United States Patent Application Publication US 2006/0123505 A1 - sequence listing, part 7

SEQ ID NO: 12660 - DNA, 3083 bp, Oryza sativa
  ref <308>: DATABASE ACCESSION NUMBER: AK110008
  ref <309>: DATABASE ENTRY DATE: 2001-12-06
ctccaaccaccgcctcctcccaccccttcacaccgctctcgcttcggccccgtcgtccctgccatcgcgatccaccctgacaccgcctctctatcctctcgccgtcacctcgcctcgtccagatccttccacctatcctcatcctagctacctcgccaatcgaccctcgtcgccctactcaacaccatcccaccgtcacctcgccagtccacgcaacacacccacctccgcctcgcatcctacgcacacgtcttcaccgcccgtcaacatgtcgtccgcctcggatcctgccgcctcttccgcacaggctgccaacgacgcgtccaagaaaaagtcgacaaagaaggccgtctcctgcgaaccatgtcgtcgccgcaaactcaaatgcgaccgtggatggccctgcggcgcttgccgcgatcgcaacgagtcgagcaagtgtgggtgggcagagggcgtccgtccacagaccaccggccgcgacaccggagacgcctcccaaacaaacgaccgtctcgatcgtctcgaagccatgatgggtaccatcgccgcatccctcggcgtcgatttgcccggcgcaaagaactcgcccgcctcggccactctcactccgggcggcgtcgcacaacgcaagtactcctcctccagctccctctccaccaacccgggcagcgccaacgcttccacctccaaactatccaccctcgccgaactcggcgcaagcgaggccaaccgcgctgccctcgctgccacctccacccgttccgatgatccacagccatcctacggcatcggccccatctcctggggtttcggcttcggcatctcccaaaccagccaggtctcctcggaagaactcacgcgcagaacgctctttgagctctacaaactcctccccgaccacagcaccgtccgcgcactcaccgatttctacttccgcgagctgtcctggatggcgcagctcctccccgaagagaccttccgcaaacgcctctgcaccgtcgaggagcagcgcctcttttgggacggccgtcccgacgcctatcgctacgaagagatgcgtgactcgctgcgcctcgtcgccaccatccacgcgctctgcggcgccgtgctcgtgtttggcgagcccatcgaagccgactcgctcccggaaaagtacggcaagcaggccttcaccatcttcctcgacgccgcgcagcacgccctctccatgctcgacatatacgaggagctccacatcgacaacgtccgcaccatgatcctgctcagctcgtgcctcagtgcgctcaagggccccgccgtcggctcggccatgatcgccaacatctgcttcatggcctacgcgctccagctcgacgtcgagccgcccaagacgctgccgttcgaagagcgcaaggaccgcatcagcctctttgcaaccatctgcatccaggactggttctccgccggcaacgtcaaacgcagctacatgatcgatccggctaacaccagcctcccctcgctctttgggcccgacgccgacaccaacgacatcatcgccgtgcccatgcgctacaagctcaagctcagcgacgtctcgcgtcgcgccagccatcgcatccgcatgagcgaggacgaggcgtacgagttcaccaagcagcttcaccaggaggtcgtcgccatcgaggcttctattcctgagcatctgcgcttcgacgagtcgctcatcgactcggacgatccggacaacccggaacgctggcatcgtagcgccatggcgctcgccgtgcagatgcagctgctcacgctgcacaagcgcttctacgtgcagtcgtggtcgaatccaaagtacaaggagtcgcgcgacattagctttgcggcgtccatgctgatcatcaaggtcttccgcaacgcgttcaagtggttcacgccgcgcgagaatgccacgctggacgaacagcgcgccgtgatcggcgagggcatgcgcacgcagcacaactcggtgtcgcggctgtggttctttgcgcagatgtcgatcatctcgtcgctggtgctcatccactttgtgtccatgctcgatacgcatccgtaggagtcttgcgattgggatagctccgagctgcgcgcgcagattacggacgacctcaagtttgtgaggctgttgttgcaggcgctgtcaagcaagtcgaagctggctctggatggcgcaagggcgattcagccgcccgagtcgaaccggaacaagcgcaaggcagacgaggcagtgggtcccgcggggagtgttcgtgggggagggccgttgggaagcaggtcgatggacagtctgccgattcgcaatccgagctggtattcggcatcgtcgggatactcgaacggatctacgcctggattggcatagcgcacaccgcctgcgtacaactcgcctggttcgagcagcaatagctcgcacagtctggcgcattcgtccgaactcgcccgtcctaaactgcctttcgatgggcaggtggcacctgcgacggcgaactcgttcgacgacattgaagcactgtggcagaagcaaccgtggcaaactgcatcgctacgtatgggtacctcgcctgccaacgccatgaatcgtgccggtaagacacgtgctgcatccggaagcaacgcggtaggggggtatcaaggacagaaggcagttggggttggtagcgaggggacaccggattgtccgtatatcaacgctagcttcttcgggcccgatgcgagtttcaacgatctcgcaagggccgaggcggcaattggacgacaggatgctagtttcggctatccagtggctccgctgagcccgtttacagcatcgtttattaactcgctcgatcagtacgtggcgagcttggaggagccactgccgtcaagtagccccgcggttgtggcgatgcccagtgcgacggggactatggcgttgccgcagagccatgcactcgtccaggcgaacaatgatgcgggcaccggtgcttaatcccgcaccctctcaccaggagtggtatcgggtacggatcaatgccctctgcatctgttgatttattggcactcgtggaattgtacaccatctctccggg

SEQ ID NO: 12661 - DNA, 2893 bp, Oryza sativa
  ref <308>: DATABASE ACCESSION NUMBER: AK110009
  ref <309>: DATABASE ENTRY DATE: 2001-12-06
cgtcgtcggcgcagccggtcaccgcgcgcctctggcgcgcccctcggggcgctgcgccgcaacggcctgcgggctccccatccgacccgtcttgaaacacggaccaaggagtctgacatgcgtgcgagtcgacgggttctgaaacctgggatgcgcaaggaagctgacgagcgggaggccctcacgggccgcatcgctggccgaccctgatcttctgtgaagggttcgagttggagcacgcctgtcgggacccgaaagatggtgaactatgcctgagcggggcgaagccagaggaaactctggtggaggctcgaagcgatactgacgtgcaaatcgttcgtctgacttgggtataggggcgaaagactaatcgaaccatctagtagctggttccctccgaagtttccctcaggatagctggagcccattacgagttctatcgggtaaagccaatgattagaggcatcgggggcgcaacgccctcgacctattctcaaactttaaataggtaggacggcgcggctgctccggtgagccgcgccacggaatcgggagctccaagtgggccatttttggtaagcagaactggcgatgcgggatgaaccggaagcctggttacggtgccgaactgcgcgctaacctagaacccacaaagggtgttggtcgattaagacagcaggacggtggtcatggaagtcgaaatccgctaaggagtgtgtaacaactcacctgccgaatcaactagccccgaaaatggatggcgctgaagcgcgcgacccacaccaggccatctgggcgagcgccatgccccgatgagtaggagggcgcggcggccgccgcaaaacccggggcgcgagcccgggcggagcggccgtcggtgcagatcttggtggtagaagcaaatattcaaatgagaactttgaaggccgaagaggagaaaggttccatgtgaacggcacttgcacatgggtaagccgatcctaagggacggggtaaccccggcagagagcgcgaccacgcgcgtgccccgaaagggaatcgggttaagatttcccgagccgggacgtggcggttgacggcgacgttaggaagtccggagacgccggcgggggcctcgggaagagttatcttttctgcttaacggcccgccaaccctggaaacggttcagccggaggtagggtccagcggccggaagagcaccgcacgtcgcgcggtgtccggtgcgcccccggcggcccttgaaaatccggaggaccgagtaccgtccacgcccggtcgtactcataaccgcaccaggtctccaaggtgaacagcctctggccaatggaacaatgtaggcaagggaagtcggcaaaacggatccgtaacttcgggaaaaggattggctctgagggctgggctcgggggtcccggccccgaacccgtcggctgccggcggactgctcgagctgctcgcgcggcgagagcgggccgccgcgtgccggccgggggacggaccgggaacggccccctcgggggccttccccgggcgtcgaacagccgactcagaactggtacggacaaggggaatccgaccgtttaattaaaacaaagcattgcgatggtcctcgcggatgctgacgcaatgtgatttctgcccagtgctctgaatgtcaaagtgaagaaattcaaccaagcgcgggtaaacggcgggagtaactatgactctcttaaggtagccaaatgcctcgtcatctaatcagtgacgcgcatgaatggattaacgagattcccactgtccctgtctactatccagcgaaaccacagccaagggaacgggcttggcggaatcagcggggaaagaagaccctgttgagcttgactctagtccgactttgtgaaatgacttgagaggtgtaggataagtgggagccctcgggcgcaagcttgctgttccccatcatcgtcatcgtcctcaggaacggccatcctacacttccttgcattagaccttgtagcccttccccgtccctttccgaccatctcgctctccctctcatccaggcttgtgtccactgccttgcctctcctagcagcagctctcgtcgacctcgccgccgctgcagcgttcttccgtccgccacggcgggtgaccgcagggggtttctcctgctcccccaccactgcggcggattggcgcgaggagcgcctagggccagggttgggatccgaatcgggcgcgatggagaccacgagcatgctggactccccgatcttggtgacatcgccgtcggagagcggggaggggacggtgggcacgaggggggagccgttgaggagggtgccgttggaggatcccacgtcggagacggcccaccgcgaggccggcggcgggaggaactcgatggagaggtggcgctgcgacgccccggcgtcgcgcacggcgatgtcgttgccggtggcgacgcggccgacgcggagcacggcgcccgcccgccactgccgggtctccccgccgcggcggcccttcttcacctgcagcgtcagcaccggcggcggagcgtcggccatcgccgcaccgccctgcagccgggagtggggaatcgcggagaggagagggatgcgaaaaggatttcaaatttttcggggggaatgcgaaattgccgaggagtggatatgggcacacttccacctatcgtagcagacccggttcggtcgatcggttggaccaaaaaagatcggaccctactattagaccgggccaatagaccgttgagcgacggggagaggagcccagcagccggtgctcgttagagcaatacatccagctgcttagttatagtctatctatcagctcactcatatagtggttaactattcactataaatatatgatccacatgtctgtcttac

SEQ ID NO: 12662 - DNA, 3966 bp, Oryza sativa
  ref <308>: DATABASE ACCESSION NUMBER: AK110010
  ref <309>: DATABASE ENTRY DATE: 2001-12-06
acagcacatcgcagttctctactgtaataccattcacgcctatcatgccagcagatcgcctgctcggaacgttactgcggtctttgcaggtctacactgaccaacaagacacaccaagggtccttggaacggcatcttctctgctgaccacactcaacaaccctctcaatgtgacgctcttgacgagccagattctatctgccccagcaatatgggctgtacccgatggcttgcaaacgtgcacacgatgcatgagcgtgttccactccgcggcgcaagctcttgtccgacatgagaatgcttcgcacgacaaatctccggatcgcgacttctcgcaactacagctcgaacgcactctgccaaaggatgactggatccgagccgtggcgaaaggtgctgatgaacattcagcgcgatggcgacatctgctcgcactcggcggtctgcttctcggctttggaccggctgataatgatgccctcagtcgtggcatgcggagtacccttgagcaagggtttgtccatgctatcaacctcgcgcttgaagatgtcgtggaggaagaccacttcagccaacaatctatttccctcgtgctaaactactgcttcccattgctatcggacgttgagcgatcacaaatcgatttcgacaaactgctgcctgtactcatgcgttcgacattcaggaacatggacggactcggttcaacatacttccttggtgctattgatattgacgtggaggtgacacctgagcaacaatataggtggccagacaaggcaccttctttccagagtatccagagaaccctggctagcccactcgtctcatcgctcggctcattagcccgtctcataggccatactcttgagcaagtacgagcgccatggctcgtgtcaagtgctgtcgaagacttggaagacttcacaaggacattgcacctgcagtggcgtcaaaataaactgtcaacagtggattcatccgaggaacagcgacgactcgacccaggcacgcttcacacaacggatctcctatggcgcctgcttcgatcaaccatgtatgctgcagtgattgttctccgctcggcggttggcagactccttgccgatgcgggattggcagacgaccagactgcctccaatatcgccacacaaacgctgaacagccttcgcaacctgtactttgtttcaacccgatcgggctctgctacattctcgcaatacactttcgtgtatttgactgcgatcgatatacttagcagttaccccaatgctgcacaagtatatctacaagacatcaggccatctgaagccggccaagtaccgcaactgccactcgatcgtaacctcgacttgtttttcctcaacacctcggagcaccttacacttgcattgcctccagccatcgcagaagatttattagtgaattcggctgcaccatacctcgcatccgcgagcgacgcaaatctgcttcccatattcgaagcggcacacagtgtgatgctagcagtgttctcggctccccaaaacgcggatatcgccaatagacaccttccattctacgtggatgcgttgttcagagtcttccctgctaatctctcagcgcggcagttcagactagccttcaagaccctgattcaaattacttcgccaccctcaccgctctctattagtcagcctgagcttccttcagtactgcttgagctcctgtttgatcgtgcaaagcacgccacgaccatgccacttggtccacgctctactgatccgacagctgcggaagactccgttctactctccgagcaagcaacaatcgtgttgactgtcattgacatccttacacagctttcactagggcttcttgatgagtggctaccaattgcagctgatatggtcaacacaatagaagatgcgaacatgcgggagcactgcaaggagcacttctggctgacactcgttgatggtgccatggaccccgagcgtagccgtgtttgccatgcttggtggagtagtgcaggaggacgtgatcatgtgctttttggccgcgagcccgcccagcttgtgattccagagatgagcggagcattgccagctgtcgaaggcacaagcaagctgtgatactggaaaggcacgagggaaacaatgcagaagccctgttggatcagttgcatgctgccaactcggcgtgactccaagaggcaacagactgcgtcaaacaaagacagcacgggcaaatcaagcccttccagcagtacatgtcgacaacatacctatcttcaccacaaagccgtcagctgagccgcaacaaacattgagcttcttcactgcggtactttgggaccttcttacttaagaaggcattgttgtcacttgagcgagcgacctctttcagacaccgacatccaattcacttgcaaccacacccaactacctgcacggtctttcacttgcgacaccgtttggtcgccctttcatgagccacctgccctggtattcatcatttataccacaaagcctgctgccttccttcaaccagcagcttcaacaagccacactcctcggccatccacacgagcaagcttcgcctcaagagacagaacctttttggcagcaataccctgagatcgcatacccccacgcacgcttctatccagagctcgatctttacacagagtgtccggtgtactactcctactcgcccaacatggaccacgctcacgtcgtgatcggctccaaatcacgctacgcacgttcggcccccgaggcgcaagtcaagcccagacgcccgcgcgagactgtcaacatctatctggaagacgaactcgtgggtgagatctctcttggtgtgctggttcgcttttcgaagctggccaaagccacctaccctaggcctgctcagcccatgaacgatcatgagactcggaagggtggtgtcaaggcgggcgtcgagcctggaaaagagcaggttgtatgagctacatctggcagcaaggagtgggctgagatggcggagcagtctgactccgacagggccaccaagacgcagaacgtggaggctaaggttgccgccgatgaagagtcatcgccgcagagccctatctcagtcgagccaccgaaccccaagaatctcgtcatcagcgtgcctggcgcatgggtccagcccaatctcagcatcgccaggcacatcctcacatggatgcagcagaacaggcgcacgcacaacgacgagcccctcctccccttgaccccagtgccgctggcccagatttctttgaaggtcctcatcgacaccttcactggcgttcttgcctacgacctcgctccgttccctcgtgagctgcgccacgagatcctgacacgcctcactcagcagcctgccaaggtcgagcagatccgctacctctacgagcaccttcccatcgatgaccccattctcaaccgcatggtcacttccttcttcgagcacagcgaagctgagcactacgctcaggcggagatcgatgctatctacgagtacgtccacgaggaggttgacgacgctggcgaattcgagcgccactttgaccgtgtcaggaggagccgcgctaggaagcagacgcgtgtgaatgcgatggagaagctccgggaaggctttgaggactttgctgggcctatggctgaggcgttgatggttgatgctgagactggacaggcggctcccagggacgaaggcgatggtcgtcgtcgccgtaacaggcgcgagcagcaggctcaagctaagggccacggtcagatcaatacgaacacgaacatgaaggtgtctggagcgaggggaacggctgcacgaaatgagttgtcgtaggcatgcttctcactatgatgcgtgcaggctcgaagtggtgtgacggattgcgttctcagttctctggttgacgagtggcatgtacgaactatggactagcatatggatattggcgttggcatgtctttc

SEQ ID NO: 12663 - DNA, 1520 bp, Oryza sativa
  ref <308>: DATABASE ACCESSION NUMBER: AK110011
  ref <309>: DATABASE ENTRY DATE: 2001-12-06
aagcaatgatttcagtggcaccatcccttgtggtatctgcggtatgtttggcctgaccttcgcaaacttctccggtaaccgcgacggtggcactttcaccttggcagattgtgctgctgaagaaggcggggtttgcgccgctaaccgtgtcgatcgaaagatgccggatcatccgttccatgtactggaagcaaccatttgttgcattgcaacggccattgtcattgtgctggtggtgatcctggtggtttatctgagacgacggaggaagatgttgagaaggaggcagtttgtccttgtccctgccggtgacaacgccatggctgaccatgagacaaccttgagtaacaatcttttggggaggaggaggatgaagaagagggagccaccgagcatcaacctcgcgacgttcgagcacgcgcctgtgagggtcaccgtggacgagatcatgagagccaccgggaatttcgacgggatgcacgtcgtcggcgacggcggcttcggcaccgtgtacagggcggagctccccggcggccggagggtcgccgtcaagaggctccacggcgtcggccgccggttccagggcggcgaacgcgagttccgcgccgagatggagaccgtcggcaaggtgaggcaccccaacctcgtccccctcctcggctactgcgccgccggcgacgagcggttcctcgtctacgagtacatggagcacggcagcctggaggaccggctgcgcggcggcggcggcgcggcgctcgggtggccggagcggctcacgatctgcggcggcgccgcccgcgggctcgcgttcctgcaccacggcttcgtgccgcacgtcatccaccgcgacgtcaagtccagcaacgtcctcctaggcgagggcctccagccgcgggtgtccgacttcggcctcgcgcggatcatcagcgcgcgcgagacccacgtcagcaccgtcctcgccggcacgctcggctacatcccgccggagtacgcgctggcgatgcggtgcaccgccaagggcgacgtgtacagcttcggcgtcgtcatgctggagctgctcacggggcggccgccgacgtggtcgtcggcggaggtgacggcggagggtgacgacgagcgcggcggcggcgggagcctcgtcgggtgggtgcggtggatggcggcgcgcgggcgtggcggcgaggtgttcgacgcttgcctgccggtgtccggcgcggagcgggagcagatggcgcgggtgctcgacgtcgcccgcgactgcaccgccgacgagccgtggaggaggccgaccatggcggaggtggccaggagggtgggggcgatcgaggcgatggagtacgggcctctggtggtggcagtgtccagtggcgagccgccggcgatgccatgatcttgctgctgctatactgtatactgtagtgcatcatactcctttttgtgaattaaggtgttttgatctcatcttatatgcggacacagagatgcagcagaaactcaattttttaacaagttcatacctc

SEQ ID NO: 12664 - DNA, 3236 bp, Oryza sativa
  ref <308>: DATABASE ACCESSION NUMBER: AK110012
  ref <309>: DATABASE ENTRY DATE: 2001-12-06
atcactacctcccgacacgccctcgcttctgtcttgttcctcttcagctcatccctatacaaacacacacccatcccagtcgctcctcgagggcagacgccccgcctcatacaccggcttcacaatgcctctcaaacgtctagagatcgacaacttcaaatcctaccgcggccaccaggtcgtcggtcccttcaatgcattcaccgcagtcatcggtcccaacggtagtggcaagtccaacctcatggacgccatctcgtttgtgcttggcgtccgctccgcacagctccgttccagccagctcaaggacctcatcttccgaggccgcaaaatgggcgccgccaccgccgacgacgacgacgctcctggttcagcatccgaagacgatgacgaccagggcgagggcaccgccacaaaagcaagcgtcaccgccatctacgaggacaacaagggctacgaacatcgcttccaacgcaccatcacactcgcaggctcgagcgaatacagatacaacggcagggccatccagtattcccagtacaacgcaaagctagagcagttcaacatcctcgtaaaggccaaaaacttcctcgtctttcagggcgacgtagaggccgtcgcctcccagggctccaaggagctcagccgcctcatcgaccagatcagcggctccctcgagctcaaggaagagtacgagcgcgcaaaggaggcgcaggaacgcgccaccgacaactccaccttcaacttcaacaagcgcagaggcatcaactccgagctcaagcagttccgagcagaagagcgaggccgaaaagttccagcgcctccagaccgagcgcgtacagcacatcctcaaccacatcctctggcgcctcttccacatcaacgacgacatcgaactcaacacccagttcgtcaagacccaggctaagaacatgcggcccctgcgcacagagcacaagaaggcagaagacgccgtgctcaaggcaaggcgcgaccagggacacacccagaccgagatcctccagctcgaaagggccatgaagcgcaagcagcgagacatcgaagatatccgtcccaccctcgacgcgtaccaagcgaagatcaccatctcccaaaaggagctcgacaacggtgcacgcatgaccgagcaggtggagcgcgacctcgaaaagcagcgcgccaacctcgccaagctcgagcgcgaccagcagaccgtacagcgcgcagcagaccgcgccgcacaggagcagcagcgcgcactcgagtccgccggcctcaccctcagcgaggccgacctcggcgaataccacaacctcaaggcgcaggccaacctcgaggcagtcgcagaacgtcagcaactcgacacgctcaagcgagaggccaggatcaaggcagacgccgtcaaagactacgaggacaagctcgaacaattcacaaagcaaaaggacaagctccagggcgaagaatcgacgctctccgagaggcacgcctcgctcgaggccaagcgcatccagatcgacacggatctgcgcgccgcacgcgacgagctcgccaagacgcaggcaaagcacaccgccatcaaccagcgcgagacaaagctcaacgacacgctccaggtgtgctacaacaagctcctccaggcgggcaacgacctcaaggaggtcgagagggaggcggccatgaaggagaccatggccaagctccagcgcatcttccccggcgtccgcggccgcgtcgtggatctgtgcaagcccgtacagcgcaagtacgacaccgccatcgccaccgtgctcggccgcaacacggatgccatcgtcgttgaccaggaaaagaccgctatcgactgcatcgaatacctccgcaacacgcgcgccggccaggccacctttttgccgctcgaccgcatccaggccaagcccatcaacgaccgcctgcgcagcatcgcccgcggcgcgcgtctcgccgtcgacgtcatccagttcgacgcttccatcgagcgtgccatccaccatgcgtgcggcaacgcgctcgtctgcgacacaatggacattgcgcgcagcgtcgtgtacgaccgcaaggtggaggccaaggcggtcacgctcgagggcaccgtgatccacaagagcggcctcatcaccggcggccagtcgagctcgtccggcggcaagcgctgggaggagcgcgaggtgcagggcctcaccacgcagcgcgacaagtgcctcgccgagctcaaggagctgcagaaggagaagcgcgcgtttgtcagcgacgacgacatggtggccaggatcagccagctcgaggccgacctgcgctcggtgcaggacgaggagggggcggcgagcacgcgtctggcgggcgtgcgcgacgagctcaacaacatcgacaagcagaccaaggagatgcaacccaagctgcgcgcggcgcgcaccgagaacgacaagctgcagcgcagcatggcgagcctcgacacggtggtcaaccgcgaagaggaccgcatctttgcgcccttctgccgccgcatcggcgtcgacaacatccgcgagtacgaggagcgccagatgcgcctcatggagcgccagacggacgcgaggctcgagttcgagtcgcagctcgcgcgtctcacgcaccaggccaactttgagcgccagcagatcaccaccaccgaggagcggctcgagacgctgcgtgcggcgatcgcgcgcgagggcgacaagctgcgcgcgtggcaggcgcagaagcagggccggcaggacgagctgaacggcatgcagggcgagatcgaggagatgcagacgcagctcggcgagctgcagaccaccgacgaggccaagaaggcggcgctcgacgagaggcgcaccgagctcgccaaggcggcgcggctgctcgactcgctgggcaaggagattgcggcgcgcaacgacgagatcgagcggctgggctcggagcgcgcggcgatctaccgacgctgtcgcctggaggagatcgctctgccgctgctcaagggctcgctggccaaggtggggctggaggagacgatcgatgtggacgtgcccatggatgtggatgacgacaacacgacacagaagcccatggcggcgccggatttcggcatccaggtggactttagcacgctcgacgacgaggccaaggaggacggtggcgtggcgatgggcaacgagctgcagacgcgcatcgagagcatcacggccgaaatcgaaaagatgtcgcccaac

SEQ ID NO: 12665 - DNA, 3291 bp, Oryza sativa
  ref <308>: DATABASE ACCESSION NUMBER: AK110013
  ref <309>: DATABASE ENTRY DATE: 2001-12-06
acgccgccgcatcccttccagcgacttctttgtcgcagtggatcaacaggctccagcccagcccacctgaccccgactgcacgcaagtctgcattcggctgcattccgtcaactcgtcgcgttgacacgtgcgcgttcagcgcgcaccactcaaacacgctcttttcttcttcaccacgttcctttgaccatcatcattgcctcgaccatctccatctcttcgacgataccctctcttgaactcgccagaccagacattcaccttgctgaacggctccgcagcacatcactcgatccagcacagcaaccgattcgttcgccaagccaatctctgtgtttcctatcgcgcactgctcttgtactggcgttcctgcgcccgtcgactcgtcccgacgccaactctctatcgctcgaatgcctttgatcgtcccggatgttatcgaaatcggaagcagcggcagcagcaatagagcatcctctcccatccccgaactgaccatcaccaagatgaacggcagatccatacaaccgcacgaggccgaggacgaggagatgcctcggtcctccgccgcctctcgcgtctcgctcgcaaatttattaggcccaagcggtccaggctcctcgccctactccaacacgccacgcacatcgcctcgcaagcggcctagcaccgacgcgcccggcaccggtctacagcctccaaccgacatcgccaacggcggcagcagcagctcaagcaccactcacagcgagggccgcgaaaggcgacgttcagacgcagcttcacaacgaagtcctgctcgagcggaagccgttccggacgccgcccccgctggcgacgggagcacatatcacgacgtacccacggtcgacgtcaccgaaccggatggcaaagcgcctggcgaccgcgacgaggacgaggacgacgaagatgaagatgacgaagatgatgacgatgacgatgacaaggccaccaccgatgcgggcagtgcgtccgaagctgagggcgaagacaaggccgaaggttcgtcagccaaagagggcgctggctccggcgagaaatcgatcgtgcccaagaagcgctctcgacgccgcagcccatttccgccagaggctgccacagcaccgcctccgcccaaaaggcccaccgttcgcctttcgatcctcgaggcgaggcagagcggctatctcatcaacgtgcccgagctcgttcttgccaaactcaaaggccaggaccacccctgggccaaatggtatgaggagtcgttgctggaagcagctgaacccgagcctgcgccaccacaggctgggccgggggcgcctccggatctcgaaggctttggtagcctcgcaaggctgctagcaaagtatcctgccggcgaaggatcggcagcatcagcaggtgcgtctggcgcgagcaagaagcgccgcaaagtcaacgacgacaagtacgacattggacagtacgacgtgcgcgatccgttcgtcgacgactcggagctcaacatcgacgagcccacgcactttgccaagcccaaggcagacggcttctacgtcacccagggcaccgtcgagcttgccaaggccaaggccatgggcaaggggcagcctctgctgggcaaggacagacccaaaccgctcagcatccgcgactccaagttcggcttcgccggctccctcaacaagcttgtggccaaaaaggcgcagcagcaagccgagctgcccccgatgcctgcctcgtcctcgatgcagcttggctccctgctcaacaacggcgatcccggtagccctgccatgggcgcaggctcggctctcaccaacgtgcagaggcaggaaggcacacgcgactcgcccatcaaggtcgacgacaacgactcgggatcgtccaagaatgccgccaagaagaaccgctacccgaccgagcccgtcgacccgcgtcttcaggcgtcgtttgacgatctcaagagcaaggtcggtgcagagagctttgccgtcaagaccaagttccctgcgacgctcaaaccgccgctcatcgagacggccaaactggcggtcatgctgggcgagtacgacgacaactttttcaatcatctgcccaccatcttcccgtacaaccgcttcacgatgatgaagctcgtcaagcgcgagttcttcccgcaccacatcaagtactttgaggatctcaagcaggagcgcggcgaggcgcccaaggagggcgaagaagccgcgcccaaacctgctacggccgccgaaggagatcagtcgatggacgtggacggcaaagaggacgacgagtcggtggagccgaccaagcgttgggagtggagcgaggagatgcgcgaagaggtgtttgtgctcatcaccatcgagaacgccatgagcgagatccgcaacgaaaagtacaagctcgagaactcggccgagcagtacagcgagatcaatgccaggaaggcgtgctacaagcagatggccgagcttttccccgaggacggatggacgacctcgaccaacatctctcgcgagtatgcgcagatcaagaagaagaaggatcggcaggaggcgaggggcgaggaactcttcggcgactcccgggccagcagcgccgttccggcctgagccggtatggctggaaggagtcagccggaccgccacgtttggaagacaagctttggcttgacgatgcgatgcggccatgcgagggtcaaagtccgaccacgttcgagaagcagcccaaggcaggactgccgagacaggcagatgcgagcaaggcgatccccgagtgatgctcatcccagcagactgggtcgggcggatctgggtgacacttggatgctcgaccaggatggcagatggatatggggtgcttcgacggggtctggtcagcagggatctcagcaggcagaggccgccgccgcagcatggcatcagaagcggatcagtgggctcggcaggctcgattggtgcggtgctttcgatcaggacctcgatctacccagaactatgacgaagcgggcgcttcagccgctcgccatgtgtcctccatgtgaacctattggccagggctcctacaccgtagcacaggatcgccggaggacagagcgccaagtgtccatgtgctgatcctgctaggctctggctccgagtgcagcttcggcgtcttgcacgcagccgcaggtcgtccgacgcaacttttccagcaaggctttgcactcgaggaggcactgctttgcagctcattagggtccgaacaactgcagccctttgcactcgaaatgtcactttctcagcccg

SEQ ID NO: 12666 - DNA, 3100 bp, Oryza sativa
  ref <308>: DATABASE ACCESSION NUMBER: AK110014
  ref <309>: DATABASE ENTRY DATE: 2001-12-06
accgtcgtcgacaaccacacgcgccctccccccccaacgacacacgcaccgcacgccacccgcggtagacactcgcacgcacgcccgccgcccgcacccgagtcagtcgctccaggctcccgcgcatcgttgagccgtcgacattctgcagaggccacgttgggcggagaaggagaagggaccacatacgtacacaccaccaccatcaccaccaattccttgagggcggaagcgcggcgtaggcctgcacgctgcaagcatggataagaagcacgaagacgtcggcggcgtggcgcagattgacaagacgtccgtgttccaagaagcacgagtcttcagccagagtcccatatcgccgcggaaatgcagagtgatattgaccaagcttgccctgctgctcttcaccggcgagagctgggggagacaggaggctaccaacctctttttcggcatctcgaagctgttttccaacaaggatgcttccctccgccagatggtctacctggtcctcaaggagctcgcgagctccgcagacgacgtgatcatggtcacggcatccatcatgaaggacacctcggtcggcagcgacgtcgtataccgccccaatgcgatccgcgccttgtgccgtgtcatcgacgcttccaccgtgcaggcgattgagcgtctcgtcaagacgtgtatcgtcgacaagaatccctccgtcgcatccgccgcgttggtctcctcataccaccttttgcccgtcgcaaagggcgtcgtcaggcggtggcagtcggaagcgcaagaggcggcatcgggccccaagtcgggtggcttcttgggtggttttggcgggagctcacacaacgccctgcaggcgagcacaaattacatgacacagtaccacgccattggattgctatatcagatgcggtcgggcgaccgcatgagcttggtcaagatggtgcagcagtactcggctgccggtgtggtcaagagcccggctgccacggtgctgctggtccgactcgccgcgaaacttgcagaggaagaccccaacctccgcaagcccatggtgcagctgctcgatggctggctgcgccacaagtccgagatggtcaacttcgaggcggcaaaggccatctgcgacctgcgcggcgcgaccgacgcagagctcgtacaggccgtgcacgtcctgcagctcttcctcacatcccctcgcgccgtcaccaagtttgctgctctgcggatattgtccaccatggcctcattcaagcccgatgctgtccgctcgtgcaaccaggacattgagtcgctcatcacaaactccaaccgcagcattgccaccttcgccatcaccactctcctcaagacgggcaacgagtcttcggtcgaccggttaatgaagcagatcaccgggttcatggctgagatcaccgatgagtttaaggtcaccatcgttgaggcggtccgcacgctggctctcaagttcaagtccaaacaggctggtttcctctccttcctgagtggcatccttcgcgacgagggcggttacgagttcaagcgctctgtcgtggaagccatcatggatctcatccgcttcgtccccgaggcgaaggaggacgctctcgccacgctttgcgaattcatcgaagactgcgagttcaccaagcttgctgtccgaatcctcttcgttcttggacgtgaaggcccatcgaccccccaccccaccaagtacatccgatacatctacaaccgtgtcgtattggaaaacgccattgtccgtgcggctgccacctctgcgctggccaagtttggtgtcggccagaaggacccggagattaagaagtccgtccacgtcttgctcagcagatgtctcgacgatgtcgatgacgaggtccgggatcgtgcggcgctgaacttgcggttgatggaccaggacgacgaccttgccatcagctttatccgcaacgactccatgtactccctgccgaccctcgagcaccagctcaccatgtacgttagctctgactccaaggaaaccttcgcggatgccttcgacatcaccaaaatcccgaccgtctcccgcgaacaggccgatgccgccgacctcagcaagaagaccgagggctccacacccatcctcaaggcacccagcgcgcaaaaggcacccgccaagtcgggcgcagaatccgccgccgccgccacggccgccatgcaaaagtacgccgaggagctgcagaagatccccgagctcgcggcacacggtgggctgctcaagtccagcgccgtggtggagctcactgagtcggagaccgagtacgtggtcacggccgtcaagcacgttttcaaagatcacatcgtcctccagtacgacgtcaagaacacactgcccgacacggtcctgctcgacgtggagatggtggtcgcgcccgaagacgacgactcgggtctggaggaggacttcatcatcccggccgccgagctcaagaccaacgagcccggcaccatctacgtcagcttcaagcgcctcgagacggaaagcatgttcctggcgacgagcttcaccaacacgctcaagtttgtgagcaaggagatcgacccgtcgacgggcgagcccgaggagggcgagggctacgcggacgagtaccaggtcgaggagctggagctgaacggcgccgactacgtggtgccggcgtacgcgggcagtttcgataacgtgtgggagcagagcaacggggagagcgcgacggagacgctgcagctggccaacatgaagagcatagccgacgcaaccgagcagctcatcaagacgctcagcctccagcccctcgagggctccgacgtgccgctcagcccgagtacgcatgcgctcaagctgtacgggaagacggtcacgggcggcaaggtggcggcgttggtgcgcatggcgtttagcgcgaagacgggggtgacgatgaagattgaggcgcgggccgaggaggagggcgtcgcggcgctggtggtggggagcgtggcgtaggcgtgtggaatatgatatcagcgggtatgaataaaagtaggggtaggggtaggggtagctgatgaatggatggttgtcttacggctaccgtttcaccgt

SEQ ID NO: 12667 - DNA, 3575 bp, Oryza sativa
  ref <308>: DATABASE ACCESSION NUMBER: AK110015
  ref <309>: DATABASE ENTRY DATE: 2001-12-06
atcaatctcatctccattccccctccacgtctcgcgcttttctggatcaccgccatctcaccctctccgcggccatcgccaccgaattgcaccaccatcccgacgattccacgcaaggccgcgatccgttccaacacggctttatcctcgttggccgtgcccatcttcgcatcgcttccgacgacctctttcgatcaacgtcattcccttgccttctcacgtacgtcggtcctgccgattgaccgcacgacaccgccgcctcctcggcccatgtttgctgctgcacgtgctctcgtcaaatttggagtcgcaccttgtcagcatccaaccacctcgtcttggcacgcttccgacccgctgtcgagccgctgcacgctttgagcagtctcatcaaatcgcacgcgctgcacgcatccgcctcgcgtcgttcgtctttgaagcaactcaccctcttggctctccccacctttacaagcccacggcccgacatcaccgacgatctccgactgcataagccccgagcttacttcggcaccgcaccttccccatacagcggcgagcgagtgagtcgcgtgccacgatccaccatacacggacgatcctttgcacctgcctttccgcctagctcgctgtagcctcaagctcccccgcccacgctgggcattccgactcgggcgttccagcagttccagcggaacaagcgacaatccggaattcccgcgccgtcacgagtgcattcgcttcttgacacactcaggctccagtctgatccacagaaacaatgacgtccaccaccgaccacggtgacaaagcctacagcaacgtcatcacatccacgtgcactcccggcccttctcccgtcagcacgcctggtgccatgtccgcattacctcttcccatggccggcggccaacatcaccacccgccttcgatgccctccaactcaatatccatcgccggcgcctcccaagatcaacatacacccggtagttacggtccttcctccatgaacgcatcttccgacatgggttccgtcatgaccgaagatgaggaggacctcgaagactacggcaagggcggctaccaccccgtgcatgtcggcgacaccttctccgacgggcgctacctcatcgtcaggaagctcggatggggccacttctccaccgtctggcttgccaaggacaacaagatgaagaggcacgtcgcgctcaaggtcgtaaagagcgcgcctcactacaccgaaaccgccctcgacgagatcaagctgctccagcgcctcgtctccgccaacccaagtcacccgggcaggcgccactgcgtctccctcctcgaccatttcagacacaagggccccaacggctcgcacgtctgcatggttttcgaggtgctcggcgagaacttgctcgggctcatcaagcgataccaacatcgtggcgtgcctccgcacattgtcaagcaaatcgcaaaacaggtgctcctcggcctcgactacatgcaccaggagtgcggcatcattcacactgatctcaagccagagaacgtgctcatctgcatcgacgacgtcgaggcggtcgtcgaggcagagttgcggtccaacccggccgccgtgcccactaagctcgtcggcgttccgccaagtcggggccgcggcggcactcagacgcccaagcgtgacggcatcttcatcacgggctcccagccgctgccgagtccaagcagcagtctcggatccagtcccatgtttgacaagtgggcctttggcatgtccaagatcgacaagccaagcgtcagcgacagcgaaaacggcttccgcagcggcgccagcagcgaagctgccgggtccaaaggtggatccctcgtcaccagcaaggagcgcgaaggctcgaccgacgtcatcggacacggaatctcgcagctcagcacccaagcctccagcagcctgccaggcgattcgttcggcagcaggacgacaacgggcgttccgcagcaaaagggcccctcgctcctgtccctcggagcaccacgcgttccgcaggcgcccgcgccagccgctccgagctccgccgcaccactcgcagaagcagctgccgaaccgaccgactctccgtcgcccatgtcgatggactcaccgagtcccaccgatcgccaagagcccactcccatggaccaagagatgcacccgccagcgcccgccgccggcgatcccaccacgcttcccccgccgccaccgtacgatcccagctcgctcgagaggatcaccgtcaagatcgccgacctgggcaacgcgtgttgggtcgaccaccacttcaccaacgacattcagactcgtcagtaccgatgccccgaggtgatcctcggtgccaagtggggcccaagtgcggacatgtggtcggcaagctgcatgttcttcgaactgctcacgggtgactacctctttgatcctgccgccggcaccaagtacaacaaggacgacgaccatgtggctcagatcatcgagctgctcggcgacttccccaagagccttgcgttcgcaggcaagtacagcgccgacattttcaaccgtcgtggagagcttcgccacatccacaagctgcgcttctggccactcatctcggtgctgcaggagaagtacctcatgccgtacaacgaggccaacgagctgtcttccttcctgatgcccatgctccgcttgcatccggagaagcggtccggggcgagagagctgttggaccattcgtggatcgagggtatcgtggttcagggcgagatcgagcaggccatgagacaggcaggcatcgacgtcgatgcgctgaccgcaggcagtccgtcaggcctgtcgctgccgcctggtctcacaccgagtgaggccgatgcgctcaagcctgtcgggtcggtgtcaagcagcccagccccattggcgttaaacatgcagggtctcgaggatgccaagcgtcgcgccgcacagcaccaggccgatgctgctgctgctgcggcggcggcttcgcaaaatggagcatcgcaaacgacgaacacgtcgaatgcagcatctgctgcgatgccccactcgcgcgaccccgttcatgcgctgcaagccgaagcgcttgagcgatcgtcgtcgagcgatggcgctggcgagtcgcacatgacgatcaaagggctcggctcggaggatgcgagtgccagccgctcggtctcgacgccaaagctcaccgggcaggcgcaggcgggcagctcgagcaaccgtgaggccggctcaccctcgccgcagggtctgccgcgtccagtcgcaaccacagtccagtagatgtgtggcgctgtgcactcgagctgttgccatctagtcttgcttgccttattctcgccgccatacgcccgctaatctttcttgcactcccccgacctgccgtcgtcgcgccgcattgctcgcctccagcttgtaccaccagataccattttcacgcacatgcgttctgtttcatgccttgactcttttcctcagcttttgtacgttcgtgctccaggctcctctcgcttgtcttttttcttccttcgtaattcttagacgttccgtgatt

SEQ ID NO: 12668 - DNA, 2801 bp, Oryza sativa
  ref <308>: DATABASE ACCESSION NUMBER: AK110016
  ref <309>: DATABASE ENTRY DATE: 2001-12-06
caacccctctcgcctttctcccacgcttccaccgctggccacccgtctttcatcgcggctcgaccttcatcgcccgcacttcgaaagtcgccgcatattcaccgctccctcgcatcggcaatctctccctctttcgcttgcctcgagcttcagccaaccacaatcccgctccaacatcccaccacacacatcccagcaccaaaaccaacaacttccagcatacaaatagccttctcactttgctttcgcgccatcaccctcctcgtcattcttcccttgcgctgcctcatagccaaccgacaccccccacccaacgcatccttgcatccgtctccaatccgcacgaatgctcgtctgacctcgcatccacaccagcccccttccacaggctcgcatgccgccaaccctcacaatgcgtcggtccaccctccggccacgctcaccccgcctacgcgccctcggctcggcgcatacatccaatgcttctcatcgcgattcaatgccaccccgaacaacaccacagcgcaactcgcgccactcccccgccttgtttgcctcggcttcatcgcgcactcgtcgtcgtcggtgcacgcgcgtcgccgcctttgcaacacacgccgccatcctcgtatcctccatcctcgtcttttcccccgccatgatggcgcccgctgcagcacagtccgtctcgcgtctcgacactcgctctcgcgccgccgccatgtcagccaaccagcacacctttgacgccagagccactgcacctgactccttattcgacttcaattcccaaccacggcctgcatcggaccacactctacccgccgcatcgttttcacacccaccacactcctttgacgacgtcgacgatcggctaccgccagaaccccatccgtctgcccccttgcatcggcagtatccgcgacaattcgacgacgagtccgcacttttcggcgaacgcgacgtgtccaccaccctcagcccgcacgaatacaacgcagccacctcggccactcagtcagcacatcgctactcgctcccttccagctacccctccagcatcgcctcgtcttggagcaggccagagcgcagcgtttggttccagcagaaggccatcatcatcacctccatcttcttggccatcttcatcgtcctcttcatcggcgccgccgtcttcctccgcgaacgcaagttcgacgacgaactcgccgggctcgacgacgaagaagcgctcgcacgcatcgaggagcgtatgaccatgggtcgcttctccgatcccacagagaagcccgccggaggaggaggaagcagattgaaacgacgtctgcgtctcggaaggaagcgctccgaaaaggactcggtggatccggattccaccgacccgtccacaggctcgtccagcgcacttcgacgcaagcgcttcctcgtctcgcgctggacacgcacgcgcgacagcaacgacacggtgcgcagcagcaacgatgcagcctccatccgctccggccgctcggcacgacgcgttgcgctgggcgatcccacggcacagcagaccgtcgaggtcgtctacgacaatacagatgccaatgccgcctcgagccacacggcaacgtcggcacgcgatgccaacagcgccgacgacagtcacgcctcggactcgcgcaccaaccgtcctcgttcgccaccacccccacatcccgacagcgcccagcttgacggcgacactgccacctcacccacgtcgggtgcgagcgcgcgctccccccgccgcgctgtcttggatgacaccgacttccaagccgccgatgccgccgagacgcacgacgatgatcttcgccacatgcctcccgcctacatttcgtccggctctgcagcgctgccgtcgtcgtcgtacgatggtggtgctttggctgcggcacttgctcgcggagatgccaagcacggcattccgcccccggccgagcgcgacacgagcgtgccgcccgaagtgtttaccgccgtgcttgcagagtcgtccggtgcagcgagggagcaagaggcagaggcagggcccacagcagcgcacattgccaccgacgacaaggcgctcctgggcgcgctttcggctgcggcgagcatgccgtcggcgccggccacttcggaggccacggctcctgcgtatggctttgcgggtggctcttcgagtggggctgtgattctgccgccgaccgcacccgtgctcgaggcagatgcggaaggcttcgagttgccgcccgacgaagcgcaggatgcaatgggtggtggcaagggcaaggcgaagcagacaccacttgctacgtcgagcctgctgcccgctccgccggctgcggtccaaacggcattttcgccattcgaccagccgtaccgatccactgcccctcccggggcgcagttgccgtcgtcaccgccgatggcacgcattggagccggttcggatagtggaggtgggatgtcgtcgcgcaagagcgaaaagcaaaaagaggccgaggaggagcagctggcacagctcgttgcgtcgcgtcccgacgtaccgcgctatgagaggcggcagagcagcgcaaatggggcttcggcgcctgcgcttgaagaaggagcggtggagggtgtggaggaagatgcgaggggtctgcctgcgtacgagcagcaaagacgcgcctcccagcctggaacccggcggcagatgcagttgacacccacggctccatcggctccttcggccccttccccttcggcagatggacttgatgagtagctagtgcgaatgcattgcccttttgtacaaccag

SEQ ID NO: 12669 - DNA, 3987 bp, Oryza sativa
  ref <308>: DATABASE ACCESSION NUMBER: AK110017
  ref <309>: DATABASE ENTRY DATE: 2001-12-06
ttcttcgacattcctttgtgaggatcagcatctaattagtgacgcgcatgaatggattaacgagattcccactgtccctgtctactatccagcgaaaccacagccaagggaacgggcttggcggaatcagcggggaaagaagaccctgttgagcttgactctagtccgactttgtgaaatgacttgagaggtgtaggataagtgggagccctcgggcgcaagtgaaataccactacttttaacgttattttacttattccgtgagtcggaagcggggcctggcccctccttttggctctaaggcccgagtccctcgggccgatccgggcggaagacattgtcaggtggggagtttggctggggcggcacatctgttaaaagataacgcaggtgtcctaagatgagctcaacgagaacagaaatctcgtgtggaacaaaagggtaaaagctcgtttgattctgatttccagtacgaatacgaaccgtgaaagcgtggcctatcgatcctttagaccttcggagtttgaagctagaggtgtcagaaaagttaccacagggataactggcttgtggcagccaagcgttcatagcgacgttgctttttgatccttcgatgtcggctcttcctatcattgtgaagcagaattcaccaagtatctgcttccccctctccctcccccttcccttcccttcccttggcgtgttctcacccctgacgaccgcatcctggccgcattcgacggccgacagccaccacactcgttttgtctcccacgctcatttcaacactgtctccaggatccgcatatatacagcagtcaccggcacacgttccgaatagaccgaccaagtcagcatggtcaatctcgcacttaagctgagcgtcgtcgttcaggcggcgctcctcctgcttgcgctgcagcacgccaccactcccgcaaacgccttcttcggacgcggtcgtcccgcaggcttcaactcgaccgatatcgtgtcgcgttacgccgacgtggagacttccgatcctgtcatgcagcgcgccgccaacgcacagccttcgagcaaaggtgctcagacttacgaggacggcaacgatgatgacgatgacgacgaatacgacgtgctcgagatcatcacctcgttcgaacccgaacaggatgaggacgtcggggctggcaagatgcgcaagcgtggtggacctaccccgtgtcccgcacagcacacgcagcgccagcgtcgctcgctccagactcctctcccacaccacaagcgcgagtccgagcccgagacttaccacgaggaagaagaggtcaccaagaccattcatcagactgtcaaccgcagatgcactcagaacgctcgtcgcgcaccgcagcctacgcctcagaccaagcccaagcagctcaagaagcgctacgtgtccaactttcagcctcccgccggataccgctactcgtggggaattgacggctctcgtgtctcttacggtacctttacaggtcaatacctcagccgcaccacgatctttggcgcttccgctgttggccagagcgaggtcgacacctgcagcgcacgatgcgaaaacacaaacggttgcggcttcttccaccccgtccagatgaacggcggctccgaaggcgccgtcatctgtgttctgtacaccgtcaaacagtccaagtccgcggccacttggactagtggagcgggaagcgcaggcggctccgtcgccttttcttacggctttacgcgcaacgctggtcccgccgccggcgtcgccaacttccaagctccctcgggctacctcttctcgtggggaatcgaaggagcgcgtgtctcctacggcacttctaccggccagtacatcagtcgatccaccatcgtcggcgccactgtcgtgggtcagaacgaggtcgccacgtgcagtgctagatgcaatgatgccaagggatgtggattcttccatcccatccagatgagcggaggctctgcaggcgccgtcatttgcgctctctacaccgtcgagcagcccaagtcagccgcgacctggaccaagggcgccggaagcgcaggtggtgacgtcaagctctcgtacggcctgattcgcaacgctggtccttctcccggcaacccagccgctaccacgtcggtaaagactacttccaccacggccaagactacctcaaccacgcccaagcccacaaccagctcgacgtctagccgtgccaccaccaccacgacatcgtctaccccaaagacaaccacttcgtcctccactccggttcctaccacctcgtccacctcgactaggagctccacttcttccacgtcgacgaggagctccacttcgtccaccacatccacctcaacgaggagctccacttcgtccacatccacgaggacgtccacttcaaccacgtcgaccacgagctctacttcctcgtccaagacgacgtcctccacctcctcctcgtcttcttcgaccacattgtcgtctgcctcgtcgtctacctcgtcgtctacctccagcaccgtcacgccgacacccacgcccaaggtctactcgctcatggccaactacaagggcgccaacttctacgacaacatgtacttcttcaccttcaaggaccccactaacggcatggtcgactatgtcggacgcaacgaggcgtcctcgctcggattggtcaagacgaccagcggcggtcaggtgtacatgggctatgccaccacgcgtatctaccctcccactcccaccaccacttcaacgacggcttcgagcacctcgacgtcgtcttcgagcacttcgacttcggccagctcctccacttctacccgcgctgcaggcagacgtgccatctccacttcttcgtcgtcttcctcggcctcgacctcgacatcgtcctcgtcttcgagtgccagctcttcggccggatcgttcggtgcccaggcagtgacgacgagctcgtcgatctctggctcgagctccacgtccagcagcacgagcagtgcggcggcaacgtcgagtgcggcacccatcccgtacatgaagtcggtgcgtgtctcttcgtacgacacgttcaccacgggtgtgtttatcctcgatgcctcgcacatgcccgtcggatgcggtgtgtggcctgcgtggtggacggttcccaccaacccggctggcggctggcccaacggtggcgagatcgacattgtcgagggcatctcgttcacgtcgcagaacacgtactcggtgcacacggtgcccggctgccgcgtcaatgcgaccaccaactcgcagatgggccagtaccagctgaccaacatcaccatggcgaccaactgcgcgtcggccgagacgggcaaccaggggtgtggcgtgcagtcgtcgttgcgcaacgactacggcgtgggctacaacaacaatggcggcggtattcatgcgatggtgtgggataaggacgagggcatcaaggcgtggttcttcccgcgctcggcgacgccggctgacatcactgccggcacgcccgaccccaccggctggggaacgccgcagggaagctggccggctcagagctgcgatcccaccacgttcttcttcaaccacgtgagcgtgttcagcaacaccatctgcggcgactgggcgggcgacaagacgctctggaacaacgcgtggaacggccaggcacagagctgtgcccagatgaccggctaccccacgtgccagagctacgtacagtccaaggacgtcgacttctcccaggcttattggctcatcaactcggtcaagatctaccagaccgaccgaactacctaggcgcgcccgtcgtgcgcatatgatatctggtcgggaacacggagtagaggctggatcctcttgctccccgtcgttaccaccagatcggttttggctcccgcgtcacgatgctttctcttctcgctttgtatcatagagcctcctgcttgcgacattgatttgttttgcgttcaaaaaaaaag

SEQ ID NO: 12670 - DNA, 2830 bp, Oryza sativa
  ref <308>: DATABASE ACCESSION NUMBER: AK110018
  ref <309>: DATABASE ENTRY DATE: 2001-12-06
gcgctttcatctttcccttttcggccaccgcttccatcgagcctcgatactgactccaaacgtccactccttcaccaccgcttcgtcaacctcatcgtcgtgaccaccgttgtctatcgcatataccctcgtcgtcatcgctccggcacgcctgatcgcccacaatgcaggtcgagccagcacgagcaggcctagccgtatccaaccagtccacatcaccctacctcgcagcagcacccgcaggcctctttgcgtcgtcgtcgcagcccaccgccgcctttgatccggcatcgcagcccgacgctcagcatctgcagcttcagcaccaccagcaccagcaaggctttatcgctgcagacgccttccagcactcggtcgcacgcagcttctcgccagcggtgcaagacccctcgacttcgacgcacgacggcgccgtctaccgcgtgcctgcactcgcccgctcggcttccgtcgactacacctataactaccagcagctacctccccatatccacgcacaccaacagcatccacagcaacagcagcagcagcagcacgcgccgccaccgcactcggtgccctaccatacgcacgtctacgcgcccacctcgtacgcgtcgctcaccggctctgcaccagcacccgctccgtttggccaggacctcaccgcgctcccctacacgcactctcccgaccttgccatgctgcccaacaacaccggcatgcccatgatgcgatacggctcgttcgggctgcccgtcgacgacatggcgcgtgccggctcgtcgagcggcggcacgccgggacccatgacgcagcaggacatcgacaatctgctcgccatgtcgcgcgcccaggcgggcaaccagggcgacgccagcgccttcccatgcacgtactgcgacaaggtctacacgggcaagcacgcgcgcagcatctggcgacgccatctgcaggacaagcacaacatcccgctcagcgcacagccgcgccgcacgcgctgggacggcgacgccaaccgccccaagaacgcagaggagcgccgcgcgcgcatgctcgagagcaagcgcaggtgggcgcgcaagaagcgtctccaggagaagcaggctgcgcagggcggcaagtctggcgcgagcaatacgcccaatcccgacgactcggatgccgatgacgctgacgacgccgacgacggtatggacgccgacgtgtccaacatgtcgatgagttttgccgctaacgacgccgacgagagcttatcggcgccgccagacgcgcagctgtttgcgagccacgagccgctcggtcggcctgccaagcggcaggcgctggcgtcctcgactgcgcacaatgtcgccggtcccagtgcgggcggcgcgccgcacgcgggccagttgctggcggggccgtttggcgcacacgagctgccggcgggcagcggcatgtattcgcactcgccgctgcgacacacgggtcccagtcttggcctgcccacggcgcagcatgtcctgcccgccatgcctgcagcggcgggccccaacgacagcttgagctccaacagcagcgactactcgcagcccaactcggcgagcttcttcaacgacagctttggcggcagcgcgagcaacgcgggcagcgacggtgccagcacctccatcgacacgcccgccaccacgtggcctgctctgccggcgcttccggcggtggagggcgagaagctcgtgggtggggcaaagcccaagatgcagaagggcgagacgcgcgatgcggcgatccagctgctggcgctgcgttctggcaccaactcgcccacggacgagcgcgaggtgagtctgcggcgccgcgatgacgaggcgtggagcgagacgccgagtcgcgcaaaggtgtcggagcacgaggcgcttacggcgctgtcggcgggccgggtggatgaggcggcgagtccgtcgcctgtttcgcgcacgctgccgcagcgaggcatgccggtgacgacacctggacctgcggcgaggacgggtgagaatccgttcagtctggacaagcacaagatctcgccgtatcgcaggctgagctactcggctgccccgcgttcgcccgtagcgtcgcctacgcatctcacctttggtgcgcccactgccaagactagcgcgggtgcggtggtgggggtcaagttgccgccactggtgagtacgcccgttcgccagccggcggatgaggagcgtacgcggctcgaggcgctcccaccgctgctgggggcaacgccgttttcgggcctgggatactcggcgcgtcgtcgggctgtgggtcgaccatcgccctcgcgccacgacgaccaattcagctcgccacagcatcttaacctcacggagagtctgggcctcgcaccgcattcgatctcgcgcacctcttcgttcgcctcggcctatgctgggtcgcttggactcacgccaagtgttgcgcacatggctgggctgggtagcacacctttccactctggacttggcgggctggcgggcttggggggctttacacccatgtcggccaagttttggcccgagtcgtcgaggaagtcggcacatagggcggcactgagtagggcgagtgtaaggcccaaggaggcggatattttcgatgcagggttcaagggcaaggatgcggcgcccagtagcgactcgtttgatgaggacgatgcgttggggcccggtgcgatcgatacgccgtccaagccggcggcggcgaggatgatgcccaagcagaggaagaggaaggacgaggctaggtccccgcttaaggctatcgggctcaactgagcgcaatactatacttttttagc

SEQ ID NO: 12671 - DNA, 3274 bp, Oryza sativa
  ref <308>: DATABASE ACCESSION NUMBER: AK110019
  ref <309>: DATABASE ENTRY DATE: 2001-12-06
atcatcgccgccacaagtgctccagcacagtcggctccattctcacagaaagcgccgtcgttcattgctgcggatccacgactctgctcagtctgccggtctctcggcttaatcacagttcgcaggatcggattcatccttcaccccgactatatcagcctgcgggtcaggcgcataagcttcgtccaccatggcacccaacaggggtatcgcctcgcactttgcagcgtcaaaagcaagcatcagtcgcaccgcacgctcgctcaagtccaagtcgaccaaggatgccgccaaggccactccgcctaccaccggatccacggccgtagagcctctggccgcatcaaacgagcctgctccgtcttcacccgcggcgccgtcggtgccaaaacccgcgacaccgaaaaagtcgaccgcaaaaagacaaactcgcacacgactcaggacgccggacgagggcgaagtcgaccgcatcatgctcgagaaccaagctcttcttcaggccagcccctcgcgcgcttcttcgagtgcttctgccgcacccaccgacgatgcaccactgacactgctcggaacgccaccaaccacgccgagcgcaggctcccgctcggcacgtttctcgccgctcctcgaacctacacagatgtcgccaatctcggtgcgcaccgacccggacacgaaaaagatgtttctcctcctgcccaaatcgcccaagccgtcgagtccggcaggtgcgtctgcaggtccatcgagcccgtcgaagcgcaagcttaccacgccgcccaagtcgacctcgccaaccaaaacgccaaggacgctcgacggcactcctcgccggctcatcacgggcgagcacgaggtctttggtaccgaagaggaggacggcctggtgctcacgccgggtaaggccaaaggcacgcgcattgcgctgggtagcccgagcaagagcccgcggctggccaggctaggtgacacgcccaaggacaaggttctgcgcaccatcgtagacgaggacgacgagtcgtacatcaccccgcgcagcgtgaggcagaggcccaaaggcgtccctctgcccccactcgccacacagaatgcagcggctgtctttcgcggcgcatccatcccgtcgtccagcagtgcacccagcatctcgcagcgccagcgcaaggacctcttccacaccggtcccttttcgggccttgccgccatatcgtcgtcgcagaacgaggtggaaagcgagaccgacccggcggatgacgaggctgatttgcccgatccaaagcacgcgctgtcgacgcagctgccgctgccctcgttctactcgagcctcatgacgctgcatgtggcgctggagcacgcgctggtcgtccacctcgccaccgcgggctgcgcgagcgctacgctcgaatcatccgtccagacttcatcggatagcgactcggaatccgacaccgcattcggcgctacacgcaaggcaaccaagacggtgcgtctgcccaacctcatctcgtacacggcgctgcgtccactcgtcgaacgctccggtgggcgccgcttgggccccactgagctgcgacgcctcgccaatgtatggctcgacttccagcgccagagcagcgacgccgttgacgaggtgcgtgggctcggcttcatcatcggcaagacgcgcagcatcgacacgcgcaccggtcgacgcgcgctcgattggggcatcggcatcgagctcgagatcaagcgcaccgtgcgcgaaaagacgccacccacgcagatcggattcggcggcgtcgaagtccagtcgtctccgctgctggcttccagcgacaactttgacgaaacggtgaggggcacacccaagatgccgtcgcgggcgaccacgccccctcccgcaggcgagcgcgtggctgccaacgcaaggacgcagttgatgtcgccactcttgggctcgccacgcaggaaggtgtgcgcagagtcgcccacgcccagctcgccaaaggtgcgcagctcgctcggcgcagcaaaggcgcgcgagggcatgtcggtcgtcgccatgtggaacaacggattggagaccagaaaggccgaggtggcaaggcgattacgccagagatgcgcgcgcttccaccagctctggctcgacgaaaacggcatcagtgttcctgctccaaagcaggcgcacgaaccctcgacgccgtcgcgcaagcctgctggtgcagctgatgcagagagcgataccgaggatggcgtgccaggtccgccgcgcgaggtggtgatgggtgccggcgggctgttgactccctcagcgacgcggtccggcgggcgaagggtgggcaaacgcaccttccatctggatccgtccgagctcgactcgcacacgctttcggacgaagatgacgacgacgccgtgctcggctttgaggctctccagggcggcaagcagtcgatgctggcggaagtgtcgcactcggtggtgcggacgagcaagtcgatgcccaacctcgctgctgccgcagtgccacccgagggggcggatcttgtagcttggcatgttgagtttccactcgacgatgcgcgtgtagtcaagcctgttcctctggctacgcttccctcgctttctgcgccgctcgcaacgccgcaccgcaacaaagagatcggattgggcattagtgaccctacgacgccgcggaaaccgatcaaatacactgctgcgcccgaactcgcctcggaggcggcaccctcgacggccggcatgtcgcttcgcgaacggatccaggcgaaagaacagctgcggcgcaccgcttcgcttcccgcgctggcttcggggtccatgacgtccatgcaggcgctttcacaacgtgcactcgtatcgcggttgccggaactgtgctcgatcctctttatgctgttttccaacggcaccacgctgtcgtcgacgggcatcacgcggtctccgacgattcccatgcaggacctcctggccaagctgagcaaaagcacaaagatcacgctcagcccacgcgagtgtcgcgccgccatcgacctgctcgcctccatagctccgggcttcttggtggtcctcaacccctcggatacagccgcggcgggaaccaaggagtacgtccgcctgggaaccaatcccgacaccaacgccctgtggaggctcaacgatctgcgtgcccgcatcgcctcgcaactcaatgcccacaagtagactttagcaccatgccaactttttacatcccggacagcatcccgacgcaattgcatgctcaatttg

SEQ ID NO: 12672 - DNA, 3308 bp, Oryza sativa
  ref <308>: DATABASE ACCESSION NUMBER: AK110020
  ref <309>: DATABASE ENTRY DATE: 2001-12-06
acgccagcttccctctctgccatcaacacacatagcgaccatttacttgggcatcgctatcaaagatggctgctcctcgcgttagcttcggcgaaaaggatatggagaacggtggtgatggcgcggccgaaaggtctcgcaagtggtcgcaggctcctggcaacatcgaggacctcgacgagtacactgctctgcagaagtacatctctacctacagagaccccaaggcccacgccgctgaggaggctgaggccaacgctgccgatgctggcaagggcaaggcctggtaccagttctggcgctctggtaactctggcaatgccaccactgccgaccccggtttcgtccccgatgagatgcttgaggccgatatcaagcagggtatctcctctcacgaggttgagcagcgccgcaagcgctacggttggaacgaaatcaccaccgaggaggagaacttgttcatcaagttcctcggtttcttcactggtcctgtcctctatgttatggaactcgctgtcctccttgccgccggtcttcgtgactggatcgactttggtgtgattattggtattcttcttctcaacgccgtcgtcggttggtaccaggagaagcaggctgccgatgtcgtcgcttctctcaagggtgacatcgccatgaaggcgactgtcgtccgtgatggccaggaatccgacatcaaggctcgcgagctcgtccccggtgacattatcatcatcgaggagggtgagtccgtccctgccgacgcccgtcttatctgcgactacgacactcccgaggacttcgctacctacaaggagctccgcgaacagcacgctctcaaccccgaagaggaccccgccggttccgaggacgccgaggacgatggtgagggtgttgcccaccagggtcactccatcatcgccactgaccagtctgccatcaccggcgagtccctcgctgtcgacaagttcatgggcgatgtcgtctactacaccaccggttgcaagcgcggaaaggcctacgccgtctgccagacctctgccaagttctctttcgttggtcgcactgccacccttgtccagggtgctaaggaccagggtcacttcaaggctatcatgaaccacatcggtacctctcttctcgtcctcgtcatgttctggattctcctcgcctggatcggtggtttcttccgtcacttgaagatcgctacccccgaggagtcctccaacaacctgctcaagtacgccctgattctgttcatcatcggtgtccccgtcggtcttcccgtcgtcaccaccaccaccctcgctgtcggcgccgcctacctcgccaagcagcaggctattgttcagaagcttaccgccatcgagtcccttgccggtgtcgacgttttgtgctctgacaagaccggtacccttactgccaaccagctctctatccgtgagccctacgctgctgagggtgaggatgtcaactggatgatggcttgcgccgcccttgcttcttcccacaacatcaagaacctcgaccctattgacaaggtcaccatcctgaccctcaagcgctaccccaaggcccgtgacatcctcaaggacgactggaagaccgagaaattcactcccttcgaccccgtctccaagcgtatcaccactgtctgcactcttcgcggcgaccgtttcacttgcgccaagggtgcccccaaggctgttctcaacctgaccgactgctccaaggagaccgccgacctcttccgtgacaaggccaccgagttcgctcgtcgtggtttccgctctctcggtgtcgcttaccagaagaacaacgacccgtgggttctcctcggtatgctttctatgttcgaccctccccgtgaggacactgcccagactattatcgaggcccagcagcttggtgtccccgtcaagatgcttactggtgacgccatcgctattgccaaggagacttgcaagatgcttgctctcggaaccaaggtttacaactctcacaagcttatccacggtggtcttaccggtaccactcagcacgatctcgtcgagcgtgccgacggtttcgctgagatcttccccgagcacaagtaccaggtcgtcgagatgctccagcagcgtggtcacttgaccgccatgactggtgacggtgtcaacgatgctccctctctcaagaagtctgactgtggtattgccgtcgagggttcctccgaggctgcccaggctgccgccgacatcgtcttccttgcccccggtctctctaccatcgtccttgccatcaagtaggctcgtcagattttccagcgcatgaaggcttacatccagtaccgtatcgccctctgcttgcacttggagatctaccttgtcacctccatgatcatcctcaacgagactatccgctctgagcttatcgtcttcatcgctctctccgctgatttggccaccgtcgctgtcgcttacgacaacgctcactctgagcagcgtcccgtcgagtggcagcttcccaagatctggatcatctccactgtcctcggtgtgttgcttgccctcgccacctgggttattcacgcctctctctacgttcccaacggtggtatcgtccagaactggggtaacatgcaggagattctcttccttgaggtcgccctcactgagaactggctcatcttcgtcacccgtggtggccagaccttcccctcgtggcagctcatcatcgccatcggtgccgtcgacgctcttgccaccctcttctgtgtcttcggttggctcgccggcaacccctaccagatccccctcaacaaccccatgtcccagtggacccagacccttaacggccacactgacattgtcaccgttgtcgtcatctggggttactccatcggtgttaccatcgtcatcgccattgtctactacctcctcaactccatcccctctcttgccgacatcggtcgcaagaagcgcagccaccacgacacccagatggagaacatcatcggccacctcaccaagcttactctgcagcacgagaccacccccaacggcgagggtcgctacctcctgcagcagaaggcctctgatgaggatgatgaggagtagattccgtctttccctttcttgcctacactggcctcgtatagcatgataccttatgcgtcttttcttttctcttattgatggagacagtactgtgttactactcttttcttactcttttatacgtcgaggagagggcaatgtatcgcagactgttgtacataatgtcgactgccatagcttagcggttgatttttgaaataatttactataccc

SEQ ID NO: 12673 - DNA, 3272 bp, Oryza sativa
  ref <308>: DATABASE ACCESSION NUMBER: AK110021
  ref <309>: DATABASE ENTRY DATE: 2001-12-06
aatcgtttctcgtccctcactcccaccaccatctccgttgcatcgtcgccaagtacatcccgcacgccaaccacgcccttttcatcacggcctccttcggcccgatccttcctgctcacccccgctgccatccaacagctccctttgcgatcgcatcacctatccccaccaaaagcctctcctctctgcatcgcatcgctcacacgtcggcacaaaccatgccagcctccaccgacaacagctcagcagcaggcccgagccgactctcttcgtcgcccagggccaccttctacccctcctggccacactcgcacgatgaggcagagtacttcgaggtccctccagaccacttcctcgcgcagcaacgcggtccccataaagcgcagccctccgacccatccgaacaccccctcgtccgtcatctctccgcctcatcctcctcaaccactcgctctgcctccatagacgcagctcccaccaccaccatgccagcactagcagcacatgccgccttgctagccccctctcagccgctcgccgagctcgcctccgctgttcaggctggcatccccgcagcgccatcctccgttgctcgcgccaatccgcccctggaccgcctcgcagacgccgtcccgcgtccagctggcttctccaccgtcgacgaccacatcccagacacctccaccctcgcagccgccgactttgacgtcgacgttcgctctggcttcctccctcccgaagcacccgtgctccgcctcacgcgcccgcacgccgaccactgggaacacgcactcgaccaagccaagcgcatcccactcatgcagggcggcggcggcatcaccatcaccccgcaacagcgcatcctcgcccgtcgctggcgtcgatccctgcgcgaaatgcccgtcctgcccctctccgatgagctcgccaacgacattcgcttcgcacgtcgcggccatgtcgtcctctccttcctcgcacacttctacatccactcccagcctcgcaaggctgaacacgccgtcgaccccacccctgcacgctcatggctcaacgtcttctcgcgcaagtcgccagaagagctccaggacgatcaggacctcgcagacgaacttgccggcaagttcgcccgtcgtgtgcccgccgccatcgccgtgccctgggtgcagctctcgcagaagctcgacctgccccccgtgctcacctacgccaccaccgtgctctggaactggaagtacatcgaccccacccgcggcctcgagcccgacaaccttcgcatcgtggagacctttactggcacgccctccgagcaccactttttcttcacctcgctcctcatcgaggcgcgcggcgtagaggcgctcgagctcatgcgcgtcagtctcgacgaggcctttgttgccgatcgcgtcgcacgccgccgcgtcgccgccaatctcaacaggctcgccgtcgtcctccaggacctcacgcgcctgctccacgacgtgcgcaacggctgcgacccaaagatcttctactggggcatcagaccctggtttgtcggcagcgacaccgtcgacaagggcgacgagatcggatggcactttgagggcgtcgacgcggaaggcgtcaagcgcgtcttctccggcccatccgcaggacagagcaccctgatccacgccgtcgacgtcttccttgacgtcgaccacacgcgtcgcaagcagcgtctcaatcgtccggccgtcacctccaacggcgacgcacgcggtgccgacgccaccttcatggagaggatgtcgctctacatgcccggccaccaccgcgccttcctctcgcacctccgcaccatctcgtttgatgatgccgacgacattgacgacgacgacgatgctccagctgacgacgatgccagttctgccggtagcgaggcagagcaggagcagctgagggagatgccgcacccgatccgcagtctcgcgctcaaggcgcagaccgacgagcacgacgaaggcctgcccgccgcctacgacaatgcgctcacccagctcaaggcgctgcgcgacgagcacatgaagatcgcctacctctacattgtggcgcaggcgcgcggctcgccgccgcccgcgtatgcgccgctgcccaagggcttcactggcgagccggcggtggaccgcaagctcgccaaggcgcgcgcgcagagtgacgaggccgaggcggacgcagcgctcgacacggcctccaacgacaacggcggcggcgcaaagggcactggcggtaccgacctcgtctcgttcctgcgcgactgccgagtgaatacgatcgatgcgctcatcatggccaaggacaccgtcgtcgcagctgcaacgcgcacagcagacgcttctagctcaggtgtgggccattgatatttcggacgtctctagccttagcgagggtgcgctcgggtcgattgtagacgagctgcttcccggggcatgcaacgccgccgagcgggagaaggtgatgcggtaccatcggcaagttgaccgtgtgcggtcgttcgtcgcacggctgctctcacgcatgttgctatcgaaacggttcggcgtggcgtgggaggcagtgcgtttcggggcaacgccacaggggaggccgtacatcgctgcgcccgacctacccgtgcgggtggactataacctgtcgcatgatggggactgggttgtgatggcatttcacatcgcctcacccggggaggaggaggtgcgggtgggtgtggatgtcatggcggttgcgttgccgcggtacgagacggacgtgcgcgcctttgtagatacaatggatatggctctcactcccaccgagacgcagtgggtgctcgacccccgcactgagggggagatgcttacacggctgtatacgctgtggacgtacaaagaggcgtacaccaagcagctcggtctcgggctcgggttcgactttgcccgtatcgagctgagcttcccggcaacaggggtggcttcgctacgtgtggatggaagcgaggtgggtgggtgtggatttgtagatgtgcttctacccgcgcgtggcgggtcgtcatctcagctggtggtgtgtcttgcccccgccgagtctgggtttcagtcgcaggtggacgcacgcacggccgagcaacagggctggctttcgattgtctcactttcgcaactcgtcaccgaggctcgtcgccagctctgacgcagctgcggcaaaatgtatttatgctcttagacggtgaggtattctgcaagtacaggaatctcatccaacaccgt

SEQ ID NO: 12674 - DNA, 3063 bp, Oryza sativa
  ref <308>: DATABASE ACCESSION NUMBER: AK110022
  ref <309>: DATABASE ENTRY DATE: 2001-12-06
atccacacacacggcagccaacccactctcgccctcgtcggtgccgtcaccggtcagggtccattgatcgtcgtccacgtccgctcttcagagatgccctggcttccagcttaacctcgatcctcagcagctcgatacgcacgccatcacgccaacaagctgcccgagcctctgcctcgacgcctggctaaagctacacggctgccagcctactcgaatggcgtgcctttcgcctcgagggctctagccgtagagctccttcccatcgtcgcaacggcagcgctcgtccgtcatggatcggtgttgatccatctctcgacccttcgcttccggtagcacatctcgacatgcccaccatcacctttgtcacgccgccgggcaggccgtccgtgctgcgcgccacgtcgggcaagcaagaggcagcacaggattcaaactcgatgcatgaaccggcacccttgacctttggcaagaagcgcatcctgcccgtgctcaccacttcgcccgagccagccaaggacgcattcgaacagccgccccaacgcgcatccctcgaccagccaagctcctcccgcaccgtccatgacgacacgcgtgaccacaaacgtccttcgctcctctcggctgctatgagctcgtccggcacacacccacaccgcagcctcagcaccaccagctcgggcatcctgcgcaaggctcagctcgaagacggctcgcacaccgacgatcgcgattccaggtcacacgcgccttctacagacgctgtcaaccccgctccaagggcgcgtctgcactttgtcgaacctcacaaggaggccacccaccacacctcggcgcgcattccgcacgacgccaggacggaagagtcctcgcatgcatccacctcggcagctccggccgtactcgccaacgccgacaacactcctcggaagcgcagcctcgtcatccaggaacacgccgatgtgatcgaacgcgtcgccgagcgagctgcaaggcaagccaacaactcagagactcacgcgcctgatcaccctccccacacgcgtcataccgtccgatcgcgtcagcacagcgcctcgtccgcaggcgaagagaccgcctccacccgctccagctgggccgtacgcagcagctcgcgcgggtccagcgtcgccacctcccccaccgtcgtctccgacgtcaacacacaagagctctcggatttcgatctcaacaggcccgctcgtgaccccaagccgcccgccaactcgtccgtcacgcccatctttcacagcaccgacgccaagcccgacgcggagcccagtcggccaccgccccctgcgcccgcaacctcgtcgcgcaagctcgtctttgtcgaccccccgcctcccaggcccaggcacgatgcgccgcctcctcaagcgtccaagctcacctcggccgccacctcgtccaaagcgcacatgaatgcagtcagccatgacgacggccacgatgcgcacgcgcgcaaagcgctctcgtttgccgcgtgtcccaagccagagcgccccgctcgcctctcgcccgcacacgccacccgacgcgccaagaagctctccgccagcccggctccgcacaagctcgcctatccacagcgcttgcgtggcatccgcggcaccgaccccatccgatcgcccgcgcccgacagggtcgtgccgctcacccacgtcgctgccgagcactgggaggctgccatccacgatccgccgtcgtcagaaggatccggctacagcgaagacgaagaggacgacgatgacgatcaagacgacgacgacgacgacgacgattcgcaaaaggggctcggcagcgagcaggatgatgacgagcaaaaattcagctcgagcgtgtcggatcagcagagtcttgccgagtcggcggcgctggcgagccaagacgatgcaatcgctcgagcgaatgcggctatccagagtgctggagcgcatcaagctgctcgtgctttgacgcctgtgctcgacctcgactcgagcgctgtgctgactgggcgacggcacagcacttcggctctgctgcagctgcagacggctcatgcggggccgtcggtgccgctttcgcctccgcgcgtggctcggccgtcgcgctccacgcaggcctcgccgcggcagggtgcctcgcgcgcgggacgcaggctgcagcccaaggagtcgctctcgcatccgatgtgcttcctgcccgatgcgtttggggattcggcgccggcgacgccgacggagcccgattcggacgggtacgagccgccgcgcgccaaccttttgcatgggtggctgtccgagggtgggagtgcgacgagttcgcgacgcgcgagttggcagcagccgctcagtcctgctttgcggccgggtgcgggggagcaggaggcggtgccgattacgttgccgccgttcaggcggtcgcgcgagcgcacggcacagtgctcggttacgagcgacgacgagcgcgcaagtcggtcgcttggtggcaatgctgcgttcattcgagagtcggcattgggtaggtcgctgagtacagcgcctctgttgggggtgagtgtgcctgatgggagacccgagaggccggtcatgtggaagcagctcagccatgtggagcgacccgctagtgggctgggcgcgtacaggcgtgcgagtcattcgttggaacccaggctggcaaagtcggcgtatacgagtccgatcggatcgtacactgcgagagcggcgggggtcaagcagcgcgcgacttcgatgcacatgcgtgcgttgcccgtggtggcacagactcagcgagatgtcagcggcgcagcctcgcccaggagggacgatgcacaggcgactttgaagcatcatctggcgccggttaggagcgaggcagagcgcgatgatgaggcgccagggaatgcggctaggtactggacagagaggctcgcgagtctggcgcatgcgatgggcgatgagctggcgagtgtcggacagaccgtgcttgggtacgaggcgagggcgaatgcaaacgcgcatgaggagtagcatagtaatgacagtgggtttttgatcc

SEQ ID NO: 12675 - DNA, 3178 bp, Oryza sativa
  ref <308>: DATABASE ACCESSION NUMBER: AK110023
  ref <309>: DATABASE ENTRY DATE: 2001-12-06
tggccaccacgaagtttggcagaagctggagcttgagtcaccctttctctccgaatcgtctcacgccagctgtctctctcaattcggccgtggctgcggcagaccctagcctccatccaagcaacatcagctcccatcgatatccagctcattcacgatcatcccgatcggagccgccgacctcacatcgccccttcgttacccactcgctcgaccgccgaaggttcccgcgcagcaccgcatcgaggccatccgtccaccatctgcacccatctgccggcgtttacccacccggcctttcttcgcgaccgttcttggcgatgaagtgaaccgcgcccacttgcccagttgccaacaacgccctcatccgcgttgcttgccgtcgctcgtcgtgatctcacgccgcaagtccgccaccctgcatcagcgtcatggcgtcagcagccgcgacgaatcatacctgcacgcccgacccctgatctcaaatcgctaaaaggcccaatcccacctcgcaactcaccacatgtcgccgtcagacggtcacgcactgtacggcgacgatcaacacaattcgcgtaccgagtcgacatcttcgggcgccgcgaacatggacgcgcgcggcgacgatgcgcccactccgggctcgagcagctcgcaccacaccacctctccatcacagggccgcacgccagcatccaccactccgcgctcggccggccaccgagccgatcacactgacgatgcggccgaccgcgcagacgctccgcagccgtccgggagcggcgcaggcacagcagccgtgccgctcgcgggcaagcgatcgcgctccggctgcctcacctgccgcaagcgcaagaaaaagtgcgacgagacgctgtgcgtcgaaactggcggctgctggcgctgtcgcaacgccggctatcgctgcgagggcttccgccgcgcgcccgtcacgtttgagcccggcaccaccaccacgtccaagtccaaacgcatcaagatcgcttcgcccgacgactcaaatccgcgcgtaaagaccgagcccgcctcgtccacgagccagctggccgactttgagcacgaggcgcgccaggcggacgggatggctatgcccaactcgctcgcccagtttgcaggcctcgcgaccagcacggctgcctggcccatggtcaacggccttgcaccagcgccgaccacgacaacgacgaaagccgatgccaagccacccatctcgtacaagaacggcacgcctacatcaccgccctcgacgttttcgagcttcgtgcatccctcggccatgttgccgccacccccacgctcaccacttcgatccgcacacgatcacgagccaatacgaccgccaccagcggccacctcggcgttctacgccgcttcgtcgtacgtggcgtgcgagatcgtgggcgactgtctgttctcgggtcgccatctgtgcgcgtcgtgcagcgcggtggcgaaccggctgatgcagccggacccggcgcagctcgccgccatggatgcggatctggtgcaggtgcagcccatgccgagcctgtcgacgcccatggcgtcgcggccgcactcgcccgcaccgcacgccgcgcccgacgccaacggagccagccaggcgagcgccaagtcgaagctcgtcatggagagcctgatcggctactacagcacgctcatcacatgctggacacaggggtgcgacgtgcgcggtctcgaggcgtctacgctgtttcgacagcttgtgccctatctgctcgacagcgtcgacaccaatccgccgctgcggctgtcgatcgctgccgtcacggcaggctacgtgggcggcgcgaggctcacgtggcccaaggacgtggtggcgatccatcagtgggccaacacgctgcgcggcgataggacgtcgatcgccgactgcgtcaaggcgaatctgagctttcccttccccgccacgcccgatacggtgtggtcggcatcgccgtcgggcagcctgtcgtccgagacgccggcgggcgcatcgtcgctatcgccagccaacgccgagcggctacggcgggcgtcgaccacacacgccacgctcgacgatctgctcgtcggccaggcgcagacgctcaagcagctggcggtcaagtcgctcgagcaggcggtggccgactaccggtgcaagacggccacggcgcgtgctgccggtgtgggcttcaccgaaaaagggttcctggccgagctcaagcaggtgaatccggtgctgttggcggcgatgaacattgccatctatgcctttgccgaggagggcatggagagttactttgaagaggcggcgcgcatgcgcgcgctcatcgacacgctgctcggcgccttcccgcccgtggatctggccaagctcgtgtcgcacgagctgctgggattccgcacgtacgtctggtcggacgtgagcacggcgattgcgtgtggcacgcgaccacatctgcagctggccaagtcgacgtttgccaccgacgccgacgccgcggtgggggcggcggaggggacgattgaacgcgagctggacatggcgtttgggctgcaggatgcgtcgctgatcgcgctctcggacattgcgcggctgcggtacgactacgacggcggcgactttagcaagacggcgcagcgtgcggcggggagtgcggtgccggcgtgggtgcacgaacgcgcgcaacgcatccagacgcgcgccgagagctgccggatcgagacgagcctcacgacgggatcggcgatctgtgccatgatgaccaagagtgcgtgtgtgattctgatccacacgctcatctatcgcgtcggtgcgttgcatccggtggtgcggagtctgctgcgcggcatgctggagctgtggacgagcgcgggcgagcagtactgccgcagcgtaggatgcagcaacttcaacctgcccatctttatcgcggcgtcggttgcggtggacgaggcggaccgcaaggtgtgcgagcaggccatgcagatcgtaggtcacgaggaggccggaccggcaccgggcagggagttgatccgcgaagtatggcgacgcaccgacatcaccggccagccgtgcttctggacagacctggtcgccacgggcgatttcgccgtcgccttcttctgagctacactcatagtgctctcaatccattgtacacctatg

SEQ ID NO: 12676 - DNA, 3377 bp, Oryza sativa
  ref <308>: DATABASE ACCESSION NUMBER: AK110024
  ref <309>: DATABASE ENTRY DATE: 2001-12-06
agcatcagccggcccccatccacatcacctgctggtcatcatcaccaccactgcccacgccgccctcctacgctcttctacgcttcaccttgcgacacccgctgccacctagcgtcagcctgcccggctgctggctctctctcctgctcaggtcttccctacccgccacgatcgtccgagctgggtagctcccgaacctccacgccgggctgctcctgcttctcgaccttctcccgactcggtccaatgtccctgcttcgctcactccctctgatctgattccatcgacacccgacgctccccgacgcctctgacttgcatcagctcctactcttccgcaagccatcatgtcgatggaccgcggttcgccgcagcgacagggtcaagcatcgacatccgcgcccaaccgggagccacggagccctgccagtccgacaaccatccaacgccatccatttactcggactccatccaacgagccaccacgcatccactttgcacgcgagggcgacaccaccccggggcgtctgcatcccagctcaggcaccgatgcaacgctcaccgtcgatctcagctcgtccagcgagctcgaccgtgcctcgctcgatgcatccgtcaatggcttgtcgtcttcgatggactcattcggtgcgcatcctaccgacgctctcgcgcaatcctccaacgcacactcttcgtccgcatcaaagtactggccagagccttcgggttcgcacctgcgttcggcgccttatgccgtcaacgattcggactcgcaggcgagctatccgccgcacgaacgcaacggccctcatgcaaggataccgcgcctgcacaccaagtcgctcggctacacctcctccaacgatggcgacctcacccccatcgcctccacatcccgcatggcgccacccctcgtcggcgtcaatctcaccgatcaacagatcgccgacatgaccgaatccgacgtgtccgagtacgacgacacgtctaagctgcggcgcaatcgacgcggcagcggcgcagacccagccgccacgtccgtcttcagctccatcacaaagagcctccgcggcgagccattctggagccgatccgcctcctcgtatacccccttgaccgccacccgctcccgcagcctcaaaaagtccaagtggaatcgcaactccaaggcggacaagaccctcttctcttcctccgcacatccctcgtccaaggaccgcacccgcccacgcaggaccccgtccatatggacacatccgctccgcatgctactcagcttcttctccgagctctttcgcaccgctttcgggcccatccatcccgtcaccatcgtcctcgcgctcgtactcatcgccagcttcgtcgcctcggtcaccaagctcatcatctacatcctcaatccagacaaggagcccttgccctggcgcacctactgccagcagcagccctcctttccgcacgcctatgcagacgccctcgcacccgtcgacgtctttgtgggcgtgttcagcatcgacagcgcgtacgagcgacgccacctcatccgcagcacctacgccacacacacgatgccgctcgatccacacacaggcacgcccactagcaacgtacaggtcaagttcatcatcggtaagccgcgtcaggcgcacgcaagacgtgtggcgctcgagatggagaccttcaacgacattgtggtactcgacatggaggaaaacatgaaccgcggcaagacgcacgccttcttccgatgggccgccgagaacgccaccgtgcccttcctgcgcgctgtcgaggatggccagaatccggcttcgggcttggcgcagggctcggtgctgctgggcgagttagagtcgcgaggccaggggcatggacagacgcgcgaggtgctcggaggatctacggagcagatgcatcgataccaggtgctctggaagaaggccgactacgtcgtcaaggccgacgacgacgccttcttgatcctcgaggagctcgagcgccacctgcgagtggcgccgcgccagatgacctactggggctacctcttccgcaactggttcatgggcggcgagtgctacgcgcttccgaacgatctggtgcagtatgtggccaagtcggaaaacgtgctgcactacatcaagggaaaggaggacaagaaggtggcgcagtggatcaacctgcatccgaatcgatcctcgatccactgggtctcggaacactgctggatctacgaccatcccaaggcgggcaccgcctattcgcacggcttcctgtttccggactacgtcgagaagatcaagctcgagggcagacgcgggctcacggatcaggagattgcgcggaggggaggcgagcatcgcgccaagtcgtactcgaccgtctcgcgctggcattcgccgtacgtcgagccgcgtggcgacctgaccatcgaggaagaggtcgaggcactggtggagggcggaggacgctggtcgggctcgtgggttcgtggcgaagagggcaacgacacgcagatctgggtgccgtggcagcagatcgtgtttgaagccaacgacgagcgacttcggccgcccatcctggacaacttgggcgcacatccaacactggccgaagaggtcggcatcgatcccgccaccggtctcacggttcgacacatccacgctgccaaccgtcaggcttcttccgcgttcgcccaagccgacgacgatgcggtgcacgcgcaacggcgcaagcgcgacattccgttcttggcgcatctgccatcggtgcccggcttcgattttggcgcaggcggcgtgtctcgcagcgcagcggaagatcgcaagcgctcgtttgccaattcggccttgcagccacgcatgatcccgctgcctacgcacaaggacggcaacggcgaggcggaggagcttcgtcgacgccgctacctcgggcgtcggtttggaggcacggtggtggtgcactacctcaagaagagcgagtggttctacgagacggcgcttgcctttgctggccgtggccgattctggcccgatggcgccggaggaacgggcagcgaatggaggatgtacggcagcccgctggtgcgccacgaggacggctacatcagcggcggaaggagccagccgcgtccggacatggagctggcctaccttcagcaggcgcgggttcaggcgcaggccaacgccgcccaggcgcagcagctttcggcgaggatgggcagcttcaccaagcccaagcccgctgctgccggtggacctccgccctccaaagcgccgccccaggattcacagccgccggtgcagccgccacagcaccagcaaccacagcacgaatgatctttcaatgatgagcatcgctatcgcagtcgctgcaat

SEQ ID NO: 12677 - DNA, 3547 bp, Oryza sativa
  ref <308>: DATABASE ACCESSION NUMBER: AK110025
  ref <309>: DATABASE ENTRY DATE: 2001-12-06
atagaagccgcaggcctcacaagaccgcactgccgcccaagcaactcagaccgaagatcagacaagatcagacatctcgacggccaactcgccgccgcgcatatagcctcccggcgtgaatcgaaaagacgccgaaccgtggcaccgccaggacctccgcaacgatcagcaaacaagagcaacactgcagggcagcgacacatagccgactgttgagcgggcgatatcgattgctgtagacgtcgccgggcttggacctagagggtgcacgccaaggataaagcgcacgtctacccggcccggttccaacactttctttgcttgttcagccctccaactccacctcgaacgaccaatcgcctacgtcggctgcatcgacgagactcacgctctagaccaacagaaacagagcaaaaagctcggctcgccttttgcactatcggaccgacgccaacaccatcgcctagtcggagccagacgctcacacgtgagcccagccaagatgccggacatcgacaatccagccagtccggtgcccgttcaaatcgaagaacgcaagtccccaggctcgccccactcgccctctgcaacgcgcagcaggcatccgcaccatcattcgccgagctctcaaggctccacaccttcgccatccaacttgtcgcacccagcctcgctcaacggcgacgatgccaggcacggcacatctcccgccacttcggtcgacgtgccatcggtgccgcctgcgggcctgaagctcgacactgcctctcactacgcacagacccgtagggaacagcaggcatcgctgtcgcgggccggtgtggctcgatcgcctcatcctctggatggatcatttacaggacggtccggtggcatgctggccacgatgcaggaagaaggtgggcccggctttgccgacagtcgacgcgactcttcgctgggattcgactcgaaccagacgttttcgcagatggagcaggccatgcgcgcgtcgcgacatcggtccgcctcgagtgcagcagcgcttgcgctccacggcagcagcggcccctatgtcgatcgttgggccagcaacgccgcaggcaggattgcgcccgcgtccaacctgccgtcccgtaccctttgggacggagtaaggacgggggaagccgcgggcggacccaatgcgccgaacagcatggctgcccagaggccccaaccccacctccagcgcggcttttcggcctcgtacgtgcgcagcaaaccggagccagcatcgccttcgccgttcctgagctcgccagcgggcttccacgatctcggctttgactttaccgaaggctcgttgcgcacacatcgctccaactacaacaccaactcttcgccctttggcgcggtgcacgatcttcccgagctgtcgtcgtatcccgagccatcgcgactcggtggagccgatgcggatggcccagatggagacaacgatcgtgcgcagtccggttacgagtcgcgacgccactcggtggccggtcccacgattgccagacgcgattcgtccagcgccagtgtgattggcggccatcgacgagcgatcggcttcgacgtggccggaccgtacacgaccgatagaggcggtcacgagcttgccggtcacggtaccaccgccgatcgaggctggcccgtcgccggcaggcacggcagggatcgcagcatcaccagcgtcagcgctactgcctcgggcttcaacccctttgccggaggcagcctggccctctctctggacgacttagctggcgattcggactttgagccgtcttcgcacgcccgcacccctcgccgtgacatgagtggcacgagaggcaccgctgatccaacatgtgtctctggcactagcgcaccgaatgttggcccgcatgccgcttccatgccctccgcattcgacgagggcagcctcgacggttttggagccggctcgacccgatttgcagatgcaccgcgcctgacgcgggctggcttggacagcctctctgccagctgggacacgatggctccttcgcacatggcaactcgctctcctggtgaaggccagcacacctttgccgagatgacgaggcgtcttcggcagatgtcgattggcgaacaggatgtgcactctcactcgcaccgtcacggctcgaatgcctcgtctttctttgacaaccaggccgagggcacgcggactgtccgggcaagcccaggcacgtcacccactggcgtacgggggctcgccgctcctaccaccgggcatgctttgtcggcccaagccaagtccttcacggcctcgcagccgatggcgagctatggtcaggactttgcgggcgccatcagtggagccgcaccgggcgcgcatggcatgcatgccggcttcggctttgcgccacctggctcggtgctggctccaggcagccgcatgccgtatccgcccccaaccgcgtctcccttcggaatgatgcagcagtctgctttcggtcccggtcccggtcctgctctgggcttgagcggtcctgctcctcttcctgcgctctcgcccaacgacctgacgttttcgagcctggcagctctcggtccgatgccaccaagttcgatgggacctccgggagccctcggcggtggcggggcgccgttcggctcgggagcgtcgggggatctgcaggaccttggcaagggagtgccgctcggcagcctgtcgaaggacacgccgctgtacattgtcgagttcaagcaaggacgcacggatctgttcttccgctcgcattcgccgactcagtcgccctcgatgcgcgaggaagagcccatccgccgaggcgacttagtgattgtcgaagcggatcgaggcaaggatctgggcacggtggtcaacgacagcatcacggtggagcaggtgcaagcgttccttgcgcatcagtcggatctgacgattggcgcggctgcagcgcttcaaggcaacggcagcacgggtttgggcgctggcagcagccgcgacgagacgagctcgaatgcctcgggcaggagcgggtcgccttcggcctcgtcggctgcgagcggaccgagcagcagtgcgacttcgaatgcgatggcgagtcgacccatgcggacgatcaatcccaaacgcctgtttaccaaggcggcggcagccgatacgagcacgctttactcgaaggcgcaggacgaggagcgtgcgctgcagctgtgcatctcgaaggtgatgcagcgtggactgccaatgagcgtggtggcggccgagatgcagtgggaccgacgcaagctgacgttctactacactgcgagcatgcgggtcgactttcgcgatctggtcaaggagctcttccgcctgtacaagacgaggatctggatgtgccacctcggccatccgagcggcacgggtctcagctagaggagggcggtcgagggagcgggtcaccatggctgggctcacgtaaaaagccagcgagcaaggctgcttctcctgtccacttgtcctcgtgtcttgacgatgtaagctcaattccatatcttcacgcacaaaaaaaag

SEQ ID NO: 12678 - DNA, 3341 bp, Oryza sativa
  ref <308>: DATABASE ACCESSION NUMBER: AK110026
  ref <309>: DATABASE ENTRY DATE: 2001-12-06
gctgtccgtcctactccatctacttcgcgagctgccgagtcctcatccacctcgtcgctaccacaagcgaccgcgatctgccagctctttgccccgatagcacctccacgtccagtctcgaccgtgtgggctgccatcgttccaatcaaccatatccaccgccagcctgaatttcagcatccaccatgctcaaacgcgccgtgcagtccctcaccaaggactcgtcctccggcgagaacggccatgccaagggtagcagttcgcctgccaccgcctccgccaacggcactggcagcggtcacaccacgcccatccagcccccttcggccaaatcgacgctcgactcgaccatgagcgggagcaccgacaagaaattccgtctctcgcacattttctccggccactcgctccccggccgtcgatcctcctcgcgtgccagcagcatggacgaaccacgtcccagcgccatcaaaaaggcgcagcgcatcgaggagaaggagcgcaaggccatcgagcaggaaaggatccgcgaaaagatcgcctttgcccgtcgtcagtccgacctgcgcgctgccaagatcgagactcccgagcagcgagcgcgttacggtgaccactaccccgtcgagtggaacaaggaccacgatcgctgggccagcatcgcatccatcgccgacgatgccgagaccggagacaccgtcacggtccgggcgcgcattcacaccatccgcgacgtcagctcgcatctcgtcttcatcgtgctgcgccagcagatcgccaccatccaagcggtgctggccgaggagtccgacatcatcaccggtcacatggtgcgttgggcaaagcgtctcccgctcgaatccatcgtcatggtccgcggcgtcctccaaaagccgcgcgagcccattacgggtgctacgacgcaacacgccgagatcaaggtgcacgagctctacctggtcgctcccactaaggaggctctccctttcaacgtgtacgacgctgaccttgtcatcaagaagagcgacgaccacgacagccccagcagcgccgatgccagcggcaacaacaccgacaccgagcacgacggcctgccccaagacgagaaccactcggtcgagaggcacgagggtcccgtcatcacccagcgcgtccgcctcaccaaccgcatcctcgacctgcgcacgcccaccgcccaggccatcttccgcgtcaacgcggccatctgcaacgccttccgctcccacctcgacaagggcgacttcatcgagatccacacgcccaagctccagggaggcgcctccgagtctggatcgagcgtgttcatgctcgactactttggccgtccggcgttcctggcgcagagtccgcagctgtacaagcagatgtgcatcgccgccgactttcggcgcgtgtacgagatcggaccggtcttccgtgccgaaaactccaacacggcgcgccacctgaccgaatacactggcctcgacatcgagatggagatcgtgcactactacgacgccatccgcgtcatcgacggcatgctcaagaacattttcacggtgctgcgcgacaacttcaaggcggagcgcgagctgatcaagcgccacttcccgcacgaggatcttgtctatcccgaagacacgctgatccttccgtttgcccagggcgtgcgcatcctgcgcgattccggcttcgtcgaagaggacggaagcttgcccaaggaggacgaggatctgaacacgcgtgccgagatccggctgggcgagctgatcaaggaaaagtacaacaccgactactacattctggacaagttcccctcgtccgttcgtcccttctacgccatggaggacaaggagaatcccaaggtgaccaactcgtttgacatcttcatccgtggccaggagatctgcacgggcggccagcgcatccacgacattgacgagctcgaggccaaaatgcaccgcctctctattccggccaagggcatgtccgagtacctagaaggcttccggctgggtgcgcctccgcatgccggatgcggtatcggtctggagaggctggtgatgctctacctcaatctgggtgatgtgcggatgggcacgctgttccaccgcgacccgcgcagtctgccgctgcagaagaatgtcgaggacgagctgcgacatccggaggccagcaccaacccgccgccgtggaagcatccgcgcgtggcgctcaaggcggacgccgagagcgagctgcgcgacatgcagccgctggagaagctcatcgccaactacggcgatgcctccaacacggcctggctcgacgaccgatacaagacctggagacacccggatacgggagcggcggtgggggactcgccgttcaaggggtatgcgatgatcatcggcgacccgctgtgcgacaggacgcagctgacgcaggtggtgtcggcgttcctgcacttcatcaagaaggaggccaagctcaagcccatctggatgatggtgagcgaggatgtcgaggagatccttgggggtcggttgaactggtgtacgctctcgtgtgctgccgaggagcgtgtggaggatccggccaagaatccggcgcgccacgataccgagatccagaagaaggtgcgacacgcgcgcaaggagggtgtgcgcatccaggactacgcgctcaaggaggaggtgccccaggaggtggtgcgcgagacggacgagcgcatcgacgactggcgcaacaaccgcaagggagagcaggtgtacatgaccgacgtgcatccgtggcgcgacatgtcgcaccgcgtctactacattgcgcgcgatgctggcggcaaggtgtgcgccatggtggtgctgcaccagctctcgacgcagcacggatggcacatcaagtgggccctcgacttccccggtgcacccaacggcaccatcgagcatgtcatcctccatgcgctcgagaacaacgcaggctccaagatgacctttggcgcgtcggccacctcgacgctcgtcgccaagcacggcctgagcaagatgaccgtcaaggcgctcaccaaggcgtattcgtcgatcgccgagcacaaccgtctcaccaacaagggcgagttccgccagaagctcggcgcggtcgaagacagggtctacatttgctaccctcgccacggcttgtcgcccgcaggcattcaggcgatcgttggattcttcaagcagtagagttctaagagttggaccttttcgcgaggcatggtgcgccgccgtatacctatacactcggacgagcatgcacttggccggcacacgttcgcgatgtaaatagcagtgactttgcatatgcttttctgacagcgt

SEQ ID NO: 12679 - DNA, 2918 bp, Oryza sativa
  ref <308>: DATABASE ACCESSION NUMBER: AK110027
  ref <309>: DATABASE ENTRY DATE: 2001-12-06
acctccatccccgctgccaccgcaagaccatgtcgaaccaagcagcggcggcgactccaacgtcgccaagtcgcaaacaacaccaacaacaacaaaagcagccggcttcgactcgcggaggtctagcagccatcgcaggcattgcttcacccaagttctccttccgatctgcggtgcagcacaaatcaaagctcaccaaggccgttcccgccacaacgcacgatgcggaggccaaacctgcgcgcggtgtcgcgagcagcatcccttcgctcagtcgaggtcggttcaactccaccgatgctccgtccacatccacgctgcccagacccaaaccggcagccactagccccaccgcatgcagacccgcgtcgtcgctcggaaagcgcggcgtcgacgattccagctccatcaccgactttggcgtttacaaggcctccaccactagcacacgcctcgcatccaccaaatccaacaacccctccgactcggctgcaaacaccgccaagctccgtggtccgccctcggctcgaacccagtgggcacctccagcacccaagacactgccctcgccgtcttcgtccaaggctccacgcaagatcgctcgtgccgacggcattgctgaagtgcacgcaggcacgcatgccgcgggcgccatcccacgcagtcgcaccatgagtgcggcgtctcgcaccatcgccgcgccgcaatcgcagtcgcagctacaccggccgaagatcggaacgctgcccaagcccaaagccaagccagcactcgtacggacgattctggacgagcgctacgaaagctctgcatccgacacggacgaagacgcacaaagcgactgggatcagctcgacggtcccgatgtctcgaggatccgcaccaagcgcagcatgcagcctcgcctctcggatggcgccagtgggtccatctccaccactcggactcagacgctcggcggatcgcgtatccccagcatcggttcatcaaatcgcacgctccctcgtccacacaggcgctcctcgagcaacagtctgctcggcaagacccccaccgacgagaaggaaaacgcctcaatcccggcgccatcccattcgaaacgtcatagcatcagcacgtccatcgaggctgcgcccgctcgcgctcgtaccagtctgccactctctccggcggacaacacgccgagcccgtccaaatcggcgtcgctctcggcgctccggtcgcgcggactccagccagggtccttgcaatccctccaacccgcgcctcggcacgacctcggcatcaagaactccatcatccaggccaaccccgtccatccgtccatcgcggctcttcacgcccagacggcgccgcaccagcccatcagcacacccgaggcgctcgtcaaggccaagaaacgcctcagcggcgcgcttttctcgtcgtcctcgtcgtcgttgacgctcaacaccatcgcgtctacctcgccatccgaacgcgcgggcatggcacattcaccctcgctctccaagctcccccaggcgcacaagaagccggtcaaagcgcagaccgtgtcggcggcagtggtgacgccgtcgcgctcgaagcaaagtggcatgccgcgctcggcgtctcgctcgcccatcaagtcgtcgctgctcctctttacctctgtccccgagcccgacgctgggccgagcagcgacgagcactgcacaacatcactgagcaagcaagtcgtcacggacaacgcgacgagcgagatcgacgcgcacctgctggcgagcttgcgcgtcgtggcgcacaaggcgaatctgcagctgagcgatctgctcgatgccgactcgcagaggtacacgcgcgaggcgtccgaggagctcgaggcgctggcgggcgatgtgtcggtggacctcatggcgctggatctggccgcctcgccctcgtccgatgcttcgatgctgcgctcgcctctcatcgcccacacgccaccggcagtaccggcacagccgcagcccgacattccgactcgctcgttggaacccgcacccgcggtggacgcggctccggaactcgaaggcgaggagacagacacgtcgctcgcctcgccgtcggtgcgagctgcagcgcgtcttccactttcaacccccggcgctggcgactgcgttcctgaaacgcccttgcggccacgcttgctttccgcttcaaacgcctctccaccgcttgcatcgccgagcaaggcctgtccgccgtcggcgtccatgtcggcgcgctcgcgcgcgcgcctcaaaaaagcgctgcgcgagtcgcttgggctggaggcccactatgccgcgcttaatctcgctgccccctcaaccgcggcgccgcttcatccaagcgcctcgcgcaacgccgaacgggttgccggacgcagcaaccaaggcgttggtgcgttgctcaccgactcggacctggacgacatcgtgagtgcggtggcacgcatcgatctgcaccacgctcaagccgacacacatgaagtgcgccctgcagtcgaagtggaggagatgggggaggtggcggagctgcgtgcggcccaaaccgccttaacaacacagctagccctcgccgagtcgcgcgagtcctcgctggcggtgcaactggctgagcaggcgatggcagcgacacgcatgcagcgcgagcacgagcggctgcaatccgaccttgccgctctccgcgccagggctgcagggatggagtgggcgcaagcccagactgcctggtcgcgcgcgcgcgtcgaagcactcaccgagctgcaagacgccaaagtagaagccgacaccatcatgctcctccaggcgcatctcggcatttgccaccttctcgccacctagtcccagctcccaacgatagccgcaggtggggccaggttttgcaaatgaagtccagttgcatcaggc

SEQ ID NO: 12680 - DNA, 3305 bp, Oryza sativa
  ref <308>: DATABASE ACCESSION NUMBER: AK110028
  ref <309>: DATABASE ENTRY DATE: 2001-12-06
acaaccaccttcatcctttcccgaaacacatcgacgcgcgccaccctgcttcatatcggacgaagccaacccacctttcgtaccgccacttcatatccaccaaaaagccatcctcccagtgggcgtctgcgaatcccaggcgctgctgctcacattccgtcttggcttctgtgccgatgagttcgccatcgcagcacaccagcaccaacaatgccttcgtcaccctcctgacctccgatcattacctgcctggcgcactcgttctcgccgagtcgcttcgcctcagccatggactcgctaggaagggcaaggcacgcgccggcacttcgcgaagtgcagccaccaccgactttcaggtcgtggcgctcatcactccagatacgctctcggtgcagtccatcaaggcgttgcggcgaagcggtctcttcgactggatcgtaggtgtcgagcccgtcggctttcgtcagattctcgcctcgtccaccaatgctcccaccaccgtcacgaccggcatcagcggtagcagcacagcgcacgacgccgcagtgctcgactcggagctcgacgcaaagatccgcgatatggagaggaatctgagtctgctcggccgtcccgatctcaccaacaccctcaccaaactccacgcctggaggctcggtcgcgactcggcacatctcgttgcccaagccgcctctcccgtcgatggcagcgatcagaaatggcacggattcgacaagctcgtcttcctcgacgccgacaccctcgtcctgcgccccatcgaccacctctttcgtctcggatccagcgttcacttcgccgcagctcccgacaccggctggcccgatgccttcaacagcggcgtcatgatgctcacaccctccatcgacacgttcgaagcgatacgctcgttcgctcgtacaactggctcttgggacggcgccgatcagggcctcctcaacgacttttacggctccgacgatagctcggcatctctcccagacgaggcacaatcgcccgatacgtcctcagcgccaggcgggggctggaagaggctcagcttccgatacaacgtcaccagtcacggaggatatacgttcgcgccagcataccagcgctacggccgaaacatcaacatcgtccactttatcggtcaacacaagccgtggaaccggcccaggccacatggaagcgctcagcccaatcctctcgtggcaccacgcgatctcgacagccaaactatcacgcccgatcagccggactacctgctcgccctctggcacagcgccttcgcctctctctatccgtcctcgggctccgcatcgccggacagcgagatcgagatcgtacacaccgaacgcggcgtcgaggtggtcgagcgcagaaacttcaccgtgcccacctatcacgccgtctgggacgccgaggcgcgcgaagaagatgcctcctcgtcggggcttggctttggcattcctgtagctgcccgcgagtctgctcctgcgcatccgcgcgcgcaccagcattgggaagcctcgtatgccagcttaccgctcgatggcagaacctcgctcatcccgcccgtgcccgaggtggctcgtacgccgtcgccgcccacaccgacgcaggagagcatcgacgccgagttgcggtcgcgcgacgcaagtccggcgcagcccatccctgttccggcacccagcatccagcacggcagtgcggccaagaggggcgatgatgacgacagcgatacgtcgcctcagcactactctccgcccaagctctcgtggaatcccgcccacgggcctccgccgaccgggtcgggcgccgcgctgtaccagatgcgcgtccccatcgatgcctactatgcaaacatctgggacgcaggccaaaagacgccgcgcacgctcgccgaacagaaggcggcgttcttcgtcccgcagtcgcagggcgcgcaggatcgcagtggacgccagcgcggcgggccgggatacatcccctcgcagctgcgccgcgaccatgtctttgacaacttgggctcgcacaagccggacgcgagcaaggtcaagcccatctttccctgggagacgcagcagcgtacgccggcggcgcctacgcgcgtctttcccgacgagccgaagcggtcgccaccgcccagtgccgacaccacgccaaagatgggcagcacccagcagggtaacaacggagcttttgcgtcggttgcggcggctccggcagtgtcgaggtcgagagggttgccgtcgaatctgtcgttcgtcaatgcttgggaccaggcgggtgcgattggcaactttgccaatgcatggaatcggcgcgcgaatcccacctcgccgaatcgacgtcgggcggtcgaggcggccaagcgacaggctgcgagggacaacggcgctgcgaggcagactgagccgcgccgggcggaagggcagcgtgccggttcgccccaggcgagctttcgaccggcgtacggggctgagcgtcgagcgagcatggaggaggtgaccgatgcgcgcgacggcgaagcgagcgacagccgcgacggcgacgacgagtcgtcgtccggcgaggaatcgtcgggcaacgaaggtgtctcgcaggtggtggagggagctagagatggcaccccgtcgccgacgaactcgaggcaggcggggtggccgcgtgaagggcctggaagagggtatatgcgcaaggcggagaactcggtgtatgtgcagatgcacgccacgccgcgcagtccgcgcatgacctcgcgcgtgctctcgtacacctcgacggccaccgagggtgaagtgcgcagtggacgggtgtcgggatcgagtactgcgtccgaggcggcagcgagacagcgcgccaaggaccgcattcgtccggacggctggatttcgacgggctcgggaagcggtatgagcagtccgccgtatggcggatggcaccaggcagagatgacggcggcatcgctgcgcgggatccccggcatgcgcgccggacaggcccatgtgcgcaggaggcatgaacctacctcgtcgaacgactcgctctcggaagagtcgcgatccgcctcgcccactgccctcatcgctcagccgctaccagcggtacgaggtgaggtggtgccaccgacgccaccgagcttggaggaaccttttagctcgagccctcgcaatacgcgcgctgaactctcgcagcacgcgcgtacccatctgcacgcaaggagggcccacaactttccccatgcgccccatgcgcagtaggcaggcacttgcacattcatagaataaactcatgtcacgatc

SEQ ID NO: 12681 - DNA, 3255 bp, Oryza sativa
  ref <308>: DATABASE ACCESSION NUMBER: AK110029
  ref <309>: DATABASE ENTRY DATE: 2001-12-06
atcatctcgacgtcggccgagccctgattcggaacggctttctgctcgttcactccgcgaaaaggcctctgccggacaccacactcgagcgctgcggctccagccaccactttggacgcgcacgctactcggttgttgcgcccacttcctctcgtcccacgacgcgcctacgcccacctttcataacgcgcctcaagcagtcagcatcgcctccgcgccacagtgacttcagaccacccaccatctcggctccatcgtcaacactcagtttctgctggtcagataacctactcgtacacgagccgtgaacacattctttcttttgtcctcacccttctgcttcgtctacgtacaacagcgcgccatgagccgcttacttcccgatgctcgctctgcttcggcagtccgctccttctccgcaggctcgcacgcctcgtccaacagcgatgcctcctactcttccaacgcggacgcagcccacacgccttctaccagcccggcgctttcggatcacggtgcgttctcgctagacgctctctcttggaacaagctgcctcgcgcgtatcagccttcctctcctacctcggatccacccaccgactccaagctttcgccgctcgagcttctcgtcaagagaggcaagcaggtccagcaagacatcctcgagcccagcacgcacgatgcaagctcagatcctacctctcaccgcatctatgagcgtgcctcggccctctctcgccgcacctctgtccgaagaccgcctgtccagccgtcgcccgaccccgacgactttgacgatgcccagagcatccgtagcgtcaacctgctctccgagcctggctccagcttctcccgcaacccgcgcacacagacacccacctcacaggattcgcctcccacaccctcctcgtccggcacttcgttcaccgtccaacgcggctacaaagcgacctacgacgaccagttcgattcctacagccccatgcatgccagcgccgacgagcagccgcactcggcccatctgctcagcaacgccttccgcaactcggtcgcctctgacatctcgttcaactccatcaccggcgctagcctcgatacgtccctctcgcgcagagcttccatcgataccgtgcgcagctccgaattcggcgaggacggaaggtggggcagagcgtgggcctcgcgcgccgacgacgaagagagtgcctacgaagagagcgtctacggcgatgagctcgacggcaatgtcggacctggctcaagccacctaccctccagtgtagccgcgtacgacattcagctggacccggatcaagggccatttacgtccggcggtggcctttcgtcggttgcacagcagtggaagctcgaccatgcggctcgtgatccatctcgaagcgcggaaggcacgatgcgaggcgtgcatgcctcgtcgacacccgctatccgagaaatgccgagcaaagaaaaggtcgttagcctcacgagatccattccgccgcctagactgctcgaccagcaccaggccggacactggcagcaacagggcgatcccaggcacagctttgtgcctcaaatcgaatctcacgatggcgacgcagtgaccgcctatcacgacgcatcgcagcacatctacgatcgcactcctgtggcctcggcagatcgtcaccttggccatcgctccacgtcgtcgactgcgacgatcactggcaacgatgcgcgcgagagcaccggaagcccagagagcgcacgcgtctacgtgtatccacccagtccttccggttcggaagcgtcgcgagcgagcggcgcccacgcgcactccagccgcgacccgaaccaccgcagccaacagcgcttctcgtccatgcccaaccccacctcggcgcgcatcgagaccatgtccgccgcatcctcgcccgaccagccgccgcagcacgcgggctcgggcgaagtgaaacgcacgccgctcgcgccgtcggcgctgctgtccaacccgagagtcgcgtcggctggatcactcgagtcgcgtcggctcaagccttcgggccatcctgcggggcgcgcacctccgcctccaccgcctgctgccgcatggagctcgccgagcatgagtggcggcactcccaacggccactcggatcccaaccagtacttccagggcgtggatcggcccatcatcgggcgcaagcgcgcggaggccatcgcacgcgccgacgggcgcgagagcatggtgtcggatctggacgtcgagacgctgcgtctggacggcagcagccgacgcgacagctcgagcaccatcggcagtgtcatgacctcgcgcatgtcgatcggcagcgtggcgcacgacccgctggtgctgcagtcggccaactggcaagagcattcgcctatcccaccgcaagtggcctccccacgcacgcgcggcgcgccgagtatgcaggccaaggcttcgcacgcgtcgttccgctcgctgcagcccgcccaggaggcgtacagccccgtagccggtgctggcggccccaaccggtcatcgatgctgcgcaatgccaagtcgagcaacgcgttgggatcggtcgaaatgcaggcgagcgcgtcggcaccccccgtcgggctgggtgtaagcggcgtccaatcgactccacgaccgcgtacatcgcctgcagtcgacacacgcacgggcccgtcgtcggcggaagactttctctcgtcgggcatcacgcaccacgagcaaggtgatcttgcgcgttctgcgttctactttgagcgatcggccaaggtggatggcggatgcgtggtggggatgtgcatgtttggcatggcgctgcgcgaggggtggggcgcgcgcaaggatccggcgaaagggttcacgtagatccagaaggcggcggcgcgtgcgggcgagatgatggccaacacttcgacgcccaagagcgacgccgagctgcgcgcgatcaagagcgagctcaagctgagcgtgtacgagctgggcaagtgcttctgctacggctggggcgtcaagatggacaagcccatggcgctcgagtactttgagctggcggccaagctcggcgatgcggatgcgcaggccgaggcaggagcgctgtacgccgcgggcaagggatgcaagaaggacctcaaaaaggcagccatgtactaccgcatggccgagcagggcgggtacgataccgtgggcctcagctggatccacaaggacaagtacaagtagacgaatgcatctgccctttttcctttcgc

SEQ ID NO: 12682 - DNA, 3646 bp, Oryza sativa
  ref <308>: DATABASE ACCESSION NUMBER: AK110030
  ref <309>: DATABASE ENTRY DATE: 2001-12-06
tcacacacctcaacacaccaccacacaacgcaacacacaccgcacacagggcagagcaacaagacagaggcacgggctgtacaaacagtgcactgcttctgcgccctcgcccctcacggcgtgctctgaccacgagcacggcgagcagccgtctccacgcctgcgcattcaaagcctctcgccatgtcaaccacgacgagagagcctagccgcagcagcaagagcggcaagagtcaagcctccatcaccgtcgcagcagcagcccgcaagaccatcggcttcgtcggcagcatctcactgctcgtcaacaatgttacaggcggctccatggtggtgctgcccaacacgttccaccaggcaggctgggtactgcccatcctgtgctgcttgggtgtggcactactggcgtgcgtgtgcggcgtgttgttgatcgaagccatgacgttggtgccgggcaacaatcgcttccagaagcgactggaatacaccaatctcgccaatctgctgctgccacgatggctctactggatcgtgcagctcttctaccagctgtccaccctggcgcagaacgtgtccatgatcatccagtccgtacaagtgatggatttcacattggtggcgctcacgggctacacatgcgccctgcctcagattgcacccagcttcaccttccgctgctcatatccgggcggcttcaccagcgagggcatcaacccgttcggcgactggtacttggtgtcgctgggctggtgggtaacagccatcctggtgctcccgctgggtttcatcaacctggacgacaacgacgccgtgcagcaaggcggcttcatcgcgctactaagcatcgtcgctgtgtggtgcggactcagtgtcacacaaactggcaatggcgccgtgccgccgccagccttcggtggaaactatgacacgctcatgggttccatcctgttcaactacgccatcggctacacgttgccctcatgggtgaacgagaagaagccttccgtgcccatcgtgcgttcgctgccgtcgtcgctgctgctctcctcctgcttgttcatcgtgctgggtttgtgcggcgccatcggtttccccccgccatccaattcgcagacgctgctgaaccagatctacaacagtggcagcaagcttggtgccatcaccttctacctcttccctgcctgtgtcaatctcaccaccatccctgtgaactccatcatgcagcgctacaacctggaggaggctggtgtgtgcgggcgcaaatgggccacgttcttcggagtggtgtcgccgtggctcatcgccatccctctctacacgggcagaggatatgagacgctcgtcacgtggagcggactgctgctcatcagcagtgtcaattttgtactgccacccgtgttctatctgctggcgctcaagaaatacggatcgggccccactgccatgcgcaccgtgcacgaggaagcgcgcgcgtcgcagcacagcgccggcaacagtgagcccacttcgcgcaccagccgccgccgctcagtgctgtcgcgcgggccgaacggcacgctgggtcgctcgcacacgcacacgcagatggatggcgccagcggcgtgcgccgcatgagcacgggccatgtgctcgccagcgtgcggggatccaatgccgcagtgttcgtcgccgtgcgggagcaatccactgaaccgccgccggagctgcctgagctcatgcaggaggagggcaaacagcaacagcagcagcaagggacctggcttgcacaggccagtttccgtcccgtctgctcctcgccatcgctggagggtccaactgctgctgcagtggcagcggaggatgctgtgcttccgctggccgcccccactgatgccgtcactgctgctgcgatcgcgaagagcacgctagcggagccggtcatggcgcctgccccgcctctgacttcggtcgcagcgcaggaggaaggcggagcagtggcagcagcagcagcagccatatcagaaacacgcgtgttgcccgtggcccaagaggaggccggcgacgatgatgagcaagatgtcatcgcgctcccgctcaccaccaccaccaccaccgctgcagcaatggcaccaccagtgggagtgagcaacaggccgccgctgccagtgccagtgggcgggcttgcagtgcctggatggtcccccgcgcagcacctgcagtccttgcgtgcgcagcggctatcggtggtgggtgcgcccgtctcagctgaggagaaaactgccactgttgcgcccatcgatgaccaggagagctttgtcgccacagctgcatctgtgcagtctgacaccgtcactgcgctgcacagtgccgctatcgtcgctgctgcaggcgctgaggatgtcaacccgcagcatgccgctgctgcgcctgtggtgggcaccgcagtggagccggtgactgccgcgtttttggctgctgcagtggctggcaactcaagcaacgtggtgtcgcccacgtccggattgctgcgtcaggcctcttccatgggcggcggcggcgaggccggcggcggcgacggggaggaagcagccgcaacaacggaggatgtgctcgggttgccggcgcatgtcgatgaggaggagctggcgcagctggagtgggagcagcgccaggcggagaaagaggcggcgcgccgtgcgcgcgtgttgcgcaagctgcgcctccgccgtgaccaggccgccgcactggctgccaaccctgagcaggtccacgtagagcgcgagttccagatcgtcattccggtgcgcatggctcccccacgtgaatggcgcacacagcccctgcagctgctcagctggctgctgctgctgccctggcacgtgctgttccgctacacggtgccccacgcctcccgtgccgggcgctggaaccccctacagcgctggctgctgcttccggtgagtgtgctcgcttggacatgcctgttatgcttctgcctggtgtggagcagtgtggtggtggcgcgtgtgaccggtctccacgagttggtgctcggggtgctggtgttgggggtcggggtgcgtgtgccaagcctgttgagcgagctgcaagcctaccgcgagcagcgcggagatctcaatcgcctcttcgcgcattccgtgtgggcgctgctgctgtgtctgcccctgccctggatcctgacgggtggcggcgccgcgggcgtatggggcacacatatcatctactccgcttccctgccgatcattgcactcacctccttcctgctgacggccctgctgctgatcctgctcaacgcctaccgttggttcgtgctgaagccggtggctctggcagccgccctcttcgtcatcatcacgatcctcgtatgcttcctgctcgactatggagtcgtcatgacactcactccacccttctgcggacaggcacaagcggactgatgatggaaggaggacgagatgcaagcgcaccaccgccactaccaccagccacacacacacacatacacacacaacacagaaccaatcagctctcacttcccaaggctatttgaaagccgcatcacattgtttttgccgttcgagagcgaaaagctgtctctttctctctctctctctctctcatacatttcagctagttatttcttcc

SEQ ID NO: 12683 - DNA, 3637 bp, Oryza sativa
  ref <308>: DATABASE ACCESSION NUMBER: AK110031
  ref <309>: DATABASE ENTRY DATE: 2001-12-06
aacggtgcggatgcgggatcgctgctgctgagtcctttgagtccctttccttgacaccaccacaccacctctgtacagcgtccgccatcgctcggaacgtcgagcaacgtctgtctccctttggatcggatcagccccgactctttcgaccccaccccgctgctcgacttagcattcgaagcagccgaagtgcgaaaactcttccgctgcacccccgcctcatctgtctcgagcagggggctgcgattccgtgtcctttctcacggccgcagttccctctctcctgctggccagaccagatcgaaacgtgatccgcgcaaatcaccactctttccacaatgcggccctttgcatcttccaaaaccggctcctcgaagcgtcaaatcgtctctctgttggctaccttctgcctcgtctcggccgccgctagtgcttcactccaaggcgcccgcatcgagctctcacagccgccaagcgagcgccagctctcatcctacgatggccgtgcagaaccgcgctacatccgtgagctgcctctgagcccactcctcaagagacacggtgacgacgagcacgaagacgatgccgatgaggagcaaaagtacgatgcacacacgcacctcgaaccggagcaccacgggatggaacacgacgatggaacttccatggatcaccaggacccgcatactcacgcccacgatgacgccagccacggacatgaagatgtagcgacagcagcggcggcgacacaacactcgcacacccacgagcacggtcatggcgcccatagcatgcacatggacggccccagcccagattcgatccctgacgcctcaatcgcaggctccgagctgcgcgagctcccggtatggcattcgcatgggggccacggacactcgcacggctcgggtcccgtacgcgaaaagctcaacgagacgctccttttccgcgccaagggccccgacccgctcagctacatcgagtgggactttgcctacggtgtcggctcgctcgcccagctccagcgcttcactgccgatgccgacgtcctcgccggcacagaaaagatgggcgtcgtcgatggacgatggaggaagctctttgacgagaacgatgcggatcaacgcaaggccatcgctcaggacattgcctcgcgcattgaggatgcccagggccaagagcccggccgacaccgtggtctgctcgtccttcacgtcgtgacggccatcgtcagctgctttgtcctgctgcccatggcgctcgtgctgcgcgctgcccactcgtctctcgctccccccgtctcgctcctctacctcgctcttctcggcggctccatgttcatctcgatcatctacaaggcgctcacgcccagactctacccggacaacgcgcacggctccatgggctgggccatcctgtggatctcgctcatcacgctcggatcggacgtcttccgtctggttggccagatctggtccgcagtaggcgcgctccgctcgcacaggcgcgctcagtccaatgcgtggcttcccaccggcagtgttgccaacgccacaggaggtccgcagtcgtggagggatgttgtcggcacgatgctcggccgaggacagagccacaatctgaacagcgagagctacgatgcgcttgaagaggaggctatgctttctgaagaggcgcagagcgacgcgcacgagctcgacgtcgaaaagcacatgcaccgccatacggccgcgccgaggcgaagcggcttcagctcgcgatcaggatcaggctcgggctcgccgcaccgcgtccatttcgacgaggacggagaggcagggcaccgcacgcatggtggcagcgccgagtcgctcgtggagccagtcaactgggtcagcagcggcagcaccgctgtgagcagtcccgaaggcgggcgccgcaacgaccttaccggcggtaacagccacctgggagccgatcgtctggtggcttcgcctacgaccacggcgtgcaacacgcctcgcaactcgatcttcggggccgactcgactctgcttcccccgctcagcctcaagtcggtctcgctgtggcgcaagcaggctcacgacgaccaagccggcgcgccccaagattcaagccatcccgaggccatgggctacccggccacgcagccgcgaagtagtcgccttgacaccttccgaaccgtgctgcgatacgcgcgcgttgtggcggcgcgttcgctgcccatccttgcctttgcaacctcgtacaccggtctggccgtctacacgggctcctgccgctcgggctacaagaacgtgtgtctggcgcacggcatcaagggcggcatcttcttctggtttggactgctcacattcggacgctatctgggcgcgtatgccgactgcggatgggcgtggaacaagcgacccagtgcagcagccggcgtgcggggaggcggcagcagccagcgatcggcagcatggcgccgcagcatgcccagcgccgaattcgtcgagtgtctggtgattttcatctacggcgcttccaatacctggatggagcgcttcggagcgcagccgggcgacccgtatacgatcaagcagatccagcacatttcgattgcggtcatgttctggttcgctgggctgatgggcatgctgctcgagacgcgctttattcgcaacatgctttcgttcccgatcgcgtaccatcacgtggcggctgtgccgctgcgcgaggctcgtcgtcgtcacaatgcatcgcgcatgcgcggtggtggtgctgggagaggcgcacgtgtcgggtacgacgaggcggacgaggagctcgagctgctggtcgaggcgcagacgcagccggcgtcgtactctgcgtcgttcaacccgttccctgcgctggtgatcggcgtgacgggcgtggcgatggcggcgcaccaccaggactacgtgtacgaggtgcagatccacatgctgtggggcgagctgctggctggctttgcggtgctgcgatgcctgacgtacttcctgctgtggctgcgaccgcccacggcgtcggtgctgccctcgcgtcctcccaccgaggcgctggccgcattttcgctgtgctgcggagggctggtgttcatgctgagcagcgaggaagtgtcgtttgctgcgatgcgcagcggctacggcgactttatggccatcctcaatgtggcggtggcggcggtggcgctgctcttctgctggacgaccgtgctgatgatgctcaagggctgggcggtgcgccgcgaggtcaagaggagcgtgcacgtcgccgaagtagtgcctgacctcggcgcaaacgctctgcaactcaacgtggctgccaacgaggatacccagcccaggcacatgcgcgcgagcgtcgctggccgaaatgcggcggcagcacccgtcgctaccactgccactgccgacccagtctttgtgctcgaggatgaggaggatgactagtctcacagaggatcaagtgctcattcttcgagcccacacaatattcacctttcccatttgataccaggtcttctgaccaccctcttacccggcgttgcgctttggcacctcgttggagcctttgcagcgcgcacatatgatatgccccttctctaatctagtgtatgcttttgacccgc

SEQ ID NO: 12684 - DNA, 1843 bp, Oryza sativa
  ref <308>: DATABASE ACCESSION NUMBER: AK110032
  ref <309>: DATABASE ENTRY DATE: 2001-12-06
gttgcaagctcaccatcacctcccttttacaatcacgctggccatcgtcatccgatccacgcatttctgctacgcacgcatctccacccatcggcttcaccgtgcgtcgccagcaaagaagcaaaagagccgtgattcgttgcgtcgcgcattcccgacccaccttgcaaaccctatcttgcgtagggtagcatcaagcgcgcgcgccttcatccgacacccacccggcttcgtctcgctccatctctttctctcagatcaaagcagagctcggacgcacgcatccatgccgcaacaacgcagcggcgcgcaatcgcccaatgcagccgtctacaggcgccagtctcctagcgacacgaggctgaccaccagctccaccacctcctctacgccttcctcgaccaccacctcttccaccccctcgtccacctcgactacatcctcgatccccatcaccacctccacctcctcctcggcagccccgaccacttcgtccaccatcccctcgacctcctcggctcttcccaccacctcgtcttccatcgcatccatcacctcggcctccaccgcctcatccacccccatccccgtcgtcaccgtcacctacacaagcacaggcaccgatggcgccgtcgtcaccggcgtaagcacctcgtccaatccaaccgccacgagcggaaggagctccggctcctccagcggctccagccccaacctcggcgccatcaacggaggcgtcgctggcggcgtcgcaggcctcatcatcctcgtctggctgatcctgctcccactccgcaagcgcgccaaaaaggcaaaggaggtcgagtggctcacctttggccaggagaacgaccacgtcaacgagtcgtccgcagaggccgtctacggtcgcggcgccggtggcggcagcggcggcagcggcgagggcaagatgggcggatccgtcgccaacgtcaacgagatccagatggacgacatggaacacgaaatggcacagcagccctaccactaccagaacgtcgacaatggcgccggctgggccgcagcaggtgcagcaggtgcggcaggcgcaggtgcatacgcgcactcgcatgcgcagcacgaccagtacggcaacgcgcacgacggctacgacgcctactaccacgcgcagcagcagggctacggcggaccgcagtaccagcagtacgccatgcagtcgcaccagggctgggcggggcagccgcaggtggcctacccgtccgaggcatggggcgccgctccgggctacacgagccccgtccagtcgcagacgcacgccaacgccggcctgcagcacagcctctcggtcggatccaccaaggtgggcggcgcgccgcgaaccgcgtcggcgggcggcggatcgcagtcgggacacgccaagggctcgcaggagggccacggcggcagccagtacggcggcggctacacttctccgccgctgggcgcgcagtcgccgcagcaattcccgcagcactaccagggccaccccgccgcatcgtcgccgccgcagcacgcacagtactaccacggccagcaacagccgcagcagcacgaccagcagcaggcgtactatgccgaccagcagcagcacgaccagcgctcgggctcgcctgcatcaggacatggcgctggcggtcttcacctcgccaacccctgagcgggcgtcggcatctgcatttttctcctctctgacgccatcagatgtggctttgggacattcctttcagtgtcggcgccagttacacgcttttacactcgttccccgttcttgttgctcgttttcttgtctgcgcacattctcaatgcatacggtctttcatcg

SEQ ID NO: 12685 - DNA, 3789 bp, Oryza sativa
  ref <308>: DATABASE ACCESSION NUMBER: AK110033
  ref <309>: DATABASE ENTRY DATE: 2001-12-06
gacgcggcagcgggtcgcggaactttcgcaagacgttatcgataccatcacgccgcttctcgactcgaggtatggcgcgcaagtcggcaaacccagcgtccgagagacgcccatctacatgcattccaagtcgtacagcgactggctgcagagctggacgagtcgtctcatcgcaaagacggtcgagaggcacgaggcgtctgtcgcggcgtcgactgctgtggggggcatcaacgcaggtgctctcaagggagccgaggttgcatccaccatctttggcgtctttcgcgtcgctattcgctcgcacgatgtcggcatcgcacgccacctgcttccacacttggtgctgcactcgatcatttccggcgatgtgacggaccgcgaagccattgtcgacgagatgcagacgatcctgcaggatcaggtcgagagccggacgagctacgacccggagcgcaagctgctgacggcgcagacgctcttcaccatcatggaccatatcggagtgtggatgcgacgcaagcggcaggatctcgcacgcacctcgcgtcggccgaggatcgctcaaggtggggaagacctgctggtcggagtcgagtcgactatgctgcgtatcccccaagagctgttggcacaggcgtcgctgcagtgcaaagcatactcgcgtgcgctgctcaactttgagcttcgagtgcgaacaatgcgggtccaaggcaagggcgatcatgacttgcagagctactacgaaaacatgcaccggatctatgccaacctcgacgagccggacggtatggaaggcatctcgacccgggtcatttctccgtcgctcgagcatcaaatccgcgagcacgagagcacgggtcgatggacctcggcacaaagctgttgggaggtcgaattgcagcagcggcccaacgatccggagctccatctcggcttgctccgctgcctccgcaacttgggccattacgacaccatgcgcactcatattcgcggcgccctgagcgcacacccagagtgggaggatctgctcgacgctttccgagtggagggtgcatgcatcctcggcgactgggacgaggtggaagcgcgcacgcagcgcagccaagccaaaagcgctgaacactcgatcggtcgagcgctgctggccatgcggcagagcgatgccgacatgtttggcaacgtgctggtccaagcacgccaggatctgggcaagccgttggtggcggcgggtacagcatcctacccgtctgtgcacgactctgtcttgcacctgcacatgctgcaagagctcgagatgatccgatcgcacgcgggtaggcacggcggcagtcgagcggtcacccgagccaacctctccgacaccgtgtccgatctgaacaaatctctgacggcacgtctcaacgccacgctgccttccttccgaacgcaagagccgctgctgagtctgcggaggacggccttcgcagcgctgcgatcgtcgctcggtggcggcaacgaggtgggcgaagcgtggattgccacggccaagatcgctcgccgagccggtcacatgcagacggcctattcggcgacactgcaagcgacgcagaaccaggcgacgtttgcgtttgtgcagcgcgtcaagatcctcgctaaggaggagcagacgcatgctgcgatccgcgatctggtcaactcgctcaacacgctcgtcagcagcttcaagccaacagagcacggggatacggccaggtcgagcgtgatcgagctgcaggccacggacgcggatgggaggacggtgcggatcgatcgggatgcctatgccaaggcgtgcccgctgcgggcgcggctgcaggactcgacgttccggtacacggccaacgagattcttgatcgatacaaggaggccgccaaggagcaacacgactcggagaagatgtggtaccatctcggacacttccaagacacgcacgagggcctgcttccgaacatggcgatgcagcgctacaacgtgtgccgggccttcctgcgatcggctcaggtgggcaccaagttcttctaccgcaccctgccgagggtgctgaccatctggatggacatggccgccgacgatcagatcctcaacttcaacaagaagggccccaccgccgataccgagctggcgcaaaagttcgacgcgtttgcgcagctcaacatcctgatgaagaggtacagccgcaagctcaagccgttccagtggctcgccgtgtttccgcagctggtcgcgcgcattgtgcagaagaacgaggatgcatggatggtgctgcaggacatgatcctgcaggtgctgctcgcctacccacagcagtccatgtggtcgatggtggcgggcgccagctcgaaggacgccgagaggaagcgacggtacaacgagatcatccaaaggctgggtagcaagggcggcgcgagccacaaggaggtggtcaaggtggtggcgtcgtcgcaacgactggccaaggagctgctgcggctgtgcgaccacagcgtaagcaagaacgagacggtgctgagcatggacaagctgttccccggcttgctcgaggtggcaggcacgtcggagctgctgctgccgctgcagagctcgatgacggtgctgcttccgtcgaaccatctgatctcggagatgcatcgaccgttcccgtcgaatctgccgacgatccggacgtttgacgacacgatcgaggtgatgaacagtctgcagaagccgcgcaagctgatgatcgtggcgagcgatggcaatcgctatccgttcctgtgcagcccaaggacgatctgcgcaaggacgcgcggctgatggagtttgactcgatgatcaacaagctgctgcagagccagcccgagtcgcgtaagcgcaagctgtacgtgcggacgtatgcggtgctcatcctgaacgaggagcacggcctgatcgagtgggtgccgcatacggtgggcttccgacacatcctcaccaagctgtacaacgccaaggggatgcagatctacaacagcgaggtcaagacgcacatggacgaggcacgcatctcgtcggatgcacggacgaccgagaagatcttccaggacaaggtgctggccaagttcccgcccgtcttccacgagtggttcctggcgacgtttccggatccgacggcgtggctgcaggcgcgctcggcgtatgcgcggacggcggcggtcatgtcgatggtgggctttgtgctcggactgggcgaccggcacggcgagaacattctgtttgactcgaacagcggcgatacggtgcacgtggatctcaactgtctcttcgacaagggtcagcgcttcgagattccggagcgggtgccgttccggctgacgcagaacatggtggatgcgatgggtgtgacgggatgcgacggggtcttccgcaagagcgccgagatcacgatgagcatcctgcgcgacaaccgcgactcgctgatgagcgtgctcgaggccatggtgcacgatccgctgggcgaatggagcggaccggacgagcggcatcggagcaaacactcgtcgtcgaagcggcaagacccacgtgtggtcgaggcgcgtcgcgcgctggatcccgcggcgcacaagctggacggacgcatctatcggctgggctcgcgcgagccgacgccgccgtacacgaccaacaacctggtggacgcgctgatcaaggaggccacgagctcggtcaatctagccaagatgtacatcggctggagcagctggctatagcgcgcacacatgcacatgcaaatgaactcgtagcatcaagcg

SEQ ID NO: 12686 - DNA, 3486 bp, Oryza sativa
  ref <308>: DATABASE ACCESSION NUMBER: AK110034
  ref <309>: DATABASE ENTRY DATE: 2001-12-06
aataaagcttgttttggagtgcagcttttcttcactaagtgaactgtgctgtgctgctgatacgcgacctatatcagacttgctatatctgaagccaggacacagatgtttctgcttcatgatttgtctaatgcaacaacaccaaaggggctcactgtggtggcagccatgttaggacgacagggctcctgacaatgtggacgccgtcgctccaggacagggctccgaactccggtgccttctgggcggccttggttgtcactgtaaccttatagctaagcttctggtttgtgcttacgaagtgcagggtgttcggttcgacgatgacatcggcgcccttgaacttggtgaccttgacatggtacgtcgaagatggaggaccaacgttcgtgacagtgcggcgcaccgtcagcgccttggatggctggtcggcgaagacgactgagatggccggatagttgaggtcgctggcggaactgaaggtgtgcctgcatgtcatgttggagttcttggtgaaggtcctgagctgcatcggcgtcatgtgctgcgtgcagaggaactccaggtagtcggcctggccaatgtcgtagaccaggccaggggtgagagctcgcaccgggtgtatgtgccccgctccgtgctcgaacggcgtcgacgccttgccggtcgccgcgtccttcatcggccggtacgtgttgtcgtgcacgtacgcggtggtcatcagcgcggacttgatctgtgctgggctccagtccgggtggctcgccttgatcagcgcggccacgccggcgacgtgcgggcacgacatggacgtccccgacaggatgttgaacccgaggcggcggctgtcgctggacaagctcgacgggctggcgtcgccgctccatgcggccaagatgttcacgccgggcgcgacgacgtccggcttgaggatctccagagtcaggatgtttggtccccgggacgagaacgcggcgaccaccggcgacggccggatgccgagtttggttccgccgaagctgagcgtcgcggtcggttttggggcgctcttgctgtagctcttggcggcaatgccttccgcctcgccgactgccacggccggcagcaggtggctgtcggcgaccagctcctcgccgtttgccgcggtgttggcaagtatcatgccgatgccgccggcttccttgacaacctgacccttctgcacccgaggactgatgccgcggtcacagatcactatcttcccggagacgtcgtgcggctgcagcgtcccctcgaggcacagagaacgggggtccggcatgctggaattgccgcccaagtagaccaccggatactgctcctgcggcgacagatttcgcaggcctttgtaaagcgagacgccggtgatgttcgcgccgttgccgagcgtcaccgtggccgggaagtcacggtccatggtgctcgcgcccaccgtggttatccacggcgacaggttggtgaggcttatcaggtcaggcccggcgttgccggccgagcaggcgacgaacacgcccatctgcatggccccgaacgacgctatggacaagctgtcgaggtagtaccgggaggcgccacccccgagggagatggagagcacgtcgacgccgtccgacacggcgcgatcgacggccgccaggatgtcggagctgaagcaccctcccgcccagcacaccttgtaggccgcgacgcgggcgcggggcgccatgccacgggcgacgccgccggcgtagccgtacaggttggcgtcctgcacgggcgagcccgcggcggtggcggcggtgtgcgtgccgtgcccgtcctggtcgcgcggggacttgagctcggtcgtctcgttgatgggccccgacgaggcctcgtagccgttgtagaagatgcgcgccccgacgatcttgcggttgcagttcgccgtggtgaagccgcggccggtctggcagaggcctttccacttggccggcacggggccgaggcccttgtcgctaaagctggggctctccggccatatgccggtgtcgagcacgccgacgacgacgtcgtggtcggcgaggctgtcggaccatatcctgttgctgacctccgggccaatgccgaggaagtccgggctcctggtggtgtgcagctgcaacaccgtctccgggatcacggccagcacgccgtccgcctcggccatcagctcggcttcctcctcgtcgagctgagccgcgaagccatggaatgccgtctcgtagttgtagataatcctcgtggaagcatcatcctcttcatcttccagctgcgaagagctcaccgacttcaccgtggaagcgtaccactcatggtaaaaatcgaacgagctcggcatctcagacgccgccatctgcacgatgtaagtcttgggagttggcgcgcaagcagagaggcttgcttggagaagaacagtcaccaggcacagcgccggaaccttccatctcgccttgcaaaaatccatggagaagagaaagggagaataatttgatagatagatgcaaaggagcttttgggagcaaagcttggatttgggggcagatcaagctctgctgcttatgtacactccactctccagcttaacatgcttccagtgagctgcgtggagtgtggactgtggtctctgctcgtggagtggaaactggaaagcgagaagtgtaataaaatgaggtggttgcttctgtcccgcattgaagtgagaattcattttggcgacgcggtgggttttgcttcgagacctatggttaggtttgcttgtcacattcctccatttcctggagatatttcaggagggacacttgacccttgtgtgctctactccactacaaattcgactccatctgcaaggttgaaaaacattaaagccatggtgatgctgctgctacttcctaccagctgccaaacggcgcacatccgcacatagagggttaacgcattgattcatttactgtggacggtagctccggttcatggaagcatttcatgtgcttgacctttattgtgcctactatcaatgacagtggctctacagtggtactgaaagaagactgctctcgacagcgatgccatgttgccatctactcccacaaaagatgttaatgcagctggtacgtttttagatggaatgtgaatgcatgaacggatcgtaccacgattacggtaatccgggactggtgaaagcctgaagatgctgcttgcttccagcaaaatgtctttctccatgagcttccagcaaaatgtctttctccatgagcctgaagaaagacagagcatgcatggcctcgttttatcaggaggcgccgtcaaattaagttgtactaatcgaaaggagaatcggatagacttctgattggatagcacttgaactgtgttggactgccagtctgccacatgaacacgactagcgtgtccatgtctatgattgatgggtttatctgacatcaagttaatcctctgtgccttcacgtt

SEQ ID NO: 12687 - DNA, 2747 bp, Oryza sativa
  ref <308>: DATABASE ACCESSION NUMBER: AK110035
  ref <309>: DATABASE ENTRY DATE: 2001-12-06
ctactggctcagctacttcccgcccatcgccaaggccgactgcaccgccttcggctcgcgcatcgactggcgccgcgccttcatcaccaccgacgtcaacccgtactacgactcgtttgtgcgctggcagatgaacaagctgcacgccatgaacaagatcaagttcggcgagcgctacaccatctactcgcccaaggacggccagccctgcatggaccacgaccgctccgacggcgagggcctcggcccgcaggagtacaccggcctcaagatggagctcgtccagtggggcgcgctcgccgcccccgagctcgacgcaaagctgcagggcaagaacgtcttctttgtcgccgccacgctgcgtcccgagaccatgtacggccagaccaactgctacgtcggccccaccatcgagtacggcgccttccagatcaacgactcggacgtcttcatctgcaccgagcgcgccgcacgcaacatggccttccagggcatcaccaaggagcgcggcgaggtcaagcagctcgcctcgatcaagggctcgcagctgctcggcaccaagatcaaggcgccctttggcctgtacccggaggtgtacgtgctgcccatggagacggtgctcgccaccaaaggtacgggcgtcgtcacctcggtgccctcggactcgcccgacgactacgccacgctcatggatctgcgcaagaaggccgagtactacaagatcgacccgcagtgggctgcatttgagccgatccccgtgatccgcacgccggcgtacggcgacatgaccgccgagacgctggtcaagcagctcaagatccagagtgccaaggacaagaaccggctggccgaggccaaggagctggcgtacaaggagggcttctacaacggcaccatgctcgtcggctcgtacaagggcgaggcggtgcaggaggccaagaacaaggtgcgcgacgagatgattcgcgcgaatctggcgtttgcctacgccgagcccgagggcaagatcatcagccgttcggcggacgagtgcgtcgtggcgctgtgcgaccagtggtacatggactacggcgaggagtcgtggagggcgcaggcgagcaagctgatcgcgcagatgaacacctacggctccgaggtgcgcaacgccttcgagggcaccatcgactggctcaagcagtgggcgtgtgcgcgctcgtacgttctcggctccaagctgccctgggatccgcagtacctggtggaatcgctgagcgactcgaccatctacatgtcctactacaccatcgcgcaccacctccagggcggcgttgcggacggtagccaggtgggccccattggcatcaaggccgacgagctgacggacgaggtgtgggactacattctgggcgatgctgcgttcccggccgactcgagcgtgccccaggccaaggccgaggtgcttcgtcgcgagttccgctacttttaccctatggatctgcgctcgtcgggcaaggacctcatcccgaaccacctcaccttctgcgtgtacgtgcactctgcgctcttccccgagcaccactggcccaaggcggtgcgtgccaacggccacctcatgctcaacggcaaaaagatgtccaagtcgacgggcaactcgctcagcctgcgccagtcggtcgagaaattcggtgcggacgccacgcgactctcgctcgccgacgcgggcgatggcatcgaggatgccaactttgaggagaagacggcgaatgccaacatcctgcgtctgcacacgctcatcgagtggtgcaccgaagtggtgcagaacaagagtaagcttcgctcgggcccgaaggatacgttctgggaccgctcgttcgagaaccagatgaaccagctggtgcagctgaccaacgaggcgtacgaaaaggcgctgtacaaggacgccaccaagtacggtttctacgagctgcagacggcgcgcgatctgtaccgcgaggctacggcggacgtggggatgcatgtggatctggtgctgcgctggatccgcacgcaggcgctgctcatcacgcccattgcgccgcactttgccgaacacgtgtggagcaagctgctgggcgagggcacgtcggtgcagactgcgcgctggcccgcggctgggccggtggaccattcgatcgccgaggcgctcgcgtacgtgtccgggacggtcaagacggtgcgcgatgccgagatcctgctcaccaagaaggccaagggcaagaacgcggcgccggtcaagtacaacgaccgcgcacccaagcagtgccgcatgtttgtcgccaagaacttccccgcctggcaggacaggtgcgtgtctctcgtccaggcgcactacaaccccgacacgggcgcattcgatgacaaggcgatccgcgaacagctcgccaaggacggcatgctcaaggacaagaaggtgatgaactttatcgtcaccttcaagaagcgcatcgccgactttggcgcccagaccgcgttcaacaggctgctgcccttcgacgagatcgccacgctgcgtgctgctgcgggctactttaggaagagcatgcactttagccacatccacatctaccagatcgaagacaaagatagctacaaggacgtcgatgtcgacgagaaggtgctcgaggcggccgagccgggtcagccctcgtttgcgttcttcaacgtggaggcctagaccgtcgcacctcccccccttccttacgagagcaacacaatcaagtccccccttc

SEQ ID NO: 12688 - DNA, 3624 bp, Oryza sativa
  ref <308>: DATABASE ACCESSION NUMBER: AK110036
  ref <309>: DATABASE ENTRY DATE: 2001-12-06
atcccggcctgtgtgtcttcaagcagcgtcgatacaccaccaccaccaccactctacccccttagacggcttgctgcctccctttcgcggccctagcttccgtttcgtctttacgctcgtcttgcctcgccgatccaccaccactcttctttctgctcgatcaccaggcaacgcgcattctcacaaggcaaaacttcacttctgaacgatacccgccttccaaacactttccctcacacaaaaccatacatcatgtctggcgcatctcaggcccttgaaggcctctacaaggccccctccgccgaggagtgctacgtcgctgccgagcagctcgccgaatacgtcaacagcaccagcctccccgtgcttcagtccgaaggcgtcctcgacagcctcgtcaaggcttccaagaacaagaagagcggctacgagcgcgaggccgccgccatcggcctcgacgccatctttgtcaaggtcgccggcaagaacgctcccagcccgctcggcgcagagccatggctcctcgacaccctccccgccatcctcgagctctacgcagacaagggtgacgtcgtccgccaggctgcagagaccgccgccagctcgctcctcgccctcgtgccccccgaggccgcacccgagttcctcaccgtcctctacgaggtcctcggctccggcagcgcaaagtggcaggccaaggtcggcgccctcaagctcatcggccgtctcagcgccaccgccagcgagcagatcggagacgagctcgtcgaactcatcccctacctcaccagggccatgcacgagaccaaggcagagatctccaagcaggcccgcaagaccgccatcaaggtctgcgaggcgtgcctcgacaacaaggacatccgtcccttcatccccgacctcgtcggctgcatggcccagcccgacgccgtgcccgagtgcatcaagaagctctcgggcaccacctttgtcgccgaagtcaccggccccgcgctcgccgtcatggtgcctctgctcgcccgtgcgctcaacgagcgtagccagaacgtagagcgccaggccgtcgtcgtcgtcgacaacctctgcaagctcgtgcgcgacccgcacgaggccgccaaattcctccccgaactcactcccggtgtcgagcgaatcgagaagggcgccagcttccccgaggtccgcgagcacgccaagagcgccctcgacacccttactgccgccaccgccgccgtcgacgctagcgctgccaccgaggaccccaagaaggtctttgctcagcagtgcgcagccgccctcgacgccatcctcgccgctgttcaggcttacgtccccgaggagcacgccaacctcaagagcgatgccttcgccatgaccggtctcaactacctctccaagtccatcgctcgcctcgccaacaagcgcatccttcacaccagcgcttgggaggaggtgtacgtgctgccctacctgcgtcgcgtctgcagggacgacgacgccgccaagaccgccactgccgacctgcgcaagacctacatcgagctcgacaaggcgcgcttcggcaactccgaagaggaggacgacgacgaggcgggcgagtgcctctgccgcaccgagttctcgctcgcctacggtggtctgctgctcctcaaccacaccaccctcaagctctaccgcggccaccgctacggcatcgtcgccgccaacggaagcggcaaatctacgctgctcaaggccatgcgcgacggcaaggtcgagggctacccgtcccaggacgaggtgcgcaccctcatggtggagcacagcctgcagggcgaggacggctcgacgcccatcatcgactttatcgccaacgacaagaagctcgtgggcaagacgcgcgagcaggtggccgagaagctgcgcgaggtcggcttcgacgacgagaagcagaagaaccccgtctcctcgctctccggtggttggaagatgaagctcgagctggcgcgtgccatgctttccgatgccgtcgtctacctgctcgacgagccgaccaaccatctggacgtgcagtcgatcgcatggctcgagaacttcctcgtgaccaacaagcagatcaccgtggtcaccgtgtcgcacgactcgggcttcctcgacaacatctgcaccgacatcatccactacgagaagaagaagctgcgctactacaagggcaacctctccgactttgtggccaccaagcccgaggccaaggcgtactactcgctcgccgccaccaccgtcaagttctccttcccgccccccggctcgctcatgggcgtgcgctccaacacgcgcaccatcctcaagatgtccaactgcaccttcacctacccgggcatgaccaagccttcgctgcacgacacgtcgtgtgccatcagcctgtcgagtcgcgtgggtgtgctcggccccaacggtgccggtaagagtacgctgatcaaggtgctcaccggcgagacggtgccgcagcagggcaaggtggagaagcacccgaacctgcgtatcgccatgatggcccagcacgccttccgccatctggagcagcatctggagaagtcggcggtggagtacatcgcatggcgttaccaggacggccacgaccgcgagatgaccgaaaaggcgtcgcgaaagatgaccgacgaggagaaggcgcagatggagacgccgatcaagtcgaccacgggcgagtcgcgcaaggtcgagtacatcgtgggtcgtcagaagctcaagaagtcgtaccagtacgagatcaagtgggtcggctacgagcacaggaacaactcgtggatcccgcgcgagcgcctgctcgagttgggcttcagcaagctcgtgcagcagtttgacgactttgaggcgtcgcgcgagggtgccggttcgcgcgagatcagcgtcaagctcatccgccagcatctcgaggcggtgggtctgcagggcgagattgcgcagcaccatgccgtcggcggctactcgggcggacagaaggtcaaggtggtgctggccgccgccatgtggaacaatccgcaggtgcttgtgctcgacgagccgaccaactacctcgaccgcgatgcgctcggtggactggcgaccgccatccgcgactgggcgggtgccgtggtgatcatctcgcacaacatggagtttgtcggtgccctctgccccgagatctggaacgtggacaacggccgcatcatgtcgcgcaccaagactgcgcttgccgagggagccttcctggacgagatggagaatgcgtcgactcctggcgcctcggtgcccggtacgccgctgcctggaagcacggcggcgtcgcgactgacgtccaaggccggtacgcccgtttcgtccgtggctcctacgccggcaggctcgggcgacgagggcgagcaggatatgtccaagttcaaggccaagaagggcaagaagaagctcacgcgcaacgagaagaaggcgcaggaggagaggaggcgtctgcgtctcagccgctggctcacctacggcggtgagcgagaaccagacaccgacgacgagtagaaccgtcgccgaccacctgcactcggtttctttatttttgcgcatagtcatatagaatagaacagttgtccatttgtc

SEQ ID NO: 12689 - DNA, 2968 bp, Oryza sativa
  ref <308>: DATABASE ACCESSION NUMBER: AK110037
  ref <309>: DATABASE ENTRY DATE: 2001-12-06
tggcctggctcctgccatccaccacttcaaccatggcagcgcgcaacgcagacaagcccagggcaagcgggcgcgcgtccatccccacgccgcccgtcaagtttgccctcgatgaccgctattcgcaaggaaagcacgccgtcgtcaccaagcccaagcccaagcgctccggtggcttctccggctggctcttctggttcggcactcgcgtcaccgtcttctacctcatctatgccgcgctctggacctgcccttcgcgcccgtttgcattcgactactcggccaaggatccacgacccgtctgccgcaacttggcgcaggctcatgatcaactgactcccatcgtcaagccgtactggaacctcgcccagcaaaaggtgcagccgtacactgaccccgtcgtgcgcgccgtcgctccctgggccacgcgcctccacaaggtctcccgccccgtctatcgcgaggccaacaagcgcggccgcctcatctggaagaagcgcatcgaccccgcgcgtcgacgcgccctcaaggacatcaacaagcgcatcgacccctacgtcaagcaggcacacagctaccacaagaagaacgtccagccgcgcatcgacaccgtccacaaggccgtcaagccgtaccacgacatctacaagcgcgacgtctcgccgtacgtcgaccgcgcataccagtacagcctgcactcgtcgtccgtctcgtacgccttctacatggacaaggtgcaccctcgtgtggtcaagggcctcaagcagatctacagcttcctcgtcaaccacgtcgaccccgccgtgcgcagattctacagcctctatgtgcgcccgcagctcgagcgcctgctcgccaaggtctacgagcgcaaggcgcactacctcggctccgacgccatcaagaccgcgcagaaggacatgaagcacgccgcgcacgaggcggacaagcatgccaagcgggccgtccgcgaggctgagcagcaggccatcaaggcgcagaacgacccttcgctgctcgaccgcgccaagcaggccaaggacgccgtcgtgggcggtaatactcatggcgagaccgatcccgtcaaagtcgcccagctcgacgccgagctcgatgccgaggaggacaaggtcaaggagctgctcgaggtgtgggagacgcgcatgtccgagctcatcgaaaaggagtacaagctcgccgtcgaccgcatcgccgacctgcgcaaccgacgccttgccgacctgcccgaccgctttggcctggtcaacgaggccttcgtcgaggacaccgtcgcgctcctcctcaaccgtgtcgaacgcggtgcgcgcaagatctccaacggctccggcgacgtgaccagcaaggtcgaggcgggcaacaggctcgtggaccagcagctcacgcgcttcgacgaggcggcgcaggagaccaagtcgcagatcgccgcgttctacgaggagctgctgcagcaggagacgcaggccatcgacacgagcagtgccgaggtgcgtcgcttcgccggcgcggccaaggaggcgtacgacgagatcatgcgcgacgccaagttcgcggtcaccatggacgagtggcagggctgggacgtgggtgtgcgcaagcgcgccacgctcttcaccgaggagcttgctgcggtgcagcgcggcacgaagcgggtcagcaccgcctcgggcgcggtggatctgagcaacgaggcgcccgacgtgcagaaggagatcaacgcgctccgtgcgtggacagataagctgcacggtgcggcgcgcagggagctggtggcgtacggcgactcggcactggcgcagctcgcgggcggcggggtggtggccaagatctcggacgtcaccgacaggctggcggagcaggcgagtcgcatcagcaccgacgcggccgctggcatggtcggtgccgttggcgcagcgcgcgccaggttggggctgggggagcccgcagcggacgggtacgtggcgcgcgccaaggcgtacgtcgccgcgggcacgggctcggggtcgtcgttcgacgactatgttagcagcctcagtgcgggcgcgggcgcggtggctagctcggcatcgtcgctcgcgggccaggcgagcagcagcgtggcttctgccgtcgacacgtcgtccgcggcgtcggcgtacgaggccgcttcgtctgcggtcgcaggtgccgcgagcgctgtagcctccaacgcgcaggctgtggcttcgtcggcatcgggcgcggtgggcggcgcggtatcgcaggcctcggtggcagcgagccgagccagtcgcagtgcagcttcggcggtgggtgcttctcccacgcccgagtcggtcgcggactacatcgatgccgtcacagccggtgtgggcgcagccgttgacagtgcggtgagtggtgtggcggcggtctcgtcgggtgcgtcgtcgcttgcatcccaagcgagccgcagtgttgcctcggccgccggtgcaacgcccgagtcggtggcggactacgtcgaggctgcgcgcgatcacgtcgttgcggcgggcggaaaggcggccgaggcagcgcaaggcggtgtgtcgagtgcaggcgtggtgtatgcgtcgggatcgtcgctcgcttccgccgcgtctcgatcggctgcatcggcggtgggtgcatccccctcgccggaaacgctgcaggaccgtattgacgacgcgcgcgatggcgtgaacagcgttgttgacgccgtcacctcgagtgcaggcgtggtgtatgcctcggcttcgtcgctcgccagcgcagctagccgtagcgccgcatccgccgtcggcgcatcgcctacaccggaaaccctcgccgactatgtcgacgacgccaccgatgccgccgacaagatcgctcaaaaggctcagggcgctgtcagcaaggccgcggctcagcttcatgttgagctgtaagccgaaaattttcgcacaacaatggaaggttcgaaagc

SEQ ID NO: 12690 - DNA, 3529 bp, Oryza sativa
  ref <308>: DATABASE ACCESSION NUMBER: AK110038
  ref <309>: DATABASE ENTRY DATE: 2001-12-06
attcatccctggcttcatcggcaacaccatccttcgcatccattgcaccaacatggtatcgccaaagccagaggcctaccacgacggcctctaccacctcgccgccgccgcagagtcttcgccctcgccacagcccaaccactatcccgatgcacactcctttggcccctaccatcagcagcagcatcagtatgctcccatagccgctggtcatcgccccatgcacccacaacaaccacagtacagatacgccgaccgcatgtattcgccttcctctgcctccgtcccctccacctcttcgggctcagccgcgccgcccaagcccacttcagacgaccccatccttcgcaaccccatcgccgacgccgccgccaaggatgcagcagcagcagcagccgcagcagcagagaaaaagatctcgtgcatggaatgccgcctctccaaggtaaagtgctccggcggcgacctctgcacgcgctgcaagcgtctcggcaaggagtgcttctacaaatcgcacaagcgcggcagaaagtcggacagctccaagatccagaagctcgaacgcaccgtcgactcgctcagccgcgcgctcgagcacttctccaaggacaagatcgccgtcgcatccctcagctcccagtcgcccgacgccgccgcagtgcacaggatcatctcgcgggccggcgtcgccgactcggaagacgcgtcgtctccggatgcgtactggaaggctgcggacccagctcgcaacgccaatctctcatcgtcctccgccaatgccatgtcgccgcccgcgcattcgccgcgtgcgcccaggcctaacgcttaccgcgacccgccggtgcatgtgcatcgccggccctcggaggtgttccgccagcgctccacctcggccaccttccagacgccgcagagcatcgcctcggccacgcccacctccgacgacccagacgagcccgagaatctcggcctgcccacgctctccaatccgctcaagctgctcgcccaggtgagcgactcggcagcaagagaccgcgactcggccaacgatccctccgaccgcgccacctcgtccgacaacaacgacgccgcttcgccaaacggtgccgacgacgccgcttccgccagcggcgcagacgctcgagaccaagccaacaccaaatcagcatcttcgacgggcattgtcgcgggtacggcggggacgcactcggcagccgatcgggctgacatggctaccggctcttcctcggcgaagcgcgatcggccggaccacgcaggccagcccagcctgttcgccaccgcgtttggctcggccaccaccaacaccgtgtcgcgcttcggccccgggcgcggcaaggcgttcttcgacatgggcctcttcaccaccaagctcgacaatctggcgcactttgatcccatcgaccgcggctacctcacgctcgccgaggcgcagagtctgtacgccgtgtttatgcagtacatcaatccggcgctcacgctgctcgatccgcatctgcacacgttcgactatgtgcgttcgtcgtccgcgctgctgctgagctgcacgtgctggatcgcggccaagtaccgcgtcgaggcgagtcagatcgcggcggacctcgagatgcatatccgctcgaacctgcttccgaccattctgatggaggggttcaggaatgcagagattccgcaggcgctaattattctcgcggcgtaccatccgcagatgaacacgctctccgaggataaggcgtgggcgtatgtgggtttcgctatccgcatcgcaagcgagctcgatatgaatagcaggatcgctacaaggccgatgaatcgccaggatgatgcggggttggcgaggaggttgaggaatagggagaggacctggctcaatttgtggctgttcgagacgagcatgagccagcatatgggtagggggcctacgctggcaaacgatcccgtggtgatggggtgtgcgcactggcatctggacaagtttgcgctgcccggcgatagggccatggtggcagtggtgcagctgcgcctgttgatgctgcgcaacacgcagctcttcgaaaactttgtcgatgtctcggcaacccatctgccggcagagcgaaccgccaagcaggtggagcttttccgtcgtatttgtgcgtcggacctcgatacgtggttggcgacctggacggggccttcgcctcgcatctcggctgacgatgcgcaaacctcacccgcagggacggtggcatccgaatccagcacagccggctcgggcttggccaagcccgatttgcccccgacgctgtcgcgcatctagaggctcaagctgtactactggtatgcgcgattgatcctcgacacgatcgcgctcaagtgcagccatctgggcctcgaggtgctccggccgatctacaaggacgcgtatgcgtgctgcatggcgtacctcggcctcttcgtcgcgaccatggtgcccaacggtctgttctggggccacaactcgaccgtcgtcacgccggcctactgcgccatctttgcgctgcgcatcgtcgggctcatttcaacctcggcgggcgccgcgagtctgcaggtaaagtcgctaccccagcgcgagtcggcgcaggcggaggatctgggcattgacattgatgcagagtacacgttcgagatggtcgaaaaggtggccgaggtgtgcgaggaagcgggcaaggctacgccgcacaggagggcggccgcgggaagctatgcgtttttcctgtttaccgtgctggccaaggccaagtcggcgtggagggccaagcagaacaaacagcccgagagggacgagggtggagagggcaagaagcgcgcgcgcgacgacgaggacaagggcgcaaggcaggggaagaacgccaaactgcgcacgggcagcagggagcgcagcggaaaaaacacaggcgcggcgacgggtggcggaagggggaaaggcgatgtgaagaatggcgatgcgccggggcacagtggctcggcagcggcagaggcagtggctcacggtggagtggtggtggcgccgacgcaggcaggccaggacgcaacgagcggaagcgaccaccacttcctgcgccagctcatgcagttccaagcgggtcccagcggtgtacagaccgcactcgtgtcgagttcaacacccgcgcatggccagcacgccctgaacgccgcacagcagcatcacgccgcgtctgcgttcgagtcgttcacccccgtatcaggcgatgttgcgccggagtacaccgcgcatcttcacgccccgcacggcgccatggatggggcgggtaacggctttgcgcccgacttgaacgaggccatgggcagtgcggccggaatgggcgtagagatcgactgggactttggaatgctcgacggcttcctcggcgagtcgctctttagcgatatgagcttcatctcgtcctcggccggcgccaacggcaacactgccagcaacacttagcgaaaaattgcatgcgtctaccagatgaatcgaaacatgcccatg

SEQ ID NO: 12691 - DNA, 3388 bp, Oryza sativa
  ref <308>: DATABASE ACCESSION NUMBER: AK110039
  ref <309>: DATABASE ENTRY DATE: 2001-12-06
acctcataccctcgtccagctgtcggccaaccttgactttgtcgcaatccaagcaagccccatctccttgactctcgccgtcgtcatcatcgtccatcgctcacgccaacatcgcttgttcaacgcacgcattgccacaaccgacacgcacccgcccgccgtctttaccatgctctcgcactaattcgccaacacccgatctagacgcccacctgcaccaccattgcgtcgctcatggccgtcatgaacgatcccgccatgcctagccatgctcagggctctgccctcccctcgagcgcttcggccgctggcccttggcgctcggcgacggatcatgacgtgcacgccgacaatcgcgacgaagacatctttggctggatccaaccggacgagtgggataccgtcgctggacccaacaagtccaacttcatgcgcggagactgcctcgaatgtaccaccgacaaagacaccgccaatgttccctctctcccgcagagctgcggtggagcaagctgcggctacggcgcacagtgttgcgaatacagtcgacgtgcacccacacccacggtccatccgaccgcactcctgccctgctcctccagcgtcctcgtgccacctccaccaccaacaagatcgccgacctcgccaagatcgaacacaaaaacagtctgggtgtcagtcttgtcgacatcatccatggccgcagttgccgtcccatcagcctgcttgatctgcgcaccttccttcacttccagcgtcagccacaaaagcgccttcccgcctactaccctgcctccgacatgcagtcctcggcactcgacgactttgatctcaacctcgaccagccctctgcttcccctacacacttgttcaaacacaagctcaatgcgcgccgactccactttgacgaagtagacgcgctcgacttcctcgtcgcctacgagcgctacgtgaccaagttccgcgatcagccacgcgcgcaccgcctccagagtcccgaccccgccacttgcaaagcagcgctgcgtgcttatgtccgtcgtcagtgcaagcctcgcgtctcgtccgacctcaccgtcgcgcagatgctcatgcaagaagcacccacccccgacgatgacgttgacgacatctccgaacaggcctcgcgcgaggtgctcgcgcgactgcggccaacggacctcggcctcaagcccgaccagcaaccgttgcgtgtcgagtttgatcgtctcgtgcatcgttatctctgctcgcgccgcgtgtgcatcctgcccagcaatcgcaggttacggcgcaagcgcgactcgtcttcgtcgtccgacacggccgcgggcggctccgaatcgccttacaagcagcttggctcgtcgagcgccgaaaggatgccgcggctgcgctggatggtcgatgtcggcctcatttccgagagtgacctgcagctctgcctggccgaatgcgacttttccacgcacccggacgtgctcgcgcccatcgcagaggccgtgtacgcctacatgtcgcagcacgtcgtcccgttcttcttcatctcggtggcgcgcaacctcagccccaacaccaagcgcggccgtctgttggtgggcgttgcatgcactaccatcgctctcatcttctcgatcctgctcatcatctcgccatcgcctcttgcaccgcacgccaaccacggcacgggcaacattccgcgatggtggcgtttgctcaccgctcccgtctggtgcgccggcctgggctacatcctggcctactttacgggcctctgcgtgtggctcacgcttcgtggcaatcgcgaacccgacgaggaggaggagcgcgaacgcgaggagatccgatcgcgcatctcgggcgaagacgtggtgggctttgacctcgccgagcttcaggcaaccgccgacgagagggacatggaggtggagcaggacaccaaccgatggatggcgcccgagatcgccgacatcctcaccggcttcacgggacagaagaaggacaagcgcaaacgtcagcgttcgagctcggatgcactccgtctggacgcgctggaagaaggtcaccttcgggtcaaatccgaggccaccgatgtggtgccgtcgagcaaagtttcgttcgagtactcgctgacggccgagaagccgtcggatgcctccgagggcgcgatgacatccttcgcggacaaggcttcggcgctggcagccccggccgcggtcatcatgaacacgcctcgacgtccatccatgatgccagtcatgtccgagacgaacctggcgggccgaccctcgacgacgctgtcggctcgtgacgtgagcgcggccaactcggtgcgaccgagcttggaacgctctggacactcgcagagcgacgtgcgcccagccgacgcccgcggtgctgtcaacggcgacagcccttcgggaccggcgctgttgcgacagaagcgtgtgcctctgctcaatctgtcgatcggctttgtcaaagctcccggccatgagcgcggcgaggaccaggccgatgcgcccgtgctgacacgcgatgcgctgctcttcgatcccgagctcgccgcacgcgtgacgacgccgactgtggccggcggtcccatggaaggctcgcccgtgcgtggagccaagtcgatcggcgccgccggtggttcgcagcacggctcgccgcccgcgcgtcgcaagtcgctcgcgcacgtccttctgcctctgcgatcgggcgctcgcctgcaggcgcagatggaagacgcgcagcttagctcgccgacgtacgagacgcacagcgagaagagcgccgagcatgccgagatcgccatgcctacagtgccggagccgaccgcactggcatcaatgcccgtgattggcgcatctgcgacgagcccgcgcgacattgcgccatgggcgatcgcgcctggcaggagtgtggatctgccttcgtcggctcagccggtgttgttcgcactcccttcgagccgcaagtcgcggatgtcggcgactacgagcaccacggtggtggcgagcccgctggcgcctgtgtctgcaggcgccaagcgctcgtacgaggagtcgccgtcgctctcgctgcgggagcgcctgtggatcgccgtgcagcgcggcacgggttttgcggtgggagccgagcgtgtgctcgacgcgcgcgtacgtagggcgcagcagatgaaggcgctgcgtatcatggcgctcaacacgctcgccaccgtcgtcgtgatggtgattgtggtcgccgtcccatgaggcgagcccagggtcacggtggggtgaatatgtccccgccgttggaatcattctgtacttgtatcttttgtgttttgctaggtcatcatggtcactcgcaccgattgtaatcgataccctcagtcatttgt

SEQ ID NO: 12692 - DNA, 4144 bp, Oryza sativa
  ref <308>: DATABASE ACCESSION NUMBER: AK110040
  ref <309>: DATABASE ENTRY DATE: 2001-12-06
agactagcttcagctcggtttattcagtgaatcagtgatcctttggcccccatgagctcgcctcgcacgtcgccccgccccgccacctcggcagacacgtcgtcaccgccgactgcagcgccgtctggcgctcccactgcagcggcgccgagcaatgccagcaggtcgccacctgcagcccagcctgctgtggcgccactcgacctgctcagcggtctactgcggtacgaccagcagccgccgccgcatcggcgcggctcgctcaactccacctcctctcccgtgaccaccttccgcccgcgtggcttgcgcgcacttggaacggacagcgatggctctgcaccagccactcctgtcacactgccacctgctgctttgcagtcacagcagcagcagcggccaccgcagccgcagccgcatcaggcgcagcagcagcctcctggctcaggcccgaactcgcagcctccgaccccgcgtgtggccaactctgctgcttcggccaatgcagccctcgcatccgtgcgctctccacccttgcactccgccgccatcgtgaatgtgcacattcctcctgctggcggtcattctcccgtggtcacctcgtccgaagcggccgctctcgacaacccgccgccagcccgccgcctcatgatccacaccggatccatgccgtccacgccgcaggagactcatgtgccgagcaatttgcagccgccttccctcagcgtggacacctccgcaggggacacgcctcccgctgccaacgtcgctgctggtgccccgctgcatcagggcatctccctggcgcccttctctgtgccggcgcgcatgcgcatgctgcccaacacacgcgccacttcccagccggacgaccccgatgcgaagcgcgctttccaaacgcggcacgcgcgcagcaactccaatgcgccgccgctgcatcgcgcccaccgcgcttcctccgacgcggaccagatgcccatgcacgcgcagagcgtcgacctcacccatgaacgctccgtcgccgctgcacatcgagctccacgacgacccacacgcatgcggcgcgcgcccagtgacggcggcagtgcagagggtggcgccggtctgctccgccatgagggcagcggcggcagcagcggcgctgggggccattccttgcgctcgtcgggccccagctcccgcgccgctctgtcacgacggggctctctcgacccctccacgctggcagacggctccccgcaggcgccggctgccgcgcagctgtcctcctccttcctcgaccgtgtgccgctgtcgatgcgccatggtgccgcgctgcagccgggctccatcctcatgtcgccgctcttctccgcacagcagcccccttcgctctatggcaccccttcctcctcgcgccatcgtcgcacgcgcacgggcgcccccactcccattcacggcgtggcgcgccaccagcagtcggccgtcaatctcaacgcggattcgttctcgcgtggtggtggcggtggcagcggtggcatctctgctgccaacacaccggcgcagcagtcgcgcaagctgtcgctcggcgagatggccgacaatgcgcgcgctgtgaagaacgagctgcgacgccaaggagcggggcctgcgggctccggcgcacagcgcatgggcatgggcattgtctcgcgaagccgcgccaatagcatcatcgctgcgactcaggcgccgatgggctctcacgccgctgccgctgctgccgctactgctgccgctgctgcagcagcctccggcggtatgttcggcggctcgggtccgggctccggccagctgcatgtgcggcacggctccatcgcgctgtcgaactcgggctcctcgcgcggtggcactcccgtggcagcctcgaatgccctggcgcagcgcagtgtgcgccacggccctgtttccacgcgcagctcccgcgcgcccaccatgctgggcggaggcgacatcatgtcgccactgcacctacctgccaatgccaatgcggctgcggctgctgcggcgctgcagtccatcaaggctgccatcaacagcgacgaggcccccagtgccagcggcaacgctgctgctgcgcgcgcgggccaggcggaggagggcgagcaggagaaggtcgcagggggtccggacaaggatcgcctgcaggcgccttccgtgtcgccggacctggctgccccttccgacgagctcaactcgtccgcggaggcggtgattgacgccgccgcagccttgactgccgcggcgcagcaggacccctcgttgctgcacgggatccccgccttgccctccgccctcaccgccgccaacacacgcgacggctcgttcgatgattccacgggcggcatcagcctggccgatgtgcgcttggccgccacagggaaggcggcagcgagcatcgccttgcagccttccccggacccggatgagagctacggcgcggtggatgtgcgcggcttccgctcgggcctgttccgctacgcgccctcgctcgccacgcagctcacggcatccgacccctacctcgacaacggcatgcctgcattgacccgccagcactatcgcgaccgctcgcgctcctcctcgcacctgcacgtgctgaccggtgcggacaccggctatgacagcgaccctaccaatggcggcctagtgacggagctggagatggtgcagcgccagcacgccttgtccggctcctacgagggaggtgaagaggacggctacttgtctggcgggggtggagggcagcttgcaggcaacatgggtgacggctacacgtccggccacgagctggaggaaggcttgggcgccgagcatgtgcgcagcaaggatgaggagaaagtcattcatgtgttcttggaggagatgggcgcggcgctcttctcatgcggcctgccgctgcacgtggtggagttctacctgacgctggcggcgcatcggctgaagatcgacatctccatcgtggcgatctccacttccttctggatcaccttcgccccttcgtccactgcgcacatggtgatggcgttcaaacccggcttgtcactgtccaagatggtggacacatgcgccgtatccgaacacatcctgcatggcatgtgctcgcctgtggagggactggcacagctgcaagccatcacgcgtagggggctgatctaccccaagtggagcgtggtgcctgccatggcgtgctgctgcttcttctacgcgccgctgttcaacggtggctggcccgagtgtctggtggcgggctttgcgggcgtgctgatcgggctgatggagtggttctcggagtcgcatgcttcgctggcgcgcgggcacgatctgctggcgggcctgctggctgccacggtggccatcatcgtgcactcgtatatcgtgcacatcaatctgctagcggccacgctgagtggtattgtgtggtgtctgcccggtctgcgcatcaccatgtcgatgttggatctgtccacgggcaaccccgtcacaggcacggccaaattcatgtcctcactcatcaccgccatcaatctcggcattggggtggtagcaggcatgagtgtcggcaagctgacgggcgtggagagcaaggatttgctgcagagtcaatcgtacggcacggtgggcgcatggttcctccccatcgccgtcgtcagctcgtgcttcccctccatgctcctcctcgatgcgcatctcaaacatgcaccgcagtatgtcatcggatccgctctcgcatattacttgtccaactactctacggtgtacatcgggcaggcgttcggaagctggctgagctctgctgcatgcggactcatggcgaatctctacggacgatacacgccttacccctccattgagttggccttgttttccattttgatgttggtgcccggttcgatcggtgtgcgttcggtgctggcgtcagacgccatctccacgctgggtttcctcacgcagatgctcaccgtggccatcgccatcgtcacgggacttttcaccgcaaacgtcgtcgtgccacccatccgcgcactttgagcgcgcacgcgcgcgtggccgctcatgcttgcagattcgaagctctgccgctcgcttctcatagcccttccccatacagatgaatcgttgttcg

SEQ ID NO: 12693 - DNA, 3429 bp, Oryza sativa
  ref <308>: DATABASE ACCESSION NUMBER: AK110041
  ref <309>: DATABASE ENTRY DATE: 2001-12-06
accatcgaagctcaagaagctcaacatgctcagctgagcctcgttcggccgtcatgtcgagcctggccatctcggacgtcccctggctctccaaacgcatcaaggcatgctgtcgacgcgccaagctgtttagcacgcacgagctcctcctcacacccccgctcctcctccaacaggcgctgcgactcgccccagccgacgtcgagctgctgctgctccaggtggcgaccgcggccaaagcttcgacaatctctgtgctcgatgcgctgaatggtattgcgcccccaccgcttggcgacgacttgttcggggagcacagggatgattcgagcgactcgcacaccgacgacgagccgatcgacgcgaggctcgtgccgcccacacagggatacgatggcaacttccccggcgcacaccagttcgtatacgactccgaagacgacgacgacagcagtgtcgccattgacaacgacgatgtcgaacccacgcggccactcgagcgccatcccgactggcacgatcccgcaccggcacagactagcgatgcgcttgtgcatggccgcccacgtcacgtctacaccaccggctcgcccgaactcgacgcgctgctttcgggcggtctacgatcctccctcctcaccgagatcgtgggcgagagcgcatcgggcaagacgcagatcgccatccaggcgtgcgcctttgccgcgctcggactgtccccactcgcatcctcaatcccacctccgtcccagcaaagtttcgacgacggcgtaggtgtatgctacatcacctcgagtggcgagcgagctgcacacagcatcgtgtcgcgtgcactagagctagcctcatccgccattcgccaccgcttccacctacacccgaatgcggacgaggtggagctcgcggtggagcttggtcgcgcgcaacttttgcgcaacctgcacgtggcgtgcgtcgcggacattgaggctctcgaccacgtcttgcgctaccagctccccgccctcacctctcgcaccgacatcggcatcgtagtggtggacaatctacccgcactgtttcaggacgaccctgtagcgggcgatatcgactcgctcgtccaccgttctcgctggctcgtcgacgttgccgatgcactcaagcgcacctcggcggctgtggtggtgatcaaccatgtcagtgacgcctttggcatcgacaaagacctcgcgcgtcgcttcgtctttgattcggcctcgcgcaccagccgccgcactgacgtcgtggcggatcatccagcagccatggagtacgccgcacagtccgcctacactagtggactgctcgccagcgttccacctaccctagctgcagccatgaccaccaccaccaccgactccgactctccactctacacgctccatccacgcacggcacaactcggacacacttggaccaacctcatccacactcggctcgttcttacccgcacaaacggtcgcgtcaaagatcccaacgacgacaagcgatacacccacgtacgcaaggccgccgtcgtactcaatcctgccggaccgtccatgttcgacctacccgcatcgcaggcgcatttacgattcatcgtcacccctgcctcggccgtacacgcactcgcaccctacacgctgcacgactcgtaatcttgtattttcttcagctacacacgctgtgcccaagccgacctgagatcctgcggcacctggttccacacgccctcccactgggcgcccagctcggactgcatctgctgcaacctgcccgcaaaccacacgtgcacgggtgcatccttgagcaccgtcgccgtggggtctacacgctgcgtctcggacgccgcgagccgcgaaaaggcagcctggaacgtggcggcggcggtactgtcgtcgtcgttggcccacagctcgtcctcctgcgccgcagccgaactgggcgtaagcagcagcttgatctgcgccgatagcagcacgggcagcacaggcgcatgggccggctcgcgcagcttggcgctcgtcagcaacagcccgaatcccacccccaccacgcggcggtgcctctcacccacattggccagctcgggggcaagaatgccctgggcaatctgaccgaacagacccggctgcaccgcttcaaacgtgtcgacaatgtactcgggccccttggacgtcagcgccaccgctgccacgagatggatcgtgcccttgaccagacggtcggttcgactctgctgcagccgcgtcagcagcagcgtcagcactgcacgacggtactgctcgagcgcgtcggcaggtacggcctcgaagagcgtttcgagcagctcgagtgcatggccctcgttgacgcgcgtcgcgatgagcttctgatagatacccagcatggcacccaactgactctgcgccacgatgcgcgctgcatccttggcgaggaacgccctgacgagccggacgagcgcgggcacgttgccgcggttctcccagcacgccggcgtgaggatgggcggcagcaacgacgcatacgcctcgggcaaccccgccgcacccggatgcagctcgagcatctgcgacaggatctgaaacacgtacggctggaactcggcgacgtcctggctgaggatcatcgtaaacggcgggaacagctgctgttcaaacgccgccaggctgtcgggttgcgccgcgacggtgtagcgcaccaacgccgcgatgctctcaaacagaaactgggagaagcgcgggttggacgggttcttggcgatctcggtgaggatcttggcgaggtggtcgaggaggacggcgtgtgcgggtgcaatcgcctcgcgcaccgtggcgagcatgcgcatcatgcacttcattagatagtcgttctcggcgagcttctcgggcgtctgtccgcgctcgatgttgcggaagagcgccatgtggatgttctctgcaaacggctgcacatcctgcggagtgaagagcatcttgccgtcgcgcttgagcgcgaggacgcgctcgatggtgatcgaggcatacgagcacgtcacgtactgctcgctctccagatgctgtacgaggagcggcagcacgcccacgagctgctcctttgtgagctggttgcggaaggtgtgcagatacttgatcgcgtccacctggagaatggggctgggcgagtcgtgtgcgctcgcctgcagatcggcatagacgttgtccgagaagaactggacgacgtcgacgagctcgttggtggcggtgacgccgtgctgtgcggtggacgacttggatgcgatcgaggtgagcagatagatggcggtatccttctgcttccagttggcggcggggtcggcgcggtactggtcgaggtactgcacgatgtacctggacacgatcgacgtcacttctgtcgcaaagaattccatgagcgaacggcagaattccg

SEQ ID NO: 12694 - DNA, 3982 bp, Oryza sativa
  ref <308>: DATABASE ACCESSION NUMBER: AK110042
  ref <309>: DATABASE ENTRY DATE: 2001-12-06
aacatcaacccaccataggcgacagtcgcttgacactcctcgtcacttctgatcttgtacggtcgcatcgaatcacaatgtccacgctccggccatgacgcttctcggcccgcctcttcccaaacactgcatcgtcgcagagccatgaccaactcgcacggatacgtgctcgagtatcctcgtattcgagtcgaccactttgatcaggcgcccgtgccacttcctgcatccctacttgcccatcgtcgctccgtagtcggccatggcgccgtccactctcgacaacacagcgagagcctgcaattcgagcccgcacagacgcacttcgacaaaccgctgctctatctcctgacccacatacacacggaccacctcaaaggactcgacagacccggcatcaccgcccccatctactgcagtgcaaccacgaaacagctgctgctccgatatgaacgccaaaagaccaggatcgaaaaggaccgcgatgcgcaggctggaaagaccctcagcgtggttcggccctacgcccaccttcgcgtgacgacagatcacgctgctgccaggtccaagctttctggataccacgctagcagccttgatctactgcatcctctgccatacaatgtgcccaccaaggtcccttacacaccaacttccacagtgacgctcaccttgaccgagagcaaccacatgttcggcggcaccatgttcctgatacaaggatcaaatggcgcagtgttgcacaccggagacatgcgggcagagccttggtggtgcgaagccctcacccgcaatccgatgctctctccttatctcttctggccaaccgcaggcgccgaagtgggctccaacgaccacccaacgactgagcagtgggccgagcagatcgaatctttcgatagctccaccacctcatctcatcaaggcagcgaaatcttctcgcaatcccaaaacgagtcgcagactgcttttggcacccggcatcatactggcaacgcatcaggccccaatacttcgactcgtggagcacgcaggtctgcattacgcctgcgaaacatctacatcgacaccgagctccttctgtgcaaccaacacgtgccgacgaagcaacaagcctgcctcgacatggtcgcacttatgcgcatgtatcccgccaacacacacttctttctcaattgctggacatggggctacgaagacatgctggtagtcaccgccaaagcctttggctgcaagatccatgtcgaccgcttcaagtacctcatgtacaaagctgcccgcaacgaagcgcccttcctcgccgacatcgtcacgcaggatcataccaagacccgctttcatgcttgcgagaaacgcgaaccctgcgtctcggtcaggtcactcgcctctcgctatgccaacgacaccagtgctgccttggctaaacaggtcgtggctgcacattcgcagatggacagcagcagccccgatccgcggcaaaggtggggaccagtgcgctcgcagccggagcccctgtttgtctatgtcaatccgggtcaagtgagcgcagatcagtggcagagcatgttcgaggatacaaagcaaaggcttcaagctgcgcagaggcacgagaccgcatggcccgaggcactaatcgtgcccatcgagcgccattcgactctgcccgaactgcaaaacttcgtcggactctttcggcctaagaccgtctcgcccaatacgattctcgatccaaagggcggcctcgactactacctgcttcatcacctgtttggccacgtgcttggaggcgcacatgaccgccagcagctcgctgatcagggtctgctcatgcttggcgacaagacatggagcctctacgaggctcagcttgcccgcgcgagagaagaggccctggctcaacgcaacgctggcgctgactcgacagaggccgtccgcgcagcgagtgtcagtctgagggatgggcaggcagacggcgtcggcgagagcatcgacgcgaaccagctcgaaaggctatctagactgcgagggatcagtttcaaggggttgatgatgcagaatatggcgggcaacctagctgccatgctcgagatcgagcgctggcgcaaagccgcgggcatccacgagccgccagacgagctcgagagcgtgcttcaacaatcttcgggcgacgtcgctgacagaaccaatgccagctggtcgagtaggggctacgacgccgatcacagccagcttggcgagacgcaggcaattccgaaaggcgtgtcgctacgtctgcacaaggagacgaccggtactcaccagaacaagccgagccctgcgcccgagccagcttcgatacacagtgagccgatcgactcggcacgggaagtggacaggcattctcgtatcccgcccattcccgatcttggcgaggcgagtgtcccggccaaccgcgctgatgcgatgggtgcatctgccaacgctccattggagtctcaagtgtcgcagagctcggtcggcgaacccgttactgagctcactgaagacctggcaagtcggtacctcaacgtgttgatccaccacttcaacgtgccgtttgaccggtcgactcctgccaacgccacgcacatccagctgtggggtttggttcgcaccaagctgcccgctgacgcgcaaaaggtcgaggagcactggtttcgtgagacgggaatgctgcctccgctgtggagccccgacgtccacgccccaagccagcagctgcagccgactgcgcaacgaggtcgaggagcgacaaatgaagcacagagcaccgacggaggcaacgcatttgcggacgtgctcgcgtcgttcgtcgacatgctcgccgcggcatctacccaagaaaccccggcagccccgacgcatggcgaccgcgcggttgcgctgcaactcatcttgcggctcttcgccaagctcggcttccacgaccgtgtgctggcggagtcgtacgagtcgtcacaccgccatacgcactctcacagccacacgagctgtgctgccggcagcatgcaagcatggcaagcgattgctgtgccactcaccggccttgcccaccagctcgccgacggccttcaagtcgtccctgcgcttctttcagatgggagctgcggtcgaggaagcgagatgcatttgctgggtcttcaggtggccggggtgctgctgtcgtaccggccgctcaacgcggttgtgtcaacgccggccatgcaggcgctgctcgaatcggtcattagcatcgtcgaggcggcgccgagcgattgggacggagcagagggggacgcgaaaagggtcgttgcgctcgcatgtggcgtgctgcgagcagaggagatcgacgagcgcgtactcgccaagtacgatgccagactggtgcagctcgccagggatcctgatgggccgttgaggtctctcgacggtctgctggatacccagagcggagcatctgcaacgcagtcgtcgatccagcatactgaggcacaagaaggcgagcaggtgagcgtggacgtagaggaaagcatgcctgtgcgtgcgccgcgagcagcagctgcatccccaaagccagcacccccaaagccagcacccccaaagccagcacccccaaagcctgcacccccaaagccggtatcgatgcagtgctcgcaagaggcagtggggggaaccgactcgattgtagaagcgacgtccgaggacccgatcgagtcggtcgagtccaaccgcctccaggcatcgcaggcgtccgagtccgccacgcaagaggaagattccacccagtccgaatcggcactctcctacaaccccgtccgaaagctcgtgccgcctcgctccatcgaccgcactgcatcgctccctagtctccacgtttcggccgatctctcgcgctccacacgcaagcgcaaaccagcagatcccgatcgagacatcctaccaccccgtcgctaccaccgctagaaattgacgtctatattacttt

SEQ ID NO: 12695 - DNA, 4745 bp, Oryza sativa
  ref <308>: DATABASE ACCESSION NUMBER: AK110043
  ref <309>: DATABASE ENTRY DATE: 2001-12-06
actgcggatctctcgacttgctgcaccgctgctctgctctgccctacgcccgtgtgtgatgctgccacacgcgcccgactgaaaagcgcccgacgcatcctcaccaacaatcaacatccccagcaagcgccgcgcgacgctgcctgtcgccaccacaccaccgccgccgcaccgcgtctcgtctcgcggcgacgcccgcccgacccagggactgcgacgactcgagcttgcaaccacaatcccaccgcgcacgtgcgctcacaccacactcctgcctgcgcattcaccatgagtgctcaaggcaacaccgaaatggcgaccgcgaacactgcggcgccgctgtcgcctgcgccccacgacgaccccaaaccaaccaccgagaccgtcgccggcgcaagcgcaaagcccgcgaacgccctcacaccaccgacctctgaggaaatgaaccacgagacgaaagactccgattcggaactgagcgatttggatttgagcgacgacgaagatgacggcgaaccgattgagcccgaccattactgggatggaggcaacattccggtcttcaagccgacaatggcacagttcaagagtttcaagaagtttatcgaaaaggtggacaaatacggcatgaagtctggaatcgtcaaggttattcctccagaagaatggcgtaataaactcccagatctcgacgagaaggtcaaacgcattcgaatcaagaatccgatcacacaggaattcaacggtacctttggcacatacacacaacagaatgtcgaaaagatgcgctcgtacaacctcccggaatggaaagccctcacgcacgagacccagcatcaaccaccagctcgacgcggagagcgtcgtcgtaaccaggagaaagtcgtcagaggtggcggagggctccgaggacgtgctgcagcggcagctgccagagctgctagcgaagttggagacgatgaaacaccagagaagccaaaggagaaaaggaagcctggaagacccaaacgcaatgttgtgatcaaggatgaagccgattcggacgattctaccacgaagaaggcaacaccaacaccggccgacaagaagaaaagtcgtggtggaggacgtgggacaggcacaaacaagagcgtctcttctcggcgtcttaacaacacggcagaatccgtggatcatattgacgataaggccttcagaaatttcgattatcgaatggaaggcctcgaggaatttactccggaacgttgcgcagagctggaaacacattactggaagagtcttgctttcaatcagcccatgtacgcagcagacatgcctggtacgcttttcaacgatgatgaggaaacatggaatgtcgccaaactggagtacattctggacgtgctaggaaccaaagtcccaggtgtcaatactgcttatctttaccttggcatgtggaaagctacattcgcgtggcatcttgaggacgtcgatctttacagcatcaattacatccactttggcgcgccgaagcagtggtacaacatctcgcaagaggacgcacgccgctttgagaaggccatgaggcaagcttggccaggtgatgctaagaactgcgatcaattccttcgccacaagacttacttgatctcacctgacgtgctgcagaagcaatacaacgtcaaggtcaacaaacttgtgcactatgaaggagagttcgtcatcacatacccgtacggctatcactctggctacaacctcggatacaattgcgccgaatccgtcaacttcgccactgagtcttggctcgagtacggacgcatcgctcgcaaatgtaactgcgaggcagacaacgtctgggtcgatgtggctgagattgagcgcaagatgcgcggagaaccaactccagaatattacgaagagactgatgacgaatctgaacttgaggaggaggatagcaaactgcccacaccccctgcaagcgtcaaagggaaacctgcttcaaagaagcggaagcgcgagacgaaaaatgaagccccgaagaaaaagaagattcgcattcgcatcaaggcgccttcagccgagccctgtgtcatgtgtcccaacgacaacccgtgggaacctctgctgcccacagacaatggcaagaaggctcacagatcatgcgccctctatacaccagagacgttcatcacgatcgatgatggcaaggagatggtgcgcggcgtcgctaatatcgaccgtgctcgcttggatctgaagtgcaactactgtcgatcgaaacgtggcgcatgcttccagtgttcagcaaagaagtgcgcccgcgctttccacgctacctgcgcgttggcggctggcgtacaaatcgatgctggacctgtgcctaccttcgacgaggatggcaaagagtatttcgaggaaggcttcgactttaggtgcaagatgcacaggccgaagatgccgaagaatgcgacttccaacacccttgagaaggacgagagagtcatgaaattcgccgagcaactcaagccaaaggatgttgtgcaagtgcagcttattggtcgcgaagtgtttggtgcgcttgttatcgagaatcgaccagccgagatgacagttcttgtggacgtgatgctcgaaggcgagcgtgtcgaagtggaatggaagtacatctgcgtcttggacccatacctctcgcagaggcctcaaccatcagcaaacgccgtgccgatgcccgaaggcatgaacaaacagctcgtgtctgccagcaaccgacaagatggcgtgcccagccaagacgaggtcttcacggacgatgcggcgtacaagtggcaagagttttataactccgaatgtcctccgggaggatatcggcccaacaaagacaagcttcccaaggtcaaggtcgatctcgaaagggtcgatcaattgtactactatctcccgaagaaatcgacggaagccaaatgcttcttcaccgacaaagtgggcggcacagagcacgccccacgcagcaacttcctggaccgtgtcgctccgccaaaacccacctactcgtacactgcgcctcgtccctcgttggccgcagcaccacctgtgcctcgcactcagcctacctacagcacgatgcaaacattccaacaagctctggacaagccatatgcgtacaagccacgtgtaccgtctcatcccaacacgcttgcaatcgacactcaagttctggccaatcaaagcaactttgccactcaagctgggcagcccggcccttacggtaggatgcaatctccaacgccttacggtcagccaaattctcgaccaggaggaggctctcgccgaggaagcgagagtgaggcggcaccgccgttgcgcccgttctcacaggatcactactattctacccgagtgctcccagcagcatggcagggcgaatattccagtttccagcgtgaagttcgcaagtcccaaggcgcccagaccttgccacgccctactttcccacaagggagcctgccacctatttacaaccctggaccacaacaacaacctgctcacgcatacgcgccgtctggcctcatgggtcgtccagctggtagtccccaacccacgatgcaagcaccgtacggtcaagcagcaagcgattcaatgcagccggtaccgtacactcactcgccctatggcgctcctccaactcctgctactacagcctccgaggcgtctaggcagccaccgcgtccacaagccagccaggaccattcaacctcacaaacccctgcagagaagcaaccagccgttgctcgcacaccgtcccattccatcagctctgggtcgaactcgagacccatgagccagcagtggactccaccttcacagcgtccaggcgctacacccacgcaccagcaacctctgtatccactgcagcctcctcgccaagatgagcagaagcccggatggccaacggccgtgcatcagacaccacaagagttccagacccagcttacttatgctccaagcattgcttcgcgtgagggtgcgcacttgcgtgcgttacgcgacaaaggctacatgcaaccagtctatcagcagcatgtctccccttatgcaccttatcagccgccatatcaaccgatgccccagcaacagcaccgcaacagcttggggcagcctttcgtgccgggccctgacacgcacgtctggacgagtccgagggcgccaaccgccagcccgatttctgatcccaatacacccggcatgcatcagcaaaagcagcaacagcaaagagaccactactatgggtcgacattgttcaatccgccggcctggggccagaacccgtcaagaccagacctcgctctgctgactgcgcacgggcaagcccagaaccctaacgggcagggtccaatgctccctcagatgcagcctgcacccagcaatgggcccagcactggtcccagccacggaaatgaggcttggaggtacaccggatagatgggaacccaatgcaaagccctggtattgtaccgagtggcggagtgccggcactcacgagctgaaggagaaataattggaccaggtctcacctaagaacgagggaaggagggatcggtatggattaatgactacacaaaattagcagtgccgaagatgcacgcgtcgttcgcttttcgtatacactattttgccacgttctcgaggctctctcactgtggagtagttgactgtgtgtagcttgtcactcaattgaaacgcatcaacatgcactttgaccgtac

SEQ ID NO: 12696 - DNA, 3725 bp, Oryza sativa
  ref <308>: DATABASE ACCESSION NUMBER: AK110044
  ref <309>: DATABASE ENTRY DATE: 2001-12-06
agctacaccactcgtcgacccttcgcacttctttcaacatggcatcaggcagctgcgcagcttgttacgcctgacctgtctcttctcgttcacgccaccgtcgcaccaggcactgcacaaagcctagcatggcagcccctcagcagccagtgcctccatacgctttggcgccgcttctcatccctacgcttggcagcgacgacgataccgaatctctgcatcccggatccccggttgcgattcaacaaaatgcgcagcgatccatccgctgctccgagtccgacggcacacatctctacatcggcacctcggacggtcagatccactcgttcaacatccgctaccgcaagtctgacgcggcacaaggctcgtcacagcaatgcacatacagcctcaaatcgagccgctccatatccagccatgcgaaacccgtcgaaaagatcgtccttctacgacccttccgcgcagctgccgtcctgtgcgaaggtgtcgtcaacttcttctctacgcccgactggacaccgatacgcagtctgccatccacaagagctgtcagtaccattgtattggatgacgaagaggcgcaatccgacacaggcatcgacgctgctggaatgattagcgtctgcctcgtacgtcgcaaaaacatcatcctcgccaaaatcggctcagacggccgctcggatctcctctggtccaccatcaaggacgtgcctcttcccggcggcgccatctttgctcgtcgctacgcagataccctgtgcatcgccaacgccaccgagtacagcctcgtcaacctctcttccggctccatcacccagctccatctgcccatcagtcagaccggcgagtctccctccgcccaggtcaggcccagcatcgtcacggttcctgtccagccttcttcgctcaggcaaggcagcgtctccccagaggtcggccgcggctccagcgctgccgcttcgccttccgccaactgcgagtttctcgtcacgtcgcacagtggttccagcaccctcggcgtctttgtcaagccctcgggcgagccggcgcccaagctgctcgaatggccgtcgcatccccgctccgtcgccttcgacggcaagcatctagtatcgctgcttcgtaacgataccgtcgagctccaccgcatccgctccgactcgacccacaggcttcagaccattcagctgccgccaggtctcgatccgcgtttcctgcagcccgtttcgcacccagcagatgcacaacctagcgcgtccgacccatccgtctctacaagcagcgatctggacatcgtcaaggtcaacctcgcccacctcgatggctctgacgccaccttgttgagtcgcgctcaggaagaccagcacgcatcgtcatcttcgccatgccagatcctcttgtgtggcagaaactccacctcggctgttcagcaggactcactgctaggctggacatcccaacagcttcgtcgcggccgtatccgcaatctccggcagagcctcgcctcgtacagagagaacgcaaacgatgatgctaccaactctagcgctttgcagtcttctctcgaggcatcggctgcgcacgcacgcttgggcatcgaactcttgcatcgtgcagactttgctgcggcgtcggatgttttgagtcacgcccacctcgatccacgttggatcctgggctgcttcccatctctgctgcccgagggccaagcgctgggagaggccattctaccggcactcctgctccccgatctcgaaaagttgaagcgcaaggatggcaacggcatccaaagcatcgagaacatcatcgtcgccaacctcactctcaactactctcctcctttggacgtcgacaaggaccgcgccctctcggaactcaagcaaacactgctgcaccgttccgacgcaatgctccgtcgtctcttggaggactggcgtgcagctgccgtcgacgcagcacatccatgggctggtacatacatggacgagcacatgctggccaacgtccacaaccgcgtcgactcggcgtatcttcacctgcttgcgcagggccgtgggacggacaacccagatgcagcttcgatcaagcgcgagatggcggcgttcctcgactcgaaccacgcttgcgagcctgccgtggtagagaagcttctcaaggacaaggggttcttgctgctcctcgcaagacactatgaatcggtcggcaacgtcgagggggcgctcagcatcttggcgggcttggtggatggcaagcagagcgatgcgctcgagcagagcattgacaccagcgctacggtatccaagatcgccgatctgctttctggacagcaggatgccagcttggtctccgagtacggtcgctggcttgtgcgcaaagaccctgaagctggtatccgcattctcaccgcccagactgctgcgtcggattccgctgcgacccaaaagacgccctcgcgaagcaaggcgcaggagctggatgcgatccgattgcagaaagcgaccatcgacgagctgcgccagatcgatgcggacgcggcgaccaagtatctcgaggtggttgcgctgtccacgtccaaggtgcaggatgagcagatgcaccgcgagctggcggcggctctcatccggcgcgtcgccaagcatctcgaggatgccgagtaccgaacgaagatggagtcgatcgagcacgagtatgcggacggctcgtatgccgagtcgttctttgcgcacctggcgttggcgtgcagcggctcgagcatggacgtggatcgactcaagctgtcgatgctgctgcaggggtccaccatgctggactacggcgcggtgctgttgatgatcgagccgctgccgacgctggcgtacgagcgtgcgattgtgttgggtaagctgggacgcgatgcggatgcgctgtctctgctggccatcacgctgagggatgccaacagtgccgaggcgtactgctcgcaggacggtgaggtgctttcgcccatgctggcagcttctatcgccgaggaccacgaggagttgcgtccgtttgcagcgatgctcagccgcacacatgcacagcgcatcaagacacatgccaagcaggagcagcaagctggccgcacaggggcagcacagcgaaagcagacgctgctcaaggagcttctgtcggtgtacatggcgaatggcgcacacgaaaagttccgcatcgctacggcgcatttgctgaatacgcaggcgctgcacctcgacagccagcaggtgctcgagctggtgcctgccgattggtcgatccagacgctcgagacgttcctcacgcagagtctgcgacgtcagcttcatcgccgacgcgaagtggccatgctgcgcagcatcgcaaagtgccgcagcctcgacctggccgaagatctgtgggcacgtcagcgcgccatgggcggcattgtgcaagatacggattcgggcggcgccgaggacagcgctgcatcgttcgatgccgtacaccagtccagcctggcagaaggcaaagcacacttggacgatcaggacagcaacgctcaaagcgaaaagcggcgaaccggcggtctcgatacgagcgaccgagcaaaagtggagattgtccacgccgattatagcgcccccacatctgctgtcgtctacgccgagcgcgaggacggtgcggacggcgatcttggctgacactctcactcgcagcgcacatgggacaatggcaacgtgtctcgc

SEQ ID NO: 12697 - DNA, 3182 bp, Oryza sativa
  ref <308>: DATABASE ACCESSION NUMBER: AK110045
  ref <309>: DATABASE ENTRY DATE: 2001-12-06
acgaccttgctcgcatcgcatcgcatcgcatcgactccatcccggacgggctgatggtactgtccacctctagccgcgcgccagcacaaggaccatggcgaggaggaagaaggaccctttcagcgatgacgacacctccaccgacgacgacagcctcgacctggccgacgtggacgacgaggccttgaacggcgtttcgggcttggacttctcgactcgacccgcgcacaagcggccacgccgcaccaaggacgacgccatctacggcatgtttggcgaaggtgaccacaacgagcacgacggcggcgcaggtcgcaccgtacgagccagggatgcgcgaggcaaaaagatcgactaccgccgcggacaggccttcattcccgcctcggcgtctgcagcagctgtcagcacacagcaaggtgaatctttgcacacgcaggaagctgcagcgagtggttcgggcggctcagatagctcggattcggattcgaactcggaggcagagatactgcaagatgccggcggcgcagaagcggttgaggaagacgactttcagcctgcctcattccgatccagccgcggaggtattggatcacatggacacgagcaggcgccacgtcctcagcgtcctcctccaacagaacaacctcagaagcggtcgggccgtgcagggattggcgctcgcgcaggcatcggcagctcctccagcaacagggacggcgacgataccgcctcggcaccgcgcagaaccgggctcacctcgctctcgatgttcgtctcggctggagcatccaggccatccgaaccagcgccaccaggaccaccaccgataccacccacgactttggcgtccacatcagacgcagcgacatcgaccacggcaccagaaccgccaagctcaacaacacaacacaccgatgccatcgcagccgtcgacgaccgagaccaacaaatgtcagctgccggcctgccaacctccttctccaggccctcgctggcgccgtcatcggcgttccagcgcgcacgcaagccggacgcgcccgccatgccacgcacgagcatcaaattcggcggcaagttcgacccgtctgcgtacctggcgtcgatgggctggacgggcggaggcctgggcaaggcgggccagggcattgtgaacccgatcgaggtgcagctacgaccggagcgcgccggtatcgcgtacggcgggctcaaggaaaagacgcagcaggccaaggacgaagcgcggcgtcgcggcgaagctgtatcgagcgacgaagagacgcacgcgcggcgtgggcacgggaagaagcgccacgacaagcagagacgcaaggcggacggagaggcagcggagacgccgcgcgcatggaccaagaaggagaagaagccgcgcaagcccagggtggagcatcgcacgtacgagcagatcctcgccgaggtgggcgcggtacgtgcaccgtcgacgctgggcaagatctacgatgccagcagcggtgagctgcgcgaggtagcggatctggcttcggcactcgggagcaggggtgcgccgacggccgaggcgaacgagctgccggagctgcagcacaatctgcgcctcatctgcaccaccaacgcccagacgctcacggcgcttgcccgggagggcgcgcagatccaggacaggcgacgctggctcaggcgcgaggcggagcaggcagagcgccagcgcgcggccgacgcggcaaagctacagcgtgtgcagcaggcgctggtgctcgtgcgcgagctcgaggcggtgcatgcgcgcgctgcgaagctggaccccgacgcgacgcaagacgcgcgcctggctgcgctcgaggcgtttacgcccatagtcgcgcggctcgaggcccacgcgcgcgggatggccgagatggcgctggacgaagcggtggtgggtgcggcagcgcccttgctgcgtgcggtatggacggcatggcgaccgctcaaagagccgcagctgactgtgtcgatgctgcaggcgtgggcggggatgttgcacccgcaagaaacagcgggcggcaagggcgagcgcgtcatgacggcgtgggaggcgcttatttggaacgtctggatgcctcccgtccgcagtgcgctcaacgcatggaagccgcaccatccctcggcggccgtggagctgctcgaggcatggcgcggcgtcgtgccgcagtttgtgtacgacaatctggtagaccagatcgtgcttcccaagctgcacgccgcgctcggggcatgggagcccaagagcagctggcggctggaccacgccgtgttcccctggttgcccgtgctgggtacccaacgtctgggcgaggtgatgggcgaggccaaacggcggctgcgcagtgcgctcaagacggccgacatcccagccggacccgatggagggctcgaggcgtggcgaaagctgtacgcgcagagcggcggcgagtgggacgcgctcatgctggcgacggtcgtgccgcggctgtcgagccacctgcgtggtttcaaagtggaccctgcagaccagaagatggatgtgctggaggcggtgtttgcgtggacaaaggtggtgcggcggtcggtggtggcgcgcgtcgtggcggccgaggtgttcccgcaatggctgggtgtgctgggtgcatggattacgcagccgggtgcggatctggacgaggtggcgcagtggtacgagttctggcgcggctatctggagccgctgtgcacgtcggatcccacgaaccccatcaatgctggctttgccatcgcgctggataggattaatcttgcgctcgatacaccacccgaacaaagggcgcagctcaagccgccagtgtacgtcctgccatctcgccggtcggaggtgaagccagctgcagcgggggtgcaggtggccgaggtggcgacgctgcgcgatgtgttggccgaggagctggctgtgcacgatctgttcctgtttaagaccgcacaggtgcacaggacgggtccggcgagcacggcgaccgtatggagggtggcgcgcgcgtttgaagcgacagccgccccagcggccaaggtgtatatcgacgacgatgtcgtgttcagaagcgacgagcacggatggacgcccgtcagcatcgccgagcttgtgcagagtctcgcgtagcctagcgatacaagcaatacaaatgcaagccaac

SEQ ID NO: 12698 - DNA, 3276 bp, Oryza sativa
  ref <308>: DATABASE ACCESSION NUMBER: AK110046
  ref <309>: DATABASE ENTRY DATE: 2001-12-06
aatcactcacagcaatctccttgatcgtcgccttcgtcggatcggatccgtaccgacgacgccttcgtggcaaccctccccgaccacacaccaccaacaacgacgatagcaccaccacctacagacagcgatgcaccgaatctaagcatccaagccctgcacatccatccatacaccaccatggacggcgcaaactgtgccagtcgcaagggcaagcgcgccctcgtccactcgtgcccgtcctcgtccattcccagcaagatccccaggacatctccgccactcagctccgaggccgatctgccaccatgccgccccaacgcgtctgtcaccaacgcaggcccttccatcagccgtgtcggagtccagcacagtgatcgtgatcgtgctcgcagcccgcaagcatcgtcgtcatcatcatcatcatcatcatcgtcgtcgtcgtcgtgtgctgggcccagcgccgacccctttccgcgatatgagctcggcatcccgcatctcgatgtcttgcttcccacccgtgatggcctcgaccttcttcacgcctaccagcagggcgtcggctggatcaacacgcccgtcgatcgcaccaccctcctcgagacgctcgaagaggctcagcgccacgggcccacctcgattcacccgcatcgcctcgcctgcctcctcgccgctctcgctctcggcgatctctttgggccttgctttccatcctcgcttccatcctcctcccgtccatccgcccactcgccgtccaaacgcggcaagatttggtttggcgtcgcctctgcatgcctagcaggctcgcgccccgacatcgagctcatgcacagccccaccccggacgcctgctcggctctctatctcatgtccatctatctgctctgctccaacgacgacgagctcttccagcgctcacaaggtctcaccggccttgcgctcatcctggcgaaggccgctctcgtgccttcgtgcctcccgtcctcgcgtcccatcgcatcgcgccataccaccgcttccgcctctctgcacgccaacctggtcaccccctggcagcctgtgctttctaccgccgcacagagcggcgacaacgaccggcttcagtgcaatcgtcttctcagcgatctcatcttccatctccaatgccaggtcctcaccctcgccctcccttgcacttcaaagagcgctggcaacgtcgggtcgatcccctcgctcgccaacttccccgacgtccccacgattcaggccatctggaccgcctttggcactccgctctacgccagcatcgacgccttcggcagtcgcttcagccccaacatctttcacaactggaagctgggcctggccgaccttatgcaccaggtttcgtgcctcaccaatccgagcactgcagcaaagcccttagcgcccttgtcatcctccgctgccggcctccaagccgcagacaaggacgcaggtgtgcgctcggtcaagccgagtctgcccgatcattcgcagatcatcaagctcgacgagcgcatccgacgctatcacgccagcctgcccgactttcttctcctccaccggcccttgcccgtcgagatggccggaaaggtcgacgaggacgagctcgcgcagatcatttgccagcgtcacatggcttgctccatggtccaccgcatgcttatggcgctccatcgtccgtggttcctctcggcgcttgctacaaagtctcgccctccgcacaccaaggccgctgcgaagcatgggcaggctgacatcgcacgaggatccgaaacggcacaatccaacaaaggcgaccccactccgcctgcgcagcagccttccgcgtcagacatgtactccttgtcagccgtgctccgttcggccacatggcagaccgagacgttcgcgagcgcggcatcgtgcgcgcctccgcaggctctggcgtggtggcagtttaccaacaacgcgcttgcggcgtcggtcgtgcaggcgacggctctgcttcgactgtgcggctccggcgcgcctggtgccggctcctccgggtcagccaaggtagccggcactgcggcgagcgagccctgtaccgccacatcccaattccaccgccaagtgcgcaccgacctcgacaagaacgtctgctcgttccagaacgtcgccaagcgctgcaagctcgcagcgcgcgccttgcccttcctccagcgcgtatgcgccgccatcgacacgggcctctgcaagtccaagacgcagcagatgcccgacaccgacgcgttgcaatccagcctggatgagtccgagagacccttggaccacagcgagctggatgcatgcggcctgcgcacccaccctccacagcatacgtccccatctcaacatagactcgacacggacaacagcatcagcatcagcacacgcattcactccgagaccgcttccgacatcagtaacagcattagcaacagcattagcaacagcaacagcaacagcaacagcaacagcaacagcaacagcagcagcaacagcagcagcaacagcaacagcaagggccacctggcaagcaacggtaaatcaaccaacgacaaaacaaatgcaggtatcaacaggacgaccagcgacatggacacgagcaaggctgcgaccgacggcagttgctcgcacaatagcagtgacgaggaggctgcgcatcgtccgcgggctggggccgaggctgcatgtgatccgacgcccgagcaatggggcagtcgaccggccgtggccgtgcgccgtgcatcgagtgccaactcacgcgcaggctcggatctcgaggcgatgtttggtccgatcgcccagggtctcgagcctcccgaggcgacgagtgctccgcgcacgagtgccggactggccaagccgttctaccgccagaactgggactcgctgccggtgccgcgcgaagcggatgggggcagctcgcaggcgccgcacagcgacgcgggctcgtcgtccagcagcaccatgcccgtcacgccggcggccacgctgggttcgcgctcgccgcgcatgggctcgcgtgtagagattcctgacgtcactccgtcagcggctggcagtggcaacgaaggaaagccaccgactgcggcggcgacaacgacatcgaggaagaaggcgagcttcgagtcggatctggtgctgcagtgcatccgattctggcagccggatctgctcgccatgccgtcgcgcgccttagccgctccgagggacacttgagctcagtaggcacctgcgggaaaacatgcattttggttttcaaag

SEQ ID NO: 12699 - DNA, 3402 bp, Oryza sativa
  ref <308>: DATABASE ACCESSION NUMBER: AK110047
  ref <309>: DATABASE ENTRY DATE: 2001-12-06
ggtgctgacgtgtccttcagtgactcgtccaaatgcgagccaccaccggccatggcggtcaacgaacccggcaccggcaagggatagctcctgccgtagagccggaggaagccgagcgcctcgacccgcggctccggcggcggcacgctgccttccaggatccgcaccacggtggccatgctcggccgcagcgcagggtcctcgtgaaggcagcagagcgcgacgcggacggtgcgtgccgcttcggcctcgtcgacgcgcccctccagcctcgcgtcgacgaggtccaggtatctccgctgctcatggagctccagtgccagcatcgggaagtactcgtcgccgccgccgctcgtgccactcgccgtcgacgtcatcgcgctgctccaaccggacggcaagtccgagtgctcgccgctgccggcagcgacggcgacgttgttggccggcgccgccgcctcctgctcgccgcggttcttcctcccgtgtatcagctcgagcagcaccatgccgaagctgtagacgtcggcgcggtcggagatggccgcgttgctgatccactcgggcgcgaggtacccgcgcgtgccgcgcatggtggtgaacagcgccgactgctcccgcgacatcagcttggcgaggccgaagtccgagatcttcacctggccgccgttggcgagcaggatgttctccggcttgacgtcgcagtgcacgatcttctgctcgcacccggtgtgcaggtacgccagcccgcgcgccgcgccgatcgccacctccatgcgctccccccactccagcaccggccccgtgcggccgaacagtgaccggtcgagcgagccccggttcatgtactcgtagacgagcagccggcgggaaccctcggcgcagaagccgcggaggcggacgaggttgacgtggcggatgttgccgatgatggtgatctccgtgcagaactcccgcttggcctgcacgccggcggcctcgagctttttcacggcgatgagcccctcgccgcctggaagctcccctttgtacacggtgccgaacccgccggatcccaccttcgtcgcgaaattggaggtcatcgttgtaatctcctggtagctaaacctcgccggcacgcccggtatgacgatgtcgtcatcgtcgccgccgccgtcgtcgtcagcgtccgcgttatagccggtgtccctggacggcgacttctgacggcccaagtacactttcatggtggagctcttgcccttctttttcctgccgttcttgctcatcttgttcctccaccatatataccatccgagcacggcgaggagaaggaacgccgcgacggacggcaggacgatcggcacggtgtggttcgccgacgacgagccgatttggttgctcccggccttggttgcggagttgaacgtcttgatgtatcccaggtttgtatctgatgcgcccttgtacagcgagccgagctgctttcctccgatcaagcggcagctcagggagacgctgtcgtggaagaagccgaggcaagcgcagctggcggtgcagagcgcgcgacacgccgtcttgttgacgccggtgttcgtcggggcgtcgaacttcgtggcgaagtaggaggtcagcggcttgagggcgatgtatgaaacggaggcgccgccgctgctactgtcgttgttctgacacgcggccggcgacgcgagcgtcgagccgtcccccggcgtgcacgagccggcaactgtcacggatgcggcgaagagcggcgggcacgtgcaggttgagccgttgcccgccggtgaacagtaaccgagggacgggcactgcagcgggaggtcgcagtcgccggctggggcgatgaagtcgccgccgaccggcgccgaggagttcacgagcgcgtagctgatgatgcgcagccggccgtcgctccccagcttcagcatgcggaactccgccggcgcgaggcccacccggaacaccatagcgccgtcggcggcgaccgcgaacagccccgacgcgttcaccgacatggacgccacggcggcgttggtatccttgaacccccgggcgtcgttcgacagccgccagtaggtggacccctgccacgtcaacagcacgtcggcggtgatcacgccgaaccggtagtccccctgggagaaatcggtagcgcccttcgccgacgacaggtatgctccggcgagcagctgctgcccgggcagcagcgtgtcggtggcgttatcgaacgaccgccacagcgtggcgttcccggcgtccagcagctgcaggtccccggtgtcctgcaggcggagcgccgcgacgggggaccacagcggcggcgttgaccacagcaccgtcccattggcgtccgacacggtgatccctcccacagagagctggaccttaccggtcgagctcgtcggcgcgtcgcggttggccgaccagacgggcgtccccgacggcgcgtgcagcacggcgaggtagaagctggcctgctgcttcccggggttgaacaccgccgccctgaacgagccgttcctggacaccaagaacgcgccgccggtgtcgacgtagtcgtagctagtcgccgtgaagctgggccgcacgatctccacggccaggggccccgcgtccgcgtcccgcacggactcgagcagcagcagcagcggcggcagcagaaggcacgcgagcgatctcgagggaggcatctgcgcccatgaagcgtaccaacgcacggcacgagatggggagaggaggaggaggagtagccgagtagccgagtaggcgatcgcgagcgctgacttcgcagcaagagttgggaatcgccacctctgcttcggcgccgcgcgggagttgggcttgggcacgtttttgccgcggtttaggcctcggaatccatagctcgcggcatagcgttttcccggattggatttgccgggttttcttctagatcgggccgttttttaagacaaacggtggagtggatcgagttgcacacttgctcgccgtgcagccagcttgaaagcgaaatcttcggttggtgctttggcacggggcactgcaaagtcggcaactgcggcaggaaaccgtcaaacagagctggttattaggccgtaggcagttgcagtacgttgactactatcctcagcactagagcaactaagcaaacggaattggatcagtgcagatttgggactttttttgcagaaagtcaaatggcatccattttcagattcttcagaacaggtgctgttcattcagaaattcaagagttctgtggtcaattatgggcaaaaaaacacgagttaacatttggtagtaaagtagcatataaacaagtagctcatctacaggtcagtcggccagttcccgcatgacgatggttgttgaccccaggtttggctgaccgcggttttcccc

SEQ ID NO: 12700 - DNA, 3075 bp, Oryza sativa
  ref <308>: DATABASE ACCESSION NUMBER: AK110048
  ref <309>: DATABASE ENTRY DATE: 2001-12-06
atcatcaccaccttcttccctcctcgacgtcgctcttcgctttctcgttgcgacactctccgcctcctaccttcttcactaccacatcactcctacacgctcaacattcgccttgctgcgtggcgttcctacactcttcttcactcaattcctgccagctttagcgtacgagctagaggacgccactcctgctcgtcgcttctaggaagcagcctcgagtccccactttggctttctggctgctcgtccgttttagacctcgcctctctccctcggcttgctggctcccaacgcagccgttcccccctggcctgcacttgcactgcaactgcgacggtcgcatattcacctccccggtgctagcgtctctctgccgccagcctacaaccttctgatgcaaacttgtcgcctgcatcgacgagaccttctcgctccatctcggtgttttagctgaccgatcgatcccgcacaaactcgcctcttgactccaggctcaacccactcctctatactccgcatctcgacccataccgcaccatgcagatcactctgttgtcctgttccgaagctgctgatagccagcacgaatctcccgcatcagcccacgccaactctacgcatacccagcatatctcccctgtaccctcggtcaccatgggcaacgccgacgaccacgacgaacacgccacaatgaccatcaacgtcgaagaaaccaatcgcaagtacgcctccatctctccagctgccaacgctctcaagcgtctcgccgccgactccgactcggcttccaacaacgattccctcaccgacggcaccgcctccatgccctccacagagccttccaccaccccagacgaggtcagcagctcctccagtggcatatccgccgctaggaggaacgcaaagcgcgcacgaaccgactcggcagctcctctccaacatgcacgcgagcgcgttcagctgcctcaccctctcggcatcaagccactcggcaacgctttcctctcggatcgcaacgatcgcatcccttcgctcggcctctttgcgcgcttcgacgacgactttctgctcaacttcatcaccagctcccttgcccaagaccccgccacgctcgccaagctcgaagccgtcagtcacgccttctacactttcatcaacgccaccaactcggtctggcgcgaagcctttttgctcgctttcaacggcaagatgaagcgctggtgcggcagctggaagcgcaccctcatctggcaccacaagctcagccgagccgtctttgacgacaaggcgcgcgactccatggacggttccgcctttgcgctgctcgacccgcccgcacccaggattcagtcgccctacctcttctcagacaccctctaccaccccttccgcctcgccactgctcctttggaccacctcgtcgctcccgcatgccgtctctacaaccccatcccaaagatcgaccttgcagagccgggttccatcgccgagttcaagcttaaattcgcctatgccaacaggcctgccatcgtacagaatgccatgccgcccaaggactggccctgtcgtgagtggtcgctcgacaagcttgcgcagcgctggcccaaccgattcttccagtgcgaggccgtgcgctcacgcctgcccacctactttagctactcgcgcggcatgcagcacctccacgaacagacgtggcagcagctgctcgaagacgccgacggcaacccggatgcagccggccggcgagactcggcgaccgtctccaacgatggcacatcctccgcagacggcaccgacagcccgcgcgatcgcaccgcgctcccgctccagaataccccgtacacgatcacacgcgctggcacgcagctgtactctgccgtcgccgacgagggcgactcgacgttcgacccgtacgccgtgccggacgagtcgcccttctacctgtttgacgcgtcgtttgccgacgacccgcatgcgtcgctcgagtggcgcgtgcccaagttcttccagcagatctccaccaccgccgccgacgcacgagctgaccatgatgcgtcggccgtgcgctccgacctcttctcgctgctcggccggctgcgccccgatcaccgctggatcatcgccgggcccgcacgcagcggcagtggctggcacaaggaccccaacgccacctcggcgtggaacgcggtgttgacgggtcgcaaggcgtggatgatgctgccgccgcacgttacgccgcccggtgtgtttgtgagcgacgacgaggccgaggtgacggcgccgctcagcatcgccgagtggctgctcgagtttgcgcacgagacgcgcaggctgtacggcccctcggcggcgcgcgcagaggagaggctgctggtcgagggcgtgtgcgaggagggcgaggtgctgtacgtgcccagcggctggtggcatctggtgatcaacctcgaagagtcggtggcgctcacgcagaactttgtctcgccgcccgaactggccaccgtgctcgactttatgaagaacaagcccgaccagctttcgggcttcaagcgcacgcagctggacgggccggccgaggcgggcgcggtggcgcttgcgccgggacgacaggcggcgtcgatcggacaatcggtcgcgggcgcgcaacagacgcaggcggacgaggcggacgacgactgcgacggcgcgacgtttgatgtgtttgcgctcttcgccgaccggctgcagcgcttcgacggcgcgctgctcgacgaagcactcggcaaggtcgagcagtccgagcagacgcgcaaggcgatgtgtctcgcgaggcgcgtggcgcccgcgcccaggacggcggcgcgccggccgaatgccggcccgacgtggtgggagaagctcaagcagcacgaggctgcgcctagtggcgacggcgccgagcaacaggcgccgagcgcattctccttgtccacgcagctggcgggcgagcagctcgagctcgacgacgtgccgtggtagactggcgcggctgtagccactgcatgttcccctggctcacatttgtataaaaattctcagactcttttttttcctttg

SEQ ID NO: 12701 - DNA, 3547 bp, Oryza sativa
  ref <308>: DATABASE ACCESSION NUMBER: AK110049
  ref <309>: DATABASE ENTRY DATE: 2001-12-06
aaccctcttccacatcgcgacgcgcagcgcctgccaggattgccgcccccacctcacgactttcgcacgcgctgcatcatcgcttcatttcatccgagaagcgcggtccctccagagcgcgccaatctgcctgaagttcaagctcggtgggaaaccttactcccgtatccgcacctgcatctcatccgcacctcctcggccatgcaggcgctgctcagctgagccacttcgcttccacttgcacgtcagggcgacttgcagcctagcatgctcgcgcgacgttctcgtcttgcgcctcgtcaccttctgtcatgacctccctcgtcgacctttacaatgctcggcgcgcagaagaacttggtgtgcctgatccaagcacttccgcgccgacacttaccaccgacgtccgcacagagaccatatctgtccattgccagaggaacccacagcccacctcattagctgacctgtacaaccagcgctacgaatccgaaaggaatccacaggtcgaccacgagtcgcgaacctcgttcgcacagccttcctccttcaggcctccaactcagaacaagcacgccgcaatcccatcaagcgcagtctccgtcgactcggacagcgatgtgagcacgtgatccttacgaggcttcttacagaccgaaacggacgaactcgaacatgaggccgacgaatccggcgcatccgacgattccgacgtagcaatgatttccgcagccagaagccaatcgcgcagcgtttccgtgtccgtagcgcctcaaggagcccgcgtcaggtacgttcctcgcacgcccgtcccgcgcagaggcgcgctcaatccgtcggcaacgcccttgcctgacgacggtcacgatgatctcgatgacgcggtaacgcccgagccggaaccaccaagcgcgtctgcgagctcgaatacggcgcccctgccggtccgtccacacccgtcgtcatccaagctcgttgtgcagtcggagtcctccgatacgccgcacactgctgagtcggatacctccgagccacctagagccccgcagcatctcgagcgtgtagctctcccgcgtcacactctggcggatacggaagagacaagcggcactgaatcggctctggcgcatcaccatgtgcctgcgcgtgtcggcacagcacgactccaagacatggaagcgggcgacgacgctgtaatcgttgtggtcgatgactcttccgccgatgaggcgtacacgcgcccaaccccaaagcttcctggccaatccgcacgcagcgcttctgcatcctcacgctttgccaacgccaacccaatggtggtgctccccgatgccaagcagtcaatgcatctgctggatgtggagatgggcagctcatcggacacgtcacacgctctacagccttcgtcggatcacgtcctcaatggtggcttgcaacccaaaagcattgtcattgacgactcaagttcgcaagcaactccggccactggctccgacagcgaggctttccgacgctatccgaagcgcgcgcgcaacgtcacagattacaatgtgcggcgcgccttcgagcgatgggagcggcagcatgctcaagaggcgttagcgcaagtcagccatccagctcgacaaaggggaaagacgctgcccgtggtccttgcgtcgtcggagttcctcgatcgtgtccgtcagggcgctacaagcacatctcacacgcggccaaggccacagagctctttcgccgacttccttctcgcaaaggcgcagtctgccgcttcggctgagccgaccttccctgccgcttcgacccgcagtgcgcaccctgacagggcgttgaccgtagccaaggcgcgccaactacccacccgcaccctgcatccagcagcattttgggaccttcctgtgcgcgccgaccgcgaaggtgtagctcagctcccgctcagcacgcgtcgcgcgctcggcctcggacccgctccgcctccgacaagcccgcagatccctccacccgccaagcgtaaaatcttgtttggtgagctgctttctttgcaggaacagtggcccaaggcagcacagcggcgcatgcagctcgagtcttgtgtcggcgaggggcgcctggggcggtcaccgaatgccgaaggactcgacagcgtggcgcggcatctgcgtgccggacgatcgtgcaagcttcctctgccggacgcgctgagcgtgctgtcggacatggagcggcgcgagtggttgaggttcgaagaagggcagtcggacctcgagcggcttgccgaggaggatcgcgcgcgcgagcgcggcctcgtcatggtcgacgtcaacgactgcgggtgcgtcaaaacgcagaccgacggcgcggggcgtacgcgctttgcaaaggtgacgtgcgcgacgggtggaacgatccgcgtgtactttgatcttcagcgctccgaggccgcaatctcgcaggaagaggagagcgagcagaggatggagatcgtgcgcacggcttcgcctgccaagctgacatctgcgtcgcgtttagcgggtaagcaggccgtgccaaactcagactctgcttcagaggagatggttctggacgtggtggacgtggatgatgacgaattgcccgtcgaagcgcagatgtacgacagcgacgacgacgacactcctgtcgaagtggagatgctggaagacgacgatgatgacgacgcatcggttcgggaagtgacgcccgtgccagtggcaagcactgccctaaatcgcgggcgcatcgatgacttattctccgtacggacgtccagatcgcccggactggagcagcctaatggctcggcagcaattccacttcccagacccggccaggccgctgccgctcttccttcttcctcttcaacgcaacccgctgcacgcgccgccatctccaaatcacgcagcgcttccgacaagagcccgcgcgaccttcgctcatacttcacactcctgccgtctccgtcaaagcgggctcggtcgccgtctcccactggtcaacgcggggcgctcggctctctgagcgctgtagcgcgcggaaagcaacgtgcggtagagaagtctgcggcggaagactcgctgtcgacagccgaggtctccgagtggatccccagccagtcgccttcgcaacaggtcgaggtggtcttagacgcgcccacacctgcttctatgcgggagatgattggaacgccgcgcaagaagcgcgcacattcgcccgaaacctcattccgcaagcccaagcacacaaaggctgccaaagcggccgagccaagttcacagcaagaacgactcgcgcgcgcaccaggaatcaagcccaagaagaggaaggccacaaccgcacagcaacgacgaccgcccaaggcgacaccgtccccttcgcgcggaggttggcgaggtctttcgtcctggtacactgcacgagacgccttcactccgactcccgacacgccgaacccacgcaaacgtcactgaggtagccacactgcaaacaggcacgcacaagcagagatgaaatggatgcaaaagtctcgctc

SEQ ID NO: 12702 - DNA, 3184 bp, Oryza sativa
  ref <308>: DATABASE ACCESSION NUMBER: AK110050
  ref <309>: DATABASE ENTRY DATE: 2001-12-06
gcacctattcaacaccgcgtcagcatcatctcccaacacatgcacaccggggaaatgtacttactacatcatccgggcagggattgcagtcgcccgcggggacgcagacatagtcggtcgcattaccacccccgaccgccggttgcgatcccgaaggcttgtctttagcttggccgttgcggaatcccgaccagagcggccattctccttcgtatcctttcgccttgacaccctcggtcttgccgtcgcccagcacgaacttggcgcccggcagctcggtgtctggccgccacgagtctcgacgcgcgagcgagcgcggtggcgtggacgaagaggtttcggtcgcgagggcgttgaggaagaagagcgacatcatgagcgcgatgcgggacggccgtgtgcgtgggtatgtacgcggcattgcgcgtgggttggaggtgggaggtgggcagagatggtggtgaggacggcaggagcgaggttcggttgatgaggtgttggtgttgggcggtgcgtcgaattccgagcgccgaatgccgaatcccgaccgaggtggtggaggcgcagcggtactcgacacaagagctccatgcacccttccacctgtccaccacgcgatcaccagcccaccctcttcacgagccccctgcgcaacagacgagggcgctgttcacgggccggcatcaatcagccatgtcggccgcgtccgccgctgcgccagacgcgcttgtctcgaccagcgaccgcacggcgagcggctccaagtcgaagaggaagcggagagactcgctcagcaagtcgggaaagaagcgcgagcccactcgacaggaatcgctcggcggagcggtgattcgatcgctcttcggcacgcttgccttcctgttcaagcggcccgtccgtctgttccgccccgtcaagctgtcgtcatggacgatcctcgaggccatggcgaatcgcgagggccgcaaactcagcctccgctacctgcgcatgctgctgcgccgcgagaactccaactttctgccgcaccttcttctgcctccgctcctcttcaataccgccatcggcttcacgctcttcgaggcatacagcatcacggagagccggctcctcgcccggtcgaaacgacaagccagcggccctggcaccgatgcggaagatgcagaagatgaggaagaagcgagcgctccgacgccaaagtggacgccgctctggatcgtcacagcttccggtgcggtggcaggcgccgcacagtgcttcctctcggcaccgctggacaatgtgcgctacatcatgcagcgcaacgtcagcgcatccgactcgcatgcacgcggcggcgctagagcggtgaccctcatatcgtggcgcgctatcctgcgtgcggcgatcttgccgttcgcgccggcgattgcacgcgacaagctcgtgcacgacgtgcagaaggaggcgatcgagcattccaaacgcacgcccaagcccacgctgcgtgcgcgcatcgtggcgctgctcgagccggcgacggcgagtcgcgatgcggccgaaagcgtgagtcagcgcttcagcatgtcgcccgagaagcggcaggagtgggagaagcgcctcaagcgctggcgcggcggcgtgcacggctcggggctcgcactctcgctcatccgagacagcgtgggattcggcagcttcttcttcatctttgaggtgtcgaggcggtgtgcctttttcgcctcgacgtccgtcgaccgcatgagtgcgtggttcaatgcgcgcggactcggcgttgtgcggccaggcggagagacgacgcagcaggacggccccaacgtcgtcggaagacgcaagagcgatgatgggatgggcgggggcgatgtgcacatcgaagacgcaggacgagtggcacactggatccgcgagggccagaggaacgtcacggatgccggcgtgagctacaaccagtcgcgcacggtgcagggacgggtggtggcggtaatcatcctgctggtgggcggtgcggtgggtgcgttttcgtacgagctggtcggacggccgtttgaactgatgcgcgtcgtcatctgggaggggcgcaagcagtgggagcagggcaaacgcgagcctggcttccgatcgtcggcgagacgcagcgcatccacggcttcggcggcgccatcgagcgccgacgcgatgggcgtgactacgctcggcagaacaagagtgcgcggtgccagggcggcggcgcaggctcgcgcggaagcgtacgatggacggctgtgcaagcggcgagccgactttgtggtgctgcgtgcgcagaatacgatgggcacccatgtctcgcgcgtctgggggcgcgccaagctcacgcgtccaccacatccgctccggctcactggcccggcagtgctccaccgaccgcagatcaacggtacagcaggtccgagactcaccagctcccgcgcgctgcagcatcgcaagacgctcaaagcgccgacttctacattgccatcgcacacggtcgagagcgaaaggcccccgcagcaccgccgaactcaccgagctgcgccgacgctggcgacgcgacctggctttctgacgctgctcatcgagcatgcacagagcacggcgcagctagaccgtaagcactcgggcgtcgatccgtccaagacttccatcccgctgctgctgctgcacacgtactttattgcgcccttcctgcccgagatccccgagccggtgctggacaacgagctggtgcgtgccgctgccggtgtcgacaaacacctccgcccctcctctggcgcgcaaacggtcaagacgcagacggatctcatggaaaaggtgagcactgtcgctcagcgcacgctgctcatgtcgcttgcatcaagacgcaggtcagccgagtcgcccgaggccaagctcaagaggaactggatcaagaacaatcccgtcaacgtcagctttgcgaaaggaaaggcagcagggacggatggtgggaagagagcgggtgggttcggagcgagcgacagatcgacgctccagaagggcacgaggtattgggcgagcggcagagtcgtctggtcgctcaagcggctcgccaccccgtacggcgttgcatttctcgtatttgcctggctcggaggcgatctcaactaatttcacatccgcacaggacattgaatacactagccatacgtat

SEQ ID NO: 12703 - DNA, 3271 bp, Oryza sativa
  ref <308>: DATABASE ACCESSION NUMBER: AK110051
  ref <309>: DATABASE ENTRY DATE: 2001-12-06
tggcatgagggcgcctcgcctatctttctcgggcgtaggcacgtctgccagcgcgagagcctcctccagctccagcgtcagcgtcgcgcgaatcgctcagccacgtcgcctctcgacacaaccgcaacatccagcacccactgcttcgtacccgcccgagctcttccaggacatcgtacaccgctctctccgatcggcgccttcgcctcgcgatgccaagtggagcaccgctatgagctgggcgcccgcgcaggacattgatgccgcacctgcgaccgccccccaagccaagacgggcaaggcacgcacatccgcccttccgacattcaacacatccatgctcatcctgcgtctcatccgcaacaaccgcatcctctctgccatgaccgcattcacagagcacatgaacaacaactccctcccgccattcacgcacgaccagctcgaggcgatcatcctcgcgctgcgcatccagagccgccgccacgcatcagcacgtccaacgcccatgccgcagccagccgacaggcacgcagagctatggcgaccctcgcgcctcgatccctccgtctcggccaagtcgctccccatccccgtgcagtgcatgtacgcaatgtcggccgtgtacgacgcctcgatcgagcacaagcacagacccaccgcaaagatggtcacggccatgctcgccacctttgccaccaccctcgcgcccgaacagctgctacacgctgcacgcaccgccatccagcacctcttccccgccaccacgtctcagcgcaagatcggcgtcttctggcgcttcatcagcctccgcgcactctccacctttattcgcgtgtttgggcgtgcaggcgtgcccgaagagggcgaagagttcctgcgacagtggacccgagctcagcgcgccggcgcggcccagccggatgcagccatgctgcaagccgacatcaccctcgacctagccggatggggtagcaacatcctcgtgtggcaggcgctcatcaatgccaggatcgacgcgggtcacctcgccgaagcgcgcaagtggctcgacaggtacaggctggccaccaagcagctgagtgccgcagccacaggcgaggctgccaacgctctgcccatccggtccgagccgtacctcgcctacatggccggcgtgcgcaactcggccaggaatctgcgctcggtcggaaagatccgccgcgtcatctcgtccacccacgacgtcgtgcgcctcatggccgcagaccacgtgcccatcgaatcctcggtgctcgcctttgtgctcgactgcgacgccaggctcggcgatgtcgacggcggcgcttcgctccttcacgagcttggcgacctcatccacaccatggcgctcgccgatcccgcgctgctccgttcgcttctgcacatgcgtcgtgctgtcgtcagcagcgcctctgctgcgggcgcgcgctcgaatctgtcaaatctgccgtcgacacactcgctcatccgctcgctcgtgcgcgtcggcgagggcgagacacccgcattgggcgaccacatggcagagtgccgcagccgcggcatgctcaacgacgccctcgtcaccgtgatggccgaacgcgactatcccgccgccgtggttctgctcaacctgtttgagcgctggatgatcaccgtctcgcagacgacgtacagcatcgtgctcacctcgctcgtgtcgcacggccatcacgatgcgctgcgcggcgaagcagcccaggcgacgcgctccgacagcgtacacagcctcgaggcgacgctgcagagcatggcgcgcgagggcaacggcgagcaggcggacacgatccgcagagcgctcggcgaccgcgtgctccattcccacacattcgtcgcgtccgctcggcccgcaacgccgctgaggaagacgcagttcctggtgcgcatcctcaaccgcgtgtgtgcggccgaaatcgaggcggccgagggcagagagcaactgcccgcgtgggcggtgcgcgtgacggcgatgcagacgcagcactggaaagacgacgtgcgcagtgtggtggccaaggccatcactatagcgcaaaccggcctgctggggcccaaggacacgcgcaagcagcgcatcgtgggtccagccaaggcgccgctgctctctgcagctgcgccacggctctcgcccaaacgcaaacacttcaccgccccacctgccacatggagccgggaactgagcacgtcggcggcagcgcgcgagacggctgcgagctgcgatctggcagcgtcggccaagggcgacaatacgcatctggagcccgtgcgcaccgtctacatcccgggtttcgtgccgtacgatctgggcctggcgctgcaggagcacctggtgcaggagcgtgcacaggcacgtcaggcgctgcgcgtcctggatgacgccagttcgacttcagcctcggtgcgtgcggggctgacactcgtatcgccctctgcgtccgaagctgccctgcgcgcacaggctgcgcaggatacgctgctgttgctgcagcatcgacccgtgtacaccgaggggcgacgggaggaatccgagaactttgacgttgccgaagctctgcgcgcgctcggggcggattacaagctcaccaagcgcggtgggcagatcacctaccacggaccgggtcagttggtgggctatccgatcctgaatctgggtgctatggggttggcgagtcggtgctacgtggaccgtgtgcaggattcgttgatctcgctgctggctacgcgcgggattgggacggtggatccgccggatgcgcatacgggcgtgtgggcggacgagttccacaagatcgcgagcatcgggatccaggtgcgtcaccgtgtctcgagtcacggctttgcgctcaatgtcgagcagcgtgccatgcgtggagtccgacacattgtggcgtgcggcatcgtgggtaggagcatgacgtgtgtgcatgatcgtctcgaccccacggggccttttgcacggtacaattcgggcaagcagggcgacaaggacgaatctgtggagagtgttgcaaaagactatgtgcgacactttggcaaggtgttcaagaggaccacaaggcaggcgacgcacgaagagatcagctttcaactggcacccgaggacaaggctgcactgatgcgcgagaggctcggtatcgatgtaggccatgtcgaacaagtggtgcaggcgattcgtgtgggcgatcatcgtgtgcaggtagcgtagtaatcccaccgactgcttgaagcatac

SEQ ID NO: 12704 - DNA, 3230 bp, Oryza sativa
  ref <308>: DATABASE ACCESSION NUMBER: AK110052
  ref <309>: DATABASE ENTRY DATE: 2001-12-06
atcatccgccatcctttccgcatcacgctcatcgccgacactcactcatcctagcgcttgctacctctctgggcgtgcacatcactcctcgcatcccagaaggctcataccccacgctggaatcttgacgagttgagcctatccggaacgcggcggtcaaagcaaacgggccactgctgagctaaaaaacaagtttggcttaccggctctctctctctcttcgtgttcctctaacgacactctcaacgacgcgtgcataccgcgcttccgcttcaccttcactgctgccagctgcgtcccacagcaagctagcagcggccgtcatgtgcctaaagcaatcagcacccgtccaagttcgcatgacagcacggctcgattgcccttgaccctttcaccacctcgtctcacccaggcatgttccccaccaacgccggcaacatgtcgatgggcggactcaacaacaatggcaacgtcaacggcggcaacatgggcgccggcctcggctttggcatgaacaacaacggcagccagatgcacggcaacatggccaacggcgtccagtcgcaggagaccggcaattcccagtccacctccgaatacacgctcgccggcatactccaccatctgcagagcgaatggcgccgatacgagaaggaccgcaacgagtgggagatcgagcgtgccgagctgcgcgcacgcatcgccctgctcgagggcgagcgcagaggcgtcgagaacctcaagaccgacctcatgaggagagtcaagatgctcgagtacgctctgcgccaggagcgctccaagtacctctcgtccggcggcagcacgatcaactcgcagtcggcatcgtctcccttgtcggccaacgcgcctccagccaaaaacccgctgttgcagggcctcgaaaagggtacctccagcagcggtcgcagctcgcccgcccccttccccgaagctgcgcctacggcatccgccatcgcagccgcagcaggctcggcaggtgcgatgggcaccggcctgctttcgcgctccacctcgagcgccaaggaccccaagtcgcgcgccaggagccgagagtacctcaagcagtgcctgcaggagatatcctacctcacctcggcatccacattgaatccgctcccggaccgcggcatcgcctcgggatcggctgtcaacggcaccaacatgcagagcgcgctacgaccccgaaagacgatgctcgaaaatgtgccgcctacgcttcctggccctaccgagtcgcacgccgccttggcaggatccatcagccgcgcatcgggagccgcactgggcatccccaatgccaagggtggtcgtcccggacgatccccgctgtttgcctcggaacccgtgctggaggaagcgaacgagactgaagagcctcaagaaggcggcctggagaccgtgccagaacagcgagaggtggatggtgcagagcagctcagttctggcgctgaatccgtcgcgcctctcaagaaccctctgagcgccacgttcgccgagcccgaaccttcgagcagcgccagccccgaggagactggcgacgagcagcgcgaacaggacgaggcgcccggcagctcgggctcttctgactcgtcgcgctcgtcgcagtcgacggactcgcgcggcaactcggcgggtagcatgacggaccaggagatggacgagcaggagcaggtgacggccatcttcaagccgggcggacgtgactggcagaagctcaaggaggcaggcatcaagagccgcgagcggcgcgagagcgagcgacagggccaggcggcggaagaggcgtcgatcatctgggaggcgcagcagcagctggccatcacgtcggaaaaggtgaatcagctcatgaaccgtagcggacgggcggcgggttcggagcgcaaggacgaggaggaactggcgaatctgagcctggtcgccgaggacgacgaggcggccaaggaggcggcggaggcggcggcggacagcctgctgtggaagtcgaaaaaggtgctgcgaagccacctggacgcggtgcgagcggtggcgttcctgccaaatgagatgtgcctgctctccacgtcggacgacaacacgatcaagttctggaacctggatgcgcagacgctcaaccagcctgcgggcaagtctggcacggacagccagccgctggtgacgttccgtggccattctgcggcggtgacgtgcgtggcggtgtctcgcagcaagcgacgcttctatagcggcagcctggactcgtcgatccgcgtgtggcaattgccagacggatcgaccgaggcgtacccgccgtttgaaaagtcgatggagctgggctgcctggtgggccactcgcaggcggtgtgggatgtggcgctggtgccggaccgttcggacgacgagggccgacttgccagcgcgtccgccgacggactggtcaaggtgtggaatgtcggcgcgagccaggcggagggcaagtcgaaggcggcagcgacgctcgagctgagctgggactactttggcagcgagcctgcggcggaggcggccaaggagcgcgagaacctcgagaagagcggcacgctgccggtgccgacgtgcgtggaggcgtgccactgggacctgcgtctcttggcggtgtcgtactcgaactcggtggtgaagctgtttgagctcgacacgggacgacaggtgcgccagctcaagagcgacgagacgtttgacggcacggccgagacgcagatcaacaagctggtgacgcatccgacgctgccgctgctcatcacggcgcacgaggacggctacatccgcatgtttgacctcgacacgggcgcgtgcacgctgtccatggtggcgcacctggatgcggtgacgtcgctcgacatcgacgcttccgggctcacgctggtctcgggcggacacgactgcagcgtgcgattctgggagatcgccggcggcacgctctcgggcaaggagggcagtggcgttgcgggcggcgagggtggccagtccgggtcggcatcgagcgcagtgtgccgacaggagatcagctcgcaccgcaagaaggcgggcgagggcgtgctggcggtcaagtaccatccgacagctccctactttgcctcggcaggcgcggtcggcgtgattcgcatctacggctgagcggtgcacgctgctgcctgccgaaaggcgtttttgaaagcatgttgtagcaatcattcgatcatttcattatt

SEQ ID NO: 12705 - DNA, 2746 bp, Oryza sativa
  ref <308>: DATABASE ACCESSION NUMBER: AK110053
  ref <309>: DATABASE ENTRY DATE: 2001-12-06
gatagcttcaagcttctgcaaagattttgcttagaaacagcaaagacaaaaaaccattgcgtggtggctcgtcgtactagctgatggcgccacctttgcatggcttcccttgccggtgacgggaaaagccgaccggtgaaccgccctgacggcgagccggagacgacggtgagccgggtcatggcgtgtccgtacgtgttccgtgcacaggcgccgccggcgatggccaaggaggcaatggcgacaccgacacggccgcaggtcagggagacgtggccggcgggtggcggcggcggcggcggtggttggatgggcgttggctccggcgagagggtggcgagcgcgtacgacctcgtggagcagatgcactacctgtacgtgcgcgtcgtcagggcgcgcgggctcacggcggcggcgagcacggtcgccggcggcggcgggtgcaacccgtacgtggaggtgcggctcgggaactaccggggcacaacgcggcaccacgagcggaaggcggcgccggagtggaaccaggtgttcgccttctcgcgggagcgcgtccaggcctcggtgctcgaggtgttcgtcagggacaaggacgccgtggcggcggtggcgcgagacggctacgttggaagggtcgcgttcgatgtcggcggggcgcccgtgcgcgtgccgccggacagcccgctcgcgccgcagtggtaccgcctcgaggacgtcggcggcggaggcggcagggcggtgcagggagaggtcatgctcgcggtgtgggtcggcacgcaggccgacgaggcgttcgcggacgcgtggcacgccggcgcggcgtcggtgcgcggaggcggcgacggcgtggcggccgtgcagagcacgcggtccaaggtgtacgtgacgccgaagctgtggtacctccggataagcgtgctcgaggcgcaggacgtcgtcccgggcgccgtcgccggcgcaggcggcgacaagggacggcacggcgaggccttcgtcgtcgtcaaggtgcaagtcggcggcgtgacgctccggaccaagccgtgctgccgcccgacgagcccatcgtggaacgaggagctggtgttcgtcgtggcggagccgttcgacgagccggcggtgctcgtcatcgaggcccgggcggcgcacccgggcaaggacgagatcgtcagccgcgccgtgctgccgctcaccctcttcgagaggcgcctcgaccggcgcggcgcggccgcggccacgcacacgcagtcgcagtggttcagcctggagccgttcgtgcaccggccgcgacactcgccggaggagcccgccttcgccggccgcgtgcacctccgggcgtgcctcgacggcgcctaccacgtcatggacgagcccgccatgtacgccagcgacacgcgccccacggcgaggcagctgtggcgcccgcccatcggcgtgctcgaggtcggcgtcctcggcgcgcagggcctccccccgatgaagaccgccgccgacggcggccggggcaccaccgacgcgtactgcgtcgccaagtacggccacaagtgggtgcgcacccgcaccgtcgtcgactcctccaccccgcggtggaacgagcagtacacctgggaggtctacgacccgtgcacggtgctcacgctcgccgtgttcgacaactgcaacctcggcaatggcggcggcggcggcaaggaccagaggatcggcaaggtgaggatacgcctctcgacgctggagatggacagggtgtacaccaacgcgcaccggctcgtggtgctgcacccgtcggggttgcgcaagaacggcgacgtctgcctcgccgtgcgcctcacctgcctgtccctcgccagcgtcttgcgcctctacggcgagccgctcctccccggggcgcactacgtccaccccttcgccgtcgcgcagctcgacggcctcaggcggcaggcggtgggcgtcgtggcggcgcggctgggccgcgccgagccgccgctgcggcgggaggtcgtggagtacatgctcgacgccggctcccacctgtggagcatccggcggagcagggccaacttcctccgcgccacggcgctgctctccggcgccgccggcgcggcgcggtggctcgccgacgtgtgccactggaggagccccgcgacgacgatcctcgcgcacctcctgctcgtcaccttcgcctgcttcccggagctcatcctgccgaccgcgttcctctacgcgtccgtggccggcgcctggagctatcggcggcggccgcgccgcccgccgcaggcggacgcggggctgtcgtgcgccgaggcggccggcgccgacgagttcgacgaggaggcggacacgttcccgacgtcgaggcccgacggcgtggtgcgcgcgcggtacgaccggctgcggacggtggccgggaggatccaggcggtggtcagcgacgtggcgacgcagggggagcgggtgcggtcgctgctggcgtggagggacccgagggcgacggcggtgttcacggcggcctgcctcgccgccgccgtcgtggcgtacgccacgccgccccgggtggtggcgctcgtcgccgggctgtacctgctccgccacccgcggttccggagccggatgccgtcggccgccggcaacttcttcaagaggctgccgtcccgcgccgataccatgctatagtatatgatgcgtcgtttcttgtgtcttatgatgttataaaactttttttttcttgtaattcatcgccaatgatgcctgc

SEQ ID NO: 12706 - DNA, 3701 bp, Oryza sativa
  ref <308>: DATABASE ACCESSION NUMBER: AK110054
  ref <309>: DATABASE ENTRY DATE: 2001-12-06
atccatccactccctgctccataccacgtcgaacactgccatccttgaaccgcactaggaggaccgttcatccgactggacgactccgacggctctaggcgccagcttggcaagcgcatgcgcgtttctcacaacatgacaccgcgcactatatccagacccgctgccatctagacgacccgtgttgcccatgagcgactcgagcgccactctcgacaacgccaaagctcaacgaggctctcgtggtgtcactcgcattcggaagcggtgggagcggatatggccgcgcatcaagcttctcgcgccgcccgtggcgggtgcgctgctcatcagcccgtttgtgcttgagcgtcggctcaagacgtggatctctgcagaccctttctttgcctacatccactttttcctcttcttctttccctccccacttgcaaccggcgcgttcttggagcgatccatcatcaccctcgtctttgtggcggcaggaacgggcattgcgttcggtgcgatttgtggcgccatctcgatcgacggcgccggcgctgccgcctacagctccaagcagtccagagcgatcggtgtttgcaccctgatctttctgtcgtttgtttcgggtgtgctttcgagctatgcaccgcgtctcaggggtccttgtcgtgcgctgctcttcagcacggtatgggaactcacgaagcagtataatgtggcaacggctcgcatctttttggacagcttctatcccgcactcgtcgccatggtcgtgggcatctcttgcaactgcctcatctttccacgcacggctcgacgctcgtcgatcgatcagctctgccagctgttccagggtaccgataggctcatggccaaagcgattcaggagttctcggcaagcctcaagccgaacaagacgctcgggccacaggggattaccgcccaggatgcgcccgcggagagctttgaacagctcaaggagcagctcggatcactgcagacgcgcctcgaggccaactttgatgcggcacgctacgaggtcgggtttgcacgcgtgggggtcgagcagctgcacgtgtttctgcccatcctgagggatatccgtgcatggttctcgtgcagcctcgcatgtcttggcgaggccaagcaacaagcagagaccgtggaggctgcagagatcggatcgggattggcggagcagcctggggtcagcacaccggtggaggagacaaaggcagcatttgatttcaagcactcgattcgtacgtttagcgtcgaggtttcggcagcgctggcgtgcctgcattggacagtgcgcaagtgtaccggctcgagcgcggcagacggtgtgcagccatcgagtggacgcaacgagaaggaggacgcggctgcgggtgggggtgatccgcacctcgccttggctcagcagaagcagaggctgcgcgcatccatccgcacgttcaaggcggccctcaacgatgctgttcgagagtcgcgcgccgaactcaacgccacgtccacatcgcaagcgcatccaaaggtcggcatgcccgtcggctcgggtctgggcgtcaacctgccagactcgcaccaagcgacgccgggcgtgggccagcccaaggttctcgccgacatgttccgcaccgaggcgtatcagatctcgttcctcatggtgtctctgctcgaggtcgggctgctcgtcgacgcgtgcctgaccggggggctggcgctggcggctgcatggaagagcagcccgcataggaggctgcgcatgtcggcggccaagtggcagtactggctcggccacagcgagctcggtgttcgcgacgacatggtcttcatggacgaacgtgtggatgcgctgctgcacgaagacgagcctgcgtcgcctgagctgcgagccgagtcggagcagctcgactacttcaacgacgatgccgagacgtttgtgctgggcgatgcgccgcggctggatcgcacgccgtcgcgcgtgagcaatggcatcacgtccatccgctcgtggtgcagcaccaagcttcgggcgatgcacagtgtgttgcgcacgcgccgcgcgacgaggtggcgcattgcactgtccagacacatccgagcgctgcgacacagccgccacatcaagttcggcatcaagttggccggcggctttgtactgctcacgctgccgtcgtggctggcgccgggcgaggcgaagcagtggtggctgcaacagcgcggtcagtggatggccatctcgtatcttttctgcctcgagacatccacgggcgcaagcatccgcaccagcttcttccgcatcctcggcaccgtctcgggcagtctactgggcctggtgatcaacgaggtgagtcgcggcaacaactatgccctcgccttcctgctcacgctcgccacgctaccgccgtcgtacgtgatgctgtttacgcagctccagggcgtgggcatcgtcatgggtctcacgctgcccatcgcggcgctgctgcccaccgaggagagcggcgaaagcgtggtgcacgtcgcgtggaatcgcggctacatgatcttctttggcatcattgcggcgctggtggtgaatctgtttgtgtggccgattcatgcgcggctggagctggtgcggagggtgtcgtcgatcacgtcgcagctccagtcgctgtacctcagtctgtcgaggcagatgctctcgggcgggctgacgtcgagccacaagtccaacgccgcattcgagaggctcgaggtgggcatcgagcggcgcgtgggccaggcaagggggctggtggatatcatgaagatcgaggtgagcctccagccgaagcgcacgcgcgtgctctcggagctgctcgaccacttacagatgatcctcgagctgctcatgggtctacggcggtgtagggagcatgggttgaggtcggtacgccagcaggcggtggtgaacgtgctggggctcaggcagagtctgatcgcatcggtgctgttggtgctgtggactacgggtcaggcgttgcagacgcatgcgccgctgccgcagtatctgccgagcccgcggttggcgctcgaggagctcaccgaggcagtggcggaacagctgcgcacgatgctcgaggagcaggagcccgtgcgtccgcaaggcgtgcccgacgccttccatgcgctggacagtctgaatcacgaggcaatcctggcgagcgtaaggaggcgacatcgaaagcacggcctgcactcgatccaatcagccagtcccgcgtttgggtcggagagcggtgcgatcacgccgaaagagcacaagaggagcgcagtgtcgggcaccgactcgcccgcctcggctgggacgcgcaaacgcaatgtcgactttgccgtcttctttatcttggccgagcatgctctgttggaggagatcgtggcgtcgctcgaacacctgctgcagctgtgcagaagcatggtgggcgaggcgacgttcttgtacacgcagtttgtgcccaccgatcgcacgcccggcgacaccacccctgcgcaaccacgcggcgcggagccatccgacaccgatactgccacacccacaccagcggcatcacttcgcgcgccaggcagcgaccgcaccccgacgctacgcccgtctccactcgcacatgcttcactcccgcccacctccgacccgtagcgccatcttgtaccatcccactttgcaattgcacacatctacttgc

SEQ ID NO: 12707 - DNA, 3506 bp, Oryza sativa
  ref <308>: DATABASE ACCESSION NUMBER: AK110055
  ref <309>: DATABASE ENTRY DATE: 2001-12-06
atcatcacaaacctcaccacgtcacaggggcgctcgcagctccatagcgggcacagcagcagcagcagcagcaacaccgtgggagccacgactctgagcgccaccttcacctacacgccatcacggctcgctaacacacacggccgggcggctgagcacgagcagcgatggactacttcaagtcgctcagctccgccgcctcttcggtgctgtcggcaacgcgctccggcccacttgccaacttcaccatcggccaggagctcgtcgagtattgctcccgctcgctctggtcgctccactcggccaccaagcgcgacgacaactccgcctgcaccgtcctcgcctttgacctctcccacccgcacaacgccacccgcgccaacctcctcccctttgcaaaaaacgccgccaggaagctacgcaccacgcgccatcccaacgtcctcaagctcctcgacagcgcagagaccaactcgtccgtctacatcgccgtcgagaaggcaaccccgctctacaaggtgctcgcacagtccgaggacaagcgcgcaactccacaacgccaggactggatcgtatggggcctctcgtccatcgtcagcgccctcaagttcctcaacgccgacgccgcctctacccacggcaatctgcgtcccgagtcaatcttcatcaccgcagcaggcgaatggaagctcgccggattcgaagccctcactccacacgcagaggctcctcatggtctgctcttcacccagggctccctgctccccgatgcaaaccgatatgcgccacccgaagtgaggcagaatggctggaacattctttcgtccatggattccaccttgctcgacagctatgcgctcgctctcgtcgccatcgaggctttcaacgggccgctgcctccacagaccggtaccgcagcaccaccacgcggccacgtcccgcagcagctctactcggcgctccagcgcatgctcgtgcccaacgccaagacgcgcagcaccgtcgccaaggtatgggaggccggcgagggcgaaggcggattcttcaaggaaaacacgctcgtcaaagtcgctagaggcctcgacggcttcctgctcgccacggaaaacgagaaagccgacatcattaagctcctccagcagaagcccgactcgtttacgcccgactttttgatgtacaaggtgcttcccaccctggtcgccgccctctccgccgtaccaccgccgggcaccatcccgtccgccagcacgcaggcctcggtgctgcttccgctcgtcctgcgcctgggccaaccgctgcccaacgacgaatggacagccaacgtggtgccgccgctgctcaaggcctacgcctcgcccgaccgatccacgcgcatggcgctgctcgagaacctctcgctctacgtcgagcgcatggacaaccgcaccgtcaccgacaagctgtggcccaacctcatcaccggcttcaacgactcggtcgccgtcatccgcgaggccacgctgcgcgccatcctcccgctcgcgcccaagctctcggaccgcatcctcaacaacgacctcctgcgcgtgctcgcacgcacccaggtcgacccggaagccggcatccgcaccaacaccaccatcctgctcggccgcctcgtgccgcacctctcggtctcgacgcgcaaaaaggtgctcatccccgccttctcccgcagtctcaaggaccagttcgtgcacgcgcgcgtcgccggtctcatggcattgatggccaccggcgactcgtttgaccacgacgattgcgcgcgccaggtggtgcccgccgtcgcaccgtgcatggtggacaaggagaagctcgtgcgcgaccaagccgacaaggccatcaagatgtttctcgaaaagatcaagtcgggccgcgcaggcatgcccgacaccgcgctcagccccgaacagctcgacagctcgacctccttcagcagctccacggacggcaccaatggcgccggctacgcgagctccatggccgcctccgccggcagtgcagcctcggcgctggcgggctgggccatgtcgtcggcgctctcgtcgctctccaactcgtcttcggcaccgtcggtcgccgacggccgcccgctctcgtcggcggcagagctgcagtcgcagatggacgggcgaagcacgccagccacatcagtcggcacgcccgccacaccgccctcggcacccgtcccaccctcgtcggggctagcgagcctccggctcggatcgggcgctgccgatgctgccgactcgtccagctggctttcggaagcatcgagctcagccaccgcggccaagtcggcgctcgactacgatctggacgacgatgcgccatcggcgtcgacggcgcaggcgttcgccgcaccgcccgccgctgccaacacggacctcatggacgtcaacgacgatagcgccgactggtcgagctttgaggtggggcagcccaagaagaaggcgcccgccgtgggacgcaccaagatggccaaggccaagcttgggcctcggcgcgcggcggcggcgggggcggcggcggctgcagcacgttcggcgtcggcgccggtggcgccgcaggtggatgcgacgcatgcgatcgagcgcagcagtttgcgagtagccgcacccgtggagcaggaggcggcggcgtggggtggtgacgagggctggtccgcgcctgctgctgagagtgccgaggcgacgcccgagccagcgggggcggagctggctggatcgcaggagctgacagcgcaggcgttctcggcggtgccggcgtcgatggccgtgccggcgcccgacgacccgtgggcatccttcgacgaccaggacgacgtgcaagacgagcgcagccgcagcgcgtcgcccgccacgcccgccgccgcggcgccgctgtcgcgagaggagaagaaggccgagctggagcgcaagcgcgccgagcgccggcagcgcctcgagcagctcaagcgcgacaaggagcaggcgcgtctggcggcgctgtgagcggcaatgcacagacccttttttccccaaaagacaaagagtgtggattgcatgcatgggtcttagggtattgctggagggggaagagcgttttggaagcgttgctgggcggcttgtttgccgcttggaccgccgtggcctattccgtagggattgtcaacgtcctgggagtgttgttgggcttggaggaacttttgttctcttgctctttgacggattgcgacccaacgctgttttccctcgtcggagcgggcgatttgtcttgcttcgttgaggctctttgcggcgtccagatggtgtttatcggctctttcgatggctttttgactctgcaggctgagcctcgagtactggagacctgccaggacccaggtgacgacaaagatggcgctgataaagtatccgtttgtgattctgccgttaccgccgttccagccagctgcacttgcagagggtcgagtgaagttggagtaaaaatcgtggttctgccaaccg

SEQ ID NO: 12708 - DNA, 3231 bp, Oryza sativa
  ref <308>: DATABASE ACCESSION NUMBER: AK110056
  ref <309>: DATABASE ENTRY DATE: 2001-12-06
atgttgccggatggccaccatcacctcaaccctagagaccgtcactacaccttagccggattcaaccactgccgacgtggtatgaacccatgacgacggctgcgttcacctcgtgtcgcccttgaccgccgctatggcgcctcacaagcgctccaactcggcatcgtccaccccggcaactcccaccaagaagctcaaggcgccgcaccagtccgcgctcacctcttttttcaccagcccctccatcgcatccaaaccgacctttgccgctgaacctacctcaccgatatccgagaccgcccgagggaagcaaaaggcccaagttggggacgtcgatttggctgcaacgtcgcaggaagagaaggatgcgcagtttgcagcagagcttgcggcgcaggatgctggcgtttcggtggaggactatcgcgctcgcatgagagctgatgaggatatggccaggcggctccatctagagtggtctggagaccccgcgcctaaagacggcgctgctgcaggcgcttcgaatttccagcctgcttctcacgcgatggatgcttcggcgccgccttcgccatccaagaagccaccatcagccgccaaaccagtcgatctcgtcgccttagatgcagcgatcgacgcgattccacttggcgacgacatcttcgtgtacgacccttcggcggtggatacatccgcgtggccgcatgtcgcgggcaagcacggcgagctggtgcccacaacgccgtatgcgctgctgacgcacgcattcgtgctcatctcggccacgcgctcgcggctggccatcacgacgctgctgacgaatctgctgcgcacggtgcgcgcgcacgatccggactcgctgctgcccacggtgtacctggtgagcaaccacatcgcaccgccgtacgacggcgtcgagctcggcctgggcgggtcgatcgtcaacaaagccatcaagtcggtcacgggcaagtcggcgcgcttcctcaagcaggtccgggacaagaccggcgatccgggcgacgtggcgtacgaggccaagaaggacgtcaaggccctcgtgcgtccgccgcccatcaccgtgcagcggctgtttcagaacttgcacagcatcgcacgcctcggcggcacgggcagtgccaaccaaaagctcggcgtggtcaccaaactgctcgttgcgagtcggggcgaggagacgcgcttcctcgtgcgcacgtttatcagccatctgcgcatccaggcggtgcgaaccaccatcgccaccgccctcgcgcgcacctttgcgctcgtcgagcactcgacggccttaacgccaccgagcaatgacaaggagcgagaacgcgcaaatatgctgctcgtccatccgagcgagcgcagtggcatcctcgccaatgcaaccaagcccaaggaacgccaggatccgcagcgtctcgtactcatggagcgattggctcgagccgaaaagctggtgcgagaagtgcgtgcgcgccactcgaactttggcgtgatcgtaccgtcgctgttgaagcacggattgccagggttgtcggagcatgtgccgctgcgcattggcacgtcgatttcgcctatgctcggctcgatcacgcgctcgctcggcgccatgcatgccaagctcggcgcgcgcgcgttcgtgtccgagttcaagtacgacggtcagcgatgccagatccacgcgatctacgtgcccagaagtgccggcgcggaggcaaggcgcagtgtgcgcgacgataccgccagcagcaacggcgccgtcaagtgcggcaagtgggtgggcaccaacggcgaggtgtacgtgaggctgttctcgcgccatctggaagagatgactgaaaagtacccggacatcaccgacatggtgccgctgcacatggggcagcagctcgaggccgaggcggcggcagagcggcagaaggtgacttcgttcattatggacgccgaggtggtggccatggacctggatgggcggctgcttccgttccagacgctggcgaaccgcagccgcaaggacgtctctctgcacgagatcaaggtcaaggtgggtgtctttgcgttcgacctcatgtacctcgacggcgagtcgctgctcaagtcgtcatttcgcacgcgccgccggctgctgcatacgcgcttcccgccgctgtcgccgcaaagcccgctgatcgcgcggttcgcacacgtgcgttcgtgcgagagcaccgatgccgaccaagtggcgcgcttcttcgcacaggcgcaggaatacaagtgcgagggcatcatggtcaagtcgctcgaccatcactgggaggcaccgcgcccgagccaccaggacggtgtcggtgagccagtagaagaagacgatgcagaggaagacgaggaggaggacgacgatggcgagaacggcagctcaccaccaagtgcgcggctgcacaagctggcagacgtggtggacgacgacctggcgatggacaacgaggacgaagcggtagccacagtcgaggcggggcgaggtgcgagccacgtagcaggcgaggtgggcaagggcgtcaatggacgcggcaaggcgctgctgtcgacgtacgagccggacaagcggtgcgagtcgtggctcaaggtgaagaaggactatgtggacggactgggcgactcgctggatgtggttccgatcggtgcgtggcatgggatggggcgcaaagcgacgtggtggtcgccgatgctgctggcgctgtacgagccggggacaggcgtgctgcaggcggtgtgcaagtgcatctctggcttcaccgatgccttttacaaggagctcaacgtgcggtatgcggaagggagcgaatcgtgcgtgcgtgcacggtacggcgagccgcctcctttcggctacgaggtcgatacgggcaacttgttcccggacgtttggtggcgaccgagcgaggtgtgggagatccgcggtgcggatgtgacggtgagccccaactatacggcggcgatcgggctggtcaacgaagagcgcgggttgtcgatccgatttccacgcttcatgcgtcggcgagaggacaagacggtggagcaggccagcacacccgccatgctggccaagatgtactttgagcagcaaaaggcggcaccggcacccgatgcgcgcgacgacgacgacgacgacgaggctccacgcaagcctgctgcggacgatgactttgaattctagatttgccttgtcgtcgccatgcatccgcg

SEQ ID NO: 12709 - DNA, 3461 bp, Oryza sativa
  ref <308>: DATABASE ACCESSION NUMBER: AK110057
  ref <309>: DATABASE ENTRY DATE: 2001-12-06
gattcacgaccaccacttcatcttccccatctcctctacgctcgtcgacgtccagtcaacacggtgcaagacgtcgctcagggattccttcaccttcgacccgctcctcactcaccgccctggacgtggacgaatcgcagcgcatccccccaaccacacctccttgcacacgtacgcacgacgctttccgtttccgtttccgcatctgcatcaacccgaaccgccttcgtttgaccacagcatcgaggtagacagcagccctccccatctctgcatcgacacgccaaccatcacgtcaagcaacacagcgcatcgcacctgccttgacagtcttgcgcgcttgatcatccgcgctggctcctctttcttgtgtcttctccaagcgcccaccagcttatcgctcacttgcatccgtggtgacgactagcgtgtttccgaccggagtcgactcgtagctttgcctttcgtctcttccgtggcaccctctcacgaccgaccggaggcacgcccgttcaccctcgcgctgcccccctcccgccccgcaaacccaaacgcgctccgttcgactggtccataccctcacatcctcgccagcatgacatcaacctggcaaccgtcccaagacgggctcgcagagctcgtgcagctcttccgcgactcgcaaagcccacagatggacgtccaagagagaatcgcccagcgcctcgacgcggtcagccagatccccgactatgccaactactgcgtcttcaccctcacctcgctcaccaccgaagacctcgcaacgcgctccgtcgccggcctcatcctcaagaaccacatcctcttccaccacgacctcatctcgcccgagtcgttcgagtacgtcaagcaggccatcatccccgcgctcagcctgcccgaggacatgctccgccgcacagccacccaggtcgtctcgatgctcatgaccatcctcacgccgcagggctggccagaaggcctctccaagctcggcgaactcatgggctcccaaaacacagacgaggcagagggcgccttcagctcgctcgcaaagatctgcgaagacatcccgcgcgagctcgagctgtgcgagatcaacggcgtcaagcccatcgacatcctcatccccaacttcatcaacgccacccagcacgccgactcgcgcctgcgcatgcatgcgctcaactgcctcaaccagttcgtccagatcggctccaccgcgctccaggcgcacatcgacgccttcctcgccgcgctcttcaagcgcgccagtgacgagagcgccaacgtgcgcagatacgtctgccaggcgctcgtgctcatcctcggcgtcaggccagataagctcatccccgagatggacaacgtggtcgaatacatgctctactccacccaggacaaggacgacgacgtctcgctcgaggcgtgcgagttctggctccagttcgccgaagagccctcgctcaaggacaagctgcgcccttacctcgccaaggtggcgcccgtgctgctcaagggcatggtgtacaacgagctcgacctgctcatgctcggcggcgacgaggacgatgccgccgtgcccgaccgtgccgaggacatcaagccgcgccactacggcggcggcggtgcgcacaggaacgagcacctcgacgacgccgccgccgcggccaacggcggtgcggcggcgacgggcaagtcgcgtgccgccatcgaggcgcaggacgacgacgaggacgatttcgacgacgacgacgacgacgacgaagacgacgacggcatctcggactggaatctgcgcaagtgttccgccgccgcgctcgacgtcatggcggtcaactttggcgacgagctgctcgagatcctgctgccctacctcaaggagcgtctgttcagcgacgactggctccagcgcgagtgcggcatcctggcgctcggcgccattgccgagggctgcatcgccggcatccaaccgcatctgcccacgctcgtgccgtttttgatcaacagcctcaaggactcgaaaccgctcgtgcgctccatcacctgctggacgctcggccgatactcgagctggtgcgtcgccgccgagacgcccgagcaccagcagcagttcttcgtgcctgccatggagggcctgctgagcatggtgctcgacaacaacaagcgcgtccaggaggccggctgcagcgcgttcgccacgctcgaggaggaggcgggacgcaacttggaaccgttcctggagccggtgctcaagacgctcgtatacgcgtttgacaagtaccagcagaagaatctgctcatcctgtacgatgccttggggacgctggccgactcggtgggttcggcgttgaatcggcccgagtacgtcgagattgtgatgccgccattgatcgcaaagtggcaagggctgcacgatacggatccggacctgatcccgctgctcgagtgcatgtcgtccgtgacgatcgccgtgggtcctggcttcctgccgtactcgccgccggtgttccagcgatgcgtgggcattgtgcacgacaatctggcggcggccgaggccgaggcgcagaagccggcggtggagcaggatgttcccgaccgcacctttatcattgtggcgctcgacttgctgagcggactgacgcaggggctcaatacggcggtgcgcgatctggtggcgggatcgcagccgtcgctgctgccgctgctgggccactgcatcaccaacgtcgaggcgccggtgcgccagtcggcgtatgcgctgctgggcgatctggccatctcgtgcttcgacctgctcaagccgtatctgcccgcgctgatggccgagctcatccgccagatcgagcccgagcccaagatggagaatgtgtcggtgtgcaacaatgcggcgtgggcggtgggcgagatcgcgctccagtacggcgcggatgccgagttgacgcagtgggtggacgagctgatcaagcggctggtgcctgtgctgctctcgaccaagtcggtcaagtcgctctcggagaatgcggcggtgacgatcggacgactgggactggtgcagccgcagctggtggcgccgcatctggacgtctttatcgagtcgtggtgccaggcgctgtgggacatcaaggacaacgacgaaaaggactcggccttccgtggcctgtgcgagatgatccaggtgaattccaacggcgccgccaagggattcgtctacttttgcaacgccgtcgtacgatggtccaccccgagcgccgagctcaatgacatgttccgcaagatcctcaccggcttccgcgacatgagcgggccgcagcgggacgtgcagaaggcgcagttcccgcccgtcatcgtccagaggctcgccgaccgctatgggctgtgagccgtgtgccaaagctcactctgcaccaatcctttcatcattctcgccaccaacgcaatgcaaacacaacccaacattc

SEQ ID NO: 12710 - DNA, 3271 bp, Oryza sativa
  ref <308>: DATABASE ACCESSION NUMBER: AK110058
  ref <309>: DATABASE ENTRY DATE: 2001-12-06
cacgatggagctgcagagagtgcagaattcgacggttaatgtgatgcacgtcatggagtatctggctgccaatgtcgacctcgccaaggacctcgtcatgaggtgcagcgccgttgcgcgggagctcaagaacgatgacctcctgggcatgaccgaggaccttgacagtgtcataaagaacattgggcatgagctcagcaggatacctgcttcagcatttggtagcagcaggtttccagatggcagagcagatgcaaaccttcagattgcaggacatcggccgcgttattgtgaccataattcctgcgatggttactctgaggccgatatgtcgataatcccggcaaacagcaggccccggagaagaacattgcacaatagtgacatgccaaggctggtggacttcctgcagggaatgtaccatgaatcacatgatatcggtgcacattcattcaattcgctccctgaagtcgcagaatatgtcgagccattatatgattcgttcttctgtccattgacaaacaaggtcatggttgatccagtgacaacaggaagtggtgtgacatatgataggaaagccattgaggagtactttgagaaatttgctgatggttctgaacctgtggtatgccctgtgacaaagatgtcgatgcaaagcaaggcactgaggagcaatgttccactgaagagcacaattgcagaatggattatgagaaatgaagccacaagggtcaggattgcacgaaccgcgctctccatggcttccacagaggcaatgttgcttgaggccatacaagagctgaagctgctggccaagataaggagaaagaacagggaacagatgcacaaaatcgggataactaagttcctccctcgtttgttggagcacaaggatggtctgatacgctgtgattcgctggatctcctttgcttattggctgaggatgaaacaggaaaggaagtcatagcaaataccagagccattacaagaacaataaagctgctttctagtaatagtcctgatgaaagacatgcagccatctctttcttgctagagctttcgaaatcggagctattgttggaaaacatcggatcaacttctggaagcatattgatgcttaccacaatgaaattcaatgattcagatgatccggttgctgcagagaaggctggggaggttctcaagaacctggagaactgcccaaagaacattaagtacatggctgaaagtggttacctggatcctctccaaagacatttagtggaagggtctgaagatgttcaaatggagatggtgagctacctcggcgagctggtccagaagcaggaaatgaccatcaacattgctgggagtgcttcagagatccccatcaagatggtgcatagcggcaacactgtgatccgcaaggcggcccttgatgtccttgtccagatctcctcagatggccccaacagcaagactctcgtcgacgccggtgctgttccggtcatggtggaggagctcttcatccgcaagatcgacgacgagcctatggggtccaagacagaggctgctgcagtgctcgccaacatcgtcgagtccggtctcgatcccgacaccatcgtcgtcaacaaggaaggccatgtcatcacttcaaagtattcggtgtacaacttcacccacatgctcaagtgctccatgcctgatgatctcaacctgagcatcatacgtgtgctgctcgcgctcactgcgctcccaaagccgctcatgacggtggtgtccgtcatgaaggagcaggacagcagcctgaccgtgatcgagttcatgggctcgaagacggaggcgttaggcatcagcgcgacgaggctgctcattgcattgtctcctcagatggggcacaccattgccgagaagctctgcaaggcgccagggcagccgggaaggctggtgaagagcatcggccagcccgggcgtgtcaccgaacggcacgccgtggcggcgacgctgctggcgaggctgccgtaccagaacatcacgctcaacctggcgctgctggagcagggagcagtgccgacgttgctggccaagatagaggagatgcagcgcggcgaaatgcgagtgagccgccatgccaagacgtacatggagggcctcgtcggcgcgctcgtccggatgacgatgacgctgtacgaccccgacgtgctcctggcggccatggatcacaacttcacggcggtgctcaccgatctgctcgtgcggtcagcgggcagcgacgaggtgcagcggctcgcggcggtcggcctcgagaaccttagccaccagtcggtgaacctctcgcagccgccatcagaggagcaacggcgccccaagaagaagaacatcctccggcgcctgcgcgacgcgcacaccgggcgggtgcacgacaacaaccggaagccgccaccgccgccggcgcagggacgcctctgcccggtgcaccgcggcgtgtgctccccggccaccacgttctgcctggcggaggccggcgcggtggaggccctcgtcggcgtcctcgagagcaacgagaacggccgcgtggtcgacgccgtgctgggcgcgctctgcacgctcatggacgacgccgtcgacgcggaacgcggcgtggccgtgctcgccgagcacgacgccgcgcggcacgtcctgcgcgcgctgcggcagcaccgtgacgtcggcggcgacaccgccggcgcggtgtcgcggcgctgcttctgggccgtggagaggttcctggcgcacggcggcgagcggtgcgtgcgcgacgtgacggcggaccgcgcgctgccgagcgcgctggtgagcgcgttccacaagggcgacgccgcgacgaagcaggtcgccgagagcgtgctccggagcctgcaccggatgccggactactccgccacctacgtctccgtcgagttgtagcatatcatcttcatcttcatctccatagtttcttgccatgttcttggctgtaactactagaactacatcatacgggcttggtgtatttggtttggtcttgtaactatactgaacaagttcacagggaaaagagaagaagaaaagaaagaacactgcagatgcaatgtagctagtacatgttgttatagcaggggaagattatatgctctttgacataggtagtagtttctttttcttcatgtatgtataatttgtttcagaaattgtcttttgtggattggtgtttttgcttggagaaagaaatatttgcatatagatgcagcaaaaatgtagtgttcagacctc

SEQ ID NO: 12711 - DNA, 3071 bp, Oryza sativa
  ref <308>: DATABASE ACCESSION NUMBER: AK110059
  ref <309>: DATABASE ENTRY DATE: 2001-12-06
attctacacctcgaactctccggctctctatcacagcctctctggaacctgctacaatcgcatgttgtagctcgagcatacgcggagggccagcaacagcactattcgcagggatgcaggcggcacctgggctcccgcgccagccctcatcatctctgcagccgccttcgtcgcccccctcgacagaccatgtcccatccacggcacacccagcacttgcttcgggcgatctcgctacattcctccagccctcattcgatgcagcggcatacgtgagccagctgatcagcggcgtcgacgcacagctcggcgtggcgcgctctaccgcacaacctccaacaccctccgccaaactggccgtctcgccaggcgggctcctccagccagcgagccctggcattctcccagcaagtgcgcaaaatgcagcagcatcaaggacaagcatttcgctcgcctcgccttctgcagctgcgcccactgccgatgcagctgcgggcagctcgaaagcgcaggcggcgcaacgcaagcgcgagcaggaccaggaggaagtcgacctctcgctcgccatctctcgtctcaatctgggcatcgaagagctggaccgctccatctcgacgcaggtcacggccaatgcacccgcgctgcttcagcgcacctcccgccttgcaaccatgcagcacgggctcgaacagaccaaacaaggcgtcgaatcgctcgacatggaggtggccaatttgcgccgcaaggtgcacgatccctttcaaaggctcactgaactgcaggccgatctgcgcgtgtacgacggtgcgggcgagcttgtcgccaaggcggtcaaattcgtcgggcttgctaggaggctcgagacacagatggaggcgctcttcgccaagaaggacggcacggcgacaggcaaggctgccgaggcagatggcgaggatgcggtggtgggactggtgcatgggcgcgatctgtcgcgggcagctctgctgatccacgagatctcggacatgctcgacgccgagcgaccccaaggcagcgacggtctgttggcactgaagctcgtgcaggacgtagtgcctgtggtcgagagtgcgcgcaagacggtggtcgactatatggaggacatgatcgtgcgcgggctgcgcgatctatcaccggtgatgctcgcatcgagtctgcagacggcgttcaacctcggcacgctgcccacgctggtcaaagacctgctggacgatctgaccgaggtggtcagggagcgcacagcggctgcgctcgatctggatgctatcgcgcgccagctcggcctggcaattccctcgctcgaagcgtcgaatccgagctactcgacctaccgcggcgggcggcggagggacgacgcaagcgcgcggcagcagcagcagcaggcgtggtccgacgcactgtggaagcggctcgagtcgctcatcgtcgtcgagatgggcgcggtgtgcagcaaggtgtacctgctcgaaaaggtgctcaagctcaagacggacgccgagacgggcgtcaactttcttgcagccgcactcgacgtgcttggtgacaagcccagccacaccttctggcgcaccctggcacagtgtctcgagcaacagactggcgtagcgacggccaagtcgccctgggtggctcagctgctgtcgagcgggatcgcagccgagaacacgcagggtggggtggtgatgggcgggtacatgcggctgttgaggctgctgcacgagttctttgccaagatcaccgtgtacaccgacgtgcagtatacgcagacgcaccagagtgccgagacggtgattctgctgtgcggcttggcgccgctcgaaaagggatatgtggacaaagcaacgtggcgggtggctgaggtgctgtcgcaggtcgtcgcgcccacacgcaggaccgcactcgacgcaagtcgcgaggctgacggcgtggttgcgctggtggccaatgcggtcgatggtgtgcgttcggatccgctcctgctccgcgcggtcgttgaccgctgcgcagcgctggtcgagcagtacgctacgcgtctcgacaaggtggttgcggaggatgcgtcagcgtggctggtcgatggccgcgctgttgaagcaagcgcttctcagacgtggaatgctgcgctcgtgcgcttctcgcacgcgctcgctgctggccttactggtgcggcagcggaacaggacgctgcgagcgcgagctatgcggcaacgcgcctacacgccgctgtcgacacgatcatcggtgcaacgcggcgcgtgctgttggatccgttggtgcgtgcagccgagcagacggttgcggagcgcatgggcaagatgcacgtgcagctggcatcgcgtggtgcagtgcaccagcgtggtgtctcgatcgatgccacctcgggcgcctcggcgtacatctcggacgtctgcgatgcgctcgctttcctccgcgaccacctcctccctctctacccgcctcagttgcgcatctcgctcgcaggggcggtgcctgcaaccgctgcccactgcttcctgctctacgcgggtcttctggcactgcccgagcaggcggacaaggtgaagcttcggctcgccaccgatatgaccgagctcgaattcgcactcacccagctcgtgggcgaggcgcccaagcaacctcagggtggaaagtgggtcgatgacgcggagcgagccgaggtggtgggcaacatgaaggtgttccgccgcacgctgttcatggacacgcaccagctcgtggaggaagcaaagggtgtcgagccgaattccgtgtttgcggtcgcgatggcgctgcacctcgtgtcccgagccggagcgctggacaaggtgcttgcagcaacggcgagggcgacgaagtcttcaaatgcagcagccaggtccgagcttgttcggtccgccatgcattccaccacgggcctcattgggcgcatccactctgccctcccgaatgcctcgcttgacgatgagaccgcccgcatcatcaaccttctcctcccacccacctcggcgtagaacagcatgcttcactgccaaatgccacacgtccacctc

SEQ ID NO: 12712 - DNA, 3773 bp, Oryza sativa
  ref <308>: DATABASE ACCESSION NUMBER: AK110060
  ref <309>: DATABASE ENTRY DATE: 2001-12-06
tttcctgcccctgctcacacgagtggcctctcttccatcgcacatacacagcctagtgaacactccaccccacgcatgagcagcgcagacaagtaccgtgcggacggggagacggaggccgctgcagctggcggccagcagcccggcgcctcttcggcgtccgctgccagcagcaccagcagcagcgactcacccaaccactcgcaggtggaaggacagccgcaaagcacggtgcgcattcatatgaacgaggacgcacaggcagctggcgtcgcgaacggcacgcccgcgcgcaagatgaaggagcgtgtggcgccgactcctttgtccgctgctgcgactgcttcgtcggcctcgcatctcgccactccggtcgcttcttcctctcctgcaccggcgtcgcctggcgtgggcaatgcggtgtcgcctcggcgtaagctcaccgccacgggagctccgacccatgcagccaccagcgcggagacgctcaagtcgcaaatcacaccagcgcgtcacgtggtagcgccggagcagggcagcggcaacgatggaaacgtattcgtgcacgtgatcgacggcaccggcaacttcagctgcaccccggtcgatctgacgtatctggtgctgcacgcgcagcagagtcgcaatgcaaactacagcgtggtcggaatcatgggctgccagtcgactggaaagagtacgctgttgaatttgctgttcggcactcgattccaagagatggacagcagccagggccgttcgcagacgacgaagggtgtgtggatggacagcgggtgcaagaagcgcgacttggtcatcatggacttggagggcacggactcgggcgagcggggcgaggatcgaaccacgtttgagagacagacgtcactctatgcactcgccgtcgcagaagtgctgctcatcaacatgtgggagcacgatatcggccgctacacggcgtctaactacggcattctgaagacggtgttcgaggtgaacttgcagttggaagtgtcgcagcaggcgctgttcggcgaggccaccaatcgcaccgtgctcatgttcgtcattcgagaccacatcgaggaggagacgcccatggagcagctcaagaagaaactgcacaaggaggtggacaagatctggggcgaaatccgcaagcccgaacgattcaaaaacacgcaggtggcagagatgttcgagctcaaattctgcgcactgccgcacatgaagctgcagaaggacctcttcaagcagcgggtgaacgccctgcgcgagcagttcaccacgccgtcagacagcgagtatctgttcggtggtccgcgcaacgggcgcaaggctgtgccggccgacggcttcggcttgtacatggagcagtgctgggcgaccattcgttccaacaaggagttgaatctgcccacgcagaaggagatgctggccaccttccgctgcgacgagatcattcactcgctgtacgccgacacgttcgcgccgggcatggcggagctgaaggagctggccgccacggagttggtggcggaccagttcgcagacaccgccgagccgctgctgcgcgctatcctcgcagactactcagatgagaccaagcactaccatgcggccattgtcgccgcaaagaagagagagctgctgcgcaagatgagcagggagctggaggaaatcttcgccacgcaggcgcgcaagttcgtcaccaagcaggcgctcgatgtgtgcaagcagaagatgaaggagcagctggcgtcgggcagcgcagctctgtcggcagccaacgctgcggctgcttccgctgcggcgagtggccacaacaagcgcggcagcgtgagcatgagcgcagctgcgctgtccgccgcgtcgcacgacgcgccccatccggcctttgcttccgccacgcagtcggctgtgcaggccgccatggacttcgccacggccgagctgtccaagttccagctgccggtgctgagcagcatggaggcgagtgccgctgggcaggaggaggacgccgccgctgcggaggccgtcgcttcgtcgctgggcaccgattcggccactggttccgacccgctgctgtcgtggtctgctctggcgtcgaaggtggaggaggaggtgcgcacggctgtggatggctgcgtggcgctagagcgtgcccaccagctgaagaagctgaccttccacctggacaaggtgttcaaggcgcagctgtcggcgccgctcacttccatcctcaagaaggccgctccgcgctccatgtggagcgacatcggcaagttgtatcgcaaggtgcgcgccaatgtggtgcagcagtacgtggtggacacgctgtgcgtggcgtacgcttgctctgcggaggagaccacgtcgctggtggagcagagtgagcagcaactgtcgcagctgtgccgtctcatcgtcgatcagcatgtgggcatgatctcgctgcacctgcgctccaagttcgattcgctcttccgctacgacagcgagggtcgcattcgcaagtggggtgcgcgcgataacattcgtgccgtgttcaagcaagcgcgtgacgagacgctgcagctgctggacctgttcgccatcttccgtctcgacgagtacaaggaggcggactcgcccgccaataagcgcgaccaggcgctgcgcgacgaggaggaggctgccaagacgcgtccgcatgtccgtcgcgcatcttccgtgatgggcaacagctcctcctcgctcaacgccaccacggctgcaccagcggcatcgggcgagtcgaaggatgacgcagacgaggagggcgaggattctctgtccggcgtggagtccgacagtgagggcgtggaggagaaggtgggtcgcagcacggtggactactcgtccgtggacgcggcgaacatcatcctcgacgcctctgcacgcctggagaaggagtccactttccgcttcgacatcgagggcgcgttgcgcgaggccgagatgcagcaggcagccaacgaggacaaattcaaggtgccgtggtggatgttcgcgctgctggccttctttggctacgacgagatcctgtccgtgctgcgcaacccgttcatgctcgtcttcctcgtggtggcgggcggaggggcctacatggcgcatcaggtcggcgccctgttccccatgctcgcggtcgccaaggctaccgcgctgcaattcctcgcgcaggcgcaggggtcgctcaacaatgtgcagcagctgcagcagcccagcggctcgccctcgcgcagcaaccgccgcctgtccagaatgtcaagcggcagcagcctcaaccgccgcgccagccacattcgcaacccgtcgctgggcgaatacacggagtcggagagcacgccgcgctcctccagccgccgcgccagcgtcaacgagggcctgtcgcgtgccgcgccgccgccgcctcggaggatgatggcgaggtggagatgagcgagctgcagtcgtcgcccatcgataccaacgaggtgcagttcgtgctgggcgcggactcgcgcaacaccacctcggctgctggggccagccctccccgcgtcaaacgcaccaccagcgtcaagcgtgggagcatcaacaagaaccaatgagctcgtctcgctggctctgggcaacccaagcatgctctcgctttgctttgctttgcttcgcttctgcattaactcgcgttcgcttctgctgcatcagctagtcgctgcatgtacatactcgcgcttgtttcacatggctcatacactcaagccatatttatc

SEQ ID NO: 12713 - DNA, 3955 bp, Oryza sativa
  ref <308>: DATABASE ACCESSION NUMBER: AK110061
  ref <309>: DATABASE ENTRY DATE: 2001-12-06
atcaccaccgccatccgtcatccctccttctccgctgctccttcttctctctctttgcctgccaatcatcctcgcgaacgtcgtcgccttgagtatctagcctttactcaccgtcgccgcacatcgcctcgtaaccttcgtaaacgagtcagcttcactcgttcctcagcatcgctgtcaaactcgatcaacaccctttcgtttccaccaaaacttcacacttgatctttcgccatgtcttccaaggccatccgagagttcgacgccaagctgctggtcaactactggctgccccgctcgcctctggcccacgccgacctcaaggtcaacgccgactttgtcgctcccgcgcccaaggtcgcccagatcgcctgggaccccaccaccaactccatcacagacgagtcgcagctcccagcatgggtccagtcgaccaagttcgtcgccaagccagaccagctcatcaagcgccgaggaaaggccggcctcctcaagctcaactcggactgggctgatgccaaggcctggatccaggagcgcgccggcaaggcccagcaggtcgagtcggtcaccggtaccctcaacaacttcatcgtcgagcccttctgccctcaccccgccgacaccgagttctacgtctgcatcaactcggcgcgcgagggtgactggatcctcttcacccacgagggtggtgtcgacgtcggcgatgtcgacgccaaggctctcaagctcctcatccccgccgaccctgccgcgcccttccccaagcgcgaggtctggaccagcaccctgctcaccggcgtccccgctgccaagcgcgaggtcctgaccgacttcctcatccgcctctactcggtctacgtcgacctccacttcgcctacctcgagatcaacccgctcgtcgccaccgacgacggccagatcgcctacctcgacatggccgccaagctcgaccagaccgccgacttcatctgcggccccaagtgggccatcgcccgtgacccttccatcgtcatgggcatcgccgccggtgctgccggcaacaagggcgaggaccgcggcccgcccatgtactggcctgcccccttcggccgtgacctgaccaaggaggaggcctacatcgccaagctcgacgccggtaccggtgcctcgctcaagctcaccgtgctcaacgctacgggccgcatctggaccatggtcgccggtggtggtgcctcggtcgtctactcggacgccatcgccgcccacggctacgcccacgagctcgccaactacggcgagtactcgggtgctccctccgagggccagaccttcgagtacgccaagacgctgctcgacctcatgacccgcggcgaggtcaacccccagggcaagctcctcatcatcggcggtggtatcgccaacttcaccaacgtcgcctccaccttcaagggtatcatccgcgccctcaaggagtacaaggtctcgctcgccaagcacggcgtccgcatcttcgtccgccgtggtggccccaactaccaggagggtctcaaggccatgcgcctcctcggtgaggacctcggtgtcgagatccaggtcttcggccccgagacgcacattaccgacattgtgcccctggctctcggtgtcaagaccttcgaggaggtcaccctcgcctcgcagcagcagaacgccctcccttcgggcgcccagacccccgtccacggcggcgccaacggcgccaaggccgaggacaaggccatcggcaccgttgaccacaccaccggcgagcgtgtccagccccaggaccagatcgtccactttggcgctggtgccgccggcgagcgccctgcctaccgtcccttcgacgccaacacccgctcgctcgtctttggtctgcagccccgtgccatccagggcatgctcgactttgacttctcgtgcggtcgtcagaccccctcggtcgctgccatgatctaccccttcggtggccaccacatccagaagttctactggggcaccaaggagacgctcctccccgtctacaccagcatcaaggaggccgtcgccaagcatcccgatgccgacgtggtcgtcaactttgcctcgagccgatcggtctactcgtcgacgctcgaggtgctcgactgcccccagatccgcgctctcgccctcattgccgagggtgtgcccgagcgccacgcccgcgagatcctccaccgtgccgagaaggccggtgtgctcatcatcggccccgccaccgtcggtggtatcaagcccggctgcttccgtatcggcaactcgggtggtatgatggacaacatcctgtcgtccaagctctaccgccccggttcggtcggctacgtctccaagtccggcggtatgtcgaacgagctgaacaacatcctctcgatcaccaccaacggcacctacgagggtatcgccattggcggtgaccgttaccccggcaccaccttcatcgaccacctgctccgctacgagcaggaccccgagtgcaagatgctcgtcctcctcggcgaggtcggtggtatcgaggagtaccgcgtcatcgacgccgtcaagaagggtatcatcaagaagcccatcgtggcctgggccatcggcacgtgcgccaagatgttcacgaccgaggtgcagttcggccacgccggttccatggccaacagcgacatggagaccgcctcggccaagaacgccgccatgaaggccgccggcttcatcgtgccggagaccttcgaggacctgcctcaggtgatccgcgaggtgtacaacaagctcgttgcccagggtgtcgttgtgcccaagcccgagcgccccgctcccgccatccccgtcgactacaagtgggcgcaggagctcggcatggtccgtaagcccgccgccttcatctcgaccatctcggacgagcgtggatcggagctcatgtactcgggtgtcaagatctcggaggtgttcgagtcgggtatgggcatcggcggtgtcatctcgctgctgtggttcaagcgccgcctgccggactactgcaccaagttcatcgagatggcgctcatgctcaccgccgaccacggcccggccgtgtcgggtgcgatgaacaccatcatcacgtcgcgtgccggcaaggacctgatctcgtcgctcgtgtcgggtctgctcaccatcggtgaccgcttcggtggtgcgctggacgacgctgccaccgagttctcgaacgcctacgaccgcggcatgaccgcacgagagtttgtggacagcatgcgcaagggcaacaagctcatccccggtatcggccacaagatcaagtcggtgtcgaaccccgactaccgtgtgcaggtggtgaaggagtttgtgctcaagaacttcccttcgcacaagatgctcgactacgcgctcgccgtcgagaaggtgacgacggccaagaaggacacgctgatcctcaacgtcgacggctgtctcgccgtgtgcttcgtcgacctgctgcgcgactcgggtgccttcacgatcgaggaggcgcgcgactacctcagctacggcttcctcaacggcatcttcacgctcggtcgctcgatcggcttcatcggccaccacattgaccagaagcgcctcaaggctggtctgtaccgccaccctgcggacgacttccacatcgagatggccacgcccgcgcgtgtcatgggcactctcaagaagtaagcaggtggtagcggccgccgtcgatgtcgcagcagtagtagcagcagcatacaggttctcgtgggttctcgctgttttttccgtttctccgttccgtctctccgtgtacaatccttcttctccttttatggctcgctgatgcggcgtcgtatggtcgggaggtcgatgctgtcggctcggctggtaaggctagtcagcctggctcggcagtgtagcaccgctccgatacggacccgaccgatgcaattcagtctcgttgcacttt

SEQ ID NO: 12714 - DNA, 3640 bp, Oryza sativa
  ref <308>: DATABASE ACCESSION NUMBER: AK110062
  ref <309>: DATABASE ENTRY DATE: 2001-12-06
atcttggtcgcagaccatcgcatcacagagccactgtcggcctcagacactacaccgactactcatcgccaccaccaccaccacctctatcatcgtcgcctgctttgccctgctttgccctgctttgctttccccttcatctgcaactgcaactgcatcgacgtgtccaccaccgcactcatctacgcacgcaagcccctttcaatccgcgcctcgacaagcatgcactccacctgattgtccccaagacttcacatcgctcccctctcgtgcatcgtctgcgcacccttgcgtcatcgccaaccgtccgcgtcgcattcgtcccaccccacgcccacgcccacgcccacgcccaccctccatcaccttcatatccaaagggcgttcattgcggctcatatcctgtccaatcccacacagacgcctaaccaccactgcctctctctctcatcttccacaaaaaccacccacccggacgcaggcgtccctttgctatatcaatccctcgctccacattcgtgccctccgccatccccttggtctccctcgttccaagtgcaacctcagcacgatcaccgacatggacgccttccaagcagacacgactccgccaccgacccccggtccgagctcgtttgctccaccgtctccgcatgcacaaagactcgcaaggcagcctccaacttcgctctcgcttcgcatcccacaagacggtcaatctcgcctcacacaaccttcgccgctgtccgctcggccagcgctcccgctctcgccaggccatgcctcttccagcaccctcgcgcctccgccgctgtctaggctagcacgcaaacgcccgtccaagctcacgctcgcgccaccatcgctcgccgacgatccgggcctctcgtcgcgctccatgcccagctcgcccgtcgtgctctcccgatccaactccaaatccgagcaccagcccgactccaccgtcgcggccccatccgccatctcggaagccgtcaggcatctctcgagcaccctgcgcggaacgccgcgaagaagacccagcatgcccttcaaggacacctcggcgcagcgctccgctttcccagaacctccgagcgcatccagctcgcgcacaaggccgccagaagccttccgcgatccatccgagcacatcctcagcggcaagggcagcaccctccagcacgctcgctccgtctactcgcacggccccgtcgaaatcctccccggcctctacctcggagacgagcacaacgcacgcgatcaccacacgctctccgccctcggcatcaccaccatcctcaacgtcgcaaaggagaccaccttggatttcactgcagacgccgccagcgcatcacccgcgcagtggtcgcgcgtgcccgaacgcaggggcactctggcaaacggtgagctgccctcggctcgctcccatcgcgactcggcgcaatcctctcaagtgccccccacacccggcgcctactttactccacccaccaccgcatctctgccagtcgccagggacaacaacgacgcgccttcgcctcgcaccgccatcagcccctcggtgctccgcaacacctcctccacgcccaacctgctcacccagttcctccacgacgagcccgcctcgacatccgacctgtcgtcgcacacgcaagccgcgcctgtcgacgcatcggccgacctgcgaacgctgacggcgcaagacgtgttgaagtaccgcacgctgcgtcgctccagcggctcgtcttccgacgatgctaatgacacggcatcgtccccctcgtcgtcgcgagcacccagcacttgcacgtcggcagccaccgagctcacaccccccgcgctcatgagcatccgcgcaaagggcagcgatgccgaatccgaatcccacgacgcctacgattccagtgcatattccagccagcaggtgtcgcctagatatgcgtccgacgccggcgagcagcagtctccatccgcctgggtcacgcacgtcgagctgcccgccaacgccacgctcaccagggtggcggtgggcgcagcagacgggtgcgccgccgaggtgcgctacatcaagctgccctggacgcacgacgagaccgaactggcgtcgggccacggtggattcgcgcaggggtgtgcgctcatcgccgaagcgctcggcgtggatgctcggtactggtacgcggccaagattccggaggatgtggatgcgtgctcggcgctgcacgacgatgccagcctggcgcaggtgcagacgagccgcacgcccggacgcatcctggtgcactgccagtgcggagtgagccgcagcgcgacgctggtgattgcgtttgtcatgcaggccgccgccatgcgctacggctttggggcggcacgcagcctgctgggcatgcacgactgctacaacatggtcaaggacaagtcgtcgagcatctcgcccaacatttcgctcatctaccagctcgtcgagtgggagcgctacctctccagcgccgccggtcggctgcgcgacgtgctcggcatggccagcgtacgcaaccacagcgaagcgggtcaagtcatggatgtagggcattctacgagcctggcgggtgcaggatggtgcaccgagaccatggacgaggccatgtggagcaagatgcggctggaggaggaggagaaggaggccgccgaagaggcgcggcggcgcgaagagcgactcaacgaagcggtgcgtctggcggcagagagaaaggcggcgcaggatcggctcgaaggactcacgcccgactcggcggcggcggtgggcagtgatgcggcagccggatcgctcatgcagcggaggcgcaagaaggcggctcctgcactgcagctccagacggccggggcggcgggtggagcaggagcggcgttggcgagtcccgggatgcagcgacgccgaccgccagcgctgcagctgtcgcgcaacggagccgacagaggcaccgcggtggaaacgccgttccagacggcaaggatggaggtgtggacgggcagcgagcacgacggcgatggcgacgtgatgatggacgagctggatgcaccgcagacgccgctgcgatcgtgggcgatggactcggatgtggtgtctacgccgaccgcgcgaaccgccgcagggccgtgtgagggcgaggcggatgcatcgacgctgcgcacgccgagcgcccgcacccacgcctcctttacgctgggtggtgaagcgcggttggatcgggcgcggccgtcatcgacctcgcacgtgtcgttgggacgcgaaggagtggtgtcgagtacgctgcccttggcgatggagacgtcgctatcgctcggttcgcgcggagtggaggctcagggtcacgcggggcgggcacgggcacgaccggactcgatgcagagcgtgctgtccagcacggcatccagcacggcgctgtttggcgtgacggcgctctcgcgcgaagaacgcaagaagcaacaccggcgcaccttctcttccgactggccgacgctgcaagccaacctggcgagtcagaagcgcaggagcaagatcgagcccggccctacggaagcgatggacgtctagaaaaattcaaactgccacgtgagcacgttgggtgccttgcaattctaacgtcgggtttaaact

SEQ ID NO: 12715 - DNA, 2750 bp, Oryza sativa
  ref <308>: DATABASE ACCESSION NUMBER: AK110063
  ref <309>: DATABASE ENTRY DATE: 2001-12-06
accaacaccctcttcgctccttccagcgtctctctcttccctagtccatccgcctaccatgccgccgaagcgagcagcgcttcccaccaaggagcgcgccctcttccagcggctcatccaggagtacgagacgaaaaagtacaagctcggcctcaagaccgcagacaccatcctcaaaaagttcccagaacatggcgagaccgtagccatgaagggcctcctcctcggctccaccaaccgccgcgaggagggcatcgagctcgcaaaaaagggcgtccgattcgacctcacctcgttcatctgctggcacgctctcggcatcttgcaccgccaggacaaaaacttcgaagaggccctcaagtgctacactcaggcactccgcatcgagggcggcggcaacatcaacctcctccgcgaatcggccttcctccagctccagctccgaaactacccgcccatggtcgagaaccgcctcacgctgctacgcatgcagcctcacctccgcatcaactggatcggcctcgccgtcgcacaccacctcgcaggctcgctcgatgccgcagtgcgcgtgctcgagggctgcgagaacgtcatgcgcgacatccccgacaggaactacgagcacggcgaggtgctcctctaccacgccagcatcctcgaggagcaggccaagttccaggagtcgctcgatctcatcgaggccagctcgccgcgcatcgtcgatctcaagggcaagatggaggccaaggcacgctgccacgccgggctgggcgagaaggacgccgccgagtcgatctggaggcagctcatcgcttccaacccagagaacaagcgatactttgctgggctgctgagcttgcttggcatcacgaccgagacagcagaccaggcgcaagccgtcgaggtcttccgcggcctgcaggcggaccaccccaagtcgacggccgccaaacgtctggcgctcatctacgcctcgggcgacgagttcgccacgcaggcgacggcgtatgtcaagtcggcgctcgtcaagggcgtcccctcgctcttctcggacctcaagtcgctctaccaggactcggccaagcaggctgcgctcgagcagattgtcgagacgctgggtctcgagtgggcgcccgcgtccagcgcgcccgccgacggcaccgagccgcccacatcctatctttgggcgctctactacctcgcgcagcactactcgctcacgggcgactcggcgcgcgcgctgcactacatcgactcggccatcgcgcactcgtcgacgctacccgagctgcacatggtgcgcgcacgcgtgctcaagcgcgccggcgacctgctcggtgcctcggccgccatgaccgacgcacgcttgctcgacggccaggaccgcttcctcaactccaaggcggctaagtacctgctgcgcaccaacgacaccgtcgaggccgagcgcatcgtcggtcttttcacgaagcccgatgcgcccagccccacgtacgacctcaacgagatgcaggcgctgtggtacctcgccgaggaagccgaggccttcctgcgcacaggcaacctcgctatggcgctcaagtggctcggccagctcgaacgcacgttccaggaattctgggacgaccagctcgacttccactcgtactgcatgcgcaagatgacgctgcgctcgtacgtgaacctggtgcgctttgaggatggcttgcgctcgcaccctgcgtttgttcgcgcggcatcggtggcgctgggcatctacacgacgctgtacgacaagccggacacaccggcgtttgtcgagaccaagacggacgaagaagaccccgcgctcgcgggcttgagcgaggccgagaagaagaaggcgatcaagaaggcgaggcaggcggaagccaagcgtgccgccaaggcggagcaggaagcggcggacaagaagaagaaggccgaagaagccgcggcgaacggcgaggtggtcgacgatgatggacccaagcccgatccggatccgaaggggctggacctgtttaagagcgtgcacgaggcgccgttggaacaggcagccaagtggctgcgattcttgcaagccaatgcggccagcagcgaagagacctggatgggggcgtttgaggtggcgatccgacagaagaactggttgctggcgacacgtgcgctggttgcgctgcacaagctgcaccctgcgcacccggagctcgtccacatggtggtgcgtctcaagacgcgattgcccgacctttccgctgcgccgaagccgattggaagtgttattgcctctgcactggagacgatcgtgccggcggacaagccagcgtcggttgtgtttacggaagcgctgcagtcggggagcgccacgccggaggaagtgttgggtaacgcacgtgcagcgctggcgctcgaccgcacagacgaggcagtccagatcctcctctccctccccaagaccatctcgccagccacgcagccccgtgcactcaaccgtgcactgaggaccaccacggtggctagagatctgctcgcgacaattgctcctaacagcacggcagaatttgacgccgcggcagggaagaccttccccctggccaatgccttcatgtccacgtcccagctcgaagaacgtcagaagaccaccaaggtagcgcaacaggcttggtcgagcgcgccggtagaggaagaggcaaacggtcaccagccccttctgtaaactcacgtcactgcatacacatttttagcccccc

SEQ ID NO: 12716 - DNA, 2772 bp, Oryza sativa
  ref <308>: DATABASE ACCESSION NUMBER: AK110064
  ref <309>: DATABASE ENTRY DATE: 2001-12-06
atcacatcagcggcaaccttacccacactcccacaaaacaagcgcagtcacactcgcaacccgcacgtttggcttcagcagcagcagcagcagcagccaggatctataaagcttggcgctttcccgcctcgcaagccaaagcccacttcgacatccctccacctttgctccttctgtctctgccccaaaatgtcgatcccttctgaaggcttggtctcggtcgcctccaacgtacagccccaggctattggcacgggctcccgcgttgccaaggggaagaccgtgctcatcgacaactacgacagcttcacctacaatgtcgtccagttcctcgccgaggctggcgccgatctcgtcgtctaccgcaacgacaaggtcaccatcgaggagatcgaggctctcaaccccgccaacatcgtcatcagccctggaccgggccacccgcttcacgactcgggcatctccatcccctgcatcaagcactttgccggcaagatccccatcctcggcgtatgcatgggcctccagtccatctactcggcctacaccggcatcgtcgagtttgccggcgagatcgtccacggcaagacttctgagatcgctcatgacgccaagggtctctacgcaggtctccccgctcacggcgtcgtcggcacccgctaccacagtctggccgcccagctgcccagcttgcccaaggagctcgtcgtgacttccaagacttcgagcggcgtcgtcatgggcattcgccacactcgctacaccgtcgaggctgtgcagtaccacccggagagcatcctcagcgtcggtggccgcgaaatgatggtcaacttcctcagctggaccggcggcacttgggacgccaacccgcaagccaaggtcgacgccgccgccatcgagcgtgccgagagcaccaccgaacccgtcctcgccatggccaacgacggcggtgctgctgcccctgcaagcgcgcctgccgccgccaacggatccgcgcccgccgccaccgccagcgtcggaaccatcctcgagcgcatccacgtacagcgactcaaggacattgccgccaccaaggccgtcccgggcttctctcagcgcaacctcgacattgccctctcgcttcacctcgctcctccgctcatcaacttccccgagcgtctccagcgccacgccgcccgcggccttccgggcgtcatggccgagatgaagcgtgccagtccaagcaagggcgacatcgaccccaccgcacatgctggcgcccaggcgcttgcatacgcgcgcggcggcgccagcgtcatcagcgtgctcaccgagccaaagtggttcaagggcaccatccacgacctctcgctcgccagacgcgccgtcgacaatctgcccgaccgtcccgccatcctccgaaaggactttatcgtcgacacctaccagatcgccgaagcccgactcgccggcgccgacacggtgctgctcatcgtcgccatgctcaccgacgagcacctcaagcagctttacgactacagtgtcggcctgggcatggagcccctcgtcgaggtcaacaacccagaggagatgactcgtgcgctccgcctgggtgccaaggtcgtcggcgtcaacaaccgcaacctgcacgactttaacgtcgccatggacaccacctcgcgcctcgccgatgccgccaacaagggcggcgtcatcctctgcgccctcagcggcatcaccggtcgcagcgacgtcgcaaagtacctcaaggagggcgtcggcgccgtgctcgtcggcgaggcgctcatgcgtgccaaggacaagcgtgcctttatccatgacctcctcggcctgccttccaccagcgccgccgcagagaccgtcgagggatccctggtgggccacggcaccctcgtcaagatctgcggtctttccagcgtcgaggacgccgtcgcggctgctgaagccggcgccgacatgctgggcatgatcctcgcaccgggcaccaagcgtaccgtctcgcacacccaggcggccgaaatcatccgcgcggtccgcgctctgcccggtagcgcccccgaagacgccgtcgcattggatgccgaggcggtcgccggcttgctcgagcacggcgtcacgcccgaggactggttctcgctgacggtcaagaagctgcgttcgcgcgcaggcaagcgcccgctgctcgtcggcgtcttccgcgaccagccgctggccgaggtggcgagcaccgcgcagaagctcggccttgacgccgtgcagctgcatggtcgcagcgagggcatcgagtgggccaagttcctgcctggccgcctcgtcatccgtgtcttccccgtgggcgccgacgcccagatcggcacgggcctgctgcgcgacgtcgcgcgtcccggctaccaccaccttgcggcgctcgacaccgccggcacgccaacctcggccaccggcggcgacggcggcacgggcgtggcgtttgactggtcgctcgctcgcgccgtgcgcactgccgacgcgctccccgccatcgtcggcggctccgccgcgcgccccgtgcccctcatcctcgccggcggcctcacacccgacaacgtcgccaaggcgatccacgacgcgctccccttcgccgtcgacacgagctcgggcgtcgagaccgacggcaggaaggacctcgccaagatccgcgcgttcgtcgccaacgcccactcggcgccgcgtccgcagcagtaattctcactcacgcctttgcacacgcgcaatcgaagagatgactttcttgac

SEQ ID NO: 12717 - DNA, 3699 bp, Oryza sativa
  ref <308>: DATABASE ACCESSION NUMBER: AK110065
  ref <309>: DATABASE ENTRY DATE: 2001-12-06
accatctctgcataccctgagctgctaatccacacgatgcaggcgaacaacctgcagctgttctgggagatcgcatcttccgatcaggacgcgcgactcgcttcggccaaccacctcgtccagcaactcctcgcacagcaggacgtgcttgcgtccacgtccaaactcacgctcaacgccgccctttccaccgccgatgatgacgcgccaaacgcactgcaagtcgacgaggccgaggcggatgctgtagaggatgcgttgggaaaccgcacggtcgccgacctcatgtacgccctgcgtcgtctgctgcgcggcctcgcaagcccaagagaaagctcgcgcctcggatttgcggtggtgctcaccgagctgctcagcaacatccgctacgccgtcaccgcacgcgagatcctcgtgctcgtgctgaggtactcgaatccacaggtggccgcgagcaggcaggagcagaaggactttatgtttgcaaagctctttggcatcatgtgcctcgtccagtccgagctgctcgttcagcacaccgccacgatcgccgacttcaagaggtgcatgcgcatcctcatcacgctctcggcggataagccttggatggcagagagctgcgcctgggttatggtcaatgccgtagcccagatccaacagcagaaagatctcgcctgggcgggagaggcccacgcttggatgaccgaacaaatcacagctacaagcgaactcagccccgaaaagctcgccgtgctgttgcagctcagccacacggctcctgccgactactttcacaacatcgcgctgccctcgatgcgcaaggaacacccactatccaccgccaatctgccgcagctcgcgcgtgtgctcaaggaggccatccccgccgaaaacgacgccaacgccaccgtgggtgcaaggtctcgctggcaacccaagatccactttgtgtgggacctgatcctcgacgtctcctttaaggaggtggcagagacgcggcttgcggcgtttccggacttctaccgcgtggtggtggacgagacgctgtttgcggcgtcgtcgtcgcacgatcgcaagtcgtggggattccaggtgttcgagcgtgccctggcacgcgcgcgcgacgacgacaaacccctgctcttcacgcccaactttatgcgcacgctcatcaaccaactcggcaaccgcgaacgcctgctgcaccgcgccgccgtcaaggcgacccacacgatccaggaggtggtcaagcagcatccgtatctcggattcgtgctggtcacccagctgatcggcaaaaacggccatccgaacttcgactcgatcaccaagaccaagacggtcgagcaggtgttggcggcgctcgacgtggagcgcgtgcgcgagtacgtgcagcatctgggcgatatcatgtgcaagggcatcgctaccgacgacgacgatgaactgcaagagatcacgaaccggaggaagtgggcgttggatcagttgctcttcctcgtgcgcacgcccagtgtgcccaaggacgacgcgctcatcctcgacgtgctcaccttcctcgccgcgcacggctactttgcgctcaccaagcccatcaagaagcgattcttgctccacacactgcccacgccgccgttggcagactcgctcaagcagctcacgcgccagcgcttcctctcgtgcgtctcggagctcgccaagcaagccacccccaccaccgcagtgaatggaaagaagacgcccggtgtggcgcaggatggtgagctgtggctcgccaaggcgcacacgatcctggtgcagctcgaggcggacaagagcgtcacctcggtgtttgaccacgacgccgagatcgccgccaagctcgccgagggcgtgcggtgtctggagcgcgtgcgcaagctggatgccaagagcgacagtgccgaggcgcacgagcgctcgcgtgcgttccagtcgctgctgctctcggcgctgctcgtgtcggcggatgctgcggacggtgcgtcggatctggtggaaccgctgtgcgcgtgtgcgaacaagctcttcccgcccgcaaccacgcgcaagggcaagaaggctgacgaggaggagccgacgggcatcgagctgctgtgcgactgtctgctcagcttcctcgagctctcgtcggcgttcctgcgcaccacggccaccaacgcctttgaggccttctcgcaggatatgaccaaggagagcatgggtctgcttctgtcgcacctgcgcaccaccgacgagccggcctcggcagatgaggatgaggacgacgacgaggtgatggatgcggacgacgatgacgaggagggcaagccgtcggatacgtcggcgacgagcgacgacgagagcgatgccgcgtcggatgcggacgacgacgaagagggcgaggaggtggacgaggagctgcgatcgcggctgcgcgctgtgctcaaggagtctggcatggcggagcgcgatggcgaggccgacgacgatgacgaagacgatgaggatgcgcagtcggatgccggttccgagtcgagcgttgaattctccgatctgtgcgatgacgagatgatgcttctggacgacaagttggccgaggtgttccggcagcgcgtctcggcggtgcgcgaccagaaggaggccaagcaggaggccatcgcgctgcgcttcaaggtgctggagctggtggaggtgtttgcgcgcaagcagccgcagagttcgttgatgctcgacctcatcacgccgctgtacgatctgtggaaggcgcgggacgaagatacggagcagctggccaacaaggcgcgaggactactgcttacgcgcatcagcaaggccaagacggttccggactcggtggatgcctcccagcttcgggagctggtggagaagatgcatacagaggcgcgcgagtcgcagtcgaacgatgtgtcgaacgtgagtcaggcgatcaatgcctacctcaccaagacggcgctatcgcaggccggggatgatgccaagacggcgctgggtggcgaattggtggcgatctatcgtgcatcgttgttggactacctcgagcgcaaggcgagtcggatgcgacacgagttcctcatcgacgcctttcgacgattcccgctgctcgggtgggagcttcgcggcgagttgttggatcactgtcgacctggagccgccactcgcgcgttccgccaggttcaggccgtgtcgatgcttcaagcggtgcttacgcaaatcgcccagcgtgccgtcaaccaggtgctggacttcgtgcccgagatcagcagcgtctttgtccagatcgtatccgactcggtggaggattccggtgcggcgcttacgtcgagccacatgaaggatacgatcaagttcgtcctgcaggcggccaggatcagcctgcgtgccgaaaaggacgcaagcagggtcgaggcggcttggaaggtgacgaagctccaagaggcggcgaagaagctgcagggctcggagcgcttcaaggcgtcgacgtcgattcatgatctgatgaagcagctgctcaaagtggtccagcctcaggcgggcgacaaggtcaagaacaagaagcgcgccgccgacgatcaggcaaccgctaccaagagcgaggccaagtcgccggcaaagaaggtcaagcccagcaaaaagtgaaagcaccaggcaactcatgaccagcaactaattttcttcatt

SEQ ID NO: 12718 - DNA, 3336 bp, Oryza sativa
  ref <308>: DATABASE ACCESSION NUMBER: AK110066
  ref <309>: DATABASE ENTRY DATE: 2001-12-06
atcatccactcgatatcatccgacgacggctaggctcggcgtactagcctgtagcgccaggtaccgccgtcatgtcgcaacgaccgcttccaacgggtgcaccgcccgcggtgatcagcgtcgttcgacgcccactcgctcccagcgctcgatccaacatcgccccggccacagcatccactgccgcagcgcagcccgcaaaggcacagatcaagctcgaggaccgcctctccaaagccgaggcaaagatccaagacctgcagcgagaaaaggatactgcgcacaaccagctcggcgacctgcagaccgagctccgtctcgccgcacagcgcgaagccaagctcaagcacggcatcgagaagtgggagaaggcgcatgcatcgctcaaggagaagagcagcaagctctccgacctccaggcgcgtctcgcagagctgcacaaggtccatgaggagtccaaggcacgccgacagagcgagatcgatgacctcaccgaaaggctccgcaaggaacaggacaggcgcaagcacgagctcaacgaagcgcgtcagtctattgccacagaaagcgcaaagtggcagcaataccagaccaagtgctccgccctccaggccgagctcgacgcgctcaaactgcaaggttccgcgtcgcacgatctggtggccgaaaagcagaagcaaatcgacgagcttcaggcagagcgcgattcggacaaggtgattctgatcgattcgcaaaagtacgcgcgcaagatcgaaaacgagttcaacgcacgcatccaggagcttcaggcccagctggatgccaagacggacgaggcggcgcgcagcgctcgtgaccaacaggccgcagccgagcaggagcgctccgagatgcacgacgagctcgaggagctgcagctcgagctcgagcagaccgagcaacagtatgcgcacaacctcaccgtgatcgcaaaggcggtatcggagcagatcgatgccgtcaagctcggctctcgcgcagagacgcaatcctggatggcaaggtggcaccacgccgcctcgcagcaaatccaactcgagtcgctctccgacgagcgcgcagctcagatccacgagctcgtcgccgtcgtcaagcaggtccaggacgatcgtgacactgccaagcgtctcgccgccacgctacaggctgatctcgtcagcatcacaacagagctccacgccgaacgtcacctcgctgacacgctcatcgcacagcagctcgaggatcagcaacagcgtcagagcacgcagcagacttcagcaagcgactcgaattcggaaggagagatcgacgcaggcgacatgtcgtcagcgctgctgcgtgtgcatctcgacgacgtccagtcgcacaacgccatgcttcagcaagaggcgagtgagctgcagcagctcgtcctttctcgctccaacgacgccaagcaagccgaggaagcgctcgcagccgtgcgcgcacaagtcgcaacgctcgagacctcggtggctgccaagacgcgcgaggtggacaacctcgtctcgcagctcgccgagctcgagcctctgcgtcgccgacttgcgggcgcgctggaagaggcagcagcggccaagaaggaggcacaggcgcagaccgaagccgcacgatccatcgctgcgtctttgcagaatgcacgcgtggccgaggaggcatggtgcgacgagcgcgatcgcatggcggcactcctcgaccacgccgagcacttcgaagcgctctaccacgagctcgccgagcaggccaaacatctcgtcgagcgcaacgcgctggccgagcaggagaaggctacgctgtcggcgctcaatgccgagctgctgggacacaacaaccccaaccagaagatcatgtacatggatcgcgtgcgacacgagctcgacgacgccaggcgcgacaacgtcggcctccgcatgcacatcgagcgcctcgagcacgagaatgcgcagctcagccgcgagctcgccagcttcagggcggtcgatgtgccgctgagccagcgacccaggaccgaagtcacgcgcgtgctcagggcgtccgccgatccagcacagctgctccgcaaggtctcggctgcagctgcgacaccagcagccaaggtggagctgcccagagcggagcagcgtgtctcgacgccggtcaggacgaactttgcgccgattaccaacgcgacgcccttctccgctgcgcgcccaagattcagcgcgcagccgctgctgccggaagtgcacaaggcggtggaggcagcgcccaagcaggcgcgcaagcaagaggaggaggcgccgcagcgggtagcagagccgctggcacacccgccactgcccgtgcacacggggctttccatcaagaagcgccgctcgtacggaaacctgtctgtacacgcgatcgaggcggacgatgcagcggcggaagagactgaacaccaggaggcggtggatgacgatacgctgcttgccaatgcggtcgaaatcgaggcagacgaggtggctgtcaagagggatgcgaagcgcaatgcgccgcgggcgacgctggtcaacagtggagcgttgcgcgtcggtggtgcaccctcgatgcctgctcctgctcctgcggctgctacgacgcaggtggacagcatggctgctgcgagtgtaagtgcggtgcgaacgccgagtctggccacgtcgtcactggggatcaaggcgcggcgtgtatcggagatcgtgcgtgcatcgacgcctccgctaggctcgatcgtcgacttttccggcatcgatacaccgggaggagcgatgctgctcgatgctgcgctcccctcgccctcgccgtacgggcttgcggactggacggcgacggatgagacctcgcacgtgcctgccctaacggcgcactttggatcgattgcccactcgactccactgccggccaaggcggggcgtagaaccaagtcgcgctattcgggtgcacagcgcgtagcgcttgcaccggacacaacgccgcgtgccaaaccgagcctgcttccaccgcaagccaagaaccagtggctggcagtgtacgaatccgacgccgtggaaagccccatgtacgagcgcgaacacgactcgttccgaaacggatggctggacgacgatatccccgatctgcccgagttcaccatcgaccatgccaagccagccccagcaccggctgccaacgcgaagagcaaaaaagtcaagccaagagcgtcgagcaagctcgtcaagccaggtccaatggcccgcactttcttccgctgataataccctgcgcttcccacagcacatgcggattccgaatcgtactttgataccacacttc

SEQ ID NO: 12719 - DNA, 3077 bp, Oryza sativa
  ref <308>: DATABASE ACCESSION NUMBER: AK110067
  ref <309>: DATABASE ENTRY DATE: 2001-12-06
actccttgcctccgactcgcaacatcattgccaccgaccatcgctgcagcccaccatcctcgctcgagcaagacaggcaacagagaaacagcgaccagcacaaccttcaccaaacgcagggccacatagagtcttgctcgtccagctctgggcgccacagggcctaccgccaacatgccccaccatcaccgtgcctcgtcgctgaggcagtccaacaaggccttcaagtcgaagcacgccacaaagacctcgctgcgtgaggcgtccaaaggtcgctctgccagcgacgtctccagcacctcgcgcctctcctcgcacaaggcttcgccgctctcggccgccggaaacgaggtgggctcgcgccagcaccgccgcaaccacgccaagcaggcacagcgttccaagcgcaatgctctcgtccagtccaaccgcatcttctcctccgccgcatccagggagggcaaggacggtctctccaagggtttcgccggcgccggtgctggcgctccgtgcatctgcgccgtcgtcgacctcgccgaggacggcgactcgtgggaggcggtgaggaggatccaggaagaaggtctcgacggcggcgtccagcctgtgcctggtcgaagcgtcgacgatgcgttgcgcaccggcctgccctactgcgagctcgaggcgacgcgcttccgtcagaccatccagttccttccgcttccctacggcgcgctctaccccatcctcgacgcatgcaagtgcgccgactttgtcttgctcgtcctgtccgcatccaccgccatcgacccgggctcgtggggcgagctctgcctgcgcacgctccaggcgcagggcttgcccaccgtcgtcgtcgccgtgcccaccctccatccggacggcgccacgggcgttggaggcagcaagaaggccggtgccgcactcaaggcggccaacgaggtgcgcaagtcgctgctcagcttcgcacagtacttttcgcccgacgtcgacaaggtgcatgcactcgacgaccgcgccgagcgcggcgcgctgctgcgcacgctggccaccgccacacccaagcgcgtcgcctggcgcgacttccgcgcgtggatggtgagcgaagacgcagagtgggaaaccgctcccaacccggacgctaccaacgccaatgacggtgcgaacggcatcgcgagtctcaacggccacgaccaagaacgaggcaccctcaaggtgaccggctggatccgcggcgcacccatgtcggcggaccgcctgatccatcttccggactttggcgactttgaggtggaccgcatcgcgtacgcaccgccgcccaacgcacgcaccaagcacaccaaggcgagcgccaccacggccgcgagcaccgacgctgacgacgctgccatgacggatgccgacaccgccgctactgtcgccgatgcaccgctggcggcgggcgatgtgctgcagacgcgcgacgacgagttcgccgacgacctcgtctccgaaaacgagccggacgacatgggcaacgagcagacgtggccgaccgaggaggagatgcaggcggccgagcagtttgccaagcagcgtgccgacggcgagatgccgcccccgcccgcgctgcccggcaccacgcccaagacgatcatcaagggcagcggcaatgccaaggacaacgccaagtaccgtgccgcctggatcatcgagtcggacgaagacgaagacgatgacgacgacgacgatgccgactcgatgatggcggaggaagccgacgaggacatggacacgggggatgtcgaggtgaacgaggcgattgacgactacgagcgcatgaaggcggcggcgattgcgcagcagcacgcgcagccgagcgagagcatgtccgagatggcgttcgaggacgtggacgatgcgcaggccgaggccgagtaccgcgcgtaccaggagcagcgcaagcgcgagcgcgaggagcgcgacgatgccgagttccccgacgaggtggatacgccgctcgagatcgcggcgcgccagcgcttcgcacgctaccgcgggctcaagtcgttccgcacctcgccctgggatccgtacgaggatctgccgcgcgactatgcgcgcatcttccagtttgaggacttccacaagacgcgccgccgcgacgagggtgctgcgctgctggacggtgtgcagcctggcttccgcgtgaccgtgtgggtcaaagacgtgccgcgcgccgcggcggtgcgtgctcgggcgagcaatattgagctgccgaaggtggatgtggcggtgccgtttgtgctgttcggcctgctgaggcacgagcacaagaagagcgtcatcaactttaccgtcacgcgcaacaccgagtacgacgcgcccgtgcgatccaaggaccctctcgtgctgtgtctcggtccacgccgcttccgcgtcaatccgatcttcagccagcactctcgcggtgggggtaagggcgtcaacaacgtgcacaagttcgagcgcttccttcggcccggtgtctctgcctctgtcgccaccgtctacgcacccatcacattcggaggcagtactgctcccgccgtgctgcttcgggaacgctccatcgatggcgagtccgggtacgaccagcggggcgtttccgcagcccagatgcctcacctcgtcggattcggcaacctcatcgatgccggacccacgcgcatcaatgccaagcgcatcctgctctcgggccacccgtacaaggtgcacaagaagacggccacgatccggttcatgttcttcaaccccgaggacgtgtactggttcaagcccatcacgctgcacaccaagctcgggcgcacggggcacatcaccgagtcgctcggcacgcacggctacttcaaggcgcactttgacggtcccatcagccagatggacacggtgctcatgaatctgtacaagcgcgtgtatcccaagtgggcgcatccgtttggtagtgcgtatgacgagctgcctctgcctcgaagcgaggtgtacaagcaggatgacatgcagacctagaccccccccccggcacacatgatcttagcgctaaactttcgtttcattcc

SEQ ID NO: 12720 - DNA, 3250 bp, Oryza sativa
  ref <308>: DATABASE ACCESSION NUMBER: AK110068
  ref <309>: DATABASE ENTRY DATE: 2001-12-06
aagtcttctcgccatcacctttccaccacctcaacacccgtctgctctattccaccaccgtacatcagcttccaacaccgcttccctcgcctctcgacttccaacgctcctgatactcccgctcattcacctcggcgcttcccacatcgactcgatccaacagccgcgcctcgcacaacttccacacacaagcgcacaccttttctcgtcttcgaatcgatatcactgccgcaagcgcaaatcgcccacccccccccccccccttcaacatcccaacacaccatccctccgccgcctatcaactcttttgccgggcagcggatgatgaacagcctccctcgtgcttaaaccagccacggtgcaccatctttgaacatcgttcgccgctccatccgcaaactcaagcgatccgatccagtcacagccgcaggtcatggccgccaccagagctcgcacagaactcgccgcagccgcagcctcaacccccaaaaatgacacatccctagactcttcccgccaagcggcggccgccccggctgaagcctctaccgaccacaccccggcacgccgcaccaccactcgcacccgcaagctccccagccgtctcctcccttcgccttcgcctcccccctctcgccccacctcgctctacaacgcagccaagcatgcaaagggaggcagagactcggcagaccccacagacccatcatccgcgctctgcacacctacatccgcatccgcagcacccacccccaagacgcgaaagccaaggccttccgacgtcgaagaccctctcgccgatccagacacctccctcgacacctcccaagatctcggcccgggcaagcgcaagcgtcgccctagcagcatgtacaagccgccttccaccttgacctcggtcgacacgccttcgcctgccagcaatctcgccgccaccgccgccgccaaagcaaagaagaagggccgcagccagagcccagacacctcgactcaaaccaccacagcctcggccaccaaactcaagcgtcgcttgtccaagggcaagttcgagtccaccccttcgtccttgaacaagaccgacgccgcccacatccacgctgacgattccgaagccgagctcgagtccatccgccactcgagcgcctccaagcgagcccgactggacgatgccgacgacctcgatctctcgcctcctcctctgctcccacgcgacggatccgcccgcgtgcgcatgcccacccacttcacgcagcccaccttcatccgcggcggccgtgtgagcgtgtcgcccgaagcttccgccaagcgtcccgtcacgtttggcattcgcgacttcaaccgtcctgcattccatcgtgccgacgcagtctcgggcgaccgccacaacactcctcattccgccatggcggtcaagcgcagtgctccagccaagcgttccgacatcatgtcgtcctcgcccatctcggctggcgtggccaagttcgagagcgaacccggcgcaccgctcacctatgtgcctttcccatgcgctgcacgcagcctgggccgattccacaacatgcgcgccaaccccttcgcccacgagcagatggacgtcgacgacgacgacgaagaggaagacgacgacgagaacgacttccaccaggccatgctcgacgccgactttgactttttcgattcgcaaaaggccgacggcaacgccaccaacaacctctggaacgtctcgcagcgagccgccaccgaggatgccgccgtcgaggacgacgacacgcccgccaccacgccgaggagcccgcagtcggggtgcgacctgccttcgcccgacagccctcgctgcaagtcggaagacgaggctcagccgctgcgcaccgacgactcgggcatggcgttcaatgcggtgcgcgactcggtgtttgtgcacgcgctgcccacgacgcaggtgggagcggacaaggcgtgccagcacgcgggctcgctcacgctctcgctgccctacacgccgggcgtggcggtgtcttctccgcagctgcgcgccagggagctcgagttggacggaggcgctggagtgcgaggcacgggcgatgcatcgagcctcacgcagacgggcacgccggtgctgcagcgtcgcaagcatgcggcgctgggcggggatggcgcgcacgcgcttgcgccgctcaagctcggggcggagctgatggagcgaggctcgtcgcactcggcgacgtacatgcagctgtcgccgatgatcgagatggactcgcctctgctcagcccggtcctcacgctcggcatgcacgccatgcacgccaagggcaccgacctcccgagcccctttatcatgggtgtcgactcgctgcctgagctcgagcatcctgctgcgctcgatttggcggctgccgacggctcgaccacgcccaagacgttccatcccgaggcgatggacgatgccgtgctgcccgccgcgacgactgtgagcactgcagccagccagacggtggaggcgccctcggcacccaagccggagcccaaagtggcgcctgccaaggtggagaagccggctgcgcgtcggcctgcactgccaccgcctcgtcagatccgatttacgaccctggacacgcctagcaacgatgcgactgctgccaccctccctcgcggcgccccccagcagcagcagcagcagcagcaacaacaacaggcgtcgactttgcagcagcatgcaacgagtggcaaagtggagcaagctacgccggagctggtgcactcgagctcgtcgtcgcccgactctggttcggattcgccgagccccgtgtcgcaggcgggatcgagtggatcgggcgaggccgaggtggaatcgctcctgttcgggcctcctgaaaagctggagctgcacgagctcgacagtgcctggaacggatccaaggcggcagcgctgcgtctgacccaagtgcgccatgtcgacgtcggtgcctctcgcacgtaaacccaccaccaccaccactctttctcacaccgccactcttatgtaacaacagctctcagtctcctttgcccccggcatcgtccttggcaaagctgaggaaaaaaacagccgcccccccccccctctctcccccaccgctttctctctggaaaaagaagggaactgtgcccgctagtgcagtgccttagtgtagttttttttcgagccccctccatcgtccagatctatattcgttcaaactctttatttccaatgtaacaacaaggtttc

SEQ ID NO: 12721 - DNA, 2828 bp, Oryza sativa
  ref <308>: DATABASE ACCESSION NUMBER: AK110069
  ref <309>: DATABASE ENTRY DATE: 2001-12-06
accgcaaggctcaccttctttgcaagacattcgctttcgtctctcgtagacgccgtctctcattaaacaaactccagtcattccttacaggtccgatcgcacattgcagaattgacttctgcctggtttccttcgcagtatcgatatctctcgcaatctcaaagaagtcgtgacgccttagcactccaccgctacaaaagagcaaggaactttccacagtcaacatgaagaagcttaccgtcgctttcctcgccactctggccgccgccgatgccgcccaggctcgcggctcccgccacgcccgtcgccagaactatggcaacggctaccaggttggtgaggtctcctccgccgccccggttgtgagcagctctgctctccctgccgctcccccggtctcggccggtggcaacggctacggagtccccagcgctcccgtcaacacacctgctccctccaccgaggcctcccccgagaagccttccagcgcccctgctcccccgccagctgcctccgtccccggcaatggctacggaacccccgagaagccctccgctcctgctgaggtcccttctgctaccccctccccctccactgaggcctctcccgagcagccctccagcagcgcccctgccgaggtccctactcccagcgcccctggtgtccctacccctagcggccctgctggagtccctactcccagcgctcccgcgcccgctcctccggcttcggtccctggaaacggctacggcactcctgagaagccctccagcgctcctgtagaggtcccttccgccagcccgtctgcttccactgaggcctctcccgagcagccctccagcagcgcccccgccggtgtccctactcccagcgcccctgctgaggttcctactcccagcgcccctggtgtccctacccctagcggtccggccggagtcccaactcccagcgccccggcgcccgctcccccggcatccgtccctggaaacggctacggcacccccgagaagccttcttcgtctgctccttccagccagaccactgatgtctcccccgagaagccttccagctctgccagcggccctgcctccgtgcccactttccccggcaccggcagcctgccccttccttccatgcccggaactggtccggctccttccttccctggaactggcagcctcccggctccttccatgcccggaactagctacaacatgcccagcttccccgccactggtgtctctacccccgctggtcagacctccaccgacgttgccgccgagactccctcttcggctccctcgttccctggaaccggccctgctccttccttccctggaaccggcgcttacggcactggtgtcctcacctccgccgcgccccttcctaccggcactggtgctttctccttccccgtgactgatgtcgccaactccaccagcgatggctctgagctcgtcacctcggttatctacaccactcagatcttcacccagactgcctgcgctcagtccgtcaccgactgccctgctgcttctaccatcctcatcaccagcaccatcccgctgaccaccaccgtctgccccaagtctgagctccccactcctactggagcttccaccaccgcggccccggtcgcctctggtcccggcaacggctacggcactggctccaagacctccgctgttgttgaggctgtcagcagccccgtcaccgagaaggtccacgtctccaccgagaccctcgtctacaccgtcggcaccggctcgactgcccacgctgtcaccaccgaggtcgccaccacctccactgagaccatctacaagaccgtctacgtcaccaagggctacgagactgctcccgcctccaaggaggttgcttctgaggctgctcctactggcaacgaggccaccacctacaccaccctcgagtctacctccaccaccacccagttcatcactgtccacccctctgcctctgcccccgctgccaacgttcccggaaacggctacggcactggctctggatctgacgtccctgtcgagggtgccggctctgtcgtccccggcggcaacactgctggcgctggcgagtgtgcccctgctaccactgtcaccgttaccgagcaggagaccgtcaccgtgaccgctcagcccactcctaccgctgatgtccctaccgagggcgagaacgtcccgtcttccgcccctgctgcgtccactcctgccactgacagcgcacccgtccccaccggcggtgcccctgctccctaccccgctggcaacggcacccttccctctggtgcttcgtctggcttcttgacccagacccgccccgtcggtggtgctgctccctctggcactggcatgttcagctaccccaagccttccggcaccggtgtcgctccctcatccgagcttcccagctttgtcctccccaccagctccgctgccgctgagaccagcgctgctgccgtcgccgagagctcttccgctgctcccgtcgccagcccgtctgcctccgcccctgcccccaactacggcagcggctacagcaccggcaactacaagcgcttcttcggccttttctaagcgccttgatcgcatgatgttttcttctgtacacattctgtgagatggcctgtggctccttttcacgtagcgcttgtttattgcatgtggccgtgaggcacgactttgtttctttgggttctgtatagagagcgtgtctgccgggagcagaagacgggtggaagaggaggagaagagaaacgggttcaagacagttgtataggggttgtagtgatcaatgtacgctgtgctttgcct

SEQ ID NO: 12722 - DNA, 3506 bp, Oryza sativa
  ref <308>: DATABASE ACCESSION NUMBER: AK110070
  ref <309>: DATABASE ENTRY DATE: 2001-12-06
ttgctgctagcctcccctcgtcccagcttcacgttcggccttcccaccatcacgtcgattcgacatccttctcgctctgactccgcacaagtcttcgtccattcgcccggcaccgcctgccatcctcttcatgccgtctttcgtttgaagttccgagactaatctcagcccgatcgcccactcaaagcgcatgcgagcaaacgctcacggtcctctccttcgtgtatcacagaatgactttcaccggtcttccaacagctgctctcagcgcatccacacgcgatcctacatcgtcccaaccgcatcgcttcggcgaagtgaccggatcgacatcgtcccatggcagcagcggcctcgacgattacaaggtcctgcagcctggcgacttcgccaggatgaagggtcagctcagcttgcgctccagacccgcctcgcgcatcgattgggtcatcgactccgaccattacaatgccctcgccgcgtctcctggcgtgcccaatctccttcacgacgcatctcctctgccacccgactttgacctcgtccttcctgctcgccaccaccaccttcacgatcaagcgaaaagcaaccgtgccacctttggtccgtggagcgataaatcagaccacacgcacgagggcgctgccgcttgggccgatgcgaaggaggaccttcttagcgtcgctgacgagggctccgacaccgaaccggctctgcaaaccaacgacaccgctctgcagtctatccaggcccagcccgctgcggcacccctgaccgcggaagaggaggcaccacaggcagtcaagcaagacacacatctgtcccaactcaaaatggaagccgaggcggcctgggcaaactatcgcccgggcttgcggcccctcaccacggaacatgagtcgctggcttctacctccagcactccaggcacgcccactcaggtccctcagcgattggcctcgctgcgcagatcctcgctcgtcgctcacgtagctctcgccaagccgcaccagggctccaaccacaagtactcggccagtcacagcagtatttcgctgtcctctctagcgcacgacactggcaccccttccagccttcacgcaaaattggagcccgagtacgttcctcatcctgcaaggcctttcggacgaggctcgctaggctcgattcgagcaagcccgtccgaagcacgctttcagcgtccctacacggcctcgatcctatcgtccacttccgaaggcagcttgctcagctaccaaaacagcttcgagagcggcctcagcccccttcttttgaaccgcgctgccacctcaggcaggttgcacggccgttcccagcgacctgcgaccgtcgggagcatcactgtctcggctgcgccactccgcgacctccactttccccggcccaatctttctgccagctccggccgcccagagaccaccaatcagctgtctgccgaggagcggcgccagcaagtgcgccgcaccaaaaagcttgcgcaaatgcttggcgaggagatgctcttcgccacaaatgctcacaaccagcagctcgatcccgcaccacgctctcactcgctcgtcgcatcgtcggcggatgctcggagccgaaagcatcgaccccagagcatgccattcagcgtcaccggacacgtcgacgttccaggcacgtttgcgtcaaacgcaggaagcaagacgcgcgctttctctcgcaagctgcttcacagtcgaacgcacggtgtcaagagctgggatcacgctagctctgatctcaatcagaatgcagtgtatctcaacctcaaccgaaaggccgccgacgtccttgggatcccccatccttactcgtcgaacgcacgagcgaacgtttacgctggagataccttttcaagcgacgaagagctaaaccgcgtcgaagaaatccgctctcatccgcgtcccttcgtcccctcaggcttggaggaattcaacgagcccacgccgaaagttgaccagctcgcggctttttcagctgctgcgctcgatgaagccgcttcacctactctgcctcaggacggtccgttccgtccctttgatcgctccgagatcgaccaggctctggccgtttccgagagccgcaagctggcggctgctcgcgacgagcgtcgacgtcgtgtggccaaaatgtcgcgctggctgggcgaggctgtgcctgcagagctcatctcgtcggccaccaaggcaggtccgggcgcagtcatcgtcagcaccggaccgtccaatccggctagccttggctctccggcgcctacgaccagcgacgctcatagcctgcgcggcgccccgtcttcgtcagcatgtcaaccctcatcccacagccatggctccatctcgcacgagagctcggttgcttccaacttgcactcgttcatgtcaatcgacagctcggacgaggagtctggtgacgaggctgcgcctgccattgctactgatcgtgtcttgacagacgtgcgcttggctgcctcttcgccccgtagcagggcttcagaaagagtcgctgcttccgatagtctttcgacctgccgtaactcgatcgagagctacgagtatctcctcgagaacgaccggaggcgactgggagagcttgcctccatcttccagcacggcaggtcagctcctcgaccttctacggtggacacgatcagcgcaaggagtcgtccggtccgtcccaatggacgaccgcagacgtcgcccgtgacgggctcgatgccagatggcaggaggcgaggcttccagtccctcggccacgcgggctacgagtcggaagaacgacctcctcgtccgtcagcggcgttcttggagctctcggattccgagagcgacagcagcgaagccgatgagctgcccgagagcgacgatgagtcgagctatcccacgtcgcgtcgacagagggcggccaacttgcacgatcgctccatctcgaagctgtccaatttcttcggctcgactccttcgcagattgtgagatcgcagagcgacatgcgagtcctaacgtcgagcgtcgacacggtctcgactgtgggcaatgggtcgttgggatccaggcccgcgcgcggcggcaacggcatgcgcagcttgtcgcagcctgaagcgctcaagaccatgctccgctcgctcgaggaagaggccatggacgactcaaagctcaatcccttccagaaatccgagatctcgaggagggtgcatcggctcaagaaacgcaccaccaagatcttcagctgaggatcgatgtcccggtcgctttcgcccgtgtgtccgctggcggacactcttgttccatgctgtcgatcctttaatttcgtcgtctcgaggcaccgatcaggtgccagaaagatttgcattcgtttccatcctcttcccatcacagtcgcactcgttgatcgctgtcctgtctctttgtatttgtatcacacatcgatcccactcgctcacactctctgcgcacgtgataatggtcatccttgtccccac

SEQ ID NO: 12723 - DNA, 1670 bp, Oryza sativa
  ref <308>: DATABASE ACCESSION NUMBER: AK110071
  ref <309>: DATABASE ENTRY DATE: 2001-12-06
gaatacattgcaacaatcgcaacacacacgacacccatcacttcatctccgtcttccttcttttcatacgcagatatcgccgtctcaccattgaaaggcgactgcacttcttcttgcatccagcgctactcgtaattctctatacccttccgccaccatgtacatcttccgccgcgccgccgctcgcgcagtctctgcgccccgtcagctccgcgccactccttgcgtgaacagcttccagtcctccatcccgtcccttacccgttctttccaccagtcgagaatatggcgcgccgaggagcaaaagaaggagaccgagaccgctgcccaggacgccgtctctgagtcatcaggaaccacatccgagcctctcggccagtcagaaggcgtctcctcatccgagaccaccaccacaccgtcgtccagcaccacttctgagcctgtaggccagagcgagcgccagtccaagcctgtcctcgagcaggcttctgagatcgcggagaaggccaaggacactgtctctgatgctgccgcaaaggccgcccaggctgttggcgagttcacccaggaccccaaggagagagctcaggatgctgctgcgtctgccactgagcaggcatcacagaccgcctccaaggtcagcgagcaggcatctgaagtcacctcgcaaatcagggaacaagcgcaatctgctgccgccgaggcaacccgctatgctcgcaacaccgccgcatccaccagggaaaccttccaggagcgcaggccttacgaaagccgtccgcccgcacccccgagcaagattctttacattggcaacctcttctttgaggtcaccgctccccagcttgaggcggaattcgccaagtttggcgaggtcacgaacagcagagtcgttaccgacgacaggggcctgagcaagggtttcggttatgtcgagttcatcaaccagcagcaagccgatgctgctcgcgaagctctggaccagaaggtcttccagggcaggaggatctccgtgcagtaccacaggcgtcgcgaagccaacaacaacaccaagaggaaccagaggtcaaccgcagagcccagcaagactctgttcattggcaacatgtcctaccagatgagtgacagggatttgaacgaccttttcagaagcatcaagaacgtgctcgacgtcagggttgccatcgaccgtcgttccggacaacctaggggtttcgcacacgccgacttcaccgacgtcgagagtgccgttaccgcaaagaaggctctcgagcagaagtctgtctacggtcgtcagcttcgagttgattactctggccaggcgaaggaggacggtgacaggcccgcccgccgcgagagatccgacaggtatgagaggcgcgagaggcgcgatcgcgacgacagcaacgacctcgactagagcgttgacgaattgatcacctactcttgacaccacacgatgtatccgccagcactagagactgctttgaactatacatacctggatgtcttcaaggtatacttgcattgcaagcgaagcagacaccgtttggtggcgaggcctgtacgatttggcggagatgagatatttggggggcctttgctgtacatatatgatggctgtacgacagtgtagaatagacatccgaaaagtgtacttttgtttgcac

SEQ ID NO: 12724 - DNA, 3424 bp, Oryza sativa
  ref <308>: DATABASE ACCESSION NUMBER: AK110072
  ref <309>: DATABASE ENTRY DATE: 2001-12-06
tgcttctgcggcagctgcgtcggcatcatccgtctcctgcattgaagccgcgatgaagcattctcgaccaggctcgcgaggcagcgaggcgccctcgtcggctgcacccaacactcccgaagcgcatgctcacaatcccgactcgccctccgacgatgcgcggctctactcgcgcggcaccggaaaacgcaatcgcgtccacttctcctgtaccgaatgctatcgtcgaaagcaaaagtgcaatcgcgagacgccatgccagcactgcatcgctcgcaagatcccagagcgctgcaagaccttccagccgggcgaggatgccaacgatgtcgcaacaaggctcaatcgcgtcgagagaatgctcgaagaccatcttcccaagctcgctgagcaggtccaccatctcgtctccctcctcggatcaagcacaacgtcgcgcccacagccccacgaccctcacccccgcatcccttccgccagcagatccacctggcacgaaggcgctctcgccagatcacccgagcgcacatacgcccgagctagcgaccagggcgacgatgacatcgacgaactcgagacggggcgatacagtcccaaaaccggcttctacagcggtggctccatggacatgcgcatcagctccatcctcgacgacctgcccggcagctcgtccaagtccgcaccgctcaacccgcccgttcgcacgctcgagggtccctcggagatcgacgtcgtcatgcccgaatacggatgtccaactgcacccactcccgatcttcttggcgctttcagcacacgtgcacactgcagcgtgcttatcgaccatttcttcaacgacatcaactggatgcgccagcccttcccacaaaagagcttgcgcaagtccttcgaggccttctgggactcgggcccaaagatcaacgcgcagaacatcaacatctttgcgctattgtgcaacatttgcgccatcgccatgctctccgtgcaacatcgtctcttcccagagggcccgcgcgatcgcctcaaggccgcacggcgctaccactacgccggccgcagagcgctgcttatgagcaccatcatgggtcgcgaagacgtcgatcaaatcgtcgcctggctcgtttcgtgtcgcttcctcctccttgatcgtcgcattggcgaggcctacactttgggctcttctgctgtccgcgccgccttcagcatcggtcttcaccgtgacggcaccaagctcggcctgtctcccgccgagaccgaggcgcgcagacgcgtctgggccgctgtttacttcctcgaccgagccatggctctcaatacgggtcgtccggccgtcatcgacgatcgcgtgtgcgacactcaagttcccagcgaagtcatggatgaggacatctttcccgctcccaaacatccaccaaaaatgcctcccggcgtcgatcctccgaccgcctacagctacaccgtcttccgtcagcgcatcgcagagctcgaaggccgcatcctcgccacttttcagaatcttcagcatccggtccacatcagcgacgttctggctctcgataaaagcatgcgcgaactccaagacggactgcccttctatttccgtgcaaagctcacaaaggatggtgtagagggcgacaaatcgctcgactcggtctacggctttctcaacgtgcatcgcttcctcctgcacaccgagatcaactcggtccgaatcgcgctgcatcgcccctacctgctccgctctggaggtcccaatggcgccaagttcttgccttgccgtgaggccagccttgacgcagctgttcacgacctcgagatgcgtcgcgactttgtgcagaacctcaagacgctgacgcctgccggcgaagagcctctgctgtatcgcgttcagatcggaacgtataaatggttccattcgcttctggtcgtcggcatcgtgctcctcatggacccgaacgcacgcgatgcgcccaagctcaagtcgcacctcgaggagtatgtcaacacctacaagagccggccggcgagccagcgcgacgagatgcgcgatcgcgaggccaacgtgatcggcatcttcctttcgcgcattgaacaggtggaaaagatggcagctgaagccaagggcaacgcatcaggctcacgcgctgcgccgcgcgctccaaagaggggccgatccaccgatgccggccccaacagcgatgcacgcgaccgactgaacaagtcgcgaaagcgcggcaaagacgctggcgacgagctttccgacgaaaagtcggatgcgcatctgctgctcagcctcgatgcgagcagatcaggtctcaacggggctggaaggagggaggtgggcaatgaagctgatgctgcatccaagtcgtatctggatagactagcacgtggcgctgtcccgtcgacaagtgacgcgccacaagatgcaggctcgactgcttcgcgacagggatcgggcgattggtcattcggcggaccgcgcgggctatctggcacggtagaccctagctcgtccgcaagcagctccaacagcccttcaacttcatcgctcccagctgtgatggcgagtgggcatggagtcaacgatcccaaggcgaatgcctcttcgtcttcgacgcccacctgggcacctgctcccaacggtggcggtgaggatgcgcaacagttctttgacgcgtggtaccaagcggagtgggcagcagccaccatgccatcgtacgatgccgcctacaatggtgccaacggacttggcggaggcgctgcaggggtcagtctcgggctggattcgctcgcgggctttagcggtgtgtttggctcgacgtccaatggaggcggcgcatcaagtgggcctgtgagccaagggctcggtggaggcttcaatggactcatcgggccttcgatcggcgcacccggggctgcagccccggggcctggcgcgaatggctccaaggcgttggcaggcgccggcactggcgcggggctgacgaccggaggcggaatgagcgaatggatgtcgcaagctggcgggctacctccaagttatgcggcgacgacgacgagcgcagcgacatcggatcggctcgcagatctcctttcaagaagtcagccggcgagcaacacggatggctcatggcaggagcaacgacacggcgccggacagtctgtctcgggctccagcggcctgcagccacctggcgcagtcgccgcctccgcatttggctcgtcggcgccgacaggagctccaggctcgcaggcacaaggctcgcaggcattgctcacctttgacggttcggcgccgggataggatggtcaccaaggggccggcgcaggccagcgagatttcgaccctgcattctggcaaacgctcattgacaaaatcatcacctgaagccacacgagccaatcaatttttttgcgccag

SEQ ID NO: 12725 - DNA, 2793 bp, Oryza sativa
  ref <308>: DATABASE ACCESSION NUMBER: AK110073
  ref <309>: DATABASE ENTRY DATE: 2001-12-06
ctcacaacgagcaaacagcgcaaaaccgaaaaaccgtcgacccgcggccgcgccggcgcgatgctccgccggcgccaccacctccccgccgtcctccgcctcttctccacttcctgccgccgcggccaccccacgcagccgccgcagcatccgagccccgccccgctcccgctcccgccgccggtggcgaagaaggtccccttcacggcgtcggcgcacgggaggtcgtggagcgacccctaccactggatgcgcgacacctccgaccccgacctcgcggcgctcctcgaggccgagaacgcctacgcggacgccttcgtcgactccgccggcgagggcggcggcggcctccgcgcgcgcctcgcggccgagatgcgcgcgcggctgcccccttccgccgcctccccgcctcagccctggggcccctggttatattaccagtatgttccagagggtaaggaatacccagttttatccagaagattgaggtcttctggtggtctagcaagagctgcccttgatttcatttctggttcaaaaaaggagcaggtgttgcttgactggaatgagattgcagaaaaatttggttatgtgcacatcgggagttgtcgaatctctcctgatcataggtttctcgcatatactcttgatatatctggggatgagttcttttccttagaagtgaaagatattcagtcgacaaacaccattttttgttcaccccacaagggaatagttagcttagcatggtctcgcaacagcgacaacttattttacacagtctgtgatgagactctacgacctaatcaggttctctgtaaagatctgcaatcagatcaggcaggttttttggttttcatggagaaagatataaactgttgtgtggatatcacaagcacaaaagatttcaagtatgtcactatcaattcaaacactaggacatcatccgaggtgtacgtgatggagtctggtcatgtaagaggtggcttatggcccgtacagaaacgttctgacaaagtgcagtactttctggagcatcataatgggtttttctacatccttactaatgcaccctcagaaggtactgaaacagcaaatggtggttactacctggccaggtgcagagctgaaaagtcagaaatggataaatggcaggttgttgcactccctggatcatattatacctttcaggatatggacatttttcacgaacaattagttctatttattcgaaaaagcggtcttcctcttatttgctccatcaatttgccaattgatgttgactttcaggagcaaaaggaacttgatgatcttgatccatggtttttccctgtaccgtcagacttatgcagcattgttcctggatccaacaatgacttcatgtcatctacttatcgtctggttttgtcatcaccagtgcttccagacttaacagtggactataacatgagaatgaggacatttgcaatccttcaccaagaggaagtaactggcctttcctcaaatctatgcacagttgggctgcaatccaatattacaggcatccaacaaaaccttcagcttattgaagactcacagagttggagtgatctatccaagctattttcttgtgaaagggtccaagttatttcacacgatggtgtctcagtacctttagtgatcctgtattcacgggaagcacatcgtcgtggagaatcacctggcgtcttgtatggatatggagcttatggagaagatctggacaagagctggtgttctgataggttaagtctgcttgctcgaggttgggttgtcgcatttgcagacgttaggggtggtggggattcatcatggcatcttgcaggcaccaaagctaacaagataaattctatcaaagattttgctgcatgtggtacacatctcatcaaggaaggatttgttcgcaaaaatagactttgtgctataggttgcagtgctggtggcctgttggttggtgcagtcatcaatatgctgccggatttattttctgctgcagttctaaaggtcccttttcttgatatctgcaatacaatgatggattctactatgcctctaaccatcttggattatgaagaatttggtgaccctaatatctccactgaatttgatactattcgtagttattctccttatgacaatttatctcctgacatatgctacccaccggttctggtaactgcctcatttaatgatacaagggtaggagtctgggaagctgctaaatgggtttcaaaagtgagagatattacatgccaatcctgttcctggtctgtcattctcaaaactaatatgcaaagtggtcattttggtgagggtggacgcttcatgcattgcgatgagacagcttttgagtatgcatttctcatgaaagccttggggttggatgacaatgacagctgcaaaatagtgtgatagttttcagggctttctacgcttcaatgttttgtgcaagtgtgacatatgactgcagaaactgattacattgtggtaagatctggcagctcatagtcctttattagttgaagagcatgtgcttttgtaattttctgcatcgcagactgttaggtgagatgagcagattgttatcttgtgctctcagggtagcacgtgtttttcttaagacaggagatcaactgctccgctatcaaaggtcagtagcctgcactatctgcggtagtagcatcaataaaatgttactacagcggtcgaaaatatctggtatcttgtattctgattatctagcctttctcacaataaatgttatgctaaagcact

SEQ ID NO: 12726 - DNA, 3099 bp, Oryza sativa
  ref <308>: DATABASE ACCESSION NUMBER: AK110074
  ref <309>: DATABASE ENTRY DATE: 2001-12-06
cagaactggcgatgcgggatgaaccggaagcctggttacggtgccgaactgcgcgctaacctagaacccacaaagggtgttggtcgattaagacagcaggacggtggtcacggaagtcgaaatccgctaaggagtgtgtaacaactcacctgccgaatcaactagccccgaaaatggatggcgctgaagcgcgcgacccacaccaggccatctgggcgagcgccatgccccgatgagtaggagggcgcggcggccgccgcaaaacccggggcgcgagcccgggcggagcggccgtcggtgcagatcttggtggtagtagcaaatattcaaatgagaactttgaaggccgaagaggagaaaggttccatgtgaacggcacttgcacatgggtaagccgatcctaagggacggggtaaccccggcagagagcgcgaccacgcgcgtgccccgaaagggaatcgggttaagatttcccgagccgggacgtggcggttgacggcgacgttaggaagtccggagacgccggcgggggcctcgggaagagttatcttttctgcttaacggcccgccaaccctggaaacggttcagccggaggtagggtccagcggccggaagagcaccgcacgtcgcgcggtgtccggtgcgcccccggcggcccttgaaaatccggaggaccgagtaccgtccacgcccggtcgtactcataaccgcatcaggtctccaaggtgaacagcctctggccaatggaacaatgtaggcaagggaagtcggcaaaacggatccgtaacttcgggaaaaggattggctctgagggctgggctcgggggtcccggccccgaacccgtcggctgccggcggactgctcgagctgctcgcgcggcgagagcgggccgccgcgtgccggccgggggacggaccgggaacggccccctcgggggccttcccgggcgtcgaacagccgactcagaactggtacggacaaggggaatccgactgtttaattaaaacaaagcattgcgatggtcctcgcggatgctgacgcaatgtgatttctgcccagtgctctgaatgtcaaagtgaagaaattcaaccaagcgcgggtaaacggcgggagtaactatgactctcttaaggtagccaaatgcctcgtcatctaattagtgacgcgcatgaatggattaacgagattcccactgtccctgtctactatccagcgaaaccacagccaagggaacgggcttggcggaatcagcggggaaagaagaccctgttgagcttgactctagtccgactttgtgaaatgacttgagaggtgtaggataagtgggagccctcgggcgcaagtgaaataccactacttttaacgttattttacttattccgtgagtcggaagcggggcctggcccctccttttggctctaaggcccgagtccctcgggccgatccgggcggaagacattgtcaggtggggagtttggctggggcggcacatctgttaaaagataacgcaggtgtcctaagatgagctcaacgagaacagaaatctcgtgtggaacaacactcgatgaataattagcgggcagcaacactgttcactatcttgaccagcatcaaacatgcctcacccattccaatgcatagcaacagtggcgaccgagggtggttcatacctccttgcagcctgcggtcccaaacttctctcgttggctgcgaaagatggctccatcgtctcgcaatggacttctgatgccgccggtaccgtgcctgtcacaaccgccgacgaggcagcttccgaaggcgatgaaagacctgcaaagaagcagaagaccacagcaaaggcagctccagctctgaccaacatcatcaagcttaccgtctccaatgatcagcagcatgccgttgctgtgaccgaagacaagtgcgtccgtgtttacagcatccagactgatggcggtattgtcgagctcagtcaaaggacgatgcccaagcgtccttgtgctcttgaggttttgcctgacaacgacacaatcatttgcggcgacaaattcggcgacgtctactctttgccacttctgcctagtgacgagtcggagaaagaggctgccgacttgaaggctgctcaggccgcccaagatgctaagaacgcagaattacgagcgcaagggaacttccaacctgcggccacgaacttgactgtccacactaagcgcaacctgcgatcactcgaagcgcagcagaagcaaaagctgttcacgccgaggaaggaagtgcttgccttcgagcacaagctgctcttgggtcacgtctccatgctcactgacgccacattcgctgtccgcgagatcgaaggcaagagccgcggctacatcatcacagcagaccgcgacgagcacattcgcatctcgagagcagctcctcaatcgcacattgttgagggcttctgcttgggccacacagaattcgtgagcaaggtccgcctcgtccctagcactgatcttctcatcagtggcggtggcgatgagtggatcggcgtttgggattgggtaaactccaagctgaaggcctccatcaacatcaaacaacacctcagcaaattcctgaccccgacgcccgaagacaaagatccccaggtcgccatatctagcatttgggttgtgccagtccagaaccaacctggcaaccacgcagtggtcattgcatctgagaaggtaccagctctgttggtaatctctacatcaactattggtgattctcaaacccaagttaccatcgtcgatgaacaactgcagggctcgaatccgctcgatctcactgttattgaccaacgtgtcctggtgtctgttgatgctcgtggcgatgatcaaaagcgcgtggtggcgctgcaatttgcggccaacgacaatggatctatcgaagtcgtccgtgacgaggcatctgagaacacactgaagcagctgaacgatctgactggcatcgaagaagaccccaaatcgctcgagacccttctctacggtatcaagaacctcaagaagcgcacaggctgggaggagcgcgaggagtaagaatagaacagaaattacatcatattcaagctctg

SEQ ID NO: 12727 - DNA, 3501 bp, Oryza sativa
  ref <308>: DATABASE ACCESSION NUMBER: AK110075
  ref <309>: DATABASE ENTRY DATE: 2001-12-06
gcatactgaagaagataaaaaaaaaagttcgatagattcatcgctcatactagcaagcatggcaatgccagttggagttgcaccggtgttgttactgttgcttttgccattggcggcggcgacggcggcggcggagagtgacgacagggacgcgctgatggcgttcaaggccggcgtgacgtcggacccgaccggcgtgctccggtcgtggaacgagacggtgcacttctgccggtggccgggggtgaactgcacggcggggcgcgtcacgtcgctggacgtgtccatgggccgcctcgccggcgagctctcgccggccgtcgccaacctcacgcggctcgtggtgctcaacctcacctccaacgccttctccgggagcatccccggcggcctcggccggctccggcggatgcggtacctcagcctctgcgacaacgcgttcgccggcgagatacccgacgcgctccgcaactgcaccgccctcgccgtcgcgtacctcaacaacaacaacctcgtcggcggcgtcccacggtggctcggcgcgctgcccaacctcgccgtgctccggctcagccacaactcgctctccggccgcatcccgccgtcgctggcgaacctgacgaagatctttcggctcgagctcgaccagaaccttctggaaggttccatccccgacggcttgtcgcgcctcccggcgctcggcatgttagccttgtcgcagaacagcctcgccggggagatcccggtggggttcttcaacatgacgtcgctgcgtggcctcgcgctcgccgacaacgcgttccgcggcgagctcccgggcgacgcgggcgcgcgcacgccgaacctccagtacctcttcctcggcggcaacctcttcgccggcccgatctcggcgtcgctgtcgaacgccacggcgctggtggctctcagcctcgcgaacaacagcttcgccgggcaggtgcccggcgagatcggcacgctctgcccgctgtcgctggagctgtcgaacaaccagctcacggcgaccgacgacgccggcggcggctgggagttcatggacaacctgaccaactgcagcgccttggccgagatactcctcgacggcaacaagttcgccggcgtgatgccgccctccgtcgtccgcctctcgccgcagctcgaggcgctgaaccttgccggcaaccgcatatccggcgtaataccgccggagatcgagagcctcgtcgggctgcaaacgttgtgcctccagtccaatctcttctccggcgagatcccggaagcgatcggcaagctcaagaaccttcgagagctgctgctagagcagaacgaactggccgggccggtgccatccgccattggcgacctcacgcagctgctcaagctcgacctgagcggcaactcgctgaacggatcgatttctcccagccttggcaatctgcatcagctgacactgcttaacctctccggcaacgagctcaccggccatgtcccgagtgagctgttcaccctctcgtcgctgtcgctgctgatggacttgtcggacaaccagctggacggcccgatccctcccgacgtcggccagctcacgaagctcgcgttcatggcgttgtcggggaaccgcttctccggcgaggtgccgaccgagctggagagctgccagagcttggagttccttgatttggcccgcaacgtgttcgtcggaagcatcccgccatctctgagtgggctgaaagggctcaggaggctgaacctgacgggcaacaggttgtccgggagcattccgccggagctcggcgggatgccgggaccgcaagagctgtacctctcgcggaacgacctgtccggcggcataccggcgagcctcgagaccatgagctcgctgatggagctcgacgtgtcctacaaccgtctcgccggccaggttccagtccacggcgtgttcgcgaacacgaccgggctgaggattgccgggaacaccgcgctctgcggcggcgcggcgcggctacggttgccgccatgtccggcgccgggcaactccacacgacgagctcatctcttcctcaagatcgctctgcctgtcgtcgcggcggccctttgcttcgccgtgatgttcgccttgctccggtggcgccgcaagatcaggagttcgagaaccggaaacgccgccgctcgcagcgtgctcaacggcaactactacccgagggtcacgtacgccgagctcgcgaaagccaccgacgacttcgccgacgccaacctcgtcggcgccgggaagtacgggtcggtgtacagggggaccctgtcactgaagacgaagggggagttcgcgcgcgaggacgccgtggtggccgtgaaggtgctcgacctccggcaagtcggagcttccaagacgttcatggcggaatgcgaggcgctgcgcagcgtcaagcaccggaacctgatcaacatcgtcacctgctgctccagcatcgacatggagggcaacgagttcagagctctggtgttcgacttcatgcccaactacagcctcgataggtggctgcatcgtgcgaagcatacggagaccgggaaatggtgcggcggtgccggcggcctgggcgtgatccagaggctcgacgtcgccgtcgacatcgccgacgcgctcaactacctccacaacagctgcaaccctccgatcatccactgcgatctcaagccgagcaacgttctcctcggcgaggacatgacggcctgcatcggcgacttcggcctcgccaagctccttcttgatccggccagccatggcgccgcggcggcgaacaccgagagcaccatcggcatacgcggcacgattgggtacgtcgcgccggagtacggcacgacggggatggtcacggcctccggcgacgtgtacagcttcgggataaccctcctcgagatcttctccgggaaggcgccgacggacggcgagctccgcgacggcctgacgctgccggagttcgtcgccggcgcgttcccggacaacatcgaggagatcctcgacgtggccctgctgctgcaggccgaggagctcgacggagcagcgtcgtcgacgacgtcggaggaggagagcgaggcgcgcgtcacggtgcgcgattgcttggcatccgccattagggtcgggctcagctgctcccggcgagctccctacgagaggatggccatgagcgtcgccgccgacgagatgcgcctcatcagagacgcttgccttcgtgcttgtggtaaataagtaggacagtatactgattgtttgtagaactttgacagccgaattagtcgatggataattattactacgtcatcggcatcgaattctatcactattcgaggcttcgagcaagctgttgtggagtaaaaaaaatgaaaatgtaaaatccatggaattcaggagctctgatctcttgatttatctagtgtactgtactgacagaaaatggatgtactctgcatattcagatttcagaatagattgttctgtttatgtcc

SEQ ID NO: 12728 - DNA, 3125 bp, Oryza sativa
  ref <308>: DATABASE ACCESSION NUMBER: AK110076
  ref <309>: DATABASE ENTRY DATE: 2001-12-06
atcgcaccacctgctcaaccgctccttcgtcccatccttcatcgtgccttctgcgcgcgttcctcacccatcaccgccctcgctctcgtcaccttgcgcctaccaccgtcgtcatcggcgctagcaccgcgctctgtccttcaccgtgcccatccagtagcacgcggcgcgcatcgtcgcacactttgccagcacctagattgcacctcgcgtccacacgtctgcctgctgcgcagtctcgaaacacatgccgtgccgactactataaatcaacgtcactgcttttgctaccgctcctccgagctccctcttggattcaaccacctgccaacctttgcagcatcatctggccgacactcgaacgctcccaatagaacagccgctgcttccgccagcttcccttgccgcaggtagaactcgctttcatcatgcatcaatcacccaaacgctcggtgatcaagcacccgcatgacttccatggcgcacaagtcatgccacgcagtgcagatgctcttgccgaagccacatcgcgtccacccatgcctccatccgtcgctcatgccgatccttcctcgagcaccacccccaactacctcaagggcgtagagggtatcggcaatccagacgccaccttctctggcctcggcagcagcttcgactttggcgacctcaacctcgtccccaaacgcagtgcacccgctccacccaaccatccaaactcgactgcagcctccggctccgtctttgcatcgcgtcaggccggcccttcgtccacctccgcctcgcccacctccacctcggcatccacattcgcaaacggcacatcgtccgcagcgtggtccacaggcgcttcggcggcgcccgctgcagtaggtccttaccgaccgaaccccaccatcaacacatccgtccaatctatgcagggccctcgctcgggtctacccgctcagtccagcctgccattcggcgtaggcaatcatccgccggccgcttctcccatctcgggccccgtctcggcctcgccctactcgtcgaacgcgcccggtgcttcgacgtccaacgcggccttcccacctcgccccgtacgctccaacacgtccggccccgacaccttccacacggtgtcgtcggtgaccgcctcgcagcacgtggcgcccgtcatggcgcagcgttcgcactcgagcatcggcccgcagcagcaccagatgatcggctcgccaacgctcaaccagtcgtcaccaacgctcgaacacggtgcaccgggcgagtccacgccatcgctcaccacgcagagccagtttgtgcacggcacgcgcgaccgcgagcgaagtcgcgacggcagcgccacgcccggaggccgcaacacgttcaagagcgtctttggcggctttgtcaactcgatgagcgacgtcttttcggcccaaaagaagatcgagatctcgacgccctacgaccccgtccacctcacccacgtcggcttcaactcggacacgggcgagttcaccggtctgcccaaggagtggcagcaactcttgcaagagtcgggcatctcgcgccaggaccaggaggccaacccgcaggcggtgatggacattgtcgccttctaccaggatgccaccaagagcgatggcgacaccgatgtgtggaagaagatgggctacgccaagggcaacaatcaggctcccggcacgccacgcaccgacaccagcagcagcgacgacggcttcaaatccggacctcagcctgtgctgtacgaaaagcctcgcgctgctcccgtgccgcccggtgcgctgcacggcaagagacccggcgacatcggcagccccgatctgcgcgcgccccacgccaccggcgacgtggcgctcaagccgacgcgaccagcaccggcgcccggagcgggccaggccaccaaagcaggctcgccgcccatgggatccaggcagccgggcgcttctggtgcttctgtctcgaaagctggcaccaccaacggcgcttcgacgacgtcagccgctgccaaaagcgccaaggcggcaccggcagcgggaccggcacagggaccgggcgcggtgccaaggaggcgcgagaccaagaagaacacggtcaaggactcggacgtgatcgccaagctgcaggcgatatgcacggatgcggacccgaccaagctgtaccggagcctgtccaagatcgggcagggcgcgagtggcggcgtgttcacggcgtaccaggtgggcacgaaccattcggtggcgatcaagcagatgaatctggagcagcagcccaagaaggatctgatcatcaacgagatcctcgtgatgaaggagtcgcgccatcgcaacattgtcaactttatcgactcgttcctgttcaagggcgacctgtgggtggtcatggagtacatggagggcggcagtctgacggacgtggtgacgtgcaacatcatgaccgaggggcagattgcggcggtgagccgcgaggtgctcgagggcctgcgacacctgcacgagcacggcgtgatccaccgcgacatcaagtcggacaacgtgctgctgagtctgcagggcgacatcaagctgacggactttggattctgcgcgcagattggcgagtcgcaggcgaagcgcaccaccatggtgggtacgccgtactggatggcgcccgaggtggtgacgcgcaaggagtacgggcccaaggtggacatttggagtctgggcatcatgtgcatcgagatggtggagggcgagccgccgtacctgaacgagaatccgctgcgtgcgctctacctgatcgccaccaacggcacgcccaagatcaacaaccccgagaatctgtccaacacgttcaaggactttctcaagacgtgcctcgatgtggatgccgaccggcggccggacgcggtgggcatgctggcgcatccgttcctcaagcgctccgagagcctgcgcacgctggcaccgctcatcaaggcggcacgcgagcagacacgcaagtcttagctcgccctcgtccctttttctctctctctctgcaacggacactcgacgcccatcgcttcatgctgagcgctgctgtatctttgcaatgcacggggatgcatgaatgcaagcgccgcgatggcttcaatctag

SEQ ID NO: 12729 - DNA, 4009 bp, Oryza sativa
  ref <308>: DATABASE ACCESSION NUMBER: AK110077
  ref <309>: DATABASE ENTRY DATE: 2001-12-06
ctcgcccatcaacctgacttgcccgtccatcatcggcagtctttcctttccttcctctctcggcgtccctctgccgctctactgccacgcggccactgcaaattcccccaagcgtgcacgagcttgcctgcctgcctggcccgcgtcgccatcgcctcgcttgattgatccgcaccgggccgctcgactctctcgagcacgctcctcttcatcatgcagatgctcacaaagttcgagtccaagtcgaaccgcgtcaagggcatcgccttccacccgcgcctcccgctcttggcatcctcgctccacaacggctccatccagctatggaactaccagaccggcaccatctacgaccgtctcgaggagcacgatggccccgttcgcggcatctgcttccacccctcccagcccctcctcgtcagcggtggtgacgactacaagatcaaggtgtggaatcacaagacccgcaagtgcctcttcaccctcaacggccacctcgactacgtccgcaccgtcttcttccaccacgagcacccctggatcctcagcgcctccgatgaccagaccatccgcatctggaactggcagagcaggacctgcatcgccatcctcaccggtcacaaccactacgtcatgtgcgcacagtttcaccccaaggacgacctcatcgtctccgcctccatggaccagaccgttcgcgtgtgggacatcagcggactccgcaagaagaacacctcggcacagcccatgagcatcgaggagcagatcgcacgcgccaactccggtcaggccgacctctttggcaataccgacgccatggtcaagtacgtcctcgagggccacgaccgcggcatcaactgggcctccttccacccgaccttgcccctcatcgtctccgccggcgacgaccgccagatcaagctctggcggatgtccgactccaaggcctgggaggtcgacacctgccgcggccacttcaacaacgtctcctccgccctcttccacccgcgccacgagttcatcatctctgacgcagaggacaagaccatccgcgtctgggacatgggcaagcgcaccgccgtacagaccttccgccgcgagtccgaccgcttctgggtcctcaccgcccaccctaccctcaacctctttgccgccggacacgacaacggcctcatcgtcttcaagctcgagcgcgaacgccccgccttctccgtgcaccagaacacgctctactacattcgcgacaagcaggtccgctcgctcgactactcgaccggcgccgaccacgccctgctcagcgtaaagcgcctcggcaaccagtacatccccccgcgcaccctcagctacaaccctgcagagcgctccgtcatcgtcacctcggtcagcggcgaccagggcacctttgacgtcgcgccgctcccgcgcgaggccggcggcgacctcgcggagtcgtcgagcgtcggcaagcgaggccagggcgccagcgccatctttgtcgcacgcaaccgcttcgccgtgctcgacaaggccgcccagaccatcgagatccgcgacctcaacaacgcagtcacaaagaccatcacgccaccccagcccaccaacgagatcttctttggcggcaccgccagcctcatcctcagcaccgccaccggcgtcatcctctacgacatccagcagcaaaagacgctcgccgaacttacgagcccgcccgtcaagtacgttgtgtggagcatcgacggcagcatggtcgcgctgctcagcaaacacaccatcacgctcgccgacaagtcgttcgcctcgtccaacctgatccacgagaccatccgcatcaagagcgccgcttgggacgacagcggcgtgctcctctacagcacgctcaaccacatcaagtacgcgctgccccagggcgacaacggcatcatcaagacgctcgagcagcccgtctacctcacgcgcgtcaagggcaagaccgtctcgtgcctcgaccgtctggcccgtccgcaaaacatccagatcgaccccaccgagttccgcttcaagcttgcgctcgcccagggcaagtacgacgacgtgctcaccatcatcaagaactccaacctcgtcggtcaggccatcattgccttcctccagaagaagggctaccccgagatcgccctccacttcgtccaggacaagagcacgcgcttcgacctcgccatcgagtgcggcaacctcgacgtggcgctcgagaccgccgagtcgctcaacgtcgacgaggtgtgggagcgccccgccaccgccgcgctgcgccagggcaaccacaagatcgtagagcgcgcctaccagcgcacaaagagcttcgacaagctcagcttcctctatctcatcaccggcaacaccgacaagctcgccaagatggccgtcatcgcagacaagcgcggcgaccatctcagccgcttccacaatgcgctctacctcggcaacgccgatgcccgcgccagcgtgctcgtcgacgtcggtctgcctgcgctcgcctacgccgcggccaagtccaacggcctcgatgaccgcgcgacggccatcgctgccgaggcgggcatggaggaggaggccgccgaggtggaccgacagctgagcctcggcgagggctcgtccaagttggcgccgcccaccgccgtgtcgcaggcgttccagtacaactggccgattgtgagcaccgagcagagctactttgaccgtgcgctcgtcgccggcaacgagggcggtccgatcttcaaggacaatgcgctcaacggcgccaagacgcacgacatcgagtcgtggctcgacggcgaggcgctcgaagaatcggacgacgacgacgacgaggatgcactcgatgccgaacccgaggactttggcgaggccgaagaggcgtgggatctggcggaagaggaggaggaggtggcgctggccgagcaagaggcggcggtggtggcgccgctccacgatgcgccgctcgacggactggccgccggcagctccgaggcagaacactggctgcgcaactcggccgtggctgccgaccacgccgctgcgggctcggtggagacggccatgacgctgctctcgcggcaggcgggcatcgtcgactttgcgccgctcaagccgctcttcctgtcgtcgttcctcgccgcgcgcagctatctgcctgcggcgccgggcgtgggccccatcgaggtgcatctgcgcaggaacaacgaagagagcgacggcaaggtgacgcaggcgcatccggcgtcgccgcgctcggtcaaggcgctcgcttcgggcgagctgcaggagggctaccgcgccgtgagcgccaacaagctcgccgaggccgagacgatcttccgacgtctgttgcaccagctcgtgctgacgccggcgtcgagcgaggccgaggcgaccgagatccaggacctggtggtgctgtgccgcgagtacattctgggcgtttcgatcgagcttgggcggcgcaagctggtgcagacggagccggacaatgtggcgcgcaacctggagctggcggcgctgtttacgcatacgcagctgcagccgcagcatcagacgctggcgctgcgcagcgccatgaccgaggcgcgcaaggtgaacaatctggccatggcggcgagcttcgccaagcggctcgtggcgctgtcgcccgcgcccgccgtggcgcagaaggcgcagcagatcatctcgctcgccgagcgcagtccgcgcgatgcggtcgaggtggccgggtacgacccgctcgagcagacgtttgtcatctgtgccggatcgcaccgtcttgttacggcggcgggcgcagggtcggtggcggacccgctcacgggcgcacgctacctgcccgagttcaaggggtcgctctgcaaggtctcgcagatctccgaggtgggcaggctcgcgtcgggcctgcgcagctttgccaagtgaagacgtatctggcggcttttgtagatattgtgcatgcgcgcgtgttcaactgggagtgcgtgcgttg

SEQ ID NO: 12730 - DNA, 2876 bp, Oryza sativa
  ref <308>: DATABASE ACCESSION NUMBER: AK110078
  ref <309>: DATABASE ENTRY DATE: 2001-12-06
aaccatctccttcttccacgcaggccgcgggcacatcgacaactcgcaatagcgtgggaacacaaaggccagcgcaccagcacttcgccccttgttcttgcaaacgcgagcctttccgcccatgcaagtcgcataacactgctatgcgccgagcgaacgcctcgcgacaatgagctttgccattccatcacaccatctcgccgccatgtcggcggcatctctcaccccgcgagggaacgacacaccgcagcgaaacggtacaggactatcatcctcgccagcatcatcgtcgcacggccatggggccgcatcgtcagcgccaaaggcggcgtcggtcgccatgtcggcggcactctctgcagccacgcagccagggacagcgggatcggggccatcgaatcttgtcgccgagttcctcaagtcaccagacgacatggccaagatcgcggcactgcgcaagaagctgctcaaggaacaggcgagtctgtcggccaagctcaagctgggtgccaaggagcagctggaagcgacgcgcgaaggactgttgaagctgcaggcgacacgccaagacgtagcggcgatccgggaggcttttgcacaggtcgaagcactctacaacaataccgacgtcgacggaggctcggggtcgcagtcgaccgacgctaatcgctcgttccgagtgatcagccaggtctcgcagatccaccgcaactttgtgcagacgacgagcacgctcgagaagctcgatgcgcttccggagcagatcgagacgctggcggacatgctgcagcgcggtcaggacgacatcatgggaccggcgaccgatctgctgccgctgcatttccatctttcgcagctcgaggcgtttcgcaacgagacgttccagatcgcacgcacgtgctcggcggatgtgcgcagcacggtggccgagttctttgcaccgctcgatgggctcatccgggcgtttgacgagtacatcatggcgctggccgaacgcacgatggatctggtgcgcgagggtcgcccggcagtggtggtgaagctggtcaagatcatcgagaaggagtcgcgtgaggacgagcgtgcggcggcgatccgtctggccaagcgcgccaacctcgagggcgcggcgcggttccggtcggtggtggccaacgcgcgcgtcatcaagctgtaccggcccaaattcgtcgaggcgatcgaccggtctgcggcggagctgtttgacgagtgctggtcgcgctttggctcggacggcacgagtctcgagttcctgacgcacctggactggatctacaacgatctgcgctttgtcgaggccgaggtggtgccgctctttccggcggactacaagatcgtgcgcacgtttgtcaagagctaccacaagcatctgggcgctattctgcgcgaacgcatcctggcgacggatccggaggcgagtgcgctgctggagctgtaccagtttacgcaggagtacaccaagacgatgaccagggagctcggtgcggacaaggcgtggctggagccgtcgctgttgggtggcaaggagcagacgatcatcgacgactatctggggctcatcacgaacaagatcggcgagtggacggcgaatctcatgtcggacgaggtgcgcgagtttgtggcgcggcagaatgcgcccgaggaggacaacgaggggctgtatggcttgcagggagcggcgatcctgttccagatggtcaaccagcaggtggacgtggcagcggattcgggccaggcgagcgtgttggccaatgtggtggatcatgctgccaaggcgatgcactctacgcaggcgacgtggctgcgcgtgctggagagcgagttcaagaggcagcgcgaggccaagacgcccgaggatgtggtgggtggactggtggagtacgtgattgcattggccaacgacgagctcaagtcggccgactatgccgaggccctcatcgcgcggctggaaccgatggtgagcaaaaagtaccaagcgggcatccgggaggcggttgacaatgcgctcaacggcttcctggacgtgtcgaagcggtgcacgcaggtgcttgtggatctggtctttgcggatctgcagcctgcgatcaaggagctctttggcttcccggcatggtactcggagggcaccatgacgaccattgtcgagacgatgcgcgactacacttcggactacagcgagcggctcaacccgaacctgttcgacgtgctgtgcgacgacatgatggaccgcttcctcgtgtcgtacatcggtgcactgcgacgggtgggtagcggcaaactgcgcatgcctacagccggcgatcagatgcgcaaagacgtcgaagacgccaaaaccctcttccccgctttcaaaaaggaagaggaggtgcaggagaagttcgaggtggccgatgcgattctgggcatgctcacttcgtcgccgacgatggtctttctgccgtactggagtttcgccaaggcgcatgggtctcacttgggattcctggaggctctcatgcgggcgcgcgacgatctcaagaaggacgatgtcaacggcatcatggagagcgcgcgccgcaaggtcaagagcgaagggctcaacgacgtggttcccgagaccggtgggccgacggtgatgagccgcgtagcccaggcgtacggctcgagctttggcagcggcctgctcgccaatctgggcgccgagagagccgcgggcatggcggcgagcgctttagctagctggaagagcaaggagcgcgagtgaccgacccagccctcacagaaaaagtgaacgagcccaagcctgcgataattcgccggcgatgcggattgcacgtgtcggcgctacggtgaaatgcgcaccgcacctttgcaac

SEQ ID NO: 12731 - DNA, 4087 bp, Oryza sativa
  ref <308>: DATABASE ACCESSION NUMBER: AK110079
  ref <309>: DATABASE ENTRY DATE: 2001-12-06
tcggacggacaggaagaccgcaagcacgctctagccgcaactgaggcagctcggtctacctcattgcgacgcattccatcgtatcgtcccgatcgtcgttccgcccagcggccggccagcacaggacagcgagagctgcatgtctcccgtaccttctccgcgcgatacactgggacgcacgagcccggatcaagctcgttccggcgaagcaggcgacaagtccacaacgaagagttctgcgcagccaaccatacctcgcgagagcacggaaaacggaaaccatcctcgcctccaacagggcgtgctcgctgacagcccttcgactcccatgacgccgacgcgcctcgtcttgacgaccgctcctcctatcccgcacaactggcttgagctcgccttgaaagggcgcgcagcagcacttcgcgaggcacaacgcaagtccgcgccttcctcattgcctgcagacatgcaacaagctccagtcacagatccaccgacggccggcacttctatgcagaccgatgcagtccaggatgccgccactcagcagtcgtctggcgtcaagactgagccggacgtcgacatggaagcaacagccgccacgctgactgctccgccaacagaaggctttcttcacgacggcgccttagcgagcgggctcgttagcgcctccagcagcccgccgcctgctccgtctacgaactcgcccgagatctccgtcgctgccgtccagcctccacccatggcggcactagcgcttgccagccaaaatgcaccggcagcatccggaccagaggcgttgcgcaccgagatcatgggccctccgccgtcattgcctacagatccagcctatccgccactgaatcctgtcgcgacggaaatcattgcacctccaactgccagcaaacgtagaggcccagctccggcggccaacggagcggctcgcagatcagacccaattcaagcgcctgccgatttcgatactcccaccaatctcaatggcaagatgccatatgcactcttccagacagtccagaagagcgctatcccggcctcgaaaagcgctcagactacgctcgcggctcaaagagaatccacggcagacgatgctgcggcggctggccagcaatcgagcggcaaagcggaatcggcacctttgacagacaacaaagccatcgatccgctcatcgccgacgtgttgacggacgccgactctgttgcgactgcgacggccacacgagaaactagccgggaagcatcagcagttccggagaccggtgcccaaggtgccgctaccgaaatcggcgagcccgcacagccatcgaccgcgatcggatcggagaccgcgagtatagcgccctcatcgtcagtgccacaacaagcggctccaccgacactgtccgcaggtacactggagagtgccgacgcatctccgtccgccgcccttcgtcgcacgccgtccaaccgcggcgcttccttacaagcatcgcagtccatcactagcgcatacgcagatcccatgggcctgaaaaagcatcgcgaactgctagcacaggaagccgcgcgtgctcgcaggtcgccttcggcggctagcgctggcgcagcgtctgtagctcccgccgtgccttcggcaggggcgagcaagaagagtaacactgcagcacgcacgatcgtgcctccatccttggttgagccgccgccgggtatgatgcacaccccggaaggacgtctccgtgtcattccaggcattgcaggtgctgtcgtgccaacggcctcgagctccagctctacggatgccaaattggctcccaggctcgaggacaagggcagtgccaataacgacttttgcgaggtctgcctaggtcacggccgctttgtctgctgcgacggttgcccgcgcagcttccacttcttctgcatgaacccgcctcttgacattgacgagatgccgccttcgaatgcggcgcaagtgctgggcccggccaaggcaaatccggtccaaaagggcaaagccaaggcgggcgaacctggcgcgggctccgatctcaacatggacgagatgtggttctgcaatgtgtgcgtcgccgaacgcaagcccaaggcggtgtctcgacccaaaggtttggggccctttggctacttgctcccgattctgtcgcagcaaaatccaaaaagcttccagcttccggcggacgtgcgcacttacttcaaggatgtcgctaccgccaaagacggcgatttcgtcaacgcagctatggtccgccaggtcaagccaaatcggcatgggcagatcgagcctcgcgacccgtacagactcaaggacaagaacggcgacgccgtgctctgctaccgatgtggcggaacaccgttgcccgcaggatccgatcagcataccgcaccagtcggctccccagagcgacacagccgcgcagcctcggaagccggcagcgcctcggcggcgacaccggcggaccacaccattcgcgaggggacaggttggcgcaggatcgtgagctgcgacttctgctcgcttcactggcatatcgattgcgtcgatccgcccatgctgggcatgccgagcaatctgcgcaagtggatgtgccccgcacacagcgaccacgtcggcgagcgccgaagggttgcgcgcatcggcgcagctgtgcccaagacgctcgacctgcctctgccgtcggtcgagaccatcggcccaggcaagcacttccgcacgcgggtgctcaacaacggcgatatcgacatcattcctgacccgatggaattgctcatgggtgccaacggcatcaccggcagcctgcagacaggcatcaaggaggtcccactcgtcccgatcccgggcgtggtggactcacccacactcaccgatggtgggtccaagcttgcatccaaaatccgctaccgtttcccggagaaggtcatccgcaccgacttttggagcaagcttcggggcgacgatgcgagcaagatcggaagcgtcttttacctcgcggcggacgaactggtgcatcgatcgccgttccggctggttgcggcagaggacggagcggcgccgacgggcgaggacgtgtcgagatacaggccgtttggccgacgcgactaccagcgatcgggtctcgactcgctcgctgatattgcgtcggcgaggctggcgggagatgcgcttgctgtgaaggagacgcccggcttgatccgaccatcacggactcggcaattggtggcaacggcattgggcatcgatttggacaacagcgacgtacccgagtcgagcttgcgctcgtcgctcgacgagcccgagagcttagagtcctcggactcgccgctgtcgagcctgtcggatagcgagagcgatgcaggcgctgagactgcggcgcagaatgcggctcagcgagagatggccacgcctgtcaagcctgctcaggtgtcgcagccagctcagacggtccagcccgtgcatcctgtgcagcccgtgcagcctgggctgtcggaggaggagctgatcaagcgcatcgcgatggaggcggcgtcgggcgtgagcagcggcgatccggtgcgtctgagcaagcgcaaggcggcagtggcagccgagtcggccatggccggttcgccgaatacgccggcgaaaaagctgcgctccgcctcgcccgcggtgagcgccacgcccacgccgatccgcacgggggcggctgctggtgcagtgccagcggcagtgcaggtaggctcgccagctgcgccggcaacgggcgttaagaagatcattctcaagagcaacggtgtagcgcgcagtggcaagacggagcccaagggcgtttcagaggcccaggcggcactgcgcactgcgcatcatcttgcaggccagtatgcggacgagcgccgagagatcgagcagctgcgtgcgattcgcgagctcatgcgtctcaaaggaccggatcgaatgctcgagtttctgctttcgcccaacgagtccgcaggcgcgaccaagccgccgccgtcagaggcggttcaagcaacatccgatgcatgttaaacttggctcaagaacgcaccgactttgcatgcaatcgcatcgtgttcagag

SEQ ID NO: 12732 - DNA, 3962 bp, Oryza sativa
  ref <308>: DATABASE ACCESSION NUMBER: AK110080
  ref <309>: DATABASE ENTRY DATE: 2001-12-06
aaccccaccagacaccctttcctcctccatcgtctcctggagtctctttgctccgtcgccacttgagagccgctgctgccgccgtcccagccgctctgggccacgccagtccactctccccgaactccctctacatccagcaccactgtcgcgattaagctttgacttgctcctgggccaaaggcagcaatccgcattcctcaactctcagtgcacatttgcaaactgcagcgaccgcgccaagagtctttgcgttcacctccatctggttgtcgcggcgtgttgcgaatccatctgcttaccctgtctgagcatggccagcgctcccgcgagaccgcctcgcttcggtatcgacaacgccatggattcaacaggcatgtatgcaaatgacgccaactccaccgcctcccacggctcttccagccgcttcgctcccgccgtgggcacgcgctccactcccgcccccgcgcctaccgccttggcagacgtgttagcccgcgccgacggagaccacgtcgcggctctcgaccaagtcttggctgagcgcaaccaattctgcctcgataatgccaaactctcgtccgaaaatgtgcgcatctggaatctcatgggccgcatccgcaaggagaacgaaagcatcaaggcaaggtgtgtcgagctcgaacgcgcttatgccgccgcacctgctaccaggggctcgccactaggctccaccaacagcgccacgcccggatccccagctggcggtcgcagaaggatgccctacggccaagaaatcgaaaggtccagcagtccgctcagctctccacgccacatgcgacaaaactctcgatccgagctcgaccagcgtctcgcctcggctggccaaaccaccaacttggccaactcccgagctcctactgacaacggcaacggcgtctccggcgcaccttccgcctctgcgcccgagccggccagcgtgttgtccgacaccattggctccacccacgcctacgacagccctgtcaccagcgtagaccaaggcccatcgcgtagcactcaacccgtcgacacgggcctcgatcgcagcgtccatgccaacgcggatcatcaggcttccatcatgcagcagcgcgccgctgcccaggcacaggcgcagtccatgtcgctcaatcgatcggctcaaggcccagacacgctcgccgactcgctcgccagccacgagagcgccgactttgaagccgtggatcgcagctctgcctccggcaccgacgaaagtcctcacttgcaccagtcggccacgcatcctccgtcgtccgcctacgatcgtcatcgaacgccgattcagcagccttatgccgcaccctcgggcattcccgcatcgccgtatcatccttcggtagacagagccgtcgagcaggagcgttcgctcctcgcctcgggtcccaatcgcaaccgagccgagatcactccgaccatgatcccctcctcggccagctcgcgttcgctggtctccaaggtagtctccgaggaccgcctctcacgcggcacaggctctcgcaggtccaaggacgacgtcaagaagcatcgcgtgcttgctccccgcctcgactcgtcgctgttgcgcgtcgccagcgtcaagatccagggcaccaactaccgctccccggatcgaggcaaggaagccatctccttcctcatcaccgtcgacattctgcatcctccggcctcctggggcctcaacagcatggcctcgggcgagcccagtccacctacctcgtggaccatcgaaaagagctacagcgacatcatcggcctcgatgccaagcttcgcagcaaggtcggaaagaaggcctcgcagcgcctcgctcccttgcccgacaaggccctcttcaaggaccacgcgcctgccaaggtcgaccagcgcaaagccctgctcgagatctacctgcagagcctcatggtgctggagctccccgacaaggacgaggtgtgcacgttcctctgcaccgacgtcgtgccgaatcgtatgcgcgatccgctctcgaccagcaaggagggcttcctcaccaagaagggccagaacctcggcaggtgggtcacgcgcttctacgtgctccgcaactcgttcctcagctactacgagacgcgaggcggtgcccagatcggcagcatcaacatccgagatgctcagatcggtcgccagcagaagagcacggcgagcagcgagcaggacgagaatgcctaccgacacgcctttttgatcctcgagaagcgcgagggcatgcccgacgagccggcacacatcgcccgccacgtcctctgcgccgaaagcgacgaggagcgcgacgactgggtcgacgtgcttgtgcgtgccatcgccgagctcgacggcgtgtcgttggacgacatgcccgcatcgcccacgcaagcgatgagccagatgtccctgtcgcagcaggccacgacgccagggcgcgaggctttggggtccaacgccaggttcccggactcggccttcagcccgtcggctgacaaggctggcaggcagtttggaggcgacgcaggccaggatggcagccgcaatgtggcggcgcgcatgaacagcgtcgactcgaccgctacgggcaagccggtcggctcgacgcctggctcgtcgctgccgcagtcggcatcgtaccgcagcttcaacgagccgcgctcgcccgtgagctcgagaggcgctgacctgtacgatgcccctggctcgcccggtccgcgcaacgagccgctcaaccgcggcaagacgtcgatcagcgggccgctcaacggcgcgcccatcccagccggctacaagtttggcgccaaagacgacatgggaccggacagcaagaaggacgacaagaagcgcttctggcagggcttccgcgcctttggcggcagcgacaagcacaaccgcgagccccgacccgtgtttggcgtgccgctcgccgagtcgattgcgatctcgagcatccacgagggcctggccctgccgtcggtggtgtaccgctgcatcgagtacctcgagaagcgcaacgcctttatggaggagggcatctatcggctctcgggctcgtcggcggtgatcaagaacctcaaggaccgcttcaacatggagggcgatgtggacctgctgaccgagaaccagtactacgatccgcatgccatcgccggcttgctcaagaccttcctgcgcgagctgccgacgagcgtgctgacgcgcgagctgcatatggactttatgcgtatcaacgagctgcaggaccgcgtcgagcgcgtcaacgagctcggcaggctggtgtcgcagctgccgctggccaactactcgttgctccggacgctctgcagccacctgatcaagatcatcgagcactcggacgtcaacaagatgacgatgcgcaacgtcggcatcgtgtttagcccgacactggcgatcggagcgggcatctttgcgctcttcttgaccgagttcgacagcgtctttgagacggatgccaacggcgagccggctccgaggaggatcggcgaggagccagtggaggggcagcagcaggacgcggagcagcatgcaggacaggtgcacgacgagacgagcgcgaggagcaagaggaatagcgttcagtaccgcgagagccaggcggacaagctgctcggcttggaggggaggagcctcagccaccaggctgtggacgaggacatggagggaatcggcgaggaagcgtgggcggaacagcgccgtgcatcggagccagcggagaacggacagatgcagtacgaacaggcgccgcagacctacggccaccaccacggcggcgagatgcatggccagcacaacgctccgtcggccatcatgagctaagctcgcatcgctggcagatgcttgctcccaactttctttcttcatccacattcgtgtctgttttgcaatgataccaggctttgtcctttctcaacgaacctct

SEQ ID NO: 12733 - DNA, 3392 bp, Oryza sativa
  ref <308>: DATABASE ACCESSION NUMBER: AK110081
  ref <309>: DATABASE ENTRY DATE: 2001-12-06
cgtgcagctcaaggaggtcatcgacgatccccaaagcaaaaagatcttcatggtcctcgagtacatggaaggcggcgaaatcgtctggaagaacgattaggcccagcccactctcaccgtcgacgaggcgcgcagcatccttcgagacgttgtctgtggtctcgagtatctccactaccagggcatcatccaccgcgacatcaggcccgccaatctactctgggacaaggatcgccgcgtcaaaatctccgactttggcgtatcccacttcagctacgccatgatgatcgccaacgaacagtccgcagcagcaccaactgccaccgctgcgtcttcgtccgcctcgtcctcctcgagccgattggcaccgccgccaggctcgacgtctgatcccagtctggtcgatgatcgcgagctagccaagacggccggcagtccagccttcttcgcgcctgagctctgcatgtcttccttctcttcggcatctccttccatcaaccctcgccatgacgccaaaggcgcatcactggcggatgcagcagaagccaaccaatcttccgctgcggctgtccgtcccaaggtgaccaaggcgatcgacgtatgggcattaggtgccaccctgtactgcctattgttcggcaccacgcctttcaccgccgagtccgagtacgcgctcttctcggtaattcccaacaccgactactcccttcccgtctccatgggcgtggaccgcgtccgagtcggaccaaggaagcctcgctggcgctctcacgtccagtggaccgacgaggaggccgacgcacagccgcaaagcccttcagatctcatcccggatgccgatccgcaggacctgagcgaagatgctaggcagctgcgcgacttgctggaccgccttctggagaaggacccggcaaaacgcatcaccctcgaggaagtcaagaagcacccctggatcactcacggcctgcaggatgctcctgcgtggctctcggagacggacccgcatcaccttccttttgtcgagatctcgcacgccgatgtcgaggacgcactgacaggcttttccaagctcaaacagcgcgtcaagcgctggcagtccaagctactcgactcgttcagcggcggcaggcgccgtagcaagtcggtgaaccactcttctgccgggtcgtccgtatatgcagacattcacaccgactctggcagtagctcgccgcatccaaatcgactcgcgatgcctgaagatgccggatcaatgcccgtcacgccgttcgactcgtctagtcactcgggctcgtctgctcgcacgccacggacgccactcaaaggccacatcttcttctcccgccagaaaagcgccggctcagtcggtcgtcgcgacggcaccaccactcttcgtgcactcaccaccacggtccgcaacgacgaagagggtgatgcgattgcactcggatcgcctcgcaccacgctggcagggacgactggcaaggtcgaatcaaaagcactctcgggagagcccgcctcaccctcgctgtcgaaggaggactctgtgcagagctcgagcgcggcgcacatgctaccgcccctcgtccttactggtgcgcttgaggccgatacgatgaggcctcccagtctggtctcgcagcgaagagtctcggcgcattcgaccagcagcgtaggtgcgcgttccgacgcggctcccgaaatcccgcaacgcacttcgtccggtacccatgcgctggcgcccaagggaggcgcggccccggtctcccctgtgcttctgtctcaatcaccgcagacaacgtcgctccggcgcatgcttagccgacaaggccggaccagcaacgactcgcatccgcatcgtgccgcttcaccgcggcgttccgtcgattccgaggggcgttcgtccactctcagcatctcgcaaacttcgcgagtctcgggccgccatcgtctcggcgacttcttgagaggcagctggctcatgaccagcgaggaccgacatcgtagcacatccaggccaagcacgcgcggctcgcgtgaggctgctccctttggcctcggcgccaccggtacgagcacagcaggacgcagcggaagtgttcgcagcaacgccagcagttcgaagcgagaagccgccgctggcccttcgtctggcatcgctcttgtggtcgacacgcaaggtgccgtgcgacagaccggggctcttcctggatccggaactccgaccagcgcgcccgtccttggcagcaacagcagcagcgccatcacgggagcaccgagtctttcgacggaattgctcagcgagcccgtcgagagcggaagcatcgcgcgaagcgcctttggagctgcgagccaaccaacttctcccctcacgggcttggatgaagtacagccttttgcattcgatcggctgggcaggcgccgtcccgtacagatgggcctcgacgaggcggacaacgatgatgttgacctcgagctcgagttctcggacgacgacctctcggacgacttgcacggtgtcaacaccggccccatgctcgtcaatgcgggtcacggctggtctgtgcgtgacggcgaccacctcggtggcgacggcgtcaacggcgacggaggggatgggccggccttcctgccggaggcctaccgtcgtaaggcatcgggtgggagcgacagctcgcacgacatcctcacgccctcggtcgagggtggctacaacgtcttcaagcctccgtatcagcacctcttgttgcctcccgaggtgagcgaggcacctggacagcatgccgtcccagttgcggccgcgcactttgatgatgttgctgcggcaccttcgagtcaggcctttgccatcgacgtggggctgtcccccgaggcgcaggcactgcgaaaagccgagggtaccgagacgaccgcggatgtactcgtcaattcgagtgcgcgtccacacagcgacgatgccactcccgtcagctcaggcagcgtgtcgcgttccgcgtcgcatcgtctgcatggctcggacgactcttcgcgcgcaccctctgcggctgggacgtatgcgacgggcggctcagagaacgaggtgcaccttgcagacgcgcttgagaagaaggcgacggaggtggtgcccttggctaccattaagccgatcattgcgacggaagagtcgcaatttgcagacgccgacgaagatgcagcggcttccgctgcgcctgccgcgctgttggacgacgacgacgacgacagcgacgaacagtgcgtcagtttccaggcgcgtcgtaagcgatccacgcgcttccgcccggcggccgctccggcggcttgatcccgaatctttgtcgccagcttctctgtacacgtatcgcattcacgcaactttgactttgttgacagac

SEQ ID NO: 12734 - DNA, 3461 bp, Oryza sativa
  ref <308>: DATABASE ACCESSION NUMBER: AK110082
  ref <309>: DATABASE ENTRY DATE: 2001-12-06
atcaccatcagccgcgggcccgccgcccatacaacaccagtaccgcgtcctgctctgcttcgacgccaacgactttagcggcccgccccttattactgcaccgtatccgaacgaagcacggccggatcaagcgatcagtcgccgtggacaaaagctgacctcgatgcctcccttcgcaaccatctcgcttccgattccttcctttcagaccgaagagcccagccccttgacgcccggctccgacacttcgacgctcttcgagttcgagctcgacgatcctttcaaatcgtccctggactcgggcaaagacttcgagcttgcttcgccttctgaccaccccccggaacctttggaagagcaaggcactcgcagcgcaccctccatcccttctcgacgcctcaggtatctcgagcgcatcgaaaaggtgctagcaaccgagctcaatcccttcgacctcatcgcctactccgactcggaccacagtactatcggtgcgcccgattgccattctcgtcccgccggggctggctgcaacgacgccgcccttcccacacgcgtcgacatgcagaacaccggcgcctcgagcacacaacaccacttcaatgaccccgcccagcagcaggcgctcaccgacaacgcctacagcggagcgttctacgatccatcctccgctgatggctacagcgcgccaacccagaccagcttcctgagcgcagcgccggcatcctcctcctcctcatccatcctttcccagccatctcccgccgcatcctcttccgacctcaatcacctcggagcgccgaatgcctttcgcgacaacaatgtcaacccaagtccgctctccagcccctacctcggagcgatatctccggcgggctcgcaccaccgctcgggctctcacagctccgaggcggcgagcccacctcagttcgacagaggcttcatttcggacccggcactgtctcagactgtcggccagatcggtcaaattcgcctcgatgaggatcagcgctacccacccacctttgaagaaagctcggactacgccggctcgcccgcaaatcaggccgctaccagctcacaaggcgcagatggctcgacgtttccgtcaacaaataaccaaacgttcggcggcagacccgccggtagcaccccgcaactcacgctgggcatccccaccgtctctgtctctggcagctcgatggactttacgccaatcgctgcaaccgctgacactgcgatgccccgcatcaacgttatggcgccttcgccctcgacgccaagagccatgggtgcgcacggtcaatcgggcggtttccaggacgtccttgctcagctagtcgcctcccacgccgctacctcgggcatctctgcgccatcgaatcagcccgatgcctccagcagctggctccagtccgatcagcccttgaccatgcacaacgagccattcagctatgcctcgaccccaggcacaaccgtcgaggctcaacagccatcgtcgaacgagcagcctttccgaccgaacttggctagcggtcgactgattcccgaaggatacacaaccgagtcggctcagatgatgtcgaccttggctggcaacccgcagcgcaatcctgccgtgcacgcgcccggccagtggtcgagccaggccaagcgtcaggactcgtacgacaagatccggcagttcttgcgtttggacgtcgacatgggattccaatcgacgggcaagaccgagtctcccacgctcgccatgttccgcaaacgtgccaattcggatataggtccaagatccccagtggtcggcggcgatgcgggagcagcaggtactgcgttcgactggtcgcttgctgccaccaacgcatccaacgcgaaggaccaggacagcctcgacatcgactggacgcatttgaaagcagacccgacaggcttccaaggtgcatcaaacgagctcggctccacccagccggcgacgatgaaccctgctctgttgagcaatgcccagctacctgtcgacctctcgcaggcttttgatcctagcaacgctgcccttctggccagctggcagcagcaacaagccctcatgcaacaacagcaacagcagcagcagcatcaacagccgtaccagcagcaacaccaacagcagcagcagcaacaacaacaacaaatgcagcagatgatggcgcccgtcttccaactgaacggcaataacaacctgatgggggaatccgacttttcctctcagctgggcggatcggggccgggcgagttcaatccacagtggcgcttccccggcgacgggactcagtccgccaattttgcaggtggtgcgtctgcccagccgagactgcgaagatccagcagcgcgcgacagagctctgcgggtggacaccgccgactcacgcactcggaggacctgtcgcgcagccgaatgtaccagggcgctgatgaggacttcctcgccaagatcaccgcgccagacggaggactggcgccgctgtcggcaggacgctcggtgtcgtcgaacaacgctggtccgagcaaccaccagacgtcgtcgccaagggtacacccctatcgcacaggccacgaccgacacttttcctttgggtccaacacgtccaacagcagcgccacatctgcgtcgccgttgcccacttcaggggcacggtcggttacgatgctgcagggaacttggtgcagtattcgtctgacatgtttggcgagatgggtggaggcgcggaggatgctgcgcaatcgccatcggcatcgagcgcggcttcggcagcgagctcgatgctgagagcaccgcccgtgccggttgtcacgagccaggctacgcaagcggcttcggcgtcgcggcgaaagtcggaggcgctgtttgcgtgcccgattccgggatgcggctcgacgttcacgaggcagtacaacctgcgcggccatctgcgatcgcatgcggatgagcggccgtacaagtgcgactggcccggttgcgacaagagtttcgcgcgctcgcacgactgcaagcgccaccagaatctgcatctcaacatcaagccgcatacgtgcgagcagtgcggcaagacgtttgcacgtctggacgcgctcaaccggcatcacaagagcgacactggcggttgcaccaccaagagcgacggcgagagccagtcgaacgaaaccgacgggtcgtcgatctccggtgcctacgatggagccgatttggatcgcggtagccagcattggggtcaaggcgatgcgggagcagcagcggctacgacaagctccggcaagacgtttggtggccatgtgctttgatagcgcaagcatgcgtccggtctgtgcaggcacagattccgggccgcaaggcagcttgcccagcatgacccggctgccagctgacaagagtggctctttgctgtactttgatttatgcgttatggaactcgatggtcttattctactgt

SEQ ID NO: 12735 - DNA, 2869 bp, Oryza sativa
  ref <308>: DATABASE ACCESSION NUMBER: AK110083
  ref <309>: DATABASE ENTRY DATE: 2001-12-06
ataactgtgtacgagtggctctccatctcccataccgcacagcaatggcgagaccttccgcttccacgtcggccgccgcggcaagcaacggtgcagccaagaggaagcgcaacgttcccgctcctgccgccaaaccatcttccaccaccaccacaaagacgcccacgacagcaaagggcaagtcaaaagcgcaggagctccacctcggcgactcagacgatgaagacgaagctcagcttgatctcgaatccgacgacgatgatcttcaagctggcgacgcctccggcgatgagagccaggactgcgacgagttccccgagatcgacctcgaggaaagcgagggcgaggaggactcggacgcggaagcagagcagcctgagcaagacgatgatgcagatgatgaatccatagagcttcaggatagccaagctgatgatgaatccgagcaaggctacaactcctcggacatcgacaactcggacttcgaaggtgacgagccagaggacgatctcgagtacgattcggcggaagaggacgaccgcgcctctgcctttgccgcacgcagcgacgcttcgcagacaagcatcgacgaggaactctcgcgcatggtgtctcgctacgcatccaagcccgacgaggagtcgggctcgctctcggccaccaacaagctcggcatcccgcgcaaccaggcagcccaggccttcgaccttcgcacccgcaacccggacggctccgccaaaggcgtcttcaagcgcagcgacatcacgggcgagatgaagcgcgtctaccccgagatccaacccgaatacgactcggacagtagcaccgaagacgccgagaaccgcatcggcaacgtgccgctcgagtggtacgacgacatgccccacatcggctacgacatcaacggccgcaaggtcatgaagcccgccaccaaggacgagctcgacaggttcctcgacaccgtcgacggcgacggcgaggcttggttctcggcgcgcgacaactccaccggcaaggatgtccgcctcaccgacgaggagctcgccatcatccgcaagctccagaatgccgagatccccgacgatgcatacgacccttacgaggactatgttgactggttcactggcgaggacaaggtgatgcaaaccgcactcaccggccgacccgagcccaagtcgcgattcgtgccgagtaagtgggagcacaagaaggtcatgaagatcgtgcgcgccatccgcgacggtcgcatcgtgccgggcgccaaggcccagaaggacaccaagcccaagttctacaacatctgggccgacgccgacgagaacgacacacgcagcccgtgggccgtcatggcggcacccaagctcgcgctgcccggccacgccgagtcgtacaatccgcccgaggagtacctgttcaacgagcaggagcgcaaggactggctcgacgccgaggccgaggaccgcaagcagaactacctgcccgacaagcacggctcgctccgccacgtgcctgcgtaccagaactttgtgcaggaacgcttcgagcgctgcctcgacctgtatctggcaccgcgcatgatgcgcaagaagctcgacatccacaacccggagaacctgctgcccaagctaccttcgcccaaggagctcagaccattccccaccaacgtcagcgtcgtgtactcgcatccggacggcagcagggtgcgctgtctttcggtcgaccctacgggcaactggctcgtcaccggtggcgacgatggacgcgcgaggctgtgggatgtggcgattggcagatgcaccgcaacgtgggatgcatgcgaggggatgcccaaggcagagcgctcggctgtgcactcggtcgcgtggtgccccaccaagaactactcgctctttgccgtggcggtcaacggccgcgtggttatcatcgctccgccgcagacgcagaactatgcccagacgcagtcgggtcctgcttcttccaaggccgcctcttcgtcgggcgcgacggcaacatcgactgcgtcgttcctgtacgctaccgcagcggcggctacttcgatgccgagcaagcccgatgcgcgtgcgcccgtcgcatggacgaggccggccgagagcgagcgtcgttcgggtgtggccatgtatctcaacatcacggcgacgagcgcaagcaacctcaagacggtggtgtggcatgccaagggcgactactttgccaccgtgtgtcccgatgcagcgtcgggtgcggcaggtatgctgatccaccagctgtccaagcaccgctcccagtcgcccttccgcaaggcgagcaagggctcgagtgtgcagaagatcgtcttccatccgaacaagccgtgggtgtttgtggcgacgcagcgctacgtgcgcgtgtacgacctcatggcccagtcgctcgtcaagacgctacagacgggtttcaagtggatctcgtcgctcgacgtgcatccgtcgggagaccacatcatggtgggttcgtacgacaagaagctcgcctggttcgacctcgatctgtccgcacgtccgtacaaggtgctcaagtaccacgccaaggccatccgtgccgtcgacttcagcacggcgtggaacctggtcgccgacgctagcgacgacggcaccttgcagctcttctacgccaaggttcatgccgactacggcgagaacctcaccctggtcccgctcaaggtgctgcgcagccacgaggtcaagaatggcctcggcgtgctcgatgtcaagtggcaccccacccagccctggtgcttctcggcaggcgcggatggaaatgccctgctctggaccacataagaacctggatcagcgtatcacctttcgcaatgcatgcttgtattcccatc

SEQ ID NO: 12736 - DNA, 3386 bp, Oryza sativa
  ref <308>: DATABASE ACCESSION NUMBER: AK110084
  ref <309>: DATABASE ENTRY DATE: 2001-12-06
accattgcttccgcagccaactcggtcgaacggagacgatgtcccgcccgggagcgcagcaagaaggcgtgcggcttattcgtgcagagggttaggttgggattgtctcactttcgacatgcccagcagcaattcaaccaattccacctcgtccaagaagcggaggacgactcggaagacgtgcgcgccatgcaaggccaaaacccgcacatgctcagcatcgctgccttgccaagaatgcgtggcagccggtgaggcaactagctgtcactatcgaggtggactgcaactgaacgccttgaagcgtcccaatgatgcacgtgaacccggctcgagtagaggtttgaaggcgactcgcctcatcgctccttctccatcgctgacgcaatatccgacgactcctgcgagcgttcaagcctcttcgcggctactgcgagtgcaagatcgttccgacgatccatggccacaaaacggcgtgaccggcttgtctagctcggagccgacaccaggtggctgggaggctcttcaacagaccgccgaacctggccacctgtccaggcccagtcccctcgacaccctcgctcgaatcgcacaggaacctgcatcccagaagttgcggagcaccgaaagcctggcaccacagtcgagcgatacgagcccttccgaaagaggctacggatcaacaaacacttctcctgcttgcctgcgcacatcagacctagtcgagaaaacggcgagcgacgatcccggtgctcgagagcagtcaactcctgtcgttcttcccttctttcgatactttggcaacacggcaatagctccggggccgcggtgcgtcgaggtagaggtgagagacgagcagacgactctgatgaatcatcatcacgtctcgatttcagacacgagccggagcggacctctagaaccgctgagggagcacatggctccagtgtcgagagaaacagcgacgcaaaaagccagctcggagccttgcacgggtctcttcgacgatacgaatccatcgctgccgtccagaaccatcttggcacgcctgattcgcgtcttcttcctcaccatatcctgtcatctccccttcctgtcggaggagagaattatgaccgagctagagcaaggccagctcgaaccgctagaggcgaactgcatcgcggctctcgcctgccgcttcggcagtggcctgggatcgaactcgcagccgctgggagctgggctagagacggctgaagctaattggcacgctgcgtcaaatcgcgaggccactccgaatgtggctaggtatatatgggcagagcccttcgcggaaaaggccaaggagctgatctatccgatgtttgcactgccatcgctcaaggtgtgccaagcgttggtgatgatcacgtggatcgagtggggcagcgaccgcgattcgagcgcgtggctttggagtggtttggccatccggatgagccaggacatggggctttcgtactgggactcgctcgaatcgatctcggacggcgagacgcgacgagtgcaccagctgaccttctgggccgtctactttttggatcgcgtcatctcgtacggagccggacggagggtgacgatcgcgcgagccgatatcgagattgatccccccacgagcgcagagtgccatggctgccgtcgtgatcctgcgaggagggatgtgagccacccttggccgcatctcattcggctacttggccatcgaggtgacattagcgaccagctcaacagccggtcggcttcgaagccggctgatcgggtgggaggcgggaaggaagcgctgtacgactttttccgctcgctgccgatggacgtgcgattcaacgtgtcgaatctgcgcagccattcgctcaacgacgcggcaccggtgctggtgatgatgcactgtctcttccactcgctcgtgtgcgtcttgcatcgaccaagcctggtgcagacgaaaggcgactgggccaaaggcagggagtttgccgaggcatttcggtcagacgcatcgcgctttccggcggagtgtgcgtcgtcggcgcgctcgatcagcgacatgctttcgttttcaggcctggtggatgagcggacgatcgtgtgtaacccatacatggatcacgccatgtttatcggggctatcgcgttggtcgacgagctgcagcaagtgatgcaggtgaacgggcggcaaagtcaagcagaggcggatgcaagcgccactggatgcgttgctagcgacgaacttaaggctcgttttgccgaggagacgctgagggagaagattgtggtgatgcgggatgcattggagacgctatcgcggttctggggggggatccgatgggtgtgcggatggctggaggaacgaagccaagccgtgcagccgcgtggcgaggcggaggcgagcgacagcaaagcgacgtatcaagcggctccgaccaaggtcaaggcggatatgatgcgcttcctagcgcggctgcgtgcagcccaacgaaaggcgccactggaggatcctgcctcggattcggcgggtgctgccgagcgcgcatgtgttccgactgcgatcggctcgccgcggagcaggctcgacagggtgatgttgacggatgcagctaagtcggcccaaatcggcgaggcaggcgatgcagacgaggccggagaagcatgcgacgctggcgatgcgttgcgcgcagcgacggcaccagttggcgtggcgcagttgggcgcgagacaacaggctagtggcgacgcgtgggactcgcttgaagcaatactgggcgagcaggggctggtgcttgacgggatctttgatttcgagacgccttgggacgagctgggcgacatgagcgggatgcttcattgcggctaaaccaacgagcttgctgcgcttgaaacgggcgggtatgcacctggctatagcacgtgagccctggcgaaaacgaaaacctccccgctgcgcgccacggagattcggacgtcggccaccaagcaagcccagaattgcgttggtccgactggagcaaattgaccggcccgttttcccagccaccgagacggagaggaaggatcaatcgcacagtcgcgtagctgccacagtggtgtgactggtatgctgccaagactcggtattgcgaggaacaggatgcctgcataaccgagtcggtatcgccgcgcggaagcgtgcaggtgtaccagtgccctttgcggtggctatcgccggacacgcgttcgattgtttgtcgcgatggtcgtatcgtatcgtcgtacctgcgagagtccgccaacgctagtgccgtgaatgtaacgaccaacaaagcggtgaaaaaggtttggtcgatcaggcacgccctctgacatcatgcacggaaaatcgacggattaactcg

SEQ ID NO: 12737 - DNA, 3330 bp, Oryza sativa
  ref <308>: DATABASE ACCESSION NUMBER: AK110085
  ref <309>: DATABASE ENTRY DATE: 2001-12-06
atctcattcgccctcccgcccgccacgcaactatgttctgcaccggcgcccgctagtcgtcacaccatcctcgcatccgcgttcgctctcgtcgtcaatcatcgggcgagcacctacggcaccctgagccaacacgataccccgggccagcatggtgcccgcgcctcgtcgagcgtctcccggcgcggatgactcccagccttcaaactcctcggtcatcgcagcctccaagcactccaagccgtccacttcgaggtccagagctccatggcccttggacacactttggtccagcgcagcgcgcaaaaactcgtccgcaaagtctcgctcgcccgcatcgcccgagccgcctccgctcggcgccacgctcggcagctcctacgaaagctgcccagaccaaccctttgacttcaacgatctgcccctcacgccacctgattccggtggctccgccttcgagctccatcctgccacctccgctccacagcagaataccccactcgtcaccgccgccacactcgaacaagacttcaagccgccacagaaaccacacagcaagaacgacatcttcaacgcacccgtctcttggctcacgcctccatcacgcatcaatcccactccaccctcgcaagctcacaccgccgctcctccgccatccaagaactcgtccttcttctcctccttcggctccggtccctcgccacagccgcccttgcagcccccgccaccaccagcacgcctgcacaacgctccggctcgttcctcgtcgtcgacacatgccgccgtcacacccactcgtcagctcgactccgagcctgcgccgtttgctcccgcaccgacaataacaagcccctccgcagccaagcagcaggccacgggtcgcaaactcggtcattcgcgcaactcgtccctcggccgagccagctcagaggagtgccttcaggaggaggccagaatacgcgccgccaagcatgtcgactttcgcctctgccccaccaacgagttcctcctcggcgagggccgccactgctgcgtctatctgggcagctaccgtccaacgcatgatcccctaccatcagcatccagctccgactcagcacaccaagccagcatgtggcgcctctgcgcaatcaaacgtcttcacgccgaccgtcagagccagctcctgggcctcgaagaagccttcgcacttcgtcgcctcggcatgcatcccaacatcatccagctcatcgacattcgtgacgaggtggagtttgtcacggcacccgacccatctgccagcccgcacgcttcccgctccgacgtcccctccgcagggctagggctcgggctcggtcttccccgcatcgaaggcagaggcgcaccgtccacaccgcttggacatgcaagccacgcgagatcgaccagcgacatgacgggcaaggacgagctcatcttcgagacaaagtcgcacaaacgcgccctggccgaagaaatcgtgcgtcaagcggctcgcaactccttgcctgactcgcaccccgctgagtctcgcggcatcaagtctcgcaccagagtcgtcacaaccgagtatagggcaagtgatcggagcgccaacccgaccttcttggtgcatgcacccgacagcgatgcgcaagagatcagcgcagacgccaacgaggccgaccagcgcattcacaccgcgcctgttcgcagattggccagcaccgcgcccgaccctccgcgcctcctcatcctgctcgagcttctgcctcacaacctcgccctctacgccaggaagcacgctgaccgcatcgatctgcagcagtggctcgactgggcccatcagatggtcgaagccgtcgtcttccttcacgacaagggctgcgtgcacgccgacatcaaaaaggagaacatgctgctcacagacggcctcgacatcaagctctgcgacttcaattccgccgtcttccccaacccaaacgatccgccccgcgatggtctcggcctcggcacgcccgcctactgtgctcccgagctgagccgcgccacgggtggcccgactgctacgagcttctcctatcccatcgacatcttctcgctcggcgccgtgctctactcgctcgccaccggcacggagcccttcagcaaggcacgcagcgtggtcgagatgctccatcgcaagcgcctcttcttcgagagcgaggagaacgaccgcgcctcgcgcctcgccgtcgaagcaggcagcaaccccaacagccaacccgccagtcgcagcggcagtctgcgcggtcggcaccaaaagtcgtcgtcggcctcgatcaacgagatgcccgccggcgccgcttctcccgcacagctggcgtcttcgctccaccgcatcctgcagctcggctcgcccgcaccgcgcacgccgcgccgcgaagcgagcagcgacagcctcgagagcgtggcgtcgagcatcaccaccatcgccgggcgccatccgagctccctcgccgtgtcgcggctgctcgagcccaccgacgagccgcacggcctgctcgtcgatcccagcgggccaacgcgcaagaactcgctgctcttcgccaaggccgacgtccgaagggccgcatccacaggcgggcgcaatgcgacggcgacgggcagtgcggccctgcagaggctgcgcatctcgcgcgacgagggcatttcagcgctcgcctcgcccatcaccgcagccggcgatggccatgccccagacgccacagaccgacctgcggtcaggaaaggagcgccgggtgtggcgcgcgtggcgattctcgaggcatcttcgcgtccagactggctgcgacgccgctcttcgtatggcgacgaggtgcgagctcagagcgcacaccacagcccgtcgggcgctgtagccattgcgcaggtatcggggtcagaactggtcgcagagcgcgccgacgaactagccaccaccccgaccaagcctagccgactgcgcaccatgttctcgcccacgtccactaccttcccgaaacttgatgaacatgaccagctcgtcgtggagaacactgcacgcgagacagccacgcatctggcacccgatgacgacatgtcggcgtgggaacagcacttaccggacctgcgcccgtatgccgacggccaccccgccatcatcctccccgccggtggacgattgccagactgggccagagacctcctgcgcgacatgctccacgccgatcccgccgccagacccaccgccaaccaagtgcgcagccgtctgcgttcggccgcacccacctacatgtgactcgtgcttgtcacacctattgatacccggctcaattcgcaatatttgcagccatc

SEQ ID NO: 12738 - DNA, 3783 bp, Oryza sativa
  ref <308>: DATABASE ACCESSION NUMBER: AK110086
  ref <309>: DATABASE ENTRY DATE: 2001-12-06
atcaaagctcccatcggcactcgcagtcaccgctggtttcggtgtcgccgactcgactcccccctccttcatctcgaggcttccgacactaggctgtggtggcgtcgctgcattccagcgccctactcactctgacgtgctagttccgacgccgattcgcatgccgtcgctcgcatcatcggagcgcctgccaacatcatagcatgcctgcaatggcgcaagaccaattggcgctgcgcgaccgcggcgcaccgcttgtgccctcgtccgagctcgacgacgctccccacaatcacgatgcagacgacgagctgccagaggcctactgcggcggctgcggcagactcatcgacgaggagagcgtagaggaaggcgtcatccagttcgccacaaagctatggcacatcgaatgcttccgctgcgcaaagtgcaagaacagagtcagtacagagcgcgacgacatcctcctcctctccgacggtcatcccatctgcggcgaatgcaactactcgtgcaacatctgcaaccagcccatcatggaggaggccatcatgactggcgacgaatcctaccacgcctcgtgcttcacctgccgttcctgccactccaagatcgaggaactcgtctttgcaaagaccagccagggcatctactgcatgaagtgccacaacgagcgcgtcgcacgcagccgcaaacatgccgaacacaagcgtgcaaaggctcgtcgcgaaaagcagctccaagacgctcaaaacgcagaggcaaagcagcaagccctctccaacaccaaggccgccaacaacgctccatctccctcctctccgcccgaccgacagccgccatccctcccgtccaagactccggccgccgcctccaccacccctagtgcttcagctctcccctcgccctcgcccaacgccgccagcctctccccgtggatccaccagggcggctcggccgcctccgcagccgcctcgcgtcccggcagtgccggcggcaagcgtcccatgcatgctcctccacctcccaaccgcgacgcccgcagcccagctctcggctccctcgccaagctcgagggccgctccctctcggccaacaacgcctccaacacctcgttggcttccttggccacagatgacgcctccaacccctacgagacgactgcaccgctctcgccacgcaaaaacgccttccacgccaccataagctccccacaaggctcgcccgctgccaacaaatcgcgcctcccaccatttacagacgcaccctactcttcttccagcccaaccacatcgccgctcaaaaagtcgctaccgctccaagcctctcctcgcacctcttcccgcccccttcagccctcggccgaccgcgacgccctcggcgtcagcctgcgctccaccacaaccgcatccacctcaccgcgcaatccgctccaagcatccgcatcctcctcccgtctctccaaggtctactcattctacgacccagactttctcaacctcgtcgagtcctttggcgactttgactccaacgacgagcttcgcgcacaaccgccgcccgtgccagagctgccggcctcgctcccgtccgcatccgccgtcacggagcccgtcaacaccaaagtggcgcacgaccaaacaaccaccgcacctctgggcacattgctggatgagcacgaccagaacaacggcgcagacagtccagacagcgaccaagagctcctcgacgaggaccgcccacgcacccagactcccacaggctcgctcaacgaagtctccaacaaggtgcgcgcatccatgcagcaggctcgcgatggcctcgtcagcatggacatctcctttgtcgaaaccatcctccgcgatctcgaagacacaagacaacgcatggagtcgcttcagacgcgctacgaccgcatccgcagggcgagccagcaggccgcccacggattctccatggccaaggaggagttcgagcacgaggtcaatgccaggcacgaggccgagctcgagatggcgcgtctgcgtaggcaactcgcagagcaggcgctcaaactcgccacagccaacagcgagaagcgtcagcaggagcagctcgagcgacgctcccaagatgtcaaggcctcgctcaaaggcatggaacgcgatctggcaaagttgaccgtcgagcgcgacctcaccgtcgccgaggtcgctgagctcatggcgctgcaggacggcgccgcgggcccgtcttcggtgctctcgtcgccaaacatggctcgctcttccaccagcacctcggatgccgtcatcacgcagaacttggccacgcgcctcgagtcggtcaagaatcgctatcgcaaggagatcgacgagctcaccatggagcgcgactcgctgctgatcgagatcgaggagctcaaacagtccaaggagctcttcctcgaggaggcgcagagcctcaacgccaaaaacgaagagctcaacaccgtgctcggtcagctcaaccgcaaaatcgagctcgcggcccagtcgcgcgaccagctcccacctctgcctacgataccccgggaccttgcctcgtcggccaccaagagctcgggaggtttcagctttggctcgcgccacaagcagctgcacaagcacacggctcacaacgcctccatctcctcggacgcgccgcccagcagcgccggctacgacgtctcggtcgacacggccgtgcagcaggtcatccagccgggcaagatcgagccggcgcccgtggtcaaaaagttcaagtggatgaagccaaagctctcggaaactacacgcaacaacgttccgccagcggggcaggtgccgccagtgccgcccaaaggcggtgccggtctggccgcgccgagtgcgagtggatcgacgacttcgatgacgcgcgccacctcgcacgacgtcgtggtgcgcgagcatctcttccagccgttcaacgtgcttcgccccacgcgctgctttgcgtgtcagaaaaacatgtggggccagtccgagatgcgctgtgcgctctgcacccaggtctgccactctcggtgtctgcagagcctgccggtctcgtgcaaccagccgtacacaagaccggacgagagcgtgggcgacaacgcgggtccgtccatgtttggacgatcgctcgtggagcaggcggcgcacgagggccgcgatgtgccgctcatcgtcgaaaagtgcatccaggccgtcgaggcgtttggcatggactacgagggcatctaccgcaagtctggtggcacctcgcagctcaaggtgatcacccagctgtttgagcgcggcaatgcctttgacctcgaggatacggatcggttcaacgacgtctcggccatcaccagtgtgctcaagaactacttccgcgagctaccgacgccgctgctcacctttgagctgtacgacgagctgatccggctggtcgagtccaagcagggcgacgcgggtgccaagcaggagaagatgaaggagctcgtcaccaggttgccgcgacagcacttttgcacgctccagcatctcgtcctgcatctgtaccgcgttcaggagcgcagtgtggacaatcgcatgaacgcgcgcaatctgggcgtcgtgtttggccccacgctcatgcgctccgccgacccgtcgcaggaattcgcccacatgggcggcaaagccatgaccatcgagttctttatcgaccacgctcccgacctctttacatgacctgcacagcgctttgtatcaacagcccttatctacgtcttgtccctcctaaatgcacagcaacaccttg

SEQ ID NO: 12739 - DNA, 3507 bp, Oryza sativa
  ref <308>: DATABASE ACCESSION NUMBER: AK110087
  ref <309>: DATABASE ENTRY DATE: 2001-12-06
cttttttccatgaagcgcgcactgagtgttgcagcttcttccgtcgctcgttcttccttcgtccgcgcccattcgagtcttgccgcgctcgccttccagcccgttcacgcgccctatcgctgcccgcgctgcgctcgagccaaccacgcacacaggcacgcggagcaccgtcctctgccctaccgactcgccgtccccagccgatttctcgccatggctgctgctgctacaacctccaatgccgctgctgctgccagcaccgagcccgtgtatcgccactaccgcaaggacttcggccctctgcagacgcgcccgctgcacctcgacctcgatttcgacgtctatgaggacaaagtgcgcgtcgtcacacgcaccaccttcgtgcatgttgcgaaagatgcgctgacgcagctgcagctgaacagcaacgatctgcagattgagagtgtggagttgctgcagggtgcgtcgcagctgtccgtgtcacagccctccagtgacgagttcgtgacgcatgtgacgagcctcaattccagcgccatcaaggccacaccgctcaagttcgacttggattccaagggacacttcctcaacatcacgctcagcgagccggtgcagcagggcagccagttcgtcctgcgcactgtgtctgtcgccacacccacggcgcacatcctcgagggactgtattacgactggacgcccgacggtcagccgcgcacgatcatcacgcagtgccagcagcacggcttccagcgcatcgtgcccgcgctggacaccatgacagccaaggcgtactacaccaccagaatcaccgcggatgcaaaatactcccatctcatcaccaatggtgatcttgcccccggcttcttcgatgccgccactggcgagcctcgtccgcacagtgcggccgacggcaaggacgggcagaagcgctgcagtgtgacctactacaaccacaaggtgaacatggctccttacttgttcttcctgggtgctggccactatgtgtcgtatcgtggcgaggtggagtaccccaacggcgccactctcctggccgagttgctggtgttccccggactggtggaagaggcacatgccaagagcgcattgcagagcctcatcgattccattcagtggtgctactgctccacgggcccggaggccacggaacacacgcaggaacgcaagcgcatctatgagctgctcgccgagcgcgacgcactcaagaaaaagaactccttgtccgaggccgagaatgccaagctggcggagctgcgcgccgagctgaagcgcctggactccgtgtggaacaaaactggctacgcatacaccggcgccatctacagagagatcagcatgcagaactcggactatggaggcatggagaacgtgggcaacacgaccatcctggcatcgcgcatggtgccgtcagccaatctgtcggaccccgcatacccgtatctggagggtgtcaagattcacgagttctaccactcgatcaacggctcgcaggtgacgggagagagccccttcgagatctggctcaacgaggcggtgacggtgcacatccagcgtcagcgtgaaggcgtgttgttcggcagtgatttcatgcgtttgaaggaggtggcgtatgcgttcacgccgggacaagggcctctcgccatcgactccggggccaatgccatgcccatcgaacccaagggattcaacaggacgcaggagctcatcagcgccatgacatactccaaggcgcccgagttcgtgcacatgatcgagttgttgatcgggactcccactttcaatcgcggcttggatttgtatcataccaagtttgccttctccaatgccagcaccgatgattgggtgcactccatggaggaggccagtggacagcagctcatgcccatggccaatcgctggctgcgcagatcgggacacccgcatgtggagtacagtggtgcatgggacgagagcaagaaggagtacacgctgcgcatgaagcagtccaacctgcctaccaagggcgacacggcgccatggatcttccccgtccgctgggcactcatcaaggatggcaaggctgtgcacgagggcatgtacactctatccgatgagtcggcctcgctggtgatccccggtgtggctgtggcgccggacttcgtgtcgttcgcttgcggctggtcgttcttcggcacgcacgccaacacctccgccagcgacgcccaattggcacagcaggccctcgccgacccggatgtcatcaacagatacttcagctatcgcgctgtcaccgataagagcaaggccaaaatcattgaggcgctgcgggcggaccgggcggcggcggcgacggcaggcagtgcggctgaggctggcaagggcgcggagtatcccccggctggcgcggccggtgtggtggtggccgacgaatgggtggagctgcacgcacgtctgttgttcgacgagtctttgtctgcgggggcgcgcgccgccgtgctgcgcgagggcgaggacatcaccacgcgacccgacttggcgcacctgtactgggagattgccgatgccaagctcgcactgctgcaggccgtgtacgatcgccacgcagacaagatcgtggcgctgtacaatgagatccaggcgcgcaatcgtgcgggcccgcatctggaacagctgcatgaccgcgcactcaagcaccacttgttcaacctcatcgccgcgggcaacaagccacgcagtgtgctggtgtcgcgcaagccctccgctgtcacggcggatgtgtcggccatggcgcgcgccctgctgacttcgcccttcatgtctgaccggctgttcggcttctctgccttcctatccggtcccgcgtcgttggcggagaagcagtccgtgcgctcgcagatgcgttcggcttggaagagtcacccggacacggtggaggtattcgtgtctgtgattggcagtgtggacgatgcatcggcgccggatctcatccgagagctggtggaggacaaggaggtgttcgacgtggcacaggcgggccatgcgcgcacactgacacgcctgtgggctggcaatcgcaagcgctctctgctgtcggaggaagggcgcaagctcacgctgcagctcttcctgcaggtgggcaaggtgaaccagtactctgcgcagtccttcatcgccgcgctcaacgatctggccaagttcgacgcccagaccacgcagaaagacgtgcttcaactggtgcgcgacatgcatgcgggcctcgaccccgtcaagacggagagcctgttcaaccaactcaccgccacgctcgcaccctacaaagacgcctaaaacaacgaacaagcacaaactaccccccacgtgcacaagcagccaactcaacacaaatccgcgtcacattagcagctagctcaacgcggctgcgcatgcggctgcatcataaaattggctctttgtctaccgtacgtgcgcgaccaaatcgctcaagcccagatcaaggaatattct

SEQ ID NO: 12740 - DNA, 3332 bp, Oryza sativa
  ref <308>: DATABASE ACCESSION NUMBER: AK110088
  ref <309>: DATABASE ENTRY DATE: 2001-12-06
aactcttgcctcactgcctcggaatcactggcaagaagctactcggaaggaaagcgctgcacgacaaccgcttcacgtccatcatgcgccgctcgccgtgcaccctgctgtgggcttgcctgctgctggccaccaccctctgggtggatcgcgccgtggccgtgcgagagcatgacttcaaaaagtgccgcgactcgtccttctgtcgcaggattcgccgccaatccgagtacgtagagcagtggcagcaggatcacaacgagcccttcacatctccctactcggtcgccagccaaacacccaacttcgttcacgccaacgccagcatcaaccttccgctctcctcggccctgcaccccgacatccagttcgagctctctctcaccttcttcaaggacggaaccgctcgcgttcgcgctggccagctgggcgagcgctacggaggctggaaacgctacgacgaggccgccaagtgggcagtcgagcagctgcccgacttggcctcggcaccttcggacacgcgcatcgactcgcacaagcacggcttccaagtccactttgggccgcaacattcgcgctcgctcaggctccaattctctccgctcaaaatcgaaatcctcagagacggcgaggtccaggtcgtgctcaacgatcgcggtctcttgcacctcgagcacttccgcaaaaagccagagcccttcccaaccgtcaagcaggaagaccaggaggtacatcagctcgtattccagcgcaacaagcgctccatcctcagctccccctcctctgcgcagtacaccgagtcgctcgtctcccaatgggcaggcttcgagaaggaggacaacggcgagtgggaagaaacctgggcctcgcgccgtgacagcaagccaaagggtcccgaggcgctcgccctggacatgaccttcccaggctacacccacctctttggcctgcccgagcatgcctctccgctctcgctgcgatccacccgaagtcccgtcggtcgccccgctgcagacgacgagaaggaccgtttcgacgacccctatcgtctcatgaacaccgacgtgttcgagtacgatcacaactctcccatgagcctctacggcagcgtccccgtcctgcacgcccagagcaaggaccgcgccgtcagcgtcttctggctcaacggcgcagagacctggatcgatctccacaagtccacctcttccaaaaagtctccggacaccacatcctactcgcacttcttctccgagtccggcatcctcgacctcttcatcttcacatccgcagacgcaaagaccaacatggcacacttcacccgcctcgttggccgaaccgtactgccgcagcactttgccatcggctaccaccagtgccgctggaactatctcaccgattccgacgtcaaagatgtgagtcagaggttcgacgacgaggacatccccatggacgtcatgtggctcgacatcgagtacagcaaggaccacatgtacggcgtttgggacgaaaaggcattcaaagatcccgaggggatggtcaaggctctcgatgacaaaggccgcaagctggtcgtcatcatagatccgcatctgaagcgcactcgcgactactggctctacgccgaagcgcaggacaagaagctgctcgtcaaggactcggacggcaagggcgagtacgaaggctggtgctggggcggctccgccagctggctcgacatgtttgagcccgccagctggaagtggtgggccgatcaattcacactcaagggaagtgcgctggcaggcaagatccgcgccaacgcgcgcaacgtgtttgtgtggaacgatatgaacgagccagccatcttcaatggacccgaagtcacttcacccaaggacgtcatccacgccggcggctgggagcaccgcgatctgcacaacatcaacggcatcctcttccacaaccagactgcgcgtggcttgcgcgaccgcgagctctcgcttcccagctctctgggaggaggcaagccacgcaggcccttcgtcctgtcgcgcgcctggtgggtcggcactcaaaagtacggagcgatctggaccggcgacaatctgggcacatgggagcatctggccgtgagcgtgcccatgatcctggccaacaacattggtggaatgagcttctgcggtgccgacattggcggcttctttggcaacccatcgtccgacatgctcgtccgctggtaccaggctggcatctttgagccgtttttccgggcccacgcacacatcgacaccaagcgccgcgagccgtacttgctcgaggagcctctgcgaagcgccgttcgagagctcatcaagctgcggtacaagatgctccccatgtggtacactgccttcaaggacaatgccgtgacgggtatgccggtgctgcgaccgcagtacctgatgttccccaacgatccggacggattcgccatcgacacgcagtactacatcggcgactcgggactgctggttcgtcccgctgtggacaaggatgtggactcggtgtcgatctatctggcggaagaccgaccgtactacaactactttacgcacgaggtgtaccagggcagcgagcgcggacgaagcgtcacggtggccgcgccgcttacggaacagatgccgctcttgcaccgcggtggctcaatccttccgcttcgcgagcgtgcccggcgagcggcggagctcggacgtaccgatcctttcacgctcgtcgtagctctggacaaggagggccgactcggcaagagtggagcgtcgaatgtgctcgccgaaggaagcctgtacctggacgacgggcagacgtacgagtttgaagagggccaatttgcatggcgccgattcgagtggacgcgcgacacggcttcgggcaagcacgtgctgcgtagcaccgacgagtctgcactcaagatgggcgatgccgagctggtgttgggcgacagcaagcagctgcaggcgtacgacgagtccaacgcgtatgcacaatccatcaaggatgtgcgagtgtccaaggtggtcgtgcttggcttggagcgcgagcccaaggcggtgcacatccagggcaagcgcgtgcagaaggacgctgcagcgtcggtggtggaatggacttggaagagcggcacgagcgcctcgggcaaaggtggcgccttcactcttggagccaacacggcttcggaactggtgatcaaggaccctgccgtcgcgcttgtgtcggactggacgatcgagttggagttctaactctagccgccgcagcatgtattaaagtagacgatcgcttcaacacttggtctcgacgtgcagactatgcagacc

SEQ ID NO: 12741 - DNA, 3663 bp, Oryza sativa
  ref <308>: DATABASE ACCESSION NUMBER: AK110089
  ref <309>: DATABASE ENTRY DATE: 2001-12-06
aacagctctccctcaagcaagacgagcaagcaacatccaagccacgctcttcccccctgcccctttgcacttcgctggtcgacctacctgtctgcgataggcgacacagcacactcacacccgcgcaatctacccagcgcccaaaaccaaggccaccgccaaccccctttcgttgaccacctcccccctacaggctgcccaccatggtcaagagagaggaggagaagttcccccgatccgacaccattcagggtcccgacatccccatcgaggatgcgctcgaatcagcatggcagttccactacaccagcgtcatgcgcgctctcggcgtagaggatgcagagcacggtctcaacaagcgtgacatcgagtcgcgacgccagcagtatggtcccaaccagctcgaaggcggagacgagatcagtgtctggaagatcgcccttcaccagatcgccaatgcgatgaccttggtccttatccttgccatgggtgtctccctcggcatcggctcctggatcgagggtggtgtgctcgctggtgtcgtcgccatcaacatcatcgttggcttcgtccaggagctttccgcagagaagaccatgaacgcgctccgcaacctcgcctcccccactgctcgtgtcatccgaaacggtgacggagagaccatctcggccaacgaggtcgtccccggagacatcatcgagctcactaccggtgacactgtccccgccgactgccgtctcatcgactcgatgaactttgaaaccgacgaggctctcctcacgggcgagtcgctccccgttgccaaagaccacacccaagtctactcggccgccgaggaggttggtgtcggcgaccgtctcaacatggctttcacctcttccaccgtatccaagggccgcgccacgggtgtcgtcgttggcaccggtatgaacaccgagatcggcaagatcgccgacgcccttcgcggcgccgccaaggcgcagaagattcgcgacgtcaagcgcaatgcctacggcaaggccggaccccaccgctacgtccaggccggtgctctcaccgtctgggacaaggtcaacaacttcctcggcaccaacaagggcactccgcttcagcgacgtctctcgcagctcgccgtcggccttttctttgttgcggtcctctttgccatcatcgtcttcctctcgaacaactggaccgacaacgaggtcatcatctacgccgtcgctacgggcgtctccatgattcccgcctcgctcaccgccgtcctgaccatcaccatggccatgggcagcaaggccatggtcaagaagaacgtcattgtccgaaagctcgagtcgctcgaggctctcggatccatcaacgatatttgctccgacaagaccggcacgctcacgcagggcaagatggtcgtccgcaaggcgtgggtccccgcttcgggcacgtacagcgtctcggagactaacgagcccttcaacccgaccctcggagaggtcagtgtcaacaacgttgagcctcgcgatgcaaagactgctcgtgactcgatcgaggacaccggcgagattgtagcccgcaacggccaatccgacaaggtcaagggcaacgaccgcttcgaggacttcatgaacgtcgcttcgctttgcaacctggccaacgtattcaaggacaaggagactcacgcatggactgctcacggtgaccccaccgagtgcgccatccagacgtttgtcacgcgcttcgcatggggccgtcttcgcctgaccaagggcaagaaccctgacaaggaggtcaccgagaaggaccgcgacgccgccgagtggacgcagatcgccgagtaccccttcgacagctccgtcaagcgcatggccgtcacctacgtcaacaacaagacccaccagggctacgccatgatgaagggagccgtcgagcgcgtcctcgagtcctgcgtcaaggcacagaccgacgagggcctcgtcgacttctacgaggacttcgaggcacgcgtgctggccaacatggaggctctcgcctctcagggtctccgagtgctcgcccttgctcaccgcgagatctccgacaaggagaaggagcagggcgaggagctcgagcgtgccgatgtcgagtccaacatgatcttcctcggtctggtcggtctctacgacccccctcgccccgagaccgcaggcgccgtgcgaaagtgcaaggaggccggcatcaccgtccgcatgctgactggtgaccaccccggcaccgccaaggccatcgccctcgacgtcggcatcgtcccgcgcaacaccaccaagttctccaaggcagagctcgacaacatggtcatgactgccgctcagttcgacaagctctctgatgcccagatcgacgcgatgccccagctcccgctcgttatcgctcgctgcgcacctcagaccaaggtcaggatgatcgaggctctgcaccgccgcggcaaattctgcgccatgaccggtgacggtgtcaacgactcgccctcgctcaagatgtcggatgtcggcattgccatgggcatgaacggatcggatgtcgccaaggacgcttcggacattgtgcttacggacgacaacttcgcttcgattggtaatgccatcgaggaaggtcgacgcatggccgacaacatcaccaagttcgtctgccacctgctcgcccagaacgtcgctcaagcctcggttctgctcattggtctggctttcaaggacgagactggactgtcggtcttccctctgtcccccgtcgagattctgtatgtcatcatggtcacctccggattccctgccatgggtcttggcatggagaaggcttcgacggacatcatgaagaggaagccgcgctcgaacaagtggggcatcttcacccccgagatgctcatcgaccttacggtgtacggcttctggatggcggcgctctgcttggccacgttcacgctcatcacgttcaactggggcgacggcaacctgggcgtcaactgcaactcggactacagcgggtcgtgcgaccttgtcttccgcgcgcgtgccgcgacgtttgccgtcatcacttggttctcgctcatccttgcctgggagatggtcgacatgcgccgcagtctgttcaacatgcgcgacgatgcacgctggtacaaccagtggctgcgcgacacctggaggaacaagttccttttcatctgcgtcgtcggtggcttcttcagtgtcttccccatcctctacatccccggccttaaccgcgtcgtctttttgcacgatggcgtcagctgggaatggggcgtcatcatcgtctgcaccgttctcttcgtcggcggtatcgaggcttggaagtggggcaagcgcgtctactaccgtcgcactgaggttgacactgccaagcttgtcgacgaagaggcgggtgtcgcggacgagcacgaccgcacgcccgtcgacggcgagaagaagcagcacagcaacgagcacagcaggaagatggtttctgcccccaccacgtcgtccgagacgaccgccgtgcaccagatggcctaagtgcttctgttcgcctatgagcatcaatcagcatctctctagcatcgcactcatctctgccctgttttgtacattacactcttcgtctcagcatcgttatatcgaaaagcatctcccgctttgc

SEQ ID NO: 12742 - DNA, 2705 bp, Oryza sativa
  ref <308>: DATABASE ACCESSION NUMBER: AK110090
  ref <309>: DATABASE ENTRY DATE: 2001-12-06
acatcgcaatccttattcaccgctgctttttcgctgggagagggcatgtcgtttctgccgtcgtttacggcgcttggagcatcgtccagctcgacatcgtcgtcgtcgtcgacgggaccaacattcaagccggcatcgctatcgtactttaccatcttttgccctgcactcaagcctcccaagtcccatcgcgcgcaacaagacgatgacgccgagcaggatcccgatgctctggaggaggagcgtgaatccgcccaaatcctcttctacaccagtcgcgctcgagcagctcctaaagatcgaatgcttcgtcagatcggtgtagccaaaggcatgatcgaattctgcagcatggtccattcctcccccagcgatggtgcgggtcggacgtggaatgtgcattcaagcaaacgacggatgatcctcgtcgaggtagaggcgggtgtctgggtccatgctagcatcgaccttgcctacaccaccaccacctcgtcagccgatgccaaaccgaagcgcgagtttcacgacgacctgcttccagatgcttggttggaagaaggtattcgcagatcgtggatcgattggacgctactcaatggtggacctgcacatgttcttagtcagaagacggggagggtggggctggaacggtcgctggaaaagtacttttccgtctgggcgtggagttgggatttggaggctgcaacgaatgcagggtcgaccaagcagcacgggttgttggcggagtgtgtacaggcgtatcctgtggtaccgcgtggaccacgcgaagggatcgaagagctcatgcggtcggatgttgcacagcggctaggtcgagagcgcgagatggtcgtgctttccgatacccagcttctatggccgccgagcgatgcaggctgtttcgacgacccacgcgacaccaaacccacgcaaccacaaagagaggcagggcagatggacgcagcgacgaaagcggagctgctacggcgggtagtgagtcatctaacagggctggaacgggagcgcgagctggtgcgtgcagcggcggtagcaagtacgagcgacggacgccgacgcggcacatcgggcgccattcgggaacgtggttcgagcagtacgaagcgcgatgtgcgtacggggctgctgtccaacggcacgggtgcaggcaagatgcgcgtggtgtcttcgcctgccatgcagcaacgctccacgagcgcgtcgagccatgcatcgacgacaagcgactccacacgctggtccaactggggcggcatgctgagtggactcggcaagctgggcctacgcagcagcgagacgcccgctcgcaccgaaacgcccgagcccaaaccagcgaccgaggagaacgcggcaggcgcgtctgcgatctcgatggcgcctagcgatggcgggggcggcaaggcgggcgatgtggcgagcccactaggttcgctgcaggatgcgggggagaaggtgtggaacggtgccgagcttgcgctgcgtggcctgggcgcgtcgctgggactggcgagtgcgtcggtggggtcgagggaggatggcgcagcgtcgcgcgaggccgaggtgtcggagcaggagcgatttgccgacgcttcgttcgatacgagtggcgccgaggcggatgcgagcgtggtgaccaaggtgtcgatcctggagcccgaggtggacgtcgacgagctggcggaagcgctgggagccgaagaagccagccatgcagatgagaccgccgcgcagccggacgaagctgagcccgtggcaccggcgagcaaggctgtggacgacagggatgcggacgcggcgtcgattgggacggcggcgagtgccaaggcgtttccttcgatctctgtgacctcggcggcatggtacagcaaagcggttcggtcggaagcgacggtgtcgacgaattcgccacagctgtccagcggtggagattcgcaagatgcatcgctgggtgccgggcagcaccacgactttgagctggacggatggggccacgagactgcgcagcctttcgagagcttccgagtgcacgtcgggggtgctgaggagccgttatgccacgagagcgtattggcactgcaggaggagccgttcaggtgcacgccgtaccgggtcctcttcaccacccgccgactgctgacgatggtgctgatcgagcgcctccccttggacagcgggtcaacgctcagtgtcacgtcgaatgatctgctggacgacgtgtggatggtgttgcgacgtatgcagcggcttctcaacgaccatgcgcgctccgcaccgcctccaagcgacagcgtaggattcgttcacatcgatgggctcacacagacgatgcacagtacactctcggcgacaggcgagaacgatggcgaggtggaggtggtggcggatgcgcactgtgtatctgcccacgagctcatgcgtcgtcacggcgtgctcgagacgttttcgcgctcgagtcacggcaagacgtggacggccagtcgacagcgcctgcacaaggagggaggtgcgagtcagacgtacatggtgctggcgggcaggaagatgagcattgtagattgcgataccgagctgcgcaagctcgctcaccagtatccgagctttggcatctgatcctccgacacccaatcggttattgccggccatgcacattcgcctacggaaaaggaatcgacggcactgacgatctt

SEQ ID NO: 12743 - DNA, 3968 bp, Oryza sativa
  ref <308>: DATABASE ACCESSION NUMBER: AK110091
  ref <309>: DATABASE ENTRY DATE: 2001-12-06
atccgcgacccccttcatacgcccctcccacactccatccgacaccatcgcatcgcctctgtctgcacacgcgcatacaccaccacatcctcgcacagtcgccttggtcgacctcaatcgcctcacatgacgcacccagctcgatgagacccacccaagcgtcggcaatcccacccacgctctccgctgcctagactccagcttcctggcatccacgtcttgcatccttgcggcagccttggaccagtcgcgatcgtgccgacatcaacaatgacatccacgcgtccaccactcgacgtcaaccaccgctccgagccagccccctcgcgccgttccatatccagccaggccgcctccgcctcccgcgccctcacctccgtcgcttcctcttccgtatccaccccttacggcggccttccctcttcggcatcttcctcctcttcggcatcttcctcctcatccttggtctcctcagcgcgacgctccatatcctcgaccggaagaaactccttcccgcgcgcaagtccttccacaacttcgctcgtcaaggatcaatctccccgctctcgcagccgacgtaatggcagcgccagctccagcagtctggtgctcaccagacccgacaatgcgacaggcatccaccagtcaagcaacgccgagtcctccgcatctggctccggcagcaaacgcgaagccgtgagcgcttccgccgcctcccagagcacccgccaccagcgccaccactcggcagagacgctccgcttggatctcgacggcctcgacctcggcggaaaccagtctctcgccaaccctttcggcgctgctgctgccgccaccgcacccgatcatcgccatgtccgctccacttccaacaacgccgccatccccaactcttcttcgtcttcccgactcggcggcttcatcgaccccttcagctccaacaaacccgtcgatctcaacctccaccagctctgcgcatcctgcccaaccgatccccacacctaccccgccctccacgccctcgaagacagcttctccctccatctgcgtgcagagtgctccgactatcgtcagatcatgcccgctcagatcgttctcaacgctgccgccgacagggagctccgcatgcgcaacgctggccccgaagcaaccgaccaataccgtccgcgaggctattccatcagtcacggccaggtcctcggcggattcgcgagtctcggtctccagaccgagccagatgccgcgcccacagcgccaccaacgcgccagtcgcccgtccgcgccgacaccaagcactccactgactcgtccgagccgcccatcacgccgatcgagtggagggacagctttgcatcgcccacctccgccagctacgacgccacgcccaagtgggcgcatctcaccagcaggccttgcaatccgctcgagccgctcgacgtgctctccatccaagagatgggcttccacagcctcgacgtcggcagcctcaacgactgggagggctgcaaactctccgcagagatcctctgccccatcaacggccatcagcgcatccagtggtccgtcgctcagaccacgcgcaggaccaaaaagtgggtcgtcgtgcccaacgccaccatcacctgcggcaagccagacactctcgccaatgccgaacaggcagagaggaccgtcgtcgtcagcgcacgttccatctggctcgacgaagccgcgcagaccgcagcgcaagcaagcacctcacacaatcctcccaaccactcggccaaacttgcaacgtcgaaccgcagctctcgccccttctcgggcaagtcgggctttgagcttcggctgctgcgccccacctcgggccgcatttgcccgcccatttatctggccaacgcatcgacgcatcgatcgcttcatcagtatcgcaccgacatctgcttgcgatccaagccgagccaggctagtttggttgcagaccgtctcagcccgaggccgccccagcccgtgtatccggtgcttcgacgatcgcgatcgcgaccctacctgcgccaccagcacgtacccttgcgtcgctcgcgctccaaaccctacttgaagcccgaacagcacgcggccaaccaggcggtggcttccagtgtcgtcgccgacgatttcgcgccttcgcctccaggcgatccgcacctgcgcatgcatccgggcgagtcgtggccttcggcacgctcgcgctcgcctcgaccgcgatcgtcgttggacgcgacgtcgagcagcgatgacgaaagcgacgcctcgtcggatgcagagatcttctcggcgcccaagacgcacgagtcggcgagcggcagtgcctcgtctgcctcctacgaccactctcacaagccagacatgcctccaaggtcggcaccggtcgccatggtttcctctggcaacaggcacggcacaggccagcgttctccctcggagaaatccgccgcgacatcgtggcagcacagcagcctgggcgagtctcataccgattcgtggcagggcacctcgcagaccaccgccgcgtcggcctcgtctgcgagcgccagcagcaagcagagccgcagccgcaagggcctgcagcgcgctctgcagaagaaggacaaggtgctcaactcgtggttcaagcgcagaccggacgcgtcgtcggcagcttcggccgatggccaagccccgcaagccgaggtggccaatggcgtgtcgccttcggcatcggcgctgccgtctccgaccagcgcgcacaggagtctcaacggcagccagcccgctcgcatgccgcgggagagctcggaggcaagtacgggtgtggcgagcaaggggccgacgcctctgaccgggacggcactggaaagcttccagagggccatgttccgaccggcttcgcccgagtcgaccatcatgggatccagaaggggctccgaggcactcacgcaaaaggcagtcgagcccagcaacgcggtgggcgatcgctcgatccccgacaaggtggctacgaatggcggcgctcctggcacggatgcagcttcggacaaccgcacgggcgtgcacacgacgctgtcgacgctgtacggatgggaccgggaacaggcggcgagcaagctgctgccgtcgagggctgttggctcaggcccgggcagtgtagcctcgacacagggatcttcgtatctggatttggacgagcaggtggcattgctgggcattgatgcggtgccagctgaggcgctgacgatgctcattccgctgccgctgatcgggcgatcgcgagcgcaggatgcagtgcggtatatgcgcgtcaactttgttccgtttggcagcttgtccgactctgtggacacgcagagaagtacggcatggagcgggctcagtggtgtgggctcgccgggctccgggagcgaagcagggctgtcgcacagcacgagcaacggcagcggcagtctggcatcggctcgcgaggcaggctcgggcacgaccaagacgtcggagcagtcgaattggaagcgaaagctgggactgtcgggtcgaagcggcgcgggtgccaacgggcagaacagcgccgcgattggggctagccagctggcttcaacgaccgagtcgcccccgccaacgagtggcccacaggcgttccgcattacggcgattgtacacgatgcgccgtggactgcgccggcggcatgttcaccgctggatgcacgcttgcccgagccaggcacgtttccggtggtgttgggctactgcaacggctccaagacgctcgagatggtgcccgagggatggggcgcgctctcgctcgccggcgtgcccgtgcccaccaagccggacggctcgccgttggagggtgtgcatccattgcatggcgtgacggatctgatcatctcggcgtgtaccgctgtgatggatgtgtaatttctcttgctagcattcctcccctcatcacagtggtttgtaattgtatcctcgacatg

SEQ ID NO: 12744 - DNA, 3218 bp, Oryza sativa
  ref <308>: DATABASE ACCESSION NUMBER: AK110092
  ref <309>: DATABASE ENTRY DATE: 2001-12-06
gcatctgcatccaacgacgacgccgccaacttcgacgcgcacgactacaaacgacatgacttactgaccaatctgcgcattcttgcggcgcttcgaagtcccaccacgctcagcaaaacagcgactgggattggactttggaacccacctagtctccactggacccggtggatcgggactgcgcagagcatacaccaccgcctgcatccggtgagtcgtggggggggggctaaagaatgttgcagcacaagttatcgctggcgacaacgcggtcgtccaactcgtcttcgtcgtacaatgccgcgatgctagcgaagaaggagcgacgtatccccatctacgtgcggattgtgcccaaggacatctggcttcggatgcacgtcagtccgagccagacggtgggttggatcaaggatgcggcgctgcacaaggtgaatgcgcccgaagtggatccttcgctctcgtaccgcttctaccaggatgcactcaacgcggcgtcgcaagccaagcttgcgcccgtcgccagccacgaccgcgtagtcaagcaccgcacatacgccctgccccgcacctttgtcgctcctccacccgagctgggcgatccaaatgcgggtgtcgtggctgcccttgcaaagggggcaaaggcaagaagaacacctcttccaccagttcaatcgagacgtggggacgactcgacaatagcgacttcgccatcgacgtccgagctgggaggtggccgcacgggggcgtcggaaacatcgcattcgcagacgagcgaggaggaatgggcgatccgtctcgacccctcgctcatcacgggcgatcgagacgccaagctcgaggaacaactcgccagtctgcgtctggcgcagtggaccgccagtcgcaccgagcgatcccccctggacagccttaacagtacacccaccatcgcatccagcagtcagttcggcaccgacccgggcagttcaccttggctaggaagccagtgcacggacgagcggtcgcaggggagcagtggagcggcgggactgtacacgcaggcgggtgcggccgagtcgttcgactcgctcgcatcggtcgggtcggacgaggagacggagctggtgacgaccgccgacgacgaggcgtcggtcatgcagtggggcacgcaggccgaggcatcgccactatcgagcccgcgtggaccgcagccgagtttgagcgagcagtcgcccacgcggccacgcagtcgcacagtgacagccgccgacgtgttgcgttcgcgggcctcgggcgaatcgcctccgccaatgcccgaagccgtctcttcgcccacacgcaactcgtcgctgcccaagacgctgccgcgccgcatggtggccgagacgagccagcgacgcgccgtacacacggatctgctcgaactgctcaagggctctgctgacgacgtcgaaccgcagccgcgccgcacgcagccagacaaaggcatggtgcgacgcacctcgagcagtggctctgcgtccatggcgggggagagcggcacatggacctcgcccacgccgtctgccaccggcgagagccgcttcgtggccgggctgaggtgggacgagatctcgcgccccggcaagggggtgtctcatccgctatcgcacaagctcacgcttctctcgtgtgcgaacggatgcgagatggaagagtggaagacggtccaatcgtacgccatccgtccatacgagctgctcgagatgcagtgggccatccctaccgaacgcgtctacatcccgcctctgcatccgcacgatcttgtccgccccccacgcagcacgggcaaggagccgcacaaaccctggcgcaccgccaccgatgccggtccggacgtggacgcgccgtgtctcgacccgtacttcgaggggtgggtgtacgtgctcaagggcggcggagtggcgggcaaggagaaagcgcgcgccaaggtgggcaagtggaagctgcactggctcaccatcaagggttggcggctggatctgtaccgaaagaaacctcgcgcaggtgaagcgatgcttcccgtagcggaccaagcgtggccgttgcgttcggtcgagtgggttctggaaagcgacacacccatcccgccgaacgcggcactgcctgcactcgacaccataccgccctcgagtctctcgctgtgcttcacctcgacacctgcagctagtggggcagcaggcgaagggggattgttgacgctgcggagtctatcgcgctttgaccacaaggcgctctcgacgctgctgatgcgcgcgtggtaccgcgctgccacgacctggccgggcgtggacatgtggcgacgcaaggcgatctttcgcgccgtcgtcgccgggcgtggcggtaccgttgcccccgggcgtgctgggagagggagggggaggaacgccaaggcgcgcacacgacttcgaccgtctggatggccgcgggagtgggaagacgccgacgtgtggtcgagcgactcggagcgcgagcaggtcgaagtgccactcgagctcgaagaggcggttcagcagcgccgcgacacgatcacgcagctagcggtggaaaaggcatcgcgccgaaagaaggatgacgacaaggtggttgttcccaacggactgtacgctgcgctgctcggacggaccacagcggcttcggctgcagaagagacggcgcgcgattcgtcgccgtaccatcagggcagtggacacggccatgcgagcaggctggcgagtcgaacgagcgccactcgtgttgcgtacgccgagccgggactcatgcttggcaaccaagttgatcgtcagcccggcgcacggcgtggcgcggcacgcggggatgggtctggcgatactgcgatgcgtcgccaacgcagtggctcgctcacacggtcggcttccggcggcgatgtgagtgcagcgaggtcgcgctcgctcaccgtctccagccccagcggcgcaggtgcgacacgcggccgcagcaacgactcgtcggccccaggcagccgcaacgtctcacctctaccgggaagaagatcgggcgccagcacgccacgcgagaacgcggcactgtatccaatgtcgcctgccatcgcaccgggctttgtcgacgtgcctcctcctgcatcgctgctgctgctgaaaaagtacaaggcgagccaagcgtccaagccccaaccttagttgccagcatgcaatgccccaaccttagttgccagc

SEQ ID NO: 12745 - DNA, 3169 bp, Oryza sativa
  ref <308>: DATABASE ACCESSION NUMBER: AK110093
  ref <309>: DATABASE ENTRY DATE: 2001-12-06
atacgacactactatcacctctgcgatgccggtctcttgagaacgaaacgctcggttgctcgaacaacgacgcatgaccgagagcggaggcagaggccatcggctcttagcaaaggcgcgcaggcccaaaaaggctcgccagcctccacacagccgagttggtcagcggtggacttgcttttctttttcatttctttgtttcgagactgagcacgaaagaaacgagacagctcagcacgatgacgagaaggaattgtttcttccccaccaaccaaggtcgcatttctcgcatttctctctacacctcgcatctgtgccggccgcctcgatcgacaggcgcttcgatacatcagctttccgcctatctgcccttctccgcttgtccagcttcgaccgcagaggctgattcatcgacctcacccgctcggaccatcacgaaagcagctgctcctccgtccatccctctccaccacagcctatatatcgcttcgcgaccgtttcgtcggtcgtgatctgctccgcaccccactaaactcgagttcatgcaccagctctcggcgctccctacgcacatcatccgcgccaagtccctcgtcaaccttaccgcatcgactcgtccgctccgtccatcctctagcttctcgcacatcttcgccagatccttgataaaagggaacacgttcagctcgcgctctacgtcggcttcagcgcactcaccgcccgtccgcaccttcgtcaacgcaagcatgccttccgtcgcccagctccgacagccttcgccatccatgcttcccccggcaaagcgcgccaagatgcactccaataccgaaccagactcgcacgtcgctgcgaccgatggtgcagccgcggccccggagatcgaggctgtcgccgccgactccacctcgtacaacgacgtgcccgccctgcccgacaacgcccatcaccacgtcgacgatctcgaccccatccccgcgtgcacctcgacgctcaccttccaaaacggcatcttcctcgcacccatggtgcgcatcggcacgcttcctacgcgcctcctctcgctcgagtatggcgccgacctcgtgtggggtcccgaaatcgtcgatcgcgccatcatcggctgcgagcgcaaggtcagccccaccaccggcgtcgtcgaatacctcaaggagcacaagcagatcttctcgtgccaccccatcgaaaggccttatctcgtgtaccagctcggcagcgccaacccggatctcgcctaccaggccatcaagatcatcacgcaggcagacgacgttgccgccgtcgacctcaactgcggctgccccaagcccttctccacccacgcaggcatgggtgccaacatgctctccacccccgtactgctgtgcaacacgctcaaggccatgcgtcgagccgcacctccgcacgtcgccgtcacgtgcaagatccggctgctgcccacccaggaggctacgatcgagctcgtagacaagatcgtgcgcaccggtgccatcgagtgcctcaccgtccactgccgcaccaaggacatgcgcccacgcgagcccgcgctcctccaccgcctccgcgagatcgtcgaccacgtcaacacgctcgcggccgagatgggccgcatcatccccgtcgtatgcaacggcgacgtgtgggacgccgtcaatgcgccgcgcatcaaggagctcaccggcgtcacctccaccatggtcgcgcgcggcgcggaggccaatccatcgtgcttccgcccacagggcagtctgagcatccccgacgtcatcgcgcccaagtgggtgcgctactcgctcgcactcaacaatcccatcggcaacacaaagtactgcatggcacagctcgccttcaagcccgccgagtccgtcgccaaggacgccggtgcaaaggccaagccgatgaacaagaagcagctgtcggctctgcgcatgggcattgcacaggcaaagacgcatgaagagctcgcggcggtgttcaagatcgacgttgatcaggtgcgtgcactcggcgtggacgacgagatcctcggtgatctgcgcaccgcgctctcgcagcgcgtctcgcaccgctccgccagcgctggcggcttcgacggcgagaggctgggtgctgtgctcaacaatgccagcggcggcgcttcgcagcagggtggacagggcgtgggcgatggccatgcttccggcgacggccagaagcgcgccacggacaattcgccgcagcccgagtggaagcagctgctggcgacgagcgtgagcgacaacatcaaggacgaaaagtcgatcctctactacgcctttagcacggtcgagccgccgagctcggtgcatgatgccgccaagccgcacgtgcgctacgttgtgcaccgcggctttgtcaacgagcagcgcgatggcgatcgtccgggcggtattgcgccgcacaatgcgtcgtttggatcgagcccgtgtctgctgaccaccaccgacgtgcgcacgcccaaggtgcagcagctcacgtcgcagagcagcctgcgtgcgcacggccccgacggctcgcgcggcggcgagtgcgagatcgcctggtggatcgaatctgcccagctccagttccgcatttcgggcacggttcatgtgctccccacgccaggacacccgctccgatcgctgtttccctttgagcgtctctccccgccacgcgcgcccggaagcgaggccatcgacgccttcgactgggacaaggaacgcaagcgcatctttgataagctcaacccaggcctccttgcgtccttctgtcgacctactcctggctcggcgcacccgaacgctgacaggctgcaacaagccaagccaaaggacgacaccagctcgccctggccgctcgaattgccaagcccgggcaaggaggagaacgaggagcagaagaggatgctcgagcagagcgagaagaactttgcgctggttgttgttgagccctacaaggtcgacctcgtcaatctcgccgacgatacaaggaccgtctacgagctccagccgggcgagtgtgccgccacgggcaggtggaccgcacgccgcgtagttccctagcctagactcctggttcttggtgtacctgagttcgttcgtttccgagtccgtgtagatttcccgcatttgcaatcgtattggtctgtcct

SEQ ID NO: 12746 - DNA, 3138 bp, Oryza sativa
  ref <308>: DATABASE ACCESSION NUMBER: AK110094
  ref <309>: DATABASE ENTRY DATE: 2001-12-06
taccatcctgccctctgctcgctccgtgatcttctccatcgggttccgacatctgcacacggcttctgtctcgtcctccgccttacgctccagcttgtgccatcaggtcgccgtgcagctcagctcgtcctaggcataggacttgctcgcccctctccctctgggcatctatcgactccacagtctgcaaccaacgcactccatatatacacaaaaacaatgtcggccacagcttcacgcagagggtccttccctcgccccaagggtcgctccaaccaacaggtgcaggacgacaccgaggaggtgcgcaacctccgcgccaaatactcggatcagctcgccatgatccgtgaactcttccccacctggaccgacgaggacctcctctttgcactccaagaatcgctcggcgacgtcgagaacgccgtcgtccgcatctccgaaggtcaggtcgagcagttttcttccgtcaagtcaaagaagcacgtcaagaaggagtccaacgtccaccacgcggctcccgcaccccacgcttccgcacctccgaccaccaccgcacctcacgccgcccgaggaaaccacatcggcgcccctgccggccgcggtcgtggcggtgcttcggtgcgaggcgctcgcggtggtcgaggcggcttccgcggcgtcggtggacgcggcggtggcatcgctcctcagaccaacggccacgacgtcaagacgcccgagaccatcgaggccaccaccgcccaggcctttgcccccatcgctacgcccaccaccggcaccagctgggccgccgctctcggaaggtccaacaacaagtcgcaacccgtcctagccgcacctgccgcacccgccgtgcccgctcccgcacctgcactcgtcgaggaatccagcgacgcttccctcggcgcacccgtcgcgcctgccgataccgctgccgcgccagccccggctgccgagatcgtcgcccctcaggccactgagagcgccaccaccactggcgctctctcttcctccaacgacaagccagtgcccgccgtcaaggttccagctccctccaagcccgctgccaagcctgctggcatgagctgggctcagatcgctcgcaagtcggaagcacccaagcccgctcccgctccggctgcctcggccgcatccgaagccgcccccgccccatctgcagagactgctgccgccgaatccgccaccgctgcccccaccgagtcggccgcatcggctcaacccgatgtctccgccgagcagccggctccggatgcagtggaggcggtcgcagaacccaccgccgaccccgtcgctgacgtcaaggaggatgccgccccggctcctgctgtctccgagtcggtcgctcccgaggccgcgcctgccgccgaatccgccagcgccgcccccgccactggccctcctggtctctccaaggccgctccccgtgccccagcgcagcgatcctcccaacgcgcacgacaggacgctccggtcgtcatggctggtggctcctcccagcttgacaagcttggtgtgcaattcggctcgctcaacttccttggcggcgatgccgaggacgctgccgagacggccgaagagtctccggctgccgccgaacccgaggctgctcccgctgcggccgcgcagaccgcagccgtgccttcggctcaacgccaggacgcccaggttggacaggcacagaccgagtcctacaaccagcagcctgcttccgcccaatacaacggcttcaagtcggactctttcgacaactcctacggcttcaccggccagcagcagcagcagcaagctactcccgctcagtccgctgcccagccccagcagcagcagcagcaggctgctcaggagcagatccacggctacaacggctacaactcgatcggtcagggtcaggccgcctcccagcctcagcctcagcagggcctccaggactactcgtccatgtacggtggcttggacacccagcgcctcgcccagttctacggcgcttacgaccagggctccaacgccttcggccagcgatccgacgacaagtctcagcagcaggcctcgcagcagggtcagcagtcgcagcagcaggccggctcgcagcaggctggcgagcctcaccagcctcagcaccaccagggccaccaggcaggtcccggcctccagcaggctcctcagcagcagttccccggcatcatgccctactactacccccactactacatgcccaaccagttccagcactacgctcagcccaccgccggctacggtcagtaccctgtgtacggccagcctgctggccagccccagcacccgtccaagcctggcacgcccgccaacatcgcttcgccttacagccagggtccccagagcgacgccagcgcatacggcgctcagaaccactacggccagaccccaagctcggctggcctcgcctcgtacgaccagggcttcggccgtggcatgcctggcctcggcggcatgtcggactactccaagatctacggcggtgccatcccgggtctcggcggcttcctcggcagcggtgcgggtggcgcgccgccttcgcagaacgctgcctcgggcaacgctggatccggcaacgctggcacgccccacatgggctcgcagcagaagtcgggtgcctcttccggcagcgcgctcgacagctaccgacagtatgatgccaacgcctccaagggctcggcacagtccggagccgcctcgggccaggtcggacgcggccaaggccagtcgcaggctcagccgcaggtgcaacagcaacagcagcagcagcaggcacagcagcagcaggcgcaacagcagcagcagcaacagcagtactaccagcagtacggcgcctacggacaccaggccagcagcaacgcctactccaactacccctacgcacgccagtactggggtcagtagacgcctccctcccatgagtgccttggacggcttgcagccgcgttgcgctcatcgcaccactcaaccacccttgcccggatcgagacattgttcgtcccacgatgtggcgcccctcgtcagcgctctaatccgatgctaagaagaaacaattgacacgtcgcatcgaattgatctgcggaaatacatgtcatcctcgcg

SEQ ID NO: 12747 - DNA, 2837 bp, Oryza sativa
  ref <308>: DATABASE ACCESSION NUMBER: AK110095
  ref <309>: DATABASE ENTRY DATE: 2001-12-06
aaacatcttcgtcgaggatcgtcaccacccatcgcgttccggccactcttgcaacgtgcctttcacaggctaacgaactcttttttaacgacccagtaacgaaccaactctccagcttttggctgcaaacttgaaccacccatcattctccaatcccaccaagctcaccgctatcctcaacgccacaaagtgaccatcctcgacgcctacacccaattccatccgcatcatccgcacggacgcttgtgcttcctgcacgttaccgcatctgcactctcccacccgcctctttgtgtgccaagcagatccaccattgcatgccagctttgacgtgtatcgattcccttgtaacgaccttgtaacgacccgtggctcttcctccgactctagaggagagttccttaacgaccttttttacgacctccctacgttccgcatttctttaccctccctccttctctttctaccgcgcaactccctccgctcctctttactctccaccatctcaactctctccgcatccccatcgtccgaccagaaccctcgccttctctaatctttgttcgacgttcgccatggaggaccagctcttcagccccaccgccgcctcgcagctcttcgacctgcccctctcttccaacggacccatcggcttctccccctccatcgacatgaccagcaacctgcccctcacctttggcgacaacctcgagacccccgcctttatgctcgagattcagcgaaagcgcgccgacaccaccaccaccctcaaacccgactttgagttcagggacgactttggattccaaggcgccacactcctgaccgacacgcctcgacgaccgcgcgccatccagcgcctctccctcacaccctccgtcgccagctcggccgcctccaccgcctccgagttcgactacagtggctgcgacagcgaggccgatcacagcaacgtgacgtccccttccgccgacgatatgtgcagcgccccttggaacgactcgccctttggctctgtcgacgtctcggactcgattcagaccgcctttgaccgcatcggctttggctccccctgcgatgagtccaagctttccctctacaagcaagagatgttcaccccggccgggtttagcttccacgacttcatcgaggagcctaccaccggcggcgacggcgacaacgccgccaactcgggcaccatcagggccaaggacatgtccatctcgccactgaccttcgccgacgtgtcgagcgacggcggccacagccacatccgctccagcggcagcgagtccagcctcggtctctttgacagccccaacgtcggagccatgcccatgcccatgggcccttaccctgtccaatcgttcttcggcaacggcagcgcctaccccatggtcttctctcagagcgccccggacgcttcgtgcatccaccctcacggttcctcgtgcccgtcgtcgcccaacagcgccagcagctcgtcgccctactcgggcttcggcatgcccgccggcatgccctcggtgctcgcctcgcccgcctcgcgtcagatccagatccagcacatcccgacccaggctcccggtctggcgatgctgcccaagggcatgagcctgtacagccactttgcccatctcgccaacccgtacgccggcctcatcaccaagcgctcgcgtggacgccgtgtgcccaacaagcccgaggagatgaacaacctcggcaagagcggcaaggtctacacttgcaaggtgccgggctgcggcaagtgcttcaagcgcagcgagcacctcaagaggcacgtccgctccatccacaccgacgagaagcccttcctgtgcccctacccttcgtgcaacaagcgcttcagccgtcacgacaacctcaaccagcacgcccgcgtgcacacctcgatgggcggtgtcgccggcgtcgcaggcgacgagtttgacgcggcgtccggccacgccatgtcgcacctcaaccacccccttgcccaccccatggtcctcagcgcaggtccacagggcggtatctcgatcgcatccggtccgagccaccagatcaagcaggagtagtctactgcggattccaacttgcatcccggacggtcgagccttgcacggcgcccgcgcgcgctgtctgcatgtcctcgacgcttctcttgttgctgctctcctggatcctctcaccacccatgcgataccccggcgtccactgtgcacctgctgccgtggactgccattctgatgataccacctgcgcttctgtctcggctttcggcctcttgctctggcgatcctgtcccgtccctctgcggactcgggactcgacgctggatttttcccctttccgctcgggcgacctcggtggtggacacgccccaggtcgggcggtccgcgctctttgatggtctcccgacatagagcggtgcataggcgtgcgtctcacccgacgccgctgcttagctaccgcgacattcggagcagctgtgcgtctgcttcaccgctcgacggacagctggactcccctccctggcctccaacggaccttcacttcgcctcgcggcgttccggttgaccaagctggaacgcacgagacgttcttctccctctcccctctgcctcgactctcctcggacaatacctcttctgtgctccgtttttctctctcataattgtgtcgttcggcaagcgtggcctctccccaccacacgcgccgcttttccacccctgtatgtaggtcttctcacaccctcgtccgcgccgctttggcgcgaacttggctctccctcttgactcccgctcgtggctccgtaatacaaagcttgttctgtg

SEQ ID NO: 12748 - DNA, 3978 bp, Oryza sativa
  ref <308>: DATABASE ACCESSION NUMBER: AK110096
  ref <309>: DATABASE ENTRY DATE: 2001-12-06
tgcagatgctcggacgtgccggtcgaccgcaatacgacacgtttggagaaggcatcatcatcaccaaccactccgagctgcagtactacctcagtctgctcaaccagcagctgcccatcgaatcgcagctcgtctccgagctcgctgacaacctcaatgccgagatcgtcctcggcaccatccgcaaccgcgacgaggccgtcgcttggttggggtacacgtatctgtacgtgcgcatgctgcgctcgcccgcgctctacagcgtcaccgcagactatgccgaagacgatccctttctcgagcagaagcgcgccgacattgtgcacaccgccgcggctctgctcgaaaagtgcggcctgctgcgctacgaacgccgcagcggcaactttgtctcgaacgagctcggccgcatcgcatcgcactactacatcacccacgacagcatggcgacgtaccaccagcagatcaagccgcagctcggcctcatcgagctcttccgcgtgtttgcgctctccaacgagttccgccaccaggtggtgcgccgggacgagaagctcgaggtggccaagctgctcgaacgcgtgcctgtgcccgtcaaggagtcggccgacgaccccatcgccaaggtcaacgtgctgctccagtcgtggatctcgcagctccggctggacggatacgtgcttgctgccgacatggtgtacatcacccagtccgccggccgcatccttcgcgccatctttgagatctgcctcaagcgtggttatgcgaggctgagccggatggcgctggatctgtgcaagatggtcgagtcgcgccagtggggctccatgacgccgctgcgccagttccgcggtgtgcctgcggatctgatccgcagactggagcggaaagagtatccgtggaatcggctgcgggatctcgagccaaacgagatcggcgagctgattggaattccaaaagcgggccgtctggtgcaccgactcgtgcatcaattcccgcgtctcgagctgcaggccttcttccagccgctcacccgctccctgcttcacgtccaactcaccatcacccccgacttccagtgggacgaaaaagtgcacggcggcgctcagtcgttctggatcatggtggaagacgtcgatgccgagatcctgcactaccacgaccaattcctcctgctgcgcaagtatgccgaggaggagcataccgtcagcttcacgatccccatgacggagccgctgccgcccaactactacatcagcgtcgtcagcgatcgctggctgcacagcgaggtgcgattgcccatctcgttcaagaacctcatcctgcccgaaaagttcccgccgcacacgccgctgctcgagctgcagccgcagccgctgagtgcgctcaacgatcgacccgctcaggagctctaccgcgactcgtttgcgcacttcaacaaggtgcagacgcagacgttccatgcactctacggcagcgacgactcggtgttcgtcggcgcacccacgggcagtggcaagacggtctgtgccgagcttgcgctgctccggctgtggaaggatgcggatgcgggccgcgccgtgtgcgtcgtgccgtacgagtccatggttgcaccgcgtgtggccgagtggaagaccaagttcggcgagtaccaggacggcaaggaggtcgtcgcgctgacgggcgagacgagtgcggaccttcgtctgctcgaaatggcggatgtggtcgtgacgatcccggagcactgggacgtgctgtcgcgccgctggcgccagcgcaagaacgtgcagtcggtcgcgctgtacatctttgacgagatccacatgatcggagactggcgcgtggggccgacgtacgagattgtcgcttcgcgcgcgcggttcgtcgcagcgcagaccgagaggccgacgcgcatggtggcgctcagtgtgccgctcgcgaacgcgcgcgacgtcggcgactggctcggagcgccgagcggcagcgtgttcaactttgcgccgagcgcgcgtcagacgccgatggaggtgcacatccagacgttcagcatgccgcacttcccgtccatgatgatcgccatggccaagccggcgtaccttgccatcattgagcatgcgcccgaccagccggtgattgcattcgtgccctcgcgcaagcaggccaagctgactgcgaacgacttgctcgcgtacgtgctcgccgacagcgagcgcgacgatggtgcgagcgacgacggcgaatcgcgcttcctcaacatcgagatggaggacctggagccgcatctgcagcgcgtgcaggaccgcgatctgcgcgagctgctcgcctcgggcatcgcctactaccacgaggggctcaccaagaacgaccgacgcattgtggagcggctgtttgcagcggacgcgatccgcgtggtggtggcgagcaaggagacggcgtggagcatcccgctgacggcgcatctggtgctcatcatgtcgctgcagacgtacgagggccgcgagcaccgctatgtggactatgcgctgccggacgtgctgcagatggtggggcgatgcacggtgcccaacgacgagggcacgtcgcgctgcgtgctgctgtgccaggcgacgcgcaaggagtactttaagaagttcctcgccgagggcccgcccgtggagagccggctgacgagctatgcgcaggactttttcaacgccgagattgtggcgcgcaccatcgacgacaagcaggcggcggtggacattctgacgtggacgctcatgtaccggcgtctgcagcagaatccgcaggcgtacaactgccagggcaagagcatgcagcacattggcgactatctgtccgagctggtggagacgacgctggcggatctggagaactccaagtgcatcgccatcgaggacgagatggacgtgagcccgctcaatctgggcatgatcgcgagctactacaacgtgagctacgtcacgatcgacgtgttcaacatgtcgctcaaggacaagaccaagctgcgcggcatgctcgagatcgtcagctcggctgccgagttcgaggacctgccgattcgtcagcacgaagatgtgctgctgcagcggctgtacgatcgactgccgctcaagttggatcggctcaatctgctgagtccgtaccacaaggtgtatatcctgctgcaggcgcattttgcgcggttgacgctaccggtggacttggaggcggaccagcgtattgtgttgggtaaggtgctcaatctgctctcggcgtgtgtggacgtcatgtcgtccaacgcgtacttgaatgcgattgtggcgatggagctgtcgcagatggtggttcaggcggtatgggataaggactcggtcctgcggcaggtgccgcactttagtgccgaggtgattgagcgctgtcgcgcgcgtggggtcgaagacgtattcggcctatcggacctgcttgcggatttgtccgaggtcgaacgcgatgagttgctgcagatggacaagaagcaaaccgcacgcgtggcggcgtttgtcaacgccttcccctacatcgagctgagctacagcatcgaaacgccacgcgaagagatgaacgcctcagaccccattacggtgcgcgtcacgctcgacaaggacgacgaagacgacgaagagggtctggtggttcaaagcgccttctaccccgcacgcaagctggtccagtggtgggtggtcatcggcgaccccgccaccaagaatctgctcgcgattaaaaaggtcactgtgcgcaagacggtacagctcgacctcgaggtcacgttgccacagggaagacacgaccgcctcaagatgtggttggtctgcgactcgtatctcggcgccgaccgcgaggtcaacatcgaaccactcgacgtcatggagggccacgaagaaagcgaagaaagcgaagacgatgaagagagcgacgacgacgagtagttgccaatgccaagttttgtacgattcg

SEQ ID NO: 12749 - DNA, 3240 bp, Oryza sativa
  ref <308>: DATABASE ACCESSION NUMBER: AK110097
  ref <309>: DATABASE ENTRY DATE: 2001-12-06
accctccctagcaccctccatcctcaagtctcggtgttcttcgcgtcctcatcaaaaaggatgccgtccaaacgaaaggcgtccgcgcccaagaaggcggcgcccgccccttcggcccccgctgcaaacggcacgcgcgctgcaatgcccgccgtgagcaccgtcaatggccagcctctcccggctgggtcgcgcgccgcagccaccgccgcagaccctcgtaggtatgctgatgccaggcgtgctcgtcagatcgacccgctcaactacgagcgcacgcccaagtccgggctgcttgtgctcgtcgtcctcggtctgttttcgctcctcggctccatcacgctctacctgcactacaagcttcccaccccgcgtggccccacgaccattctcgctgccggtgtcacgcctgccgatgcggccgcctaccacccagctatgcctggtgtcgtccctgccaacgctgctgctgggtcggccaacggcaagttctacgaactcttctcggaagccaacgcggtgggcgtcatgcaccacctttccgtcgatgtaggctaccgcatcgtcggcaccaaggagcacgtcgaggccgagaactggctcgaggacgtgctccgccgctacgagggatcgcacgacaccggcacgccagacgcgcccggccgcacccacgtcgaggtcttcaagcagatcggcgacggcgcccaccgcttcgacttcatgtcgagcaccgtgtggaagcgatactactccatgtccaacctcgtggttcgcatctcggacggaaccgaggagagcaaggccaacagcctcctcctcaacgctcacctcgacagcacgctccccagccccggcggtgccgatgacggtgtcggcgtcgccatcctcctcgaggcactccgtgtgcccaccctgcccaacacgggtcgcagactgtacaactcggtggtgctgctcttcaatgacggcgaggagtcgctccaggacgccagccacctctacatcacccagcacaaccagaccaacaccggcgtcaaggccgtcgtcaacctcgaggcttgcggcacaagctgacccgagctgctcttccaggccaccagccaggagatgatcgaggcctactcgcacgtgccccaccccttcggcacggtgttggccaacgacgtcttctccaccggtctcatcctctccgacaccgacttccgccagtttgtcgagtacggcgacaagctcaccggcctcgacatggcactcgtcggcaactcgtacttctaccacacgcgcaaggacatccccaagtacctcgagcccggtgcgacgcagcactttggtgagaacacgctggcgatcatcgagcatctgtgcctcaagaacggcagcgtcgagctgctgcgcaacatcgagccgtaccagtcgcgccacacgctgcccatctacttttccatcgcgggtcgctactttgtcatgctgcagaacaaggcgttcaagagcatcgtcatgggactctcggcgttcatcaacttccagctctcgtcgacggtgcgcacggaggccaacatcggcgcgctcaacctcaccatcctcagcgccgtggcggcgatcgtgtcggtgatcggcgcggcgctcggcgccaacttggtggcggtcatcatgacgcgcgtgctcggcaagggcatgtcgtggtactcgcacgaattcttccccatgctcctgtacgggcctcccgccatcgccggcgtgctggtggtgcagctactcaccgccaagctcatcaagccgcacaagcgaccgtaccttgagcgcgcgagtctgtcgggtctcggcatctttttcaacatcggtctgctcggtctgaacgcgttcggcatcggcagcgcgtacctgatgatgctcgcctcgatcacgtttacggtggtggtgacgatcaacgactttgtgctcatcggggtgggacagatcgaggagaagctcgtggcgccggacaaccgcgcgtcggcgtacgtgtatccgatcatggcgctcatcccgggcatcgtgggcgtggagggcatggcgagcttcctggacctgtttgtgccgctcacgggccgcatgggcgagatctcgcctgcggaccacatcattgcctcgatcgtcgctggactctcgttcctcagcttcccctttgccatcccgctcgcccaccgatacacggccgagaacctcaagaagaccatcgtggcgctgctcgcgctcacggcggcggtgatggccgtgtttgccagcccgggctggaagccgttcgactcggcgcaccccaagcggctgtttgtgcaccaggtcgagaacatcacgtcgggcgagtggttcgtgaatgtgggtgcggccgacccggcgcctggattcggcgagctcgctaacgagctgcagtcgtacctgggcgtcgcgagcgagagccgcgcggagctgcaggtgatgaacgactacaactcggactttgacattctgtaccccgtgtcggcgttcctcacgccgtacaagttccaactgccctcgcccgcagcgggtttcgccaccaagtacgccgctccggcacccgaggcgaaccactttaccgtgcgcgccgccaacgaggtgatcgacctcgaggcgggcacgcgcagcctcacgctcgagatgagccacccgggcgtcatctggagcgtcgtggcgtttgatgccgacatcttgagctggaacctgcccagcgagcctcccaagggccaccagcgccaccacctcaagagcgtcgcgcgccacggcatctacgagtggtcggtcgacctcgtgctccgcctcgagggcgatgcgctcgaggcggccaagaagcgctccggcgccgcagcgcgcttcaagaaggccgtcacgggcggcgataccgaaggtcagctcatccgcaccgtcgccgacgcgcccatcgacaaggacgcgtcgaggctctggatcgacgcctccggtctggtggccgacgagatgtacccgcagcacaaacacgttgctgccgccgaccgcccggccatgaacacgtttgtcaagatggacgactacatgctccagaagcacccggagattgacgtcatgatgctcaccgtcgtcgcgggtgtctttgaagcctagacgcatagactactaccgcagcgtgcctcccacttagctcttgtacatagatgcctacatcgccgatctgcgctgttcaagttgtaacatcggtgcggttttgcc

SEQ ID NO: 12750 - DNA, 3407 bp, Oryza sativa
  ref <308>: DATABASE ACCESSION NUMBER: AK110098
  ref <309>: DATABASE ENTRY DATE: 2001-12-06
atcctgcgctatagttccctagggctattatttaaatgaccctgtcatagcgctgttgcccatggcggcgcccaaggtcgatctagctctacccgatctgtctccgagagacatgcacctcccaccgacgccaccagaggactatagcgatgaaaacaaggctggacttcagacgcccccgatgcagacgctccagcagttgctgacgccggacaacaccccgccgggcatggtcccacagcctcccaggcctctgctgagccgggatcccagctcgagggcagactcgttccggactgcgagggaagagctgtcgcgcgagtttttgcgggcggtggacgaggcagggagtcaagtggaggacgaggaatcgagcgaggacgagtcgctgcacaatggcgagcatgacactctggacgacgagccttggcgcgacatgcctggagcctttaacagcacgccgagcacgacttcgagcgaagatggtggagaaccggaacaatcgcttggtgctgtgagctctccaagcacgggctcgagcgacaaattcgtgcgaccaaagcaatacctggacgtggagagcccaccgagcacaggctccagtcgcaacctagagcgcacgaggaggtatcggcacgacacggagagccccagcgaccgacacaaagcagacggcagtacctcatatgcatacagtgcgcgcagcttcgaggcggatagcaaggattcggacgaagacgaacaagatgatgatgatgatgatgatgatgaagttgcgcacgaagagggagacaaggcaagcgtcgggcacgacttcgaacacgcaaatgaaaacaggcacgactgggacaatcatgtatcatacctttcgttgggaatcaaggagcaagaggacgctactacttctgcacgggcaagtccctccagttctcgtttgagtggaaatggtagaagagtgggagccaacggtgcgcagccgttgatcaagggcattaataacccgccagttgcgacatccgccgcagtagcagagcaaggacttctcaagcgggcttctgacgagagcagtcaccaacgcagcgacgacactccttctccgagtgtgagcgcacaaaagagaaagcagatggcagccaccagcaaggaagccacgacgccacgcgaggcacgcgaactccgaagaatcttgatgagccagcatgccggaaccgacatccctgctgaattcctcaacactcctcctcgcgacgccaacgacaccgtatacaaacacatccagcaggcgaacatggatcgcttcgacgccatgaagaacggccatgcaatcgaagctgtggttgtctcaaccgactcggcgcgcaaccggcatctgcgacatgttacgaagcgccaatcgctgcgtagcgtcagcgacaacaacagcgcatatatgcctagcggcggtcccaaacgggagtcatctctgcggccaaagaaagtgcggattcagccaaaagtgccgcagtcaaacggtcccgaaagcccacaaaccatccgctcagcgtcaggctctcactctttgcgccacgagaagcgacctctcagcggcactggtcgtcctctacagtccaatgacaattcacctgcgctctcacgtgcgaaggaacctctgccacttcgacacaagccaccatctatttccaaggagccgccgagacctcggcactcgtcactgcctattcacctgaagtctgaaccaagtcaggccagtccgacttctgtggactctgcaaagagcgaacgtcgtcgtgcgctcaggcgatcgtcaagagagtacaggattgagaacaaacatgctacagccgatcccgtcccagagcagaagcccgtcagcacgatcgtcgagactacaacgttcatttcgccccatcctctcggactcgggacacagagccgaagccgcagtcggggcactccactgtcggtcagtggcgtctcggatcgcacagagacggaagtgtgtgaggcgcaaaacgtagccttttatccccacagcaatgagagcctgctggtcgttcagcaccgctccaagcctgagcaaaaagtccaagacacggcgcactcgccgtccaaaacaaagggcactcgacgcttttccgacagcgataatgctagacgcccatcacctttcctttccgagccggccgtacaagacacacctgcgatcgcggtcaatggcaaaagtatacatacagtggagagtccgcttacgaacccacgtgcggcacctatgcctccagtgatcaatttcatacccgcaacaccttcacacgaagacgaagaaaaagagctcgttcccttggaagaagaagagattccaagcacacctcagcgacggaactccttggctaaacgagcgagacggtatagtgaggttgtcacacgcccgttgtttggccgcacattggtgacacgcagccataacattcgtccttcgccgacagcatctgagaagcgcgatgagagacttcatccaaattgggtgcccaacagcttctggcaagatgatgacgatgacgatgatgaatactattccgatcccgaggatcccttcgcgcggctgccagctggaggtgatacgtctgagcaccctaaagccaagttccctcgcaacatgagtgtgcgaatgcccggattccgtgggagcggcggcttcctacttggcaatagcttgggtgtcgacaggcacggcacgaataaacgaagacactacatcgaacctccctcaggcaatggctctgcatcagcatccaggcaatcagtgcgccgtgttgcttccctagattcaatggcatcccacgcgtcaggcgacggttgaatctttgtcatccccggcacacgaacaaggcttcaatacgttggcttcaagcccatcaaagacaagattaaaaagaggcgcgagacgcgagaagacgctgcacgagaaaagaggcgcgccgaaatcaaagaccaaatcggcatgcgaatcgtgcacgatgcttgagacaaaggcaagccgcaataccctaacagcacaaattttctggtgcagcccactgccaggcaatttggcccgaccatgatatgaacatgacgatgaacgacaaaacaactattctacccagctaacgacttttggatatgacgagatgcatacgcgcaagcgacctttggatagcactggatttttgacttattgcttttctctgtacacttacctcttgcagcgcatttccacgacatattttactgcatatgctatatgttgggaccagtggtgttgagacgtcatacacaggatcgtaacgagattccgtatcaaatgcgatctaataccatcgaaccacaacaccgctctacaactggtatctaaactccttgttcttgcg

SEQ ID NO: 12751 - DNA, 4310 bp, Oryza sativa
  ref <308>: DATABASE ACCESSION NUMBER: AK110099
  ref <309>: DATABASE ENTRY DATE: 2001-12-06
aacctctcccctcctcttcttctgctgtcgctgttgcatccacctcgaagcttgtcattcgcgcctacatattcaagctatcggatgcacgttgctcactagcacatacagctttcaaccacctatcaaaccacctatcaaagatagcacgaaccaccaccgtatcgcccaacaggttcggcctgcaattcgctacgccgacatccttcagccatcgatcttgagaatcaagtcgtatccaggcttttctctgtaaccttccacgcctctacttcgacattccatcctgctcgccgcctggccccgccatctagcacacgctttgcactccacccgggttcaagaagcgctagccaagggacgacccatctgaccattcctacatcagaacatgttcagtgccgcccaccgctcccttccgctcttgcccaactcttcgcatactctcggattcttctaccacaataccagaccgtcatcgtatcccgtgcatccaactgcaccgtagacggccgacaccacatcgtgtctctcccaccacccccccgcctctgcgtgagcgtgcggctctcaaccccgcattccaaacgcaaaagcaccccgtcgaagctgctgtggtgatctcaactcgtcaccatcctcaccttcgccgaccttccagtcgactctactcgcaccatacgggcaccgcatcgctcgtccctactccagcttcatgtctcgccaattcagcgcagatttctcacgttccgctagacgagcagactctgtccatcccctcacccaccgcaagagcctgcaggcaaagctgcagagcacgcccggccgtaccagcccgtacgcccgcaccggcgcatttaagtcgggccctccttcgcgctcaggctcgagcgtaggaggctcaccgcgtcccctttttcagtccgacaacgaactatccagctccacagacgacgacgacgacctaggctccaaacactttcccggcatcaaactgcccgtacccactctcgccatgtcctcccgaaaggcacccagaaaccaaaacacaaagaagccctccaaggtctactcgaccaagaaggatcgcgcacgcggcgaacgcaaggccagcgttcgcaaggagcgcttcgacgagctcgacaccgactcggacctcaccgacgtcccctcggatgacgacgcccaagacgatgcttccgtcgccggtccctcctattcgagcctgaacaagggcaaggcaaggagcgtcgacagcgatgacgacctcgagtcggactcggataccgagatggagcgcaagctcgccgaggcgggcgatggcgagtcgctgctcggcagcggcgcttccggcgaagacaccgaggaggaagaggagcgcttcatcatccaggacgccctcgaccgcgaatccaaggccaaggcgcgcttgcaacatcgcgaccccaccgaccgatcgcgccatgctggcgaccgcaactgggccagcaagggtgatctgcagcaccgcgctcgctccatggcgatacgccgggctaacggcgacggccagaccggcgaggctggcgatgacgccgaagccgacgacgaagacggcgatcaagatgacgatggcgatgatgccgacctgctttccatgtcgcccgacacgctgcgcatgtacggcctccccgtcatcgacgatgagctcttcgaacagcaagaggctttcaactcgtcctccgagccttccttcaccgactttttcgaaacctccaccgacagcgagacgggcgcgcccgacacgcagaacgagatcggcgacgacgacgacgaattcaccaccgactcggacgaagaccgagacatcagcgacctcgaaggcggcctgctcgatgcgccgctcatcgcccacattggcactggcagccccgaccagaccgtcgccacgtcggaaggtgccgaggacggctcggacctgcccaagcccgaaatgccgctgctcgtcatcgaggatctcgacggccgtctcatctacgccagggctggcgacggtgaggccgtctttggctcggacggcgagttcgagtttgtcgacgacagcgacgacgacagcgccgattgggagttcgaccagggcggcaaccgactctggtctggcgccggcagtcatgccggcttcctgactgtgcccgacgacgacggcgacaccacggatgagcttccggacgaagacatgccgtatccgcgtctgcttgtcggctccgtcgcgcctcgtggcggacgcaacgcgcgacgtgcgcgtgccatggccaccaactcgcgccgcctttcgcctgctgccagcagcaacatgccttcgccttcggcgctgcaacacgcccccgccgcggcgacgtcggactcgagcgcaaatggcaagcattccagcggatcgggagcctcgcccgtgtcatcggacgagcaggctgccaacgaggtcggcatcaccatctcgaccgaagacctggcgcgcgatcctgaaggcaccctccgggctgccgcagccgcgctgggagtcacgattcaggaagccgccgacatggtggctggtgtgcaggtgcctgcgatcgccggccaacccgccgacggcaccgatagctccgctagcagctccgtgcatgccgacggcaagatgatggcacccaagacaccggatcagcgccagacgaatgtggccaagcctcagatgggaagcttcatgcccacgtcggccaagtcggtgcaccgagccgtgattgacggttcgcgcaaggcgccatccccgttctcgggcaagaggagcctggaaaagaagggtctcgccaagaagcgcagcgccggacgcaggagctcgctgatggacgagggcttctctgccaagcgtctgcgacgattctcgtcggccaacgacgctgcctcggcgctggacgagtacagcgagttggcaccatcgtcgcccgagccggtggccgaggtggatccgatggagctggacgacgtggtggatgcgagcatgatctggcgcggcgctggctccaagtcgccgtcgccggaagcgccggacgcggagcgacgcccgtcgatgcgcgcctcgcgcaagtcgtcgtcgtctgcacctggtctcaacctcaacgcgtttgcacgatggaacaagatccccatgggctcgttccgcgattcgcaggctgcgccggtgccgtctcaaaacgcgttccagcagcagcatcagcatcaacagccgctggggacgttcctgctcacgcgctcgcaaggccagtcgggaagcagccgacgcaccaactcgccgttccgctcgagctcgaatgccgtgcgccatcccgagatgttctcgatcagtcctctgcgccagccgcaccaggaggtagagcagcctttggaagcgggccgctcgagcgacagcacgcccggtcgacgacgttcgtttatcatctcgcccgtgctgttcccgacgcgcggcggcgagattcctccgccgtcgtcgagcccgtacactgcgcatacgccgacgtacagccaggtggcggcgatgcgtctgggcggcagcggtgcgacgggcgatgcagccagtgtggcttccaacaccagcgccggtcctgggcgcatcacgcgtcgcgagaagcgcgagaagcgggcgcgacgcgcggcgttgctggctgcgcaggagaatggcgaggtgggctcgccgcaggatggcgacgagcgccggacggtgtcggcatcgccgatgccctcgacgccactgctgcagctgtcgaacctgccggaaggcagcggcggcggatacgaggagggcgactcacccgcgacggcgttcccgcggatgcgcatcactgatgccacacccacgccgcgcggctcgccagctccgttcggccccgcagcgccaggaaaggatctgctccagtcgggtgatgcaccgagcctcgcacctcccacgagcagccagttcctgcccgaggccgagctggatgcgacccccacgccgtcgatgcccagcagggctgcggccaaggacgatggcgcgagtgccactgcgatgctgccgtcgtcggcgtgcaagacgcccctgcactcgccgctgttcggaggcatctttggcggcgcactcaactacgatctcgaggacaaggatgccgagcagctgcgcatctagaccccgtgatccggcgacgtgcacaaggtttcggtggtttcagtctcatctcaagtaacaagcgcttgtcaggaaagcctgtttgtatgtacgtctttgcttcaccgcacacaatgattgataatggttccaagtg

SEQ ID NO: 12752 - DNA, 2240 bp, Oryza sativa
  ref <308>: DATABASE ACCESSION NUMBER: AK110100
  ref <309>: DATABASE ENTRY DATE: 2001-12-06
acacaactcccatcgttccgaagcatacctcttcttcccgcaggcccgcctcgatccactcgatacgccgtcggaacctgctagactcgtcgcatcgacgctaaaacctcgaccctcgtcctcgcacactcccacatccgcacatccatcaagatggccaagatcaagcaaaagggaaagtcgggtgcggccaagaactacgtgacgcgtaaccaggccatcaagaagcttcaggtgacgcttgccgacttccgccgcctttgcatcctcaagggcatctttccgcgccagcccaagagcgtccgcaaggccaacaagggctcttcggcacccaccaccttcttcttcgccaaggacattgcgtacctccagcatgagcccgtgctgcagtcgctgcgcgagcacaagacgtttgccaagaagctctcgcgcgccatcggtcgccgcgagtgggccgccgccaagaacctcgacgagagcaagcccacgtaccgactcgaccacatcatcaaggagcgctacccgaccttccgcgactcgctcaaggacatcgacgatgcgctctcgctcctcaccctctttgccaacctgcccgccacggacaaggtgtcggccgaggtgatcgccacatgctcgcgcctctgcgccgagtggcagttgtacgtcatgaagaccaaggcgctcaaaaaggtcttcctcagcatcaagggcatctacttccaggccgaggtgaacggagagaccatcacatggctcgtcccttacctctttacgcagcacatcccctcggatatcgacttccgcatcatgtacaccttcctcgagctctaccagaccctgcttggattcgtgctcttcaagctgtacaccgacgagaacctcgtctactcgcccaggttcgacgccaccaaggacgagcaggctgccggctttggcgcgctcagcctcgacccggccagcgcggctgtgctgcgtggcgagaacgcggcggccgtcgctccctcgacctcttccaccgtcatcaccgcatccggcaagaaggtgtcggcgagggacgtcaagaagcagatcaaggcgatcgccaagtcgggtgccgtggccgacgacgtggatgaagcggacgaggcggacgaggaggaggcgcaaatcgaggccgagcaggaccagtttgtggagcagccgtccaagtcggccgaggagcaagagtcgtcggcgcacctcaccacgtttgacgagatccaggccgcttcggcggcgagcgaaggagcagccaacgggctcttcacgccgtacgtcttctacatctcgcgagagtgcccgcgtgcggtgatcgagtttgtgctgcgctcgttcggcgcgcttccgggccgcatcggctgggacatggtggccggtgccggcagtgcggtggacgaggacgacgcgaggatcacgcatcacattatcgacaggcccgtgcacgctggcggcatgaagaagtacgcgggcaagcgcgtgtttgtgcagccgcagtacattgtggactgcgccaacgcacgcaagctgctgcctgctggcgcgtatggaccgggccagactctgccgccgcatctcagtccgtttgtcgacgatgccgaggtggcgcgtcgcggcggctacgtgcccgaggaggcgagggagcagctgggtctcgaggccgatgctgccgccgccccatcggacgacgacgaggacgacgaggatgtggacgaggagagtgccgacgaggacgaggatgcggaggaggaaccaacaagcaaggccgaggagtcgtcgcgacctgcgcttgcagcgttgttggccgatcctgcggatgccacggatgctggcctgctggatgctgccgagctcgaggcggaagcggcgggtggcgaggatgcgctggaggagatgcgacgcaagcacgccgcagcgctcaaggaggccaagaagaaggccaagggcagcagcgccggtggagcggcggcgcgcaagagcgacgagcaggaggccaaggagatgaccaagatgatgatgagcaatcgccagcgcaagctgtacgaaaagctcaactactcgtccggcaagcgtgccgaagagaccgccaagctgcagcagaagaagaaggcgctcaacaagaaggcccccaaggcgcgaaagtgatccgccctggcctgcattgcattgcactcattcttgcgttgttgttgtgttccgggtatcaatgtcatttcgtatatcgc

SEQ ID NO: 12753 - DNA, 3728 bp, Oryza sativa
  ref <308>: DATABASE ACCESSION NUMBER: AK110101
  ref <309>: DATABASE ENTRY DATE: 2001-12-06
atccatcacaccgcatcgcctctacccttcagcacctcagctcgctgacatgagccctccgagatgagctagctccgacaacgagcgatcgcatcgcattgcattgcatcgctgtggctccatttccgtccctcacccgcccgcaaggcacaactacaccaccatccttgtcgaggacaggcgccggtacaccttggatctcattcccgctcattccaccatccagtacatataccgggctggctgcactcaacgctgcagcttgttccgtcgcgaaaactgcgctcgccgcctcttcgactttgactgttgctgcccagccctgttctgccaaagttccaggacgtgtcggatgagccgactcgagacgctcggacccgcttcactaggattctatgctccctacgtcgccatctcagcaatacgtctctctaagagctgccttgtctaacgcccggatcacacccgaaccatttcgccggccatggatcgaccctatccctatggcggctcttatgctgccaatgacacgagtctcccccgcttttcagctcaaggcgatgcggctcctgcctccgcctcgtatgacgatgcgtccgagatgccacgcattcagaagcgtccgcgtcgcacccacgccagacgctcgtgccagatgtgccagcagcgaaaggcacgttgcgagctgcccgacctcgaagtgccctccagccctttgcccttgcctgatcaccaggcttgccatcgctgcaagacgcttcagatatcgtgcatcgtcgacgatgccaacaagaagaagcctaggaagaatactgccgacactgatcccgcccagcccggctcctccaaacgcagagcctctgccagcgtcgctggtgaccgcccacgcaccatgcggaactcgtccacatcggcatcgctttcctctctcggcgacagacgtagtatcggaagcaatcgcagtaacagcagcgccggcatgctcccctccggcctgcccgatgcagatgccgacagtctcaagttcgccggcggccgcgagctcggcaaccagatcgtataccccgccgaggcaaaactcgtctcaaaaacgccagatacctccgacgaggacgaacagcctgatcccgccaccgatttctcggcacgctcagatcgccagccggatcggactaactcatcggaaacctacatcaagactcaggaccgcggcccaagcaacgccgccaacattgacacctgggagcgctattccgcgcgcagtcgcccactcacgctgctcaccgagttggtgcctcgacaagcgggcttcgcatccaagatcttccgcctcgtctcggcacgcgcaaccatcgagaccgacgtctccgagatcatccccgacgcaaaatccaagattctcagtgactggtgcgaggagaatctcaccctgtggatgccccacatctccaatgcctaccagctccgccaagatgctctgcagggaaaacagacgctgtccacccagctgctcgaacaagtgctctatctcatcgccctgcaacacatccgcgaccccaaagacgacgtcgcccgtttctccgtcgtgcgcttcgtcattcgcgacacggcacgtctcgtgctcacctcgccgcgctcgagcaagggcgtcgaagcattagagctgctgtctctcttccccgtcgacgtctcggccatccccggcccctctcgcagccgcatccggaccgactcgctcatcagcgcctccgagcgagtcgctcgctcggtccgcttggatcgtgtcgcaatatccgcagctgcaccctactcattcttctcgtccaccagccctttggacgagttcgagacgaagcgcaccgccatgacttgggccagcgtcaaaacgtggctcacttcattcacgctaggcgatgacgagctcttcgagagcgtcgaccaacgcttcttctcagacgactggagccgctccttgatactgccgctggagctcagccagaccgacgctgcagcacgcctcgtcgaggcagggcagagcgaaaatgatcttttcgctcgcaaagcctggtcgcgcagccgtcgtttgggcagcatcggactcgccatgcgctgcctcggaatgcggcggctggtcgaggcattccacgccatccgcaccacccctgtcgacctcgacgagtcggatcgtctctacaggctcgccgattctggacgactacaaacgtagcgttgattccatcgacgacgagtttcgagaccgtctcgccgatctcaaccaagacttgcacctgcttcgctcgtggctctcgatcgagaccacggccggctttctgctcgtcctgtgcatcggcatcttgcgcgggctgggcatcgacaagaaggaagacgtgcagacacaggagttggctctgatgattcgtggcgagaacgcttcgtcagagatgagggagttcctgacgcgctatggcgagcaccgcattctggctgctgaaaaggtgctggtcaacaccacgatcctttgccgagatgcacgtgccagtgctgccaccatgctatccggcaagggttggatgagggacggacagtcacgcaccgtcgttccgaccatgaacttgtgtggctacgcgctcgaggcagccttcaacgctatggagtggcacgctacgatgttccaattgtggaagacgccgccgaagcgcgccgagtcgtggcgactggtcttttccgacttgatcgccgccatgctctcgctggatcctacgggctcaatcgagaacggcagcattcctgccacgtgcgcttttattttgcagggcatgctcaaggtcattgtgctgtggacgcagtgcagtcgtaacaaggacatccagcgcaccacgtccacgtcgtctgccaacctcaatggtcgtgatgggtccagcaacggccgtgactcagaccggtactctggacaatccttggcaagcgctgcgcccgcggctgatctggcgcggtacgaagcgttgatacaacacgacatggcgacgagccggacctttgatgcggtgcaatcgttcgactcgagcgcaaacgctgctttgatgggaaactcgaacacgatgcgcagtgatcaacacgggccgcggtcgaatccgtacagtatgactgcgtcgatgtttgcagccgatgtttcctcgtcgcagaggaatgaagctagcctgaacggtgcaggtcctgagttcgcgtcaaacgcgagcgagtcgctggcagccgcgctgcctcgcagtgtcgagtcccaggcgaaagcgcccgggatgtcgacggagcaaggggcattttcagcgtacagagcgccgccgatgtcctccatggacggatccagcgcttcgggcacggtttcgccgatgcccctggctgcacagtacacagctgtgggcaacggcaacggtacggcgctcgacggcggcgccgcagtgccaggcgcccatttcagcatgcgaaacgaagagggccgtccatcggtggcatacgactcgctcgactttatcctcaatgacgtgcttggctcgtcgcagtggtcgggcattctgcaggacatctggaggacggacatctagcctcgtctccacccggcacgattcgaacgcagaaaaagtcgcacaacgcagcgatccggacgatgcaagtgcagtctgggtgtagcaacaagtctaggttaaggaatgggaatcgtaatctgggcgtaaagc

SEQ ID NO: 12754 - DNA, 2934 bp, Oryza sativa
  ref <308>: DATABASE ACCESSION NUMBER: AK110102
  ref <309>: DATABASE ENTRY DATE: 2001-12-06
ctcccagagctgtaccttcttggtgaattcttgagactgctatctgaggcaggttcctcacgtttttattatccgcctcacagtcgcgttttattatcgtatccttttaaacatagcctgacactctttcgttttcgatcctggcaggtcctcgtcgagcaagaccctcgtgttccatcatcaacccatcttcgggccaccgcgtctgacgttcccacttcaaacacctgtatagaggaacgtgttgcagcgcaccatgtatccatcacaacaccaccaacagatgccgccgcctcaggcacgatctgtcgcgcccgagactttcttattagaccaggacgctcagcaaagcctcccgccggacagtgtcgttgccctgcagcaggtcgacaacctcaagtacttccccatatcagcgcccgttgactggcaacccgaccagtacattcgccgctttcttctaccaacaggcgaatacgtctcgtgtgttctatggaacaaccttttccacatctcaggcacagatattgtacgatgcttgtcattcagattccaggcctttggccgcccagtgaagaactcgaagaagttcgaagagggtatcttctcagatctgcacaacctgaaatccggcacagatgcatcgctcgaagagcccaagagtgcattccttgactttttgtacaagaacaactgcattcgaacacagaagaagcagaaggtcttctactggtacagcgtaccgcacgacaggcttttcctcgacgcccttgagcgcgacctgaagcgtgagaagatgggccaggaggcaaccaccatggcagtcagcgagcctgcgctctctttcgagttcgattcatcacagtcgctcttcgagcagcttaccaaggcacaacaaacaaactcctcgtcgttcaacaacaacgtgcagccttcttaccagagcacatcgcctgacatgcgcgagatgtccatgcctccaccaaccatggtccctgtccagcagcccatgccccagatgcagcagcagcagatgcagcaaccaatgcatcacgaggacccaatggcctagtaccaccagcaaatgtcaatgcctccttccatgcaaaacacagtcgtcaagagccgagagcaccgcgagctcagccagtctttccagtacgaccgcaacggtatccccttgtcgcaagtccaccagcgtcacagctcgatgcctgcgtacatggagtactcgcctgcgccatctttcgtctcttctcactacgaggattacagcactcgcggcatgtccttcgagccattgacccctcctcaacaccagattggcctcggtgctgagcctgcctacattgcgaacgaggacactggtctttacagcgccattccagaccttccagttcccaacacattcaaccctctgatgaacatgccaccatcgaacttgatgggatctggctaccctggtgtctcacgaccattcgctcctggcaatgtctactccgtcatcgaaggttcgcctacctacaagcaacgccggaggcgttcgtccctctctgcgggcgtcgccgccgctgtcaccgcttccggtgccggtgctcaccaggttcaccgcccaagtgatctgaggcgatcaatgtcaagctccgtcgttccccttgctgaggtcgacgagtcaaaccacaactcgcccaacagccagaacggtacaagctaccctcagatgcctgaggcgaagcctcacttggacatgtcccgacagggtaccccactcaacaccgtcgaagagagcccggagccacaatcggcttcgctgcaccacgacgacctgaacaccctggtcaacggcgagctgtttgagagccccctccagcacagcgcagtcgctcgtaccgctggtgcaggacccgttttccgacgcgcccgcagtgctaccatgatggaaatcggcccgtacccccagaaaccgcactcctgcccgatccccacatgtggtcgtctcttcaagagattagaacacctcaagagacacgtacgcacccacacacaagaacgaccatacgtttgcccgttgtgcaacaaggccttctcgcgctcagacaaccttgcccaacatcgtcgcacacacgagccccgcgctgacggcgagccgctgagcgactaccaagatgaagaagaccttgaaggcgaggatgaccacctcaactcactccaagacgagctttcgcccgagtctggcaacgagtacctcggcctgtcgcactctatcaacgatattcccggtccaagactcggcatgaccatggcgccaccacaacgcagcctcatggccgccagccactactgagcataccctatcacgacgttacacacgtgacatgagcatttcggcgcaatcaagggcgcagccatctagaaggataccagtctgctgttttttgttcaatcttcttgttccacttcgcgtttaatcctcttagaccgatgtctgttcttgtgttaccggcatacactttccatgtccgcgctgcatctgttttcctttttcctttccaaccttcggagctaggggatggtgtgataccaccggcttttgggggattgggtgacgacacaacactacgaacatgagtaccacttctttttctcgtctcatcgtttcacgtttctttctcttttttcttttctttttctgccctttccgatctgttgctcagcgcttgttgatggatatatccttggtggcatggtttgctttgttgcaaaagttgtttgatggtggactgggaagtttggataccatttgaagcgcacgtatacgcatatcgttgctgttttatctttgaagatatgcaggtagcttggtggtttacgtctgtcctcttcaagaggcggcgtgtgtataatatttgaactcaatgcaaaacgcataactgc

SEQ ID NO: 12755 - DNA, 3249 bp, Oryza sativa
  ref <308>: DATABASE ACCESSION NUMBER: AK110103
  ref <309>: DATABASE ENTRY DATE: 2001-12-06
atgaggatctcggcagcggtccaccatgcgcctgccgtgcacccaacgacgagggcaccgacaccacctcctaccaagtcggtgctgaccacgcctgtctcaagaacaacgagcccgcgtccaaagaaccttcgcccatcaccgtcccctgcaagctggcgtgtgagaacaaaggtctgcttcgactcaagagcggtcccgaaaccctctttggttggggcatggggtgggcctggtcggctgccgagatcctcatccagcaggaccagcaaaaggcaaaggagcagggcaagacctttgacgtcggccctcgcaccgagcgcgaagccgtgctccgcgccatctgcgagagtctcccgtccaagcagatggcctaccagctcatcgacgtctacgagtccagagttcgctatctctgcggccacgtcgtgcacgtgccgtgcctcaagcgcgagatggaggccttctacgccttagactcggtcgagaagcgcgcgcgcgttgtcaaccacgtcgacccgggctggctcgccatgttcctctccgtgctcgctctcggcctgcgcttctacccctgctcgcccaagcccggctggcagcccgccaaccacctcttcgacggcaagaccatctacgcatggcactcggccgcaaagacgtgcctcgtgctcgcaaactacctcaactccacaagcatgagcgtcatccaggccatcctcctcctctacctcttcacctccgtctcgggcgccagctgcggcggcgaggccgactcgggaaccaccaacaccgccctcctccgcatcgccatcaccaatgcgcaggaaatgggccttcatcgcctcggcgacctcgacaagcagccaaaacccaacgagccctcgtccaaggtcatccgcagggagatcgcaaagcgcatttggtgggcgctcgtcttccgcgactggagcgcaacaggcaccggctgctccaaggactacatcatccgcgcagagcatttcaacacgcccctccccggcaattacaacgacgaggacctcatgattacgccgctccccgccccccggccgcgcgaggagttcaccgaaatgtcttacgtgctctccaacctcgagtttggcatggtcgtcaaggaggtcgtcgacgtgcgcttccgtcgcgagttacatgcagccaccaacggcggcgaccgccgcctcacgtgcgtcgaggcacaacgcctcgatgtgctctaccgcggcgtcctcgaaaacgcacccagctactttaaggtgggatccgagatcggccgcgtgacgtgcatcgaggtgcagcgctggctgctgcagcaggccgtcttcagcaagctcctccgcatccaccgccccaacctgtcgagtcgcaaggagtcgcgcaccaactgcgtgctgctcgcacgctccatcctcgacatgcagaagaagatccgctcgcgctgcaccgtcatcgaccgcctctgggtcaacctcatgcagagcttctcggcagccatcgtgctggcgctccatctgctccacacgcgccccaccgccgaccaccgcgagtctgtccgctccgagatcaccgaggccatccgcgcgctcaagcaggtagacgggaacgactgcgcagccaagaaatgcattcgcgtcattgaggccttgcttgaggaggaggcggagcgatggcaggcgggcaacgctgccctcgcacgcaaggacggacccggtacgcaggaggccgccaaacctaagcgaaagcgccagatggatgtcgacgccgccgacgacgagggcgccgcctcgtcgggaggcggacgcaggaagaacctgctcagtctggcgcagcgagtggcgcaggccgcgcgcgaagatggctctgcggccaaggcgcgctcggcgccggccccggtcgatgaggcttctaagcgtcaggccacgatggctgcggtccgatccatggccgacgacggcagccgtgctgcggcggaccgatcgctcgaggtgaacggcgtcacggcgctcaaggacgatgcttcgctcttccgcatgaacaacatcacgctgccgacgtccggtccgagcccgatgtccatgtcggcgcaggccaacacggacgacgtggcattcccgcagatgctgtcgacgatgccattcccgagcaacctgttcaactttgacggcagtaatgaggccgcccagcgccttgtgccgccgaacggtgtcgatctgatgctcaacaatcccatcactccgccggatggccagtcgtttgacctggccgcgttccttgagcaggtgcagaactcgcccggcagctcgaccgatgtcagtctttcgtcgggacacgacgagcgctcggcgtcgacgagctcggacgtgtcgggcatggacgacaaggcgtccggctcggcctttggccgcgcgagcaccagcagcgtcggcgacggcaccgacaacacgagcgtgtcgaggttcggcgagccgctgctcaccaaggaggccatcaaccgccagcagcagcatctgcagggagccaatggcgccagcgtgcttgcggcgaatgctggcgtgggtgtccctcaggcgggctcagcggcgacgggtgcggcaaggccggatgcgtcgacggacatggactcgttctggaactggatcatcacccagggcgccaacggcatcactgccaatacgggtgcggcgggacaggcggcacccgtgctggtccagcccgcgcagaacaatgcgacgccgtcgagccaggccagtgtcggtgcaccagtggctgcgcacgttacgccgcagtcggcgcacagcggattgacgccgttcctgggtccgaacggattctttgccaatgccggcatggatcttgccaagggtggtgcggcggtgcacggatatccgacaccgagctccatggcgtcgtcgacgccgccgagcaaggccgagcctgtgggtgcgcaggcgactcagccgagcacgacgggcccggctgccggcggcgcgttcggcgacgatgcgcaaaaggcggatctgctgtcggtgggcacgccgagcgccggctttggcctcgagagcttcctgggcgcgccgctgtacgactttaccgactttgccaatgcctggacggcgagcaacccggcgagtgcgggtcaggtgggcgcgagcatgggtccggtctcggatccctagtgagctccccagtgtatttttaactcaggatgtgcgtgcaatggtaccgcgtcagtct

SEQ ID NO: 12756 - DNA, 3162 bp, Oryza sativa
  ref <308>: DATABASE ACCESSION NUMBER: AK110104
  ref <309>: DATABASE ENTRY DATE: 2001-12-06
taactcgacggatcgcacggccctcgtgccggcgacgcatcattcaaatttctgccctatcaactttcgatggtaggataggggcctaccatggtggtgacgggtgacggagaattagggttcgattccggagagggagcctgagaaacggctaccacatccaaggaaggcagcaggcgcgcaaattacccaatcctgacacggggaggtagacataccgcacatccaggaacgtcgaacgtagatcagagcatgggtctggcacgctcaagcttcggcaagcgcgcatgcttggtgccatgtccgaggacgcctactagcaggtcagcgctcgcgagcaggactgcctggcctcgctcggcagtaggatgctccaaccctgccgccaatgcaccaagttctcgcagtgcagactccacacttcagtctccatatacttcggctcgctacttttcgtcgtcgccacgctggtttgtggccgatagcgggctgccccatgcggaaaagcaccctgttgcggcgttgcgcaacatctcgatcatcgcgcacatcgatgcgggcaagaccaccctcacggaacgactgctgcacctcacggacgctctcgctggaaacggcggaagcggcagcacagctgcacttcccggcgacgttgattcaggaagcacggtgaccgactttctcgagcaggagcgccagcgaggcatcacgatccagtcagccgctgtgggccccgcttggtggcccaagccatccgtctccaaatccaccgacacaagggagacggtcggaattacgctcgtcgacacaccaggtcacatcgactttggcatcgaggtggagcgcgcactgcgagtagtcgatggcgcggtggtggtgctcgacggcgtagagggcgtcgagtcgcagacggaaaacgtgtggtcgcaagcggcgcggtacgacgtcaaggcgtcgattctgttcatcaataaactcgatcgcatgggaagttcggtgacccaatcgctacgcagcgtcatccgctccggtatgcatcagcgcccgctgctgctccagcttccgatcccactcaagagcaaggacgaaccgggcgtttctggccttgtggatctcgtggagatgcagacgctgacgttctcgggcaaggccggcgagacggtcaatcgcaaaccgctgcaggaggcagacgagatgtacgcggaagccaagcaggcgcgccatgcactcgtcgagtgcctcgcctcgctcgacgaccaactcctcgaagagctcttcagcctgccgacgagctcgaacgaggaaccgcacggcaagatgccagcagcttcgctgaggcaggctatccgacgccagacgcttgcgggtacggtgctgcccgtgctgtgtggctcggcagccaagaacgtcggtgtccaaccgctgctcgatgcgatcgccgactacctgcccagcccggcggacaagccgagtgtggtcggaaacgtcgctcaccgagccggcaagaacgacgcgaaagcagatgcgggtgcagaagtatcattgtcgctcagggacaagcgcaccacggcactcgcgttcaaggtggtgcacgacaagcgacgcggtccgacgacgtttgtgcgtgtgtactcgggcacattgcagcggtcgtcggtgctattcaacacgacaacaggtgcacgtgagcgtctctcgcgggtcttgttcccctttgcagaccagtatgtcgagacggcgagtctgcgcgcaggccaaatcggcgtgatccttggtcttcgcgacacacgcacgggcgatactctggtcgatgtctcctccacccccgctggatccaagagcgacaagggtctcgacgccgcggacgccaagacgctccggctcaagcgcgtgcacatcccgccacccgtgttcagcatgtcgctcgagcccgcaagcaagtccgatgtcgacgcggtctcggacgcactcaacctgctcattcgaaccgatccctcgctccgactcgacgagggctcctcagcaggcgccgggacaacgggtcagaccgtgttgagcggcatgggcgagctgcacctcgagatcgccaaggaccggctggagaacgaattcggcgtcaatgcgagaatgggcgctgtgcgggtatcgtaccgcgagacggtggacgagggcgcaggagagctcgaggcaagcgaggtgctagagagggatctggcgggaaagcgcataaagatcggtgcgaggattcgagtgagcgcgctcgcagaagacgagcagcacaggatcagtcagtcagacgcagccgtattcggaggtaacgtcgtcgacgttgttctcggaacacctccatccaacggtcaaagtgcatctggcggcaagggttcttcaaagtccactgggaaggaggactcgactacgatcggtctgccggcgggggtggacatggcgagcgtggaggcaatgttcaagtccggcatggtcgctgcgctgtctcgtgggccgctcacctcgaatccgctcatgggcctgcgcgtcacggtggacaacatcgagatgtttggcgacctttcttcgtcggcagccatctcgtatgtgctttcgcacctcgtgcgtaaagtgctgcgcaccgaacccaagctcgacccgcagacgggtatggtggtgcagcccggtcaagcaaggacggtgttgatggagcccatgatggcgacacgcatcactgtgcccgccgtgcacctgggcaaggtgatcaacgacatcaccgccgaacaagacggcttggtcaacgatgttgtgcaccagaccaactcacaggatggctctgagaccgaggagcaggctgaggaggcggtttacatcccgccgcgcgagagccggttcgagatgcagtcggccagcgctgcgtcgggcaagggcgatgcggagaagcaggcaggcaaggcggagatccatgccgtagtgccgctggccaacttggtgcgctactcgtccaagctgcgtgcgctcaccgcgggcaatgcccagttcaacatgcagctccagggattcgcacgcgtctcgcaacatagacaggccgggatcctcgccgacctgggccgatggtgcaccagtctcaaccactcttgtaccaccaccactttgaacaatctacgtttgcattgg

SEQ ID NO: 12757 - DNA, 3750 bp, Oryza sativa
  ref <308>: DATABASE ACCESSION NUMBER: AK110105
  ref <309>: DATABASE ENTRY DATE: 2001-12-06
atcgaacccctaagatgtcccagccctagaacagcgactgtacgcatatactgctctcgctacccaagaggatccgctcgaaaagacgtaggaacctgccaccatggcgacaacagacagcgacatggcagccgccaagcccaacgacaactcgaagccgccgcgtgctgagccaaacaaggcctcaaagatgccggcgtggatcgtggacaatctcaagtcggctcgctcgctccgcatcctcgcacgatgctgggtcgcaagctgggctgccttcgtcctcatgatccccggaccgcctctgcgggtgctcggacaggcggcgttcttctcgtgcatgctcacgctcatggtgccaccctcgatgccgttcttcatctttgtgctcgctttcggcatgctcgtcgtgggcgccttgaccggctgggcatggggctgtgcggctgctgccgccgcttcgcgcgctagaagccagcagctcttgcagtccgccgtgggcagggtgcgtgccggagcagcaagcgccaccaatcccgaggcctacgtcaccgccgccgtcttccgcggcgaatacctcgacgtgcgctccaccgccgtctacggagtgttcctcatgctcggcgtctacctcgtggccgtcatgcaggtcaagctgcccaagctcaagatcggatccattttcttgatgatcgtgctcgacatcatgaccacctacggccccctctttccctacgcacgctacacgcttggcgagatctttatgattcccatcggatgcgccatggccatctgtcttgcggcgcagatcctcatcttcccagagaccctctcgtactcgtggcagctcagcttcgtcgccatgttcgacaccacacgctctttgctccatctccacactgacgcactcgcagacgtggccaagcatcacgaccccgcctccacgccttcggctcgtccgcacctcgaccagccgtccagcgactacctccagctcagcctcaaggcggaggaggaggcatccaccacagccgccggtctgctcgccaaagcgcaggccaaccgtaccgccctggccgagcagctcgaaggcttaaacggcatgaccgcctttctcggcatggagttctaccgctcctacttgagcgcgcacgacatgaagctcatgtacagaaagacgcgctcggtcaatctgcagctcacgctgctcggctccttctggcgtctcgtccaccacgagctcggcatcagcgaccctagcaccttccacgaagagcgcgatgcttccgagttcgaggatggctacgacgtcgatgggcaacacggcaccgaggcggtgccgaccaaggagaagctgcagcccatccggctgcacgagacggtgacctccatcgcgtgcgtcgcgacatctttacgagcgaggcgcagcagcaggtcaccatgtcgcgcatgctcaacatcctcaaccgcgtctcgcagccgtcgctcgaggctgcagccgactcgatcggtgcggtgcaggcgtactttggcgccaacctcgcgtggaggcagaagcagcccatcgaccaggtgctcgcccagctgcacgagtcccggtccaagctcgaaagcacgcgccgagatctgctcaacgaccgccgtctggagctgctgcagccgtatgccgaacactttcgcgccacgcatccggatttcgacctggaagagcactttctgcagaccaaggagtccatccactcgttccgctccggtgcgcgacctctgcacgtctgcctcgtgtttgtgacgaacctcatcgatacgctcgagtccatctcgcagttccacgccgagatggtggcgattgcggatcgcgcaggcaccaagaagcgcatctggtggcccaagcatctcggacgcctggtgcgcgtgctcacgagcgacaagcgcggctcctcggacggtctcgatcgattcggccccgccgagggcgaattcgagagggaagacgacatggaccgcgactttcgacaggatcgtgctcataccgcttcggatggcgcatccagccaaggtcacaatgtcgccgaccacctcgagggcgagagcgaggcggaggatgacgacacgctggccgcacagtccggcactccacgggatcgagacgaggagaaggctgctgtgcctgccaaggcgaagaaagccaggcgggagcgaaagcagacgcactacgctcgcgatccggacgcccttccgccgacgagtgtggcgcaccggatcggacgcggagtggcggcgacgtactactttgtgagcgggccgacgggggtgtttgcgctgcgcatgtgcattgcgacgtttgcgatctggatcacggcggtgctgcccaacacggcgcagtttgtgtacaccaaccgcggcatctgggcgctcatcatggcgcagaccgccgcggcgctctcgggcggcgagctggtgtttacgtttgccatgcgcttcatcggcacggtcatcggcttactctacggcgccgtgctctggtacatttcgacgggccttggtcgaggcaatgcgtatggaatcggtgcggcgacggcggtgggtttcctgccgctggtgtttctgcgcgtgtttgcgcccaagatgctgctgctgccagcgatcatgctcaacgtgtcggtggtgctgattgtgggctactcctggatcgacacgcacctgcaggtgacggtgaacagcggcgtgggcatcgaggtcgcgtggaagcgtacgctgctcgtgatcatcggcatggcggtggcgctgatcgtcatggtgctgccgcggccggcgtcgagtcgactgctgctgcgcaagagcatggccaaggtgacacgccagctcaacgagctgtttgtcgaagtgatggaggtgtggatcgcccgcaaccgcctggtggagcaagagtcggaacgagcccagttcgcgaaccagctcgacacgaacggggccgacgccaaggtttcgagcaacgaggcgattctgcagctgtggcaggagcgggagtcgttgatccgcgcgcgattcatgggtgtgaatgcgcgcgtggccatgtatccgatgcagatcgggcttgccacgatggacttccacatccgcggacgctggccggccgagcggtacgtgcagatggcgggcgtgcatgcgacgatcgtggagtcgctcggagcgatcctgtgcagcgtgcgcgccttcgacggcatcgcgacgctgtcggagggcgacaagccacgtgcaactcctggaacaaacgcacgaagccacatggactgggaggtgatgctgtcgtcgtcgacggcgttgctggatccgcagtacctctccgagatctgcctgacgtttgacgtgctttcgaaagcgctgcgaaacggcgagcggctcaaccacgcgtcgttttcgctgcaggagaaccacttcaagtattctgctcgcaaccggcgcatcggcgagctgctccgcaagggcgctgacggtggccgtggagaaggctcggacgtgctgcgatggagcgttctgcgcgatccgatgtatttgcgctacacgacggcgaggatggcggcactcacgttggctacggagctggacaagctgcgcgcgattgtgcagtcgctcgtgggcgaaagctcgctgcgtggcttcgacatgctcaaggaccagcacgacgagcgactgtatcgtgtcgcccgccaggcttagatagcctatgctttatcgttgaatgccagtgaatgg

SEQ ID NO: 12758 - DNA, 3302 bp, Oryza sativa
  ref <308>: DATABASE ACCESSION NUMBER: AK110106
  ref <309>: DATABASE ENTRY DATE: 2001-12-06
atcgatcgatccatccatccatctcttcggcccttccgaccctgcagccacctcctccatacccacaacaaagctcggaatcgccgctgagcacacgctaccatggcgcgcttcgacgaccacatgcccacgcggcccgtcgaccgcgacgaggccgagtccgagctctcgatccacatcaaaaaggccaccagcaccgaagagaccgctcccaagcagaagcacgtccgcaagtgcatcgtctacacctgggactaccgcacctcccaatccatctggaccggcctccgcgtccagcccatcctcagcgatgaggtgcagaccttcaaggcgcttatcctcgtccacaaggtcctccaggagggtcaccaagtcgtgctcaaggaggcccaggctcagatcggatggttcgagacttgcgcccgcaccgtcggcgccgacagcatgcgcggctacggagccctcatccgcgcctatgtcaacttcatcctcgccaagctccgcttccaccgccaccacaaggagttcaacggcctcttcgaatacgaagagtacatctccctcaagaacatcgacaaccccgacgaaggctacgagaccatcatggacctcatgaacctccaggaccagatcgaccagttccagaagctcgtctttgcccacttccgcggctccgccaacaacgagtgccgcatctccgccctcgtacccctcgtcaaggagagctacggcatctacaaattccttacctccatgcttcgcgccatgcaccgtcgcaccgacgccagcgacgctctccaaccccttcgcgagcgctacgactcgcagcaccattcactccgcaagttctactacgaatgcgccaacctcaaatacctcacctccctcatcaacgtccccaaactcaaccacgagccccccaacctctttgaaccccccgaagagggtccctacctcccgcctcgacagacgcccaaggcgccaaccccagaccccggcccatcccaggcagagatcgacgagcaggcgcgcttgctcaagcagtacgaagacaaacaggcttcgctcaaggcacaggaggaagcagaaaggcaacgacaagccgacctcgccgccaagcagcagcgcgactttgaggagcagcagcgtcagcaggccgaacagcagcgtctcgcacaagagcagctcatgcgtgcacagatggaccagatgcagggcggtcgtctcgccgagctcgagcgcgaggtcttagccatgcgcggtcagtacgagcgcgaccagctcatgctcgagcagtacgaccgacgtgtcaaggcactcgaaaccgagctcgccaacatcggccagaactttggcgctcagatgcagggcaaggacgacctcatcaagcagctccaggatcaggtcactctctggcgcaacaagtacgaggcgctcgccaagctctactctcagctgcgtaccgagcatctcgagatgctcggcaagtacaagcagatgcagatcaaggctggaagcgcgcaggaggccgtcgacaagatggagcgtatggagcgcgacgtcaaggccaagaacctcgaactcgccgacatgatccgcgagcgcgaccgcgcccgcttcgacctcgaccgcatcaaagccagtcagaaggaggagttcgaccgactcaagcgcgacctcatgtttgccaacgagcgtgcagaggatgcgacgcgcgccaagagctccgagctctcgggcatgatgtccacgctcaaccgccagatcgccgagctcgaggactcgctgcgcgagaagcgcatggagctcgacgcccgtgacgccgagctggcgcgcatccgcgacgagaaggatgccgagctcgccatcatgcaggagggcatggatgccaccatcaagcagctcaccgacatgcagctcaaccagggcgagagcgaccaggcggtcaatgcgcagatcgacacgctcatcctcgacaactccaagaagctcaacgccatcatcgactccatcctccaggcgtgcgtcgacaaggtggatgatgcgctctacgagctcgagtcgccctcggcctcgggcaacaccaccgccacgcccgagtacgtgctctcgatgatcgaaaagggcaccacctccaccaacgagtttgccaccgtcttttcgctctacctctccggcgaggtgggcggcgagcacgtcgaggtcatcaaacgcgccaatcagctcgcccagaccatcagcgacacgctcaccagcaccaagggcatcacaaggttggcgcagaacgacgatgctgccgacaagctcatcggcaccggtcgcgagacgggcaacgtgctgctgcgattcttcagcaacctgcagtcgtaccgtctggccggcgtcgcacctgcccagcgccgcgatgtggtggcacgccagaacatggaggcgcgcgccgcgtttggcaacctcaacagcgtggtcgagaccatggtcaaggcgggcaacaccatgcttgccaacgccaacggcgacattggcgacattgtggagcgcgagatgatgaatgctgcgagcgccatcgatgctgcgacggccaagctgcaggcgctgctgtcgaggccgagggaccacaacaagtactcggcggtggatctgcaggtgcacgacgccatcctcgaggcttcgctcgccatcacacgcgcgatcgccggcctcatcaaggcggcgaccgagtcgcagcaggagatcgtggccaagggacgaggctcgtcgaccaaccagcagttctacaagaagaacaaccgctggaccgagggcctcatctcggcggcacgtgcggtggcgtttgcgacgaccatgctcatcgaggcggccgacggcgtcatcatgggcacgcactcgctcgagcagctcattgtcgcatccaacgaggtgtcggctgcgacggcgcaggtggtggccgcgtcacgtgtcaaggccgagttcatgtccaagacgcaggaccggctcgagcgggcggccaaggcggtcacggacgcgtgccgtgcgctcgtcaagcaggtcaagaccatcaccgacaggcagagcaacggtgcagccgactttgactactcgcagatggccgtgcacgagttcaaggtcaaggagatggagcagcaggtcgaggtgctcaagctcgagaaggagctcacccaggcacgccgcgtgctcggcgctatgcgcagggcgggctaccacgcgaccgaagacgactagagcgaggtgtggctcgtttgggtgtacttctctttccatagcaatgcaactatgatactacg

SEQ ID NO: 12759 - DNA, 3534 bp, Oryza sativa
  ref <308>: DATABASE ACCESSION NUMBER: AK110107
  ref <309>: DATABASE ENTRY DATE: 2001-12-06
atccaccttttccatccctcccacaacacgcatccccatcacaacctcttttttcttttctctccccctcccccccggacgagagagagaagttcttcgcaagttgcattctgcgtttggtctcttgtcttcttcctttgaaaacaaaaaacacatctcgttttttctttctttcagaggatcttgaagacttcctagacgtgccattccgagcagctccatcagcgctgcccacgagtcacatcaagtccatccctaatacctacttcgtcctacaccgagtgcaccttcactcgctcactgacgcaaacccgtctttgttctgtggcctttcctcctccccccaccgggatcgtcgcagacgcaaaaccactttttcgtcccacctgtccacagtccctttctccgttggaacgccccctcgtcgttctttctggagatatttaatcggctggccacgacaagtttcctcccaaactacacctttccacacgatcaaccattcccctaaccaacacccaccatggctgatcaactgaacatgggcggcctgagcatgaacgaccagcctcctgctggcgctcgctcgtacatccctcctcacatgcgttctaagatgggcgctggtgctggtcccggtgcacccccccctggtcctgctggtcccgaccctgccatgaacggcggcctcaacaacagtgcttgggctggcaaccaaggctttgatgcccgtcccgctcccggtggctggagtggtgctggtggccctggtggttatcctccccgtggcggcggctacaacaaccgctccggcttcgaccgcaatgcctacggcggtgctggcggcggtgctggcggcggcggcggtggccacgcacgcggctctggtgatggtcagtggcgcgacggcaagcacatcgccggccccgccaaccctcgtgtcgagcgcgaacttttcggcactcccgacgacccttccaagcaacacacgggcatcaacttcgagaagtatgacgacatccccgttgaggcttccggtcacgatgtgcccgagcccgttcgcgaattcaccaaccctcccctggatgatcacttgatccggaacatcgaccttgcccgctacaagatccccacgcccgtccagaagtactcgatccccattgttatgggaggccgtgacctgatggcttgtgcccagactggttccggaaagactggtggcttcttgttccccatcctgtctcaggccttccagaccggtccttcggcgaaccccaccgccggtggcggaggctttggccgtcagcgcaaggcctacccgacttctcttatcctggcccccacccgtgagctggtgtcccagatctacgacgagtcgcgcaagtttgcctacagatcctgggtccgcccttgtgtggtgtatggaggtgccgatattggctcgcagctccgccagatagagcgtggatgcgatctgctggttgccacccccggacgtcttgttgacctcatagagcgaggccgcatctcgctccagaacatcaagtacctggtcctcgatgaggctgatcgtatgctggacatgggtttcgagccccaaattcgacgcatcgttgagggtgaggatatgcccaacgtccaggaccgccagacgctcatgttctcggccacctccccccgcgacattcagatgctggcacgcgacttcctgaaggattacattttcttgtcggttggtcgtgttggttctacctcggagaacatcactcagaaggtcgagtacgtcgaggatgttgacaagcgctccgtgctcctcgatatcctccacacccacggagccggtctcaccctgattttcgtcgagaccaagcgcatggccgactcgctgtccgatttcctgatcaaccagaactttcccgctacctcgattcacggtgaccgcactcagcgcgagcgtgagcgcgcgctggagatgttccgcaacggtcgctgccctattcttgtcgccacggccgtggctgctcgtggtctcgatatcccgaacgtgacccacgtcgtgaactacgatcttcccaccgacattgatgactacgtccaccgaatcggtcgtaccggccgtgctggtaacactggtcactccactgccttctttaaccgtggcaaccggggtgttgttcgcgagcttctcgacctgctgaaggaagccaaccaggaagttcctgctttcctcgagaccattgctcgcgagagctcatttggcggtggtggtcgtggtcgtggtggcggtggtcgcggccgtggccgcggtgcccagaccgatttccgaaagtacggtggcggcggcttcagcagcggcggcggcggaggcggcggcttcaacggccctccttccggcggcttcagcggcggcggctacggtggcccccctagcggtggctacagcggcggcggcggcggctacggcggcggcggcggctacggcggcggtggcggtggctacggcaaccccagcggacccggccaggcttcttggtggtaaactatgccaccggacggcgcccattcgtggtcctcgccccacgcgaggatcttctaccgcggtcgacttgggcattcggcatacctgtgcggcatcaactttcagttatttcgtcacgcgttgcatttcctttctttgtttttccttccattggcatcttctccaaccaaaatctgcgaggcatactcccttctcctggcggacttgattttcagtctcgccgaggattggcagggtcgagttctccggcacaggactctggcacatgatagacggcatttgtctttgtttcggctgcgcagcaattatgatacccaatagaagtccccgtcgcgggcgacttgcgagcagctgcagaggacttttgaaggtcgaaggcgttccttcatcgagactcggatcagtcccacctttgcggcagatgggactgagcgacgagccacacgaacgcatttacgacctttgccttctgaggaggcgtcacaacagagatcgtccttgacattctcacagaatggggttatgctctgctgcttggcagttggttttgcgcgaatggcatcttcatagacaaaagtggatttctcggtttctctggccggcaggctcacacgagcaacgccacggcaggagaagtcggtagagggctcacgtggtaattccggcggtggtcgtgataatggacacttcacccaccaaaacaggcgtctcggttgagcaggaatatggatccagacctcctagattcttttcgcagttgcaaaagatctttggtgattaggcaggtcagggtttggggtcctgctcgttcgatacgagggcatatggaacaggctagggttcccatctgctcaggccggatggcataggcttttgcagatattcaccgagatgtttatcggccctttcggttctcaagctgtggtggaccgggaaaggaatccaccaagggactgactgagaactcctcaataaaaaaaacgattgcttcctgc

SEQ ID NO: 12760 - DNA, 3121 bp, Oryza sativa
  ref <308>: DATABASE ACCESSION NUMBER: AK110108
  ref <309>: DATABASE ENTRY DATE: 2001-12-06
aacactcaccaacctcgacgcgacttcccacctttcgacacaacctcgcccaacagagcagaggcatgagaagtcgctttacgaactggcttgcctcatacacccgatcaatcccatccggctcgttctcggcactcgtggtagcaccaaacgcagctcctccactgcttgagcgcaactttaggtgcttcgcaaccaaatcaagtcatcggtccgtcaagatggtgcccgacaccgacttcacagcggcgctcaacaagccgctcgaggtcgtccagaagatctacagcgatgctcaggacaagtcgcccgacaacatcaccaagctcgtcacagcccacttccagcaactctttgcctcttccgatgccaagtccaagatccccactctgtccgctgccaatatcgccacgcttcttccaaaagcgaatgccgatgctggcagctcacatcgtctggttcggttccgcgccatgatccaggacaccggtctgggtaccgaggtgttcttggccaagcatcaacagggggaccgcaacatcaccggcctctttggcggcgaggccatccttccagcctcggagagctcagtcgatactgagcacgccgaacctgatcatcagaatcttgccgagagagcagtcatgtacgccgtctccgtgcctggccagacggaatgggcggcccaagcgcatcgcgaggcggcagctgaagcatcctccgattccagcgttgatgagctcaccagcgccactgcagcagtagctatcgaagagcctcagtcaccacaaaaggtcgaggaagtgcgtcagcgtatccgtcgcgcggccgagaagggaaaggcaatcggatcgtcaggcaaggtgccccgtctcgtcgcgatctccaagctccaccctccttcggccatcctcgctgcacacaagaaagctggccagctgcatttcggcgagaactacgtccaagagatggtcgacaaggccaaggtgctccctcgcgagattcgctggcactttgtcggcggtctgcagagcaacaagggcaagcttctggcatccattcccaacctttacctcttggaaacgctcgactcgatcaaggcggcgaacgtcctgcaaaaggcgctgtcttctccggacgctgccaagcgcgatgagcctctgcgtgtctacctccaggtgaacacgagtggcgaggatgccaagagcggcctgcctcccgtcctgtccaccgacccggagcaagccaaggagagcgagctgctcaagctcgctgtccatgtcatcaccaagtgcccgaacctgcgtctgcgcggtgtgatgactatcggcgctgcggccaacagctccagtgccgacgcggatcagcccaagagcgtcgacgaaattgtctcggccaatccagactttgaaaggctcattcacacgcgcaagaacctggtcgagttgttgcgcaaggaccctgatgtggccaaggcggatcaggcccatgtcaaggaggcctatgcggatctgctggaggggtccgaggcaaacggcggtctagagctcagcatgggcatgtcggctgacatggatgtggccaccatggctggaagcgacaacgtccgagtggctaccgattgttttggacgccgacctggcacgcgggaggaggcgatgaacggcatgaagcgcgaactcgaagtcggtcccgaggctgctgccgaggagctgaaaggctcatcagctccgtcgcagggcggtgcggcatcgtccagctcgagcggagcggataagttcactttgccccgggcttatctcgccaagtctcctcttcccgaggctccgcacgtcggcgggttggtgaagctgcacgatctggaagcggccgagaagttcaagacgaccgagctggtcgaggtgatcggcatcctggacaaggcgagcctgccccaggccgagtggcaagagaccggttccggagctgcctcgggcgccgagccggcagaggtgccttgcatccacgctgtgtgcgctttcgccgtcgagcttgactctgtccgagctcaggagtcgacgggcggatcgtcgtccggcaatgcgctggcgcagccagcggatcgagatgctcttattacgtttctcagcggcggtttggcaggcgacaagttggcggccgagctggtgctgctggcgacgatcgcgcgcatccacgtgcgacgcgccaacctgtgtctcggcgcactcacgctcaacgtgtccaactttggagcggcaggcaagacggcttcttcggcggagcagacgcagctgtcgcgccggctcaacatgctgcttccggcggtggtggatgtttcgatggagcttgcttcgctcaacgacgaccgcaagcctctgtacgcgcgcagcgccggcgaggggacgggactggaagcgggtcggcttcagctcgtgaatggcacgacgatcgtggtgaacgaaggcaccatgggcgagggacagctcaaggagtcgggcatccgcaacatccgcgcgctttcgtcggtgctcgagtcgcacaagctgccgtacgcattcccgtactcggagtttgagttcgacacggaccttaacgcgatcgtcctgagccagggcaagagtttcctgcccttcgacatccactgcccgctgtcgcccgaggctggtagcgaggatctgtactcgagctcggtgcccaaggacgaggcagaacagctggctggctggagaagcgctctgcttgaggcgaggggtctggcgactgccaaggcgttcgagatccccgatagcgtcagcgagcatattcagcacgagtttgtcgccgagagacgcaaagagcagcaggagtccaaggatgcccacggaggtgtggcgagcaaggaaggcgcgttgggacaggaggatctgctgcgcagaatgtcgctcgtccgtctgctggccatctcgcacgccgaaaagacgctcacgatcgagaggtggaattccgccgtggagctcgacaagcagctcatgcagcgtgtggctgccgctcagccgcagtcgcagcaaaaccctgcatcgggctcggccggcgctggcgtatctcgttaggttcagaaaatgacagagtcactgcacaatcc

SEQ ID NO: 12761 - DNA, 3331 bp, Oryza sativa
  ref <308>: DATABASE ACCESSION NUMBER: AK110109
  ref <309>: DATABASE ENTRY DATE: 2001-12-06
acctcgtcttcccaccatcaccttcgcttgtctacatcttccacctccatccctgctccttgctgcgtctttggcgcctatctcggcttcatcttgtcgctgtgtcgatttgccccctcgcgtcaccttggatgacgaactcttctcggtcgcccatcgctctctgcttcgacgctgcacgatcagctcacggctcgaatcagctccttcctcgcctggcaagctgagctacctgcacgtccctagacgcccgtagcatcctgcattccgtctcccgtcggcgtacggagctgccagtgccaagaattggccggcctgaaccaaaccctaccccccccccccccaacccacgcgccgcacttacttccgagccaaggttcgtcccaccctctccattccgcaatacctccgcttcggcctgtcacatccgaggtcgtacacacaaacggctacgcgatcgctctcgacgtatcgccagtcgccagtccgtccaatccgtcgttcgctgcaactcttcccccttgcacactccacggcttagcatttgatcgatactactctccaacatgctgtcgtcaaagcccatggaccccatcgtccaccacaccaccgagcccgaccaggagcgtcgaggcgccgatgtcgtccatctcgctacccaaacaaatcagatgacgctccgagagaattcggccgctccaggctacactacctcaccccgcggccaggctgtctcgtccgcacagcccagctccacctcgacatccgacttgcccacgcccgttgccagcaacaacgcacacgtcgtctcttcacctgcccaaatggcttcacccgtgtccaccggaggcctcgacgcttcaagcggcatcgtctccggccccgtcgatgccattacagggcccagcgcctccgccgccaaaatccgatcagagaacctcagaaagttgggtctcagcgagcgcgcggatcactcgggcgtcgccacacccatcggcaccggtggctcctccgcacacttccagcccaacaacgcatcgtccgaacccgtctcgcccgtcgtgagccagcccaagtccggcctcaacaaggtgctcagcggcgccatgactggcaccaacttccagcccgtccagggagccggcgccagcggcctcgcatcagcgcgcggcgttgacgcttccggcaacgaaacagccaccagcacgcctccgcagttcatcttccccaagctcggctcgcggcgcaacaccgaccgccactccggcagcggcagcggcgccgcctcgccctcggacaacgacggtcaccacaagaagaagaaggacaaggatcactcgtcccaccaccacaacccgctctccgacctacgcaagttcctccacaaccacattggccaccacaacagcgactcccgcagcgacagcagccgctccggcgtcgcgacccccaagcgtcacggcaaggactcgccgcccctcggcgaagaccacgcacacctcgccaaaaagtacggaaagtggggcaaggtgctcggctccggcgccggaggcaccgtgcgtctcatcaagcgctccaaggaccacaccgtctttgccgtcaaagagttccgccagcgcaggcccggcgagaacgagaaggagtacatcaaaaaggtcaccgccgagttttgcatcggcagcaccctccaccacgtcaacatcatcgagaccatcgacatcatctccgaccacggacactattacgaggtcatggaatacgctccctacgacctttttagcgtcgtcatgagcggcaagatgtgccgtcaggagatctactgcgtcttccgtcagatctgcgacggtgtcgactacctccactccatgggtctcgcacatcgcgacctcaagctcgacaactgcgtcatgaccacgggcaacatcgtcaagctcatcgactttggcactgccaccgtcttccactcgccaggcaagaccaaggtggtcgccaccggtgtcgtgggctccgacccttaccttgcacccgaggtgctgtcgcagcagacgtacgatccgcgcctcacggatgtgtggagctgtgcgatcatcttcttgtgcatgatcctgcgccgcttcccctggaagctgccggacatgaagaccgacccgagcttccgcctgtttgtcaactcgcatccggagctgtgcaagccaccggcgtccgaggccaagagcgacggtgtgccgagtcggcagggcagcacaacgtcgagcacgctcgccagccgcgtcaactcgggcaacgacgtgtcggccatccgcaggacgctcggcatgtcgtccatcgacccggtcaccagctccgacgatgccgccacgccgcagatccgatcggccaaggaggcaggctacatgacgccgcactcgatccattcgaacccgcactcgccgtcgctcagcgactcgttcgacgcgcacaagatgctgggcgaagacagcaatggcaacggcggcgcacctgtcgcgagccccggcgccgtgtcccccgtggtgtcgtcgccgagctcgacgcttggcgacagtgcggaaggcggtgcgtttgatgacgtgcgtccgcatcagcaccgcagcgacagcgtgtcgtcggcgtcgtcgcagaccacgtacacgtccggtgcggccgacagcatcttccgactgctgccgcgcgagacgcgctctgcgctgtcgcgcatgatggcggtggagccttcgctgcgatgcacgctcggcgatcttttacgcggacgtcggttcagcgatacggacagcccgctcacgcgcacgcccgtcatgtcgcgcagcaacagcaccgacatgctgcggtctgccatcgacggcgcgcacgcgcaggcgcatccggaaggctcgggcaccgtgtcgccgcgcagcggcaccatcgacggcatcagccgcgacgcgcacgcggccgggctgggctccatcggacttaccgagttcgaggatgatgatgaccatggcgacgactggctcaagggcatccgcacgtgtgcgcacatcgtcaaggacggcaaaccgggcgagcagcccgaccacccgcacgtcaaggtcatgagcgaagacagcaagcgcaaaaactcgctcttccaccgcaaggactgaaagaaaaacacatactggatccccaaatcacgaatcccgcccgccaacaaaagtgtacacggaggagaggaaatacggatgctactcacgcccagtctctggcttttgcactcatcgcgagtgtccgaggccggtgtggtgttgcatgacccacttgttctagacggaaatctatgtttttttgactc

SEQ ID NO: 12762 - DNA, 3552 bp, Oryza sativa
  ref <308>: DATABASE ACCESSION NUMBER: AK110110
  ref <309>: DATABASE ENTRY DATE: 2001-12-06
ctgccgcccgaggtagtgccgtccaactcgcgtgcgagggtatggtcgctatctacgctgcagacacaccagcgagcattccctccgcggccgcgcaacctcaccgcggccatcgacgatgacgccggcgaccccctgcatggctggcgcgcacgagcagcgcccgcccacctgcgctggacgctcaccaatgccaaccgctccatcagcgtcgatgccttgctgccgtcgctcgtgcatctcgacctcctccgcgcaggcatcatccaggatcctgctgtcggacttaacgagggacaacagcgttggatcgccgaggagcccgcgtggacatacacggctgatctggcccccgtcctcgaccagatccgcccgacgcacaagccgacccagcaccagtactggctccactttgacggtctcgacaccgtcgccgatgtgttcctgggcggagagcgtcttctgcgcacgcgcaaccaacacacctggcacgccgtgcgcatcccctcgcacctgctggagcagccatctgcacagcacaggaacctcacgctcgtttttcacaatatcaacacgtatgcagccgagcaggctcgacgcttcgatccgggctacccaaaccaggtcgagagccccacgcgctcgcgcacgtccgactatgcctatccgcaccgcatctttgtgcgcaagcagcagtccgactttggctgggactggggtcccgccctaatgcccgtgggcccgcacaagccggcatacctcgtggagttttgcggtccagcgtccgtcgaggccgctaaactgcagcaggaggtgcacgttgtggattggcacgtcgacatctaccgcaaggggcagacgaacaatcttgtgccgccagatccggatgcaaactgggtggtcaatgtgtcgcttacgctgctcacggcgcgtcgtgtggagcggccgtcggtgcgcattgcgatcccatcgctgggcgtggccgtgccggacacgctgctgtcgctgcccgttatcgaggcgggactcaacgagcgggtgcatgcggcgtttgagatgcacagcagcggggagggtgcacctttgctctggtggccgcgcggatacggcgagccgacgctgtataccctagaagtgcatagcgacgagctgcacatccatctgcgccgccgcgttggattccgtaccgccgcgctcgacctctcgcgcatcccgcgcgcacaggcatcatccgagcacgttcagccgggctcgcactttcgcctgctcgtcaacgcgcgcgaggtgtacgtggtgggtacgagcctcatcccgctcgacacgctcggtccgcgagcggcgccgggctacatgcactggctgctcgactcggccgctgcggcgcacgtcaacctgctgcgcatctggggcggcggaagctatccctctcgcgagctgctggatgcatgcgatcaaatgggcatgcttgtttggctcgacaccatgttcgccgcatccctttacccggctcacgatgcattcgtcgccgatgtgcgcgccgaggtggcacaggccgtggctggcgttgtctcgcatgcgagcgtcgtcaccgtggtggggaataacgagggcgagttgtactttctcggtggctacggccaccgcacgcgcgatgcagaatggaaacgcgcctacgagatgctcttcgatcatgccgtgcgggacgaggtgctcgacaccactcgcgcgctatcgtacattccatgctcgacgacaacgggctatgtctcgctgcatccgtaccgtggacgatacacggcctatccgcacaacgagctgcacggtacaggcgaacactatggatacgacgccgcgcgcgcgtgggacatcgccagctacccgcgcgtgcgcttcatggtcgagttcggcatgttctccctgccgtccattcacgcactcgatcagatcctgcccagctcgtgcagcgatgcgctcgagcccgcgtgtgtagttgactcggcgggcaaccttgactatcccttgaccgctgacgaggatgtgcagcagttcaaggcgcagtctcccatgctgcgctcgtgcaatgatgttgccgagctggcatgctcagtcgaaggggcgagcaacctcagctgcccctgtgccgccgacgagggcgtgcagcgactcaaggtgggagtgcagactgggtccaagccgcagtgtacagtcgactcgattgtcatgcacgcacatctcaagcatccacccgcgggcaaccttagctaccccttcgctgccgacgaagggatgcagcagctcaaggcgggagtgcagacgtggttcgccgatccggaccagtcgggcaagagtgggcgtgcgttgttgcggcgctggaccgagtcgagccagctctaccacgccctgttcgtagccaaccaggtagccgagtaccgccgcggggctgcacgcggcgagcgcaaccgcggcctgatcgtatggcagctcaacgacgtgtggacgggaacgacgtggtcgagcgtcgagtactcgggcagctggaagctggcgcactacaccctcgcttgcgcccaagcgcctgttgcacccgtggcgatctacaacacctcgaacagcctgctcgatatcggcgttgtctacactggtgccagccatgagggtgggtacttggtggtcgagtggttcgacttttacggcacgctgcttgaggagcgtcgcttcggcgtgcacgtcgaggaagacgtcgggtggtggtgcgcttggcagctgaaccccacccagctatgcggagacactcgctgctacgtccgcctcacgctcgtcctcactggcaccgaggtggtgagttactggacacacatgccgtctctcgctgcgtcgcttgctcaggtctctacgcacgcccgacccatcatcacactgcacgcgcaccatcctccagaggcggagcattggcacatcagaatcaccaacacgggcacagccaccgcaccctggctcacgctgacctcgaatacggccggctactttgcccaccccacaacgctcgcccccaccaacgcgttcttcctcaaccccaacgctgaactcacgctcgtctttgtccgcgccacatccggcacgcaaacgtacaaggactggttcgatcagctcaccgcctcgtcgctcttggacaatttgcccccacacacgccataagcttacgcgcaatcgcacacgttgaaacaccaaacgcgttggtctgtcacccgcaccgcgtcctcgctctttgatgagccggccctgcacacgtgaatgccacaacgtcgcggttggttgggcgggacggcctggctggctggttgaaaggcacggagcgactcacgcggccgaattggcacggcaagaggcggcgttgggagtcgagtgttggatctggctgctgccgctgctgtgcgaccatgtcgcccaaagccgagcgggcggcccaaagcttgcctgaagcagctggcatttgtctaagcccgtctctctcaatccgaacacctcaacgacgctgctcttcgttcgcgcctg

SEQ ID NO: 12763 - DNA, 3387 bp, Oryza sativa
  ref <308>: DATABASE ACCESSION NUMBER: AK110111
  ref <309>: DATABASE ENTRY DATE: 2001-12-06
tggactcacacctcactcatcatctactcttgctcgtgccagcagttcctgacgatatacacctccgatccgtcatatacccgtgacaccacagccgacgctcgccctacccggcgatctctaccagtggccggtatcgtcaagaactgacttcccgtagcgcttcatttgactttggcaggtctgagacgcccgttgcgctcctccctccacgcatccacttccccactgcagcgcctgctgctttgccatgtgcattctccctcgtcggcactattgaagttgaagaccacggcctccaggtcgagcctgcccgccactcgcataccaccacctcacctcgccactgcccgacactgaccccgtccacgcgacacacctacacctaatcctgcggctccaccagctatatcgccaacgtatgggtgtcgtcacaaccgcaatctagtcccgcctgtccaatggctcctctgaggcccgaggcgtcgcgagcctcttcgcacagctcctacgtcgacgcaagcgacgaccgacatgtccaacaagctggccggtccaacacaaacctcactgctgccgcttctgcacaatcgctacgcgaacgagcccggcccggatcacgaccacccagtcgatcgccaagccagccaaacctcctacagaaaaagataagaccgtcaaagtcgaacatcctggccgaagaaccattgtcgccgcccacgcaagctcccggctcttttcgcacagcctcgccacgtgcgccctcacattcgtcgccgcttgtaagcaggctgtccaacagctctagtgaagctagcagcagcaaaagtaacagcgacgatgcaagaggcgctgcgcttctgcccgcgcagtctgcattgtccaatttatcaagtccgcaagagcagagaccacgagcattcatcccggaaaatggctcctccctaagcatctcatcgcaacctccccggactgttcgcgatctggggtccagctacacccgctactacaacccattcgcatcgcagaacaactctcaaatagacgtatccacgcccttccccagaacaaactcatcaacgcatctcatggccggtgccggcatgtcgagcgaggatcttcaaaagagattgtccaatccattcaaagacacgaaccgaatgtcgaatccgtttggctctgccaacaacaccgccccaggaacaccagtccaaaggacaaatagcggagacaatgagaaagtccccatcgcaggagctgccgccgttggtaccggagcgggtgcagtggctgcccacgaaatggtggagcgacacggcacgcctctgttgatacgggagaatgaccccgagaaggctgtgttcttcccgtacatggacgacagactgggcgcaccgattgccgagtttcctctatacaccgacgcggtcgaagacgacgacgacatgcatatgccacaatgggatgacgatatcaagctcaaaccacattggaaagatcatttctcgcgaggcaatatcagcagcaccataggaatgatcttcatggttcttggcctgctgacggttttcattgtactacccgtcatctccttcaccggcacaaatctcatcccgtactcgtacgaaacgccacttgatcagatgcccggcgcgtgggatgcgcaagataagaacagctgggcatatgtcaacgacagggagtacccgctgatgaagaacatcaggactggactgatcgacccggacactcctgacagtgcgatgacgaggaaggatattaacggcgacaccatgaatctggttttcagcgatgagttcaatgagcagaaccgcaccttttaccctggagacgatcctttctggtttgcaccggacttttggtatggagctaccatggatttggagtggtatgatccagatgcggccaacacaggcgacggcgttttgatgctccagctcgatgccttcctaaatcacggtctccaattccgctctggtatgctcaactcttggaatcagctctgcttcaaaggtggcgtcttcgagatttccgcgtcccttccaggccccggcggtgttcacggtctctggcctggcgcgtggacgatgggaaaccttggacgccctggatatctcgcgaccactgacggcatgtggccgtacacatacaacgactgcgatgctggcatcacacctaaccagtctcaaagcgacggactaagctacctacccggtcagcgtcttccttcttgtagctgcaaaggcgaagaccatccgacacctggaaccggccgtggtgctccagagatcgacatcatcgaggtcagtggtgattgggccggcatgggagttgccgtcgccactcagtccttccaagttgcaccttccgacgttaattggtatcccaactacgaattcatggaaactccagactaccgcctcagtttcgtcaacacctacaccggcggccccttccaacaagccgtctccaccaccaccatgcttaacaattcctggtacgacggcatgcaataccaaaaatacgccttcgaatatgcccctggtgccggcgaggacgcctacatccagtggttcgtgggcgacgacgagatgatgaagttcgacggccgtgccatcggccccaatggcaatgtcggccagcgcctcgtctccgaagagccgatgtccatggtcatcaacttgggtatctccgagaactgggttaacatcgactgggacgcgctcaaattcccgaccataatgcgcattgactacgtccgctggtaccagaaggaaggctccgagatggtcacgtgcgatccgcccggctacgagaccacggagtacatcaagaaccaccctgcggcctacaacaaccccaattacacacactgggaagacgcgggctatgtttggccgcagaacacgctgatgaacggctgtgaagcgtagacgtctcctgacggcatccgatgagcggcttctcctctcttttcgcatggttgtaacgaggctgacgggaaaacacggaatgaatatatgggcgttctgggagacttcgagggaaaaattcattgcacggcgcgaaagggagttttgtctacaaatggggcagcaggaatctctctcattttctggatgcccttctttcatactcgctctcttctgcgccaaaccccataaagtattatttaatccgcttgtacatacgactacagacatactcacgctcgcaaacaaacatattctcatggcattcgatacgaagatgaaagtggattttggatagcagtgacggtggctgatgggtagtttcacttccattgtatgtatatattgcagggatattgtgcagcttcattacccgcaattgccgggcgttctc

SEQ ID NO: 12764 - DNA, 3732 bp, Oryza sativa
  ref <308>: DATABASE ACCESSION NUMBER: AK110112
  ref <309>: DATABASE ENTRY DATE: 2001-12-06
catctttgccgaagcatatgccaagatggggttgactacccaagcctttaccccagcaccagcatcgctccgaggattcggcggagaagcagttcaagttctcggccaagcacagttgatggtagccttcggcacgggggaaaacagacgcgcagagcaagtattgtttgacattgtcgacatcccatacaactaaaatgccatcttcggccgtgcaacgttgaacaagttcgaagccatttctcatcacaattatctcaagctcaagatgcccggcccggcaggagtgatcgtggtcaaggggcttcagcctttggctgcttcaaaaggagatctggccataatcaacagagcagtgcacaatgttgaggccgaaccgcatgaccgggcgaagcatgtgccaaagcccgcccctcacagcaagataatcaagatatagattgatgatgccgaccccgcaaagctcgtatcgttggggggcgacatgggcaaagaagaagctgagaacatcctagaggcactcaagaagaacattgatatctttgcctggggctctgatgaagtgggaggtgtttcgacagatctcatcatgcatcacctggcagtcaagccagatgctaagccaaggaaacagaagctacgcaagatgtctgctgatcgccaacaggcagcaaaagccgaagtccaaaaattgctcaaggctggagtcattcaagagatcgaccatcctgagtggctggcgaatccagtgcttgtgcggaagtcaaacggaaaatggcgcatgtgtgtcgacttcacagacctaaacaaagcatgtccgaaggacgatttcctcttgccacggatcgaccagcttgtggatttgacagctagctgcgaactcatgagcttcctggatgcatattccggctatcaccagatccacatgaacccggcagacatccccaagacagccttcatcacaccatttggcaccttttgtcacctcaggatgccttttggcctgaggaatgccggagcaaccttcgcgaggctggtgtacaaggtcctttacaagcagtcggggcgaaatgtggaggcttatgtcgacgatgtcgtcgtaaaaagccgcaaggctttcgaccacgcgtccgacttgcaggagaccttcgacaacttgcgcgcggcgggtacgaaactgaatcctgagaagtgcgttttcggtgttcgcgccggcaagttgttgggtttcctagtttctgaaagaggcatcgaggcgaatcccgagaaaattgatgccattcagcaaatgaagcctccgttgagcgtacgtgaagtacaaaagctcgcaggccgaattgcggcactcaatcgattcctctcaaaggcagccgaaagaggtttgcccttcttcaagaccctccggggcgtggaaaaattccactggacacccgaatgccaagcagcgttcggcgagctgaagcaatacctacaaagcccgccagctctgatcagcctagcaccaggaagcgaactgctactatacctggcagcttcgccagtggcagtcagtgctgcccttgtccaagaaatagattcagggcagaaaccggtctatttcatctccaaagcattgcaaggagcgaagacaagatacattgaaatggaaaagctcgcttatgccctggtgatggctccgtgcaagcttaagcattacttccagacccacaaagtcatagtgccatcgcagtaccctttgggcgaaatactctggggcaaagaagttaccggccggcttagcaagtgggcagcagagctatccccttttgacttgcattttgttgcccgcactgctatcaagtcccaagtgctagctgacttcgtggccgaatggacaccggcactcgcccccgagcccgagcccgtcaaacagccctgggtgatgtactctgacggttcgtggtcgcacaagggggcgggcattgcggcagtgctcatttcgccaagtggtgtgccgattcggtatgccgcaaggctgcagttcgacacgaccaacaacgcagcagaatacgaagccattcttctgggcctaagaaaggcgaaagcattaggggttcggcgcttgctaatccgaaccgactctaagctggtggcgggccatgtcgacaagtcctttgaggcaaaagaagaaggaatgaagaggtatttggaggtcgttcggtctatggaaaagtgtttcaccggcataacggtcgaacatttacctagaggccagaacgaggaagcacaccttggcaaaatctgctgcttgtggtggaccgcattcgcctggcaccttttttgaagtcctgtttgcaccaagcgtgcctgtggagagcttggaggtcatggcaatcgactaggagaaactgggcgaagatccatacgactggcgaaccccgttcgtaaaacaccttgaaactggctggcttccggaagacgaagcagaagcaaagcgcctgcaactcagagtcacaaaatataagatggtctcaggccagctctatcgctccggggtacttcaacccttgcttcgctgcatctcttttgccgaaggcgaggaaatggccagggagatacaccaggggctatgtggcgcacaccaagccgcaagaacagttgcttccaaagtgtttagacaaggagtttactggcccactgtgttgaaagtctgtgttgagcaagtcaagaagtgcgaaagctgccagcgccatggccgaagccaaacatcgccccagtatgagttgcagcccatcgcaccaatctggcccttcgccagatggggactggacatcattgggctgttcccggtggcgtgaaacgggtacaagttcgcaattgtggccgtcgagtacttctctcaatggattgaggccgaacccctcggagcgatcacttcggcagcagtacagaagtttgtatggaaaaacattgtttgccgttttggggtgccaaaagagttcatcactgacaatggcaagcaattcgactctgacaagttcagagaaatgtgcgaagggcttaacctggaaatcaggttcgcatcggtcgcgcacccacagtcaaatggggcggctgaacacacaaacggtaagatcctagaagcactaaaaaaaggcttgagggggcagcgaagggcaaatggccagaggagatgctatctgttctctgggcccttcgaacgacccccacaagaccaaccaagttcagcccgttcatgcttatttatggcgatgaggcaatgaccccgacagagctaggggctaactcaccaagggtgatgttctctggggacgaagaggggcgcgaggtgtcgctcgaactcttggagggggtaagagtcgaagcactcgagcacatacgcaagtacgccacaggcacttcggcaacttacaacaaaaaagttcgaccgatggagctgttgcctggtcatcttgtcctaaggaagaaggcgaacccggtagccgttggcaagcttgaatcgaagtgggaaggaccgtacctcatcaagcacaagtcccggatggggtcctttcgactggcgacactggaaggcgaagagttcgaccattcctggaacactgtctctttcaagcatttctatgtctagaacgggtggcacccaaatcgccaacttgtaaaaatgtatatatcattatgtaagcccttcagcacaatgtaagcccttcggcactatgtaagccttccgtcaag

SEQ ID NO: 12765 - DNA, 3573 bp, Oryza sativa
  ref <308>: DATABASE ACCESSION NUMBER: AK110113
  ref <309>: DATABASE ENTRY DATE: 2001-12-06
acttgtgctcacgactgtcacgctcctcatcgctgctcacctcgccccacttcaatagcatccatcgccgtcttcaaacggcgtacacttgccacacaagaagcggctagccgatcgggcgccctcttacagtgcttctcggctctatctcatcagtccggtagacaggcctgaaggtcaggagcagaagacatgccgcgctccgcaccatcgtcgcccacaaagaaggcgcagcctgcctctcttgctgccgaaaagccgagcgcgcaactgtctgcagctatggacgtcgatgcggagccctcgaaccaagacgcttcgacgagccaggcggccgcctcgggcaagaaccgtagccgcaagagcaaaaagagcatcttccgctccaaggatcgctctgccgctttctcgcccttccaaaccatcagcgaaggccgcatatcgcgtctgccggtcatcttcacccgcgatgccgactacttcttcgcagtctccaaaacatcggtgcgcatctactcgcgcaccaccggtcaggtcgtctcgacgctctccagcggcccaggatcgcactttgccgccatcaccgccatcatgatcaacccggcgaatcctctgcagctgctcaccgcatcgctcgacggctgcgtcaaggtctgggactctctcgacggcattctgctctcctccttcgacctccagcttcccatctcgggaatgaccgcgcacgagtccagccccaacacgctctacgtgctcttgaagaagttccgccaccgtgatgccgacactgctcccaagaacctgtccgagatcctggctgtgctcgagagcggcgcgcctttcaacagcatcatcgctcacttcagcctcgacctcgcctcccacgcacacgcctatcccgccttgcccaagttcgcccgtggcgcttccatccgccccgaagtctcacgtatcggcaagacgcgcgaggctgtctccatcggcgtttcgcccaacggcgaatggctcgtcgtcgtcggaaacgacaaggtccaggtcgccaggacgcacgaccttgcctcgggcttcacccgtttcatctcctcccatcccggcgcacagcatcagcgcgattcgatgacttgcatggccttccaccccaccgacccgacccgtcttgtcactggcgacgcttccggtcgcattcgcgtctggtactgccttcaaaagaacttcatggctccttccaaagcagaggcggatggcggcatggaaaggcatgcaccctcgaccgtcttgcactggcacgcccatgccgtctcctcgctttgcttctcgcccaacggagctcaccttctctccggaggcgaagagggtgtcctcgtcgtctggcacttgggcgcttcgggcaacgccgcctccaaagagtttgtcccgcgtctgggcgccccgctctcggccatcgccgtcgccaacggactggacggaagggagcaggagtacgcggtctcgctggccgacggcagcatcacctttgtctcgtccatgtcgctcaaacccaccaggagcttcacccgtatcaagatcgacgcatcgcgctaccttccaggcgcctcgctcccagccagcacgcatgtgccgctcgccgtgcatcccgcaagccgcaacatcgttctcttggccggccatccgtcgtctctgcaattctacgaccccataaaggatgccaacaccgccgagctcgaagtcgccccctccaaccgcgtctcgcgtgtggaagatgaacagatcgagcccacccgcgtcgagcgcgtcgtcttctcccccttcatttccgccaagacggctgaggccggcgagtggatggtcaccttcgacagtcgcaacctctccgatggcgacgacgacgtcgaggtgatcgccgagtccagcctcaagttctggaggtggaatcccatcaaccgacgctacgtgctcaacacccgcatcgaccgaccccacaacgcacgacgcatcacctccatcaccttttcgcccatcgacgcgctcgtcgtcaccaccgccaccgatggaaaggtgcgcacttggcacttggcctcgcgcaaactcaagtcgggcaagaacgaaagctattgggcctgccgctccgtcttcggctaccgccagcagcttcccactaccactgccttctctgccgacggctcgatccttgctgttggccaggtcggttctgtcacgctgtggagccccgagagcaacctcatgtcgatggtcatctctgctcccgagttggccaacggagtggaaagccttgccttctccggccgctacctcggcatcgctgcgggctcggcggtgctcgtttgggatctaatcctctcgcgccaagtctcacgcaaagggctcgagaccggaaagcaggccaacctgctcctcccaaccactagctcagctgacactgccgaagaagtcgaccgaccccttttcacgctcgtgtcgtctactgccgacgcacacgatgctgctggctcagaggcctcggcgactcgacaggcaaagaccatcgtggagaccgtctcgctggtctcggaccgcgaaatggccacatcgtcggctgccgtgtcggcccatgccgccagcaaggcagcatcgggctcgggtcagcgggtgattttccgcacatcggtcgctgctgtagcgcccgtaccgctgcctgccggagcgcgtgctcaggcacaggactttgtcgcagtcagcaccgagatggatctcgtcaccttctcatcttcgccttcgtcgtcgaccgcagccggagcggacgccacagcagagagcattcggggcatttcgagcgtcaagaaaacgctctttgacgacctcttcggtccatcggccttccatgatgcccgcgacgaagcgcaagacgatgacgaccaggctagtgccgtggctaacgccaatcttgtcgctggcaccgtgggctcgggagtcgcttcgctgttctcgacggccccgcatcttctgccacctgcaacgctcctctttgacgccttcttgtccaagatgctgcctcctgccatggcggcaccgtcggctgccgctgcaccgacaacgaatgcccatctggacgccacagtcgacgacgcagacaagaaggacgcagaggcacgaaaggcagacgcggttgcatcaggcgaacgcggcatctcggacgttttgctcgctgatacagacgagttggtggagcttttcaaaaaccagatcctgactgaggacgtcacgaagacggacgcgccgatcaaagtgaacggcacttcggctgtagcgaccccgtcgaagaagtcttcgactccggtcaaagccaatggtgtctccaaaactccgctctctaaaggcctctccgctgcaagccagaacggcacgccgctcacacccgctggctccgagcaggaggcgctcgtccagtcgccttcggtgtcttccaggaagcgcaagcagtgaagcgtagaacaggcccactctgctttgtcacacgaactcggtcaatcagagaaagcagcacgattcggaattgaatgcgcagacaagcttcag

SEQ ID NO: 12766 - DNA, 1443 bp, Oryza sativa
  ref <308>: DATABASE ACCESSION NUMBER: AK110114
  ref <309>: DATABASE ENTRY DATE: 2001-12-06
gcgacagcaccaccagactacccctcgccgccgccgaacacacatactgcccggagcgctccgacaaggactgacggccatacggacacacactcgcgaagatgggctcctcctcctacctccacctggcccggcctctggctcccgcccaaatctcgcagtccacctccaccactgcgccctgctccgtcaccatccagccccaggctctcttcagcatcctcgaccatgcctcgaggcgaccggcagaccaggagcgcgtgatcggtacacttttgggcacgaggtccgaggatggcactgaggtcgagatcaggaactgctacgccgtgccccacatcgagaccgccgagcaggtcgaggtcgacatggactaccagaagagcatgcttcagcttcaccagcgcgccgcgcccaaggaggtcctcgtcggttggtacgccaccagcgacgagctcaacactttcaccgccctgatccagaacttctactcccaacagggcgagggcacctggcctcaccccgccgtccaccttaccgtctccaccgtcgccggaaaagatatcgccgccaacacctacatcagcgctcccatcggtgtgactcccgagcgcgctgccgacagctgtctcttcatccccgtcccgaacgagatcaagtacggtgatgctgagaagagcggtctggagctcattgctggcgcgcgcgagcgtgaggaccgcacccaattgctgcagaccgacatcgagaccctggagcgcgccatcgagcaggtcctggaaatgctggagcgcgtctccaactacgtctcgaacgttctggacgaggaggccgagccttcctctgctctcggtcaattcctcatgaacactctcgccctcgcacccaaggttgagcccgagcaggtcgagcgcgacttcaacaaccacatccaggacgttctccttgtttcatatctgtcaaacaccatcaggacacagatcgacctgtccaaccgcctggcaatcgctgcgctcacaatgggtcctgaacacaagaagagtgagggcaaggagggcgagcagaagcagggcggtgacaggaagggcggtaaccagagagagcagcgttcaggagccggtcccagaggccagcgtgagcagcagtagatttacgccgagacgtgcgagctacacgagcgtatagagctctgtggagcaagcaggagtgttgcgagtaactctttcctggaggggagtcgcaacacgtaacgaggatctggaagatacacgttcacgttacgaacttttcttctcaacccgaaggccaggttttttaccgataaattacaagcttttagtttgttcgagagtagaagagacgcggaaaaagcttagcattagcgggagtcattgcgaatgagatggcgcctagtagagggtgtctgaatatgttttaaaagtg

SEQ ID NO: 12767 - DNA, 4691 bp, Oryza sativa
  ref <308>: DATABASE ACCESSION NUMBER: AK110115
  ref <309>: DATABASE ENTRY DATE: 2001-12-06
tgcacagccctccaacgccgcccacagctctcccaggatggccggcgcacccaggtcccaagcctcgtacagacgcgaatcgagtctcttcgagcgcgtcctcatccaggtcaccgacgacaacgagcgattcgccgtcgtcgacatctcgggcgtcgattccgccgatgccatcaaggaacgcatgtttgccaagctccatctcttcgatgccgaccactccagcttccagctcttccgcaccgagatcggccagtcggaagctaccggtcccgtcgtcaacgacgacgcgctgcttgttctgtgtcttcagatgggcgacgaccgcggcacgctcaagtttctggtgcagcagaccgcgccgcccaacgccaccgtgcgcgccatgcctccgcccacttcggccgccggccagcagcgagcgctcaacgaagttcgcagggtatccggcgccggctcggccaccagcaaccatctgcgcaccgatagtcagtcgtcgagaagctccatcagcgatgcgctcatctatcccgagatggttggcgccgatggcgcccacgaaggctccaaccgcaactcgggcagcagcctcacacgctccaaggcacaggctcggcgcgcccttccgagtgcccctcccatggacgatctgcgctcgcctacgggctaccacgaccgaagatccatcgcctcgtccggcgaaggacatgcgcaggaggcgtctagcaagcacgccagctcggtcagcgaaggaagcggcacacccgtgatgctctcgcagcgatccagctccatgaacgccacccagcctgcaccgacagcctcgtcgaacaacgcacgcagaccgagccacgtcgaagacgaaaggccacgcttcgacgcagacgcgagcgccaacaggtctctccaggcgcctgccaacgggttgggtcatcgtcaggaccgatccgacgagggcgtccgcgaccaatctcggcagcaagcgccaggcctcacgctgcacaatgccaagagcatggatgatctgcacagacccgcgcatggctccacgcacgcgccagcaatgatcccgcaagccgaggtacgtgcgcaagccggtctggaccgcgacgggcggtatcctgctccgtcgatcatgcggccctcgacagccgctcctgctggaccaggcgcgcgagatggagggcacggacatcgtcagtacagctccgacgcgctgggcacctccaagggtcctgtcgatccggcgtctctcgaccctcgcatgttacagcgcaatcgcagtgcacaggcggcgatcccaagcagccagcagctcgccaaccacggtccgacgaggatggccagtactccgcagatcaggtcgcctccgacgcagcccaactaccctgcgcgtgggcccgtcgacccgcgctacgctcgccccgcaggcatggacgatccgcgcttcgccggaatgcccactcatccagcacagtcgctgcagccacgcccgaccagtcccgcagccaggccgccgcagttcaacgcgccctcgacgtacggcgggcccaactcgtactcggtccagtcgtttgggcaggcccagcgacccttggctccgggctatgtcaacgagtttggtgtacgcgctcccaacgccacgcccaatttcaacacctttcacggccacgatccgcgactgggcgccaatggcatgcagggctctctcacgccgcgcccatactcgtaccacgaagcgtcgtcgacgcatcacccagcgtatcggccgtacagcccgcagcttgcgccttcgccgtatcgcacacgcgaggatccgttcacgacgcgctactttccggcttcgagttcgaggcaggtgtccgagttccagatgcaggcgggccgcttggagccgggcatgacggtgcagcagacgctgcgtacgcacgaggtgttgcgcaaccaggcggtgtctagtccccagggccaggcgtacctgggccatgcgcatccgcctggcccttcgtacgggccgcgggacccgcgtcagcccggtcagcccaaccagtacatgggcatgcagccgtatcccaacgtgtcggcaccgccgtcgatgccgtcgatgccgcagcggagcagccatccgtcgtcagctcatgcgaacccgcaccatgcgccgtcgtcgcgcccgccgcagcactcgcatccgcctgcgcgcaacgcgcacgacatggccaactcgaacgcgtccgcgtacgtcagtgcgcagccgcggccgcattcgtccgcgtcgtccggcggtcgtggtgtcacgccgcagccgtcgccagcatcgcacgcgtcggcgccagcggccgaatcgcaccgccgcgatcctcccgtgcgcgtcaatccgtccgagcgatcgtccggctcgtcgttctcgagccagacgagttcggggcccggacgcccttcgcaggaggaccgcaacagtcgccactcgaccgacgactcgttcagcgcacccacgtcggcgcggagctcacagagcggaccggcgtcggccaagccgaccaacggcgagaatcggtcgtcgtatgcggagcaggagcgcgagctggcggatgacgaactcgcgcgcgtccggccgctgcccaagctgcccacttcgtcggcaggtacacccacagacacgtccagcgcaaagagcggcggtgccgaggcggtgcgcaagtcggaagacgaagacacgcttcgcgcgggcgagtgggcgcagcttcggcgtgcgctcgaacctgcctcggacggcaccgtgatcggtaccgccgtcagcgggagcagcggcggcgatggggatacggtgcgcgccgagccgagcacgcccggaccgtcgcggccgcacaccaaggacggtctgggctctgcgtcgccttctctggacccgccgcgcgcgccaagtccgagcatggcgcccgaggagaacggcacggtggcgtcgtttggcgtgtttgacgacgacgagagcgagtctggcacgtgggcgcagccactcgattcggatgtcaacgcgccgcgcctgcctctgcggctggacggcgatgaggacgcggcggccgacgaccacggtactctgctgcccggccagggcgcgctgctgcaatcgcctgcgcgcgtcggcggatcgagtcccaagcgtcccgagctgcgtctgaccatcgaccctgcggctgggccgacgctgttggcgccagcttcgcagccggcagggctgtcgcccgtaccgagctcgtcgcatctgtcgtcgtcgctgagcagcggcgggatcacgcgcagcaactcgtttgcgcgccgagacgacgactgggcgttccgaccgccgccggagcagctgtacgagaacctggacgactttttccccaagcacgatctggacaagccgctgctggacacgacggcggtgcccgagagtccgatggtgagcagcccgggcagtgaggcggcggctgcggcgggcagcatggcatcgagcccgccgacggcgccgcagcaggccatgagccatcgcagccggctcaagcgctcgatccgtctggtggcgcaggaccgcaagcggttcttggaccgcgcgggcaagcgcgcgacggagaaggacgccgaggcgagcagcggactggtgcgtcggcgcagcaccaagctgtggggcacgcgtgtggtggagatgacgcccgggcaggagctggcgacgccggcgtcggcgacgtcggccgagtcgccgctgtccgacacgtcgccgcccaagccggtgttcaagtgggtcaagggcgatctgatcggcaagggcacgtacggccgcgtgtatctggcgctcaacgcgacgacgggcgagatgatcgcggtcaagcaggtcgggctgccgcgcacggcgagcgaccgcgaggactcgcgccaaaagggcgtcgtcgccgcactcaagtccgagatcgagacgctcaaggatctggaccacccgcacatcgtgtcgtacctcggcttcgaggagacgacgacgttcctgagcacctttctcgagtatgtgcccggtgggtcggtgggcagctgtctgcgcaagcacggcaagttcgaagagccgacgatcaagtcgttcctgcaccagatcctcgacggcctcgcgtacctgcacagcaagggcatcctgcaccgcgacctcaaggcggacaacatcctggtcgactttgagggcatctgcaagatctcggactttggaacggtgcgcaggtccgacgacatctacggcaacgtcgaaaacatgtcgctgcagggctcgatcttttggatggcgcccgaagtcgtctcgctgtccaagaagggctactcggccaagatcgacatctggtcactggggtgtgtggtcctcgagatgtttgccggcagaaggccgtggtcagacgacgaggcggtccaggccatgttcaagatcggcgcggagcgcaaggcgcctccgatcccagcggacgtcaagttgagcaagcaggcggcgcactttttgaaaaactgcttcgaggtggatccggccaagagaccgaccgcgcaaaggctgctcgatcacgtcttttccgtgccggacgagagctggcatttccaacagagcgccctgtggcgatcgctccagcgctgaagcgtgacttttttaatgataccatgacagctgcaagcggctcgtcttttcg

SEQ ID NO: 12768 - DNA, 2724 bp, Oryza sativa
  ref <308>: DATABASE ACCESSION NUMBER: AK110116
  ref <309>: DATABASE ENTRY DATE: 2001-12-06
gaacgcgtcactcgcgcgcaccgcgacgaatcgaccatatggccatccatcagctcagcttcgtgctcctcctcatgctgcacgcgccggcgacgtcgcgtgcccgcgacagcatcgcgccgggcgagccgctcgcgggccacgacacgctcgtctctgccggcgccggcgacagcggcggcttcgcgctcgggttcttcaccccgccgggatccaacgacacctacgtcggggtgtggtacgcgcgggtgtccccccgcaccgtcgtctgggtcgccaaccgcgccgaccccgtcccgggccccgtcgacggcaacgccggcgccacgttgtccgtgtcccgcgcctgcgagctcgccgtcgccgacgccaactccaccgtcgtgtggtcggtcacgccggcgacgacagggccctgcacggcgaggatacgggacgacggcaacctggtcgtcaccgacgagcgcggccgggtggcgtggcaggggttcgaccaccccaccgacacgctgctccccgggatgaggattggggtggacttcgccgccggcaacaacatgacgctgacggcgtggaagagcccctccgacccgtcgccgagctctgtggtcgtggccatggacacctccggcgatccggaggtgttcctctggaacgggccgaacaaggtgtggcgctccggcccctgggacggcatgcagttcaccggcgtcccggacaccatcacctacaagaacttcagcttcagcttcgtgaacagcgcccgggaggtcacctacagcttccaggtgcccgacgcgagcatcatgtcgcggctggtgctgaacagcagcggcggcgggctggtgcagcggtggacgtgggtggaggcggcgggggcgtggaacctgtactggtacgcgcccaaggaccagtgcgacgccgtgtcgccgtgcggcgccaacggggtgtgcgacaccaacagcctccccgtgtgctcctgcctccgcgggttcgcgccgcggtcgccggcggcgtgggcgctgcgggacggccgcgacgggtgcgcgcgggagacgccgctcggttgcgccaacggcaccgacgggttcgccgtggtgcggcacgccaaggcgcccgacacgaccgccgcgacggtggactacgacgccggcctccagctgtgccggcggaggtgcctgggcaactgctcgtgcacggcgtacgccaacgccaacctcagcgcgccgcccgggcgccgcggctgcgtcatgtggaccggcgagctggaagaccttcgagtgtacccggccttcggccaggacctctacgtccgcctcgccgccgccgatctcgattcaacaagcaagtctaagaagaagacgcacattataattgcagtagttgtcagcatctgtgcgctggcaactattttagcccttactgggatgtacatttggagaacaaagaagacaaaagcaaggcgacaaggaccaagtaactggagtggtggtttacacagtagagagctccacagtgaaggaaatagccatggggatgacctggatctgcctctatttggtttggagacaatagcatcagccacaaatggtttctcagcagacaacaaacttggagaaggtggctttgggccagtatacaagggtacactagaggatgggcaagaaatagcagttaaaacactttcaaagacgtcagtacagggtcttgatgagttcaggaatgaggttatgttgatagctaaactccagcatcgaaatcttgttcaacttattggctacagcgtttgtggacaagaaaagatgcttctatacgaatttatggaaaacaaaagcctggactgtttcctgtttgacaaatccaagagcaagctacttgactggcaaacaagataccacataatcgaggggattgcccgaggtttgctgtatcttcaccaggactcaagatatagaatcatccacagagacctgaagacaagcaacattcttctggataaggagatgactcctaaaatttcagactttggtatggcaagaatgtttggcagtgacgacacggaaataaatacagttagagtggttggcacatacggctatatggcccccgagtacgcaatggatggagtattttcagtgaaatcagatgtacttagtttcggcgtcatagtgctagaaatcatttctggtaaaaggaacaggggtgtctacagctactccagccacctaaaccttctagcacgtgcatggagctcatggagtgaagggaacagcctcgatctcgtcgacaaaacactgaacggctcattcaaccaagaggaagtgctaaaatgccttaaagtggggctcctatgtgtccaggagaacccggacgaccgtcctctcatgtcccaggtgctcctgatgctggccagcgccgatgccacctcattgccagatcccaggaagcctgggttcgtcgcaagaagagctgcaacggaggacacgtcgtcgagcagaccagactgcagcttcgtggacagcatgaccatcaccatgatcgagggcaggtaggaatataggatcggagtcggagcgcgacattgtactgaagattactagaacgcctttgcctttgcattttactaggtattctgtgtagaatcatatatagtcttgtgattgattaaccctagcactgagttgcgaattcaatcccacccaaataaccagaaatcgagatgct

SEQ ID NO: 12769 - DNA, 3320 bp, Oryza sativa
  ref <308>: DATABASE ACCESSION NUMBER: AK110117
  ref <309>: DATABASE ENTRY DATE: 2001-12-06
cctctcccgcggcttggcctcttcatcctccgaccgtcacgaccaaaccctccatccaatcgcgccaacatcatctcgcaattccatccgcgttcacaatcatgcactcgtaacagctcagagcgtgctcggccccctcgagggcaacacctcagaagccactcttcccaccatgcagtcgtccgccgccgttgctgatgccttgacggccgaggcaaagcttggcgctcgccacaacatcttctatacccgcgacatctgggcgcgcgcaaccgcaacacgcgtctctgcctgcctcagcgctgcgttcgtgctcgcgctctggtatgtcgcctaccatgcgctcgtcggcacgcgcgcatcctcacgcggggccaagccgctctggcagctctccaccatgctcgccgacgacgccaacatcgaccgcctcgacaccgagctcgacagcgacgagtacgaggacgagcacgagtcgcgcgcctccggcttcttggccaatgctcgcgagcgccacgcgctccgcaggatgctcgcccgcaacgagggcaagcgctcgagcatcgtgcgcatcacctcgtccgatccttccagctcgctcagcgaccatcccatgcaggtcgacctcgaaccgcctacgcgccgatccttctggcccgcacccgccttctccacgcccccctccgactcggcggcgagctcaccgacctcctcgacacccccacctgcctcggcgaggcgtcgcaaggagagcggcaggcttgcagcagccgaacccgggcgcagacagcatacggccagccccagccgctctcctacgctcttgtccggatcgctccccgtgcgtccgacgcgcatccgccccgtcgaacgctcgcccctcggccgcgtcgcatcccgaaacaagcgcaacggctcccccagcctcgccaccgacgcggcggatgccagagatgcctcgcccagccccacctcgcccctcgccgaagactgggcagatgagtcgcagctctcccccaccgccgctgcgcccgccgaccacgacgcgctgctcaccacacccagtctggcgtcggaagcgtcgttcacttcagcgatacctgcgtcgcccgcatcgagcacgttttcgctgcgcgcaccctccatcctcaagcgccgcccgcagagcttccgcaccgcctcgctgcgcgacatcgacatctcgtacagcctcatgcagcgcaaagcctcgctgcccgcgctcccgctcgccgacatccagcagcagcagcagcacgacttttggcaccacgctgtcatgcactcgtcgcccgctccaccgccgtgccagcctgcgagtcccgatgcaatccatgctgtcgagcgcagcgtgaagctcatcgagcccgactggcggccgcatctggactcgcacgtgcgtgcgcaggagcggcacgaggccgccacgcgctttgccactgcccagggcgccgacggcgacttttggttcgagcgctttacacagagcaccgcggcggcggggcgcgactgggactggcgtaagcgccgcgcgcgactccagcgtgctgctgcgctcggcatggcgctggggcagagcgggcttgccattcccgccagtccgatgccgggtaatgtgggtaagaccgatgtgcagctgcagcatcagctgggtacacagccgacgcccgcggctcaggctgcatcgccggtgcgcaaggtgttgcccgccgctccgctgatcacgttcagcgagcacgaactcaagtcggcgccggtgctcaaggtggataccgagagcggacgcaggcctgcgcgcggtagtgtcgacgctaccagccccacgtacagcgctacgccgctcagtcccacgccgagtggaacgggcacgccgctcggcggcatctttggcgcagtgttgccgtcggccgagtcggtgagtgccgtcatggccgcgcgcatggcgcagcgccggcgcgcgagcgacgacgccaccgcctcgagcgccttgcccgccgcggacgatgccaacacgatgcgcaggggcgtcgtggacaaggcgatgcgacgcaggctctcggcgtctacaagctcagcggtacccagctcgcccggtgcgtctcccgccgcctcgccgtcgatcgagggccgtggctcgccgctgcgcgattcgtcgccgttcccttccgacgcggggagaaccagcatggatgcgcccagctcgccgcccggtgcgtcggcgatgagcgtgcccggcagactcagcagcctcggcacggcgggcaagaaggtgtcgctcaccaacctgcgtgcgggcttacggcgcggctcgggcagcaccgactttatgcacgacgcaagtggcattgagcttgtgccccactcgccggatctgtccgagggcgatacgcacgtcgacgcagcggcaacaccttcgcccgaaggcccacggagcagtgccgatgcgtacagcgcgcacgatcctctgcagggcattgttctttcgcgcaccgactcgcagctgcgccatgtcgagggcggcggagacggtgggcccaagcagcgcatgcggagcgagtcgcctcaggccacaccgcagttccgcggcggttcacgtgtgacgaagctcggctcggcgccggcggcggtgttgaatccgccgtacgatgtggtggaggagctgcgggatcggggcggcgagcgcgattcgatctcgcagggttcgtcggactcggactcgttgcgacgccggctccgttcgcagaccgattcggccacacgtgcgcgcatggacttggtcctcaacagcactttgcgtcgcgacggactgtccctctcgccaggaacggcttcttcgccacccatagccaaggcacgcgcacgcggcggctcgcgctcgagcatcgtcaagagcgcctcgggtgccagccatcatctcgaccgctcggctatgcggcgttcctcgatgcgcagtgggtcggattcgggttcgcttgccagcagcacgtcgctacctagcatggcgagaaggagggcgaaggacgcgacgcccgatccgcagctgcagcccgaaccggcaccgaggggcatggcccagagagcgcgttcggctagcatcagcagcaatgctagcagcttggcgtccggtagcaggaagtcgagtaggagcaatagtttcagggaggcagcagggttggggatgaccagtaatccgggcaccccgggatcgccggaggagagaggggcgacccgtttagcttgacgccgcttcatgcccagcagcaagtgtgagcgatccgataatgcgaactgatcgaacagtg

SEQ ID NO: 12770 - DNA, 4412 bp, Oryza sativa
  ref <308>: DATABASE ACCESSION NUMBER: AK110118
  ref <309>: DATABASE ENTRY DATE: 2001-12-06
atcagccttctgcatcggacgtcgccgtcatcgaatgcgtcgcgttcgaccgcaaccctacttgcttctcgtcacgagtcgtcgacccagccaaggctcgtcacacaccgcgctgttctcagttggactgcagccgaacatccggatccgccttgctttgcaccggcttcgtagtcaagtcgcgcgaggaagaggggcgacaacgttcaacaccaacatcaagctttcggcttttctcagctcatctgtacttcgaggtcggcagccgaagcctcgccagtgtggcttgtcccgtgccagccggcgcagcacatcgcttcatcctcttgctgcaaccgcgcatcctgcattgcgattcgcgcacttcatcctcatccgccctcaccctcgctctcgcccgcaccgacgctgctccactcgctgatcccgtctggctcgtacaccgctcgtctccgacgcctcgttgcggaatgaggctcgcaccgtgacgctcaaatatcaatcgcccgccccttctttgacacaacatcatagcggggctgcgccacactcacactcgccttcgccacccctttgcacgtgccaccacctaaaatcgacgtctcacgcctacccgggtccgagcaccgctttcgattacgccatggctgcctcagatttccacgccaacggcgaatcgtcccggaccaccaccgatgccaccgcggcagcaagcgtcccatcatcaaagccatctaagcgaaaggcggaaaagatgcagacttcgccctcggcagccgatcttaccgatgcgaacggtgtcaagccgctggctcgcgcggttctcgtctgcaagagatgccgctccaagaagatcaagtgcgaccaggcctttcccgcttgcggatcctgtgtcaaggctggcgagccctgcgtaggcatcgactccgccaccggtcgcgaagtcagtcgcagctacatcgttgatctcgagcaccagatcacgcaactgcgcgcacagaatgcagagctcgagcgccttctcgccgaacgcccatcgtctggacccctcgaacctggcgcactcggcatgaagcgcccactgcaacacgtcgaggacgagttcccactcgtagcatccgacaagtctacccctcctgacgcgcgccctctcaagcgcttggcagcctcccccgaaagcgacagaaagccagatccggcccgtccattcttgcccggcctcgtgctcggtcccgcgggcgtggaagtgttgccgtccgatgcagacggccatacgacaagcggagcacggccctcaatgggtcgtctcaactcgcacgccagtggtctttcgccagcgcgtttgctgtgtcaggccttccagcaatctgcacaggcagggctccatgttcgcgatcctggatccgccgcacgggtccgcaggtccggaacgcagcgcctgggagacgagctcaatcgaagggcaacgactctctcatcccaagatccagccaagctcctcagcgaatcgcgcgaggcgcaagacggtggcgccaaggccgaggccagactgggctcgccgcagagcggatctgccaccccttccgacaccaagaagaactcgcccttcgacgacggtgatccgatgcagtacgccaccgccaccgaaacggctgatattacggtccctgctcctgaacaagctctcaagccgtcgccacttccagctcccttcccgcccttgtcgatagccaggaagctcatcgatgcctacttcgagcgcgtcaatcctcaactgcccatcctcgatcgatcttcattcatgacgcgattcgagaaagcttgcaagctcggtctcgagcgcgctagagcaaagctgtcggcccacgaacgcggcacgcaggaggatgacgatgacaagcttgcgatagagctgcagccagccgatggccacctcttccacttggtgtttgccatcgcggctgcaatggactggacgcgctccagctggagtgccgaaaatcatcacgaagccgccatgcgcttcctcgaccccagacgcttggccacgcccaaccaggagggcaacgtcggcgccatcatgggccgagatgctctcgaacagctccagtgcctgttgctcacggctctctactcgatcatgcggcccatgaagccaggcgtgtggtactgcctcggcgtagctttgcggctcaccacgggcatcggactttatacggaaacgccaggcgtgctcgaggcttcagcgagcgcctcgcaagttgtgggtgagacgctggcggagaagaagcgccggcttttctggtgctcgtacgcactggatcgtcaggtctgtgtccacctcggccggccctttggcatcgctgactcagacatcaaggtcaacctgccatgggtcgacagcgctggggacatgatccaagtcgcgatcgagcatcaagactcggacgtgcgacaagcaggctcggccgagaacgatggagactcttcgatcgagatcgcccgtcgagaagctgcctctactctggcagcgctgcaatccagcacaagcgagcagcacgactcgaatcgacaagtcgcgcccgtgtcgctgcccaagccaaaggacgcaagccgatgggtgtctttgtcgttcttccgcatgcgcattctgcagtccgagatccaatcgatcctctaccagaacgcagagctgcctcgccgcttcagtagctacggacactggaagaacgacgtcctgcagaggctgcacgcatggagactctatgcgccttcttccaaggctgagctcgaggcgaacggttgcggctacaatcccatcttcctcgagctcaactaccagcagacgctgctgatggtgtatgggcttagtccacgattcccaaacgcgtctcgcaaggatcttgcaagcgtcgaagagtgcagccgcagcatcatcaacatgtatgcgacgctgtccaaggaaggtcaaatgaactacacctggatgaccggtcacaacgtattcatcgcctgcacgagctatctgtacgcgatttggcagattagcgccaccgatccggcctcgttccggtccagtgtcacgcttggctttcgcaacaaggtggacgagatccaccacttcgccgctgcttgcgacaaggtcctctcttcgctccagtgggcgacggccgaaaagtgccgcaaatgcttgcgtacaatgttctatgccacctcggtggtagtggagaagatcgaccgcgcggcgccagctgcaattgatggcgggtcgcgtatgaagaatccgcacgaccgacctgctgaccgtagcactcagcggagcaagtctggcgcaaacacgatcaagaagcctcatcctccatctccagggcgagaaagcaactcgctgcatgcttccgcttccccgcaacgtcatgctcaaggcacctcgccggccccttggtctttgtatgcgcaggaccgggactggcgccagccgacactggacagaacgagtgactctggaccggcccagcctccggcagaggcatcggcgcacgcgccacgctggaatcagcgcccaggcgcggcacgctctccgccgcaacagtccactgcttcttggccggcagccgagcttggacacgaccgctcggcgacattgcatgatccgtatgccagcagcagtggcgccacgccaagccgcgggctcgacacgggtggtggcattaccgacgcgtcgagtacgagccatgcatggtacgaggcggggcccggaacgagccctagagtcatgtttccggacagcccgtccaactttgacatctcgtcgcttatggcgacgtccgcgatggagctcgaagcgctgttccgggaagcaggtctgtctgctggcccctcgggtgaccaacgcggatgggagaccagcacgccggcgatgcagcacagcgccttgggtccagcaccgacgctgcacggagccgccgggggacgggagccaagtgcgcagcactacgtgcagggtgaagcgctcagcttctacgactcggtcggtggcagcattgaaggcacggatgcaagcaaatggggcttctcagcgggcgcgggaccaggtatcaacgtcgagcatcgtatggcagaaggcatgggccaaggcgaagcattcgattcggattgggaggctctggggttcggataccgcatagcggcccctaccgcgtacaacacatttgcagaaacggtgacagatgcgcagcagcgcggtttcaccagcatgcggggcgaagtgcagtccactggcgctgctaatgctgcgtccgctggcaatcctgcaaccggcaacatggccgcgaccgagttcgatcaccgtttcctcgattcgcacatgggcttctgatgccttgcgagctagcaatgtgatgcagtgaattgtg

SEQ ID NO: 12771 - DNA, 3085 bp, Oryza sativa
  ref <308>: DATABASE ACCESSION NUMBER: AK110119
  ref <309>: DATABASE ENTRY DATE: 2001-12-06
cttcaacaggtactattggctgccgctccacatcaacatcatggccatcgtctttatctttgccctgctcaatccgctcatcatcccctttgcgctggtctacctcgcattggccctggtcatcttcaagaagaactttgcataccactactatcgccgcttcaacgagatggagggcgtcatctactacatcaggctgctgcgctacagcctcgacgccatcgtggtgatgcaggcggtgcttctcatcttcttctccgtcatccgtcgcggctcggtctacatcggcatgacggcggtgctcatccccatcaccgtcatcgtcaagctcatcgccacgcgcctgtggaagtcgcagtgccgcgccgtcgacgacgaggaggccgaggcgctgtgcggtatcgacccgaggccgctgtggcaaaagatgcagaggaacgaccttggaccgaacacggccgacgaggcgagcgacagccgcagtccactcgatgcgctcgcttcgggccgctatccgtccgtagtggcaccgccgcccacgacgtcggcgttccaacgcgtctggcagcggctgcacgactctttcaatgccaacggtctggacaagacgagctacctcgctgctgcccatgcacgcggacaggcgccaggccatgccgtcggagtcggagccaagggccttgccagaacgccacgctatctgctcaaggagggggccaagcacgccttccactatcgcacagccgccaaggccaccctgggcatggaagacgccaccgactctccacgcgccagcattcgcccttcgaccgaggacaggcgcgtcgcaggtctgcctccgaccagcaagatcgaggctcatccgtaccgcacctcgcacgagtctggcaaggccgagcactttgacggcgaggtgcctaacgacacttcgcaagtgttccatcgcagccggtcggccatgcgcaaggcgcgcggcggcgagcacgtcgtccaccgtcgtcgcggcagctcgcgcagcgaggagcgtcccttcctctcgggctttgatgccatctctgcccacgcgccgctgccgagcgaggacgactatgaccttagcttcgaagacggcgatgcgccgttcttggagcatgatgccgacggaggcctcggacgtcatgccagccggcgctcgaggcgaggggcgagccgcaattacggcacgcttcgcaggaagccaagtcagctcgccacggtcgctgatgacgagtcggctcagattggcaagtccgagctgcaggatcgcgagccagtcgatggcccatctggctccgacccgctcagcgaatatgccgatggcaccgagaagccagcttctgcaacgtacgcgggtgcaggcggtgctccgtacgggcactcgtacggtggctcggaacggaagttgctcgactatcacgaagacgacgactcgctcaaagggcgtgcagtggtgcgaccccacccgccggtgcgatgggacgacacgcccaacaacactgcacgctacaacaatcccttttacaatcaggagatggacgacttcctgtggctgccgcgcaatccgctcgcgccgatcgatctgtttgatacgatcgagtggtacgggcctgctctcgtcagctcgcagggcggcggcggtgtgctgggtgactgggaggatgagcaggaggatgactacgacgacgagtatgacagcgattgcgaaaagaaccacgtcgatgacattccccttggcggcgaagcggcgacgcttgcccggcgctccgagggcatgctcgagggcgacgaggagattgtgctgcccgaccacctggctcgccacttggaagagacgctgaatgtggaggaggtggcggaccctgcggcaagcgtgcccaagtatctcatggaggactacaagcgtgccatccggcgctcggaacgggcaggatcggtgagcagcgcgggacgctcgccatccagcctcttccgccggggcagcgatgtctctgcgtcgtctgcgcgcggctatggcggtccggcgctactgcaagtgccttcacacggctcgtggcgaagcgccgaaggtccgcaggcgcctgcaagcccgacttcggtgcgcgcctcgcagcgaccggggactggcggttcggagccgctggcgagtgtggccgaggcaggcgtcatgatcccgcgtcgtagctcgagccgtcgcaagcggcgcgaggagagcggcaacgacgccgccgccgaggatgcgcgtgccgacggcgatgcggatgctcgagacgaggcgccggcgacggtggagcgaaggatgtcgcgacgcacgcgacgcgatgcgtcgggcgctctgagcggcttctcgggcggcacgacgcagaagacggtgacgctcaaggcggcgctgcgtgccgaggcgctggaggaagagaggcggatcacactcaaggaaaagctggcgtcgagaaagggacgcaagaaggccaacctgtcgcgggatgcgtctggtcaactggaagggctcgaggaggggctcacggatggcgaagagggtgagcgaggcatcgaggcgggcaccatcatggagcggtatgcggcggagcatcgacgacgtgctacgcaggcgagcgagtttggccagctgacgccgcagcgcgccggcgcgggcggcatgcttcgagatgcgtcgcagggttctgcgctcgtcgacacctcgttgctcgagaggagcgggagcagcgcatatacgggcaagcgcttccgcacggcggcgctgggcgtgctgagcctgtcgcgacagaccaaggcggatgcgaatgcggcgcatccaacgtcgatggcgatgcaggagcttggcggcgcaccggcgagcacggcagcgacgagtgcggcggcgcccgccattgcaggccaaggggaagttgcgcctgagcgacctagtggcgtggccgagcggagcctgaccgaggtagcgctgcctgccgaggcgagccggacgacggcgctgaacgagacggtggatgtggcggagtcacaccagaactaacgacacgatgtaacgaattaaaggatagattgataccct

SEQ ID NO: 12772 - DNA, 2696 bp, Oryza sativa
  ref <308>: DATABASE ACCESSION NUMBER: AK110120
  ref <309>: DATABASE ENTRY DATE: 2001-12-06
tctcgacgtcatcgcatcaacccccttcttctcaactctcaccacagcccatctcgctgctgcagtcgacgccgctcgcgacaatctcgatccgaatctcggcggcctcggtggtgctagagcgctcttcgccccgctgctcagcagcttaacttcaccatgcccatgcttctcgacatccagcgcaagctctttgcaaagtcggagcgcgtaaagtcgctcgactttcaccccaccgagccatggctcctcgcaggcctctactccggctccgtcaacatctggaactacgagaccggcgccatcgtaaagacctttgaggtcacaaatgtgcccgtccgctgcgtcaagttcatcgcgcgcaaaaactggttcgtcgccggctccgacgacttccagctgcgcgccttcaactacaacacccatgaaaaggtcatcagcttcgaggcgcatccagactacatccgctgcctcaccgtacaccctacgggtccctacgtgctcaccggctccgacgacatggccatcaagatgtgggactgggacaagggatggcgcctcatgcacacctttgaaggccacacccactacatcatgaacctctgcttcaaccccaaggactccaacaccttcgcctcctcctcgctcgaccgcaccgtcaaggtctggacgctcggctccagcgtcgccaactttacgctcgatgcgcacgacaagggcgtcaactacgtcgaatacttccacggcggcgagaagccctacatgctcaccgtcggcgacgaccgcaccgtcaagatctgggactacctctccaagtcgtgcgtacagacgctcaccggccacacctccaacgtctccttcgccgtcttccacccctcgctgccgctcatcatctcgggctccgaagacggcaccgtcaagctctggcactccaacacctaccgcctcgagtctacgctcgactacggcctcgagcgcgtctggtgcgtcgcctacaagcgcacgggcaacgacgtcgccatcggctacgacgagggcgccgtcgtcatcaagctcggcaaggaggagcccagcgtcagtatggacgccgccggcaaggtggtgtgggcgcgcaactccgaggtgctcagcgccaacgtcggcaccaccgccgacgacgccgtgcccgacggtcagcgtctgcccgtgtcggtgcgcgagatgggttccaccgaggtgtatccgcagctgctccagcacagccccaacggccgcttcgtcaccgtgtgcggcgacggcgagtacatcatctacaccgcgctcgcatggcgcaacaaggcctttggctccggtctcggctttgcctgggcgagcgacagcaacacctacgccgtccacgatggcggtgccaagctcaaggtgttccgcaacttcaaggagcgccccggtctgctcacgctggcgtacaacgtcgaggcggtggcgggcggtgcgctgctcgcggtgctcggcggcggctttgtgtgcttctacgactgggagacgggtgcgctggtgcgccgcgtcgacgtcgaggccaaggcgatccactggtccaccacgggcgagctggtggccatcgtgtgccaggactcgttctacgtgctgcgcttcgaccgcgacgcctatgccgccttcctcgacacgggcgccgaggtggacgacgaaggcgtcgagacggcgttcgaggtggtgaccgaggtgagcgagagcgtgcgcaccgccaagtggacgggcgagtgtctgctctacaccaactcgaccaaccggctgcagtatctggtgggcgagcagacgcacaccatcacgcattccgaccacgagatcttcctgctcggctacatcccgcagcacggccgcgtgtacgtggtgaacaaggatctggccatctttagctatgcgctgtcgctggcgttgatcgagtaccagacggccatcctgcgcggcgatctggatgcggcggccgagctgctggagcaggtacctgcggaccagcgcaaccgcgtggcgcgattcctcgagacgcaggagctcaaagaacttgcactgcaagtgtcgacggatgccgagcaccgctttgaccttgccatctcgctcgacgactttgagacggcgctcgagattgcgcgatcggggccgcaggtgggctccgagtcgcgctggcgcacgattggcgacaaggcgcttgcgcgctggaacgtggcactggccaaggagtgtttcgaaaaggcgcaggatgtgtcgtcgatgctgctggtggccacgtcgacgaacgaccgggcgatgctggcgcggctggcggagctggcgacggccaagggcagtaccaacgtggcgtttgcggcgttgctgtcgctgggcgatgtggatgcgtgcattgatgtgctgcacaaggcggggcgcacgagcgaggcggcgctgttcgcacgcacctatgcgcccagccgggcggccgaggtggtgcagacgtggcgcgacgagctcaagtcggccaaccgccacaagcagaacgagattgcggcgagcatcgcagacccgacgcgcgacgaggcggcgttcgaagagggctggaagcagagtctggagcgcgaagccaagctgcgtgcgcagagcaaggtgaatggccgggcgtaggcgagcccatccgcatgcccaaatgacagagtgtgttgcatttg

SEQ ID NO: 12773 - DNA, 3052 bp, Oryza sativa
  ref <308>: DATABASE ACCESSION NUMBER: AK110121
  ref <309>: DATABASE ENTRY DATE: 2001-12-06
ctcgctttcctcgctcctcctcctcctatccacaactgacccaactctccccctctcgtccctgactccgctccgtcactctctccacactcctcctctcttcgtctcctcgcatcgccagacacgcttcgacacgacaggacacgactcgacacgactcgcatcacacgctcccgctagcctcgctctgccttgcatccgcgtcgacagcatcctcaccaccgacttctatcgctctcctcccaccaccaccgtctgcaaccagctgcccatccggtgcacctcgccatcaccgtcgtcctcgctcttgccctacatccgttacgattctatcacgaccctcttacgctgtttattctcggacctatctacgatttctagcttcgtttcatagcgcgtgcgtcttgcttccgtctcagctcggcatcctggtctcgtagcccagctttgtcgacacgcttccggcttgtttcgctcgactcctccgaggtgcctctcgcctccctatgcctatacggccctagacttaacccaacaaaccacattccagcatgcccaacctagcgctaccgtcgaggtcgctcttgctcggcccgcgcaaagcgctgcgagagaccagcccctcgccgcccacacgaaccagctcggcgtcgccactaccatcaccagccgtcgcagggcccagcagcctctcccgctcaccgcccaagcccatcgcatcgggcaaggagctctcggaacagtatgagctgctcgaaaagatcggcgccggctccttcggcaccgtctacaaggcaatgcacaaggagacgcgtcagatcgtcgccatcaagcaagtcgacctcgaggactcggacgacgacatcagtgagatccagcaggagatcgcacaccccgcccaatgcgacagcgagtgggtcacacgctactacggcagctttgtcaagggctacaagctctggatcatcatggagtacctcgcaggcggttcgtgtctcgacctgctcaaggccgggcccttctccgaggctcacatcgccatcatctgccgcgagttgctgctcggcctcgagtacctccacaacgagggcaagatccaccgtgacatcaaggccgccaacgtgctcctttccgccagtggcaaggtcaagctcgccgactttggtgtggcggcgcagctgtccaacaacaagtcgaggcgcaacacgtttgtcggcacgcccttctggatggcgcccgaggtgatccgtcaggcaggctacgactacaaggccgacatctggtcgctcggcatcaccgcgatcgaaatggccaagggcgagccaccgttggccgagtaccatccgatgcgcgtgctcttcctcatccccaaggccaagtcaccaacgctcgagggcaacttttcgtccgccttcaaggactttgtcgacctctgtctcatcaaggatcccaagcacagaccctcgaccaaagagctactctcgcatcgcttcatcaagtatgccgagaagaccgtgctgctcaccgagctcatcgagaagcaccacgagtacaaggcgcgcggcgccacgcgcggaggcgccatcgtgcgcgaccatctgcgcggcgtcgatgcatccgagtccacgatcggcggcagcaccatcatgagcgagtggcagttcgacacgatgcgttcgcgcatgtctgtatacgacgatccggatggcgacggcgatgacgatgccgatgcgctcgctacctgggctaggagccgcggtccgcccgcgaccggcgaggatcgcgcgggctacgacacggtgcgcggcgcgcggcccgcgggccagctcatggaggcagtcgacagtgcgatgcacacgccgcgacgcggtggcgtgctgcgtgcggccaacggcgaccaggacgacatctcggacctctccaccgaggcgtatacgagcagcgacgcgctgagccgctcctcgagcacactcgcaacctctacggcgtccggcccgtcgacgccagcggacaaggcgcgcgagtcgatccacgtggatgcgctctgcgcgtcgttccggggcatgcagccttcggacgcgcgcgaccgctacgcggcgagcgggatcggcaagaacgccgcggctgcgtcgtcggcatcgcacctggcgccgccgtcggcgagcgggctggcggagagcagcgtggacattgctacggccgcagccaccatggcttcctcgcatgcgggctcgaccgcgacgcagcacatccgatgcgcgcgcgacggcaaagcgtctccgagccacagccgaaacggctctgccgcctcgtcggccccgcgtccagacagtcgcccgcggcgcagcagctggaacgagcgcaacgacatcaacggcacagtgctgcgggagggcgatgtggccaacgggctcgagacgctgcgtcccgtacgtcggctcgacgcaggcggatcggccaagctgagccagcagtacatcggcagcctacgcagcggttctgcgccttcgggcctggagaagtcgggcgagctcgccgaggcggtgccgcgggcgctgcgccactcgcggtctgcgctggcgagctcgagcagcacagcgcaggcgcacgcgacggcgggggagaatctggtcaaggacgtgatcctgcccgtcatggagcgtgccaaggcgcaggagctcgaggcgggcgaggttgaggcgctcgagatgatcgccaagggctttgaggacctgagcctgctcaactcgcggctggcgtactcgacgatcgtagacctgctgctgagcatgaacgacaacgagcaggcgcgtgagaatctgtcgacgacattccggcagcgcctcacgcggccgcagatggccaagctgcagcagccggacgaacaaccgcgctcgcccattgccgatctgctgtatggacgctggctcgaagggctgcgcaaccgctggattggctactagaccaagattcgcgagcatggccgagcattgatagtggtcgtacggacaatgttttcttctttttttattctatgcatccgattctcgtc

SEQ ID NO: 12774 - DNA, 3063 bp, Oryza sativa
  ref <308>: DATABASE ACCESSION NUMBER: AK110122
  ref <309>: DATABASE ENTRY DATE: 2001-12-06
actcaccacctctctcgtactcatcgggagcttccatcgcccatcatcctcgagcatcatctccttcgtttcctcaaccctcatacgccgtagaacagcgacttcctcgtcagcaccgataccgcggcgccacaacttcacacacactgggcttagtgctaactgccccgcccgagccgccgccccttcccctataacaaggccgccgcaatgagtcaggcactcaacgacggcagcaacctcgacttgcccgtcttccaggatgatctgctgcgaggcaggcagcgagtcttctccgagtttctctccaaggacgaataccaggatgcagtgcgtcgcatgctcagaatggatgcgcgccggctcatcatcaacatcgatgacctgcgctcgtacaaccgagagttcgccacaggcctcctgaacgagcccaatgagttcctgccggccttcgacgccgctctgcacgtctcggtggagctggcgcacaacgccatcaaggacgacatcaagaacaagcagtactacatcggcctgcgaggcagcttcggtgaccaccacgtcaacccacgcacgctgcgcagcatccacctcggcaagatgatgagtctcgagggcatcgtcacgcgctgctcgctcgtgcgccccaagatcctcaagtcggtccactactgcgagaacacggccaaattccaccagcgcgagtaccgcgatgccaccatgtacggcactctgcccccttcgtcgaccgtctaccccaccgaggacgagagcggcaaccgcctcaccaccgagtacggccacagtcagttccgcgaccaccagatgatctcgatccaggagatgcccgagcgcgccccacccggccagctgccgcgcagcatcgacgtcgtcatggacgacgacatggtcgaccgctgcaagcccggcgaccgcatccagctcgtcggcatgtatcgctcgctcggcaaccgcgttggccagagctcgtcgtccaccttccgcacgctcatgatcggcaacaacatcaacctgctctcctccaaggccggcggcggtatcgcccaggcgcacatcaccgacaccgacatccgcaacattaacaagatcgccaagcgcaaaaacgtcttcaacctgctctcgcagtcgctggcgccgtcgatctacggccacgagtacatcaagaaggccgtgctgctgctgctcggaggcgaggagaagaacctgcccaacggcacgcacatccgtggagacatcaacatcctcatggtcggagacccgtcgacggccaagtcgcagatgctgcgcttcgtgctcaacacggcgccgctcgccatcgccaccacaggtcgaggctcgagtggcgtcggtctgacggcggcggtgacgacggacaaggagacgggcgagcgtcgactcgaggcaggtgccatggtgctcgccgatcgcggcgtcatctgcatcgacgagtttgacaagatgagcgacgtcgaccgtgtggcgatctacgaagtcatggagcagcagacggtcaccatcgccaaggcgggcatccacacgagtctgaacgcgcgctgttcggtcgtggcggcagccaacccgatctacggccagtacgacgtgcacaaggacccgcacaagaacattgcgctgccggactcgctgctgtcgcgtttcgatttgctgtttgtggtgaccgacgacgtggacgagcagcacgaccgcatgatttcggagcacgtgctgcgtatgcaccgatacctccagcccggcctcgaggagggcacgccggctgtcgacaacttgaccaggcgctcgatgtgggcgctcccgagggcacggatgccgacggcgccgcgatgctcggcgacacgtcgccatttgaaaagtacaacccgctgctgcactctggcgtgacgggctcgggccgcggcaacgacaagaaggaggtgctgtcgatcgctttcatcaagaagtacgtgcagtacgccaagtcgcgtatccaccccgtgctgaccaagggtgcagccgagtggatcgtcaacgtctactcgaacctgcgcaacgacgagctgtcgggcaaccagaagcgcacgtcgccgctcaccgcgcgtacactcgagacgctcatccgtctcgccacggcgcacgccaagagccgactgagcagcaaggtggaagagcgcgatgccgaggcggccgaggagatcctgcgttttgcgctgttcaaggaggtgctgggtggccgtcgtgccgccaacaagcgacgccgcacaggcaacagcccgatgagcgacgacgaggaccaggacgacgacgatgacgacgacagcggcgacgaggcagcgcgcaccgacccaaatgcagcctaccgcggtggcagccgggggcgaggtggtcgcagtcgcggtggcggcaggcgaggcggcgatcgctacggcgaagacgcgcacagcagcgacgacgacgacgacgatgcaggtgcgtttgtgtcgtcgcagcgctcggcacgatccaacggctcgtatgcgacgcgtgcggcagcagcgggacgtgccaagcccaagcccgccatggtgggaccgggcggcatggacgaagagatgctcgacgaggaagacatggatgcgctcgaggcgatgaggtcgctcgacgtcgaggtggtcattccttcgcaggccccaccgccgagtgcaccgcgggcggtgtcggcacagcgaatcgaggcgttcaaggagtcgctctcggacctgctcttcgcgtccgacggccgactggcagagacggatgcgatcccgctcgacgatctgctgcccgtgatgaacgaaggtcgccgcaccgaagacctcttcgacagcaacgaggcgcgacaggtgctcgaacagatgcatcgcgagaacagcatcatgttcagcgaagacatggtgttcaagctctgatcgctatcgcctccatctatacccttgcacccgcagtctcagtctacaaagagacttgctttcccggttcccttttttcttgtctcgtcgtgtgttttgcttgaattggtcaccatttgttccc

SEQ ID NO: 12775 - DNA, 3345 bp, Oryza sativa
  ref <308>: DATABASE ACCESSION NUMBER: AK110123
  ref <309>: DATABASE ENTRY DATE: 2001-12-06
atcactattttgctactgcatcaccctcaccacatcgcttccaagacatccacaaaggtcgttgcaaggcgcacagctgagcaagcagatcttcgtccgcgcacccgccctcgacaccattcccgcctcacaactcggcctcgcctcccaccacctcgctaggcatgcggtgaccaacactcgttgggcggctgcccatctgccgcagcaggagaaagcgtgcattgctggaccctctcgcctccccacagcttccgttccgcgccatgctcattcgagctcccactcgggacccggcttcgttcacgccgcaaagcgtgggccgctcagtacaaatgattctcgcacagtagcacccgcgccgtccgccacccctagaaagacgcaaaaggcgcagtacagccgcagaggcaccgacgcaagccctcgcagcacccgtgcacatgtacccgaccgcccccagccccacggaagcgaaccaggaccatggtggactggcgaaacatccgccacccaggtcgaccgtacatcctcggatgcaatgctcgacctagaccgccatatggcagcatcgcattggcccttcggcccctctcgcccacaagatctctaccgagacgcctaccttgcgcatccagaccgattcgattggagaagaagatgtacggtcccatcgcagcccgtcgtccggtccgggtccaagtcgacaccgctgcagcgcagaaaggcatccgcctccatgctcattggcgaggagagcaagtttgccgccaaagcccgccgcacggccgagcgcaagatggacgaccgctcattccggatgagccgcgaaaaagcggcgcagctcattcagcgcaacggcgagcgccagcccatccgagagcaggcgcggctctaccgacaaaactggacgcagttgctcgaccatgagcgcaaccaagaactcgctgctatcgccgagagacgcaaggcgcccatcgacaagctcgtcgacgagggtatcgccatcgacggcctgcaggcgtactggcaggacgacagtcggcgtcatttcggcaaaaaggttgccgtcttcaagctcgatgctgcggagccgttgcctcgcacgcttttccgggccggagacaaggtcaccatcatgccgtcaacaacgagcggcccgtatgcggggcagccgctcgccgaggaagaagtgatcgaggccgaggtggtggaacggcagcggacctttctgcgactcaagtttgacgaaagggacgaggatgtcgacctcgtcgcgtgtccctcgtggcgcctcgactatggattcaacgacctcacgttcgaacgcatcaaggcggcgcttgaggccatcgagcacgacgtcgagttcatcgagacgcagtacggctcgcgcttccagtacatcctctcgggcacgcgcctgagcgatgtgatcctgggcatcgagcctcccgccgaccgagtcacacgcggcgcattctgggaagacgctcgtgtgcagagctggtacgaccgattctcgcgtccggaccctgtcgtggtggatggcgatccgcagccgcaactcaaccgctcgcagacgcaggcggtggccatgatgctgcgcgagcgcgtctcgctcatccaaggcccaccgggcacgggcaagactcgcacgatcgtcaccgccatcaagctgctcaagcaggagttccaggtgccccaccccgttatgctcgccgcacacaccaatgtggccgtcgacaaccttgccgacggttgcatcaaggccgggctgcgtgtggtgcgcatcggcccgtcggcacgcgcgcgtgcgggcatcgacgagtttacgctcgatgcgcactttctgcgccatccggccaagccgcgcctcgacgacatcaagcgccgcatggacacgctcgaaaagctcaagagcgaccacgagatggtgcgaggaccggtggctgcgcctgctgtgcgagacgaaggcgaggagggcattggtgctacaggcggaggtgcggcgctgtcgtgggaggatgtcatggcggagcgggaggaagagcgcgaggtggcacagttgcaaggcggcacggcgtccgaggagtacgagagcatcaagaagcggctcaatcggctcaaggcgacctactttttcctgcgcgcctcgatccgcggcgagatcctcaacggcgccgacgtgatctgcggctcggccatcgccgctggctcgccggagctcgacatgatcgacttgcccgtggtattctttgatgaggcgtcgatggcgacggagccggtgtcgctggtgccgctcatgaagggatgtcggcacctgtcgatcattggtgaccacaagcagctgccgccggtggtgacgagtgccgaggccaagcagggcgggctgagcaagagcctgttcgaacggctcatcgagagcaccgccgcggacggcagcaagatcccgtcgaccatgctcaacgtgcagttccgcatgcatccgcgactcgccgagtttcccaacaagacgttctacagcggcgcactcgagaacggcagcggcaccgacaagatccctgccgtcgagtcggggtactggccgcaggtggaaggcaaggacgaagcacaccgactgtgctttatcgaccacaagggccgcgagtcgaaggcagacaactcgctgtcgctgtgcaatgtggccgaggcgcggctggcggtggatgtggcgatggatgtgctgcgacgcaatccggatctgacgggcgacgacattgggattgtgacgccgtatgcagggcagcagattctgctcgaaaagatgctgcacaacgacacgtcggccgaacgccggagggcagcgggtgcgctgggggcgcggtcgtcacagctcggatgcatcgatgtgcacacggtcgacggcttcgagggccgcgagaagaaggtcatcctcttctccacggtgcgcacaaacgcacagggctatgtgggattcttagccgatgggaggcgactcaatgtggcgctcacaagggcgcagagcgcgctcttcgtgctcggcaacatcgacacgttcaagaacgcccagctgagcgaagccgcctacagccgcgtcgagagcccggacctgggcgcactgaagagctacgccgagtatctcgagcaacaaggcgcagtctacaccaccgggcaggcgcacaagatcgtcgatacggccgagcatgacgaccaagacgtcgatgcggccgagacgcacagcctggcggatgcggccgattggcagcacgtaatggccgagcgctcgagcgcctagaatggcgatgcatttgaatttattgcaatggtaacatatgccacggg

SEQ ID NO: 12776 - DNA, 3298 bp, Oryza sativa
  ref <308>: DATABASE ACCESSION NUMBER: AK110124
  ref <309>: DATABASE ENTRY DATE: 2001-12-06
atcatccccatcattcacacacacacacacacacacacacgcagatcatcttcattctcatcgccgcctcgctctgtccacacccactcccacacacacacgaggaaagacatcgatcgctgcttccttccggccgcgcgctgcacacatccgcaaccatggcggcagacgacatgaaggtcgaccagcccgagcaggccatcgacgagggcctctacagccgtcagctctacgtgctcggtcacgatgccatgaagcgcatggccgctagcaacgtgctcgtcgtcggtctccgcggcctcggcgcagagatcgcaaagaacgtcgctctcgccggcgtcaagagcatcaccatcttcgaccccaccccggtctccatctccgacctcagcacacagttcttcctccgcccagaggatgcagccgccgccgtccgcagggatcatgctacccagcctcgcctcgccgaactcaacacctacgtccccatccgcgtgctcgaggagtccgagctcaccaaggacgtgcttgcgcgcttccaggtcgtcgccatgaccgacgccctctacgcagagcagctgcgcatcaacgacctcacccacgccacctccacccacttcattggtgccgaggtccgcggtctctttggctccgtgttcaacgactttggccccgactttctctgcaacgatcccacgggcgagcagccgctctcgggcatgatcgtctccatcgccggcgaggacgacgagggtctggtcaccacgctcgacgagacgcgccacggcctcgaggacggcgactacgtcaccttcaccgaggtgcagggcatggacgccatcaacggctgccagccgcgcaaggtcagcgtcaagggcccctacaccttcaccatcggcagcacaaagggcctcggcgagtacaagcgcggcggcatcttcaagcaggtcaagatgcccaagcaaatcgccttcaagtcgctgcgcgagagcaccgcccagccagagatgctcatcgccgactttgccaagttcgaccgccccgccgccctccacgccggcttccaggcactctcgcagttccggcaggcaaacggccgtctgccgcgtccgtaacgccgaggacgccgaccaggtgctcgaactcaccaagcgcatcttccaggcctcgggccacgacgccgccgatctgcccgaaaatgtggtgcgcgagctcgccttccaggcgcagggtgacgtctcgcccatggtggcctacgtcggcggctttgtggcgcaggaggtgctcaaggcgtgcagcggcaagttccacccgctcgtgcagcatctctacgtcgactcgctcgagtcgcttcccgactcggtgcccggcctgcccgagagcgagtttgcgcccgccaactcgaggtacgacggccagatcgccgtgctcggccgcacgttccagagcaagatcgccaacgcgcgccagttcctggtgggctcgggcgcgatcggatgcgagatgctcaagaactggagcatgatggggctcggcagcgggcccgacggcatcatccacgtcaccgacatggacacgatcgaaaagtcgaacctcaaccgccagttcctcttccgctccaaggacgtcggccacttcaaggcggacacggcggcggcggcggtggccgagatgaacccggacctcaagggcaagatccacagccaccagaaccgcgtgggtcccgagacggaggacgtgtacggcgacgagttctttgcgtcgctcacgggcgtcaccaacgcgctggacaacgtgcaggcgcgccagtacatggaccgacgctgcgtgtactacgagaagccgctgctcgagtcgggcacgctgggcaccaaggccaacacgcaggtggtggtgccgcacctcaccgagtcgtactcgtcgtcgcaggatccgcccgagaagtcgatccccgtgtgcacgctcaagaacttccccaacgcgatcgagcacacgatccagtgggcgcgcgagcagtttgacgagctcttcctcaagcccgccgagaacgtcaacgcgtacctgagccagccggactacattgagaccacgctcaagtcgggctcaggcgccaaggagcagctggaccagatcaagcagtatctggtggacgagaggcccaagacgtttgagcagtgcatctactgggcgcgcatgcgcttcgaggagaactacagcaacgtcatccgccagctgctgcactcgctgcctgcggatgcggtcacgtcgagcggccagccgttctggtcgggccccaagcgtgcgcccaagccgttgacttttaatgtcgacgatccgatgcacctcgagtacgtgatgagcggtgcgctgctgcacgccgagaactacggcctcaagggcgaggcggacgcagcgttgttccgcaaggtgctgggctcgatgacggtgcccgagtttgtgcccaaggacaacgtcaagatccaggtgaacgacaacgaggcggtgaacaacgccggcagcggaggcgatggcgatctgaccgacgtgacgagcagcctgcccgaggcgtcgtcgctcgccggtttccgactgcagccgatcgagatggagaaggacgacgacctgaaccaccacatggactttatcaccgcggcgtccaacctgcgcgcgaccaactacggcatctctcccgccgacaagcaccagaccaagggtattgcgggcaagatcatcccagccatcgccaccacgaccgctctcgctacgggactggtcaatctggagctgtacaagctgcttgacgagaagaagagcatcgaggcgtattcgaacgcctttgtcaaccttgcgcttccgttcattgcattcagcgatccgatcgcagcgcagaagctcaagtacaacgacaccgaatggacgctctggtcgcgcttcaaggtggagcgcgacgtgacgctgcaggagttcctcgacatcttccagaacgagcacggcctcgaggtgtcgatgctcagctcgggtgtttcgatgctcttttcggccttcttgcccgccaagaagcgcgaggagcggctcaagatgaacatgtcgacgctcatcgagacggtctccaagaagcccatcccggcgcacgcgcactgggtgattgtcgagatcatggccgacgaccgcgagggcgaggatgtcgaggtgccctttgtcgccgtcaaggtcaagtaaacacctcacgctcatgcttttctcgaattggttgtttggttttgtcgtagagccaccagaaatgccatgatttgctgcc

SEQ ID NO: 12777 - DNA, 3706 bp, Oryza sativa
  ref <308>: DATABASE ACCESSION NUMBER: AK110125
  ref <309>: DATABASE ENTRY DATE: 2001-12-06
acgagtctgcctttcatcggcgcttgcacgtcgcccaagccagcactgcctgcctcaccctccattcggtccggctgcacatcgttcgttggctagtccgccatggcgtacgtcgcgctgtgcaaggcgctctacgactacgtcgcccaggccgaagacgaactcacgctctccgaagacgactacctctacatcctcgagtccgacgaccccgagtggtggaaggccaaggtccgtcgcctcgatgaagacggcacgcccatccaggatggcccggacgagggcaccgtcggcctcgtcctcgccaactacgtcgaggaggccgaacccatccgcttaagccgcgcgctctacgactacgacgcccagaccgaagacgagctctccatggccgaagacgagctgctccgcgtctacgaatccgacggcacctggcttctcgtcaagaagcagggcaacgacccgctcagcggcggcgagggtcgcctcggctacgtccccgccaactatgtcgacgaggccgaagccgtcgataccggcgcagctccagccaccgaggaccagtacgatgctgctgacgatcaggacgacgaaaatgaagacgacgacgacgatggccacgtcaccgccatcccgtccatgcagatgccacaaaccacccaactcggcaagggcgacgagatcaaaatgtggcccgtctcggcgctcgacagcaagaagaagaagaagaagggcacgctcggcatcggcaacgcctcgctcttctttgcctccgaaagcgacaagactcccgtccagaagatcagcgtgctccacgtcgcgggccattcgctcgagaagggcaagacgctccatctccaactctcgcccgacgccggcatggccgagtccacgctcgacttccactgcggctctaaggacgccgccgccgagatcgtgcgcaaaatcgagacgagcaaggccaacgcgctcaccgcatcgtccgtagcccctgcatccgccccagccgctcccgccgctcccccaatcgctgccgcagcagccatccctccaccacctccggctccacccgcacccgctgcgtccttgccaccgcccacacgcaccgcaagcgccgtgctcccgcctcccgtccgcaagaccgtctctttccagtcgcagcaggaagcgcagcaagcgccgcaagaggcggaagagcatgccatcgccatgtacgactttgaggcgcagggcgacgacgagttcaccgtcgccgaaaacgagcacctcgtcatcctcgagcgcgagaacgacgactggtggaaggtgcgtaacgacgccggccacgaaggtgtcgtccccgccagctacgtcgaggctacagacggtccggccggtggctcggcagaccccgcctcttcggccgcgcttgctgcgcagcaggaggaggacgaacgccttcgccaggaggaggaggaggccgaagcggttgcacaggccgaacgccagcgtgaagctgccgaggccgcccagcgcgcgcaggaacgccgtgagagggaggagaaggaacgcacgcgacgcgaggcgctcaaggcacaacccgcacctgcgcctcccaaactcacgcagcgacccagcaccaccgaggtgagccgcgccgccaagaatgtcgccatcccgcagggacgcagcgcgcctgagcgacccaaggacgccggcggccgctccaagccgtcgcccaacaacacgcgcatgtggaccgaccgcacgggccagttcaaggtggaggccgagttcctcggcttcaaccagggcaagatccggctgcacaagatgaacggcgtggtgatcgaggtggtggtggaaaagatgtccaacaccgacattgccttcctcgaggacattacgggcaagaagctcaatccgaccgacgacgagatcgctgcgtccaccagcgccccccgccgcgagcgcgaacgcgagcgcgagcgccagatgagccgctcgcaggcgtcgacgacgagcggcatgtcgcgcgaggagcgcgaacgcgaacgcgagaggcgcaaagagaaggagcgcgagcagcgtcgacgcgagcagtcgcgcacgggtcccaagcgcaacgtagactggttcgagttcttcctcgcggcgggcgtggatgtggacgactgcacgcgctacgccagcgcgtttgagcgcgacaagatcgacgagacggtgctgggcgatctggacgcaagcacgctgcgcagtctggggctgcgcgagggcgacgtgatccgcgtgtccaagttcatcgaccgcaagtaccggcgcgacaagacggcgtcgtcgcgccagtcgagtcgcgcgagcgccaatccggcggcggacctggagcgccagatcaaggcggacgaggagctggcgaggaagctgcaggagcaagagagctcggcgaggcgaggcgacacggtgagccccgcgccgccccagctcttctcgggcccggacggcacgctcaagaacaacacgcgcagaggcaggcccacgcccaagaacacgggaggcagcaatgtggatgcggcttcgttggcggcagcgagcgagtcgctggcaaggaccacctcgccgccggcgcgcgtgagcacggtgagcccggcgatcgcacccaagcgcaccggctcagcggtggccaacggcttcgacgacgatgcctggacgccgcgtccgccgagcaccaagcccgccacgcctgcgcgtccatcggcagcctcgcctgcgcccgcagccgcacccccggcacccacgccgccgcctgcacctgctgcacctgctgcggctgcgtcgcccgccccggccgcgtcgccggcgccagcggaccccaactcggcgctgttcgagaagctcgcggcgatgaagccgccgtcggcgggtgcgagtccgcggccgggcgcgagcccttcgccggcgtcgtcgttcctgggccagtcgcaggcatacaacccgaatgcgccgcgcggaccatttgcgcccgtgccggccaaccagggcctgctgcagccactggtgcccacgcagggaaccggccagtttgtgccgaccaagatgcagccgcagcagacgggctatatgggcatgcagatgacgggcatgcagccgcagcagaccggttggggcatgcaaggcatgcagggtatgcagggtatgcagggtatgcagccgcagatgacgggcttcaacaacggcgccatgtctcccatgtcctcaatggggcaaatgggacagatgggtcagatggggatgcagcctcagcaaaccgggtttggcggtgcgggtggacatggattcaaccagtttggccagcagggcgtggcgagcgtgcagagtccgcagcagatgatggcgcagcagacgggctttggcatgggctcgcagcagcaggtgcagcaacagcagcagcagcagcaggacaaggacaagttcaacgcgtccaacatcttccagcagatgaagagcggttcgtttgccaaggaccccaatgcggcgccgcagacgagcgacaagtacgatgcgctgcgtccgcagccgactggcttccagccgggtggagtcatgcctcaattcacaggcatggggtacggccagcagcaacagcagcagcagtttggaaacaacggtttcggtggaggctatggaggctattgagtagcacacatgcaatgccaacgattctctctgt

SEQ ID NO: 12778 - DNA, 2942 bp, Oryza sativa
  ref <308>: DATABASE ACCESSION NUMBER: AK110126
  ref <309>: DATABASE ENTRY DATE: 2001-12-06
ttacgccggccaggctttcgattttggagctggcgcaaatgctggagcggcggcggcagctcctctaggcggtcaacccgctccaggcgcaggcgcattcggataccctgcccaaccagcacagcagcctgcctgcggtatgccacatcagccagcatatggacagccaggctacgcagacccagcggcgcaacagcaggccgccgcatatggccagcctgcttacggccagcccgccggctatgaagctcctcagactggataccctcagcagtccgcgcctggtgtcgcccagccgggtgtccagggcgtgacccagcagttctcacagatgggaatgggcggacaaccttcacagcagcctcagacagtcccgcaggctgcccagaggctgaaccctttgattcctaccgacatcagcatgcagggccagccattccacgtcagtgacttggaccagccgccgcctgctatcatcttgccgccgaacagctcggtcacaccttcaccccacgcgaaccgcccgcccaagtatgtccgatcaacacttaacgccatgcctaccacatcttccctcctcaagaagagcaagcttcctttcgcgcacattatccagccttacgctactctccacgatgccgaggacgacgtgcctgtacaatacgaccaggtcatcgctcgttgcagaagatgccgcacatacatcaacccattcgcaagtttcttggatcactcgcataggtggcgttgcaacatgtgtaacttgacgaacgatgtgccgcaaagcttcgattgggatagcgcaaagcaggcgtccgtggatagatggcaacgtcctgagctgaactactcagtcagcgagttcgttgcgcctcaagagtacatggttcgcgctcctcagcctttgatctaccttttcttgttcgatgtgagctacgcgggcgtgacgagtggacttctggcgaccgctgcaaggtgcattctggagagcttggacaggataccaaacaccgaccgcaggactaggcttggattcatggcagtggacagctcgctgcactacttcagcattcctcgcgatggcagcgagaacaacgaccccaagatgctggttgtgagcgatcttgatgagcctttcctccccacccctgaggacctccttgtcaaccttaccgaatgccgcgccaacatcgagacctaccttaccaagctccagggcatgtttgcaaacactcaggacaatggctcagcaatgggttccgcactcagggctggtcacaagctcattagccatgttggaggcaaggttgtctgcctgtccgctagcttgcccaatattggccacggcaagctcgcgatgcgcgaggacaagaaattgctcggaacttccaaggagaacgcgctactacagacacagaacagcttctacaagagcttcgcggtggagtgcagtaagacgcaagtttcgatcgacatgttcttgttcagcgcacagtaccaggatgaggccagcttgagcaaccttcccagatacaccggtggtcagacatacttctacccagcctggaacgccgccaggaccgaggacgccatcaagtttgccaccgagttcagcgattacctttcttccgaaattggccttgaggctgtcctccgtgtgcgcacaacaactggtctcaggcccagcgctttctacggcaacttcttcaaccgttccagcgatctgtgcgctttccctgctatgccacgcgaccaggcatacgttgttgagattgctatcgatgagagcgtgaccaaggctttcgcctgcttgcaagtcggtgtgctacacacaacttgcaatggcgagcgcagaattcgtgtcctgactctcagcatccccaccactcagaacctggctgaggtctacgccagcgccgatcagcaggctatcacacactactttgcacacaaggctgttgagcgcgcattgagctcaggtctcgatgccgccagagatgctgtgcaggccaagattattgagctgctgcagacctacaagaaggagcttggtggcggcaacatgggtggcggtggacttcagttccctgccaacttgcgtggtcttcctatgctcttccttggtctcatgaaaaaccttggcctccgcaagtccgcacagatccccaccgaccttcgctctgccgcgctctgcctcctttccacccttcccctccccctgcttatgcaatacatctacccacgcctctactctttgcacgacatgcccgacgatgctggtcttccccaccccgaaacaggcgcaatcgtcatgcccccacctctcaacctctcttccgccaacctcgtcccctacggcctctacctgctcgacgacggccagactcagttcttgtggctcggccgcgacgccgtccccgcgctcatcgccgacgtcttcggcaccgaggacaagaaccagctcaagcaaggcaagacttccgtccctgttatcgactctgagatgaacgagcgcgtgcgtgccgttgtcgagaagagccgcgatcacagaggcaagggttgcggtagcatcaccgttcctcccctctacctcatccgcgaggacggcgagcctagcctcagactctgggcgcagacacttctcgtcgaggaccgcgcggaccagggtgtcagtggtgctcagtttgtgggcatgctgagggagaaggtcatctcttagaatgggtttgtgctagggatgggaattggttacgcgatatcatgtcttgacgtgtcggagtggcgagttttggaagttggtggtggtgtagagtaggcaaggattggggtttgatgatggatgtggtatggtatgcattggaaggagggtttcccaaactcttcttatttgttggagtggatagaacgacttagcgaaaaattcattgtttgttttgccttag

SEQ ID NO: 12779 - DNA, 2531 bp, Oryza sativa
  ref <308>: DATABASE ACCESSION NUMBER: AK110127
  ref <309>: DATABASE ENTRY DATE: 2001-12-06
ttgaaattgccgggagggatcaccatccggcacacctcccatccgcactcgatctcatctcgaaagcggatccgtcgtcggtagatcctattcgctagtactgccgccatgaacgactatccaatggacgcggcgccgcagtcgctctcggagctgctgcagcagtccaagaagctcaccaaccatctcgggcgctcggacctgccccagatccagcttggcctcgaccagatcgagaaccagagtcgcaagctcgtctccaagagccttcgctccggatccacccagcccgccgatgcgcgcgctcactactttctcgccaacggaggcatcgatgccgctcagctcgccgacaccaccaatgcggccaacatcgcgagcacctttgaacccctccagcccatctacgacacggatgtggaaagctacctcacccacgagcaccagcaggtcgtcatcagtgccatcgagcagggaaggcgtgagacgctccaggacttccaccgcaacctcgaccgcaccatgcaccgcgactgggagaggcagaagcgcaagatctttgaagagctcggtcaacaccagcccgccagtgccgccggtcgcgatgcggatctcgatacatccgcctctggcttcggcgcctccacttcggcccacacgctgccgtcgtcgtcgagcaccatgctcggctccaatgccacctcccagatgcacggcaagatggcgcgctacctcatggtggtgtccaggctcaactcgtcccgactcgaaggatacaaccttgctctggcacatgcgttcatcgatgccatctccggcctgggcgaggagtccaagaacaaggagctcgccgacaccatcaatgcggccaacatcgcgagcacctttgaacctctccagcccatctacgacacggatgtggaaagctacctcacccacgagcgtcggctgccgcgtctgctcaaggaccgcttcgtggccgagtacaactctcgcttccgcacgctgcccgaggtgcacgacccgtacaagctgggactgtacaagctgatcgggcgcatcgacgtggccaagaagtaccctgcgctgctcacgtcgagcatccagaactggctgtggctgcagctgagcatggtgcgcgagacgtacgacgaggatgcggatgcgcaggactcggtgcgcgaccgcttcacgctcgccgacctgggacacaaggtggagaagtttggcgaggcctactttgaccccaagggcaaccggccgctgttctacttccgacttttgctgctgtgcggccagtttgaaaaggcggtgggcttcctgttttcgcgctcggcacaccaggtggacgcgatccactttggcgtggtgctggcgtactatggcctgctgcgtgtgccgtcgcaggcggcgtcgtcgcaggtcgagtatctggtggtcgagtcggacgcgcagggcgggagcgttgcgtcgatcgatttcgccaagctggtgcagcggtacgtgcgcaccttttcgcagtcgtcgcgccgcgatgcgctgcagtacctgtacctgatctgcctgcacgcggatgtggcggagccggtggggtcggagcaggtgcgtcggtgccacgatctcatccgtgcgctggtgctcgaggcgcacccgaccgagttccaggagctgctgggcgacgtgcgcaccaacggcgccaagacggcgggcttgatcgaacgcaacctgccgctgatcaagatcaagaacgagcgcgagttcctgtcgacgatcgtgcaggtggcggcgacgcagtgcgacatggcgcatcgcaccgagtcggcgatcctgctgtacaacctggcgggccagcacgacacggtggtggctgtgctcaacaaggagctgggcgcgcggctgatggagccgagcagcgcatccgagtggaagagcgacggcctgtcgtcgggcgcgtcgttctcggcggcgagcaacgtggtgacgctggcgacggcgattctgtcgacgtacgagaagcagtacggctatgcgggcaagaaccgcgacacgtgccggcggttgctggagctcaagaaggcggtgggactgcagagcgagggccgacatctggaggcgctgcagacgatcgaggcgctgcggatcctgccgctggatggcgagtcgcgcaaggacgtggtggcgatcacgcgcaaggcggaggagttcaaggaggtggacgagaacattgcgcgcaacttttccgagattgtgctcatgaccatgaccatgctgtacaagctgcatcaggagctcaaggagagcatccaccgcagcggcacgagcgccatggacgagtaccgtgcgcaggcgcgcgcgctcatgatgtgggcgggcatgctgcgcttccgcatgagcagcgagacgtacagccagctcacgcgactcgacgtgtttatccactgatgcagccagctccacggtcaccgtagaatgcggctacagtagatgggttgctgatcggctacaacagaaacaaagcgattgcccgattg

SEQ ID NO: 12780 - DNA, 1642 bp, Oryza sativa
  ref <308>: DATABASE ACCESSION NUMBER: AK110128
  ref <309>: DATABASE ENTRY DATE: 2001-12-06
attgctccctgtttgctactcccaacaaacaagacacatcacttcaatatgacttccgtccagcttgagacgccgcactccggcaagtacgggcagccgaccggcctgttcatcaacaacgagttcgtcaagggccaagaaggcaagaccttcgatgtcatcaacccctccgacgagagcgtgatcacccaggtccacgaggccaccgagaaggatgtcgacatcgccgtcgccgccgcccgcaaggccttcgagggctcatggagacaggagacacccgagaaccgtggcaagctgctcacaaacctcgccaacctgttcgagaagaacatcgaccttctcgctgccgtcgagtcgctcgacaacggcaaggccatctccatggccaaggtcgacatcagcatgtgcgttggctgcctcagatactacggtggttgggcagacaagattaccggcaaggtcatcgacactactcccgacactttcaactacgtcaagaaggagcccattggtgtgtgcggtcagatcattccctggaacttccccctcctcatgtgggcatggaagatcggcccggccattgcttgcggtaacactgtcgtcctgaagactgccgagcagacccctcttggtggtctcgtcgctgccagactggtcaaggaggctggtttccctcctggtgtcatcaacgtcatttccggtttcggtaaggtcgctggtgccgctctctcttcccacatggacgtcgacaaggttgccttcaccggttccaccgtcgtcggccgcacaatcctcaaggctgctgccgcttccaacttgaagaaggtcacccttgagctaggtggcaagtcacccaacattgtcttcgaggacgccgacattgacaacgccatctcatgggtcaacttcggtattttcttcaaccacggccagtgctgctgcgctggttcccgtgtgtacgtccaggagagcatctacgacaagtttgtccagaagtccaaggagcgcgcacagaagaacgtcgttggcgaccctttcgctgccgacaccttccagggtcctcaggtttccaaggtccaattcgaccgcatcatggagtacatccaggctggcaaggacgccggtgccaccattgagactggtggcaagcgcaagggtgacaagggctacttcatcgagcctacgatcttctccaatgtcacagaggacatgaagatcgtgaaagaggagatcttcggccccgtctgctcgatcgccaagttcaagaccaaggaggacgccatcaagctcggtaacgccagcacatacggtctcgccgccgccgtccacaccaagaacctcaacaccgccatcgaggtctccaacgccctccgggcgggtaccgtctgggtcaacacctacaacaccctccaccaccagatgcccttcggtggttacaaggaatccggtatcggccgtgagctcggcgaggatgcgttggccaactacactcagaccaagactgtcagcattcgtctcggtgacgctctcttcggttaagcgagttgagagatggactaatggcttgttgaagcggctggagatcgtttcgatgtaattacgtatgacgttatgaaatgaataacaatgtgtactgtacaag

SEQ ID NO: 12781 - DNA, 3586 bp, Oryza sativa
  ref <308>: DATABASE ACCESSION NUMBER: AK110129
  ref <309>: DATABASE ENTRY DATE: 2001-12-06
tggccgtccacttcagctcgcgccaccatctcgaggccctgcttggccagtcttatccaaccaagatcatcgccgcctaacatgaatcctagcatctcgattcccgaccgcctccccgtcctgcctctcccctatccgctcgtcctgcatcccaacctcttactctccatcaacatctcgtacgcccactcgctcagcctcctcaaggccgccctccagtactcgaccctcaaggatgacgtcgagtccagcaacgacgcctccccgcgctcccgccaccagggccgctcgcgtctcgactccaacaagcccatcatcatcgcctgcgtacccaccctgagggcacctagcggcaccgcctcctccgataagcccgtatctcgcgccaccaacccagcgctgccctccgacgcggccgcacgcaacctcacctctcccgaggacaacgacgttcgcatccgcatcaacgacctctacgactggggatgcgccgcgcgcctcatgcgtctcgtacgcaacccgcagaaccagacctgcaccctcctcgtctccggcctcacccgcgtccgcatcgaccgatggctctccatccgtgcccccctcaccgcaaccaccatcgacccaaagagcaacctcgccatcccagacgtgcccatccctctcgccaccgccaccgcctttgtcgacgacgagtcctggcccaccttcccagaagcatcgcccggcgacatcgacctcgtcgtcaggctcaagaaggcctccgcagagctcatcgacgccatcgctcagctcaaccctcccagcgacgccaacgccaacaccccctcgcccatcgtaggccccgcgctgcctctgctgcccgccagcttgctcaagaagctgcgtggcttcatgcaggactgtcgcgagtcccaggcggctctcctcgccgacatcgtcgtcggcactctcggaggcgcctgcgagtggtccgagcgcgtcgccatcctcggcgactgggatcagcgcgagcgcgttcgccactcggtcgacgtcatcctcaacggtgtcaagcgcgtcaagctcgcacgcgagctcatcgtcgcgctctcctcgcccctcaaccccagcaacaagaagaccgtcatccgctcccagctcgaggcgctcctcacccagctcgcagcgctcaaccagggcgtcgccgcacgcatctccgccatcacctccaactcttccaaccgcgacgacaacaagctcggcggcggcgtcatcatccgtgcgcccaactcgcgcaacaacaccaacaacgacaacggcagcatgcccatcatcaccgggcccctcggcggtcgacgtggagccaagccgggcatcaagggcatgcccggcggcggcggcggtctgcccggatccggcggcggcgacgacgacgaggacgagctcgccgagctcgccaagaagctcgaccaggctcgtctcagccccgaggcgcgcaaggcttgcgacaaggagctcaagcgtctcgcccgcatcccccagcagagcgtagaaaggggcgtcgtcatcacctacctcgagatcatggccgagctgccgtgggaaaagatcagcgccgacctcgagccccaccgagaccccaatgagaaagccgtcgtgctgcaccgcaagagcgccaatgccaatgccagtgccgcccccgccgaagaagaagaggagggcatcgtcgaccgcgcacgccgcatcctcgacgcagaccactacgacctcgaaaaggtcaagaagcgcctcatcgagtacctcgccgtgctcgagctcaagaccacccaggccagggagcgcttcgacgccgaagaggacgcagagcgcaaggcagtcgcggagcgtcgcaaagccactccatccgcttccaccgacgatgcggcggccgacggcgccgatgacgacgacctgtctgccctggcaggcgcagaagagggcgaggatctggtggcgcgcgagcagggcatctccaaggaacagatcgaggaggagaagcgccgccgacgcaacgagaagctgcgtgtgggcgacaagggccccatcctcctgctcgtcggtcctccgggcacgggcaagacttcgatcgccaagtcgctcgcctcggctctccagcgtccgttcacgcggctctcgctcggcggcgtacgcgacgaggccgagatccgtggccaccgccgtacgtacgtgggcgccatgcctggctcgatcgtgtcgtcgctgcgcaaggtgggcgtgtcggacccggtgatcctgctcgacgaggtggacaagctgggcagcggcaacgggctgcacggcgaccccatggcagcgatgctcgaggtgctggatccggagcagaaccacacgtttagcgaccactacgtcaacgtgcccatcgatctgagccgcgtgctcttcatcgccacagccaactcgctcgacaccatctcgccgccgctgctcgaccgaaccgaggtgatccacatctcgggctacacgcacgacgagaagacggcgatcgcgcgccagtacctgctgcccaagcagatcaaggcgcaggggctggcgcccgaccagctcgtcgtgtcggacgatgtgctgctcaaggtcgccatgggctacacgcgcgaggcgggcgtgcgcacgctcgagcgcgagatcggcgcgctcgcccgggccaaggcggtcgagtactcgcagtccaagaagggcacgctgcgcgacgacaatggccagcccaagcagtacgaccccgtgattcgcgaggcggacctggaaaagtatctcggaccggacacgtacgagcccgaggtggccgaagccaacgcgcgcccgggcgtctcgacgggccttgcctaccaaggctcgggttcgggaggcatcctgcacatcgagtcgctgctgctgccgccgggaagtggctatctgaagctgacgggctcgctgggcgatgtgattcgcgagtcggccgagttggcgctgtcatgggtcaagggcaatgcgttccagctgggcatcgtgcgcacgcgcgactcggaattccccaagaacgacatccaccttcatctgccgtcgggtgcgattcccaaggacggaccgtcggcgggtgtggcgatgacgtgtgcgctggtgagtctgttgaccaagacgcccatttcgccgtaccttgccatgacgggcgaggtgacgcttcgcggtgtagtgatgcccgtgggtggtattcgcgaaaagctcacggcggcctcgcgcgccggcatccgcaaggtgctgctgccccaccgaaaccgcaaggacgtcgagtcggatctgcccaagaaggtgcgcgacgagctcgagatcaagtacgtcaagacggtgtgggaggccatggaggcggcgtttggaaacaagctgttcgagaatgccgcgctcgcactcgaggccaacggatacggccacgagcacgagggcatccgcgagggccgccgactcatgcacgagatcgaagactcgcgactctagacctgttttctttcccacctctctctcgttctgtattgctttcgcttgtatgtattgtattgttaccaactcaggttccttg

SEQ ID NO: 12782 - DNA, 3353 bp, Oryza sativa
  ref <308>: DATABASE ACCESSION NUMBER: AK110130
  ref <309>: DATABASE ENTRY DATE: 2001-12-06
gatatctccaccatcttcactctttttcgacacctcttgaccataagccagcagtcacccagccagtgtcgccaattcgactttccattgccaccacgtaccactctactcgcatacaaccgtgcgccagctcagttccaccagccaccgacttccactttcccaagtcggcttgtcggcgctcgcggctgatccgttgcatcctcgaagagggcgagctttccgtcgcatcggagctgttccgacactcgcaacgtcaggcacttccgctcttttgcccggccgctaccgacgttccacgccctcgttgattctcagcacaccacatcctgtcttccatctgcattcgactcgatgcgcgtccgaggacctagctcctagcagcgactttccacgccacattccgacaccggtccaggtgtctgcatacgcttgctttgaacgaggcgcgagcgcgcggtcttgcaatctgtccgatgctcacctcactacgaccgcgctcaccccctttctttgacgtcgccgctcgcccacagccacaccacatcacctcgacgcttcaccctgcccactgcggctcgcctgcctatccgtcgcaaatggagggctctggcgccaggcgctacaccacgcctcctcctggacgccaagcgcctccataccagcacacaccttcgcactaccttgcagatgcaggaccgcatcctctcgagcagaggcccagtcctcagtcgcgacagcgctcctggcaccatccttacatgtccacgtcacgcggtgcgcagggtcccagtccgcctgccccgctcgaagctggagcaatgcccctgacgcgcgctcccgactacggtcctcatgatccgctcgcccacggtctgcgtcacaacacatcaccgtcctatcgatccgagcccctacatcctgcgcccgacgccaggtcacgagcctcgtcacgcgcagaggcgcaaccgctcaacatttcggcacttccgacacatccctcgcgcgacgtcgagaggatcggaggcatcggtcccagccgcaaccggggccgctccagcactctgacgctgccacaccccgacaccactcgtgtccgaggaagctccttcatcggcgcaaggcagcacactccttcgtatggccccgtccacgtcaagtacgatgagcagtcgccgctgccaccgcggtcgtgggacgagggccgctcattccgcgacggctaccacaaccatggtggcgagatgtatgcgcacaggcatcactcgccaggccttcgcccatcgtcgcgagaatcgcccatcctctttgctccgctcagtccgagccaggaccctcacatgcaggtgcctcgccgcatttcgggagcccagcacggcaacccatctgtcatggcacgcccaggccagtatcgatcgagacctggcacgcctgtctctccgctcaacatggaggggctttcgatggaggaggcttcgatgccttcggcttcaggcatggccgtaccatcgcttcacggtcagggacgttcgcctgccgaagcacgcgtccgcaacgactactttggaccggcagcagcggccgactggacacgacagaagcacaagaacggcgacttggccgccagccctccttccgtatcctatgcgcccggacttcgcaatgacccgcgcgactacggctaccgtcctgcgacaggcatgcacggcgaggtcatctcacccgagtcggagatggcgcgctaccaccaggcctcctatcctgtgggacagcctcccatgcatcctggtcgcgctccgggaccggaacccattcaccaccaccccggcatgtcgcggttggagcagatcgaccgcgaacgattcgccgcggtgcatcatccggtcgccgcgtcgccagacacctatctcggtgctggcgcaacgcaggaccatggcttccacgccgagtatacctcgcagccgaggccgggatccgccggcacgtatgtggccaacgcgccccagcagaacgcgccggtcgaccgcatcgcgcacagccgacgaaggaggcgaccaccctattcgtactcgtcgatgatcacccaggccatcgcctcgtcgtcagaaggccgcatgacgcttcgtgggatctacacctggatcagcagcaacttttctgggtaccccatggcgggtcccgactcgcagggctggcagaacacggtgcgacacaacctctcgctcggcaagatcttcatcaagaaggcgcgcaccgcgcaggacatctacgacagctgctcgtcgggcaatccatcgcagagtcaggcggcacgtggcaagggaggctggtggacgcttcatcccgtggtgctggcgcagatccgttcgggccagcgtacgcacaacgacgagtttgacgacgtcgagcgcctggtcgagaccgagaatgcggcagccaaggaaggtgctgttgctcgagtcgcgggcgcggctgtgatggcagcgacctcgtcggtgtcgtcggcagacggcaggtcggcgcctcgccgttcctcggcggagatcagccagcacaagacactcagccgacagcgaagctactcggactcgatggatcccactgcggtggagcaccgccgtgtgggtgcgagccagcacgccttgaccgcgccggtgagccgcaagacgtcgatcggtgcgagccgcaatgaggcaaatgcgcggactgcgtatgcaccgtactcgactccgctctcggatcgcaggatcagcggctcgtcgtcggaccgcacccgtgtcgacatgccgtcggtgctgcagaccaagctgggcggtggtgcgaacgatgagcgagtgcaggcgctcgggcgctttcgtggacacacgatcggcgggctcgaatcgtcttcgcctcgccgttccaactcgatgccgcaggccgagatggatggggcgggcgaagaagcgcacccgcacgtgctgaggcgcctgcagccggacgcttcgaccagtccgcgtgcggccggccgggtgcgtgcgcagatggtggaggacgtcgagatggagccctgggcagcgtcgtcgcgcccgtcgagcgtggtgctgcaggaggcgcgcgagacgctcgccaacaccaaacagcagcagcaggagcagatgctgcgtcaggcacacgacgacaaggttgcgctggctgacgcacccgagggcgccggtcgcatggccatccggggtcttctcaatagctagcgtacgccgcggcggtacgcagccggactaggagctacatttctggatataccttcagagacggctggcgagtgccagcacttttatacccttttttcgcatggaatcggagcattcgctttg

SEQ ID NO: 12783 - DNA, 3088 bp, Oryza sativa
  ref <308>: DATABASE ACCESSION NUMBER: AK110131
  ref <309>: DATABASE ENTRY DATE: 2001-12-06
accaccaccaaccacacactctcgacatggccgacgcacaggtgctcacacctgaccaggtggcacaacccctcgctgcccagcagcagcagcaagcctccacctcatccacctcatccgccagcacaccgtcgaaccgtctcaagacgtcgttcgaaaagcgccgtgccttcgagccgttctacactggcggcgccactgcactcacgcccgacggcacgctgctctttgcggcgctcaacgaagacgtctctgtcgtgcacgttgctacgggcaacatcgtgcagcgcatcgacggcgatacggaggaaatcaccgcactcgcagtcagccccgatggcgcgcgtttgatcgtcacctcgcgctcgctgtcgctgcgcgtcttcagccttccggaatgcacactcgtacgcacagtcccaaaggcgcacgcaagccaggtcaacctcatgtgcgtcgatcccaccagcacgctgctcgccacgggcggctcggacggcgtggccaaggtgtgggacatcgcgggtggcttctgcacgcatgcgttcaaggggcatgccggcgtcgtatctgcgctggcgtggaacctcccgcctgctgaaacagcgacaaagagtgcaaagaagggaaagaagccgcagcgcgtcatgcatctgctgaccggatccgtggatggcaaggtgcgcgtgtgggacctcaacaaccaggcggagctgcacaagcccgtcgccacactggcggggcacgactcggtggtgcgtggcattgccgtggctgagcgtggtgatgttgtcgtcaccggttcgcgcgatcgcacgctcgtcgtgtggcgtctgggctccaacgctccctccgccgcagcgtggaagcaggccgagacgctctcggccaacgaaggcatcgagtccgtcggcttcctacctacccgcaacaccttctggacaggcggcagtgacggccagcttcgactatgggacgtatccagctcgaccattatcgcgcgcgagccgcgttcgttcaacgagcgactcgctgcccaccagagcgacgacgaggagacgcgcgccattacggcggtgcacctcgtatcccccgcgcagggcgaggcgtggctggtgtcggtgcatgcggatctgaacatcgtcgtgcgctccgcaagcccgacgcagccgctcaagaaggtgcgtcagctcattgggttcaacgatgagatcgtcgacgtcgcgctgctggcctcgcacggcgcggcggagacgcatctggccgtcgcgaccaacagccgcgcgctgcgcgtgtacgagctcggcagcgacgagacgagcgccgagctgcttgccgggcatacggatattgtgctgtgcgtcgataggtcgcccgacatgcggctgctcgcctcgggcgccaaggaccgtaccgcgcgcatctgggcatgggtccccaccaaccgcctctcccccaccgacaccacagatgcggatggcgatacgggcaagcgcatccgtcgtcccactgctgcgttaagcgacgaggtcgactcgagcgagggcgagggcgagggagagtgggtctgcgtggcggtatgcgaggggcacgccgagtctgtcggcgcgattgcattcgcccgccgcgccaccaaacccggtgcgccgtacgcgccgttcatcgtaaccgcctcgcaagaccgcaccatcaagctgtgggacctctcccctctcaccgcgctgctcgaatccaccgccgccatctccgcaccgctctcgctgaaatcgctgttgacgcagcgcgtgcacgacaaggacatcaacaccgtcgatgtctcgccgaacaacgccatgatcgccacgggctcccaggaccgcaccgccaagctcttctctctctccttctcgtcttccccctcgggctcctcggcacgcgtcacccccctagctgtgctcaaggggcataagcgcggcgtgtgggcatgtcgcttctcgcccgttgaccttgcgctcgccacggcgtcgggggataagacgatccgcctgtggtcgctcagcacctttgcgagcgtcaaggtgttcgagggccacacgaattcggtgctcaagctcgggtttgttgcagcgggcatgcagcttgtgtcgtgcgcgggcgatgggctcgtcaaggtgtggaatgtcaaggacgaagaatgcgctctcacggtggatgcgcacgatgacaagatctggtctttcgccatctcgcgcgatgagggttggtttgtcagtgccgctgcggacggtacgatgcacgtgtgggaggacaatacgcagcagcgcctcgaggtcgagcgcgagcaaagggaggacgaggtgaggatggaacagcagttcgccaacctcctaaccacccgcgattggcgcaatgcgatcgtgcttgcgctgcagatggaccaaccccgccgcttgctcaacctctttacccaggtcgccaactctcgacccgacaccatcggcggtttgatcgatgatgcgctcggcggtagtactggtggcgatgctggatcgatcacgggtctggctagtgtcgatggggtgttggccacactgtccgggtcgcagctgatccagctgctcaactatgtgcgtgactggaacacgtccacacgcacatcggccatcgcgcaaaccctgctgcacgccatcctctcaacccacactgccgcatcgctgctggcgctgttcgacagggaggccaagacgcagcgcgcggcgattgcacagcgcgccgaagacgaagagctcggcatcgccctaccgcgcaccgacaaagtcagggcccagcagcgccgccagcatcaacagctcacgctcgaccttgcttcgctcgtcgatgcgctcaccgcgtattcgcagcgacacttccagcgcgccgataggacgcgcatcgaggcggccatgctcgaatactcgatcaccgccatggactcgctcctaggcccccaagacgacgacgacgaccagccccaagacgcgtttggagatcaaatccacctcgagtcggaacaggagcaacacgaggatagcgatgtggacatgtccgagtaatctcagtctgtattgct

SEQ ID NO: 12784 - DNA, 3033 bp, Oryza sativa
  ref <308>: DATABASE ACCESSION NUMBER: AK110132
  ref <309>: DATABASE ENTRY DATE: 2001-12-06
atcacaaacctcaccacgtcacaggggcgctcgcagctccatagcgggcacagcagcagcagcagcaacaccgtgggagccaagactctgagcgccaccttcacctacacgccatcacggctcgctaacacacacggccgggcggctgagcacgagcagcgatggactacttcaagtcgctcagctccgccgcctcttcggtgctgtcggcaacgcgctccggcccacttgccaacttcaccatcggccaggagctcgtcgagtatcgctcccgctcgctctggtcgctccactcggccaccaagcgcgacgacaactccgcctgcaccgtcctcgcctttgacctctcccacccgcacaacgccacccgcgccaacctcctcccctttgcaaaaaacgccgccaggaagctacgcaccacgcgccatcccaacgtcctcaagctcctcgacagcgcagagaccaactggtccgtctacatcgccgtcgagaaggcaaccccgctctacaaggtgctcgcacagtccgaggacaagcgcgcaactccacaacgccaggactggatcgtatggggcctctcgtccatcgtcagcgccctcaagttcctcaacgccgacgccgcctctacccacggcaatctgcgtcccgagtcaatcttcatcaccgcagcaggcgaatggaagctcgccggattcgaagccctcactccacacgcagaggctcctcatggtctgctcttcacccagggctccctgctccccgatgcaaaccgatatgcgccacccgaagtgaggcagaatggctggaacattctttcatccatggattccaccttgctcgacagctatgcgctcgctctcgtcgccatcgaggctttcaacgggccgctgcctccacagaccggtaccgcagcaccaccacgcggccacgtcccgcagcagctctactcggcgctccagcgcatgctcgtgcccaacgccaagacgcgcagcaccgtcgccaaggtatgggaggccggcgagggcgaaggcggattcttcaaggaaaacacgctcgtcaaagccgctagaggcctcgacggcttcctgctcgccacggaaaacgagaaagctgacatcatcaagctcctccagcagaagcccgactcgtttacgcccgactttttgatgtacaaggtgcttcccaccctggtcgccgccctctccgccgtaccaccgccgggcaccatcccgtccgccagcacgcaggcctcggtgctgcttccgctcgtcctgcgcctgggccaaccgctgcccaacgacgaatggacagccaacgtggtgccgccgctgctcaaggcctacgcctcgcccgaccgatccacgcgcatggcgctgctcgagaacctctcgctctacgtcgagcgcatggacaaccgcaccgtcaccgacaagctgtggcccaacctcatcaccggcttcaacgactcggtcgccgtcatccgcgaggccacgctgcgcgccatcctcccgctcgcgcccaagctctcggaccgcatcctcaacaacgacctcctgcgcgtgctcgcacgcacccaggtcgacccggaagccggcatccgcaccaacaccaccatcctgctcggccgcctcgtgctgcacctctcggtctcgacgcgcaaaaaggtgctcatccccgccttctcccgcagtctcaaggaccagttcgtgcacgcgcgcgtcgccggtctcatggcattgatggccaccggcgactcgtttgaccacgacgattgcgcgcgccaggtggtgcccgccgtcgcaccgtgcatggtggacaaggagaagctcgtgcgcgaccaagccgacaaggccatcaagatgtttctcgaaaagatcaagtcgggccgcgcaggcatgcccgacaccgcgctcagccccgaacagctcgacagctcgacctccttcagcagctccacggacggcaccaatggcgccggctacgcgagctccatggccgcctccgccggcagtgcagcctcggcgctggcgggctgggccatgtcgtcggcgctctcgtcgctctccaactcgtcttcggcaccgtaggtcgccgacggccgcccgctctcgtcggcggcagagctgcagtcgcagatggacgggcgaagcacgccagccacatcagtcggcacgcccgccacaccgccctcggcacccgtcccaccctcgtcggggctagcgagcctccggctcggatcgggcgctgccgatgctgccgactcgtccagctggctttcggaagcatcgagctcagccaccgcggccaagtcggcgctcgactacgatctggacgacgatgcgccatcggcgtcgacggcgcaggcgttcgccgcaccgcccgccgctgccaacacggacctcatggacgtcaacgacgatagcgccgactggtcgagctttgaggtggggcagcccaagaagaaggcgcccgccgtgggacgcaccaagatggccaaggccaagcttgggcctcggcgcgcggcggcggcgggggcggcggcggctgcagcacgttcggcgtcggcgccggtggcgccgcaggtggatgcgacgcatgcgatcgagcgcggcagtttgcgagtagccgcacccgtggagcaggaggcggcggcgtggggtggtgacgagggctggtccgcgcctgctgctgagagtgccgaggcgacgcccgagccagcgggggcggagctggctggatcgcaggagctgacagcgcaggcgttctcggcggtgccggcgtcgatggccgtgccggcgcccgacgacccgtgggcatccttcgacgaccaggacgacgtgcaagacgagcgcagccgcagcgcgtcgcccgccacgcccgccgccgcggcgccgctgtcgcgagaggagaagaaggccgagctggagcgcaagcgcgccgagcgccggcagcgcctcgagcagctcaagcgcgacaaggagcaggcgcgtctggcggcgctgtgagcggcaatgcacagacccttttttcccc

SEQ ID NO: 12785 - DNA, 3735 bp, Oryza sativa
  ref <308>: DATABASE ACCESSION NUMBER: AK110133
  ref <309>: DATABASE ENTRY DATE: 2001-12-06
ctccctggataagcttccaagaggctggaccggacatcagacagcgtccgttcctaatcttcagctccgcccatctataccaagccaccacagacgggcacgacctccacaagcgcaaatttgcttcgggccatgtccgaagcctcagcagctgcctctgctgcccaaacttcactgccagccgttcaaaacctgcatctgtcatcagcgcaagcatcaacgagttcggtccagcccggtcgtgagccaagtcgcggaagcaaccgcggtcgcggccgaggccgaaggaacgacggaagcagggcagaccgcactgcgaaagccaccgaccggagttcctcaggcgctgatgggacgccttcgtcatcatcagcaaccgcccaaggtgctcgcaagccaaactcaaagaagaagtccagaagaggcggaagctccaaaccaagccaatcgaatgggttcgccgcagacgtagcagccgaatcgaccgccagccagcaagacaatgcaccacagccacgcgtagcagctcgccgccagcaattcggcggtaagctcaccggaagctcggccaatgccggtgatgcgccagcctcctcagcccaacaaggtgccaaggcgtctcagaacggacgcgccaagaagccagcggtcaaggtgccggctgtagctgagcccgtcgagtatgccgacctgcgatctcgtcttctcgccgagctctcgtcgggcgagtacgactgcgtcatctgctacagcaccgtcaccacacgccaggccacctggtcgtgctcacagtgctactctgtgctccacttgccatgcgtgcgcaagtgggccgacagcagcgtcaagaaagccgaagagcataatgctatgcaggaagacccagagatccgcaaccgccgcggtacctggcgatgtccaggatgccagtacgcaagggaagacgtccccaagatctactggtgctggtgcggccgcacgcaagaccctcctggtggccgcggtgccaatccgcatggctgtggccagcgatgcagccgcgggaaatgcgctcatggctgcgctgattcgtgccatccaggaccatgtccgccgtgtgccgtcaccgtctctcagaaatgcttctgcggtgcccaaaccatcccaatgcgctgctcgcagaccgcagccaaggaggcgcgtctctctgctctgcatcaacgcggcacctcttgcggtggtgtttgcggcaagaagctggactgcggcagccatacatgtgaggatgtctgtcatcccggcgaatgccaaccttgcggcatccaagtggatgcgcgctgctactgtggcaagcgcaccaggacgatgcgctgcggagacggcgtcccccaagacagcttcgacgatgagagcgcaattggcttccagggccgcttcaactgcgatgacgagtgtcggcgtcccttcgattgcggtgtccactactgctcgaagccctgtcatgcccgtgatccacagaggcccgtttgtccttcctcgccaagtctcgtcaagacgtgcccttgcggtgcgattcccgtcacatctcgcacgtcctgccaagacccaatcccgacgtgcggcaatacgtgctcaaaggtgtcgatctgcggtcatccgtgccccgcggtctgccacctgggaccttgtccgccatgcagggtgcccgtgtcgacgccttgtcgatgtggagagacaaagcagagccgaacttgccacgaacgccagcaggaagaactcgagggacgccaggaggtgctgtgctccaccgtgtgccagtcgctgcgccactgtggcaagcatcagtgcaaccgccaatgctgtcccctctacttccaggccaagagcaagtccaagaaacgacccacgttggccgagctgcaagctctcgatccggccggcctgcacgagtgctcgatcccgtgctcgaagccgttgccctgtggttcgcacgagtgcccaatgacgtgccaccgtggagcttgtccgccgtgcctgcaggcgagtttcgaagagctgatctgccactgcggtcgcaccgtcctggagccaccggtgccatgtggcacgcaggtgcgatgcaacttcccgtgcgtgcggccgccgccgagctgtggccatccaaagatgccgcacgactgccacgaagacgagccttgccctccgtgcgtctacctgacggacaaggtgtgccactgccagaagcacattgtcaagaacgtgccatgcagccgatggcgcgtgtcttgcggacagccgtgcgatgcactgctcaactgcggcttccaccgttgccaaggcatctgccacatcgctggacaagagtgctcgccctgcgcgcagacgtgcggcaagccacgccgactgtgtcagcacgcttgccaggagaagtgccatgcgccgtcgtcgtgccccgagacggaaccatgccaggcgatcatcacgttgcagtgcgcctgcggcaatctgcagtcgcgcatcaagtgtggcgtgtcgattcatgctcccaacaaggaaaagtcgctcaagtgcaatgactcgtgcatgattgcgcagaggaacgccaagctggccgaggcgctcggcctgaatccctcggagaagacggcaccggcctcttacgaatacggcacgctcgcatactgcgccgttcctgccaaccgcaagttctgcgacgagttggaagcgacgctgaacgactttatccgctcgccacgcgcgggcatgattctgccgccagccaacaagttccaacgcgcgttcacgcacgagctcgcggcagtgtacaagctggccagcgagagtgtcgatcaagagccgcgtcgcagcgtcagcatccgtcgcaaacaagacagccgcattccgaagccgttgctcaccgaggcattcgcttcggctcgagccacgctcatgtcgaatcagcaccagccatcgtcgtcgcatctgcagtctggcaagtccgttgggctcgctcagctgcaacgaccgtcggctgaagctccaaagccgctaaacgccgtattcctgcctggcgtgtttggtcacgaccaggactcgctgcgatcgctgttgcaacccgtgctgcgcgcgatcaactttgtggtgacctggaagggcgacgaggatgtgattgtcacgtctcccgactctccgactcggctgatcatgatgaagaccgaactcaaggcgcttctgcgtcgcgagcagtttgcacgggatgccatcctctgcacggtggatgccaacaagaatgtcgtgcgcagggaagacgagccgctgctcagcaatggcggccgcgcctctggtggcgccgccaggggatcactcgccatgaaacgaggcggtcctggagtcggaggcagtggcagtggctcggcagggctgggcaaagcaagcccgaatctggtcggggaccggggctgggcatctgtagcgtctggatccggtcgcaactcgcctgcgcaggtcaacgagcctgtgtgggggcagcccaccatggccgcccagacgaatagcgtacgcacgacggctcccatcgccggcatcatcccgaatccgaacgcgccacgaccggcagctgccgacgttcccgccgcagctccagccacagaagcatcgaccgccgaaggacctgtgcccgaaagctgggaagacgagagctgatccggctttcatttgtgcccttcagatcggtgcaatgaaagcaagattaccgtt

SEQ ID NO: 12786 - DNA, 3008 bp, Oryza sativa
  ref <308>: DATABASE ACCESSION NUMBER: AK110134
  ref <309>: DATABASE ENTRY DATE: 2001-12-06
accatcgcatcttcgcttcgcatcgcatcgctcacatgcgctgccttcgtcacgctccttagcaatctcgcccgccatcatgtccaatcatcccgcttggcacgaccagcagccacagtacccaccccctccaccgcaaccaacgcgacatcactcgggcatggatgcctaccaaggaccatcgccctcgtcctctacacagcagccatcaccgtacaacagcgcgccccaacacactgcatcctatccgcacgcgcatcttccacccccagcagccagacataccccgcagcagcagcagcagcagcagcagcagcagcagcagcagcagcagcagcagcagcagcagcagcagcagcagcagcagcagcatccacaacaaccgcaatgggcgtccggcacgagtcaagactttggcggtcctagccccgccaactcggcgccgcgttccaacagcggatacacaggcttcgaccctccgtccgcgtccaacaacagcccgatgcgccaacatggaggctcgcacagctccgcttatacctcacactcgccctacgcaccctcacagtcgcacgctcccgacgccgccatgcatccccagcgctcctccatgccctcgcactacgactaccaaaacaactatccgcatccgcaccatccgcaaaacccacagatgccaccacaacaccatccgcatccgcatccgcatccgcatccgcatccgcatccgcatccgcatccgcatccgtctcaacaacaacaccaccaacaggcgcactggaacactggcccgctcccttcggtgcttcagccccagtccgcaccgctctcctcgacgcccagcagcaatcgcgggcccagcgctccgccgcctccgcagcaccacaccatggaccgtgcctaccccaacatcaagcacgacgacgacatggacgacgacgacactggcaactacgacgactttgaccccaagggcaaggcgcgcgccgctgccgatgccatgcaggccgccaacaagggcaccagcgatttcgtcaagaagctcttcagcatgctcgacgacaaggcgtacgacagtgtcgtcgcctggtcgccatccggcgagagcttcatcgtcaaggacatgaacgactttacaaaacacgtcctcccgcgcaactttcgccactccaactttgccagcttcgtgcgccagctcaacaagtacgacttccacaaggtcaagaatcccgaggacggcgccgccaccgtcggcgagcacgtgtgggagtttcagcatccagactttgtgcgtggccgcgacgacctgctcgaaaacgtcaaacgcaagatccccgcaaagaagaagcccgccaagcccggcctggtcgatgccgaccgcgacgacagccccgccatgcccgcgcccgtgcagatggaagcaccggaacgggcagagtcgaatgcagaactcagggcgcaggtggcccatctcaccgccgcgcaggaccagatgcagaaccacatcctcgcactcacaaaacagtaccagggcgtcatcggcgaaatgctcaccttccagcgcaacacgatccagcaggaccagctcatgcagaacctcatccaatacctcatcaacctcgaccaggaccgccgcgtggatggcgcacccgccccaccctccgcatccagcttcctcgcccacatgggcgccaatcagggcttcctcgccacacccgctcccgccagtgcgggcccgcatacggtgggggtgcccgcgcccgtgagcggtgccgacgctgggccatccagccatgctggggcggcgccgccgctgtcgcccaagagcgtcgcgtctccgctcgacgccacaggcagcacgcccgagatctcggcgcagctggcgtcgctgcgacagagcaatccgctggcgcccatgatgctgcatccgccccacctcgatgcggacccggccgatagctcgttggtgaatgcagcggcgagcgcggcgcgcaacccgagtctgtcgtcgttcgaaaaggcgggtctgcgcgtgtttaccgtgggaacgctgcagccgcgcgactcgcctggcgatcccacacccgccccgccacaggagcttgcgccggccgggctgcgcaacgggtcggcggggtcgtcgttcgacgtgcatgccaatggcaaaggcaaggaggctgctgacgacaagaagcgcacgcctacgcccggcgagggtcacccgagcaagcatctgcgcgtgcgccgatccacactggttcccggctgggcggtgcccccgcgtgtcctgctggtggatgatgacgaggtgtgtcggcgtctctcgagcaagttcctgcaggtgttcgggtgcagtatcgactatgcggtggatggcatgtcggcggtgaacaagatgaatctcgaaaagtacgatctggtgcttatggacattgtcatgcccaacctcgacggcatgccggcgacgtcgttgatccgacagtttgatccgcgcacgcccatcatcagcatgacgagcaacagtgggccttcggagctggtcaactacatgtcgagcggtatgacgggtatcctgcccaagccgtttaccaaggaggggctgttgaatatgctcgagaagcatctgttgcatctcaaggcggcgaggggtacggggcaggaatggcccaagggtgtttcacctgcgccggcggcgacgcccagtgggacagcgcagacgggtgcggatgatgggacgcttaacccgttggcggggatgggctttacggatgaagagtacgtcgccatgctgcagaacttgatcgctgcgggtactcaggatgacgaggcgtttggcatcgacctcaaggacggcaagaggatggcagacgagagtggcggcgagaacaagagacagcgctttgtcgattcgtagcatggttgtaccatcccacacaagtgtatagtagtctgggaccgtgcacatgtgcacacgcaagtgggaacacggataccattgtcagaatgcg

SEQ ID NO: 12787 - DNA, 3774 bp, Oryza sativa
  ref <308>: DATABASE ACCESSION NUMBER: AK110135
  ref <309>: DATABASE ENTRY DATE: 2001-12-06
atctcgcatcgagcttcgaggtttccgctccccgctccccagagtcgcacaaacggtgtcctggtatcaaagataagatagctcgacgaaaccgcaagcggtggtgacaagctcctcgagtcgttctctcgacaaccatgtatcgaagtgtgcgagccttgtcgcgaggcgccaactcggccgcctcgcaggtcgcttccacctccaacctcaagctgcccagcgtcgctcgcagccttcacagccaggccgcaaccgcgtcgttgcaccgcgccagcctcgcaacttcgggcaccaagatcttccgttcgcgattctccacatccgccctgctcaaggaacccgcgcccaccgccgtcgccaaggccgccgtcgaggacatccagcccgccgcaaccggcctccaaaagtggagcaagtacctccccaaggtggagcgctccgacgtcaagaaggtcctcctcgtcggctccggcggtctctccatcggtcaggccggcgagttcgactactccggctcccaggccatcaaggcgctccgcgagtccggcatcgagaccatcctgatcaaccccaacatcgccaccatccagacctcccaccacctcgcaagccagatctacttcctccccatctcccccgaatacgtcgcctacgtcctcgaaaaggagcgccccgacggcgtcctccccacctttggcggccagagcgccctcaacgtcggcgtcaagctcgacgagatgggcgtctttgaccgtctcggcgtcaaggtgctcggctcccaggtcgacgtcctccgcatgtgcgaggaccgcgacctcttcgtccaggcgctcgaccagatcaacatccccgtcgcaaagtcagaggccgtctccaccgtcaaccaggcgctcaaggccgccgccgagatcggctaccccgtcatcgtccgtgccgcctatgcgctcggcggtctcggctccggcttcgccgacaacgaggacgagctgcgcgacctctccgcccgctccctctccctcagcccccagatcctcgtcgaaaagtcgctcaagggctggaaggagtccgagtacgagatgctgcgtgaccaggaggacaacgccatcatctgctgcaacatggagaacttcgacccgctcggcatccacaccggcgactcgatcgtcgtcgctccctcccagaccatgtccgacgacaactaccacatgctccgctccgccgccctcaaggtcatccgccacctcggcatcgtcggcgagtgcaacatccagtacgccctcagcccggacagccgcgagtaccgcgtgatcgaggtgaacccgcgcctgtcgcgctcgtcggcgctcgcctccaaggccaccggctacccgctcgcctacaccgccgccaagcttgcgctcggctacacgctccccgagctgcccaacgccgtgaccaagaccaccacggcgtgcttcgagcccgcgctggactacgtcgtcaccaagatccccaagtgggacctcagcaagttccagcacgtcaaccgcgaggttggctcgagcatgaagtcggtcggcgaggtcatgtccgtcggccgcaccttcgaggagtcgctccagaaggccatccgtcaggtcaacccggcctacgacggattcgacgcctacattgcgcccgaggacctcgaccatgcgctctcggtgcccaccgacacgcgcctctttgccatcgcctacgccatgctcgtcaagaactacgacgtggagaggctgcacgcgctcaccaagatcgaccgcttcttcctctacaagctgcagaacattgtcgacatcaaccgccagctcgaagcgctcggctcgctctcggccgtcgacaaggagctcatgaagctcgccaagcagcgcggcttctcggacaagcagatcgccaagctgaccaactccaaggagcacgaggtgcgcgcccaccgcaaggcgttcggcctcacgccgttcgtcaagcgcatcgacacggtcgccgccgagtacccggcgcaaaccaactacctctacaccacctacaacgcctcgacgcacgacgtcgagttcgacaacgacggcaccatggtgctcggctcgggtgtgtaccgcatcggctcgtcggtcgagtttgactggtgtgcggtgacgtgtgcgcgcaaggtgcgcgacatgggccaccgcaccatcatggtcaactacaaccccgagaccgtctcgaccgactttgacgaggcggaccgcatgtactttgaggagctcggcttcgagcgcgtcatggacatctacgagcttgagggtgcgcagggcgtggtggtgagcgtgggcggtcagctgccgcagaacattgcgctgcgcctcaaggagacgggcgtcaacgtgctgggcacggacccgctcatgatcgactcggccgaggacaggcacaagttttcgcagatcctcgacaacgtcggcgtggaccagcccgagtggaccgaggcgacgagcgtggacaaggccaaggagtttgccaaccgcgtgcagtacccggtgctcgtgcgtccgtcgtacgtgctgtccggtgcggcgatgaacgtgatttgggacgagtcgacgctcgagcaccacctcacggcggcggccgaggtgaacaccgactaccccgtggtcatctccaagttcatcgacaatgcgcaggagatcgacgtcgacgccgtggcgtacaagggcgagctgctggtgcacgccgtgtcggagcacgtcgagaatgcaggtgtgcactcgggcgatgcgacgctggtgctgccgccgttctcgctggacccgaacgacctggcgcgtctcaaggtgattgcgcaaaaggtggccaaggcgttcaacatcagcggaccgttcaacatgcaggtgatccgcaagccgcctacggagggcgagaccgaggcgccgctcaaggtgatcgagtgcaacctgcgtgcgtcgcgctcgttcccgttcgtgagcaaggtgctgggcgtcaactttatcgacattgcgacgagcgcgattgtgggcaaggacgtgccggagccggtggacctcatggctcaggagcgcgactatgtggcgatcaaggtgccgcagttctcgtggacgcgtctggcgggtgcggacccgtacctgggcgtcgagatggcgtcgacgggcgaggtggcttcgttcggcaaggacctgtacgaggctgcatgggcgagtatcgcatctcagactgcattccgcgttccgcaggccaacaccggtgtgctgatgggcggtgacatcagcaaggagcagttccctcgcatcgccaagaagctcttcgacctgggcttcaagctgtactgttcggatgccgaggtggaggagtacatcaacagtctggacggtgtgcgtgccaagcgcatccgattccccgtcaaggacaagcgcaagctgcgcgaggtattcgacgagcacgagatcaacattgtgatcaacctggccaagttccgcggccgcgatttgctggatcaggactacgtggcgcgtcgcaacgcggtcgactttggcattccgctgctcaacgaggctcgcagcgccgagctgtttgtggacgcgctcaaggccaggatgccacacggctgcctgcgtggctacgaagagggcaagatcccatccgaggttcagccctggaagtactttgtcaaggaggaagccgaggcgcacaagtgaaaagctccacccaaagcaccaaaagcatgtagttttcaatggattgtgtttagttctccccaag

SEQ ID NO: 12788 - DNA, 3355 bp, Oryza sativa
  ref <308>: DATABASE ACCESSION NUMBER: AK110136
  ref <309>: DATABASE ENTRY DATE: 2001-12-06
accatcgttcctgacatcgtcgcggacccccaactcccatggatcacggagcacctggaatgcacacatcgaaccgctaaaggaaccctattcctgatccgcgcgctcataaccgcaactgctggtcgatcgtcgaacctggctctcttggacctcgacgatgctgtcctctcgcgccgcagcggggggcgacccgaccgaagtgtccgagacagcacaggcgcttctcaaggcgcactacggtcgtctgcgcaccgccacccactcatccgaccgcgccgtattgacaaaactcgagagtgccgctgcgaacctcgagcgcatctgcctgcagctcgacaacatccaggtggcgcacgagctgcgatcgggccagccatccgcacaccaggcctcgcgcatcctgcagccgctgggtgcacttgcattctggcccgcacagctgcatctcaaagacgcaagcgtctttgtccggcaggatgtggcgggcctgtcgatagccgaccagcttgcgctcgaggatgctgcgttggcaacgctcacccaatcagccggaaaagagcgcatcaccagctcggtcaggctcaacgagccgagccggacgattgaagtgacgtacgtcaagacatccatcaaggacgcacagagccacctgcagacccgcaggagtcgcttcctcgagcatgctgcacagctgcgcgatcgcatcgcaccagacagcggcacaaagcaagaccaggcactaccaaaggatatccacatggtcaatgatgagaaccaggcgctcaacgaggagggcctgccgttctttgagccgatcgaaaaggtgacggacgaagaggcagcgcaaaggaaggaggcgtatatgcagccgtttgtgcgcgacaacgacgagcgcgccgccgacaagcacaagcgcaggctctggctagagcagacgctgagcaagctcgaacaggaagaagagcaagagcaagacgacgacgccgatactgatgctgctgtcgagccaagtacctccgccgcagactcaagtgcgcccgccacacagaaagacgacgcaatcgacgctgcggaagagacacgcgtggtgctgcgcactcggacacccagtccgcctccttcgcccgaagaccaagccaacgccaagtcgcttcccgagatcgtctcggccgcgcggccgccgcctgccaagtcggcgctcaagatgggtctggcgcggccgccgatcaaccaacgtccgtcgttcggggcttcgggcatccgtcacggcttcctcaacctcaatccgtccagtcctggcgccatcaagagctcgtactcgtgggaagacctcgaaaaggaagacggccaggaacggccgtcgcgcagccacacacccactccgctcagccgcaccagcagcacggccgaaacgtcgctgcttgggcgtgtgaccgatgcggcatccagtccgatgacgagcggcacgagcacgcccaccaagaagagcgtgcgcatcaagtcgcccgagcgcgcgcatcccgaagcttcggcgcgctcgggcctgacgccgctccagcgcgcgctgcggtccagcattcgggtcaaggagaactacgcagacaccactccggcgccatcggcagcggcggatgcggcgtccgcacgtgcggactcgggatccggcaccgccgagaagcgccatcgcgacgacgtgggtgtcgaggaggaggcggagcgcatcgtggcgctgctcggacccgatgtggtcgagggccatccgagcgccccgcccacggacgtgctgaggcagatgcagcaggctcacgaggaggaccaacgcctctcgacgcccgaggccgtcgcagcgcggcagaagcacgaggaagaacagcgcgaaaaggagcgcatgcagcggctggcggaaaagcctgctctcggccatgcggtcatggagcgtcccaaagccacggctggcgcagccgagggcaagagcgccgcgaatggcgccaccaagttcagcgcgttcaagaaaggcttcctcagtcagaagcccaagtttgtgccgaatgcaccggggccgagagtgccgacggcgccgaccgagtcgctgggcatgtcggcgctcgatcgcgcatcgatgggcgacgacgagctgagcgcgcgcaggcaggccatgggcttgcccgccgccgtgccgcatgcagggccgtccaaggcctatgcggagaagatgcgacagcgccaggagggacgcgtagagcaagacgcatcccggccgggcgagggcgcgggcgccgactcggaagacgagtactttgactcgtacctctcgtcgcgctcgcgacgcgcggcagctgccgacagtcggggtatcgacgtcgatcatgacggcaacgacgacgacgacgatggcgacgactttgacgacgatgcagaggactgggacatggacgatgactttgacgatgacgaggacgagtacgactacgacgccgacgatctcatggcgctggcgcctccgatgggtggcgacgcggatgggctggcgtcacatccggacctcatgaaggagtacgagcaggcgcgcgccaagctcgctgccatgggcctggccatgcctggctcgagcggtgctggcagcagcagcgctgcagtgctgccggccgaggagtcggacgacgactatgaggacgacgtggtgccgctcgatgccgcgatggaagatcccgagtaccaaggcaacaccgtcagcgacacctctggccgctcgcgcatctcgcgcttcaaagcgtcccttcagcaacgctcctctgccgctggttcatcccagaagctcgaggacctgctgtcgtccgcgcagaacctcggcgacggccaagctgccaatggcgcgacctcggcgtcggctgcatttggcatggacggcttcgatggtccaggtgagaaagggcccgtgatgatcatcccgcagcttgcgcctgtacgcttccccaaggacggcgatcttgtggagggcggcgtgacgggcccggttgcgctcggcggtgcggacagtgacgacgacgacgaaaaggccgagatggtgatgcgcagccggctcgagcggcgcgagtggaagcagaacaaccccgagcaggcgcggagggagaaggagagccgccacaacagggatatggtcgagcagggactcgcaccaccctccgttgcaccgcgtcggcaagcggacaaggccgaggagcacgcaggtgcgggcgagggaggaatgcagaaggaagagcagcaacagccaaaaccaaagaaggtgagcaggttcaaggcggctcgtcaggcacagtagacgcaacgcaacaaagtggcattgcacagcgag

SEQ ID NO: 12789 - DNA, 3181 bp, Oryza sativa
  ref <308>: DATABASE ACCESSION NUMBER: AK110137
  ref <309>: DATABASE ENTRY DATE: 2001-12-06
atcgctccccccctccctcaacggctttctcatagtccttcgacgcatcgttgtgcagacaattggctcgctggtatcgccgaccctgcttcacccgtatcctcgcttcgcctccatcctcctctctctgtaacttctgcttggcgagacacggccgccctcgctcgagcctcgagctctgcaaacgacacgctacagcaggcattcatcgtaggctcggctgccaagatggaggacgatctcgacatcaagcgcgaggaccagactacgcgacctcgggacggaggttccgggagcgacaagcccagggtgcaccacggcggcaagaggcttcccgtcgaccccttcgcagaggacgacgatgaggacgaagaagacgaagacgatgatgacgacgaggacgatgacgacgaagatgacgaagatgacgatgaggaggatgcgcgcggcagtcgaaggcgcgccaaaaagcaaaggcgcaaccgcttcctcgatgtcgaagccgaagtcgacgacgacgaggaagatctcgacgaagaggaggaggagctcgcgcgagaggatggctttatcgaggaggacatccccgacgacaccgaagacatccagagacgcgccgccgccgacaaccagaggctcgaccgcttccgaagacaggaggaggacaccaacgcagaggcgatcgcagaagagttgcgtcagtgatacggccgctccgctcgctatgctgcccagtcagactatgccgaggtgcctcagcgcctcctcatgccctccgtcgaggaccccagcttgtggggtgtcccgtgcaagcccggcagggagagagacattgtcatgacgctcgttcgcaaggccatggccgaaaacttcacatccaaccccatgcgcatcatctccgccttctgccgcgacaccatcccaggcaaggtctacatcgaggcccgcagggcagacgacatcgtcaaggcccgcaacggcctcgcaggtgtctatgctcgacagaccacctcgctccacctcattcccatctccgagatggccgacctgctcaagcttcaaaaggtgcagaacgagatccaggtcggtggctgggtgcgcatcaagcgcggcaagtacgccggagacctggcacaggtgctcgacgtctccgagaacggcgaggaagtcggactcaagatgatcccgcgaatcgacctcagccccaaggacagcggcatctacaccgacagcctcggtcgcaagcgcaagaagggtcccggcgcctccgctgccactgttgcctttcgaccgccgcagcgcttcttcaaccccgaagaggtgcaaaaagcataccccaaggacacgcccaccaagcgtggcaccgtctgggtcttccagaacgacagctaccgcgatggctgcctcgagaaggacgtcagagtcaccggcatcatcaccgagaacgtcaacccgaccctcgacgagatcaccaagttcgccggcgaaagctcagccgaggacggcatgtccaagctcggcgccgtcgatctcagtctgatcgccgacgcgagcaagaaggcgaccgaggcgctcctgcagcccaaggaccaggtcgagatcttcgagggtgagcaggccggtatgtacggtacagtcaaggcgatcaacaacgaggtcatcacgatccagctcgagcacgaggacttgatggaccagattgtcgaggtgcccgctcgcagtgtccgcaagcgcttcaagcccggtgaccacatcaaggtcatgtccggcaagcatgccgacgagaccggtctcgtggtaaaggtggaggacaacgtgacgacgttcctgtcggatctgtcgatgcaggaggtctcggtgttcagcaaggacattcgccaggcggccgaggtgggctccggtgtcaacgtcatcagcggctacgagctgcacaacctcgtccagctcgatgcgcagacggtcggtatcatcttcaacatcgagcgcgagagcttcaaggtgctcgaccagaccggtcaggtggtcatcgtcaagccgcaccagatcagcagcaagaaggacaccagtcgagcctttgcgctcgatcacgacggaaacgagattcgcgccggcgacatggtgaaggaggtttccggacccttctcgcgcctgcgcaacggtcaggtgctgcacatctaccagtccatgatcgtcttcctgcacaaccgcgagtatacggagaacggtggcgtgttcatcgcacgcgcacgcacgctggagccgttggcgcccaagagtgtctcgaccaaggccaagaaggagggtgacgacctgtcgaggatgaatccggcactgtccaacctcggtggtggagccaacgacgtgcgcgtcgagggtgtggggcgatttggtggacgcgacatgcacaagggcaagaacgtggcgatcatcaagggcccctacaagacctaccgcggacgcatcaccgagacgacggacaacatggcgcgcatcgagctcacgtcggtctccaagcccatcacggtccgactcgactggctcgtagagaaggatcccatcacgggtgcaagcagcaagctgacaggcggtggcggtggctcgcaaggagccagccgcggcggctacggcgggtacagtggaggcagttcgggcatgggtagcatgtcgagcaacccgtactcgtcgagctcgggctcaatgggtgcaccggctggtggggctggctacaacccgtacagcgcgccgcctcccgtgtcggccggtggcggctacggagggtcgccgagcggcgcgggtggttgggacagcggctactcgcagccggctgctgcgactgcctctggtggatatggtggcgctgcttcagccaagacgccggcatacaacccctacgcggctgatggtggcaagacgcctgcctacaacccgtacgctgcggatggcggcaagacgcccgcgtataacccgatgggcgacggcggcaagacaccagcgtacaatcctctgggtgacggtggccgtacgcccgcttacaacccgtacgccgacggcggccgcacgcctgcctactatccgtgattcgttgactttgtttcagttgtacgcacaatcttcacaccaaaaacagtcatgttcagggcttcggtttcccatgcagaatcgcgattgtagagccaaagtt

SEQ ID NO: 12790 - DNA, 3635 bp, Oryza sativa
  ref <308>: DATABASE ACCESSION NUMBER: AK110138
  ref <309>: DATABASE ENTRY DATE: 2001-12-06
atcttccaccacaaccacgatcactaccacacaccgcgcacaccacgcgcatacgccctatcacacgctccggggggctacaacttgtacctggatgaacgccatctgaataccgggtgctcccaccccaccgaatctcctacatcgccttggtacgcagccgcaaccatggcctctcaacatcctctcagcctagcggccattagcgaggcagctgcgaccgcctcctcttcggctgctgccaccaccaccgctacccttgcatctgcccttctctcgcttggccgccatcctccagccggcacacccggcaacaacgggtccaccgacgacccggccattcctctgcccaaccagcgtgccttcgagggtccctggttctcccagcaggtctcgctttcgctcttcatcggcctcttctccttctgcatctttgtcatcgtccgtcgtcgcaatgctgcgctctttgcaccgcgcacaaagctcaagggcttctctccgctcgacgacggccacgacgccggctactttggctggatcatgcccacgctcaagaccgaggagatgcgcatcctccagaccgtcggtctcgatgccgccatcctgctcagcttcctcaagatgggcttctggctcttctttgcgctcagctgctggagcgtcgtcgtgctgatgcccgtcaactactggcagaacggcgtgctggacggcgtcagcccggcagaggaccgcgacaatgccaccgaccccaacagcttcagagatacggtcaccggcgtgtggacacagctcatctacgacaccttcaccaagaagcacgacgatcccaacgccccactgccccagttaccactgcccgccaaaccgccccaggcacaggtgtaccacgccgtccatctgctctccacctacctctttacgctgctcgccatgcgtgctatctggatcaactaccagcgcttcgtcagagcgcgacagctgtatatcctcgagatcctcgagtccatcccggcgaggaccgtcgagatccgcgacctccccgcccacctccgcgatgagaaggcgctcgcagagtactttgagaacatggacatgcccgtcgagtccaccgccgtcgtacgcaacacagaaggcctctcgcgcctcctcaaccagcggtccaatgcgctgcacaacctcgaaaaggcgtgggttcgatggctcggaaacccgaccgatgcagagggctacgacccggagaagatcatgctgctcgctgcaggggcgcacgacgacgttgtcgagccgtcgagcgacgatgccgagaggccacggcagtcgagggacgacctcgagagcagccgcctgcttggtccgtctgccaccaccgtgttcacgggagccgatacgatccgcacacaccgccagcggcctacgatgcgccggagctggtggaatccgttcagcgaaaagatcgacgcaatcgacgagctcacgcgccagttcaacgcggtcgaccgagccgtgcgtcggcgacgcaagaccgggcgatttcccggtggcaatgtgggctttgtcacgttccagagtgcggcgagtgcgcagatcgccgcacagacggtgcactacccgatcccggcgtactgcgccacctcaatggcgcaggagccgcgcgacattatctggagcaacatcgacctgagcaacaacgaccggcgcgtgcgccaggtggtggtgtcgatctttatcgtggcggtgctggtgttctacatcccgccgctcgtgttcctggcgagctttgtgtcgccgggcgcgatcaagaagtacatgccctggctggatcggttgctggataccgacgagcggctgcgcgcgctggtgcagaacaacctgccttcgctcgttgtgattggcttcaacgcgctgctgccgctcgtgctcgagtacagctcgtacctgcaggggctcaaggcacgcagtctggtcgagtacagtctgctcaaaaagtactatctcttcctcatggtgtcggtggtgttcatcttcctcatcgccaccacggcgtggggtgtgctgcaggagctcgccgagaatccgatgcgcgtcatcgacaagtttgcagccagcttgcccaaggcgcgcttcttctcgctgtcctacgtgatcctgcagggtatcgcgctgcagccgttgcagcttctgcaactgcccacgctcatcttacgcgggttctaccggctgctgctcacacgcacgccgcgcgagttcgccgaactcaatgcgccgcctacgctcgcgatgggcaacgtgtatccgcaggcactgctcatcttcacgctctgcatcctttactcgatcgtcagcccgctcatcgtcgtatttggcgcggtgtactttggcatcgcctacgtggtcaacaagtacaagctgctttacgtcttctacaagccgtacgagtcgcaggggcaggcatggccgatctcggcatcgagatgcatctgggcgctggtactgttccacgtgttccagttctcgctattcagcgtgcgcaagcagctgctcatgtcgacgctcatgctgccactcatcgtcttcaccttttggtttgcacagcacctccagacgacgtttggcccgctcaccgagcacgtcaacctcagcagtgtcgtcgaggtgctcaaagaggtcgagccggatccggccaccgccgggcttgcacagaacggtcctccgagtatggcgcgtgccgacgaggtgaccacggatacgtctgggccgacaacgcccaggcaggcgcagggactgacgggcgcgaacagcagtcgacagttgctctcgctcgatccgtcgcacaagatcgatcctgaattcaccaagctctcactcaagcggtacagccacgacgaggaggacgagacgctgtttgtggcgcagcgcgataccaagaccgactaccgcgagccgcctggtgcgggatactatccgggtgtgctcaacacgggtcgccgtcgatatggtcaccctgcgattacgggaattttgcccgagctgtggcttccgatccccaagcatcgcatggatgagggtggagacgacgtgactgcgcccgatgatctcgagggtcagacggcgttggcgtcgggtacgactgcgctgggtgctcctgcgcgcgagagggtcgagagtggcacaggtgtgcagagcgctgctcgcatccgggcacgtgcgcttagcaaggcagagcccctgattctgtcgctgagaaagcgcaagagcagcctgctttcgcgctcgacccgcactccggcctcggagtcttctccagcacatcccgataccgatgcgctcggcgtttggtccgacggcgtggcggggccgcagggctcgtcgtcgagcgctgcgattggagaggccctcagtggaccgtatgcggtggctcccgccaggaagcacgtgcgcgaaaatcagggcgcagatacggatggcgcggatctcgaccaggaagaaggcgtctacatccaccgtgccgcctcgctcgcgagacccgcccgcccgcgctccggcgtccccacctcgaaaactcactaccatgactgataccgtgcaagcagcctctagcgcataatctcattctaattgcaacttgagtactaccg

SEQ ID NO: 12791 - DNA, 3201 bp, Oryza sativa
  ref <308>: DATABASE ACCESSION NUMBER: AK110139
  ref <309>: DATABASE ENTRY DATE: 2001-12-06
accatcctcgacaccacggctccctctctgctttgaccacatccagccttgcttataccccatccaaaacagcgagcgaattgaggtctttccaccacgcaatagcagcgccccgcacagcccagcccagcacgcaaccgaggcctcagggcacacgcccaccatggacgactacgacgagtttggaaaccacatcggcccgctctccgactcggatatcggctcagatgacggcgacgactatcagcagaatgttgcgccgcctcccctccaaccgtcggcgcctctcgaaggctatgacgatacgcacgacgacgacgatgagcaacgcctggccgacatcgaggtggacgaagacggcaacatcatcccacagcgccaattgatacgcgtcgacgagggcccctccaacgccgtcgtgcttcacgaagacaagcagtactatccgtccgcagcagatatctatggcgacgacgtcgagaccatggtgcaggaggaagacgcacagcctctgtcggtgcccatcgtcgagccagtcgtggagcgtcgcttcgccgtccaggaagacggtctgccggagacccgcttcgaccgttccttcctcgccaacctcatgggcttccccgacatggtgcgcaacgtcgccgtcgttggccatctccaccatggcgagacatcgctgctcgacatgttcgtatacgaaacgcacaagatcgaccacgacatggacaaccatctgcgctacacggacgcgcacacgcttgagcgcgaccgcgccatctcgatcaagtcggcgccgctctcgctcgtgctcgaaaacacaaggcgcaagtcgtatctcgtcaacctcatcgacacgcctggacacaccaacttccaggacgaggtggcggccgcgtgtcgtctcgcagacggcgccgtgcttgtcgtcgacgtcgtcgagggcgtcatgtgcaacaccgcccacgtcgtgcgccactgcctgcgccacaagctgcccatcgtgctcgtgctcaacaagatcgaccgcctcgtgctcgagctccgcctgccgcccacagaagcctactacaagatccgacacgccatccaggaagtcaacaacctcatcgcatccatcgacgccgacccggcgctgcagctcgcgcccgagcgcggcaacgtcgcgtttgcctcgacgcacatgggctactgctttacgctgcgcagcttcgccaagctctacgccgagacgtgcggcgcgggcgtcgacgtggacgcctttgcacaccgcctctggggcaacatctactacaatcccgagtcgcgcaacttttcgcgcacgcccgccgacgccaacacgccgcgctccttcgtccactttatcctcgagccgctctacaagatctacaccgccgtgctctcgtcggacacgccgtcgctgcgccgcacgctggcgacgctcggcatccgcctcaagccggccgtgttcaagatcgacgtgaggccgctgctcaagatcgtgctcggcgagttctttgggcctgcgcaggggttggtggatctggtcgtggatcatgtgccctcgccgcgcgccgccgcggctgcacgtcttgccgatgcctacacgggtcccaagcagggtgcggcgtacgaggccatggcggcgtgcgatgcggatggtccgctggtggtgcaggtgtgcaagctctacgccaccgtggatgcgctcgagttccgggcgctgggtcgcgtcatgtccggcaccgcgcgcgcaggcatgcgcgtcaacgtgctcggcgaaggcttcagccccgacgacgacgaagacatggtgggcgccaccatcgactcggtcgccatcagcgagacgcgctacagcgtgcacgtcgacggtgtggcggcaggcagctgggtgttgctctctggcatcgacgcatcgctcaccaagacaggcacgctggtggatgcgacagtggataccgagggcatgggtatctttgcgccgctcgagcacatgacgcagtcggtgctcagggtggccgtggagccgctggtgccttcggagctgcccaagatgctcgatgcgctgcggcgcgtcaacaagagctatccgctcgccgagacgcgcgtcgaggagtcggacgaacacgtggtgctgggctcgggcgagttgtacctcgactgtgtgctgcacgatctgcgcgtgctctttgccggcatcgagatccgcgtctcggatcccgtggtgcgcttctgcgagacggtggtggagacgtcggcggtgaaatgctacgccgccacgcccaacaagcgcaaccggctcacgatcatcgccgagccgctcgaaaagggtctggcggaggacattgaatcgggcgccatcgatgtgcatgcgccacccaaggtgctcgccaagctgctccaggccaagtacggctgggacgtgttggcgagtcgcagcgtttgggcgtgggggcctggtgagcgcggtgccaacgtgttggtggacgatacgctgcctagcgaggtggacaagacgctgctgtacgctgtcaaggagagcattgtgcagggattccagtgggcatgtcgcgagggaccgctttgcgacgagcccgtgcgcaacgtcaagttccgcatcctcgatgcctcgctctcgcccgtaccgatgcatcgcggtggaggacagatgatccccaccgcacgcagggcgtgctacgcagcgctgctcatggccaccccgcgactgatggaaccgatctatgaggtggaggtctcgacaccgcaagatggcatcgctgccgtgtatacgatcctcgccaagaggcgtggtcacgttgtgcaggatacgcccaagcccggctcgacgctgtataccgtcaaggcgtatgtgcctgtggtggacgccaatgggttcgagacggatctgcgcatcgctacgcagggcaaggcgttttgtctgctcatgttcagccactggtctatcgtccccggcagcccaacggataccagtatcaagctgagaccgctcgagcccgcgccggcactggcactggccaaggactttgtgctcaagacaaggaggagaaagggtctgcccgagaccatcgcgctcgcttcgtacctcgatgccgacatgaccatggcactagtacaggccggaatcgagatctaggccgccgcatcgcaatctcacacgccgatccttgtgcgtctgcc

SEQ ID NO: 12792 - DNA, 3324 bp, Oryza sativa
  ref <308>: DATABASE ACCESSION NUMBER: AK110140
  ref <309>: DATABASE ENTRY DATE: 2001-12-06
ttgaagaaattagagtgctcaaagcaagccatcgctctggatacattagcatgggataacatcataggattccggtcctattgtgttggccttcgggatcggagtaatgattaatagggacagtcgggggcattcgtatttcatagtcagaggtgaaattcttggatttatgaaagacgaacaactgcgaaagcatttgccaaggatgttttcattaatcaagaacgaaagttgggggctcgaagacgatcagataccgtcctagtctcaaccataaacgatgccgaccagggatcggcggatgttgcttacagcaacagcactcctgcttcctcactgcttcgtctttctcatcagacggcccttgatcggaacggccgacctttcccactgccatctcgtcaccattgctctcgtctaggcgcccgggcagcttcagtctttcggatagcttggtcgctgctggccgccgcacacgcacggggactcgataccacaagcaaccttctcgaccatttatcggtgtcgctcctacttgcgcttctctcggcttttccgatttgccttgtcatcctcggaccacccagcatcgagatctctcacagtctcggcatggccgaacagctgtcgccgctgagctcatagaatcgccgcgcccgctcagctggtagatgccagctaggtgccgaccgtcgccatggcagtagccacagacccgtcaaaggcaggcggatcgtcgtcgcaggacagcgtgctttcttcggtgcccttccgagactcgtcggtgccgcggagccgcaaagtcgcagccacgaccgcaatgcaacctccagtcgcatctagctcccacacctctcgcaccgctcccggcttggcatactcgacatggctagtgctcgatgccgatgacagcgctcgtccgttcctatcggcacttcaagcaaaggctgccggcccatcgattgtgccgagcggagctgtttcgcccgcagcgcgcagcgcagaaaagctcaccgagctcaccaacacttccactgcagccgcagcacaggcggcgcgcaaggcctcggccagctcacacgtcagggtccaggcgtccaaattcgacgctgccaatgccgaggccaaggatggcgtcaatggactcgataaggatcgcagggcgtcgctgcagcatgcggcatcacacgcgggagcgtcggccagcataacaggcagcatcggtcgcagaagcttcatgtcccgtctcagaggcgcgggcggaagcgtgtcgagcgcaagcgtcttccaagcacagggtcagcaaggcgcagaagatgcggcatcggtgtcagcatcgggcagctggtccatcgtcaacaccccggctccaatcaaagaagaagggcaggacgcctcggctgcgcgaaaggtcgtatttgcattctcgtccatggcgacatcaagcgccgtacaacaagcatctggtctggtggcacgctgctctgccatgctgtcgctgtctcccgaggaccagatcgtcgagcaagtccatccggaccgcgtcgatgcaacatccactgctgccttggtccaaacccaccgcgcagaagccatctatatcgggtccgcacaatcttcgacgtcaagcactcagctctacgcttttctgcaagcgattgtcgatgcatccagcgcaccggtcaagttcattgcggtcgagccagtgacagtccggagattatcggcagagcaagcagccgcgttgttcgacgccgcacgcacacgacgcgtgcagctctccttaccgcctcgatggacggtcatgggcagaaccgatctcgacgagacgctccaagcgctcgagctgttgcatgaagtggaggcggagcaggcgcggagtgcgcaatcggtcggtgataacgaggaggcagacgtgagcggcaactttgacgtgagcctgtccaacatcccgacaggcatgtccagcgataagcttgacgagtccgccgagctagagacggtcaaggcgcaggtggcacagctcgaaagagacctgcagaacaaggacaggcgcattgcagagcttgtgcgccaggcagaggcgctaaccgcggagaacaaggccgctaaggtagcgtctgagctagcgtcgattccagcaacagcagcagccgctgaggaagcaactgcagtgtcaaaagcagatacgagtgcgccggcacctcctgcgactatctctgcgtcagcggtcgcagcgggaacgagtgcagagcttctaaagccagcggaagaacaggcgccgaccacatcgcacacgccagtccgaacccccactgcgaggcaactcaactccaacgcggctgctacgccgatgagcacgcctgtagcgtcgtcgtctcgcaacttggctgcagccgtaggctccaatacatcatcgccacacggtgcagtcgcaggggcgcttggggctgcggcagcaatcactgggtctcctggatctccgagtggcggcgcgcggtcttcgggcaaagtgattgccacgcttaccgcggaactctcggagacgcgagcgatactcgaggcgacgcgcgcggcgctggcgacggtgcgtacgcagtcggcagcgtaccaagcgcaggcagacgagatgcggggtacgctatcacgggcacggctggagaacgattcgtcggtgggcatcttggcgcgcaaggaccggcagattgtggaggcgctcgagcgcgcacgcaaggcggaggcggaggctaaagagcttgggagggcggggcgcgagtggggcacgcgcgtgcgcgaggtcgaggacgaactgggcaaggagcgcatcaagcgctcacgggccgagcaggcatacgacgcactcagcagcgaatggaaatccgcgcgcgaacggttacgtgccgaagtggacgaactacgcaccacccacaccgaccaagtccaagccctagccaaggagtacgatactctactcgccttcaagactcgtctccaagaccatgccaacatcaccatcgagacgggcaatgctgattttggagcacacgccctcgtcaaggacctcgagcgggttaacaccgacatgcagacgtacctctccactcaggtccatccgctcgtcgacagaatggcaaagctggagcagcgcgagaatcaagacattgtggacaggatcacgatgctcaccgacgagcttacgcgcatcaaaaccctcatgcgccgaggcgacatcactagccccgaccaaatcccaccctccaccctctagcaatgtctcgcacgcgcttacacacgagcaatcgcacgcaatcgcacggctgaatc

SEQ ID NO: 12793 - DNA, 3167 bp, Oryza sativa
  ref <308>: DATABASE ACCESSION NUMBER: AK110141
  ref <309>: DATABASE ENTRY DATE: 2001-12-06
cacaatctgtacccggcccgacaacggtatcgccgccacgcaatcgacagatgcgaaacccacctcccggacccgcaccgaccgccgcccttcccgccttgcccggcctgccgtctgccccagcgcacgacgatgctcagcgaacggaatccgctgccaccggtgaagccacggaccagcatcaggacggtgacttcaattcacgccgtgcctctcgacagctgcagaggccgctgatcttaccgaccttgcgctcctcttccagcttcgatcggctgtccaacatgcaacaggccgctggcggcacatccgcagcccaaccctccatgggaccttccccgccaaggtcaggtggtgtcggcgctgaccgcaaagttttgacgctctcgcgaaacgcatcgacggacgagcttgcccgttccctcgacatccctcgtgacacggtcaggcagatgcttgatacgactcagcacgtttggcgcaaccatcttctcggctcttccgccctgaacatgaagtttgaagcctcctctccgcaaaaccacgatcagctccccagatcaagctcgagcccgatgctgtccacgttgtttgcgtctcacagtggatccgccggcggtgttgctcgggacgatggctccagagtgcctagatcttcggccggaggcattccctacatttcttcttccagaccatcgttcgagcaacagagtccgagctgggcagtcgtcggggatgctgcagatggtcaacgagccaccttgctagacgcgcgagcagagcgggcgaagcatcgccgcacgttcttgggtcgcagcagcgaagacggcctcacggccaactacaacttttctcggcccatccgccgcgatgcgaccggctcggaccagggcttgggatcgagcgccagtatgccgtcgcttgcggctgcgaggcaggctcccaagccgcccgcactgctgcaaagccctctgctgctgaagggcgagtcggaagctaccgggtttgcccaattcgctgttgatgacgaggaggaggtcttggccgactcggcttcggaagcccaccaactctcctccgccggccatgctctgcacacggaggaacaacacggtcaagccgcttcggtgcttacgtcgagatccggtcctttcgctctgcataagccgatgccggcgctaccgggacagcctatgccgacctcgccgaggctggtgcgccgcaattctgacacagtgcttaatcgtttcgctcccgaattcggcaagagagcgccgggtgagcttcacgcatggagcgtctgcatcgacgacgacggcattcctgccattcgaccttctgcctctgctttccaccgcccgcaatgtgccctcgctggcaaaaccaatgccacatggcagtgcggatgccgagccagccacggcgctgacctcgcagcgacgccatcctcgcaactctcgagattcgccactcccgctctgacggtgctaggccagtcctcgccaggtcgcaatcggtcgctgagcgcgagcagcgtgatggatccggcgcgacaggcgcagctgtggagccaggtggagaggaacaaggagctgattcgcaagcacgagcaagagatcgcaggtctgcaggaacaggtggtgaggatctcgactgagatcgcttctgcgcgcccctctttctcgtcgaccctccgaacgccggagctggcatccgcaactatgatgccgtcccagtcgtcaaagccagtcgcgaacgttgttgcccgaaagccattgcctcagatctcgtcgtccgatgcagatgggtccaggcctcctgtgccgtccaaggtagaagcagccgaacccttcccatcgatgagcgcgacagccaaacctggctcagctcttgcatcctccgagggcgttgcaggcacacgaacgctccggggtcggattgcgtccttgtctaagatcaatctcgccgggcgtgatgaggagacgcgcgagtccaatcgctggacctaggccattcgcggttgcgctcctcttcgtcgacatcgagcctgaacaaggtgttccgattcccatggtcgcgctcctcggagaaagagacggcattcccgcagccgacaccattccctctgggcggacgccacgcgcagtccgggtctgtgtcgttgtcgcgcgacaaggcgctgcccaatgtgcacatgcactcggcggatgtgcatcgtccgctccccgcaccgcctgtttcggaggtgccgccatccaagcgatatcctccaagctcgcgcaagtactcgtacgacatgctgcacggcccaacgttccattcgagcgtcggatcgcggcatctgcgcggccgttcgggcagctcgaaatcgtcgtcgtttggcacgggcaacagcatcttttcgtcggcagaaagcaacgacacgcacgagccctcgcgcttcgccagtttcccgagattcggccgacgatgggactcgatctcgtcgcgcggcaccgttccatcggttcgaaacagtgcggatgtgaccaacctggtcggcgccacgcacgcatcgacgccggcgctctcttcgtacggcgctaaaccgtcggtggccacgtcgagcgatgtcgagctgccgccgcgacgaagctcgttgcgaaagtcggtcgaggctgctccgactcgctcgcccatcccgatcgagttcctgcaggccaacgatgccggcatggcgcccatctcggaacagagcgagatgggcagtccagcatcggcgcgcctggacacaatcgctgccgatgtagagatgagcccggcgagcctggcgggcatgtcgcccgctggtccggcgaggatgagcatgagcgagcgctaccgcctgcaaggcttgaccgtgcctgcgccgttaccgctctcgtcgacgcacgcctcgtcgctggcatcaccagcgctctcatcggccgtcgagcccgactcggccaccaaggtcggcgggctacccgtctcgcctgtctctccaaggtcggcacgatcgcctctgcctgttgcgttctcgcacggctcgctcacagttgcacgacaggcgtcgattaagcactaagttagcacggagatgctgtcatgtgggcattcgcacgtcaatcacgacgatcctcgaaatgaaggcagcattgccgatcgtg

SEQ ID NO: 12794 - DNA, 3221 bp, Oryza sativa
  ref <308>: DATABASE ACCESSION NUMBER: AK110142
  ref <309>: DATABASE ENTRY DATE: 2001-12-06
atcacaatccttcaccataagccgaacgatagcgccttagcaatagtgtcgcgggctatccataggcagacaaaaagatggaaggagaaatagcagaaacgcaagccgtggctgatcatgtcgccccaccaacggaaaggcatgctgatgaagccatcatcacagatctcaatcacggaccaggcgaacaacttttggatgctgtgaccgcaacggaaacgcgctcattgggaaaggacgctacaacgaaggcggatgtgcccgtcgtagatgcaccgaccgacacgactcttcttacaactacatcggctgcaggagctccagtcgacgcaccagcattgtcctcagaagtcctcgcgtcccagccgcttcaaccatcagcagacacggacaatcacgctgcgaatgtaatcgaccagatttcggatgatcagtccgctggagagcctcactcagcggatcaagtatcggatctcgcaacttcaaaggaagatgacgaaagctttgtcccaccggacatggagcacattgtcagtacgggtgcaacacaagactctgcagcatcgatgcaagcattgcgagaactagttgctcaagcacgcgcttcttcgggccagccacgcgaatcgcttccacctggattcggcgacgacgacatggaagcttccgcagcgccgcccacgaccgagcagcgtggggagaaacgcaaagcagaagcggagctcgaagacctcctacagaccagctccggtatcgaagaggccaaggctgctgctgaaaagagccagcatccagagacaaagacgctcttgcagaaagcgctctcttcgctctctggtctagtatcacgccgaccgaaggcggacgcttctcaaacagcgtcggcgccatcggtggcagctaagcgcgacaaagtcgcggacgaagaaagcgattccgacagcgattccagctctgatgacgagtcttccagcagtgattcatccgaggacgaggacgaggacgcagaaaacaacgctggcaatgctgaccaagctttggcggccgacgacgatgacgaagaaggtggaggccctggcggaagctcggcgccagcgaccaagaacgagatcctggccccagaggtcgagcagcctgctgttcgaatgctgtcggacacggacaaagtaacactgcggaagctgggcaaggtccactccatcgttgacagcgtcgtcgtagtcgagcaagatgtgcagcagacttcgaagtcagacccagcgagtagcaatcccgctccggtggacagcaccggtcgacaaggtgagcgcgagggcgaatacagtgtcctcgacacaggcagtctgctctgcttcgacgatggccaggtgctcggcctcgtctttgaaacgttcggctcgatccacaatcccatgtattcgatccgcttcccttcggccgccacgatcgactgcgatgccgtccagactcgacgcccggtcttctacctccccggccaaagcacttatgtcctcacccagctcctgcgctccatgaagggcagtgacgcaagcaacatgtgggacgaagaggtcgctgacgacgagatcgactattcggacgacgagcaggaggccgaagccaagcgtcgtgtcaaggccatccgttcgggcaaggtggatgagcaaggtaacccgcttccctccaactcgaatagaagcaacaagcgccaaaagcagcacgccgccgctgccggcaaccatacatctggacctcaccacggcccggcaggaccgagcttccatcaaggcccgccccagagcgcagcgggtgcgcgcagcacgatgacgagcgcttacaatggcccgaatgcgggtccaaggcgcaatgctggtcaagcccagccggccaacccccttccgcccgccagcgctgcttctctcggacctgccttccctcacggaatcgcttcgcttccgcctaaaccatcggcaggattgccctccagacctagtttcatcgcagagccaccttcctcttctgctccccggccgtctgctcctggacgagatccgacgggcgagctctcgtccatgcctcgatccagggttggcacggctgaaggccacccaagtggacagagccacagcaggatgtctagcggagcttccgtcaatctacctgccaagccgatagacgctgctgccgcagccgcagccgtcgctgctacttccaagacgggctcgccgatgccgccgcatcgagctccggcttcagcaggcgggatgggctcgccgtcgcagcccagccgactcgcatcgaatcctgcttcctatcccagccaggcttctcccgcctggtactctggatccggcccagcaacacccaacactccggcctcgcctgccatgccgtctccccacacagctggtcggggagccgcatacagtcctggtggttcaggcgtatcgcagccggccccaacaggccattacaatcctgcctatgcggctcattggcagcacggctacgctcccgcgcccccttcagcagcgccgcttcacgcacctggtgccatgccgtggaacggctcacaggcgtatcctgcaccgccgttgcattttggccaaggcggcgtgcatgcgcaagcctatcccggctacggcggtggctatggacagtacggtgcaggcccagcaggcgcgtggaacggctctggctatccaagcatgcaatacaatggctacgctgctggtcctggcagcagcgccgcgatgcagaatagcatgcacggccagcacgcatccgccgtgccaccgcatgcttaccccggtcacgctggaggcggtgatgcgtacagcacgtatggctatggtgcaccttctcagcaagctcccggtgcggctggcgcggatagatacgacccgaggagccccgcgatggcaagcaacggcaacacgagctcggcccagcccgaccttggcccgcagggacagtaaactcagcccggcgcaaagagactcggacgtgcagcatcgccaactcaaattggtctcctacgtgtttttgccttgtcaccaatacggatgtcgtgcccgccaagctgcgacgcaacgagagccagcccgctgcgcacgggccgcatcgccacgggaatcgacgttgcaatagatcaaagggccgcgtctctgccccagctccttcatttctcacacatcaccaggcaaataccgtaaccaggc

SEQ ID NO: 12795 - DNA, 3350 bp, Oryza sativa
  ref <308>: DATABASE ACCESSION NUMBER: AK110143
  ref <309>: DATABASE ENTRY DATE: 2001-12-06
ccggtacgctgggatgcttcagtatgatggtgagttgaagcttccgagccattaccttgtctccccaccagagatagagagaacatctggtgaatacttggtaaagaatggcgtccgcaccttcgcttgcagtgagacagtgaagtttggccatgtcacatttttctggaacggaaaccgatctggatactttgatgaaactaagggagagtacgttgaaattcctagtgatattggaatcacattcaatgttaaatccaacatgaaggcacttgaaattgcagagaaagccagggatgccattcttagtggaaagtttgatcaggtacgtgtcaacctgccgaatggtgacatggttggtcacactggtgatattgaagccacggtagttgcttgcaaggcagctgacgaagccgtcaagattattttggacgcgattgaacaagtcggtggtatttatcttgtcaccgctgatcatggaaatgctgaggatatggtgaaaagaaacaaatctggccagccacttctcgacaagaacggtggtatccagattcttacctcacatactcttcagccggtcccggttgctattggaggtcccggtcttcaccctggtgtgaaattccggtctgacattcagacccctgggctcgccaatgttgctgcaaccgcaatgaacttccatggtttcgaggctcctgctgactacgaaccaaccctcattgaagttgtggacaactaaaatagtaaaatcgcggtagcgaagtttagcgacagcttctcacaaaaaggtcgtatagaccacttcttcacctgtcatcattggctggcccgcacattccgccaacgccgacacgtcgctcttcggtctacacagccacctcttgtccgactgcgaacgagggtgtctctgatagaaccgcagaatcactcgctgcatcgtccgccctagccccgactctttctccaacccccgcacacttacaacatgcctagcgtccaggacatcacaaacggcgtcgacgagctcgacatcatcgacgacgccgacatcgacttctccgacattgaacagaaatactcggtcaagttcgacgagggcctcgacgatgtcatcgtcatcgagggcgtccccgtcatcaccgagtcgcgccagcagaagctcttcgagaccatccagaagcgcttcaagactcaggcaggcatcgacatcgccgtcgacggcatgcacatcccctacgcagacaacggcgagtccaagggctacctcttcgtcgagatggcctccgcagaggacgccgcacaggccatccgccagatggacggctacgccttcgacaagaagcaccgcttctccgtccaccgcttcaccgacgtcgaaaagttcgccagcctctccgagacctacgaagagcccgccgaggaggagttcaagccgcgtgagcacctccgctcctggctcgccgacccggccggccgcgaccagctcgtcatctgccgcggcgacgacgtcgagatcgcctggcacaaccgctcctccgatccccaggtcgagcacagccgcccgcgatggacagagagctacgtccagtggtcgccgctcggcaccttcctcaccaccttccatcgccagggcatccagatctggggcggcccctcgtgcgagcgcttcatgcgcttcccgcacccgggcgcacgcctcgtcgacttttccccgagcgaaaagttcatggtcacctggtcccacgagcccatccaggtccccgacaacgctcccatcggcccccagttcttcggccccgaggacgagggcaaccgcatcgccgtctgggaggtccgcaccggccacctcctgcgcaccttccccgtgccccaggatgagaacggtcagcccggccagctcaagggcttctcctggcccttcctcaagtggagcccagacgacaagtactgcgcgcgtctcaaccccggccaggccatcagcgtatacgagacaccgtccatgggcctgctcgacaaaaagtcgatcaaggtcgagggcgtcgtcgactttgaatggtgccccatgggcgacaaggaccgcgaggtcgccgaggcgggcaagcccaacaagaaggcccgcgacaacatgatcgtcttctggcagcccgaggtggccaaccagccggcgcgcgtcaccgtcatggccgtgccctcgagaacgatcctgcgatccaagaacctcttcaacgtctcggactgcaagctgcactggcacccgcagggcgactacctctgcgtcaaggtcgaccgccacaccaagaccaaaaagtcgatgttctgcaacctcgagatcttccgcgtgcgcgaaaaggagttccccgtcgaggtcgtcgagctcaaggaccccgtcaccgccttcgcctgggagcctttcggaacccactttgcgctcatctcgagcaacgatccgcagctcggcacgccggcgcccggtatcaccatcaagacccagctcaacttctaccacctccatcccaagggcgaattccgcccgctcaaggtgctcgacaacaagacgctcaacacgctcttctggtcgccgcgcggtcgccacattgtcgccgccacgctcggcagctcgcaaaagttcgacctcgagtggtacgacgtcgacttcatgcacgaggtgcgacagggcaacccttcggccgacccggcggacgacgtcaagctgatcggcaccggtgagcactacggcatcaccgacctcgagtgggatccctcgggacgctacgtcgccacctcggcctccgtgtggcgccactcgctcgagaacggcttcgccatctgggacttcaagggccaggagctgcagaagcacatccaggaccgattcaagcagatcctctggcgcccgcgcccacgcaccttgctgtccaaggaggaccagaagaaggtgcgcaagaacctgcgcgagtactcgaagcagttcgaggaggaggatgcggccgaggagtcgaacctcgcttcggcggagcgcgagctgtaccagcgcatcctcgaggagtggaaggcgtggcgtgcgcgctcgcgtcgcgatctcgagcagctgcgcgaggatctcggacgcgaggcggtcggacagagtgtcgaccacgccaagaagctggccgaagaggcgaccgaggaggtgcaagagtggatggaggagatcatcgaggagaccgaggaggtgctcgcctgatgtacgttctgctcgcttctcccccgggcgcgtcgattctgtgattgtaccttgtcctcacgcattctgtctatagatggcaacgcactctgctataaaatgcggttgtcatccaaaacacatg

SEQ ID NO: 12796 - DNA, 3084 bp, Oryza sativa
  ref <308>: DATABASE ACCESSION NUMBER: AK110144
  ref <309>: DATABASE ENTRY DATE: 2001-12-06
gacgccggctcgcccgtcaagcaagacgccgatgcctccatgagcatcaccggcacgcccaagcccaagaaggagcgcgccaagcccaagccgcgctccaaatcagccaccaagatcacgcgtttccgcaagatcaccagctgcctccagtgcagagagaagaagcagaagtgcgatcgcatcaagcccatctgcaccaactgtcgcgaaaaccccaccgacgacccctgccactacgtcgacgaccgcaagcgccccggctcggacgaagacgactttgccggcgactcgtcaataggctcgcccatggtgcgcaagcgcaaggagcccgaagacgcctttggaagcaccaacggccgcatcttcaaacgcgccgacttcccacgtctcgacgaccgtcgccaagccgtcatggtgcagacccgccgcgaacaggtcgagaagctcgagctggtcggcaaggaccgctcgcgcgacttcaacacgcgcgtcaacgccgctcgcgccgctgccatcgcaggcgtcctcttcgagagcgccatcaccctccccaccgcagacgagatctcggcgctgctctacaccttcaagacgcaggtggagccctttgtcaatgtcgtcgtcatcgacatcaacatcgcgcgcatccagagcttcttgcgatggtggcattccaagccaaccaccatgcccgccgatccggccctcgtgcctctgctcctcgtgcttctcgccctcacgctccaggtcaagaggaactcgcccgaacacgaaggtcacaatcttcgcaactttgaccccatcccgggcgtccagtgctccgacgagcgcaccctgctcagcgtcgctggccactgcatcgatgcgctccagatcgcctgtccctcggcctggtccagtgcgttccaggcgcccatcgatctcatcaaggcgtcgctgcttcgtggcatctggcacctcaacgagctcaacttgcaattcgccggcacctgctttgcgctcaccacccgactcgcccatgctgccggtctgcatcgagatcccgagcactggtctggcatgcgcatcgaggaggcgcaggcgcgcaggaacctctggtggaacatcgtgttttacgaagtcgcacacgctcatcgcatcggacagcctccctgtctcacgcacgagggtttcgacacccggtatcccgacgactacgacgccctctacgccatgtacgagcgagccggcctggctgatcccgacccgagccgcatcatcttgccgcccggtgccaccgccttggtgccgcgcgtgccgagccaggccaacttcgactatcactggtcgcgattccgcatctaccacatctttctgcgccagagccagcagctcttccgcttcggcatctcgtcgcctccggacccgaacctcaacgacgagtacgcaaagtggcgcgagaatctgcccgacaagctcaagcagcactttgaacgacgctccaagggctccgttcgtccgagcgacgagctgttggcgcaggtggctgcacagtcgttcgacaagggcgtgtacgatcccaagatcaccgaggagctgcaggactaccagcaggcatacagcctcgagttcatctacaaccagtgcatgatcacgctgcaccgcccgtatatcgacgagcagggcgcgtggaagccgcccgagtcggtgcagaagtcgctggaggtgtgtctgcagtcggccgaggcgctcatcagcacggtcgaggatgtgctggcggtcaagcccgccaacagcatgtacaaccagtgcgcgtactttgccttcaacgccggcctcatcctcgccatccactgcaagctcgactcaagctcgcaggtgcaccgcccgcacattgagaaggcgctgcacctgctcgacgagctctcgagcatgctccggctcaccaacgtcgccgagcaggcgggcagatacagctccacgctcaagcagatgctgcatggcatcggaggcgacattgcgagcctggcgacgagcaagccggatggctcggcggctgcggcgggcacgggtgccaacggcgaaagcatcgccgatgccaagagcgccgatggtgcacgcgcgtcgggcatcatgggagcgatcgatccgtcgctaggcgagtcggaagccaaggacagcaacgacgacagcgctcgcacggacgtggatggcggaccggatcgaatccctgcgtttttgctgccattcgtgggacttcccaccgacccgcacaacctgggtccgcagacgggcaactcgtactggaacgaggcgctgctcgaccggccgttggtgggtgtgcccgtcgcatatccggtgggctttggacagggcattctgaaccacagcgagcagcacaacggcagcgcctgggctacggagcagcagcagggcgaggtcgagagtggcggtgcgagcgggctgccgactggcgcggaggctcattcgcaggcgcatgaggcgacagacgctggtgctggaacatcgggtgtcgagggtggcgaggtgggcgagtcgtcggaagcgtacaacctgtacgagctgcttggcggacgcgaactggggaccgagatgccggatcgacccatgtcgttctcgcagcactacaaccaccaaaacccgggacgtggcgatcaggcttcgtcggcatcctaccgcacgtatgtgcagaactcgctggcgcgcacgtacgagcagcagcaagccaaggccggcacggacaaggccgaaaacggtctggccgacgccatgccgagcgaaagtgcgctcaacgccgtagccgcagcagctgcagccgccgccgaggcagagggcaaagaggctctcgaccctgcagcccagggtaacaatctggcaggcatgtggtatgcctgggagaacttctcccagatgctcaacaaccgccagtgaacatgaccctaccatcccccttcctttccccctttctttggtctcttggaacgaatgtgtatcagtattgtttcttcgcatctccgcgccctttgcacgccaggccggcattgatgttgtaaaacgtgacgcttgaattcatcgattcgaaac

SEQ ID NO: 12797 - DNA, 3638 bp, Oryza sativa
  ref <308>: DATABASE ACCESSION NUMBER: AK110145
  ref <309>: DATABASE ENTRY DATE: 2001-12-06
catagctttgaataccgtagagtagagagagaaaaaaacttgtttcttgcttttgaaatcctgaaatccaccatctaaagatctagactttgttgtaagctttttctaatcagatctacatgggacttggtggtttacaggaggtttagacgttcttgtaagcttgtgattatcagatctctgtgaaattctagcgatttattacaggtttttgcaggttcatgtatgttttgtgtggtgccatcgccaatgccattttttcaatttttttccccacacaggttttgtctgcaagattcgaacggaggaaggtggtgaaatccgccgacctgacctgcctaccatgggagacgccaacgagaacccggcccagcaaggagatgccaacgagagcccggcccgtcaaggccttccacctcgccacctcatcatcccctacgccatcgccgctgccatggcgatccggcccattcgccttgccagccaggaccggcttctcggcggtggtggcggggcggcagcccagcagcctccgacccaacacgccatcccggcctagaggcgcctgcccagccgcaatccctggagccgcatcgtcccgtcactcctccctgacggcgagagctaccacatcattgacaccagcttcacttccgaagaatcacaagtgcctgcaccgccaccgccgctcctcgtctccaccgcgcgccgccccgcggcgccgtcgatgacgcccatcgccaccacattcgtgtggcctgtgcccccgtgcaggtggaccgtgtcgtcggccaccggccgctaccgctttggctatggttacggcggtgcgagctcatcctctactgcgcccgctgctcctactatcacgcgggggcctactcctcttcttcttcttgtcgtgccgtctgtacctgctcctcttgttcctgcaccgcccgcgcctgctcctcatcttgttgtgccacacggtgggtggaccgtatcaccgaccaccgacaacgaccgcttcggcgatggtggtgcgagctcgtcgactgctgcgccgctcacacccattgctcattctgcaccgcccgagactactccttatgttcctgcactgcccgtgcctactccttctactgttgcgctggtcgggttgacagtgtcaccgaccactgcccgctatagcttcagctacggtggagcgagctcgtcgtctgctatgccgcgtgcgcccactgcttctcttgcactgcgcgcgccacctcatcttcgtgcgccgtgcgggcttgctccccctgttcctacgccacccgcgcttgcaactcatgttcctatgccgcccgcgcctgctcctcctgttcctacaccgcccgcgcctactcctcctgccggtgtgccacccaggtttactgtgtcatcgaccaccatctgccacaacttcggctatgatggagcgagctcgtcgtctactatgccacgcgtgcgctctacttctctttcactacgcgcgcctgcacctcatcttcgtgcgccatcgtgcacgcttgctcctcctgctcctacgccacccgcgcctacctttcatgttcctacgccgcccacgcctgccactcctgctcctcctgctgatgtgccgcccgggtttactgtgtcaccgaccaccacctgccacagcctcggctatgatggagcgtgctcgtcgtttgctacgccacgcatgcgcactatttctcttgcactacgcgcgcctgcacctcatcttcgtgcgccgcgcacgcttgctcctcctgctcctacaccacccgcgcctgcaactcctgttcctatgccgcccacgcctacccgtcttgttcctacgccgcccgcacctggtcctcctgctgatgtgccacccaggtttactgtctcaccgaccaccacccgccccagcttcggctacgatggagcaagcttgttgtctgctacgccacgcatgcacactacttctcttgcactgcgcgcgcttgcacctcatcttcatgtgtcacgcgcgtccgctcctactgttcctacaccgctcgtgcccgcccctcctgttcctacgccacatgcgcctgctcctcctgctgatgtgccgcctgggtttattgtgtcactgaccaccgcccggtacagtttcgactatgatggagtgagctcgtcatctagtacgccacatgtgcccactacttctcttgcactgcgctcaccagcacctcatcttcgtgtgcggcacatgcctgctcctcctgttcctacgccacccgcgcctgctcctccagttctacgctgccctcgcctgccccttcagttcatacgccgcccatgactgctcctcctgctactgcgccgcccatgattgctcctcctgttgctacgccgcccgacagcgcaagctcgccatctactgtgccgcgcatgcccagtgctcctcttgcactgcgcgcgcttgcgcctcatcttcgtgcactgcgtgtatctgttccccatcctcgtgcgtcatccgcaccagctcctcctgttgctgcaccgcgcgggtggaccgtgtcaccgaccaccgcccgctacagcttcagcgacagcggcgcgagctcgtcgtccgctgcgccgcgcgcgtccactgctcctcttgcactccacgcacctgctcctcatcttcgtgcgccgcccgtggctactcctcctcctgcagcacctcgtgggtggaccatgccaacgaccatcggccgctacagcttcagctatggtggcgtgagcttgtcgtatgctatgccgtgcgcgcccaccgctcctctttcactgcgcttgcctgctcctcatcttcgtgcgcggcgagcgcccacttctccacctgctgctgctacgccgcgcgcgcctactcctcctgctgctgctgccgccgccccagccgcgccttcggcgctgccgtccgggctgccttcctgaccggtgctggttcgtccaccgactgggccagcgcgggcgcgactggtgcccgccgcgccggcgggggcgttcgaggagtacctcgtgcagcgccgcgcgatcgaggctacggtcgacgatatgccatgggagatgatcggcagcagcaggagaactggtggacccatgtttgcggtggcaggtggtggccgcgacagggtggagctggaggccagggagcgtcgcaagaacaggatggacaagagtaagaccgccgccgcctctcgcgcccagcagccaccgccgccggcagatgctccggggagctcaggtggcggtagcaagaagcgtggaggtgggatgaagaagaagcaagcttaatcatcaagaagctggattgttcgtcgtcaatccatttggtgccgaagatttcgtctgcatcatttccgtttcaacgaataatttagccatgtcgtttcctgactcggcgtgtggctctgtgagccttagggagctttgctccattgatgttgttgtgcatgcaattcttgcatgggtcgtcgaactatgtttctggagttgtttgtgttaaagtcccaaacttatgttgggtttcatttattctcggtcgaatcatgcttgtgtaacatcatgatttgtttggttttcaacaatttatagcaatttaaaacttgtttggtttggtc

SEQ ID NO: 12798 - DNA, 3489 bp, Oryza sativa
  ref <308>: DATABASE ACCESSION NUMBER: AK110146
  ref <309>: DATABASE ENTRY DATE: 2001-12-06
cgcgtcacctctttcgctctcgcacaaccggttttcgtggaccagactgtctctgctcttgcaaagctcgtctccaagggaccaagggcgctcatgagactgcggtggatccgaggcggcgcatcgttgcactctgcggcgagccgtcgcgactgcgtacgctcggtgagcacgacgagcgcactatacgcaacgtcaaatggagcggccaaagtcacgtcgatggcggcgagagactcgccaaagatcatgttggacgagtacgggcgggaacggagaccgctccctcccctcgcgtccctggcagcagctgtagaaccagaaaccgctccccgcgaggtaccggtcgctcgtctcaaacggaccgtgagacgcacatcagtcacagcgcaacgtgaacctccccaagccgatccgaatcccgagctcggttccaacctcggacaagagatcgcctcatcggacaagaagaagaagaagaaggagaagaaggacaaagtcgttcgcgacgacaaggacaacgcgaccatgtcggtcctcgaagcctctgtgcgcaaagacctcgagacgtacccggacgccatcttgctcacccaggtcggatccttcttcgagtcgtactttgaccaagctcgcacggtcagctcgacgctcgggatcaagctcacgtcgaaactgtttggccgcggcgtccaccgcacgcgcgaaccgttctgcgggttccccatctcgcacctcaagcggcacgtctcgaccttggtcgagcacggtcacaaggtcgtgatcgttgaagagttcaaagaggcgggcgccacagtcgcggcgacgaccgtcacgaggagggtcactcgaatcgtcacgccgggtaccggagtcgatgaagcattcgtcgatttggacgcgatgaatttcgtgctcgcgatcggcgcgatcgaacccgaggcgacgacgacgacagcggcgacgacgacaacggaccgaccagcaggcgatcccgcccacgacgacgatgcgatcgggttggcgtaccgcgacatctcgaccggagcttcgttcacgcgagtttcgacgctcgcttcgttgcgcgacgacctccaactcgtcaacccgcgagaagtcgtcatcgacgaacgactcgaacagacgcgcgtcgggaccgagatccttgggatcctgaatggcgaacgactgcgcgaatcgctcatggtctcgaccgtctcgacgaacgcgatcccttcgtcctctcgggtcgtcgcttcggcgaggtccaacgctgaggacgtcctgctcgcgtacctcgccgcgaccctcgtcgacttgcccgcgcctccccggtcgacgcggacaaagtttgtcgacccggccgaggtcatgcagctcgacagcgtgacgctcaaatcgctcgaggtgcgcgagagcctccgtggcggcctcaaggggagtctcgtccacgccgtcaaacgcaccgtcacccccggcggcacgaggttgctgactgaacggctcacgtcgccttcgacgaaccttgacgaggtccacgcgcggctcgagctcgtgtccgtctttctcaacgcgctccctcactcgcgctcatacgtccgtgccatcttgcgcacgctcgacgacacgcctcgactcctccaaaggttgtacctccagaggggatccgcgttcgacctcctcgggctcaagaagacgatgagggcgttggatacgattcgacaagacatcgacgctcgcattccccctcgttccgtcggcggcggcgccggcgacgacgtcaggagcgggttcgagagtcgacaccaagtcgacgtcttggtcaaggcgatcgacaaactgggacagtttgacgcgctcgcgctcgaaatcgagatggcgatcgacgaggacgcgttgatgcggcggacgagggacgaggagcgcaaagcgatgatcgaggacgcctacggcgaacgacaccgagagcgagaagaggaagaagagacggccgtacgtgcgaggggggacggattgtggggcgacgatcaaacttgggtcatcaagcaatcgttctctcgggcgctcgaacgattgcacgacgagctcaagaggttgcgagacgaggcgtaccgactccagacgagcctgcgcgaacggtacgagtcgagaaacttgacgctcaaggtgctgcccaagattggtgccgccgcgcacgtcttgacgcgggacggagtcgtcaaactcgaagcggacgagcgtgcccatctgtaccagaagagcaactcgacgagagcttacgttctccgagactggaccttgttgtggaaaaaactcgaagccgtctcgagcgagattgaacgggtcgaacgcgacacgatctcgatcctgacggctcgagtgctcgacaactatgaccgtttgctcgcgacttcggacgcgctcgcagaactcgacgtcgcgatcgggttcgcagagttggcccaagagaagcattggacgaaacctctcgtcgattcgacccggtcactcgagattgtcaaagggagacacccaacggtcgagactgccctactccaccagaaccgagaattcacggcaaactctgtcacgttccgacatccccatgacgatcacctcgaaggcgacacggcgttcgaaccatccttcatacacgtgctcactggaccgaacatggcgggcaagagtacgttcctgcgacagacggcactgatcacgatcctcgcccaagcgggttcgtacgtccctgccgaacgggcgcgcgtcggcgtgtgcgaccgcgtgttcagccgggtcggcgcgcgcgacgaactcgaccgggaccgatcgacgttcatgatcgagatggacgaggcgacgacgatcctcgcacacgcgacgtcgaggtcgctcgtcttgtttgacgagttggggcgggggacgagcccgatcgacggcgtcgcgatcgcgtttgccgcgctcgaacacttgttgcaggtcaacgcgtgtcggacgttgttcgcgacgcactaccaccggttgggagacctgttggggtacgacgagtcggatgcgaagggcacggggcagtggcgaggggtcgagttttggtgtaccgacgtcgaggaagatttcgactcggtacggtacgttcacgagatccgaaggggactcaacaaggactcggcgggtttggtgattgctcgattggccggtatgcctcctcgtgcgatcgcaacggcgaaacaattgcgcgacaagtttctcgccggactcgtttgaatcaagggggaagaacggaaagacgaaaaacaaaaggctttcaacaactcgagtaaacatcattatcagagagactacgagtagaacggatccgatgggagtggggggggaggcaagggagagagagagagagaggaagcggagggcgggaaggagctacaaattggataaaaaacaagaggaacagagaatagatggattcttttccgcgacaaaaaaaaaaaaaag

SEQ ID NO: 12799 - DNA, 3748 bp, Oryza sativa
  ref <308>: DATABASE ACCESSION NUMBER: AK110147
  ref <309>: DATABASE ENTRY DATE: 2001-12-06
actggagtcacagcccaccacacgatcccgcatattattgcttgacacatccacccggccccgtgcaacaccagaggctacccagaagcctcgctataccgcaacctttttttctatcaccttcctcctcgccgctcgagcatcgctggtcggcgcacggctccgctgctgcttgtgattcaatatggacgctgccggcttgaggagtcgcattgaggccacactcgcaacagatgccgaccaccgccggcaggcagagactgagctgaaggctgcagaggagaaccctggcttcctcgacacccttctgaccattctcgagaatgagcaaaatcccggcatccggctgagtgccacggtctacttcaagaatcgcgtgaccagaggatggtctctgcccgaggacagcaccggcatcaagcccatctccgaccacgagaaagctgccgtccgctcacgcctcgtacccgtcctcgctcgtgccgcacccaacaccagagcacagctcgttgtcgctctgcagaagatcctacacaacgacctcccgaaacaatggcccgactttgtcgacctcaccatgacactcctcaacggcagcgacatgccgtccatcttcgccggactgcagtgcctgcttgcgatctgcagaacttacaggttcaagctcggcgacagcagggaggactttgacaagattgtggaggctacattccctagactgctcgctatcggaaatggcttggtggatgaggagagcctggaggcggcggagatgctgcgcacagtcctaaagtcgtacaagcacgccatctacttcgagctgcccatgcagctgcgatcacaccaggccatggtcgactggtgtaccctgttcttgcgcatcgtggccaagcaggctccccaaaatgccatgatggaggacctggacgagagagagctcaaccactggtggaagtgcaagaagtggtcctacgtcaacctgaacaggttgttcgtgcgttacggcaacccatcaagtctcgcaaagggcaacggagacgactacgccgaggtcgccaagacttttatcacaacattcgcgcccgagatcttgaagggatacctgcagcagattgagcgctgggtgcagaaggagacctggttgagcaagccatgcttgtcgcacacgcttgctttcatggacgagtgcgtgaagccaaagaccatgtgggatcacctcaagccccacatgccggtcttgatcgagcacctggttttccctgtcctctgccagtcggacgaggacatcgagcagttcgacgacgagcctgccgagtacctccaccgcaagctcaacttctacgaggaggtttcctcgcctgacgtggccgccgtcaacttcctcgtcactcttaccaaggccaggagaaagcagacctttgagatcctcaacttcattaataacatggtcagcaaatacgaggctgctcccgatgaccagaagaaccctcgcgagaaggaaggtgctcttcgcatgatcggcaccctcgccaatgtcatccttggcaagaagagcccgattgccgaccaggtcgagtacttcttcgttcgtcacgtcttccctgagttcaggagtccccatggtttccttcgtgctcgtgcttgcgacactctggaaaagttcgagtcccttgacttcaagggccccaacaatctcgtcatcatctatcgcaacatcctcgagtccatggccgaccccgctctgcctgtcagagttgaggcagccctcgccctccagcctttgatcagacacgaccctatcagaacgatgatgcagcaaaacattcctcagatcatgcagcagctactcaagttggccaacgaggtcgatgttgatgctcttgccaacgtcatggaggactttgttgaggtcttcgccgctgagctgacaccgttcgctgtcgcgcttagtgagcagctccgcgacacctaccttcgtatcgtgcgcgaactcatcgaacgcaacaattccaaggagggcgatgctgactacggtgacttccttgacgacaagagcatcactgctcttggtgtgttgcagactattggcactctcattcttactcttgagagcaccccggatgttctcgctcacctggaaactatccttatgccggtcatcaccattactttggaacacaagctttacgacctttacaacgaggtatttgagatcattgatagctgcaccttcgccgccaagaccatctcgccgacaatgtggcaagcattcgaaatgatccacaagactttcaagtctggcgcagagctctaccttgaggatatgcttcccgcgctcgaaaacttcgttaactacggatggaggagcctgatggagaaccaccaatacttggacgctgtggttgacatgatccgcacgatcttcaaggatgataaggttggaggtatcgaccgtatctgcggatgcaagcttgccgaaatcctcatgcttaacttgcgtggtggcatcgacaactacgtgcctgagttcatcggcctcgccatgaccatcttgaccaacgaagagctcaaggtcaagtcctacaggatccacttgatggagatggtcatcaacgccatctactacaatcccagactgtcggttcacgttcttgagagcaacggctggaccaacaagttcttcagcatgtggttctcaagcatcgacagcttcactcgtgtgcacgacaagaagctttccatcggtgccattactcagctcctcacactccgcgccgatgaggtgccccagagcgtgcagcagggctggccaagactcctgcaaggtgttactcgcctcttccagactcttcctgccgccctcaagaaccgcgaggaggcacaaagagaggaggacttcggcctcggcgacgactttgacgacgatgaggaagacgatgagtgggaaggcgaagactgggatcacgaagagggcgaggaggctgtcgatgtcaaggacgagagcaccgcgtaccttgacttcctttctcagcaagcttccaagttcagcgctgttgccggcgatgacgaggaagacgatgagctggaggaggagagtcttcttgagacgccactcgaccagatggagccatacggtcttttcaagactgcccttcaatctctctcagagtcccaacctcagctttacgctcaactcacagccaccctctcccccgaggagcaacaggtcgtcaagactgccgtcgaggaggcagacaagatcgcactcgcgcaagcgcaggcacaggctcaggaaggtggggccgctcctcctgctctcaacggtgcttgagctaaaacgttctccacgaccaaaggcggcacgaccccacttgcaaagattgactgaagagtccggcctgcctgccagatgcgcaaaaaagtgaaacgaaaagggacgatgatacccggtttttttgaatgatggatgaagaactttatagatgactgccgaggacgagagaatacgaatagttctcgtttggaagcaagagttgcgatggatggcgctcattgggaaaagatttcaagcccaccgaaacatctctttcgctgtgtgtgttgtggaggttttgcactgcggttggacgttcgcgtcatcgaagaaggtggtcggcatatgggagtttccgttcgatcctttcccccattcgaacagatagcatgagtgagcgttcgctgcgatatccaaatattacttgttcaacac

SEQ ID NO: 12800 - DNA, 3094 bp, Oryza sativa
  ref <308>: DATABASE ACCESSION NUMBER: AK110148
  ref <309>: DATABASE ENTRY DATE: 2001-12-06
atctaccggctcagcatccgaacacgcctctctcatctcgctgttcagagtggctgactcgcggacctcgctcgccccctcctctagacctcctctagagttctcgcttttggatcttcaccagggcgcttcgtttcgggatcagactccatccatcttcgccctttcctcgctcgttgctggattgcgacagcatcccgacttgattcgtcatggcgcgtccatcttcctcgtcgaggctcgtcaagagggccgcagccttggccaccaccgccctcgccatctccgcgcgtggcgcagccgccgccaaggccggctcctacgaggtggtcaacaccaactcgctcgcatcggccatgatgctcggtctcatggacgagcagaacgtcttcatccttgacaaggccgaaaacaactcgcagcgcttggccgacggccgcccggtctggggctcgttctttggcctctccgacaactcggtcaccggtgtctcggtgaccaccaacaccttctgcgcatcaggtgccacgcccggcaacggaacctgggttgtcgccggtggcaatcaagccgtcggctacggtggtgcggccgttccgcaaaacctcagcccttacgccgactacgatggcacccgcgccatccgtctgctcgagcccggctccaagacgtggatcgactcgcccagcacatccaccgcccaggtcaacatgatgcagtcggcccgatggtatcctggtatcgaggtgctcgaggacggcagcgtcctcttcatcggaggcgccgtcggaggtggctatatcaatcgaaacacccctaacctcgatcctttctaccagggaggcggttccaatcccacctacgagtactttccttccaagggcaatcagacggtctcgcagttcatgggcaacacgtccggtctcaacatgtacccgcacacctacctcatgccctctggcaagatcttcatgcaggccaacttcagcacggtcctctgggatcacgtcaacaacaacgagacctatcttcccgacatgccaggccgggtcatccgcgtctacccggcctcggctgccgtcgccatgctgccgctcacgcctcagaacaagtacacgcccaccatcctcttttgtggtggcagcgtcatgagcgacacgctctggggcaactacggtggccccggcggcgacattctcggcatcacggcctccaccgactgctcctccatcactcccgaagacagccagggcaaccagaacaccgctgcccagtacgtcaaggaggaggacctgccacagggccgcaccatgggtcaattcattcatctgcccgatggtaccatggtcatcctcaacggcgccgagaagggtaccgccggctacaccaacgccacctacaacagcgcccagtacaacggccaggccatcaacaccgaaggtctcgcgcaggatcctacgtacgtgcccgtcctctacgacccgtccaagccgcaaggaaagcgtctctccaacgctggctttggcgcttccaccatcgcccgactctaccactcgagtgccgtgctgctgcccgatggctcggtcatggtcgccggctcgaacccgcaccaggacgtcacgctcaacatgcccaccggcactacgccccaggccttcaacaccacctacgagatcgagaagtggtacccaccctactggggacagccgaagccttcgcctcagggcatgcccacctccatccagtacggtggcagccccttcaacatcaccgtcgatggttctttcatgggttcgtcggccaacgccaaggctgccaacaccaagtttgccatcatccgtcccggcttctccacgcacgccatgaacatgggtcagcgagccgtctacctcgactacacctacaccgtcagcgacgacgcatcggtcacctacatggtcaaccctctgcccaacaccaaggccatgaaccgccttgttgtgcctggacccgcgctcttctttgttacggtggcaggcgtgcccagcaacggcaagatgatcatggtcggcaccagcgccacgggcaccggcaacgtccccttcacgcccacgctcggatcggctctggtgtcgctcccggcagccgtcaacagcaccaagtacactgccaccatcaccagggcgggcgactcgtcgtccagctttggccttggcaagatcatcggcatcgccgtcgctggcgccgctgtgctggcgctcatcgctatcggcatctgcctgtggaggcgcaagggcaagaattcgcgaggcgagaaggctgcggcgcgacagtcggccgcgccttggaccagccgcgacgtcggctcgggtcccgagtacaagcgtgtcgacactcctgttggctccgtcaacggcggccgcttcggcggacgcaggatggacagctccaacacgtttgaaagctaccgcatgcacgaccagggcagcgtcatcgagagcaaggaggcgctcggaggctactacgaccacccacgcagcggcagccgtggcggctacgcccagagcccgctcggctacgagcagcagggccgcggcagctcccagggcggctaccagcagggttgggccgagcaccacgctggcgacgcaggcgcgtactacgaggagggcaacaggtacggcggtcagagttacgacgactacccaccacgttcctaccagcagcagtaccaccagcagcagcagcagtactcgcagcaatatcagcagcagggcggccagtaccacgacaggcagggctcgggcggctacggccgtgctcgttaaagtcgtcgctcggatgccaacagcttgggtccagaaaagccgaggggctcccgatcatccctcgacacctccgctctaatattctctcgacgtttcacgatggaggactgcaacgtcccgatctgtttcgctcgttcaccgctctttgcatcgtcggtttactgttcacattcgcttttagcaggcgtcttggcgccgcgccgtgtgcggtgcgccgcctgagacgttcccttttttgtttattaagctggccactctcctctcggacaatacacacttgaacttgg

SEQ ID NO: 12801 - DNA, 3287 bp, Oryza sativa
  ref <308>: DATABASE ACCESSION NUMBER: AK110149
  ref <309>: DATABASE ENTRY DATE: 2001-12-06
atcacgcacagcataccctggtttccctcagtcacaacatcaacgcttgcatcccacatcccacgtctcgcattggcgccggtcgccacgctgctgaagcgcacatccacccgcctctcctttcgcttccagactggccccgagcacaccaagccgacacagccatgtcggcagctcctgaatccgatgcggtacgccaggacgaccccaagtccgcgcagcccgaagctcccgaatcggacacccagttgaagaggatggatcccgactccatcctcgccgatgaagccgacccagaccaggtgctgggcaccgattcatcgtccgatgcagctgcaaagcgcacttccgccttccatctccccagcgatgccggccaatccgacctcaaaagggcctccgctgcttctgccatcttcagtcagagcgactcgatcaacagtcctcgagcacccacccgttccatgaccacagagcagcatgccatcccagaagcgcaaccactaccaacaacacaggagctgcaggctcaagtctccgacctcaccaaccaggtgaccggtctcaacgagaagctcgtcaaatccttcaatcgcatcgccgacctcgaggacgactactcggacgcccaagagaccattcgcaccatgtcggcaaagatcaaggagctcgaaaaggagcgcgcagagcacctcgacgccctcaacactggcctcctcgtcgaaaaggctcacgtcagcagcgagatgcagaggatgatggaccgtgtcatcgaagagaccgcccaacgcggcaaggcagagagtgacaagagcaagatcgaggccgagctcgacgagctcagctcgagtctctttagcgaagccaacaagatggtcgccgtcgagcgcctgtcgcgtgccagagccgaagaaaagagccgcaacatggaggagcggctcaaagataccgagggcatcatgctcgagcaacagaaggtgcttgccgatctgcagcgccaggtcgaaaagctgcaagccgatccagcctccaagaagatcaccgccgacactgcatccatcgcttcccccgaaagcgacgccgtcagcttccatcgcctcaacacctcctccctcgctcgatccatctcccagaggaccgctgtgcgtgagctcaagcacaaacccgctgccgaccttccagcccaagctcgtctcatcatcaacatcgtcccctaccacgagttccgttccttcatcgcccatctgcgcaaattgcgaaaacagctggctcctttctacaactatccactcccgcacggcgctcgcgactcgctcaccggcacccctaccccacgcaccgcttcgccagcgcctcagcaaccgtctagcgctgtatcggcgacgaccaactctatcgcgactgcttcatccgcctacagccaaggcattggcggcggtctctattccagctcgccattcgccatcgcaggcgtcagccgacaccgtgactatcctactttaccgtccaacgttgacaacctggtatcgctgccaaatcaattgtccttgcccttcatcaagcgctcccaggaagaggatgtagaaccgtgcctccgtctcgacttcgcgccggggctcaactggctcagcaggcgtcaggccaacacggcgattctcgatggcaacctcgtcatcgaacccatcttttccggaagcaccaccctcgacgaggatcgcatccgccgagagaatgcccacctgcctcccgcagcttgcgccatgtgtggcatcccggtcgtcaacgtgccttgccaggcggtgtggcagctaccgccatgtcctccgaacagggtggcaaaacttccctcgtacccagcagcatcgccaccgcaacttccagctgggccagctcagccgcgagctcgctcggctccatcactggaagctccgccagcagtggatccaactcggccaccatcacgcccaagccttccaggggaggcttgttcagctcattcaggcgatcgtccggcaccaacaaagccacggacacagaggcgaccgcgaccgcgaccgcgaccgcctcgaccgaggccacggatgcacacgtcgacgtgcctgtcgaagcgttggtctcgcccaacctgccggtgcccacgcacattttccgattgagcgagagcgcgcccacccgctacctcctgtgtccgcaccactgcctcatgcgtcttcgcgccgcgtgccagttctggggatttgtgcgcaacctcgagcgctcggtggtcttggaaggcaaattcatgaatgacgagcctcatccgctcgccgccagcacgccgtccctggagctggccaagccgctcgacgcgcccaagagcgaacaggtcgagacactcgagaaggccgtcgctgctgcggaaaaagaggaagaggccgcgcccgctccggaagagccggctgctgctcaggcagagaacaaggatgacggcgacgccgacaaggaggcggaatccgacgacaagaccgaggcagaaaaggtcaaggagagcctgcaggaaggctcgggtgcttccgacgctcctgacactgcttctggggacaaggaggcggcggatgtggagagcaaagccgcacccgctgccgaggacacagagacgtcagaggcgaaggacaaggaagaccaggaggagacagacgaggcgcctgcagaggcagccaccaagcacgacgacgatgactttgccgacgctccatcctcgccgaccgagcccaaagcaccggacgcgccagaagacgagcagaaggaagatgatgctacggacggcgcgaccaaggcagagactgcggctacggagccagcgggtgaatcggacccgacagcgaccgctgatgcgagcaatgctgcggctggtgctgccgaaggatcggacgcagctgctgcccctgcgccgccgctgcctccacgctcggtagcgcgcggcacgggctccgtgtcgcccgcacctgctgcccccccacgccgccatcctcgcgcgggcgcgcttgctgtgccacctcaacgcagctcgagcgcatctgcatccgcacctctgcgccccgccacgcccgccaacacggcgctcttcctcgaccgcctcgacgccatggagtgggaggacaagatgtggaccgaactcaccaagctcaaggaagagctctggcgcgcacgcatcggtttggtcaccgacgacgccaccatctgaaacgcttgcactcacgcagtcacacacagacactcctggcaatcacaatcacactgcgacaatc

SEQ ID NO: 12802 - DNA, 2826 bp, Oryza sativa
  ref <308>: DATABASE ACCESSION NUMBER: AK110150
  ref <309>: DATABASE ENTRY DATE: 2001-12-06
tacaggttcttcatctgttatcctttctcggaaatttatcgaatactgtatcatcggtacggataatctaccaagaaccatgctaatgtactatactaacaggcccttgccacacaggaagtatttccagacagttctttgcaactcccctgagtttaacaggactgttgttaaccatgacctacactattcaaaatgggactcatcttcgaaaaaagagccccttctactgaccctggatgatgtagagaatatgactcaaagcggcgtagcatttggaacaagattttccatggacgatcctgttcttaaccacattgatgaggagattttacaccggcaacctgaagaaccagccccagggggatggtgcataggtgttggggatgctagtccatgttctgtttcagttgaccttcaggcctgcctcatcaactccagagccgcctcgacgtccgcgcagacgctgaccccgcggcggctgaggccgacgctgccggagaagacgttgaagcactcgagctccgacgtggtgcccgcgacgcgccgcagctggtcttccattcccagctcaacgaacagcgccacgtatcgcttgtccgaccgcatcatggcgacggcgagctcgatggtgtaccggcggatccgcggcaccaccatggacggccggctgtactccctcaggacctgcaccatcgtcttcgccagcgccgcgtccgtcaccctcgccgcggcgaggctcgcgcggagctcctccggctccatgaaccggagcatctgcgccgcgaggcccaggaagatgttgagcaccttgcccttctcggccatgattgtcctcagcaccttggtggcgccggcggcgactcctctcagcggaagccgccactcgtcgccggcgtaggtgcacaggttgcggaggatcctcgcggcgccgacgatgacgacggggtcgctcatcgcctcgacgagccgttcaactccgccgccgcaagccgtcatgatggcgccgcagttcctccggctgtcgagggccagcatcgccagcgcctcgccggcctccacacggaccgcgtcggccggccggtctccgaccgcctccgtcgccggcaagaacatcgccaccagctcgctcaccacgccacccgtcctgccgatcatctccctcgcctcctcgtccatggtgaggctcgtcagggtctcgatcgccagctggtgcagctcgctccaggccttcccgtcgcgctgctgcagcacatccctgacgttgctcaccgtgaacacgatgccggagagctccctccggaggagcttgccggtggtgcccgtcgtgctagccagcctcttcaccacgcggagcgactgcttcaccgccatgaggttcgtgtcggtgggcgcggccgtcgcaggtgcactggcgatgctcgagtaggagatgatcttgtcgaggagtcccttcgtcttgccgatcttgtcgcagatgtcgtggtcgtgcgccagcttgttgaggatggagaggccgaggaggttgagctcgtcgaggtcggcgtagagcagcgacgcgacggactcgatggcgccggggatgccggtgacgcggagagcattgagcttcccctcggtgagcatggagacgaccaccgcggccgaccggcggacgcccttctccgacgagttcttccagctgagcatctcgatgagccgctcggtgaccggcgccgacgtgccgatcctgcgcagcgtggcgtcggcgaagcggtcggactcggcgagcgcgacgaggacggaggcgccgagccgctgctcgtcgtaggagccggcggtgagcaggtcgtcggcgtaggacacgaggtccatgtgcaggccgtcgaagatgctgccgttgaggcagcgggagtaggaatcgtagaagaagcggcggacggccaccgcgccgcacgcgccggcgaggtggcactccttggcgacgcgctcgatcaggcggcggtgccccacccgccactgccacagcgccttctcgacgaggaacagcagcgcctcggcgagcgcgaggccgtagaagatgtcgagcgccgagctccggttggtccgcgcgtcggcgctgccgccgtagcgctggtggacgaggcggacgagcgagagcgcgacgcacgcggacgcggacagcagctgcatccagtagaacacgaggccggccgccgacgacaccggcgaccgccacgtcgcctcgtgctgccactccagctcgtggctgcggcccaggatgcgggcgccctccaccaccagcagcacggtgatgcaccagaagtcggtgcgcccgagcgtgatggcgaagccgccgagcagcaccaccgtcgcccagatgaaccccagcgtgccgagcctgctcgccgccttctcgaggacggcgagctgcagggccagcaccgtgagacgccgctccggcggcgccgcgtcgccgtcgtcgtcgtcgtcgacgcccgcgcggatgttcggcgtcattatggccttctgcggctcgaacagcgtcggcagctggtccgggatttggacgagcacgctccggctagacatgctagcgcggcgatccatctctgcgaattcgtgtgcgttttagcaagaggtcactcactgatcactgacttttgcttgctgcgtgtgctctggattggcgatcgcgcgcacggtatttataggcttggaatgcagatgcagccaagcaaagtactacggattttgtacgatgtacgggtgtgtgtgtgtgcacactactggatattaatcccagcaaatgggaatctgcaacgaaacgcacgttgcgaaaaaaag

SEQ ID NO: 12803 - DNA, 2959 bp, Oryza sativa
  ref <308>: DATABASE ACCESSION NUMBER: AK110151
  ref <309>: DATABASE ENTRY DATE: 2001-12-06
acactccgtacagaaagtgcccgcccaagcacaccaccatgtcgagcttgagtgggtcttctccgccgccatcatccggcggacccgccaaagcgtccacacgacaggccgcagcgaatgggaccatgttctcgtcgctgcagaagcgcttcccgcgcacagcctttgtggcgcacaagatcgcttcctcccgcaccggtcgcaccaccgccaaggcatggtcctaccgtcgatcgctcctctttggcttcttcgcaacctacaccgccatcggctacctcaagctcaggcgcgacgcctacctccgagacctgatccacgacgacacctacctggtctggaagatctacgacggctccatcgtcgagtcaaaggggccaccatccgtcagcgcgctcatcaatgcgcctgcagcaggcgaggaggcaccgcgcgtcatggagatgttcgaggtcatccgtgcactcaagtgggcgcaggcggatcagcgcatcaagggcatctttgccgactttagcggcctccaccttccctcgtccgtcacgccgaatcggctcggactcgcgcagatcgaagagctcatgcaggcggtccacgagttcaagatcgccaagaaggagcagttcggcgacaaggcaaagccatccatcgcctgggcggataccttcaacagccagggtcagtatctcttggcgtcggcatttgacgagctctggattcagcctaccggctcagtcccacttacgggtcttggtgcgcagatccctttcttcaagaaggtgctcgactactttggcatcaaggtgcttgcggaagcaagacgcgggtacaagtccatggtctccaccttcagccgcgaggagtcgcttccagcgcctcagatccagaacgaagccgagctactcggtgagctcaaccgtggtctcgtccatgccgtcgctgtcaaccgattccccgacgaggatccggatgccatgtccggcaagctcgaggcgtggatgaaggaaggtcccttctcggcacgcgaggcaaaggagctcggtctgatcaacggcacggccttcaagagagagatcgtcaagcgcctcatcgatccaaagcacggcggcaacgaagaggtcaagttcaagtcactccaccactacaacaaggtcaacgaccgaacgctcgagcgccagctcaaggacgacgaaatcgtcgaggtgggcgtggtctacctgctcggaggcatcagctctgcacctggcgagttcttgacatcgtccgtgctcaagggtctcaaagaggcagccgagcacgaggacatcaagtcaatcgttctgcgcatcgactcgggaggtggagacgttgtggcgagcgagtcgatctgggatgcggtccgccgcgtgcgcgaagactacggcaagcccgtcgtggcgtcgttcggtaacgctgctgcctcgggcggctactatgcagccagtgccgctgatgccattctggcgtgcgagaacacggtgacgggctccatcggcgtcgcatcgctgcgtcccaccatcacacgcgcctttttcgatcgcttcaacgtgggcatccagtcgtttttcaccgggtccacgtctatgtcgacgctgcacgaactcgacgacgcacagcgcgccaagtcggccaagcacatcgacgagatgtacaacgacttcctgcagaaggtctgcgatggccgcagtatctcgcgcgacgtcgtcgagagccttgccggcggacgagtcatgacgggactcagcgcctgggctcgctgcaacccagatgccgaggtggaacaggttcaggtgaactcaaccgccgggtctcaagctgcgacgcctactgccgagtcggtcgtcgagctcagacaagatgccgaggcggtcaaggctgctgcagacacggagggcgctagtggcgaggtgcaggagtcggtcaagtcggccatccgaaggatcaaggcagtcagcctcaccagccagtggaggacgcaggaggtgagcgcgagcagcggcaacaatacgatcatgatcgagcgagtgggtgccacacccgccccgactccagtcgcggaggcggctgatggccaagccggcagtggcgatggggacagcaacggtatcttgtccgacctggtcgccaaggcggaagaagcgcttctcggccgtgccagcgacaagtccgcgactacatccgatgcggcttccaagccactaaccggtacggaaaagctcaagaagcgcatggaggaggaggaatcgcgactggcggtggcggctcactcggctgccgagcaatcgcgcaaatcgcagtccgaggctgacgacgaaatcaagactgccggcgtcgcagcttctgaagcctccgcggccgataccgcggccaagccgtacggtaaggggcttgtcgactcgattggcggtatctgggattcagcatactacgccatgacactcgctctccaggccgagatcgaagccatggtgaccaaggacaacctcacgctcgagcaagccaccgccaagatccgtccgagtgccagccgcgaagtgaccgaggacgggacgcttgcgctcgccaccgacctgcgtctggtgcgcttccccgaagacaagccgttctggaaaaaggtgcaggaggtcaatgccaagggtgaccagccgcagctctcgcttctgccccgagccgtgaccaacacggtggcacttatgcttgaggaggcggggcaaaaggcggcgcgtgcagcggtcaggatgatgatcgctacggctgccgatccgagtggcatcgcagccgcgtttgacgacccccagcttgcgcagaagctgcgcgcgaataatggtctcggtggtggaaacacgcgtggcagagcgcgtgcagagtatcccctggcatcgctgttcagctagactcgtagacagaacatatttcacgcctcaatcaagagatacagccg

SEQ ID NO: 12804 - DNA, 3155 bp, Oryza sativa
  ref <308>: DATABASE ACCESSION NUMBER: AK110152
  ref <309>: DATABASE ENTRY DATE: 2001-12-06
ctggcccctccttttggctctaaggcccgagtccctcgggccgatccgggcggaagacattgtcaggtggggagtttggctggggcggcacatctgttaaaagataacgcaggtgtcgccaataccactcgggctgagctggacgcacacgactgcatcgttcgtctcaagccacgagccccaccatctcgcgagcacaatgcgtcggccggcaccgcctccaaccggcgatgtgctcgacctggactatggcagcgccgacgggacggcagtggaaaccagtcaaggggatgtgacaaatgaaacggctgaccacgcacgaggtgcagatgaagtcaaatcttcacacgctttgacccgcgccaagccagacgagcttgttggaagcacccgcaagcttcctgcagcgtacgacaccgacgatgtggatcccgcagcatcctcgacggggcctccgagcttgggccccgttgctacagccgctgccatctcggaaggatttcaagtgccagcgcataaccaggatgcgaatgctgtcgctgggccgtcttctgcaaagcttgcgggagctaatgcggttacggacagtggcgcagctgcggaaggcttgtgggttgattctgctcagcaccaccctccgcctccgacctatccgccgcccgctctgccccacggcgatgcggtgcaggagcagcagcaacttccgtcccattacgggtacgacccaaaccttccacacttgcatcactccgcctttgagccaaatcatcaaggtttgcacggcggcgtctatctcggcgcgtctgcgcagcatccgattgccaacggcggctcagactatgcccagatgaaccacccttttgttccctacgatcagccctatgatcctcgcatgcccatgccctttggccctttcgcagcaggatccataccgccaccatacgcgtttcttccatatcctcaaagcaacccctatccaggaggctacgcagcgcacctcatggatccgaatgcgatggatgattccactgcgcagctgaaccggaagcaacggaagaagctcctcaagaaccagaagaagaaagacaagaagctcagggcgctctcagctacagcggcggccttcgatcctgctccagccaacgtcgagccggtctggaccgaggatggcaagccccaagccttggccatgatcagcgagctccattcgcgcggagtgcctccggctcgattggccgaacagggcgtgccacttgcgatgatcgaagtgtgctgtgccgaacttggagtgtccgcacatgttgcgggaccgccagagcagcctgccgaaccaccagcgacggcgccgagcgacaccgaaatccaggtggccaagaggttggtgcagacgaccaaggcagaaaacgagcttctggaaaagcaagaacagggcgtgccactcacaccgttggaagagctgcgacgaaaggcactggcttcccgactagccaaggcggctgcggcgtcgacagcctcggcgcaagaaggtgccgatcggcaaagcaacggcagtagtccttcctcagctgagacatcgtcaaagaagtcgactgcctttgaccgcgttgccacctctggcgaagccgacgcgctcgtgtcgcagatcagcggagtcatgcgtagccttctgcaacctgcgcagccagcggcagaacagtccagcacgtcccgaaagagggcctaccgagacatcgatgctgtcgatccgagcgattcaacctgggacggtgatcttgcagcggctgacgctgcgacttcgcccctgcctgttcgacggcaacgcatctcgtacgccgacaacttcagccgggcggccgtggcgccatctggcgaagtcgacctcagcacgccgctgcccgagctcccggatgcagcgaggtcgcctcaacctcgtcgaccgagacctgtggcagccgactttgacacggccgagtacgtgcccaagccgccgaatcggtttctcgacgtgccgtcgggcctcaacactgttgtcgacctttccgacgaggagccggaggacgcggaagtggcggcgttcgactcggcggacggctggaccgaggtgcggccggcgctcgatccacgccgcgtgctggagctgcgccacaggacggcgaccgagcactacgacaccttttgcttgctcaatggtctatcgccttcgcgcaggccgggcacgccgcaccgagacagtggcggcttcgagaacgacgttggtgcggtgccggacgcgctgatcgcgcagatctctgtgtccgggacgtcgtccggtggacctagcacgccgtcgcgcgaggacctgctgcgcaaggagctcgagatcaagcagctgatgcgcaagattcagatgatggaggaacgcaagaagcagcaagaggcagcagcaacagcaccgtcgaggtcgccagcacagcgtcccggcgcgcaagacagactggacggcgccggcttgcggcccggtggtgcgaacgggagcgaatcggcggtgcagcctgcggacgcgtcgggctcgaatccagcggagaaggatgcgtcgtcacaaatgggaagcacggcgagcagcagcgtgcggcttgatcctgcgttgcagaagcagcgcgagcagctgcttgcgctgctggcgagccggcgcaagaacgtcagcgccgcggcaccacgcgacgctgcttcgacgtcagaggcggccatggatgagggcgtaccatcgccagctgttggcatggctgtgagcgacgctggacaggagcggaaggagaagacgcgcggatcgcgctatgtgccgctggttccgagtctgttttcgagtgtggcgagtcgggtgcgtgcgtatctgccactgtcctggggcacgtcatctggcgatgtggacaggttggcgataaggtggtgtccgcgcgaggcagatggcgcacactgcacagacacacgatgcacccaacgccatgccaaagagttcaacgcagagtgacaacgcagaatgatgcacaagtgagaggtaggttgttgatccccacacacgcgcgcacggtttggactgttcgacatacggttctcatcgtcccacccacacacgcacgcgtaatgcaaaatggcaatcttcacaatcacacacactc

SEQ ID NO: 12805 - DNA, 3443 bp, Oryza sativa
  ref <308>: DATABASE ACCESSION NUMBER: AK110153
  ref <309>: DATABASE ENTRY DATE: 2001-12-06
atcctcaccagcgcaatactcgcacacactcgcatcctagcctcgtcccaaccacctctgcacctctgccacacgccggcctattctcagctctggccttctctctctcgcccaactcctctcgagtcgcacgctgccgcccgtctccatcacggcccacaggccttcttcctagcccacacgcacgggtcctgccgcaccattctgcatacgcaggacgcccgcccaccatgtcctcccgcatcccgccctacgacatcccagagccgacgccgctcacaaaggacgaggtgcgccaaaagtacgctcgctacgagtccctccgcgcacagctagccacctccttccgcggccagctcgccatccgcggcgagcccgtctttgcaaagagcatcaccatcttcaacgatgccgctcccctcggaggctggatggtcgccctccccatcgacgtccacgacatctcgaccaccccgcctgcccgcccacctcgctaccgcccccgccagcttcgtccgcctcggccgccatcgaccccatcaccgccaaagcagatgcacatgccatcaccctacaaagcgactccgtacgcgcagcagatcaactcgcccagacacagatccaccatcccgatgctacacccatccaggaccaagcaaccgtgcgaccggcgcccaagagcgagacttccgaggacgtcgacccacaggatcccgccaagtccgcattgaagcgcaagctgcctccatccaatcccgacgtggtctcccttctcggccccgactatgcatctgcccccacaaggcgcaagaccgactccaactcgcactccatgcagcacggccgcagccacgagagcggtgcagacgcagacagcgagagctccttctccgccaacgacgatgcagacaacgaccacccaatacctgcctcggctgctcctcgcgctgtccacaccgccgccgccaatcgacccgtcgcgtcatctaggagcgacttcctcacagcctcggagccacgcgatgttgctccgctcctcgccaaagcagtctccgcatcaagctcaggctcgggctcgggttcgggctcggcttccgcgtccgcctccacttccgcctctgcctccaagatctgggtcgacaggcagctcgatccctcgggcaatggttccgactcgcccggcggcagcaactcgggctccaccggtggcacgagctcctcccagctcgcttccagtttcacctcggcctccaagcaatcctccgccaagtcctccaacgcaggcggcgaccacgccgacgtcaaagtggacaccgacaccgtgggtgccatcacgaccgacgatgcggccgacgagacgctcgcattcaagcgtcccaccaccatcccgcttcccaagcgcgatgccgctccagctccacgtcgtcctgcctcgcgctccggttccggctccggttccgcatccgagtccggtcgcaatcgcagcgacctctcctacagccgcacgccagacgactgggacaccagtgccaaggcagaccaccaacgttgggcaaggcaccatcgcccgccatccggcaccccgggcgaaaggatcaaactgcccgaaggcggattcgtctggcgcagcgacggcgccgatgccggcatcaccggcgtgcctgccgcgcccggttcgctcccgtgggatgccgaggcctttgccgccagcccagaggcggctgcggctcgttcgggctcgcgcagtgcacgctcgtcgtcgggcgaagcatcgtccaacgagctcgaggctggccgtgcgggtgcatccggcgcgagctactttggcgcctccacgctcaacgacctgcaggacgcatggccgtcgggcacatgggcggtcaatcaggagggcgccaacgatcccgcctcgagcctgccgcgcttcatcccatcgcccttgcaaaagtacggctcgccctcgcgctcgcccacgccgcacatgcccgatgccaacaacccgttcaactttgactcgcgcccagacgtcaaccacaacatggccaccgccatcctgccgccgggcatgtacgaagaccgatatgcgctcgcctcgttcggcccgggcgtgggcatccgcggcctcgatgccttcaccgaccgcgccggacgcgagggcaacttcctcgcgcacatggactccaagagcgacggcaagaagcgccagatggacgatcccgacgcacttccgccgctcgtcgtcaacggcgtgccgtatcacgtgcccgtgtcggcgtatccggtcggctccaccgccatgacgacgggcgggttcggatacctcacgcgcgcatacggcctgtcgctcgacaacattgtcgaggtggagatggtgctcgccgacggccgcatcgtcacgctcaacgaagagtccaagcacaagtcgcaggaggagcaggatctgtggtgggcggtgcgcggcgctgcaccgtgctttggcatcgtctcgcgcctcaccgccaaggcgtatccggtaccgtcggtgtattcgggcaacctcatctatccgctcaatcctgcgacggcgggctcgctcatccgccactggcgcgactgtctcaaggccgggctgccgcgcaagttttacaccaacctcatcctcacggcggggccgagcaagacgtcgcacgtgatcgtgatccaggtgtgctacctgggacctaagagcgatggcgaggcgctggtgcaggcgatcagcagctggacgggcgagcggcttttgctcaaggatgtcgaggagcgcagcttcctctcgcagcaggacggcgtggccaaggtgctcaagggcggtacgggacggcgctggatggtgcgcggcgacctcatctcgacgctcaccgacgacgtgatcgccaagagcgtgcgcaactttcaagggctcggcagccgcgccgtgtggctgtttgagctcatgggcggcgcgatcgaggacagcggtgcggacgagacgtgcatctgccccgaggcgcgcgccgccaagttcaccgtgggatcgctgcagcagtggagcggcaaggacgaggaccgcacgtgcatcgagagcgtcgagcgctggttaaacgaggtcgtgcacaaggtcagcgtcggcggaccctatccgtgctttctggggcgctccgaacgcatggaccgcgtgattggcgcttacggcctcgacaacttccgccgcctgctcgacatcaagaagcgcgtcgatcccaacaaccttttccgccacacttttggcaacggattcgtcgtcgatgagcctgacaagttgctgcaggacctcgacgtccgtcagaccgagcgacgccggctgcaggaggccgacttgcgagcggcagccgctgccaacggccagacctcttcatcgcaggagtaaggaacttaaaacgaaatagcattcagacagttgaagttgg

SEQ ID NO: 12806 - DNA, 3040 bp, Oryza sativa
  ref <308>: DATABASE ACCESSION NUMBER: AK110154
  ref <309>: DATABASE ENTRY DATE: 2001-12-06
atctcgctcgcagccaacgacaagcgctcctgctgtcgatccgggtaagctgacgcgacgcgacaccgcccggagcgcaccgctcacttgaaccggttcgccatgtactcctcccgcgcactggccgcccgagggcccatcactggctctctccgcagtcgatgtcatcatgccactgcattgtcagtagccgtgagcagagcatctttgcagctcaccgcgtcctctgcacgatctcaccaccccctcttcaaaaaggcccatgccagcatccagtcgctccggtggggatcctcggctgccctcgcctccacctcgcccgaggctgccaaggtcgcagaggatgccgagaccgagactgagaacgatcccttccgcaagatcggctatctgtactttgacaccgtcttccccatccgcctcggcttctgggacattcgctatatgctcgcttcgctcgaaaagcgctccgtgctcgaccgcgtcaaggccagcttgcccccggacgaaagcgtcggctacggcttcaaagtcatcggcgcagaagagcgaatgaaggacggaggcgccttcgtcaccttctcctaccgcgaggaccccaacgagaagagcgaggactcgctcaaccacatcgagaagcgcctcaagtccggcgtccgacgcgtcttcaaccctctcctcttcttcatcggcacgccgggtgtacacgtcgtgcgcggctcccccttccgcgaggacatgaacatcttcccctccacccgtatctttgtcaagctcgagggtggcgatgccagcgaggagcagctctggcagactctgcgtccctacggtcgcatcgtatccatcgtcaaggagaagccgtccgaggcgttcgtcaccttttctcgcatccgcggcgccaccagcgcacgcaactgtgcccacggctacgagctgcccaacggcgcgcgcttcatcatcacgttccgcagcaagctccgcagcaagcaggcgtgggactggatctcgaaccatcccaggatcgtcttcccgctcgtcgccttcctcatcggcggcatctcgtacatcgtcttcgaccccgtccgcgagttcatggtggagagcaaggtgcacaacaccttttcgctcaacgagtatcgcctctactcgtggctcaagcgcaacaccgtcggcctcttcaaggacaccgacggcaacgccgatggccgcgtagacgactggtgggagcgccgccagtcggcggagaccatccaggagtggatccgagagaagccttccactttcgtcaccatctcgggcccgcgcggatcgggcaagacggggctcgtgagcaaggccatcacgcgcgacgtacagcatctcgtcatcgactgcgacgccatcgcaaagaccgccaagaacgactcgctgctcatcacctcgctcgccaacgagaccggatactggcccgtgtttagctggctcagcagcatcaacaacatcatcgacctcgccgccgtcggcctcatcggctccaaggccggcttcgccactcccaccgatgcccagctcaagcagatcctcggcgtcgtcaccaatgcgctcaacagcatgaacgaaaagacgcagagacgcctcgccaaggcagaaaaggctcgcctcgctgccgagaagaagctcaaacagcccgcacaggctgggaccaccgatggcaaccggtcgctcgaggaaaaggcctccgcgctggcacacgatacgctcgggtccatccagcaattcgtgtcgccgagcgacgccaaggacggaggcaacgacgccaagaaaaagtcgttcgactcgcccgtcgtcgtcatcaaccagttccaccacaagggcatcaagcaggccgtcctgcaccaggtgctcgcagaatgggccgccgagctcgtcaccaacggcatcgctcacgtcgtctttgtctcggacaatccggtcggcatgggcaaggagctcgccaaggcgctgcccaatgtgccgttccagggcatcgcactcgccgatgccgaggaggaaaaggcacgcagctacgtgtacaacaagctcaaggagatgggtcgtcttgccgtcatcaatgcggcggcgggcaagggtgctggaggcgctccgctgcgagccacgccgttcggatcggcggccgcgcagccggcgattgcggaggccggcgcgccgcccgagtacgcggcagcgctggacgacgagacggcaagctgggtggacaagttgggcgggcggctgacggatctggagacgctggtgcagaaggtgtcgctggggcagacggtcgagtcggccgtgcacgatattatctcgcgcagcgtggtggagctgcgcaagaatgcgtttggcgacgacgcgagcgaggcgtcgtcgctggcgtggacgcgtacgcaggcgtggacggtggtgcagaagctggcggccaagggcgagatcgcctactacggcctgctgcacaacgagttcaagggcaacgaggcggcgatcaagtcgctcgagcaggccgagatcatctcggtgcgccaccacgatggccggccctcggcaattcgagctggccgtcctgtgatgcaggaggccatcaagcggccggtggccgatcgggtgttcaacgacacccagacgctgctcgcgaacgcggcagcgatcgagtcggccgaaaagagcttgcgcaccatcgagaccgagatctcggacatctcgcgcatgatccagggctcgccgttcaaggtggcttcgggcgcaggcgccacggatggcgccgtactgccgccgcctggggataagaagaaggacgacggatggtcgctcaagctcagctggttcggggacggcgagggcgcgccgagcattcgcactagcgaggcggccaaggccaggacggaattcctcatgtccaagatggccgagctccagaccaaaatctccaagctcgatgcgcagagcaccgccatcaaggcgcggcttgccgcgcgcatggattagagagtcctcaggcgcaatcacatcaccgctttcttatggg

SEQ ID NO: 12807 - DNA, 3819 bp, Oryza sativa
  ref <308>: DATABASE ACCESSION NUMBER: AK110155
  ref <309>: DATABASE ENTRY DATE: 2001-12-06
ccgcaaccatccggtgcatcctccaagcatacttttctcccagcctcgaggatcccctgctgcctagagcgcaactacgcccttcctcatgatcccttcgcagaggtatgcggccgggagcgcctcacgctggcgcacatccgcagtcaatgccgccaccatgaactcccgacgcatcgtctctctctcctccaatctcgccagagccgctccgggcccctcggctcttcatctcgcagcaccgcgaatcggcaagagcatcgacgcaacagcttctgccgccttgcgcaccgtgccagcaaggtccctcttcacctctcccgcccacagcttgccacggtccaggagacttgaaaagatgctcgaggacggcgaggaacaccagaacgaggaaaacgagatcgacgaggacgagcagcacaacaaagaagcagagcagaccggcgcgaaggcagaatcctctggctcgtcctccggcgctcgctcagctacaggcggtgctgccgcttccggctctgcttctggctccggctcggctgcaggcggatcgagctctggctctggaaaccgttccggctccaactctctcgcccgctccaccgtgccctccgtctacccgcaggtcctcgctcttcccatcacccgtcgtcccctcttccccggcttctacaaggccgtcgtcatcaagaaccaggccgtctgcgccgctatcaaggagtcgctcaagcgcggccagccttacatcggcgccttcctcctcaaggacgaggcggaagatgcagacgtcatcaccgacctcagcaaggtgcacaaggtcggtgtctttgctcaggtcaccagcgtcttccccgttcagggcggcggccagtccggcggagcaaagaagggcaaggatggcgagaacgccgaggaggaggagggcatcactgccgtcctctacccgcaccgccgcatccgcatcgacgaactcatcactcccaccggtcagaccatcccttcgcccccaccaggcaccgagggagccggtccagccaaccctgtcagcgacgaagccgccaacgaagccgtaaaggctgcctccatcgcaaaggtgcacgacatccaacaggaggcacgcgatgacggcgtcctccctgaagtcaacgacgcatcggcagcccacctccagcagaacgccccaccagctcctcccaagcccttggatggcgagtcgcaacccgaaggcgatgctgctgacactcaggacatgccctcccactcgactcccttccagacctccttcctgcaggactacgccgtatcgctcgtcaacgtcaccaacctcgcagccgcgccgtacgataagcgcaacgaccagtacatccgcgccgtcatgtccgagctcatcagcgtattcaaggatatcgctactctcaacccgctcttccgcgaccagatcgccaacttctccatctcccagggcgcaggcaacgtattcgaggagcccgaaaagctcgccgactttgccgccgccgtctccacgggcgaggtgagcgagctccaggcggtgctcgaggcgctcgacgtgcgcgagcgtctccaaaaggcgctcgtcgtcctcaagaaggagctcatgaacgcacagctccagagcaagatcagcaaggacgtcgagtccaagatccaaaagaggcagcgcgagtactacctcatggagcagctcaagggcatcaagaaggagctcggcatcgagagcgacggcaaggacaagatgatcgaaaagttccgcgaaaaggccgcagaactgcgcatgcccgaagccgttcgcaaggtgtttgacgaggagctcaacaaactccagacgctcgagcccgccgccagcgagttcaacgtgacgcgcggctatctcgactggctcaccagcatcccctggggcgtccactcgcccgagaactattccatctccaacgcgacttccgtgctcgacgaggaccactacggcctcaaggacgtcaaggaccgcatcctcgagttcctcgccgtaggcaagctcaagggcactgtcgagggcaagatcatctgtctcgtcggccctcccggtgtgggtaagacttcgatcggcaagtcgatcgctcgcgccgtcgagcgccagttcttccgattcagcgtgggtggcctcagcgacgtcgccgagatcaagggtcatcgcaggacctacgtcggcgccatgcccggcaagaccattcaggccctcaagaaggtgggcaccgagaacccgctcatcctcatcgacgaggtcgacaagatcggtcgcggccacaacggcgatccttcgtcggcgttgctcgagatgctcgacccagagcagaacggctcgttcctggatcactacatggacgtgcccgtcgacctctcgcgtgtgctcttcgtctgcacggccaacacgctcgacaccatcccgcagccgctgctcgaccgtatggaggtcatggaggtgtcgtcctacacggcggacgagaagcgccacatcgctcgcggctacctcggcccgcaagccaaggaggcgtcgggtctgcaggatgccaacattgtgctgccagacgagacgatcgacttcctcatcaagcaccacgcgcgcgagagcggagtgcgtggcctgcgcaagctcctcgaaaaggtgtaccgcaagatcgcattcgacatcgtcaaggagcacggcgagtcggtgttcccggagcccaaggagggcgagctggcgagcgccaagaccgaggcggcgtcggcgtcggcaacccagtccgtcaccccgcccaacgtagacgggcaagcggcggacagtgctgctgctccctctgccttccccgagccatcggcgtcgacgagcgaggctccggacagcaagccgctgcaggacggcaaggtgcctggcaaggatgcggcgcccgagcccccagccaaggtgacgaccgagaagcgccagcccatggcggtgcccaaggacgtcaaggtggagatcacgatcgacagcctgcgcaagtacctcggaccacccgtgtaccacaaggatcgtttgtacacgagcgccatgcctgccggtgtgtcgacgggtctgggctacctgggcaacggttcgggatcgctcatgccgatcgagacgaccatcatgccgggcaagggcagcctgcagctgacgggcaagctgggcgatgtgatcaaggagtcggcgtcgatcgcgctgtcgtggatgaagacgaatgcattcgatctgggcatcgtcaaggatgccaacgacagcttgctcgagaacaaggatgtgcatctgcacatgcccgagggcgcgattggcaaggaagggccgtcagcgggtgtggcgtttacggtgccactgacgtcgctgctgacgaatcgatcggtagcgccgacgctggccatgacgggagaagtgtcgttgcgcggtatggtgctgccggtgggtgggctcaaggagaagctgctggccgcgcatagggcgggcatcacaaaggtgattctgccggcgcagaaccagcccaacgtagaggcggacgtgcccaaggccgtgctggatgacctcgaggtgcactacgtcaacaacgtctggtcggcactcaaccatgcgtttggagagggaccgtggtcggccaaggcgaaagagatggaggagctcgagcgcaaggaggccatcactagcgatcagcccaagcaaaagatcatgccggacgatggcgcgagtcaggaccagcctgtcaattaacacgctagattgccaaccaccgctccgttcgctcactgtacttcatcgcaaatgcaaatcattgtacg

SEQ ID NO: 12808 - DNA, 3199 bp, Oryza sativa
  ref <308>: DATABASE ACCESSION NUMBER: AK110156
  ref <309>: DATABASE ENTRY DATE: 2001-12-06
agcttccatcctcaccagcgctgcactgcagtttttcctcaaacctcgagtagctggcgcatccttgcggtgggcacagagtactgctagcatggccgccaatcgcgcccagctcacgctgaggttgcaacctcttcttgctactcagcacgctccacgcttggctcttgctcgtacaagcagacgccatgcctcgtcatcgattgttcgccagtcagattacaagttcgatgacaggaaagccccgccgcctcccagcagtaggaggtcctccttgtcgtcctcctcgccgtcttcctcgccgtcctctcctgccatcgacaagacgttcgtccgcggcgacgacaccaaagcaaggaccgtcttcatccgcccaaaggacggcgaccatctcgtctctgtcgtccacaccctctccctcctcgctcagctggcatccaaatttggcccgattcaaagcttccacttcccccgcgaacctagctcgcagcgccttctcggctacggtagtgtcaccttcttggatcgagagagcttgcgcaaggcactcgccaatgatggcatccacactgtcgtacttccgcccgtccttccgtcaagagcgcctcgaacctatctctcggacgaggagcacgagcgtatcgtgggcacagcgcctttgatcagctgcgacgctccttccaagcatggatcggcgtctcagactcaccactcgtcacgctcccttcagaacccgtccgccttgcgaccaggctggaccgacatcgctcctctcgtgaacatggaagcagctttgtcgccgcgctactatgtcgacgagtccagggcaacagcagaaacgccagaagacgccgtcatcgcccacgacgcctccttctacctctccacttcctcggtgtcggtcgagaccaagatggagcacaggatcaccgccttggctagtcgagccggcgctcgagccgatcgcagaagcgaagaattgcgcaggaacgtccgtgcagctttgcaccagttcggcggcttcaacgacaccttcaaaaacactttcaaaaggtcggaacacgaggctgagggagggttcggtgaaggacacttcgatctagaagggctcaacgatcatcggcacggtcgcacccgcaactctggctctgcagcaagcggtcattctcgtgctggctctcgatctggctctgcatggaacagacgcccagattccagaatgcagcgtggtggccacggaacaagatcgctctccacttccgccactgcgttcaacagcgagatgttcaaggccaagtgcaaggcagagtggcagcgcaatcgacactcgaacttcatcgaccagctctacctccgcgtcaccggcggcaaaggcggcgacggctgcgtctctttccaccgcgaaaagtacgtccagttcggcccgccatcgggaggcaacggcggctcgggcggctccatctacatccgtgccgtggaaggacccacgacgctcgcgcgcatctcgcgtcgctttcgcggcgcagacggtccgcatggacaaggcagcttcttgcacggcaagaaagtcgaggataaggtcgtcgaggtgcctgtcggaactgtggtcacggcgactcggcgccttcgcatacccgaggaggtagaggccgagacgtactatcaggacctgctcaggcgtgcggctaaggccaagtgggatccaaccggtctggtagcgaaggaggacatcgtgcttgcggccgaacacgaagggcgcaggcgtctcgcgagatcgcagccacccgtggaagcggaccagcaggcagtcagccagaccgaggtgtccgagctcgattcgaccgaagacggagcagcgtccggcgcggagaaagccaacgaagctgaagaggagatcgatggagaggacctgcttgatcctgaagacgcgcgtcagttgcagctgctacgtgaccgcgtctggcgccactatcctcgggcggaggagacctactaccgacgcaacgagtttcgagccgccgagatgcgcctggcgattgatcgccgtcgccgccgccgataccaggcacaggctcaggctgcgctcgctgctgcggctgacaccgtcgcatcgtcttctatcgcggccgatcagtcttccgccgcatcggtcactccatacgaggatgaggagccgctcgagcagccctggcgcatcgacctcgacgagcccacgcccgccgactcaccgggcgtcctgctcgctgcaggaggccgcggcggcttgggcaaccccacgtttctgtcgtctgcgaaccgctcacccaagttcgccaccaagggcgaatggggagaggcgctcgaggtgatgctggagctcaagcggccttcggacatcgggcttgtgggcctgcctaatgcgggcaagtcgaccatccttcgatccatctcggcgtccaaggcgcaggtgggccactggcgcttcactacgctctcgcccaacctgggcgtggtgcgtctggggcaagacggcagtgtcatgggtgtcgacgattccgaggtgcaggaaggttacggacacgaccgggatggcagtgtggctgatgcggacatgccgtcggatgccgaggagttccgactggtgctttcggacattcccggtctcattgatggtgcggctgacaaccgcggccttggccatacgttcctgcgacacattgagcgatgctcgatcctggcgtatgtactggacctcaccgagcccgagccgtggaaagacctgggcgtgttgcacaacgagctggcttcgtaccgctccgatctgccagccaaggctcggctggtgatcatcaacaaggcggaccagttcacgacgcccgatgagatcgaggctgccaaggccaaggtcgaccgcatccgacgacaggtcaacgagatctgggaggatcagcaggcgctgaggacgggcgaggtcaatcagggcgccgagcgggctcccatgaaggtgctcacgctttcggccaagaagaagcagggaacacaggggttggccaagacactggttgagctgctcagggaagctcgaagcgaggcgcaacaggatgtcgagtcagctgaataggcaccacacagaatcactcggcgtgttgttcaacaattgcttttccggggatgcagaaccttgtagagacagtgagagtgaagcaaatagctgtgatgg

SEQ ID NO: 12809 - DNA, 3647 bp, Oryza sativa
  ref <308>: DATABASE ACCESSION NUMBER: AK110157
  ref <309>: DATABASE ENTRY DATE: 2001-12-06
gttgctatctcgctgcttgattcgcatcgcgcctccatcctcatctccaccatctcccctcatcatcgcttgcagacaatggccgtgcctttagcagttcctgctagacacgaccccaagcagtccatcatggaaggtcgatcgcctctcacacccaccgacctcggcctcaacacatccttgtcgccgtccaccagcatggctcgtctctttggcagcacctgtgcgctcaccatcctcaaaggcgacgccgaccatcccgtcaatgctcgtgcacccatccaccagaaggagcgcgcatccaaaccatcgacccccgccacgaacccgccacgcttcgcctcgtctttctccagcctgcggtccgcgtccaacgctgcctcctcgggcttcgactccaccgtcaacgtccacgccgtcgcagatcacggcatccttctccccttcctcgaccgtcccaccgaagtcaaggagctcctcttcgacaccaaagccaacgaggctctcatgtaccgactctgtcgcgtctttggcggcgatcccgagcgtcccacccaacgcggctgtgacgagcgctgggatgagatgctcgagctcctcaccgagctcgatcgtccgctactcgacgacgaggactggctcgtccgcctcgagtcgctcgtaatggagcgctcccccgagctctgggctcagctggcgcgctgcctcggcgcagaaggcctcactttgcacccctcggctcagcctgcatcttcccgctttgacagctgggctctgccttcgagatactcgctcagtcgcgacaacgacagcccactctccgctccgtctcccagctccagcagcggcgacgaggatggagcccatcgcgagcgatctctctcggtcagcgtcgaacctctggacaacctgccccaatcgttctcgcaacagcctgccggaaagatgcattcgtcgtcattgcgcgacgcggcttcacctatggaagccaacgaatcgtcatcgcccgcagagccttttgccatgtcggctggcgacgagtcgggtgcgcccggctcgctggaagacatcatagaggagcctagtcttgccgctcaagccgaccgaagcgcatcccgacgaccccgctcgcactcgggcaagtttgcaggccttcgcatctcggccatgacctcggtcagtccgcctgcctcccgacgaacctcgatcacctcggcgtcgctagctgcagcttcaagccgagatgcctcgccactgcccaccggcgagatgtctcccgcaggtcgggctgccactagcccagctcgctccccttcgcgaggtccttcggcttccttctccaagcatcgcaggctcagcaccatgatgatgcagaacaacacgtcgcaccagccccgctcgtcacacgattcgagcccctcgacgtcgcccaaggccagcatcggccgacgtcagcgtggcgtgagtgaggcgaccgctggcggagcccacgctggccatcaccacaggcagcctcgccgccgcgcccagagctttgcccgctcgttcgccgagctcaagtcgcccacggaacatctcgagcagctccgcgccgatcacgcccaagccgaggccgataggctcgccgatgacacgcgtcgcatcagcctgcaagatggccaccttgctcaatcgggcaacgccgacaatgccacctctggtgccctcggcctatatggcgacagtctgagcgtgccgaaggagggcaagcccgcaaaggccgccacccgccgcctcagagtcggaagcatgggcagccgcgccagcgtcagcagcaccggatccacctccccgtctcttcccggtctgcttccggacggccgcacacgacatccctcgggaagctttggctcccgcgacctgtccgagtccatcgctgccttccgcgccacgatgggcatgtcgacctcgcccgcacccagcgagaccaactttgccgataacgccgaggcgtcatcggacgccgatcaatccaccagctccgccgctcgcaagcgcaagggatccggcggcgccgagctgcccaaacccacctcgaggactgccgagatagtcgaggcaaaggtctcgcgcacgggctcgcctcgcaacaacgagcaggcacaagaccatctgcagcaacccaagcacatgcaggagctcgagagccgcaaccgcgccgcaggaggtggaggcagcggtctggcgctcggaggaggcttttcgtttgcaaagtcgggcgccaacttccgcgcaaagaaccacgacgacgcgcccacgtcgcagggcggctggcgatccagctttgcccgccgcgatgggccgcgctcgcgtggtgagccgtactcgtaccgctcgcctcccgcggtgcatcgccgaccgggaggatttgtctcgctggctcaggagtacgagagggcgaggagcggcaggcgggcaagtgagagcgtcttttcgttcaacagcaatgcgctcgccagctcgccttcgagcagccaagcgagctttgatcatgcgggcgacggatcgatgccacgcgcgcgacaggcaagctcggaggatccgatcccgcgactggagctgacggtcgcaccggacagcagcgaggcttcgatgaggaagggatcgactccggatgttggcaagggtgagcctacgcccaaagctggtcccggcggaggcatcacgccacgcgcatcgttcacgacatcgacgaggccgccgagcagggaagcgggacacggatatccgttccccaacctgctctcacgtcgaggaccgagcgaggagctcaaggccgactcttcgtcgacgctcgcgcccgcaacgctgctgagtccactgcaggcgtgccacacccaccttggcgcgacaccgccggcggcgcgagccagtccgcgttcgccgagcatcgtatttccgatctcgccaaatccggcgttgtcgcgcgcgcgcgcgagttcagccgtgccgtcgagacgccgcggtgccaggacgcctttgcgcgcatccgcaacgtgtgtggcgacgagacggcgagcggcatccgggcgctcatcaccacggcggagcgcgccgagctgccggacgagagcctgctcgaggaggtggcgcaccgtctcggcctcgtcgaccacgagcgcgcccgcatgcgcggcggccacgaggcggaacacgccgacgtaaagctcgccgaagagggatacgcagagcgatggcacgccttcgctgacctttgctcgagtctgggcgtcggtcagtacgaactgtcgatggccaagcgcaggtgcggtcccgccatcgacctgtgtggctgatccttggctcacgtagcatcgattgacaaacacattcggtttcgctcacgcaggatcgattgacatacgcatccgctcttcgcacagcacgtactctccatggcctcatagtggacttgccatcggccacctacgtgttcggctgaaccttttctcacctggagttcattgacaaattgcacatacgtagccacacacacacacacacacacacgaagtcacacgcacacacgcagtcatacgcacacgcacagtcatacgcacacacgcagttatacccgcactcgcatgcaatgcacttttttcgatttc

SEQ ID NO: 12810 - DNA, 2830 bp, Oryza sativa
  ref <308>: DATABASE ACCESSION NUMBER: AK110158
  ref <309>: DATABASE ENTRY DATE: 2001-12-06
atcaccatcacgacccccatcacttccagctgaacctctgctcttcacgctttcgcaccgccggcttgtacaccagctcgacgtcaccgacccttcgcgtagtacccactcgagcatccgaggcacacagccacctcacagccagcaatgctgcgctccataagctcgcggtccgccgttagccgcttcggtcttgcaccatcgcgatcagctcagatcagcgcagcgcttccgtccaccgccgccacccgctctttcacccacctctcggcctctagatcgcagatcgcatcctcttccagatccaatgcagccaagctcgctctcaacaagtcggcactgttcctgcaattaaggcagtatgcgacgcctgccgaggacggtgacaagaagaagaattccgcccaggagcatgacgacgacgacaagaagaagaaggagtttgaagagtctgtagagcgcggtctcaaggaagcgcgccagggcaaggcgggcggcagccttcccgagaacctcaagcagttcttcgacagcgatgacaagaaggcgcgagcctccaagagcgacaaggaacctgcgcgcgacgaggatgacgaggtcgccgagaagaagaagaagaaggccgacaagtcgtcaggtgccaatggctccaccggcggcggtcccaacggccagtacacagagatccgcatcaacgccaacaccatctttgccaccatcgtctccacctaccttctctaccgcctcacctcgcccgaccagcccagccgcgagatcacgtggcaggagttccgcaccgccttcctcgacaagggccttgtcgatcgtctcgtcgtagtcaaccgctccaaggtcaaggtctacctccactcgaacgccaccggctccatgtacccttcgtccggcggctcgagcagtccggcgagcggcagcggccacgcggcctactggttcagcgtcggctcggtcgaagcctttgagcgtcgtcttgacgaggctcagcgcgagctcgacatccccggcaacgagaggattcccgtggcctaccacgaggagatttccaccgcatccaccttgctccacttcgctcccaccctgctcattgccggtctcctcttctggatgtcgcgacgagctgccggtggcgccatgggtggcggtggaggaggcggacctggcggcatcttcggaatcggcaagagccgcgccaagatgttcaaccaggagaccgacgtcaagaccaagttcaagaacgtcgccggcatggacgaggccaaggaggagatcatggagttcgtcaatttcctcaagaatcccgaaaagtacgagaagctcggtgccaagatcccgcgaggtgccatcctgtccggcccccccggtacgggtaagacgctgctggccaaggcgaccgcaggcgaggccaaggcgccgttcctgtccgtgtccggttccgagttcgtcgagatgtttgtcggtgtcggtccgagccgagtgcgagacatgttcgccaacgccaagaagcacgcgccctgcatcatcttcatcgacgagatcgacgccatcggcaagagtcgaggcaagggcggcaactttggcggcaacgacgagcgcgagtcgacgctcaacgagctgctcgtccagatggacggtttcggcaccgaggagcacgtcgtcgtgctcgcgggtaccaaccgaccggacgtgctcgatgccgctctcatgcgacccggccgattcgaccgacacatcgccatcgaccgccccgacatttcgggacgcaaggacatcttcctcgtgcacctcaagccgctcacgctccactcgtcgacggatcgcgatctgctggcggagaagctgagcacgctcacgcccggcttcagcggtgcggatgtggccaacgtgtgcaacgaagcggcgctcatcgcggcgcgcggcggtgccgagtcgatcgaggagcaccactttgagcaggcgatcgagcgagtcatcgctggcctcgagaggaagtcgcgcgtgctctcgcccgaggagaagaagacggtggcgtaccacgaggcgggccacgctgtctgcggctggttcctcgagcacgccgatccgctgctcaaggtgtcgatcatcccgcgtggcgtgggtgcgctcggatatgcacagtacctgcccaaggagcgctacctgttctcgaccgagcagctgctcgaccgcatgtgcatgacgctgggcggacgtgtgtcggaggagatcttcttcaccaccatcaccacaggtgcgcaggacgatctgtccaagatcacgcgcatggcgttcgagatctgcgcgtcttacggcatgaacaaggagctgggtccgatcagctaccgtacggagcaggagtcgatgcacaagccgtattcggagcgcacgggcgagatgctggatctcgaggtgcgcaagatggtctcggaggcgcacaagcgcaccacgcagctgctgagcgaccaccgcgccgacgtggagaaggtggcgaagctgctgttagagaaggaggtcatcacgcgcgaggacatgcgcaacctcctcgggcctaggccgttcagccacgcagacgaggcagaccagtacctggacaagaagggcatgctgaagcgcaagggcgagagctcggctccgcccccgccgcccgaggacctgcccacgcccggcctcgctgcatccaaggtgcaagacccgaagctctagacgaatccccttgcgccttgtctctgatccaaacctgtattctttcgtcccagtctctccatcacaactctctctctctttgctcagatacaatccaatcatgtctcttttt

SEQ ID NO: 12811 - DNA, 3899 bp, Oryza sativa
  ref <308>: DATABASE ACCESSION NUMBER: AK110159
  ref <309>: DATABASE ENTRY DATE: 2001-12-06
agcgcctttggggcatcgggcccatcccatttcaccttcatcgccatcctcccttccatccaccctccatccgccgtcccgaccgcacattcacttcatccatccacccgcgccacgtcgcgccggtgctgccttctacaccattcgtctcacacgcccactacgctcctgtcgtttccgctggtcgtgccgtgccgtgtccggttcctactactacatccaccatcgctgccatctcgcaacctccatcctttcccacttgacagtcgcatagcttcgtcagctactatcctgctctacatcttacacccccgcgctctcgtcgtcgcattcagtggccgtcatcgcctgcttgcatcatcgcgatagccgtctccgccatccatccgcccagttgcactgcatttgtgccttgcgagatccatccatccatccacgcggtcatcgaaacaccacccacgtcggctgtcgtccatcctctctcgatctccgacgctgtgctcgcgaatctggcacacatctgactcgccttagccacctccacgagacgaacttgatcgccacgtctggtccgtcgacgagtgtagcggttccggcagcttcgacgcggtctcgactccggcagcttcgcatcaatccgttgaagatctcgccgtacacaagtgcgtgccgatgcatccgctgcacacgccgtactccattccttcacacgcagcatcatctctcgttcgcagcatctcctgctcgcgacgcgacgcatcagactaagctcagcacgatcttcggttcgaccagcgatagaccctctacacattcgcgcaaacttcaccatccgcgaacccttgcaccagcatccgtgcgcctagcagcacaggcacttgtcgagcgaaaagacggtccacacgactacatcgcttcgccacaaattagcccatctctggccagctcaatacccattatccacgagggccgttggccgttggcccgttcgcgattagcacagtctcgcgcttgtagggtgtccactccagcatggcccctctctgcacctcggaagaggtgaatctgctcgtctaccactatctcaaagagtccggcttccaccatgcttccttctcgttgcggcacgagtcgcgtctcgacgacacgccactctccaaggaggccatcgtagaacctggtcagctcgtgcgcttcctccaaaagggtctcctctatgcttccgtagaggcgcacgtcgccgacgatggctccgagaagccttgctcggcagccttccatctcattgggccaccacacgtgtgcgacggcaatcctcgcccaacgcctcccccagcacccgccacacgcctctcgcccgaaccggatccgttcgcagcccttcagcctcgctccgaccataaggaagcggcaacgcagacgccagcgcctgcggccaccgccaacggcgtgcatctcgccaaggcatccacgacgtcctcgatacgcagtgcggacgactcggaccgctcgtctagagtcgcctcctcttccaagaagaagatcgaggatgtcgccgaggaagacaatgcatcgtccgccttgaaacccaaggatgtcaagcgcaaggcttccgcatccgtcagctccgaagccgaccgcgaggacaagcgcctccggaccagcgaggcgagcgccaagcaggactcggacgccttgcgtgttgatggtgagcacgcatcgtcacacaaggatcgacgaaacggcgacgcatcgtcgcggtccgcatcgcctgtcgcagagaagaaggcggcggtgcaagagcaacgcagcaaggacagggaggccagcagcgggaagaagaagaagggcggaaagtcagcagcaggcgaaaacggcgaaggaagcaaaaagcgcaccgacaaggaaggttcgtcgcgcagcaaggaccccaaagcaccgataccgcggcccaagggagacaattttgtcgaagatgcacagatcaccacactgtcagggcataccggcgaagtcttcatctctgcctggaacccgactgtacccaacatgctggcgtccggaggcggtgacgcgaccgttcgcatctgggaggtgccagaacaggccggagaatcgccggaagcacccaccatctgcaaacacttgcccgcgactcagagcaaggacatctcgacgctcgactggaacccagacggcaccctcctcgcgtctggctcgtacgacggcatcgtgcgcctttggacgccccagggcgacctgcatctcgtcatgtccatgcaccagggacctgtgatcagcgtgcgctggaatcgcaagggcaacatgttgctcacgggcagcgccgacggcaccatcatcgtctgggatctgaacagcggcaagcctcgacacaccttccccctgcacagtgacagcgtcctggacgtcgagtggctgtcctgcagatggctcgctcaagcccaagacgtcgtcggatgtgccgcctcccatgccgcacggcctgagcccgtcggtagccgacacctactttgcgtcctgctcggcggacaacagcatcacgttgtgcaagctcggcgagcccaagccggtcaagacgttcaagggccacaccgacgaggtcaacgcgattcgctttgacccttcgcagacgctgcttgcctcggtttcggacgacatgaccgccaagatctgggcgctcgacatcggcaccaatgcaggtggcgccgcctcgaccgtaagttcagggggagacaatttgcgcaagcgagcttcgcagcgccggggcggcagcgcgcacctggacggcatggatgtggacgaagagcctacaccgcgccccaacgaagatggctccggtgatcgtgaccgagagaaggaccgtgcaacgccggggaccgccagcggtaacgctgcttccggggccgcgcctgctgcatccaacaaggaagcttcgtcgccagcaccgggtagcaacggtcacgcgggctcggccgccaaccacacgacttcttccgccctcatcgccaccaccgcaaaaggtcccaacaagggtctgcggctcacgctctccggccacaccaaggagctctatgcgcttgcctggtgccccactggccctggctcggcaaacccggaccagccacgcatgcttgccaccagttcgtttgactggacagccagactttggaacgccgacactggcgagtgcctgcgcgtcatcgatgcgcacgaagacaacgtatacacgctgcgcttcagtccgtgcgcacgttacctggctacaggaggcatcgacaagaaggtggtcatctcgcgcgttgacaatggcgccctggttcagcaatatgtgggtggcggcgctatctttgacattgcatggaaggatctgcacgacacggtcgagaccaagcaggaggaaggagagaaggaggagggtgcggccgaccagccgctgaggctggccaagcgtcaccaacttgcgatctcctaggcggaccgaaagctgacggtgctcaacctggcggatctggatgcggtcaagtcgacggccaccttcaaggcgccaccgccggccgaagccaagtcggaggcgagcactgctgccgaaaagccgcccaagaagcaggccaggggcggtgtctgagattgtcgcactctcagcctcgatgatgggccgatcgaagcacacgacacaagcttcaccgcatggcctcaacgcgctgcgaggttcgaagtcacccgtcccttgtatttatgaagtacgagctgcatctcggctcgtccccctcccctttcaccactcttcacttgcgggccaagccgcgccgatccctgtcatttggcatgtacaattatttgaatctttggaagcacccggctgtataccatatgtcttc

SEQ ID NO: 12812 - DNA, 3079 bp, Oryza sativa
  ref <308>: DATABASE ACCESSION NUMBER: AK110160
  ref <309>: DATABASE ENTRY DATE: 2001-12-06
tctcgcactcaccgcttcttggcttctctgcatgccggctagcaggtcgagctcctgtccgtctgcgaccgacagaacccgctgcgctccactcttcttcggctcatacgcttcagtgcgtgcataaccggcttctgcagcacggacccttcctgcgccgtgcccagtctgcactttgcggcagtcgcatcgttacggcttgttcgtctcctttcgcgtctcggtttcgcatcacgacttcttctctttgtccattcttccgattctgttcgccgacctgcctaccatcgcattgcatctttcgataccgcccgcactgccgttcctttcgtgccccttgcgttgcgcgaaccgctgaccgccacgtgaagctgtcaatatgggcggaaaggacgccaacaccggcctttcgaggagcgcctcgcgcgacgttggcgcgtccgccggactccactcctcagcacgaagcagcaccagcaacccgttctaccgccaatttcttccatcccagttgtccaacatctcgcccaatgacgcgataccttcgcttgacgagctttcagcgctcgccaagcatctcgagaggatcaaggccgagtcttccgcgcgtctagcgcgtctcgagacgcgctcgtcagatcctttcaagcccatcttcttctcggctcccaacgacctcttcagtcctcctggcttgcccagcggccctgccaacctctattcggattcctcacggcaggcttcttctgccggctccgcttccgcctcgatttcaaagtatcagaaagcgcgcgagcgttcctttgcttcccctgctccttccgtttcgggcgccaacgtcagtggatccgccagcgctactgctgcaggaggcgcctttgcttccaagaacaaggtcaaggtcaagcgggagagggacaacgacagcgcgccggcgtcgtcgctctacccggacgcacgatcaccaagcggcgcaggcagcaaagccaacgcgcgcagcaaagcggctcgggcgcacagcttcgacgtaggaggcgatgacgagagcatcatatcgacagatccggagtgggatctcgatgaagacatgccaagccgtcctgggcgtacatacgccaagaacaagaagcgcagacgcaaggatgccgatgccgaatcgaacgaggacgaatctggatccgaattcgaagcgggcgctctccttggtgccgcaggctcatcacgaaatgctgccacctccaagcacgttggctcgtcggcttccgcgtccgcagctcggacagcagctgctgtcccaggctccatctctcgcagaggatctgaagtcgacacttcgtctggcggtgtcgccactcccaaaatccccgccatcggcatgcgtctcaaagcgaatgctgcgtctcaaaacgcaccgggcttcccgcgcaaagcttcggatgcaacccaggtgtcgacgcgacgcaacagtgtactgccctcgccttcgccgctgccttcgacacccgctcatctgaccgcagccatggtggcgcctgtgatctaccagcctgcgccggggtgggagctgccagctcgtactcctgccacattcgtgcccaagctcgaaaagtcgcgcaagccaagagcctatcccaccaagccgcagcaggtcaacgaggactttgccaacaaggactggaaggaaaaggagagggagcgcgatcggcttctcgagcgcgagagcatcggaccaggcactccggccggaccgggtcccggccagagcatggtcaaggaggccacgaccggaagaaggggaggcagggatctgcaacagacgcccatccacaccttctacaactatgcagacgccttcttcaagaccttgaccgaggacgacctcgcctggctctcgagcaagtcggacgaccatgagccgttccagatgccggcgctcggtcggcactacaagcagacgtgggaggaagaggacgctttgatcgccagcggtgccgtagatgcgtacggaaatccactgtcggcactgtcgcgctcgccatccatcagcctcggcgtcggcggaggtcttccgctcgatgcatccttactagcagcctcgcgttcgggtggagcggacgagagcaagctggctcaacgtccggagctcgagattccgcccccaccttcgttccggaccaagcagatgaccgacgagcatcttggcttggagtcgcccgctgtggtcgacgcgcgcagtggaccgttggccgagcgtctggtagcttccctgctaccacctcgtcagggcgacgacgacggagacgcgagcagagcgatgggatctgctgatgacgccggacccgcactgccgatgaacgtcctggcgcgcctcaacggacatgccaaacacgaagacgagatgggcgatgacgaagatgccgacggcgagcccgacctggacatgcaaggggtggtggctgaccaggacatggcgacgtttgaggagcggatcgccaaggagctcaaggcgctcgaagtgctgggtgcagacgaggctctggactggtcttcgcgtcaagacgacgagatctcgacgacgctgaggatggtgcagcgcgagctggcacgccagcagaaagtcaacgagatgcgcaaggatcggctgttcggcatcgccaaggaccgcatggcgcaccaggactacctcaactgccttcactcgctggagaaggagatcgaagcgggatggacacggcgattacgccagatcaaggcgagcctgggcaagcgcaagaagggcggtcacgctgcggcgtcgcatcacgacgactcgactctgtcccagcacggcgccaacggtatccagtctgctagcggcacgccgcagcctggaggcgtgccctacaacggccctgtgcgtccgcagctgcctgagaacctggtgagcgcgatggagaagcgcaagaagctccagtttgcgttcaaggagctctttgacgaggccaagcatgcgtggcagacgccgaccgagagcgtctacgctgatctgcacctggatgaaatcgagtgaagcttggtccgatcaatggcctccatcatg

SEQ ID NO: 12813 - DNA, 3346 bp, Oryza sativa
  ref <308>: DATABASE ACCESSION NUMBER: AK110161
  ref <309>: DATABASE ENTRY DATE: 2001-12-06
accatcttctctcggtaccgcccatagactacttaagataataacactcggatcatgacagcctagatcagctagaacatggacaacccacgtccctcgacgcccgctcgtagtcagagcagcggggcatccccgctgctcgcaacccactcgatcacacaaaccgcttccgaccctgtcaatgctgtctcaccgtcccagtctagggatgtcgcttgcgaggctttgttcgggggtcacactgcagacgcggaccgactagacagtaaagggcccaacgatgacacaggcagctccccgcctaccgcttcgagcccgtctcgagaggcgtttgcacagctgcatccatcaggctccaaccgacagtccgagactgtcgcctacaccgccgccgctgccgctcgagaccgcagcctggacaaacatggccgattcgaagccgattccgaccccaatgcacgcacttccatcggctcctcgacatctccctcaacgctcctcaagaccctgccggaagcagcatccaagacgcccgagaccacaatcacagcgccggcgcgcagtttcgatgccatcaagtccaagctgcagacacctagcacaacgcaaaagagcaagagcgagatccccaacgccatcagcgaggtcgaacgcgacatgagcggcaatcgcgacgcacccggcgcctttgcagaaaccgcaaacccctcgactccatctcctcctcatgcagcaacccaaaagaagcccaccaagtccggctcgttcacctccttcctccgtggccgcaacaacgcttccaactctacctcggcgcgcaagtcactgcgtaagaagggtgcattgcaggaagcatcgaagaatggagacaacccggctccccacgcggaggaggaggaggacgaggaggtcgttcgtcagaggatcaaggatcagcagaagcgtctcgaggatttggaagaggcacagacactcggactgcttcgtacgcagcaggaggcaggcatcgagcctcctgcgtctctcgcatctcccaccaagccctcgaagctgattggattgcctcgcttcggccacatcaacggctcgccaaacgctgcggacgacgagtcggaccatgccgagggctcgtcgtcgcgcaggagcagctttcatcttcgcaggggccgcaagatggagcgcgaccagtccagtgcgaccgcaaaggtcgagaacgaccgacatacatcggactcgggaggtcttcgtcgagccaactccgaaaagctcaagtccggccgttcttccagtcgcggtcgcagtgcaccaccaagctccgcttcggcctcgcgcacggggcgcagccgcagcagacgacgcaacgatgaccacggtgatactcctcgccgagccggctctggcaagtttgcgccaccacgtcgctcgtccaccacgtgggcctcgaagctgcgcaccaagatccccatcaaagagttcccgctccagggtagcgggcgcgagtcggaattcaatcaagagtgccccatctgggcgcgacagccgtacaagtatctctacttcacctactttggcctcagtgtcggcttctactaccttccacgatgggcgctctcgtccatggtcccttcgcaccgcggacgccgcgactggagctggaaaaaggccaccatggtcaagctctaccgccacggcacgcagctcacctttcgaacacgcaccagtctcggacgcgatctgcagaaggaggttccgcacagcaagacggtccgctgcaagttcacctgggtcgagccggtggcagacgacgacgtgaggggagagctcaggcgcgccatgctcgcgcagaaagtggacccgcaacgcacgtgcggcttctggtacggagatgtgccggagcacgcaagacattgcaaacgccgccgcaacggctcggccaatcagtcgagcgaggaaacgcccaacagcggcacagcggcacaggagcaaggcgaccccatgcaggaatccacggcgagccttggaggtgcttcgcagcgcacggcgcagagtgacctgtgctgcggcgtgggtcggcccgccgagcccggcgagaaggtgctctaccacttccacggaggagcgtactggatcggtaccgcgcacgagaaagacgtcacggcggcggtcaacaccgagagcctgaggtacatggcagagatctacaagaagcgcgaggcggagcagaagaaaaagtcgaacagcagcggcgcctcgacctcgcctggatccgagtcgcaatcgggtgcatccgcttcggcgttcgacggcaagctgctgcggtcgttcagtctggactaccgactgtgcgtgcccggtcgtcctcgctcgggctcgtatcctgcagcgcttctggacgcgctcagcggctacctgtacctcgtgcgtgatctcggcttcgatcccgaaaacgtcatcattgctggcgacagtgcgggcggcaacctggcgctggcgctgtgccggtacctgcgcgacgagcgcggcgaggtggcgtcgatgcctggtgcgctgctgctcgtgtcgccatgggtcgacatctcgcgctcgcactcgggcccgacgcgcgcgcccaacctcgactcgacagtgtacaccaaccagaagtcggacatcatcagcagcatgctcgccttccgcaacacggcggtctcggcgttcctgggcgatctgcccgcgcgcgagacgtatcgcaatccgtacatgtcgcccgtttcgctgcagctgccgctcgagcgcggtgggagtgcaccgcactacggattccacggcttccccaagcgcatctacatcacgagcggatcggccgaaatctcgtacgatcagcatctgacgctggcgcaccggctggcagcgggcaccaagaagggccgaccggtgtatgcgggcgaccggctgtcggcgggatgcaatgcggtcgagatggccgaacgcagggatcgtccgaggcccaaggagatgctggatgtcgagcaggatgccatcaccaacacgccgctagacgagctgcacggcttgcaccttcagccactgaccagcaacgacgcagcgcaaaagccgcagtcaccagcagcgggggacaagaagcggttcgcagcatcgccgccgcccgagccagagggcaaggaggagcgcgtggtgatctttgacgaggtcaaggacgcggtgcacgactacctgctcttcaagtggtttgagcccgaacgctccaacacgtggcgccgcgtggcaaagtggatcgacgaggcgtgaagctagatgcgctgtgaggtctagagaatgcagtgctttaatctacaggttggccgcg

SEQ ID NO: 12814 - DNA, 3164 bp, Oryza sativa
  ref <308>: DATABASE ACCESSION NUMBER: AK110162
  ref <309>: DATABASE ENTRY DATE: 2001-12-06
caacttttggtctcaccattgccagacgcttcgagtcgccacgccgccaagccctcgttagatggagtgttgcctatgccacaacagtccctgccctctttgtcttgtcgcttgcgatagctggcctgctcggctgtctgtgccagtacatcctgctcaagtctattgaaaaggaagtgcctgcgcttacgaacgaagtcggcgcgtttgccgacaaggtcatgttccaactcaacaacgcaagcgaacagtgggctgtgggtaccaaccaggtcatctccgacaccaacgctaaaatcaacgaagatgtctttggctgggtcaacacaacgactggcgctgtcaaccacaccctcaatgtctttgtcgacggtatggtggacactctaaacgccacttttggccagaccatcctttacgagccaattctcgatgtcctcaactgccttgtgctactcaaaattgaaggaatccagaaaggtcttacttgggtaagcgaccacgctcatgttgattttccactcatggacgccaacatgttcagcgcgggcgccagtgaaaaagtatcagggtctcaaaacgagctcctggcccaaggacccgcgcagggcgctgccgatgatattgctgctgcggtacttcgtgtcaccaacgctttgtaccgggcaatccgtcaagaagcaatcatcagcacctgcgtcttgatcatctggttcattatcttgttcatcggcatcggcagggcattgatcctgatgtcgaagggtggctccgaaggcacgtatcggcagcctcactcgcaagatctctccaagccaggacacgagaagcacgaacttgacgatttctcccgccgcggtcgtgttccgacttacgagcaggccacggcctctccagattcggaggaccacagtggcaacaaatacaatggccagtcttacacgcttacacccaatccactgccaacattggaggtgcacagcgcgacctcgccagccatgccaaacgatgcgttctctacgtcaaagtcagagaaactcggcaatgttggaagccagagcgtggatgctgccatccgccgaccgacccaccttcgtgcctcaagccacggtgactacgatatctcatcacctacctcgccaccacacctaccaagtcaaactcttagttcgaacccgccaccccccagccagtccacacgcgatcccttcgctgaccccggccgttgagatctggaagtcatgcgccagatctcagtcccacattcgaccgttctcccgcctgtagcgcgcagatggggtcctgtagttgataacaggatcacgcggtccgaggccagtgactgttcgtagagactttaaaaatgctcagatcgatagggtgttcaggtcccctttctgattgctcctgctgcagcatcaagttcttgagagctgcgcggagccagacgctctatgcaagccctcgcttcgcggcgaggacttggtacttgcgccaaaactgtgtactgttgtgagcgcaatgtgttgtgcgctgcacctgttaatgttttgcttttcttacttatgtaataatacaatcccgaagcgtcgagaaaccctctcccttttcccgcatgggacgcgagaaatcactggtccaagatacccactgcgaccctggaacgactttgcttctaggaacactggatgcactttgcgaccgactatttcttggaacccatcgctgtctggaactggcttacttataaaagcttctggagagcgttgaaatttctcggaggtaaacgttgcggtactcttcgccccttcccatcccgcccctctgccctagtcttccagctcaacgcagatacctcactttcttcggcttcatcgagtcagcactggtactatctcctcttctgtccctccgcgagcaggcatcacgtgtggcttgccccggatacctgtatctcgccgacgcactagaagagaagaaagatgcagcttgctggccctttgctgccgagtctgcttgcgacgcactgcgttcgattgctgccggaggccgggtgcacggaccggacatttgttgccattcgtacaagcctttgtactgggaatgcatgagtcgtgcttcatcttaggagaaaagctcggcttgggtatggttgctttaccctattaattcgcctgcgcctgcgatttctatccgctcttcgcctccttgctggacgcttcggcgttcgcggaacagaagacccgatagaccttcgatccccccgcggctatgacctctcactgctcgctcgttcgcgagcgtgtcatgtgtccgtgtctgctcacgcccgagcacgatcgaaggagcaggcggcagcgctgagacccaccccgtgccaacgacctcgaacccgctcgtcgtcgctggcgcaaaactcagcgtccttccgtcctccgccacctctcctccatccactggacaatgctcacttcttccgaagagacgtgttgtccaggctcgcgaaggaggcatacaggggacttcacacggtgtccgagcgacggagagacggatgctgcagttgcgcggttgttattcggccagtccctgtcctctggatacggggttggttcgcctgatcgtttatccggctttccgagctactccaaacgcttctcggtccgcggcgatctcgttttccttttcgggaggcgagatttgtttgcaggaccagaagcgggtttggaccgctggatttacttgatcggactgaaagaaactggtcaattttgtgtgaccttttggaatttggttcttgttatggagttttgaatttcttccttttttggcttcaggaaagaaggcggctctcgaaaggcattgagccttttccaatgttgcttggatctttaaatttttattctccagggaggagtttagggaacagcttgtctgttcccttgttgtgggagttttcccacaggcacagaacctgaccgttaagtcgatcctttggagaggaagcacccttattttccttccttgtccgctcgttgaaaacaagaggaggccatgtgagaagagaaaaaggctgtcttcgcgggctttgctgtcgtacgttggcggtgggctcgtgaggtaggcctttgtttagatagcttgtatgaaatgtgtccccctcg

SEQ ID NO: 12815 - DNA, 3211 bp, Oryza sativa
  ref <308>: DATABASE ACCESSION NUMBER: AK110163
  ref <309>: DATABASE ENTRY DATE: 2001-12-06
atcaccatcgcctttgctaccgtcaccatcatcacagccaacaacgccagcacaagcaagcaagccgctctactctactcggcgccactacgtctcgcgcacacgctcgctttctgctttggcgctcccatgctcggcgacggcgtgctcctgctccaccttctcaatccactcgccatctagatcgctgccctagctgtctttctctatccctctccccctctcacaggaacatgcaatcgccccgctccgacttcaaagcccctttgccttcgatctcgtctacttctgctgcgactcggcccttttcaacgcgcacacatagctatcccgcacacccgcaaccaccgcccttgccgctgaaacaccaacaccaacacgctcgctaccttccaacaacctcttcgacctagacactcccgcccaccgccgcgcggatccacacatccctcatacatgtatccctccccgtcgccttccccggccccctcgcctccagcatacctctacctcaactcccaccaccacccatcaggtagtcatggaggcggtccgctctcccagcctggcggccaggcttccgctcagaatcacaacaacggctacaacggctccttcactcccgtaggccgcttccccatgcccaacgccgcgtggtcacaacgctcccaccagcatccgcaccactcgcaccagcagaacccctcgctctcctccttgccaggctccatcggtcactcgagcgctgcctccatctccgcaggcggtccctcgtcccccggctacgccaacctcgccgcgcatcaccaccaccaccatggcggtcacggcccctccggtctctcccacatggcctcccccggcggcatccactcctccggtcacctcggctcctcctcagcacgctccgatgcagccgcagccgcagcagccgcagccgcagcttccggatcgccgcactggcagcagcagattctaaaggcagagatctcacgccagtccgcctctccacaccaccacgcacgcgcagccgcactcgccgcccgctccgcaaccagctccgccatcgccatccaagaccccaacaagggcatcgtgcccccgcaggtagcagcaaacggcctctttgtcgcaaaaaaagagtcgagcgcagccaacggcggcggaggcgacggtgacaagggaagcggcgcagccgatgcaacgccaggcacacccaacgccacacccgccaccaccacctcatcaccaaccgcagccaaggacaagcagacgtggtccaccatcgacatgggcggcctcgcgctcaagaacatcgccaacgaagtctaccgctactcgttcctcacctcgctcttcatcaaccacaacgccctcaccaccatctcgtccgacattgtcaagctccgccacctcaccgtcctcgacgcatcaggcaacaagctcaacgccgtccccgccgagctcggcatgctcaccagcctgcgcgagctcttcctctttgacaacaacctcgtcacgctgccgcccgagctcggcacgctccaccagctcgagatgctcggcatcaagggcaacccgctccaggacaacctgcgcacgctcttccagcgcgacggcaccgccgccgtcatcgcctacctccgcgactcgtgccccgtcccgctgccgccgccagagcgagagtggatcatgatcgacccggacctgccggacctcgacgccgaaaagcacgcgcccgacgcgccgcaggaatccttcaacgtgctctcgtacaacatcctctgcgaccgatacgccaccgcgcagatgtacggctacacgccctcctgggcgctcacctgggactaccgcaaggagtttatcctgcaggaggtcatgtcgtacagcgccgacgtgtgctgcctgcaagaggtcgacatggagcagtacgaggactacttcctgcaccacctctcgcagcaggactacgagggcgtcttctaccccaagtcgcgcgcgcgcaccatgcgcgacgaggagaagcggcgcgtggacggatgcgccatcttctacaaggcgaccaagtaccagctcatcgagaagcagctcgtcgagttcaaccagatcgcgctgcagcggcccgacctcaaaaagtcggaggacatgtgcaaccgcgtgatgaccaaggacaacattgcggtgatcgcgctgctggagaacaagcagagcggctcgcggctggtggtgaccaacgtgcacacgcactgggatccgcagttccgcgacgtcaagctcgtccaggtgggcatgctcatggaggaggtcgaaaaggccgggagtcggtttgccaagctgccgcccaagctgagtgtggccgagggctacccgccggcgcccaagtatacgcacggtacgcagatccccaccatcgtgtgtggcgacttcaactcggtgcccgagacgggcgtgtacgactttttggcgagcagcagtgtgccgggtgatcacgaggatttcatggaccatgtctatggcaactacaccgcgcacgggctgcagcacaactatcgactcgagtcgtcgtatgcgcccattggcgagctgacgttcaccaactacacgcccggatacgagggtgggatcgactatattttctactcgaagaactcgctgagtgtgacgggcgtgttgggcgaggtggacaagcagtacctctccaaggtggtcggcttccccaatgcgcatttccccagcgaccatatctgcatcatgggcgagtacaaggtgaagcgcctcgagcatgtgcagccgtccagcacggcgcgcgaggtccatcatccttcgtccggtactgctgccaggaggtgatccgacatctttgctggccccaacctcgtttttgtaaatgcattcgaaactgtaccactctcgctttgcgatcctctctgcatctttttttttgtcacaacagcgttgttctttgtattgccctctccttttctcttctctccaccatccccttttccttcacttctttgcgctttgccttgtttcaccttttataaccttccgcctatactctccccccctttttttttaactttcttccagtttttgttgacactctccatgacgaggtgcacatgcgcatgcgcgggtgtgcactctcggcttgtttcatgtgcacgtcgccgccgctgttgttggaatatccatctctcgctctctc

SEQ ID NO: 12816 - DNA, 3013 bp, Oryza sativa
  ref <308>: DATABASE ACCESSION NUMBER: AK110164
  ref <309>: DATABASE ENTRY DATE: 2001-12-06
accacaatccgtttcttcattcacagcatcgacaccatggacgaagaactggtcgatgatcgacctaggatccgcaactcccaagcctgcctcgagtgcagaaaagccaagatcaaatgcaacggcaagcgcaaagacgcgcagaactgttccagatgtgaagccaaggggctcgattgctcttggacagcctcacgccgcggaaagaagcctggcaccaaaaatctggctacgcgtgcgcgcgaacagtctgaagccctccaacgtcagctcgagcagcagctccacaccaaggtcgatcgaagctcgcctcctgcgtatgattctcaacccagcctttatcgacaagcatgggacccggcaagccaaccgcgcgcgtcgacctcctatcctccgcaccctgccgagacggaacagcgcctgatgcatcgctacggctccgatgtaagcaaccaccagtcacctcaaagcacagccacagcctcgtcgtcgtccggctcgcatctctcgtcgtccgtgcccaccgccatgtcttcgaatggtcacaacggcagtcacacgagcaacttcagcggcaacagcagtcgacgtacttccaagtaccacgacgggctcctcattcgcgaatcacgcatgccgccttcttccaccaatccgctcctttgtctttctgaggctgcgctcggtaaacgttgcaccgaatctgacagcgaagaagacgagcttgcggccgacaacgagcccatcgaagcagacgcccagcttctgggagaccagaaggatggcaagaaacgctcggccctccacccgtttgtggacgacttgatcaacgaggaggatgacgcccaggccaagtcggctcgcgagattgcaagcatgctcgagagcagtggctggactcgttcgtgccttgcccatgctgcatgcgaacgtgcttcgtacttttccggcgcatccgcgtcagccagctgggatacgcgccgatgcgatccgttggagcagggcatcgtgacgatggacgaagcgcgtcgcctgttccagctctttatggacacggttcacgagcagttctgcatcctcgatcccgtcattcacaacgtcgccaccatcaaggaatcctccaactttctcttttcggtcattttggccatcgccacttccatcgatcgcagtccccgctcgatccggcaattcgagctcctgcgcaagctggtcgactcgctcgttgtcgaagtgctcagccgcaacgtcaagagcgtcgaggtcgtcaagggcctcatcgtgtggcccatgtgggcgcatctcacccccctgatggccgaggatcgagcgtggctgcttatcggaacggcggcacgcatggccaaggagttggatcttgccatgcgcgacgacgtgccgcaggaagacgagctcgctcgtcgtcacgcccgtgatcgctccaggacatgggcactggctgccatcatggagagaagcttctcgtccttctcgggccagcgtcccaacaccacgctcgacgtggactggggtacgctcaacgattggctcaaatcgcccatctcgctcgacggcgatattcaggtcgtggcgttcctgcatctgcgccgtatcgaggagatcatgcggacgcgcatcttcagtcagagctactacgaggtcggctcgatcgagagcatccgcgtctctgccaacgtgcttctcgaggcgtggtccgaggcctggtgcgagcatccggcgctggacaagcacccgctcacctcgaccattatgcgcatcattggactgcacgtgcgcgtgctcattaacacgcatgccattcgcgagtctgaccgcagaagggcaatctgcgaatcgtccaacatgcgcatcctgcgcatctgcggcgaatcggtcaaagcggcgcgcgaatgctgcgtgatgctcttgaaggacgcgtgtcgactggcgcttgacaatttgcaaggccaggcgcacaccgttagtaggatcgtggcagccatgctgggttggtcaggcgtgcatttgctcaagaacggaccgatcgatactcgtggcctggtggtgcagttgggcctgctgctggccggcgacccgctggactctgcccattcgcgctcctttgcgcgcttctacggtcgcttcatcctctccctcagcgccgagctggtggagcgggatcgggccgaaaagcaccgcaggaagcgccagcgactgcgaggatcgtctcacatgtcgacaggctctagcggcgtaggcatcgcgagcccgcgcggcgaagcaagcaacatggctcgccacaacacggcaggcagcgctgcggccagccacgatgcaggcaaggctgtcgttgctcccgacctaggcacctccgtgccagccgccgcgatgagtgacatggcattcgctttcgagtctgcggcccagagcgggctgcagacgcccggcatgatgggacgaccggcaatgatgggccatccaggtggtgccgccgcgaactccatgtcgccatccatctccaacgcagctggtcagtcgcatgcatacatgccggcggctggcactggcgccgccagctcgacgaaccacatggcaggcatgttgagtggcggcagcggtgctggaggtgcgtcgccattctcgtcggcgtaccgttcagcgaccgtgccgtcgtccatggcaagcaacggcgcctcgggattggatccggtgactagtacctggctgggcaccgacgacctgctggaccagtacatgcagagcatcctgccgatcttcaacgactttgatcatgccaccaacaacaccatgatgaacagcattggcggcggcggtggcgtcggggtgcccatctcggaagtagggcgttagcattccgcaagcgcatccctatgaaccccgtgcctttatgtccgacatcgatcgtgcttgttccagcttcggccgaaagccttcggtcttgctgttgttatacccggctgtgcgtggcaatacgaatcaggctcaccatcgc

SEQ ID NO: 12817 - DNA, 4144 bp, Oryza sativa
  ref <308>: DATABASE ACCESSION NUMBER: AK110165
  ref <309>: DATABASE ENTRY DATE: 2001-12-06
actcggacccgttccgcaccacaacaccatccgcacacgctcggcgcccacttgcgctctccctcctcgctatcggccccaccacactctcggcctctccgcccgtcgtcttcccaaccttaaccctctcgtcgctagtcgagcatttccacccatcgcaataccaaccgcgccatctcgagccctcagccagacagtcacgctaatcgcctcctccgccgcctcccatatccacccatctcatcctcaatgtcgggcgcctttggtcaaggttgcaaatacactgaataccaagacaccagccagcctagctttgcctagctctgcctagctctgcctaactcaccctctcgtcccattcttgcccgccttgacccgctagccaactattcgacatcgtctcaccttgcatccaccctccgcatcgcatcgcaacgcatccctgcttccgctttagcctcgcaacgctacttccgcactcggacggcgcacgtcgctccgcttggccaccgccatgccgccgccctccttttcccaccagaccgccgtggtgctcccacgagccgtccaatcctggctcaaggaactcatccaaaagatccgctcggcactcaccgccaacgacgagatcaagcgacactccatcctcagcgcaatcgaagctgccgtcgagaagcacgctcagtcgctcaagagcgcagcgcaggcagacgaggccaaccatccgcccgcagccggcccctcgcccaccgctcagatcaagtcgcaggtctcgctccgcatcaatgacgccatccaaaacatgctccagggtgagctgggcgcacagcaggacgaaaagctccccgcactcgtcgacgtcctctttgtagccatgcccctcttgggccccacctcgatcgtcatggagtggtgggatctcgtcctacaccccctcctcaaaagtgcctccatccagaacatcaccgccaatcgcgcacgcgagctcgtcgtgcgcgccatggccgcagcacccacaaccgcatacgacgacgagccggcgccagtggcagtctggccggcgcccgcttcgaggcccgccgatgcatccgaatcggccaaagcctctcccatcccttccacaagtccacgccgcgcccgcgagaccccctatcctacatccgccaccacgccagcctcctcttcgccctcgcgtcaaccacagcgcagcccctcgctcaccgcgccatccgcgtccgcgggcagatccgcctcggtcggttcgcgccaagacaccttccgccgcttcacgcagcgcatcctcgacctctaccttgcagaagccgcgcacgagagtcagcagctccgcgccgaagatgcacgcccgcgcagaggcagcgctcccgacctcgccatctcgcgcgatctcagcggcagcggtcaccttcttcgcgactccgccaccctcgtctggaaaggcaacctcgagtccatcctgctcgtctacagcaaccaaaaacccaaggagttcttccaccacattgcagagtccttctccgagcccaccgcacgcgtgcccctcctcttcctcctctccaccttccttcgcctctatccgattcatgcctaccacatcaccgccaccgcgcttccgcgcatgctcatcctctcgctccagctcgacacctccaccacctgcgtctcgctcggcgtcaccgcactcatcatgctcatcccgcacatccccaattggatcgccaacggaggcgcaggcggcctccccaccctgctcagcatctttgcccgcatcgtcgactggaggcgcctcggcaacggctgggagacccgcatcggcgacgatcccgagctcgccgagctgcgcagagagaaggacgaagagttcgcagagatggaccgcctcggaaagcgcctcaacatcaagcccgctctgcgctggaaccgcctcgagtcgtccttcgacacgaccatgtccagtccgcccaacgcagagcatctcttcaccttcctctacggcctcttcccttgcaacatcatccgcttcctgcgctcgcccgtcgactacctccgcaaggcgtcgttcgacagcccctttgaaggtccctgggaagagatgatggacgaggtcgccgtccagacgcgcgctggccccatcctgcgtcgacacacgctccatcccgccctcgtcaccctcgacgccgagaccgagctcacggacaagcagcgctggctcgaccacgactcggccgacatcaatgcagaatgtctcggcctcttcctgggcaagtggcacgacgtcaatccttctcacattgtccaagccgagcgtcagcgcaacggctcgctggacaatgacgttccggacgacgaaagcgtgttctcgtccgaagcgaggctcggtccgtttgatatgggccgccgccgcagcgcagctgctctcatgcacccctcgtcgcccagcggctcggcgcatcgccactaccagagggtgccgcactcggtcaacccggacgacattctgttgacctacgcttcgctgcgatccggcgcaccgctcatgtcggccacggtctcggcgcagacgcccagcttcgacgcttcgcccgcgccgtccccgtttggcggcgcgacacagccttttacggcggccgctcagcgcctggacgactcgatcggcccgacagcagtcccgcaggccaaggcaccatcctcgtcttcggccatgacggcgagcggcacgctcgcgaggttgcttccagctgcaagtgctgcggctgctgcgacacccgccatcatcaccgccgtcggaagctccagcgcttctcacgtgtccattcccgcctcgccggccacccatgccgcgcatgcttcgatcgcacgcgtgcgctcacgatccggctcgctctcgtcggtgctgtcgagtagctcgccaagcccggccacgccaatctcgcccactctgccaggacgccacccgctcgcggccagtcatctgccctcggacccgctcacaccgcagccggagccgagggagaagccggcgctagcggtcccctcatttgcaggctcctcgcttgaggtgggcagcagcgatgcttcaatcatctcgttcatgcagcgagaaaacctgctcttgcgaaacgagctcaactttgagctctatctcaaagagcagcatctgcgtcacattggacgactccatcgcgaaaaggttacagacaccgcgctcgaggccgaacggcaaaacctctatcacacggtgcgcaccttgcgcaccacgaacgcagctcagcatgccgagttggagcgatgccgcgcggaagcggcgtcgaccaaggctcggcacgtgcagtgggaggccgatttgaacaacaagctgcgcgcgtaccgcgaagagcgcaaagcctggacctcggaggcgcgcgagctcaaggcgcaggcggaagaggacgccgccaagatcaccacgctcacgcggcagctcgaggagtcgggcgcacagctgtttgagctccagaccaagatggaggcggacgagcccaagctggccaagctcgagcagtacgaggccaagatcgcgcagctcacgtcgtgcctggcgtactgggacaacgacgtgctcaagtacgagcagcagcgcaacgagatggagaagctgctgaacaagtgggacgagatggcgtacttggtcgagtcgaccgaggcgacgctcagcgaggtcgagcagacgtgctcgcggctcgaggccgaaaatgaacggttgaagcaggagctcaacacggccttcgacagcgtcaaggcgttgaagctcgaaaagggcaagctcgtcgcacaggcccagccgggccacgagcaggcactcgacacggtcgccgagttggaacaccagcgagaggtgctgcgcgatgaaaacgaggcgttgagcgaaaaggtgctcgagctctcggcgaggatcgagacgatgcagctccagcacgcggccaacggccactcgacagtcgatggcccacacggcgcctcggggcttgcagctgcctcgcatccggatgaggatgacgacgtccccgcactcccgcacggccttcccgcaccacaggcgtgatctgacctatttgacgtcaatttgcaatctgtattactcaccagc

SEQ ID NO: 12818 - DNA, 3188 bp, Oryza sativa
  ref <308>: DATABASE ACCESSION NUMBER: AK110166
  ref <309>: DATABASE ENTRY DATE: 2001-12-06
atcacctcatctggtcaagacaagcggagccggatccctcgttcgtcggcgacgagccgaacaggcgcccatcgagtcgcttcttcgctccttcttgctttcataaacgtcgcactcgcggtccatttgcggatcgacattagcgatggcattcaccgtggtctagcagtggcgtctcgccccagaacattccctcgccctcatacagctcgaaacgtgctcgttgcatcttcggtccatccgagagcgacgtcctagcagccgcacaccatgtcgcctcctgccagcgtcaccatcacccagctcgagcctgtcatcttcctgcgcgggcagtcgtcgtcgggcgaagatgcacgcggacgcagacgccccgtcaacttcgatgcgccaccctcccagcttcgcgcactcgtcatggtccatctgcccaagccatccaagatcaaggaaatctccatctcgctcaagggcaccgccaggaccgactggcccgagggcatcggccccaaccgcgtcgagatggtcgaggagatgaccatctttcaacacagcatcagcctcttcaacgcaaaggacgccaacgactcggtgccacgcgctcgtcccagaagcaactcggtcggtccaggcatcggtctccaggaagatgtcgattgggactacgccgcggccgccgccagtgcaagaacttccgccaggcagccttcgggcagcgtgccgcgccctatcaatactaccggccgcagagacgaagaaggttccaagaactcaggcagtcaaggccaatcgggctccaatctcgctcgtcagattgccctcggtgcggccaaggcgggctccgccattatcccgcccacgctgcgcccggacttgagtcacatgaagcttcgagactcgcccaccagtccctcccaccttcgccccccggcccgtcctccgctgcaacgcaccggctccggcactacctcctggacctccgagcagaccagccccgatctcgaggcaacttcgccgcgtctgtctcccacggccaacttttcggggtcctggacgcgaagcggaccctctacgaacggctcagcaacatcaccgcaggacctgtcccgatggcacgactactttgagtcgcagggctacgagcgtcctccgctttatgggcctcgatcggctccactccagggctacgacagctggcctaccgagctgccttcggacgcttcagcgaccgcgccccaggtcgctggccctgacagtcaagctgcctcgtcgcctggcagcgtctcgtcgagcgccgcaccgagcaccagcacaacgcctcttgaccgcagcgctgccaattcggctcaggggctcgcgcgcctcaacgccgccctgactgctgtagcacagcctcggtccaaattcggcgcagccgtgcactcggcttcgcctccgtctacagcgccgggcaggagcattctccacacccagtcgccaagcgcacctcgctccaaagagcagacggtgcgctttgatccgcaatctcgcgtcgacaatgcggcggcagcggccagcaacgcatccaacaacaaagcgagcggtacgcgcagcaatccgtcgagccgaagaagctcgatggagctggacaagaacagcctgaagggcaagtcaagcagcaaggctggtcatgataccaaaggcaagaagccgggtctcaagaacctcatcaacggcctgctgaaggagcccgcggctgattccaagacgccaagcgaagagccagctctgtcggactccaaggagttcaagaagggcacctatacgtacccgattagcatctcgctgccgtccaacttgcctcccacgcttcacgccgacttcggcttcaatcgatacatcctgcgtgcgcacgtggtgcgctcgggtgcgctgacgcccaaccttgtcgccgagcgcgaggtgacgctcatccatgcgccggacgaagacgcgctcgaagagacggacgcgatcgtagtcgagcgatgctgggaggatctgctgtcgtacatggttgtcttcagcggcaagagcttccccgtgggccaaaagatcccgttgtggctcaagtttgtgcctctgggcaaggtgaagatctatcggatcctggccacgctcgaggagcgcaccgactactttgccaaaggaagacgcgtggcgaggcacgaggtgccgcgaaagtggacgttgctcaagatcggccacacgtcaagcgccgagcccaccctgcccgtcgtgtcggacagcgcagacgctttggacaagagtccgctggccccgctcgcacgtgctgctgcaaacgaggatgaggattcggacgcgctggcgtccatcttggaccctacggggccttgggagctggcgaccgagctgcccatccctgcgggtgcgtcgacgcgtatcaatctgagcaccaaccactccaagtcgaacatcgccgtgcaccatctggtgcggctgtcgatccgcgtcggtcgatcgcagggcgaatggcaggtgtggagcgatggtgcggccaacgcgagctcttcggccaagccagcaccgcagctgtacgacattatcattgaggcacccatcacactcaaccacagccacacggcgagcgaatggacggcgctgcccaactactggagcctgcctgccgagcccgaggatgcggactcggcgcgcgcgagtcccgagagagagtcggcgcccacacgaccagcgctgcccttgccggtgctcacgagcaggacgggcctggtggggcaaagtcatagcacgactccctcgcgtgcggggcccggaggcgaaaactcgccgaccggctcgccgcccatgtctcgcaatccgacgcaactttcgcgacgctggcttgcgctcagcgcagaccagaatgcgcgagacggatcggcgtcagcaggttcgaacggtggctcggttcctccacctgcgtaccaggccaacgcaaggaccggcgaaaggacggtggcctcgacgagcatgagtcggtcgccttcgactgccgataccagcgagggtgccgtgcgcgatgcgaccggtccaccagcgtcgacccaggcggcaaacgcggtcggcatggcgcactaacatagcacgaggtcatgctcttaacgccgcaacactgtacttttcatcgtcacattcggaaggacaattgcagg

SEQ ID NO: 12819 - DNA, 2770 bp, Oryza sativa
  ref <308>: DATABASE ACCESSION NUMBER: AK110167
  ref <309>: DATABASE ENTRY DATE: 2001-12-06
ccatcttttcccccccctatccatctccctcgttcccaagcgcaccgacgctagtgttcagtcaagatggttaacttcaccgtcgacgagatccgtggcctcatggacaggcccaccaacatccgaaacatgtcggttattgcccacgtcgaccacggcaagtcgaccctcaccgactcgctcgtctccaaggctggtatcatcgccggtgccaaggccggtgacacccgtttcatggacacccgtgacgacgagaaggagcgtggtatcaccatcaagtccaccgccatctccatgtacttccccatggataaggacgccctcgacgccatcgcccagaagaaggacggcaacgagttcttgatcaacctcatcgactcgcccggtcacgtcgacttctcctccgaggtcaccgccgccctccgtgtcaccgacggtgccctcgtcgtcgtcgactgcatcgagggtgtctgcgtccagaccgagaccgtgctccgccaggccctcaccgagcgcatcaagcccgtcgtctgcctcaacaaggccgaccgtgcgctcctcgagctccaggtcggcaaggaggacctctaccagtccttcatgcgtaccatcgagtccgtcaacgtcgtcatcgccacctacaacgaccccgtcctcggcgagagccaggtctaccccgagaagggcaccgtcgccttcgcctcgggtctccacggctgggccttcaccctccgccagttcgccaaccgctacgccaagaagttcggtgtcgacaaggacaagatgatggtcaagctctggggcgacaacttcttcaaccccaagaccaagaagtggaccaccaaggacaccgacgccgacggcaagcccctcgagcgtgccttcaacatgttcgtcctcgaccccatcttccgcgtctttgacgccatcatgaacttcaagaaggatgagatccccaagatcctcgagaagctcgacgtcaagctcacccaggacgagcaggacctcgagggcaagcagctcctcaaggtcgccatgcgcaagttcctccccgccggtgacgccctcctcgagatgattgtcatccacctcccctcgcccgtcaccgcccagcgctaccgtgtcgagaccctctacgagggccccctcgacgacgagtccgccatcggcatccgcgactgcgaccccaagggccccctcatgctctacgtctccaagatggtccccacctcggacaagggtcgcttctacgccttcggccgtatcttctccggcaccgtcaagtccggtcccaagatccgcatccagggccccaactacacccccggcaagaaggacggcctcttcgtcaagtcgatccagcgtaccgtcctcatgatgggccgttacgtcgagcccatcggggactgccccgccggtaacatccttggtctcgtcggtgtcgaccagttcctgctcaagtccggtaccctcaccagctccgagaccgcccacaacctcaaggtcatgaagttctccgtctcgcccgtcgtgcaggtcgccgtcgaggtcaagaacgccaacgaccttcccaagctcgtcgagggtctcaagcgtctctccaagtccgacccctgtgtgcaggcctggatcgccgagaccggtgagcacattgtcgccggtgccggtgagctccacctcgagatcgtcctcaaggaccccgaagaggaccatgcccagattcccctcaagatctcggaccccgtcgtcggttaccgtgagaccgtccaggccgagtcctccatggtcgccctctccaagtcgcagaacaagcacaaccgtctctacgtcaaggcccagcccatcgacgaggagctctcgcgcctcatcgaggacggcaagatgaccccccgtgacgacttcaaggcccgtgcccgtgtcctcgccgacgactacggttgggacgtcaccgacgcccgtaagatctggtgcttcggccccgagaccaccggccccaacctcctcgtcgacaccaccaagggtgtccagtacctcaacgagatcaaggactcgtgcgtcgccgccttccagtgggccaccaaggagggcgtcaccgccgaggagcccatgcgcggcacccgcttcaacatcctcgacgtcaccctccacaccgacgccatccaccgcggtggtggacagctcatccccacctgccgtcgcgtctgctacgccgccgccctcctcgcccagcccggtatccaggagcccgtctacctcgtcgagatccagtgccccgactccggcctcggcggtatctactcgtgcctcaacaggcgccgtggtcacgtcttctccgaggagccccgtatcggaacccccatggtcaccgtcaaggcctacctccccgtcaacgagtcgttcggtttcaacgccgatctccgtcaggccacctccggtcaggctttcccccagtccgtctttgaccactggcagctcctccccggaacgcccctcgacgccggcaagacccaggatatcgtgctcgctatccgcaagcgcaagggtcttaaggattccattcctaccttggagcagtactacgacaaattgtaagcggttttacgtcgttttcgcagtcgtatgacgaagaccccgtcgagatatggtggtgttggacgaccccactgatcgtgtccggcaaaatcggcatttggatcggtccggtgccgaaaaattccccctcgcgcgctggcttttattttctgcaattttagcctgcgattttcccctg

SEQ ID NO: 12820 - DNA, 2997 bp, Oryza sativa
  ref <308>: DATABASE ACCESSION NUMBER: AK110168
  ref <309>: DATABASE ENTRY DATE: 2001-12-06
accgccagaccaatccacaacgcctttgacaggcaggcaataccacacggtcacttaagtgctcaacaccgagtacttgcaagcggggcattcatcagcctctaggacctcgtccagaaaaaccttttccacacaacaccacccacaaataccgccaagatggtcaacttcaccgtcgaggagatccgtgagctcatggatattcccaagaatatccgtaacatgttcgttattgctcacgtcgatcacggaaagtccacccttaccgactccctcgtccagcgtgccggtatcatttccgccaagaacgccggttctgctcgtttcaccgacactcgtcccgacgagcaggagcgtggtgtgaccatcaagtccactgccatctccctttacgcacagctcgaggacgaggaggacctcaaggacatccccatccccaccgagaagaaccagttcttgattaacttgatcgactcccccggtcacgttgatttctcttctgaggttactgccgctctccgtgtcactgacggtgccctcgtcgtcgtcgacaccatcgagggtgtctgcgttcagaccgagactgtgctccgtcaggctcttggtgagcgcatcaagcccgtccttgtcatcaacaaggtcgaccgtgcccttctcgagctccagctcggcaaggaggacctttaccagaacttctcgcgtgccgttgagtccgtcaacgtcgtcatcgccacctacttcgacaaggttctcggtgatgtccaggtctaccccgagaagggtaccgtcgccttcggttccggtcttcacggctgggccttcaccatccgtcagttcgccgtcaagtacgccaagaagttcggtgtcgaccgcaacaagatgatggagcgtctctagggtgactctttcttcaacgccaagaccaagaagtggaccaagaccgccgacgagggtgtcgagcgtgccttcaaccagttctgcttggaccccatcttcaagatcttcgacactgtcatgaagggcaagaaggaggccgctcacgctctcgttgagaagctcggcatcaagctcgttggtgaggagaaggacctcgagggcaagcccctcctcaaggtcgtcatgcgcaagttcttgcctgccgccgacgcccttcttgagatgatggttatccaccttccctctccccagaccgcccagaagtaccgtgttgagaccctctacgagggtccccaggacgacccttctgccatcggtatccgtgactgtgaccccaagggtcccctcatggtctacgtctccaagatggtccccacctccgacaagggccgtttctacgccttcggtcgtgtcttctccggtaccgccaagtccggtattaaggtccgcattcagggccctaactacgtccctggtggcaagagcgacatgttcctcaagagcatccagcgtaccattctcatgatgggtcgttacactgaccccatcgaggatgtgcccgccggtaacattcttggtcttgtcggtattgaccagttcttgctcaagtctggtaccctcaccaccgacgagactgcccacaacatgaaggtcatgaagttctccgtctcccccgtcgtgcagcgctccgtcgaggtcaagaacgccaacgatcttcccaagctcgtcgaaggtctcaagcgtctctccaagtccgacccttgcgttcttacctacattactgagtccggtgagcacgtcgttgccggtgccggtgagctccacctcgagatttgcttgaaggatctcgaggaggaccacgctggtgtccctctccgcatctccgaccccgtcgtccagtaccgcgagtccgttgccgagaagtccagcatgactgctctgtccaagtcccccaacaagcacaaccgtatctacatgatcgccgagcccctctctgaggaggtctccaaggacatcgagtccggcaagatcgctccccgtgacgatcttaaggctcgtgcccgtatccttgctgacgagcacggctgggacgtcactgacgcccgtaagatctggtgcttcggtcccgacaccaacggtgccaacttgctcgtcgaccagaccaaggccgtccagtacctcagcgagatcaaggactccgttgtctccggtttccagtgggccaccaaggagggtcccgttgccgaggagcccatgcgctccgtccgcttcaacatcatggatgttacccttcacgccgatgccatccaccgtggtggtggacaggtcatccccaccgcgcgtcgtgtcctctacgccgccaccctcctcgccaaccccggtctcctcgagcccgtcttcttggtcgagatccaggtccccgagtccgccatgggtggtatctacggtgtcctcacccgccgtcgtggtcacgtcttcgaggagacccagcgtctgggcactcctctcttctctgtcaaggcttacctgcccgtcaacgagtcgttcggtttcaacgccgatctccgtgccgccacctctggccaggctttccccaccatgctgttcgaccactggcagatcatgagcggtggttccgccctcgaccccacctcgatgaccggcaagatcgtcgagaccacccgtgtccgcaagggtctcaagcccgccgtgaccgactacaccaactactacgacaagctttaagcgagctgtcgacagtagcgagtataatgtatggggcgggtcaaaagtttcgagcgcaaggatgccacgctgctcttgctcttaatcgggccaggagcagtctttctctatagttggcacatagaccgccacgtgatgccatgattgatacgatcataagggaagctagaaaacaagacatgaaatgagagtggacggttctttcctttttacttacccttttcctgattcaccttcgagatattgttgctttcgtgctttacaatcgttttgcaggtggtgttgatagtatttgaataaagtacttgcatcatc

SEQ ID NO: 12821 - DNA, 3628 bp, Oryza sativa
  ref <308>: DATABASE ACCESSION NUMBER: AK110169
  ref <309>: DATABASE ENTRY DATE: 2001-12-06
actttactgccaccactctctgcactgcattctagtcgggattgcagagctcctttcccttttctcccttttctcccttttctccctacattttcctccctccttcgttcccgacaacaaaacaacgttagacagcatggctcgaggaggaaaccgcggaggcggtcgtggtggcggaggtcgaggtcgtggtcgcggcggaggaggtcgtggtcgtggaggtggccgaggtggcggaggacgtggaggaggccacaacggtgcacccaggcagtcgtacagtcacggcgaccagaaaaacgcccgtctcgaggcctactacatcgaccagggcatcctcgacccttccgaatgggccaccttcatggactacctccgcacgcccctccccaccaccttccgcctcaccgcaggcaaggagactaccccgcagctcctcaaggcgctccaggacatctacatccccttcctctccaacgtcaccttcgacggcgaaaaggtagacccacccaagcagctgccctggtaccccgacggcctcggatggcacctcaacacaaagaagaccgtcatccgcaagtcgcccgagttcaagcgcttccaccagttcctcgtacacgagaccgacgtcggctccatcagccgccaggaggccgtctccatgctcccgcccctcttcctcgacgtacagcctcaccacctcgtcctcgacatgtgcgccgctcccggatccaagaccgcacagctcatcgagtcgctccactcgcccttcacctcgggccccagcacctacaaccccatgcccaccggtctcgtcatcgccaacgactccgacacaaagcgcgctcatatgctcgtccaccagtcccagcgcctcccctcgcccaaccttctggtcaccaacctcgatgcgtccaactaccagtccatccaggtcccctacaagagcgccgacgagggtgccgaggtcgtccagaccgcgatgcagtacgaccgcatcctggccgacgtcccctgctctggtgacggcaccatccgcaagaacgtccccatctggaaggagtggacgcccaacaacgctgtcggtctccatgcgctccagctcaagatcctcatccgcggcctcaaccagctccgcgacggcggtcgtctcgtctactcgacgtgctccatgaaccccatcgagaacgagtcggtcgtcgcagaggccctccgtcgcttcgagggcaaggtgcgcatcgtcgaccgcagctcgcgtctgcccgagctcgtgcgccgccctggtctcaccacctggagggccgctcccggtcgtggcgcacacctctttggcaagtccaagtacgcaaagcagaaggcggccaagtccgctgccgccgatgccgccgctgcggacggcgagggcgacattgtcgatgccgacatgaaggatgccgagggcgaagtggacgaggccattgtcgacgtcgaggacgccgagaacgaagctgccaacggtggcgctcccgctgcaccggagcccgagatcggctcggcagagtaccgcgaccgtctgcccgagatcgcctggattgacaactgggaccagctcaacgagctcgatgccgacctcgcctcgcgcacgcccaagtccatctggcctcagggcgacgaggagcagctcggcacccagcactgcatgcgcctctacccgcacctccaggacaccggcggcttcttcgtcgccctcctcgagaaggtcggcaatccggacgacgagggtatggctgccggcatgatccgtgccatggaccacctcgacgcccaccgacctgacggcgagtcgctcaccaacgccatcaagcgcgagctctcgcccgaggccgacgcagagggtgcccagccagccgccaagaagctcaaggacgacgatggctctggtgtctcgacgcctgtcgatgtttccacagccgatgccaccgaggcagtttcgggcgacagcgtcaaggaggacaagcatgctgcggaccgcgcgcgcaaggcggcacagcagaaggcggtcgccgatggccacggtgttccgggcggtctgccttacaaggaggatccgtttgcatacatccctccctccaacgatcaggtgcaggcgtgcaagaagttctttgacctcaaggacacgttcccgctgcgcaacctgctggtgcgcaacgaggaccaccagcctctgcgatccgtctacctcacctcgaccaccgcgcgtgccgtcatcaccggcggcggtcccggccgcggcaaccacccacacatgaaccccatcacgctccgactcatcaactgcggcatcaagagtctcggtcgccaggacgccggccgcgacggcacgctcgagtgcaagtggaggatcatctcggacggtctcctgtccatccgcccgcacatcgaggagcgcgccgtgctcaaggcgcagctcaaggacctcgccttcctgatcgccggccactaccccatcctcgacaacgtgcctggcgagttcggcgagctgctcaagagcaagaagatgggcagctacgtgatcgatgtgctgccctccgagcacgagggcaggaagctcgactacaagctcagcttccccatctggagggccgtcaacagcgtcaacctcatgctcgacaagcaggagaagagcgcgctttcgttccgcatctttgacacggatctttcgagtgcagacggtggacgacagttctcgtcgcagccatccaagaaagcgaccaaggcagccaaggacgccgaggtgcagcaatcggatgccgaggatgccgcgcgtgcggctctggccagcgccaacgcttccaccgcccccgcagtcaaggtcgagctggccgcataccagtccgagtacatccagcttgcgctcgacagcgccatcctcaagttcgacggaccgtacacgctcaagtcgggccgactgagtccgtacttcttcaatgccggcctgttcaacacgggtgccaaggttgccaaggtggccgagtgttatgccaagcgtattgtcgagtcgggcgtcaagttcgatgtgctgtttggtcctgcctacaagggaatccctcttgctgctgctacggccatggcgctgcagctgaaccacggtattgatgtgggattctgcttcaacaggaaggaagccaagacgcatggggagggtggatcgctcgtcggcgccgaactcaagggccgtgtgctcatcctcgacgacgtcatcaccgcaggcactgccatcaacgaggccatggacatcctggcttcccaaccagcggctgaattggccggtgtggtcattgcgctggaccgccaggaaaaatcgcagaaggacggtgttcccggtaccacttcggccatcaccgaggtcgagaagaggtacaacaccaccgtcttctccgtcgtcaccctcgaccagatcatcgaattcatgaaccgcgacaaggagcagtacggggaaaagatcgctcagatggtcgcttaccgagcacagtacggaacctcgcatctcgcaaagtcgtcataatcccctcccaaaactttcttaaaggccccaaacgcctgcttgtacaaaacactctcgcctcgcaacctcgccctttttagagtc

SEQ ID NO: 12822 - DNA, 2864 bp, Oryza sativa
  ref <308>: DATABASE ACCESSION NUMBER: AK110170
  ref <309>: DATABASE ENTRY DATE: 2001-12-06
gatcgcctcaggtatccgcctgcccaccaagaatgtgctgctttcgatcggctcgttcagcgagaagcaggagctgctgcctgcggtgcgaacgctgcaccagctcggcttcaccctgtacggatcctcgggctcggccgacttctactcggagcagggcatccccgtcatccacctcgaggctctgcccgaggacgacgagtctaagttcgaggacacgaccaaggcatcctactcgctgctcacgcacttgacatcgggtctgtcgtcgctcttcatctcgctgccgagcaagaacaagtaccgacgaccggtgtcgttcacctcgatgggttaccgtgcgcgacgactggcgattgaccgttccatcccgctggtcaccaacgtcaaaaacgccaagctcttcgtcgaggcgctcgcccgtcaccgcaaggccggctcgaacttcgacatctcccctgtcgacttcaagactagccacaccgccttcacgctgcccggtctcatcaacgtcaacacgtttgtgcccagcatcgccgacggcaaggtgagcacggacgagctggctgccatcacgcgcgcctcgatcgccggcggcttcaccacgctccaggtgatgcccgttggtgtgtcgtcgagcattgtggatgccgcttctctggccacggccgagagcaagatcgtcgagggtgcgcactgcgatgtgtcgctcggtgtttccgcgacgtcggacaacgccgagactatcgacgagctggctgacggcgcgcgctcgctgctcatctcgttcaacggccttggctcgaacgtgcacaaggcggcgaccatcgcctcgcactttgcctcgtggcccgcggaccgcccgatcgtgacggacgcccgcaacaccgatctcgcttcggtgctgctgctcgccagcctcaacaaccgctcgatccacgtgaccaacgtgctgtcgcgcgacgacatccagctgatcgctctcagcaaggccaagggtctgcaggtgacgtgcgacgttgccgtgtacgctctcttcttcaccaccgagatgtacccgcaggccgcttgcctgccctcggcggacgaccagaaggcgctgtgggagaatctgggggacattgacatgttctcgatcggcagcacaccgtaccagctggccaaggagatcggcgaggtggctgcgcccgaggcgggtatcgaggagacgctgctgccgctgctcgacgcggtcaacgagcgccgtctgacgctggacgacattgtgagcaggctgtacaccaagcccaagcaggtgttcggcgttcagtcgcaggccgacacgcaggtcgaggtggagatcgaccgcccgaccgcattcgtgcgccgcgactattggtcgccgctcgagtcgcgcgccacggtgggctcgatcaaccgcgtgacgctcaaggccaagacggttttcgcggatggcgaggtgctttcggacgcctcgctcggcagcaacgtgagcaacgtcgcgatggttgccaagcaggccaagtcggctggccgccgcgtgtcgttctcggctgccactgcgggcgcctcgacgactccgggtgtctcggctcaggaagcgcctacgtcgcctacgccgctctcgctggcgctgcgatcgcccgtgctgggcgcaagcaccgattctcagccgcgcagcggcagcctgatggctgcctttgccaacgagtctacggcgctgacgtcggtgccggctccttcgatcgggtcggtgctgtaccacccgacgttcgctcgccgccacatcctgtcggtcaagagcttcactcgtgaagacctgcacgcgctcttctcggtggctaccgagatgcgcatgctggtggagcgacagggctcggtggatctgctgcgcggacgtgtgctggctgcgctgttctacgaggagtcgacgcgcacgtcgtgctcgttcgaggcggccatgctgcgccttggtggacaggtggtcaaggtgcagccggacaagtcgtcggtgcagaagggcgagtcgatccccgacacgatccgcacgctgggctgctacgcggacgcggtggtcatgcgccacccggaggcgggcagcgtgcacctggcggccaagcactcgcccgtgcctgtgatctcgggcggcgagtcttcgatcgagcacccgacgcaggcgctgctcgacacgtttgcgatccgcgaggagatgggtaccgtggctggactgacgatcaccatggtgggcgacctcaagtacggacgcacggtgcacagccttgtgcagctgctgtgcctgtacggcgtgacggtcaactacgtcagtcccgagtcgctcaagatgcccgaggatgtcaagcagacggtggcgcgcaagggcatcaagcagtacgagtcgacggtgctgagcgacgacattctggcgcgcaccgacgtgctgtacgtgacgcgcgtgcagaaggagcgcttcccggacctctcggcgtacgaggcggtcaaggacagctacgtggtggacaacgccacgctggccaagtgcaagcccagcacgattgtgctgcacccgctgcccaagaacaaggagctcgccgacgacctcgagtacgacccgcgcgcggcgtggtggcgccaggtcaagtacggcatgtacatccgcatggcgctgcttgccatggtgctccaccagcgcgcctaaactccgtatcattatgcctctttcctcttccttgactgtacagggatctttccctgacgaacgtcctcatcgaggccgctctcgtatttttccctgtttcttcccctcacttatgctctcctgtttgataaagctagaaacgaccaatcgagttatgttttcccccgtt

SEQ ID NO: 12823 - DNA, 4263 bp, Oryza sativa
  ref <308>: DATABASE ACCESSION NUMBER: AK110171
  ref <309>: DATABASE ENTRY DATE: 2001-12-06
atatcatccttgcgtcgccgacatcgagcaagcacaggaatacagcgcggtctttccaacccacaacatcgaccgcggctgccgtgccgtgcacaccaccacgatgggaggcgatcagcacggcgactttgagcccatcagcatcgtcgacaatgttaccgcaaatgctgctgcagaagacagcgctcccgtcgacatcaccatcaacgaggaggaccacaagaaggtctttggccaagactctagcgtgcccttcggcaccaaattggagcctctcccacccacaataacgggctgggacgtccccgtctcgccgcctccagagtacgcatacaacgaggctggccccgactcggcagcagcattaccagacaggtcgaaatcgacgcccgtcggcaccttccaccttctcctgcccaccgccttgcacgagtccggcttgctcttcgacccgcagctcagcctcagcaagatcacagcccaccgcgaaagcgagccctcgcagccctcgccgcccacacagcccgccgaagcagttgcagcgtctagcaccgacagcgtccccgccccttccctcaccgagatccaggcatgcctgccacatcccagcgccctcttcgtggcagagacgctcgagtggcgcgtcatcctcgaccagtccgacgtttatcgaaccccactccccgactttgccgtctatgacgcttcccacctgttcgacgtctgcaacttgccaccaaactccgtatccgtcttcgagacggcgcccacgtcaataccgccccaagagcagctccaccccattcgtctgctcgacaaatgggacgcccagcatcccgaggcgacattgcctgtcatcgaagagttcaacatgcacaagtgctggatcaccggcaggcggctcctctccaccccgccagacaccatcgtctccgtcatcgaccaccacgtgctctcccgcttcaaagagtcgcgcgtaaacgatcctgccgtcgggctcaccggtcccgagacctttgtccgtgccctgcgcgtcctcttgcgcatcatcggcaactttgtccatggagagcgacgacccgcacccacctccagcatcatggtcacccagaagctcggctgggaccagcactctcgtcagatcttcctcgacctcggctggaaagaggatcgcctgctcgatggccgcaacgccatccgaccgccgttggttgctccagagtcggctccagtggacgctccttcgacaacatccagcgatgacgttgtactacaccgacacattcgcgcctggttcgagctccatgtgtggctcaccttccacctccaggctttgcaaaagacgaaacccgcttcctcgctcttgcagaacacggagcccaccctggcgacccaactcaaggtcgagtctgcatccgagtcggtcatcgagatgatccgcgagcagcgcgatcacctcgatatgagcctcaatcgcgacctctccaacgacacgcttgccgccctctttgcggtcggcgtctccagcaccacgcgagacgagctcgtcaaatttggctacctcgtcaatcttgaggccaatcccaagcacgcagctgatctctttgccagcctcgacgaggtctacgaagcgcagcgacgcacctcccgcgtcattcaggaactcgtcgcgtacgaacgcagccagggcaaatattcgcctcgcgacctcgacaaggcctatgagcgtctcaatctcacctcgaaccatctcggaccggacgtagaacgagacagcattccgcacgactttatcgcaggccagtacaaggcgcgcgcccgcgaggtgctcgtcaatgctgatgtcgccgagcacgccgccgtcaaggacgcgctcaagatcatcatcgcccatctgggcatgccgcccacccttgtccaggcgctcgaagaggatgtcggcatggacgtggatcaggcttacaccacgctcgatgccaatcgtgatctcgatgacgccaccctcctcgccatctacgatctctacattgccgacgcaccggcgcggcgcgacttgctccgccatgcgctccgtgccatcgccgaggatcgcaacagcaactacctgcgccactttctcaagactggcgagaaggatgccgcggccaacgagggccggcagcagatgccgtccgcagacgtgcccgcgggcatcgacaacatcggcaatacctgctacctcaactcggtcctgcagtactttttctcgatcaccgagatccgatcgcgcgtgctccaggtcgcgccagtcgttcaagcagagcaggacagcctttctgcagtggtgtcggaacggagagtgggcggccagcgcatcacaccgcgcgagctcgagcgcagcaggcgcttcgttgctcagctggcccagctcttccatcatctcatctacgccaatgcgctgtcggtgcggcccgagcgtgagctcgcgtatcttgccctcgtgtcttcgcgcgccgaggagctcgaggttgagagcaatccgttcacggaggcacagaccgaggaaccgccttccgtcacggcggagacgaccgaagcggcgcccgccgacgttgctgagccagaagcgatatccgcgccgacggtcgatgctggcgaatcgatggacatcactggtgacgggccagagacttcagctgcagcggcacctgatccgctggagccagcagcgtcgcgcgcgcctccgctgccgcctcgtccagcacgcaagcccaccgcgccagccgttccgccaccggctcgccgcaactcgctgatgcagctgggcgcgcagcaggatgtgtccgagtgcctggacaactgcatgttccagctcgaagttgcgctagccgtcggtcaagatggcgcttccaatgcgagcaacggcatggacgtggacgatgggccacgggtttccggctcgactggtgctgcgtcgtcgggcgacagcacgggtgaggaccttctcacgaggctgtttctgggcaagacgtgccagcggatcgaggcggacggtgttgcagctgatggctctgcagaccgaggcggacgaccgcagcaggtgaagcagccaagcatgcacatcaagcacgaagtgttcaagatcgtgcccatcgacgtgctcgaggaagggcgcgacatctatgacggctttgacggcttctttgactcggacacgtttgtggcgacgtcgggggcggtgcagaggaggtcggtgacgttgttgtcggcgccgccgttgctgcagatccagctgcagcgcgtgcagtacgaccgcgccacgatgcgcgcgttcaagtcgcaggcgcacctcgacatgcccgaggtgctctacatggaccggtatatggatctggacgccaaagatcccgagaacgcgccgcggctggcgatgcgcgaaaagtaccaggccaagcgaaggaggatcgaggagctgcgtgcgcatctggcagcgtgcagggacggagcgtcgacgctgacgcagacgcccagccaggctgccaatacggtggaggagctggcgaggctgccgtcgctcgccgatgtcgaagcgcagctggcagacattcaggctgaagcggctcggcgtggagatgcggatgtgccgccggcggtttcgcctcgatcgcgcgccaggcaaattgccgacgccggcgtggacacgatatccatcacccccgacactcccgatgtcaagacggaggtgcagactggggtgtctggactggtagatgcgggactggcgacgttgttgcgcgacgaggcgcaggtgctgcgcgagcagatggagcaagccaaatccgagatcgcggcgctcaagagcgagatggccgcaatctgggcaggcgaggagcgatacacgtaccggttggtggcggtcttcatgcatcggggcgaagcgagtcacgggcactactttttgaatctgcgtgggggcaaggaggacaagtggttcaagtacaacgactcggcagtcacgtcgacttcgctcggcagcgtgctgcgcgacagttcgggcgccacgccgtacctggtcacgtatgtccgcgaggattatgtgcagctcgtagatcctatttgcagagtcatcgaacagaatccggagcaagtggagggggcaaacgggtgggatggcgaggtcaggatgccagaggtcgtgacggacgcggcgagggatgcgggcgtcgagagtccggtcaaacgtgcgcgcacggatgacgtgtgagcaatgcaagtgtcccccag

SEQ ID NO: 12824 - DNA, 2731 bp, Oryza sativa
  ref <308>: DATABASE ACCESSION NUMBER: AK110172
  ref <309>: DATABASE ENTRY DATE: 2001-12-06
accatatcccacacacctcctcgtcgcttgacataaccaccgcccgcaccgttccatcatcactcactcgcggacaacaatcacaaacgaccgccactcgatcggcgcatcgacaggcatgctacgcctgcagcacgcacagccctcgtcttgattccacactcgccgctatctccggcagctttaagtgccgcgcgcaccatgtcgagcaggcagccatcggagagccgcgaaggtcgccgcgcctcgggcgccggtggtgcttcgtcgtcgcgctcgtcgagccgcgtggcatcgcgatccggatcggtgcatcgctccaaggagaagaagccggtgtgcatcggccagtacatcatccagcagacgctgggcgccggctcattcggcaaggtgaagctcgccacgcatgcgctcacaggccaccgtgtggcgatgaagatcatcaaccgccgcaagatctcgagcctcgacatgggcggacgggtgaagcgcgagatccagtacctcaagctgctgcgccatccgcacatcatcaagctgtacgaggtgatcaccacgcccaacgacatcatcatggtcatcgaatacgccggcggcgagctcttccagtacatcgtcgaccgcggccgcatgcccgagcccgaggcaaggcgcttctttcagcaggtcatctgcgccatggagtactgccaccgccacaagatcgtccaccgcgacctcaagcccgagaatctgctgctcgacgaatacctcaacgtcaagatcggcgactttggcctctccaacatcatgaccgacggcgacttcttgaagacgagctgcggcagccccaactacgccgctcccgaggtcatctccgggcgtctctacgccgggcccgagatcgacatctggtcgtgcggcgtgatcctgtacgtcatgctgtgcggccgactgccgttcgacgacgagtacatcccgacgctcttcaaaaagatcaacaacggcatctacacgctgccgtcgtacctgtcgcaggaggcgcgccatctgctcagccagatgctcatcgtcgaccccgtcaagcgcatcaccatccacgagatccgccagcatccgtggttcaacgtggatctgcccgcctatctgcgcccgctgccgcccacaccggcggcggagaaccgcggcttcaactttggccttaccgagtcgccgcgcgagacgggctcgcccacggacgccgcgtcgtcggtcgcatcgtcgtcggccgccaccagcggcgcgtcgtcgtcgcagacctcggcgtcggcgagtcggatggggagccagccggcggtgctcgacgacctgggccccatcgacgccgagattgtggacgagctcgtgggcaagatggtgggcttcaaccgcgacgagctgctgcatcatctggcggacaagagcgacaaccaggtcaaggtggcgtaccagctggtgcgcgaccaccggcgcatgctgcagatccaccacatggaggacgcgcacggcatggagaatttcctggcgcagagcccgcccgcgtggaacgaggggctggaaggcttcatgggccgctccaccagcatcaagcgcaagaatcgcgacaaggaggtggcgggaggtgcggcggtgaggtcgacgacgcgcgagcccgtgccaccgctgccggcgtcggctcacgcaacggggacggcggcggacgacgagggtgactcgtttgcggtggatgcggccgaggtggatccgtcggacgacggcaacgagacgctggcgagcgacgacgacgatctgcttacggacgatgacggccagctgacggacgccgaggatgcggcgggcgagcgcatggagcgcatcgcggtgctcgagacgtcgctgcccggctacctgcgagcgcgcgaggcggaacggctggcaacaccctcggcggacaagacggcttggccgcagtgcacgccgttgtcgcccacgtcggggagtggcacacctgccctgccggcggcggcggcggcggcggcggcgtcggcggcggcgcagatccacaagaagccgcgatcgcgctggcactttggcatccgctcgcgcagtccgcccatggagatcatgctcgagctctaccgcacgctgcagtcgctcggcatggagtggcgccagaagcctgtggcgcgcgcggccaaggcggcgcacgagggcgagggcgagggcgagggcgatgcagccgacaaagacaaacacgcggcgagcgaaagcgaggcgtcagcaggcaagggcgtggagttgtttttcctcgagacgcgctggaaggtggggcatgtggtggtgcgcatggatctgcagttgtaccacgtggatgcggtcaactacctcgtcgactttcgcaacgtcggctacacgatgctcgagcccgaggtgggagcaagggcaggcacggcggatgcgggtgaggaggtagatgcggatggcgaggtggccaagctcgaggcggcgttcgaaagggcgatgggcgagacgcagcaggcgatgcgcgatggcgagccgccggcgcagcaccgctttgacgggacgcgcatcaagccttcgctcgcgcccgcggtgccagccggccgcaaggaggtcaactcgccgttcctgttcctcaagtgtgccacgcggctgattgtcgagctggcgggcggcgcctgatcatcacactgcaccaatccatatgaatacccagagcgagtgggatgag

SEQ ID NO: 12825 - DNA, 3602 bp, Oryza sativa
  ref <308>: DATABASE ACCESSION NUMBER: AK110173
  ref <309>: DATABASE ENTRY DATE: 2001-12-06
atcttatcgacttggttcacgcttggggtcattgggcaggatgtcgttgacggcggagcgcaacgagcagtttagcgaaaaggagtactgggatcaacgctatgccgacgagagcgagcaggactttgactggttcaagaaggtgagccgccgatcgcgcgtctttgctcgcgacctttttttactgacgcttgtgctcaacagtatgatgatctaaaggagttgtttgacgaggtgataccggagcgttcggcgcgcatcctgatgctgggatgtggcaacagcacgctttcgccctcgatgcacacggctggatacacgcagattgtcaacatcgactactcgtccaccctcatcacgcgcatgtcccagcgataccccgaccaaacctggctcgaaatggacatcacccaactcgaccacacctccaacctctccaccctcggcggcgaagcgagctttgacatcgccctagacaaaggtacaatggacgccctaatggccgaaggcaaaggatcctccgtctggaatccaagcccaaaagtcctcaccgacatcaacctcatgctcaacggtgtagacaagatcctcaaaaagggtggcaagatggtctacatcaccttcggtcaacctcactttcgtcaaaagtacctcgaagccatcccaggctggacagtcgaaactaggacactgggagatatgtttcactactttgtctacatcgccaccaaaaactaatcctacctcgcactaccatcgcgaccactgctggagctcgaaaggtccccagcaccagtgccgagcgtggggggtcggtgcagtcgcgcacggcgcggactcgtccagttgcgctgcgcacgactctgccgcagctcatccaccttcttggctgcagcccggtgcgtggcgggcgaaagcagagacagtggcgtgtgagagactccggaagatcctccggagagctgacgcgtgctaccccaccccgtaccccctcctccgtgcgaaggagcaatcacggaggcaggtgcaagcagactctgcgacccaacaccgagtgcggtgcgcttgggaccgcgcacagaggcgtctggtcggatcgacgtagcgttcgtcagcatcgacgcattgatcgtggtggtcagcccgcgatgtacgggcgggacggtgctgaggaacgactcgacgtacgagtcgcctgaactcgcagatgccgtggtgtccgcctcatcgctcgcgtccggctcgacgcgacggcggacgcgggcgggagagagttcggcctcggtggctttgcgcttacccttgtccgggcgaggagcatcgggacgtgggctggaaaggagaccgccaaacccgccgctgaggcgcgagatgaggcgcgaggcacgcgtcatcaccccctcgcccgcctccgcctcggtcgcgtctgcattgtccacctcgtggtcgggaagcgcaggatagaccggctcggaccgttgcatcgcatcgcgcgccgcacggcgtgtcgccttcttgagcagtcccaccgccggcgtgctatgtgcacccatccggtacggcgtaccaaacgacacgcgccccttggccgcctgcaccccaccgcgtgcctctacaggctccggcgctgctgtgtcgacactccagtccaggtcctcggtggccagactatcgtctgcacccgtctcggacagcgcacgcgcgtcgtggagcgcatccggatagcggctgtggatcttgcgcgcgtacttgcgtcgaagcgcctcgagccggtgcgtgagcttggtgtgcgtccactcgccgacctgatcagcgtgcgcgatgtgcatctcggcaagaaagagcgaagccacctcgccaacgtcgacgtcgaacagcgcgtccatgtagcacctcgcgcggagcatcttatcggccccggtacccgcagaggtagacgagagcaggcgagacgagatcttctgcacgccgagcgcaaagtacttgtcgagacgcacccagtcctgcgtatcccacacacgcgcgtcaaagctgtcgggcgcaggcgccgcgagcgcctgagagagccgcgatcgcttggcagtgctgcggcgtcgacggtccggcgtcgacaggccagggaacgacacagcgctggcgatcgtcgagtcgtgcgcacgcgagcgtgacgccaccgccggcgagggcgaagcagtgtcgttgatgcgtgtgttggatgcagcaggcgtcgcacggaagccgccgggcaggaaaggtgtggcgggcgatgcggtcggcagtcgatgtgccgagacgacgcttgcggctcgcgagccgagcaggctctcggtatccgcgctgccttggcgtgcgagagcgagctccgcatccatgagcagagtcgtgagatcggccgctgcgctcgtggcatccgcgcgctcgaggctgtgctgcagagccgaggcgtcttccagacggccgtgtgtgtctgcgcggcgaatggcatcgacgactcgacgcatgcgctcgcccgtagcgctgctcgcgcccgccgcgtccatgtcgccagccgagatccagccctcgtcgacgtacttgtggaagagcttgaggatggctgtggcgcgtgcggccgcccgggggtcgagagacgaaatctcgacgatcggcgtcgacgtggcctggccgagcttgagcacgcggctgcgcgagtgcgaggcatccgcagtgatgctgcccgttgcatcggccgacgtgacgggctgtcgaagatgaagcgtgtggatgtgcggctcgtcgtcgataatgctgtgcgagcgagcacgatgcgtgcggtcccgagagtcgcgcacaatgctcaccacgtagctatcatcttccgcctcgccgtcgtcatcgcgtgtcgcaacaaagtggctcgtcgagacagcgggagaagccgaggatgaaaggatgaccaccgagtccagctgctcgctttcgtcgtcgtccgcgcgcgagtgcgtcgaagaagtatcgtcgtcctcgccctgctcttcctcgtccacgtcgcgctgtgctccatcttcgctcgcctgctcttcgtcgtcgtcgtcgtcctcctcctcctcatcttcgtcgctgctgtcgtcgaggctcgatgcattttcgtcgctcaacagtgacgcgtcagacgccgaaagctcgtcttgctcgctgccttgctcgtcgccgctctcatcgtgctctcgggcgtcggtgctctcgaagctgcgggcaccaacgtcgcgcgagaggtatgagtggtgggagctctcattcgcgtcatttgctccctccatttcgtcatcctcctcttggtcgtcgtcggtgatgtctttctcggcgtcacttgcactctccgagtcggtgctgagggagaggcgacgagcgcgagccatgctgggctctgatatggagtccgacctggcttggtacttgcgtcggaatgactcgtcatcttgctcttcgggatgcgcgctttgaagggaagccgacgagagctccgacgagagctccgacgagagctccgacgagatagattctgaacgctgtcgcgtgcttggttcagcttgactaacgctgccatcagcggtatcttcctg

SEQ ID NO: 12826 - DNA, 3039 bp, Oryza sativa
  ref <308>: DATABASE ACCESSION NUMBER: AK110174
  ref <309>: DATABASE ENTRY DATE: 2001-12-06
caactggtcgccctccaccgtcaccgctctcgccgtctctcccgccttcagcggcgcagcacgaggcctcctcgccatcggccgtcacaatggcaacatcgaactctgcacatgggtaggaccgcgtgcagctcaaaagtccgagttcgacgaccgctccttccagtccgacgccgccggctgggccgtccacaccgtcctgcccggccaggtcaactccaagatcgagcacctctgcttcgccaacccacccactcaggactctacacagccgcgcaagcttcgtctattcagcatctccggaggatccatcgtcaccgagcactttatccctctgcatctcgccaaactcggtgcgcgcagagctgccggctccgacgacgaaaccaacaaaacctcgcgtcccggaaccgtctcttcgctcttcggaaagcgagcagccgatgacctcgacccgcactacccgggagagacgcgcaccctaccctccctcgcaggcgccgtatggagcatggctccctccgccaccggccgcttcctcgctctcggctgcgaagacggttcggtaaagatcattgacctcgaaaacgaccgattcgagcatctcgctgccacctcgggtcgcgaccgccaaattgccccacgcttcggtaaagcaaagggcaaggtcatcagcctctgctggggtcctcccgtccgctcttcccccaagcgcaccaccaccgctgcccgcaagcaacagagcaccgcaaacgacagcgacgacagcgacagtgacagcagcgacgaaggtgacgatgatgacggcgacgatgaagaagaggatgaccagtggcacgagtccttcctcgtcggtggcctcgccctctccagcgccatggtctgggacgcatcgacgggcaacatcgtcaccaaactcggcgtgcacaagagccgcaccgagcccaccatcgtgtggagcgtcgccacgctgcccgacggcaccatcgtcaccggcgactccaccggccgcgtcaccttcttcgacgcacgcacccgcatcccgctcaccgacggcaccttccgcgcacacgccgcatcctccgacgtgcttgccctctgcgtcggcccggacggcaggaccgtctacagcgccggcgtggaccagaaggtcgccgaatacaccaggatcgacgcggacaacgcacgcggacgctggatccacatcgcctcgaggcggctgcatgcacacgacatccgcgcgctcgcgctcgacccgccctactcgccgctcgatgcggcgcagtcaagccgcagcgtcggcgtcgacagccagcagcagcccgcgcgtctgcctgtgctgctcagtggcggcgtcgacttcaacctggtgctcacgcccgccgcgccgccctcggccgtggtcaaggcgcagaaggcggcgaccatcgcacagatcccctcggcgagcacgaaggccaccaaggcgacgctcagcaaggtcgagcaggagcatgcggccatcaacccgatctcgtccaacccgctcaccacgtttgccgacaccacgcagcgacgcgtgccgtttgtgcccaccgcggcgcgcgccggcctgctcggcggcggctcggtcgcggcgctgtgcgccagcaagcgctggatcgtgctgcgtcgcgagcagagtatcggcatctgggaactcggcagccacgacgagctggtcggcgtggcgcgcgcagccgacgccggcgagccctcggcgccgcccgcgtgggccaagctgctcgagatggagctcaaggtggattcgaacctggtgtgcgtcgccgtgagcgccgatggccgcttcctcgccgtgtcggatctgtacgagaccaagctgtttgagctcaaggagaggcgcacgcccggcgcgcccgtcgagctcgagccgcgcaaggtcaagagcttcgggcgcgcgtttggcggcgtcgagcgcgtggcaccgagcgcgagcgcactgcgcttctcgccagactcgacgcgcctcgtgctgtgctcgctcacgggtgcgtatgtgcacgtgctcgagctggcgtcggcgcccaacggcgagagctgcaagctgctgcgcagtttcgggcagcaccgacgtgcggccgcggcgctgcacaccgccgagcagcggcagctcgccggtcgcagcggcgctaacggcgagtcgtccaacggccacgccaatggcgccagcgagggtggagacaggagcgagcgtgcggagcgcacgacgacgacgctgatccagcacgccgagatctcgtgcgacggcgcgtggctgtcgaccatctcgtcggacctgcagcaccacgtgttttcgctcgactcgctcacgtacggccgcacgctgccgtcgcccgcggcgctgccggcgggcgcggccttccacccctcgacggcgtcgcggctgagcagcgtgctgacgctcgtgtttgccgacaacaagatcgagttctgggacgtcgagtccggcaaagagctcacgtcggcagctgggtccgacgacacgcccaagcaggttcgcaagcgcggtggtgcagggtccgcgggcaccgacacgcgctcggcactcgcgcacgatctcggccgcctcaagcacgcgctgcagctgcggctggcgggcgtgcgcgactttgcggtgaatgcgctctggtgtgccgaaccgggtgcggacctggcgtcgtccacgctggtggtgtacggcgccacgtggatcgccactgcgcgtgcgtctttggcgggctcggcggtggaggaggcggatggggatgtggagatggcggatgcggagcgcgtgccgacgcccggatcgatcgagtggacggtgcgcacgacagccaagtaccagccgctgctgctcgtcgcgcacgtccacgctgcgccgcacgcgctcgtcgtcgtcgagaggccgtatttcgagctcgccaagaagctgcctgctgcgttccaccgcggtgcgcgctatggtgcataaatcaccatgagtctgtagacactcgggggcaagaaagttttttgcattgt

SEQ ID NO: 12827 - DNA, 3756 bp, Oryza sativa
  ref <308>: DATABASE ACCESSION NUMBER: AK110175
  ref <309>: DATABASE ENTRY DATE: 2001-12-06
gtgcagtactggctccgacagggcacacattgggcttcatgacttttgcgcccacaaaaaccacttctcaagactacatctcggaccacctgtggaaggcccaggtcaactaactaccgctctgcccacaccacaatccgatcactactacacttaacaaaacacaaccatggctcttagcggcaggctggcccgccagctgcagcaggagctgttccaccaggctcgccagacagctcctcgcattgcccgccgcacctttggctcccaagccccgcgatgcatcaggcagcagaggcagaccaaggctactcccaacaacatcagaagcttcaccaggtctgccaggcagagtgccaaccagaccgagaccgctcccaatgcgaaggcataccttgagagcggtgccattgccggtgcccagaacctcgtcgatgtgaagaaggttctcgtcattggctctggtggtctctccatcggacaggccggagagttcgattactccggttctcaggcgctgaaggctttgaaagaagctggcgtccagtccgtccttatcaaccccaacatcgctaccatccagactgctcacgtcctcgccgacgaagtctactacctcccggtcacccctgaatacgtcacctatgttatcgagaaagagcgccccgacggcattttcctgtcgttcggtggccagactgcattgaacttgggtgttcaaatgaacaagatgggcatcttcgaccgctacaacgtcaaggttttgggaactagcatcaggacactcgaagtcagcgaggaccgtgacctcttcgctcaggctctcaaggagattgacatccccattgccgagtccatcgctgtcaacaccgtcgacgaagcgcttgctgctgccgagtccgtcggttaccccatcatcgtccgcgctgcttatgctcttggaggtctcggtagtggtttcgccgacaacgccgaggaacttcgcaacctgtctgcccgttccctcactctgtcaccgcaaattctcgtcgaaaagtcgctcaagggctggaaggaggccgaatacgaggtcgtccgtgacgccgctgataactgcattaccgtctgcaacatggagaacttcgatcccctcggcgtccacactggtgacagtatcgtcgtctcgccttctcagactttcagtgatgaggagtaccacatgctccgcactgccgctatcaagatcattcgtcacttgggtgtcgtcggagagtgtaacgttcagtacgctcttgcgcctgatggtcttgactaccgtgtcattgaggtcaacgctcgtctctctcgttcttccgctctcgcttccaaggctaccggctaccccctggcttacaccgctgcaaagatcggtctggggcacactcttcctgagcttcccaacgctgtcactcgcacgaccaccgccaacttcgagccctctcttgactacattgttaccaagatgccccgttgggacttgagcaagttccagaacgtcgaccgtcacattggctctgccatgaagtctatcggtgaagttatggccatcggccgtactttcgaagaatctttccagaaggctattcgcatggttgaccccaagttcgctggtctccagggtgatcactttgaggacatcgacgacgtgctccagaaccctaccgaccgccgctggctcgctgttggtcaggccatgctccacgaaggttactctgttgacaaggtccacgacttgagcaagattgacaagtggttcctctacaagattcagaacatcgttgactgcacccacgaactcgagaagatcggatccctctacggcgtcaagaaggagctcatgctcaaggctaagaagctcggtttctccgacaagcaaatctccaacgctgtcaacagcactgaagacgaggtccgcgcccgccgtaagaactttggtatcaagccctgggtcaagaggatcgacaccctcgccgccgagttccctgccgacaccaactacctctacactacctataacgcctctagccacgatgttgagtttgatgaccacggaatcatcgttcttggatctggtgtctaccgtattggctcttccgtcgagttcgattggtgtgctgtcaacgctaccctcagcttgaaggagctcggcaagaagactgtcgttatcaactacaacccggaaaccacctccactgaccacgatttccccgaccgcctctactttgaagagctcagctacgagcgtgtcatggacatctacgagcttgagaactcctctggtgttgttgtctctgtcggtggccagctgccccagaacattgccctcaagctccaggagactggcaaggccaaggtcctcggtaccgaccctctcgacattgacaaggctgaggacaggcacaagttctcctccatcctcgactccattggtgttgaccagcctgcctggaaggaactcacctcttacgaagacgcgaagaagttcgctgactctgttgagtaccccgtcctcgtccgcccctcttacgttctctccggcgccgccatgactgtcatctggtctgaggctgagctcaaggacaagcttcttgccgcctcaagcgtctctcctgaccaccccgttgttatcaccaagttcattgagggtgctcgcgaaatcgatgtcgacgctgtcgcacacaacggcaagctccttctccacgccgtcagtgagcacattgagaacgctggtgttcactctggcgatgcctcgcttgttctcccccctgccaaccttcccactgccactgttgagcgtgtcaaggtcatcgccgagaaggtcgccgaggcctggaacatcaccggtcccttcaacatgcaaatcatcaacgccgacaaccccgaaggtggcgagagcctcctcaaggtcatcgagtgcaacctccgtgcctcccgctctttccccttctcgtctaaggttctcggcaccaacttcattgatgttgccactcgtgccatcactgacaccaacgtccctgagcccgttgacctcatgaaggttgaccgtgactacctggccgtcaaggttccccaattcgcctggacccgtcttgctggtgccgacccctacctcggtgtcgagatgtcttccaccggtgagatggccactttcggtaaggacctcatcgaggcctactgggtcggtgtccaatctcagatgaacttccgtcttccccagcctggtgagggtctcctcttcggtggtgacaccactaccggtgacctcgccaagatcgtcgacttcctcaaccctcttggctacaagctctacgccgccaaccctgaggtcaagcgccacctcgaggagtccagcaaggacagcaccgtcaacgttgaggtcatcgagttccccaagcaggacaagcgtgctctccgcgaggtcttcgagaagtacgacatccgtggtgctttcaacttggccaagcgtcgtgccagcagtatggtcgacgaggactacgtcatgcgccgcaacgccgtcgacttcggcgtgccgctcttcatggagcccaagactgctgtgctcttcgctcagtgcatgaacgtcaagctgcccaaggttgagggcgttcccgctgaggtcaggaggtggtctgacttcattggtggcaagcctttgtaagcgaaaatggttttcatgtagcatgtttctttatcacgatgatatcttttatttactgttcaataaaatgtttactgttc

SEQ ID NO: 12828 - DNA, 4725 bp, Oryza sativa
  ref <308>: DATABASE ACCESSION NUMBER: AK110176
  ref <309>: DATABASE ENTRY DATE: 2001-12-06
tcatctcaaccttccaagcttgacaaaagctcgctggattcgtcacgatgaacagctccaactcatcccacaacttccgctcctccccggccaacagtccggcatacgagcagcacaacctcaactccttcaacgcccgacaaccgcccttccagccatcccactctcacagccagtccacaagcgtgcttctcaactcgtcttcacgctccggcttccgtccacagtcgcagcagctacagcaacaacagcagcagcagcccggctccaaccgctccgtcagcatgcgtcccatgtccgctttccagccgcccgacaatcctgactactaccatgcaggcgccacctccagccccacctccccacgcccgccttcccctaccggctccaccgcaaggtccatccgctccaccgccaacaccccgctcaccttcaagagccaggacctccgcagcgccctcggcctccaggagtcccagcagaagaagctctacatggagggctatctcctcaagcgcgacgacctcggcaccgacggcaaacccctcaacgtcgcagacgacaagcgtcgctggtcagagtgcttcgtacagctctccggcaccgtcctcagcctctggaacgtacagcagatggaagaggccgccacccgcggcaccgaagtgccccccacctacatcaacatcaccgactcctttgtcgactttatcggcctcctcatcgaagacccaaaactcatccccggcagccgcggccgctaccaccacgcctttgccatcaactcggcaggcaacaaccgcaccatcttttgcttccgcgacccgccccccttcccgcccgactcgctcgaacagtacctcgcacccgaacaccgcaacaaacccgaacatcgcaccgtcatcggatgactcaacctcggccatcgccacctccaggcccggatcaacgccatccgcctcgcctcgtgggaaaaggtgcgtctcgaggaaatctacaccggcgccctcatccgcgcccgcctcggcgccgtcggtggtcccgcttccgcttccgcttccacagatgcaaagcaggcgcccgccgtctcggcttccgacttggccatcaagtcgcccctcgtaaagggcaagatggagggctgggtcaaggctcgcttcatgggctccaccgagtggaaaaaggtctggatggtcctcaccgaccacaagccagacgagtccgaattggcgcaaagaagaagttctggaagatcggctcctccgccggcgaccgctccagcatcatgagcgtcaacagcgtctccaccgccgctcccggcgctcccggcgcagacggcaaggacctcccgcctcctcccggcagcaacggcgcgcctggcgtcgccagcttcttcgagtccaagaaggacaagaagcccttcgccagcctcatctacgccgcccacgcctttgccgtctacccctcgcgtcccgaactcgtcgagggctcgagcctcttcaagatcgaaggcgtcttccccaactccaccgttctctccgccacccaccgcgtacgcaccaccggctgggtcatgctcatgccagagctcgacaccgcaggcagcaagggcgccaacgcagagatgatgaagtggatcatcgccttcatggacgccttcaagctctacggccgtcccgacgcctttgtctgggaggcgcgcgaccccgtctcgcccttcttcacctaccccatcggccccttcaaggatcgcctcttcctcgacagggagctcgcagagttcctcgagatcgctcgcgaggaccacctcaccacccgctccgcactccacggcatcatggccgctcgcatgcgcggcgagcgcacaaagatcctccagcccctcccgcctccgtcccaaaacaccgtgctgcccacccgcgctgccaccagcgtgcccatggacgactctcgctccgccgcttcgtccaactcgcgcctgccgcccctcgactttgcctccagccagcccgccgcacagaccgcagctccggcgctcgcacccacgcaccaccagcagcagcacgaagataccagagagcttccggctgagctgcccgccaagctgccccagactttcaaggactcggcgcgcggtgacgctcgcaacgacgatgaagctcgtccggcttcgcccgatttcgacggctaccgcccaccgcgcgagacgcgtcccggtcagctgccgcccacttattcaggcgcacagacccagaccgccaccactgccgtgccggctgcactcacccctgcaggtcccgccggcgccgtggctcccgtcagcctcgccgcagccgagccgcttgtcaaccgagccccggttgccgcaccgcagacggcaacgctcgtctcgaacgacgcgcacgcagctcctgcagccgttgtgcagcccacatcgcaaccggctgcagcaaccagcccaactgcccaacaacccacacacgcgcaggaatcttcgctcgcctacctcggtgcgtccagcacatcgcacgccacttctcccaccgtggcatctgagcccgctgccgcccgtgctgcccctgtctttggtccttccggcaggggcgcacaacagaccacctcggacgacgtgcgcggtgccaggcgcgagtccctgcccaccaactacgacgagagtgcgttgttctacatggcttccatctccgatcagcttcctgccgcgaccgcacagcccgtcgtcatgtcgggtcccagccgcgccgtggtcaccaaggagagctcgctcgcttcgcgtccgcagagccttgcgcccgcatcgggcaccacctccgccatccagtccgagagcacgcacaccacccgtctgtcgtcggaccaggcacaggcagccaatgtggcggcaccggcgctcccggccaccgctgcagtggtgcctgcgcaggaccaccacgtcaagccagtcgaccaacccgtgtcgaaggcaaaccagacggccgacgactcgatcaacgacgatgcgctcgcggcgtactcgttcttggagcagccgccctcgccggcgcttcgcaccgccgagctcgcacctcgctccacggacgccgaacgcagccccgtgccttccgttgccgcacccatcgtgacgcagacggcgccagtgtcgacgaacgggacgtcgagcttcaacactcgccccgcggctgtgcagtacccgtcgacgtttggacagaacaagcgggctgccgagcgcaagtcgatcgctcagatgcaggcgcaggcgcaccaggaggcgctctccaagcctggccgtgctggcggcgccaagcccaagggcctgcgccgtcccggctgggtcgacgacagcgaggaagaagaggacgaggaggaggatgacgaagaggaggacgatgccgccgatgctgcgcaggcaggctcgggtgtggctcagcgtgccggtgcaggaagcgcggtgcgctcggcggctagctcgagccgcggcgcacccggcaccgactcgcccgtcaacctcgccgactcggtgggcagtctgggccgcagccacgacgccgctgggcgggctggagctccgggtgccttccctcgctcggcgtcgggctacggcgcgagtgtgctgggcggttcgcggagtgcgtcgccgggtcagtcgcccgcgcggggcggcatgacgcatccgtccatccaggcgtaccagcgccagtcgatgttcaacacgcaccttgcggctgctcacggcgacgatgggcgctcgcacacgccgccgcaggccccgcagggtccgatcgtgcgcgaccggcagacgttcctgcagctcaacccggaggagcagcctggtgcgatgaccacggtctttacgccgcacggtctcgtgcaggcaggtgcgcaggacaaagctgagcgctcggccaaggcgcaggaagccgaagcgcgtgcgatgggcagccatctggtcaacgtgcccaacaagcctccgcctccgcaggcggggttgttgggagccattacggcgcacgagcgcgaccgcaagggtgcgggtggattcggtgcgacgcttaccgagcgcgaacgcgagcgtgtggcagccgaacgtcgacagcgcgacgaagatgcgacgcggcagcaggcgcagcagatgcagcaggcgcagatgcagcagatggcctacttcaaccccatgatgtaccagcagatgatgatgtccggcatgatgtccggcatgcccggcatgggtggcatgcccgggatggggatgatgggcatgggtatgccagggatgaactttgggggcagccaaatcggcggtagtcagatggcgggcgggtttgatcctatgatggctcagcaacaggcgatgcaggcggcgcagatggcgtatatgaatgcgctccagcaggcgcatgaaggctcggtggtgggacatggatctccggggcaggcgccggcgagtgcaatgggcatgcagatgccgtttgcagcgagtccgcacatgagcatgatgggcgcgccctatcccgggtttgtggcgcagtcgggggtggggaacagcgagtataatgccgccaacagcccgtcgcagaggccgaataagcccagtgggcagaactaggctgcctagcccacggggacttggcactgtcggtgtggccggcgcagaattcccgatgcccgagattagcaacgatggacgctcgaatggaaaaatattatcggttc

SEQ ID NO: 12829 - DNA, 3556 bp, Oryza sativa
  ref <308>: DATABASE ACCESSION NUMBER: AK110177
  ref <309>: DATABASE ENTRY DATE: 2001-12-06
accatcctcaagatccccttccccctttccccttcaccccacctccgcgagcgacgacctccgtctgtcgaactgcgcataactcaccgtctcggtcactgcttcggccctctgagtcagtgcatccggtagagtgccactcgcatcgtccccatttgcgcaagcctaagcacgagctttaaccgtctcataagcgcaaagcagcgttctcccgcaaccatgtcggactcttccgctacccaggagggtaggaacgagaaggccctcggcggcgtctcggaggagtactcccagctcatcgaattcatccgcgcccaaaagtcggcctcgaccgacgaggagggccaggatgagacccacatcgtcaagaagcgcgagttccccgccttctggaagaccaaggaggtccgcgtcaacaaacacggcgaggtcgaggaggtcgcccagaaggtgcccgcctcgtggctcgagaccgacatgctcaagggtgtcagcgaggccgacgtccagaagcgtcgcgctctcttcggctacaacgagctcgagtctcccaaggagaacctcctgctcaagtttatcggtttcttccgcggccccgtcctgtatgtcatggagctcgccgtcattctcgccgccggtcttcgtgactggatcgactttggtgtcattatcgccatcctgctcctcaacgccttcgtcggttggtaccaggagaagcaggccggtgacattgtcgcccagctcaaggctggtatcgcccttcgcaccaccgtcgtccgtgacggccacgaggtcgagatcgaggcgcgtgacctggttcccggtgacattgtcgtcatcgaggatggcaagactgtcccctgtgacggtcgcgttctggctgcctacgaggacaaggacggctcccaggccgctgccatcctcgagaaggctcgtgcttcccgccgcgccgacgacgatgacgatgacgagggtgtcgacaagggtcccgccatcatcgcctgtgaccagtcggccatcaccggagagtcgctcgccgtcgacaagcacatcggcgacactgtcttctacaccaccggttgcaagcgtggaaaggcctacgttctctgcaccgacattgccaagcagaccttcgtcggtcgcaccgccgcgctcgtgctcggcggcgagaccgagggccacttccagaaggtcatgggctccatcggttccgctctgctcttcctcgtcatcgtcttcaccctcatcttctggatcggcggcttcttccgcaacaccggcattgccacccccaccgacaacaacctgctcatctacaccctgatcttcctcatcgtcggtgtgcccgtcggtctgccctgtgttaccaccaccaccatggctgtcggcgccgcctacctcgccaagcgccaggccatcgttcagaagctcaccgccatcgagtcgctcgctggtgtcgacgttctctgctccgacaagaccggtaccctcactgccaacaagctctccatccacgagcccttcacctcggagggtgtcgatgtcaactacatgatggccgtcgccgcgctcgcctcgtcgcacaacgtcaagtcgctcgaccccatcgacaaggtcaccatctcgacgctcaaggactaccccgctgcccaggacgagctcgcctcgggctggatcacccacaagttcacccccttcgaccccgtctccaagcgtatcaccgccgaggtcgagaaggacggcaagcagtacatcgccgccaagggtgcccccaacgccatcctcaagctctgcgctcccgatgccgagaccgccgcccagtaccgcaaggtggctggtgactttgcctcgcgtggtttccgttcgctcggtgttgccatgaacaccgacggccagtggaagctcctcggtctcctgcccatgttcgaccctccccgttccgacaccgctgccaccatcgccgaggcccagtcgctcggcatcgccgtcaagatgcttaccggtgacgcggtcgccatcgccaaggagacgtgcaagatgctggctctcggtaccaaggtttacgactcgcaccgcctcatcggctccggcggcatggctggttcggccatccacgactttgtcgaggctgccgacggtttcgccgaggtgttccccgagcacaagttccaggtcgtcgagatgctccagcaccgcggacacctgactgccatgaccggtgacggtgtcaacgacgccccctcgctcaagaaggccgactgtggtattgccgtcgagggtgcctcggacgccgcccgatcggctgccgatgtcgtcttcctcgacgagggtctctcgaccatcatcacctcgatcaaggtcgcccgtcagattttccaccgcatgaaggcctacatccagtaccgtatctcgctgtgtctccacctggagatttacctggttctcaccatcctcatcctcgacgaggtcatccgctccaacctgatcgtcttcatcgccctcttcgccgatgttgccaccattgccatcgcctacgacaacgctccccacgccaagcagcccgtcgagtggcagctgcccaagatctggatcatctcggtcatcctcggtttcctgctcgccgccggtacctggatcatccgcggcacgctcttcctcaacaacggcggtgtcatccagaacttcggtaacactcaggagatcctcttcctcgaggtgtcgctcaccgagaactggctcatcttcatcacgcgtcttggtggcggcgagtcggacatcacgctcccctcgtggcagctcgttggcgccgtgctgggtgtcgatgtcattgctactctcttctgtctgttcggctggctctcgggcgctccccaccgcaaccccgtcaccgctcctcacggtggctggaccgacattgtcacgattgtgcgcatctacgcatactcgatcggtgtcactgccatcgttggtgccgtctactacgtgctcaactcgtgggagtggctcaacaacctcggccgtcgcactcgctcgcagaagaacccggttctggaagacttcttcgtcaacctgcagcgcctcacgattgtgcacgagaagaacgccgacggcgaggagctctgggccttccacccccgcaccgagatcgaggacgagtaagcgggacgcgcttcatcgctctgtctctctcgcacctggcctgtcgcctcctgctcgctgtccggcctcggatggcacgccttgctgccgttcgagcgtcgggttggggcaggggcgcgagtctctgctgcgcttttaccccgggccaccgacgccctttgctctcgagccacaaagttccgtcttccaactagaaacacactctcttcaatgactccgtagtctgcgcgaggccaagggtgccgtggaatggcgaggcccgaccggtaacggtggggtcgagccgactgcagcgtcttgcccctttgcctcgacgtaaaaccacatcttcgacttcgcgccttacacttttaagattacctattcggcacgttctgcaaccatatcagcttcgttg

SEQ ID NO: 12830 - DNA, 3545 bp, Oryza sativa
  ref <308>: DATABASE ACCESSION NUMBER: AK110178
  ref <309>: DATABASE ENTRY DATE: 2001-12-06
atcaaccaacccaacaatcccaccacacctcgcactccacgcaaacatcaaccgccacgcccgtctcgccagcccagcgcagcccgccatcccgcacgctcggcgctgaaacgcgacatccgcgcactgacaagcccgcccgcgtggctcgctgctgttgcgcgctgctggactccatttgcttcaacggccacttgataacgcctgcctatattcatttgcccgcgacaaatatttgctgcatcatcgccccttcgctgccgtccatgcatgcgagggtactcctggctctgacctaatccgctcgctgctagcgctcaccaccaccaccaccactcccatccggacgaccgcgcgccggcgtcaatcactgctgccatccgaagcagatcttctgcaccaacggcaacaacatcaacacacctccacatacgcccaccatgccgccatcaggccgcaagggcaagacccgcgcgcgtcgcggaggccacgccgccgaaccccacgaaccttcagacgtcgacacacccgaggccattgcaacaccatcacgcgtctcgaggaaacgcgctcgcggcaccgacgcccctgcacccgcagccgccgcccgcaacacccgacgcaggacaaaagataccaggaacttggacagagaggacaccgagggcaccgaggcccaggacctcagcgacgatggcacagaacccgccctcccgagcgagctcgagattgtcgccagcctcaaggtcgcagacaggcaggtgaatgccaccgaggacttcgccaacgacctgctcgagggtcaggaaaacgtgccgggctacggtaagatcgctggtcgggattgggctttcatcattaggaaggtggaagtcaacattggccgaccagaggcgcatgagagactgcccgttgaggaatcagccggccgccctggcactccctcccacaagactgtcgtcgacatcgatttgggacccgatcgccaagtatcgagatcgcacgcgatcatctcttacgatggcgctacctccaactggttcatcgtggtcaacggtaggaatgggctgcgtgtcgacaacaatcttctcaagcgtggcgccaagtccttcctgagaaacggcagcgtaatcgaaatcgccggcacccagatggccttcatcacaacaccgaacgatgacggtgacggtcctgtttgggacgcatcgatcatcagacgggcccagaagtcgtcagaggaggatgatgacggttacgacgattccaggatgaacggtgctcgtcaacatgcccaccctcagcaccgcggtcaactgcaggatgcaagccgccaggcgcctcactacaacaaccctcctcaacagcagcagcaacagcaacaacaacaacaacaacaaaaccgtacacacccacactctcagcgtgctgcaggtctgcacagcggctcggttgtcggtccacccggaacccctcttcgtcccaccaccgcgaccatgggcaagtcgtcaccatccgcaaactattcccgcggcatcacaatggaatccaccgagagcatcgattactccgccgacactgcaaaagatctgaagccgccgcactcctacgcccagctcatcggcatggccatcctctccacccatgagcagcagatgacgctgaacaacatctacaagtggatcatggcaaactacgccttctatcgttacaacaccggtggatggcagaacagcattcgtcacaacctgagtctgaacaaggctttcaccaaaatcgcacgtcgtactgacgagcctggaaagggtatgaaatggatgatcgagcctactgaattcgacacctttgttcagcaaggcatgaaggggtgtcgtaggccggcggtgcagatccccatccccgggactcaaagcacagctgcttcaccatccagccctcttcatcccgtacgcaatccaccgagtagtgcaatgggtatcaagcgaagggacgacgagactacaccgccactgccacagttccagcctccttacccgagaacgactgaagccttcacgcccgatcgcgggtcgagacgcagacctaccgatggtcccaacatgggactcggcatcaacgagggtaccatcgatgccgctggacaggaggcagcctacaacctcgactatctccggtctacgcctcgtaacggtctcacggccgccgccaacgcagccggttcgccacctgctctgtacgtcaacgatgaaggccgcatcggtcctatggatacgccattccctctcaggcccaccgcgcgcttcgcacctccgagcacccttcgtcgaccaagtgacttcatccaactctcttctcccgcgcctttctggaagatggaaggcttggtcggtagcactcctttcaagccttacgacatgagtcctttgaagactccattcccgatgttgaagcccaagatcgagagtgccgacgaggaagagaagaagttgatccctggcgaagaagatgaggagaaggctgggagcgctggcgaaactgagggaatcaagaattcgccccattctaccgagggtggcgtgaagttgggcatcgaagaaaagatcatccgtcgccaaggcccgatcatcccgtcatcttcgcctccacgtgcgacaagcgtgggccgcttcatcggcgcagagagcccatctgccacgcgaccgggtacagctagctccaagggccttagccttctcgtcgaggctggcaaggaagcagagaagatgtcagagtcgtcagactctggcgctgtcgacactgctgctacgggcagctttacacatggccagcctacttcgcatccattggctgctccgccatcattgcgacccagcccgatgatcaccaatggaacgggcaatgtcaatctctccactggcatgaagaacggttatcagcagccttcccaggcgcccgcgccccaagggatcccccaacatcagcctcacctccagcatcaacacgcctaccccggcatgaattctggtgcgcaggattccgacgacgaaggaatcgacctcgccaagggcttccaaccaatcggctcttaccaccaacacaaccacctcgccatgggcatgcacaacatgggcaactcgcatcccctcggcgtcaacccagttcccagagctggctcgttcagccgttaatgccatgactgcctctctaactgcttgacacacgactagaacaacaccggcctcacggccctcttacgcggcgcttgctttactgttatttgacagtgttaccagaactacctgtctcacgcagaccaccagggtgtgcgaatttaggggctcgttgcttgcttcgctttgctttgctttcgcgtactcttgacgttttgcttttggtttgctttgctacgctggatggggaagaaaaatcacgttatcacgcattgtacgactctggaagtaacgattgttcttgtcttgactcgggagggggcgtttcgatcggtttagactttaggaatagatggcaaagagacttctttactttgg

SEQ ID NO: 12831 - DNA, 3465 bp, Oryza sativa
  ref <308>: DATABASE ACCESSION NUMBER: AK110179
  ref <309>: DATABASE ENTRY DATE: 2001-12-06
agacgacgccgcaataccaccagtctggcgctgccgccatgcctgtcaagcgacccgtggacgacgacgacgatggcccttccactgcccagctgcaccacatgccggcagtcaaggcctcgcgacacgacctgcagcagcaccaggaacaccaccagtcccagcaccagtcccagcaccaagactacgacccgcatcaccagcatgcggcacagcagcaccagcagcaccagcagcaccagcagcaccagcaacaggcgagcgccaggaaaaagggcgtctcgaatcgcacgggtcaggcatgcgacaggtgcaagacacgaaagatccgctgcgacccccagcccggcggctgctcgccctgcgcccagaacaacaccgagtgtcgtacaacagaccgcatcacgggcctcgcccgctcccgtggccatgccgagaacctcgatcgcgaaaatgccggcctgcgcgcctacgtcgagagcctgaagaagcagctgaaggacaagggtcacgagccagtatctgcgcccactgtcccctccggctacgccaatctctcgtccgacaaccagagccagccatcgcccgtcgaacaaccaacttcgtcctggggatccctccatcaacccacgggagacaacacgcccgcccagggcgtccgcctgtcagagtttcgcaccggctgtatcggcgacaactacctgggcgtctcctctggcaactcctggctcagtcccatcgagggcacttccgtctcactctttggcgccacattggacctggccgaatacatacccgaagaccacgtcgactccggaacttcctatcagaacttcctcgacaaggccttcgtcgagaaacagattccagagccgcagctcccggcatatgacaaggcaaagatgtatgccgaatggcacttcaggtccatccaacccatgttaccaatcctacacaaacctcacttcatgcaactgctccacgacgtctaccacgaacgacaccagtgcagtgcggccgagcttgtcatggtgcatatggtcatgagcctcgtcctcttccaatacaacactcgcaacaccacaaccgcacacaacttccaacattggaacttttcactctctttggttccccgcctcatcaaaggccacaccttgcaggatatgcaaggtctcgccctgatctgcgtacagctacgtgccttccctcgccccggcgcatgctggatgttcacaaacacggtccttgggctggccattgagctcggcctccaccgctccgccacagcatggcagggtagtgctgcacagcaagacccgcacaccgtcgaattgcggaagcgcatattctggagcctcatgttggtgcacgtccccgtcagtggcaagctcggtcgaccaatgccgcttaggctcgaggactttgatatcgagatccctgaggaagcacacgactacttaccagaggaggcgcacttggacgaatggcgcaaatgctccttccgctccggcaagtggggtttcgtcttgctcaaggttcaaatgaaggtctacagctcgatatattccattgggtccaacaccgccacttatgacgctaacgtcaaacgcctggagaaggagctcaaggacacagttgcctctttccctgatgagctcaacggaggtcccaaaaccaaggacgaagaccgcgtgactgcactatatctgcaactgggagcaacgggctgtcaactcttgatccaccacccggctctgtgccgctccctgtctcctcaagtcatgtcggacaaccttgatgcttgcctcgatgcaagtcacaaaatgctttctatcgccacgcagctcaagcaattgaacagtctggactccactctctactggaacatggacttcttggcgtccatgtttacaatgctcttcgtgtacaccgaacgtcgtgatcgtcttagcatgaacgatctgcgcggtcttcgacaggccatgaaaggttggctcgatgtcatgggcttcgttggcaaccttttgggcactggcgacagtctgcatgttgccctttgcaatctcgtcgagtggtcactgaataacattagtagacacctggcgcagaagacggctactgcagcagttgcgtctagcacgacttctcctgcacccgaccattcccaacagcgttctcagccgccgtcacaaaagcagacgcccgtgtacgagaatggtcacgactacaaccacaactacgcgaatggtgcttcgcaagagcagaccccggtgcgtaacaatcaccaggtacaggcccagccgcttccgccgccacaacagcaaacaccacaaccgcctcgccagccatcacagcagccccaacaccaggttgctcatcaacaaccgcatcaacaaccactccagccgccgcaccaaccacaggcgctgccgcgagcggccgacaatggttatgcaaacaaccctgcatacagctacgcagacgcgcaaggtagcaatgtgccttcatttgcaccaaccattatccaagcttaccatccacaaggttacgcgggagaagacgtcaaaccgaccatggacgcgcaactcgtagcccacgccgccatggcgcaacagcaagtctcccagccagccgcagacaactacatgatgtaccaggcgccagcatacaacgtcgccgatactgtcggtccgctggcctggcgcaatttcgccgagcacatggtctcgggcatgcaaaccagcgcacccggtatggccgacggcactcttgcgagctacagcggcatgatgaccgagcctctgggcaacatcacggtcaagaacggcgctttcatgtactcgaacggcgcgaccttcgggcagatgcagatgccgccgcaagacggaagcaacaatgtcgcggaatggccgatggtccagtattaagctggccagaaaatgcccccgaaatggctcttatgtgtgatgcgacgaaaagaaaggagttggactggttctgttttttctattctccatttgatttggtgggtggcttttttttttgtctttttgtcttctcgcttcggaacgaggtggttccgcttgttttgtgcgaaggaggtggcattttgttttttttttgtttttctttcccattggaggattaccatagacgaaagttctttcttactaactgggaggtgatacccgtgggttctttgactagggcgttggagaagggaagggaaagatggcacgccgaagaaagattgatgtcaccatcgtcgtcgttccgggagggaagcgggagcgacgcttgggtcatggccgggtggattgctttgtgtgtttttttttttgtatatagcggtttagaaggaggagagagagagagagagagagagagagagttgaatcgagacgttttgttctcttcaaaaatctttcgacatgctagagtacatgcgtagaggttgttcggacc

SEQ ID NO: 12832 - DNA, 3016 bp, Oryza sativa
  ref <308>: DATABASE ACCESSION NUMBER: AK110180
  ref <309>: DATABASE ENTRY DATE: 2001-12-06
ttgaaaagagagtcaaagagtgcttgaaattgccgggagggaagcggatgggggccggcgatgcgccccggccgtatgcggaacggcttcggctggtccgccgatcggctcggggcgtggactgttcatcgactgcatcttcctctttgccttctacgtctccatcctcaccatcatggtcgaggtgcaccgcatcaaggtcaagcgtggcctccgcaagcccaagctcagcgccgaccttagcctcgactcggattcgccacctaccagcccgctctccgacagctctgcctcccgcgagcccagccccacgccttcccagcgtccgctctggcaaaagatcttcaagaccgtcttcggctacgctccctcggagaagcgtcgcaagtcggagaacccgctcggccgcctcaagatcctcctcgtcacttgcttccttgtgatgcactcgttcaacctcatctcgacgctcacaaggcagtctgccatcagccgtcaccatgccaccttcgagccctcgccttaccaggtcgtcgtagagcagtcgcccatctttggtcccgccgcctcgtcgtccatcgcgcctctccttgcccagctttccctgtctcaccccgccaacgtcgacctggttgcgcacatctcggagcccaccatccttgtgctgctcgaggccaacgagtccgtctcggcgtcgcgcagcccgcttgcaagtgcagctctcaacgcatccggagtctatgcacagatcacctcggcaggcgtgcgtcccgtcccggtcggtcgaagcagctcgtcgctcgccgtcctggacagcctcatgagcggctggaccgtcattgtcggtgaccctgttatcagcaagtggatgtcgctcgctctcggtatcagcatcttcctcaacgcctacttgctcaagggcatcgccacgggtaacgccgccctctccgagggcaacgcggccggtgccgccgcctacgccgccgctcgattcatcggcgctcatctggacagcgaggccaaggccatcgaagagcatggtgagcgcgtgcgacgacgatggagctcgcgcgagaacggcaagcccgtcgctcccgtgcgtggcaagagcgcagacggcctcaacgactaccaccagcgactcgcccaaatgtccgccactgccgcctcggccccgctcaacaagctggcgcgcgagagcgacaagatcgctgcctcgtcgcagtcgactgagggtgtcaacgctgtccccgccggagcgattaagcccgatgccatggatgccgtcaagaagtcgaacgtcgcgcctagctccgaaggccaaggcgccgttgccgcgccagaggaccgagcacagcagatccgcctgcaggatgccacctacgttgcgcccaacggcgagaccgtcgtgcgacccctggaggagcttgtcgacatctacgcgggcggcgctggcgtcttcttcctcaccgacgaggagatcgtcacgctcagccagaatggcaagatcgccgcctacgctttggaaaaggtgctgcaggaccacgaacgtgctgtgcgcgtgcgtcgtgcgctcgtctcgcgtgcctcgcacaccaagacgctcgagagctcgcttctgcctcaccgcgactacgactacgccaaggtgatgggcgcatgctgcgagaacgtggtcggctacatgcccatccccgtcggcatcgcgggccctctcaacattgacggacaggtgatgcccattcccatggctaccactgagggcacgctggtcgcctccacctcgcgaggctgcaaggcactcaacgctggcggaggagtgacgaccgtgctgacgcaggatgccatgacgcgcggacccgcgctcgagttccccagcgtcgtgcaggccgccaaggcgaagcgatggatcgactcacaggacggtgcttcgaccatcaaggccgctttcgactcgacgtctcgatttgcgcgactgtcgtcgctgcgctgcgtgctggcgggccgcacgctgtacgtgcgattcgccacctcgacgggtgatgcgatgggcatgaacatgatctccaagggcgtcgagaaggcgctcagcttgatgaccgaggagcacttcccagagatgaaggtcctttccctctcgggcaactactgcacggataagaagccggcggcgatcaactggatcgagggccgcggcaagagtgtagttgccgaggcggtggtgcctggcagcgtggtgaagtcggtgctcaagtgcacggtgcgcgatctggtcaatctcaacaccaagaagaacctcatcgggtcggccatggctggatccgtgggtggcttcaacgcacacgcggccaacattctgacggccatctatctggcgacgggacaggacccggcgcagaacgtcgagtcgtcgaactgcatcacgctcatggaggcgatcaacgacgaccaggacctgctcatcacggtgtcgatgccgagcatcgaggtgggcacggtgggtggtggtacggtactgccgccgcagcgctcgatgctcgagatgatgggcattgcgggtgcgcacgcgacgacgcccggtgcgaatgcgcagagattggcgcgcatcattgcggcgtcggtgatggcgggcgagctgtcgctgatgggcgcgctgtgcgcgggtcacctgatccaggcacacatgaagcacaaccgatccgtgccgtcgacgccaggcaccatgacgccgctgccgcgacccgagacgcccaagcactttgccgcctcgatgacgccgctcgtggcgccgcccgtgggacagtcgaatcgcggctcgcccacaggcaaccgctccatctcgatgaccaacctcgccatccccgcgtccgatagcaccggtcgtgcggcgtcgctctcgtcgaaccaatgattgtactcgtgtcctcaggcgagagcctgaccactgtaaataccaaaacacgcacacacacatgcttactacactttagaaacaaggacatgcttacccggtgcc

SEQ ID NO: 12833 - DNA, 3429 bp, Oryza sativa
  ref <308>: DATABASE ACCESSION NUMBER: AK110181
  ref <309>: DATABASE ENTRY DATE: 2001-12-06
gtatctctgcattccacgttcctcagaaacgcgtgcgctcgcgacgtccccccgcccgaccatgcttcgtcgatgcaaccagcaccgcctttcaacactttccccctcatcccgcaaaatccttatctctcgcccttctgctgcctttaccgcccttccccgcacgcccatcgcttctaacaaccttcaaaactcggttcgcaccctcgcgacgggcttatcgcaaacgagcaagcatgtgccgactacttccatcttcgcgcctctcgacactttcacccgccgtcacgtcggcccccaacccgcgagcgtgcaaaagatgctcgagtacctcggttacgagtctatggacgcgttcttgaaggattgtgtgccgcaagacatccgcctcgaggagaacgcgattcgggacgaaggcgccggaggcatttgggcgctcagcgagggtgaacttcttcgtagggccaaggagattggcaagaagaacaaggtcacgaggagttttatcggtctcggttaccaccaagctgttcttccccaagttattcttcgcaacatgctcgagaaccacggatggttcagtcaatattccccctaccaggccgagatttcgcaaggtcgccttggatcgctcatcaactttcaaaccttgacgacggccctcactggactcgacattgcgaacgcctcgctcctcgacgaaggaacggccgcagccgagggcatgatcatggcttttggccaccttcgcgagaagcgcaagacgttcttcgtcgataggagtgtcttgcctcaaacagtggccgtcgtcaagactcgtgttgctccttttggtatcaacgtcgtcgtcggtaacgtcaagaagttgctgtcggaagagcacggcgacaaggcccagcacaaggatcttatcggagttcttctccagtaccctgacgttcgaggagaagtcgcggactggaaggccgtagccgatcgcacgcacaagctcggaggtctcgtctcatgcgcgacagacttcctcgccctcaccatgctcaagccgcctggcgagtggggtgccgacatcgcgtttggaaacgcggctcgcttcggagttcctctcggctacggaggaccgcacgcggccttcttcgcttgctcggacgcgctcaagaggcgcatgccgggtcgtctcatcggtctcagcaaagacaaggagggccgacctgcctaccgtctcgcgctgcaaacgagggaacagcacatccgccgagacaaggccacttcgaacatttgcactgcccaggccctgcttgccaacacttcggccatgtacgcggtgtaccacggtcccgaaggactccgtgcgatcgccgaaaaggttcacgggctcgcacggatcgtcaaggccgctgtcgaaaagctcggccacaaggtcgtgaacgagacgttcttcgacaacctcacgatccgtcgttcgggtactgccgctactctcgttcacgagagcgccgttgccgccggaatcaacttgcgccgagtcgacgatcagcacgtcgccgtctcgttcgacgaatcccactcgctcgaggacattgtcgacctcctcaacgtgttcgtgtcgaaccagaagggccctcgtcgcatcaaccagatccaaccttacacaaccgagtcgctcgtcgaattcgccgatagtctcaacgtgcccgctcctcgcgcgactcgctcgtcactcggcgagctcagcagcggagagaacatccctgcgattgacagccccgcgatcccgtccgacctcgcgaggacgtcgcctttccttactcagcccgtttggaactcgcaccactccgagaccgacatcatccgctacatgcactacctccaagacaaagatctctcgctcgtccacgctccgattcctctcggaagttgcaccatgaagcttaactctaccacgtcgatgactcctttcacgtgggacgagttctctcgtatccatcccttcgcgcccgaagatcaagcgcttggctacaaggagatgatggacgaactcgcgcaagacttgagccttctcaccggtctcccgggctgctcgcttcagcccaactctggtgctcaaggcgagtatgcgggactctcggtcatccgggcttaccatctctcgagaggtgaaggtcaccgcaacatctgtctcgtccctgcctccgctcacgggaccaaccccgcctctgcgatcatggccggaatgaaagttgtgcccgtcaaagtgcttgcgactggctatctcgacatggaggatctcaaggcgaaagcgacccagcactcgaaggatctcgctgcgttcatggtcacttacccgtcgacgttcggtgtcttcgagagcggtgtcgaggatgcgtgctcaattattcacgagaatggaggtcaagtctacctcgacggagcaaacttcaatgccatggtcggactcacctcgcccggcaaggtcggtgccgatgtgtgccacttgaacttgcacaagacctttgccattcctcacggaggaggagggcccggaatgggccccatttgcgttggcgagcatctcattcccttcttgcccggtcacccggtcgtccccactggaggaagcgacgccatcgggccgatctcggcctctccgtatggaagcgcgagcattctgtcgatctcctgggcctacatcaaaatgctgggagcgactggcctcaaattcgcgacccaagtcgcgctcttgaacgccaactacgccatggctcgcttgcaagatcactaccgcgtcaagttcgtcaacaacaagggacgctgcgcccacgagttcatcatcgatcttgccgaattcgaagataccgcaggcctcaaagtcatggacattgcgaagcgtctgcaagactacggcatccaccctcctacctgcagttggcctctttcaactgccatgctcattgaacccactgagtcggaaggacttcgtgacgtcgatcgcttctgcgatgcgatgatcaagatccgccaagagattgaggacattgcgcaaggcaagcaaccccgtggcaacaacttgatcgtcaacgctcctcaccctcaacaagtcgtcactgccgacacctgggaccgaccctacacccgagaggaagctgcctacccggacgctcgattgcgccgcgccaaattctggcctccgacttcgcgagtcgacgacgcttacggtgacaagaacttgttctgcgagtgtggctcggttgacgagtacgcctcctgagtgacccgcgtcgcaccatagacttcccgatacccccctctgtacatttctcttctgctattcgtgcccccccgccctcagtataaccttgtaccgatctcaacatcgcattctctagcctcccaattgtcgtaaggaattcaactctgcttctgcctcaccac

SEQ ID NO: 12834 - DNA, 2918 bp, Oryza sativa
  ref <308>: DATABASE ACCESSION NUMBER: AK110182
  ref <309>: DATABASE ENTRY DATE: 2001-12-06
atccaaacgcaagcaagcattcacccggagtgcttacagtacacccgcgcatcactggcttcctcctgcaccctggccgccaagaccgcccgcaaacgtggatcgactgccaagccttggcatcctccgctcgacttgagtttcttggcatccacgccctcatcccctcgccttcatatactcgacacccctcgcgctactgccatccctaccccccggtttcgctccctcatctcgttggcctctccacaccatctttcttcggccccaccaccagcaacaacaacatcggcaccaatcaacccccgacagcgtcccaactctaccctgcactagatccggcttcctctcacatcgcagtcatacctcacgccgccatgagcaatcacctttcgcccgcttcggtgagcgagcactcgagttacgctgcatccagcagccacctcggcgcaagccccgctccatcccaccactcctccgccacatccatgtcctcctcctcgccttcgccctcgaacaagatcaagtcgtcctcggcctcggacaacggcgactttgtaccgcccgccaagcccatcacctgccgatgggacgactgcggcaagatcttctacgaccccgaggtcgtctacaagcacctctgcgacgaccacgtcggccgcaagtccacaaacaacctctgcctcacctgcaagtgggagggctgcgacgtcagctgcgcaaagcgcgaccacattacttcgcacatccgcgtacacaccccgctcaaaccacacaactgcgacgtctgcggcaagaccttcaagcgtccccaggacctcaagaagcacgagcgcatccacaccgagcagcaccagcagcagcgccagcacaaggccgcacagaacgccgccgctcgcgcctacaccatggcagacccctccgccgcctttggcgcctacccatacccagtccacgcctccaacgcctacctcggataccccgccctccccactcagcagcagcagcaccaccagcacggcctctaccccaccaccgccgctgcctacccctccgcctacccctcgctccccaatcgcgaccactacgcacactccacatcaagcgcctcgctctcgcccatgtcgtcgcgcatcgacacccctcaaggcaccagccccggccccaaccaccacgtccaggacgccggctcctacatgcacctcgcccagggcctcgactcgcgcaacaaggtcacctccgaccccacctcctacacctacctcgcccacggcgccaccaccagccaccacctcgccggcaacaaacgtggccacgaacacgtcgaggacttctttggcgacctccgccgcaagaagctcgcccccgcctacgactcgcacatggcagacaggctcaaccagacctttggcatgggcggcatcgacgatgtctcgctcaacgccatcctctccacctttgacccttccgctgcctaccaggcgcccaacaacgctggaggcgcaaagatggagtcgggcgtccacgcgcgtgctcccgtcaagcaggactccaccgacctcgcacagctcaacgccttcctcctccagctcggcgccagcgcagcctcggcactccccgcatcgcactcgcacagcttctcgtcgtcgtcgtccgtcggctcctccgcctcgtcctccttctcgtcccagggccatgccgccgactttgacctctcgtcgctctcccagtacggcctcacccacattcctggtttcgacgagtcgctgctcgccaacgcctccaacccccagcgcgccatcgcccagctgcccagccgcgctcaccaccactaccccgactcggcgtacgcgagcggctcgcaccagatgcaccagcctgcctttgacagcgtccgtgtctcgcgcggcaacgccatcgtcccgcagctcgcccccgtcgacgtcggcggccactctcaccgccgcgtagaggcgctcacccgcgccgctcccgagcacgccgacaccctacgcgccgatgcgctccgcaccgccccggtcaaggccgaggaggacgccatggaggaggacgagctggacgacgacgcctcttcgcacgccggcgaccgctaccgctccgtgagccccgccgcctcgtccgagagcggatggtccgaggcgggccgccgcgacagctcgtcgccttcgcacggcctctatccccgcgtgtcgccctcggaggcatcgcgccgtctgccaccgctgcgctccaactcgaccgccagcacgtctgcgtcgatcagctcgctgctcgactcggacgcacgcctgccctcgatgcgacgccagagtgcggccatggaatcggtggacacgcgccactctgcacccgcctcgtcgccatcgccgtcggcgtcctcgtcgtcgtcgtcatcgtcgctctacccgagcctcaccgagcgcgtgtcgcagatggagggtctgggtcggccgctggcgcgttcgccgtcggtggatggcgaggcgcgcgaggccatggcgcgcgagcacgtgcgattgattcgcgacctgctcattgccatcaacttccccgaccaggcgcgcgccaagctccagtcgcaacagcgtgtgcgtctgccacccatcctcacctcggctgcgcgcagcaagaccgaggatggcgagaccacgccctcggctgaggcggagcatgtgcgcgatgtcgacagcgaccgcaactcgacccccaccccgcctggcaggcccacgctgcccacgctcagccagctgctcaacgacatgcccgagccaaggcagcgtcccatggccgagcgccagatggagtgcgatgtttagatccgcgccgttcgattgtacttttgattcgagtctgtattctagtcgctctgtcgttgctcaatgctgtcttgtgctgct

SEQ ID NO: 12835 - DNA, 3582 bp, Oryza sativa
  ref <308>: DATABASE ACCESSION NUMBER: AK110183
  ref <309>: DATABASE ENTRY DATE: 2001-12-06
atcactcgctccacccggatccgatcagctcgaccgcctcccttgttccggcttggattgggccttgcttctcttcgacgcgcccagcttccaccgcgcgcacgcacgtgtcaacgtcgaattgcccacttgccgtccccactcatttacctcctgcacgcctctcctgcactcgcgccatcgctcttgccgtccaccctttgttttcttcgtcctcttcttcttctttctctccttcttctcctcttccatctcacgccgtacgcatcgccccactgcagcctcggtcgaatacacggctctcgaggacgcggatacgctcacttacgctcttttcaacatcgcaccgagctcgtcgcatcgccctggttcgaagcactgcatctattgttctcgccatcgaggtcaggtacccaagcacgtcttcataacatcgcctcaagctccgccgcgtcccgactggctctcgaattggcgacgcatcaagcctgcaaaatagcaaagctcttcggtccttgtcacgctcccagtgcccgcgctaccgtgcgcacttcccctgatctttgtggcgtctccttccgcaggtcgaccgcgcccgcaccgattcgagcgcttgcgtcttcccatccgcatctgcctcaggcgcatcgtccaccgccaactcacgttggcccgctcccttcccaagccgggcttcttccccctttcgcatcacaaacccacgagtctcgctcaatcgagcatgcgcgactagtcgagtaacgcgctcatacacgcggcgccctttccccctcttctacggctccgcttcggccgctcgaggtgcccctcgcacatcaacgcgaacgcgcgccaaacgacaacccacgacgcgcctctctcgccaacaatgagtcgcatcgacagccgcgccgcttccatgacccctcagcacagtgccaacatgacaaagaccgacgacagcagttccagcctcactcccgcaggcacctcggaaaacagcgtcgcctaccagtatgtcgccgtccagcagatgaccacatctcgcgatcacatcgagtaccagctcaccgtccgcgaacagcccaagcagtcgcgcatgtgtggcgtaggtgagaaagccgaccgacgccccatcgatcccgctcccatcgtccagctccgcgtcatcacccacgatcggcccgtccgtcagtccgacgtcgtcgaagactcctcggtcgcaccgcccatcgaacgcaagccgggtcacggtccaaagcagccccagacgcccggcgtccgcaggggcgtccccgtaaccaccgccctcggcgatggctgggaggacaaggcttggtacctagaaaatccgtactttttcatgtacgccatgctctgcaacgccgataccgacgaggaactccacctgctcaacgatggcaagactcgctacaccagcggctcgtgcgtttcgtgcctataccacctcaaagacatcgacggctcgcatcaaggcttcttcgtctttcccgatctcagcatccgcgtggagggacgctaccggctcaagctctgcctcttcgagaccatcggccactcggtgcaccactgcaagcctgtctattccgatcccttccacgtctacacggccaaacgcttcccgggcatggaggagtcgaccaagctctccaagtcgtttgccgaacagggcctcaaggtgcgtgttcgcaagcatccacgctcgcgccgccgaagctccaagcgcacaaaggacgacagcgaggcatccgacctcgaggctgcgtccagccgcgctcgtgaccgcagcccgaaacgtgctcgtgcctccgacattcttcctcagccatcgctcgcagtgccccaacctacggctccgaggttgaatcgcacgctcgactcgcgctatgaacgccctgcgttcgaccgcagagcatccaatgcatctgtctcgacagacccacaagcggccggggcgtcgcatccgtactcgcttcgcgacgaggaagaggcgatgtgagtgcgggctgctcgcagcagagacgcgggcttcgacgacgcgctctacgcgcgccatgtccgcgacgaaaggctcatggacccgcccgctcacattcgagactttgccgacgcacgctatgcagaagaacgtgtgccccgcgattgtccgccaccagcattgcctagcatgccgctcagggcgccgcacgaatatccggaatacggccgggctgaacctccacgggacgatcgcgggcgggctctgccaccagcactgcagcccgcagcgacatcgcctcatcatacgcatccgtcgcttgcaggccaacggtatgccccggcactgctgaatgcgcccccatccgcgcgtccgtaccgcgaatacttgcatgcatatggcgcgccggaacctgggccgtacgagcctacgcgagggtacgacgcttatgcggcatcgcggcctggtgtgcggtatgggccgccgcttgctcacgaacgacgagacgcgcagatgatgcctgcttctgccacccctccgcctccgcctcctggcagtcttgagccgagtggctggcatgcaggcgcgccttcgtcgcgctcgcactggcggtcgggcccgcctagtccgcgccgagccgccgagtatcacgttggaccgggcgaacgcgagtatgcatcgcgtcgatcgccggtgccgcccggactgccgttggctcgcgggattctgacgccgccagcggcgtttgtaggcgagggcagcgtgtaccacagacacggccatggcgccggcgagcttgcgcgtggacccgcggtatacgagtccgagatgggcgcggcgcgaccgatgcgctacctgcgcgacgatttcgggccggagcgcgcgggcgctggtggccgcgggatgggcggtgagcgaccgatgctgccgctgctttcggcaccgccacctctggcgcagcgtcgcgacatgggcagggagcgcgatgcaggctacggagcaaccgagcgcttcatgcctccgtccggacacggcgcacgcgcgcctccaccgcttgcgtcgaacgaagccgagctggctgagcgcgagcgcgagcgcgaacgagcgtgggagcgcgagagagacgaggcatacggagcacgcgagtgggaggcgcgccgcgctgcgcggccctacggcggttctaggccgccctaccagtagcactgcgtagtagctctactttgtaagactagacatccatcgccatacacgccaatccacctgtcacgctacaggggtggatccatcgctgctgtgtcgtggtgccgagtgtgcatgccgagtgagtccgtaacgaaggttcaagcggacaaatgtggttacttttcgagtgcggtgatgtacatgactgtttgcgggaaggcgcaagcagatgcagcagcgcgggcgttgaacagcgcaagcaatggaagcgggcaaaacaggggtgggacgagtaaaagagccagaggtcagtttgcgtatcctgcatgccgagtcgccaagtcgtcgtgagaacgtaccgttgtttccacgaatgaaagcgtcgccgtaaaaaaaat

SEQ ID NO: 12836 - DNA, 4746 bp, Oryza sativa
  ref <308>: DATABASE ACCESSION NUMBER: AK110184
  ref <309>: DATABASE ENTRY DATE: 2001-12-06
aattgatgaaagtgcgtgtgcccattgtgctgcaccgcttcgtaccatcgacagtcgccgcgcgggacagattcatcccgccgcccgctgtctcaggcgaacaacgttgaatcatggcgcccgacgcaaagcccgagtctcccgggacgttggcatcgtccaactcgacgctgcccgccaacaatgctgcccacgatggcacccggaggcgcgacgtagagaaggaggaccgcgcaggggaagtagaagaggaatctcctggccacacgccctcggacgagtccgccgaatacgcacccataaagacaaacacgcagacgggaaagccaaagctcgagcggcgcaagaccattcagtcggaagatgacctcttcagggtgctctcgcagcggcgcgcgagccgcaccaacacgggcctctcgaccgccgagcaggaggaggagtcgcaggagattgagcggctcatgtcgcggctctttgggcgcgcccgccaggagcacagcgaagaggagaagacgcgccacagcggcgtcgtcttccgcgacctgacggtcaagggcgttggcctgggcgccagcctgcagcccaccgtcggcgacatcttcctcggcctgccgcgcatgctgcgtaacctcttcaccaagggggccaaggctgccgcggcgaagccccccgtgcgggagctcatcagccacttcgacggctgcgtgcgccccggcgagctgctgctggtgctgggtcgtcccggctccgggtgcacgacgttcctcaaggcgttttgcaaccagcgggcgggcttcgaggccgtggagggcgacgtcaagtacggaggcaccgatgccgccgtcatggggaagcacttccgcggcgaggtcatctacaaccccgaggatgacctgcactacgcgacgctcacggtgcggcggacgctcaagtttgcgctgcagacgcggacgcccggcaaggagtcgcggctcgagggcgagacgcgcaaggactacgtgcgcgagttcctgcgcaccgtcaccaagctcttctggatcgagcacacgctgggcaccaaggtgggcaacgagttcatccgcggcgtgtcgggcggcgagcgcaagcgcgtgagcatcgccgaggccatgatcacgcgcgcctcggtccagggctgggacaactcgagcaaggggctcgacgccagcaccgccctcgagtacgtccgttccatccgcaccatgaccaacatggccgacgtgtcgaccgccgtgtcgctctaccaggccggcgagtcgctgtacgacctcgtcgacaaggtgctgctcatcgacggcggcaagtgtctgtactttggccccgccgacgacgcgaagcggtacttcatggacctcgggttcgagtgcccggagcggtggacgacggccgacttcctgacatcggtgagcgacgagcacgagcggagcatccgtgaaggctgggaggaccgcatcccccgcactccggccgccttcttcgatgcctaccgcaagagcgacatctacagcaagaacattgccgacgtggaggagtttgagaaggaggccgcggagcaggcgcgcgtgcgcgaggagcggcagtccaagaggacagaggagaagaactatacgctgcccttccaccagcaggtcattgcctgcaccaaacgccagttcctcgtcatgttgggcgaccgcgcctcgctctttggcaaatggggcggtctcgtcttccagggccttatcgttggtagtctgttcttcgaccagccgcagacggtcgcgggagcattcccccgaggcggtacgctcttcttcctgctgctctttaacgcgctgcttgctctggccgagatgacggccgccttctcgtccaagcccatcctgctcaagcacaagtcgttttccttctaccggccttctgcattcgcggtggcccaaaccgttgtcgacgtgccgctcgtcttcactcaagtcgtcatcttcaccctcatcatctactttatggcgaacctggcccggacggcgtcgcaattcttcattaccgtcttgatcctgtggctcgtcaccatgacgacgtatgctttcttccgcgccatctcagccttttgccggaccatcgacgtggcgacgcgcttcacaggcatatccgtccagatcctcatcgtgtacactggctatctgatcccgcccaagtcgatgcacccctggttcagctggctgcgctggattaactggatccagtacggcttcgagtgtctcatgtccaacgagtttgccggcctgagtctcgaatgtgttcctccctatctggtgccgcaggtgcccggcgccgagccgcgctaccagtcctgcgcgcttcagggaagcgagcccgggcagacaaccgtcgatggatcgcgatacatacaggacgccttttcgtacagtcgctcgcatctctggcgcaactttggcttcctgtgggccttcttcatctttttcgtctttcttacggcgctcggcatggagctcatgaagcccaacgccggcggcggcgccatcaccatgttcaagaggggccaggttcccaagaaggtcgagtcagccatcgacaccggaggccgcgaccagaagaacgacgaggagcatgggccgattgctcacgtcacacctgccatggcggaaagggaagccaataaggaggagagcagtaatgacgacggtcatgctatgaagcgcatcgccaagaacgagaccgtctttacctttcgcaacatcaactacatcatcccgtatgagaagggagagcgccagctgctgcaggacgtccagggctacgtgcgacccggtaaactgacggcgctgatgggcgcatccggcgcgggcaagacaacgctgctcaacgcgctggctcagcgcatcaactttggcaccatcacgggcgatttcctcgtcgacgggcgcccgctgcccaaatcgttccagcgcgcgacgggcttcgccgagcagatggacgtgcacgagccgacggccactgtgcgcgaggcactgcaattctctgcgctgctgcggcagccgcgcgaggtggcgcgcgaggagaagctggcctattgcgaaaccatcatcgatctgctggagatgcgcgacattgcgggagcgaccattggcacgatcggcgagggcctcaaccaggagcagcgcaagcggctgaccattggcgtcgagctggcatccaagccggagcttctcatgtttctcgacgagccgacgtccgggctcgactccggcgctgcctttaacatcgtgcgcttcctgcgcaagctggccgacgccgggcaggcggtgctctgcacgatccatcagccgtcggccgtcctgttcgagcacttcgacgagctgctgctgctcaagtcgggtggtcgcgtcgtctaccacggcgagctgggcaaggatagccagacactgctgcggtactttgagtcgcatggcgcgcatcgctgcccgcctgatgcgaacccggccgagtacatgctcgaggccatcggggcgggcgaccccaactaccacggcaaggactgggccgacgagtgggcggcgtccaaggagcacgagacgcgcgggcgcgagattgacgacatggtgtcgcagcggtcgcacgtcgagccgtcgcagagcctccgcgacgaccgcgagtacgcggcgccgctgtcgacgcaggtgtcggcggtgatgaagcgcgcgttcgtggcgtactggcgctcgcccagctacatcgtgggcaagttcatgctgcacatcctgacgggcctcttcaactgcttcaccttctggcggctcgggtactcgaccatcgactaccagaaccggctcttctccatcttcatgacgctgaccatctcgccgccgctgatccagcagctgcagcccgtcttcctcaactcgcgcaacatcttccagtcgcgcgagaacagcgccaagatctactcgtggttcgcctgggtcacggccgccgtcgtcgtcgagatcccctacgccatcgtcgcgggcggcatctacttcaactgctggtggtggggcatcttcggcacgagggtctcgggcttcacgtcgggcttctcgttcctgctggtgctgctgttcgagctgtactacgtcagcttcggccaggccattgccgcgtttgcgcccaacgagctgctggcgtcgctgctcgtgcccatcttcttcctcttcgtcgtcagcttctgcggcgtcgtcgtgccgcccatgcagctgccgaccttttggaggagctgggtgtactggctgtcgcccttccactacctgctcgaggcctttctcggcgccgccatccacgaccagcctgtgatttgttcggacgacgagtacgctcgcttcagcgcgccgcctggccgcacttgcgaggaatacgcgggctcgtatgtcgcgcaggcgggcggctacctgcgcaccgccgccgacggccagtgcgagtattgccagtacgcgaccggcgaccagttcggtgcgggattcagcgtatactacagccacatttggcgcgactttggcatcttttgcggcttcatcgccttcaactatgccatcatttacgttgcaacgtggctgcggttcagagccaagaacccgctcaagccgccgctgcgcaagatccaaaagccaaaggagtagagtcaagattaattaattgtatgagaatgtgaactagacttcacagcctaataaagatacaatatcgatgctc

SEQ ID NO: 12837 - DNA, 3435 bp, Oryza sativa
  ref <308>: DATABASE ACCESSION NUMBER: AK110185
  ref <309>: DATABASE ENTRY DATE: 2001-12-06
atcctagacccacccgccatcgcactcctttgcagcatcgcttcgcatcggcatcggcccgcgctgcttcggatccagtgccgcacattgcgccgcgacgctgtgccaacgaacagcagcagcagcgtatcgatcatcgccctctcggagtcacctcgaattgcgctttctcgctgctcagtcgtccataggctcctggcaaacgtccgcttccactcgctagacaatccagcattcaccctcgcttgacgcttcggcggtccggtcgccacgcccacgggtgatcgtcgccctccacccgctcaccctctgccacgatgtctctcatcttgccagaatgggtggctcactacaacgacgagaaaaaggcaaagcgctccaccatcttcagcgtcgccgtccatccggactcgagccgtttggctaccgccggcttggacaccaagatccgcatctgggccactgcaaccatgctctcggaagcaaccgaagcagacgccaactcacatcgcctcctctccaccctctccagacacaccggcagcgtcctcgtcgtgcgctgggcaaactccggccgcttcctcgcttccggctccgatgacaccgtcggcctcatctgggacctcgaccccagcggcatgggcggcggaagcttcggctccgacgacgttaacatcgaaagctggagaccccaccgtcgcctagcaggtcacgaatccgacgtcgtcgatcttgcttgggcgcaggacgacgaattcatcgccaccgtcgggctcgactccaaggtctttatctggtccggctccagcttcgaccgcctccgcaccatcgacgctcaccaaggctttgtcaagggcgtcgtcttcgaccccttgggccagttcctcgccaccgcctccgatgacaagaccgtcaaagtatggcgcacctccgactggagcctcgaaaagtccgtcaccgagccattcaccaccagtccctccaccgccttcttccgccgtcccagctggtccccggacggcagcttgctcctctgcgcaaacgccatgagcggccccgtctttgtcgcaagcgtcgtcaagcgggcccagtggacgagcgacatctactttgtcggccacgagaacgccgtcgtcgtcaccgcattcagtcccaagatctttgtcggcttcgacggaggcactcactcttgcgtcgtcgccttgggctccctcgaccagtcggtctccatctgggtcaccggcctcgagcagcccgtgctcgtggccagagacgtattcgagcgccaggtcatggacctctcatggtccgccgacggctacaccccctacgcctgctcgtccgacggcaccgtcgccgtcttcaatctcactcccgacatcatctccgatgctctcagcgcagagagactcgagcagtcgcgcgccaaacacggcgtcaagaggatccgcaatactgtcggtccatccagctccgccgtggcgctgggcacctcggatcgtcccaacgtcctccaaccccgcaaagccggacaagcgcaacccgcaagagcctccgttgcacctgtgcccatcgcgggcagcgtggcacccgtacgaccagcgtcagccaaaacagaacgtcttcagcagaccatcaccatcaccaaggatggcaagcgtcgcatcagacccacgctcatcggagacgacctcgcacctccaccgccacccgctgctcagtatacatccgagccagccaatgccaacgcgatacgtcagcatcaccttccggccatgcgcgaggccttgggcggaaccacgaccgacggattcggtcctggtccggacgtcaacggtgcacatacaggcatggccaacggcagcctcccatcgagcaccgctgccatggccgctcaatcgtcggtcatgattccacacgccacggctgcctcgatgatgccctacgtgcccgtggggctgcctttcggcatcatgcccgaaggcgccactcccgaggccatgatggagttctgggccgagtttcagcagcgtttcatgcgaggcaagaagcgtcgagcagaccagaccgagtccgactcggaagacattgagcccatcggcaagttgcaaaagggcaagacacgatctgacattggtcgaacactgggcggcgatacgacacgcgatccgcccggtcccaagaaggtgctgcgcgaggcgttgaccggagtaagcggtattgtcgagcatggcgtgcgcaagggcgtccaccttgccgtccccgaaacgctcagcgtctatcgtcgcgaagaggacggagtgacgatcgaggtgcgcaactttgacgagtcacggcccaccgagatcacccagatcgactcggcagacaaggaccgagtgctgtggattgacttcagtccgacagcggccaccttggcgaccgccacggccttcttctctgcagtggcgctcgaggacgcgaccgtgttgatctacacgacgcgaggacgcaggatcggcaatctgctgctcgactcggcttgctaccggctggaaagcaacggcgtggtgctcatggcagtcacagtgtcgggactgatgtaccggtggaatatccgaagcgaccgcgaaatccatcggccagtgtcggtgctcaacgtgcttggagagccggagaacctggtgtccatgtcggtgcacaccaacggcgcgccgatcgtgatcctgcacagcgagaaggcctacacgttcgacgacaagaagctgggatgggtatgcatcagtgacggatggtgggccgagcactcggaagcatgggatggccgaacgcgcagccgcggcaacgaggcgtcgagccgcgacccggtgcgcgcggtcgaggcggagatcaacacgatgtacgtgcgtcgcgtgcacggcgacaatccggtgggtgcgcaggaagagtccgaggacgacgagtcgccgccggtggagatgagcgtgccggaagacaagaagtcggactttgtgatcgcagtgacgctgcgacatctcgaggcgaggatgatggcggcggtgattctggacagtgccaccgagtacaagaaccacctcatggcgtacgccaagcggcttggcgaggagggcatcaagaaccaggcggaggatctgatcaagtcgctcatcgggcccatctactacaagcccgagaagcagcaggatgcgtattgggagtcgagcatcctgggcctggacaagcgccagctgtgtgggcaggtgctgcagatcctcgcgaggccgcgcaacctcacctcgctggtgcagccgtaccacgagatcctggccaacatgaagtcgtagcgcgctgcgaccgcgatggcgatttggatcatcactaccccgtgttgcgatggcgcatggcctctgtacttgtcatgctttgcctcgttcccaatcgaaggcatctgatacg

SEQ ID NO: 12838 - DNA, 3771 bp, Oryza sativa
  ref <308>: DATABASE ACCESSION NUMBER: AK110186
  ref <309>: DATABASE ENTRY DATE: 2001-12-06
tcgcccagcatggcgcctcatcctccatcgtcacccatcgcctcggagcatccgaccgacgagctcaagctcaagcagggcattcagaccgcttcgcaagccgccagcacatcacgatccaccggcgatgcctccgatgcaaccagcagcaacgcagagtcttcgtccgccgccgcggctcatccgaatgcctcggcttctcatgcccagtttcacgaatggcaagatcagcgcagatgccattcggtgctcgccgactacgactacttgcacccgaccgaggaccgacgcgacccacgaagctccaacgcccgcctcgtcatgccagtctcgcagcagtcccaggcggtggcatgcagctcatctcatgaccgcccagctagtgagatggactcccacacttcgttgcaaccacctccgatagcgcttcagcacgacgactcggcaaacgacgtcacacgcgacactgctccaagccacaccggtttggggccgagtccgtcgcttccgctcagcccagaatgcaacgtctcgccctcgccctcgtttgctgcttacggatatcccgacacaccaccccgtgtttctcagcgtctttcgtcttcgttgtcgcaagatcgacccggcactgccggcgcatccacctcggctgccgcctcgtctcaccgtctttccagcatcgccgaatcatcaaacgagcgagcaggcccagcagacgcttgcagcacaaatcacattgcatcggagacgtcgcgtccgtggacgagagcgacgtctttgagattcgaccaagccgagcagcgtgagcgctcgccgcttggtgaggcgacgcaccatgcatcgcagtcgcaagatcccttccgcctgcagcccgttccgccgtcgaagcgtcgaaagctggacgattcccttgcaggctcaactcatgctgatctcgggtcgcccactcgcatcgacgacacgcagcgctcgagcgacgctggcgttgcgtctgactctgcgcaggtacgcagcagtgtcgagacgaaggcaggtgaggcgctctctgaagacaagcctggcttcctcaaccacacccaacgcgctgctttggtcccgtccgctcagccaagcgcctctgcgtctttgtccgtagcgaggacttcgtcggcacacgccgctcgcctcgaccaatccacagatgcgagacacgctgctcatgcccctgccaccaccacccgcaacgcgcacgccgaggcgatccagcgaaagcagcatgcctggccgagccgcaagtactcgcgcctcacacgtgctcagagcgtgcccaacctgcgtgccaaggccacgctcgacgtctcggcgccgtcgcatcaccgcctcatcctgcccaaccatctggccggctacgtctcgtcgcactcgcgacagagccgctctggtcagaacgggtccaagggctcgacaatgcgactctctaaggggctgccactcaacctcgcacattactctgtcgggaccagcagctcacgctcgcgatcgacgtttacacccacgctgcatccgcccatcacacggcacacgctgcgcgagctcgacctgctcgagatcctcaagaacccgcagctccgccacgacgttgtcttcgatcccaacgtccagttccgccccaactttgatggcgagcgcggcaggcgcaagcgcgaggccggcgagagatactgggctgctgttgtccgcgagattgagaccggctgcacctgcaccgccttttcgcatggccagcttctgccgtgcacgtgtcgcgccaagggtcgttcgctgcccgccggtgtagcgtgtctgcgggatgcagcggctggccccgatggcaagcgcgattccaagggcaggccgccgctgcccaactcgcgtattccgtcgaggatcccactgctggtgcaggagttgcgcacgatctgcctctcgattctgccatccaactaccccgccgactcggccggtgtggtggcagaggaggcttcagccacatctactgacgacagcaaggtgggcgacgaagctggttccgaccgcgaccgtctggcttcggagaaagcggctgcttcggcctcgtctggcgttccttcgttggccacgacgcaccaccaactcattgcacacacgctggacccgcacctgatcgcacaggagctgcagcacggcgtgctggacgtgcctgcgctcatcacgtttatgggatcgatcctcaagctgcactgcgcgccgatgcgcgacgaggcgatcgaaaagatggtcgaggtggtgtgcatcgaccacgacatcggcaagggtctgcgactctgtttcgagatcctcgagctgataaagctcgacattgccaaccaccagctgcggtcggcgcggccgttcctggtggagacggcggtggactttgagatccgctggttcaaggagcagatcgagcagggcaagatgtcgctagacaagacgaccgcctggatgcgacacgcactgagcgaggcgagcgacgattcgggcctgccgcgcagccaagtgatggtgacggcattcaaccgcggcatgctgcagctcatctttgatgtgccgggcacgctgcccgtgctgtcgcaggtggccacgccgctgggctcgccgtcgtcgtcgtcgctcaacaacacctttgccacgctctacccagagacgttccagtttgacgcgtaccgcatgatgacgttccacaacgatgtgtcggacctgacgatcgtatatatgctgctgctgctcttccgccagctgtgcggcacgccgctggacgacggtgcgccgctgccggcgtgcgtgggcagcctggtgcagcgccagctcaagagcatcaagggcgagatctggtgtctgctcagcgacgccaatctgtgcctgtcgggctcgggcggcacgtcttccgcgcctgcgggggcgtcctcggcgagtggccctagccgacgtgcagcaggcgtggagggtaagccgttcctcggcagcgccggcggctttgccaagctcgaccatccgcgttggcgacgcgcgatgcagaatgtgcttctccagatcgccgcgcgcgccgcagcggtgcagacggcggcgcgaacgggcacgtcggacccgagtgcggtcaagacggcggcgccgtcggccaagacgcagcagctgctcaactcgtggatggagacgaatctgcgcagcggatcggcgctgcacaagatctgccagagccggctgcgcgatgtggtgctgggcatgctgacggacaaggtgcgcagcagcctgcagatcgtcgcggctgtgcctgcggccgccagcaagggtggcgagcctagtgcaagccagcagaagcgcgcaagctcgagcgaagacggcgatgcagatgacggtgcatcggcgtccaagaggcaccgcaccgatgctggttcggacgccacgagcagcgaccaggtggccaacgctgcgggtgtcgcggccggcacgggcacgccctgggacgctgcgatgaaccgcgcggggctggagccgtttgcggccgagatccgattgctgtcggaccgagtggccaaggtggcgacgttccacctgcgcgtcttccgccacctgtacgaaggctttgaggctggccgcgcccagccagcccaatagccgtcgtcgtcgtcgtcgtcgtggttgaggccatttggccacagcatttacctcttcattgtttcacatcaaggacattgcctatcagattcaacgagcaactacactatattcgcattg

SEQ ID NO: 12839 - DNA, 3553 bp, Oryza sativa
  ref <308>: DATABASE ACCESSION NUMBER: AK110187
  ref <309>: DATABASE ENTRY DATE: 2001-12-06
tcgttcgtctgacttgggtataggggcgaaagactaatcgaaccatctagtagctggttccctccgaagtttccctcaggatagctggagcccattacgagttctatcgggtaaagccaatgattagaggcatcgggggcgcaacgccctcgacctattctcaaactttaaataggtaggacggcgcggctgctccggtgagccgcgccacggaatcgggagctccaagtgggccatttttggtaagcagaactggcgatgcgggatgaaccggaagcctggttacggtgccgaactgcgcgctaacctagaacccacaaagggtgttggtcgattaagacagcaggacggtggtcatggaagtcgaaatccgctaaggagtgtgtaacaactcacctgccgaatcaactagccccgaaaatggatggcgctgaagcgcgcgacccacaccaggccatctgggcgagcgccatgccccgatgagtaggagggcgcggcggccgccgcaaaacccggggcgcgagcccgggcggagcggccgtcggtgcagatcttggtggtagtagcaaatattcaaatgagaactttgaaggccgaagaggagaaaggttccatgtgaacggcacttgcacatgggtaagccgatcctaagggacggggtaaccccggcagagagcgcgaccacgcgcgtgccccgaaagggaatcgggttaagatttcccgagccgggacgtggcggttgacggcgacgttaggaagtccggagacgccggcgggggcctcgggaagagttatcttttctgcttaacggcccgccaaccctggaaacggttcagccggaggtagggtccagcggccggaagagcaccgcacgtcgcgcggtgtccggtgcgcccccggcggcccttgaaaatccggaggaccgagtaccgtccacgcccggtcgtactcataaccgcatcaggtctccaaggtgaacagcctctggccaatggaacaatgtaggcaagggaagtcggcaaaacggatccgtaacttcgggaaaaggattggctctgagggctgggctcgggggtcccggccccgaacccgtcggctgccggcggactgctcgagctgctcgcgcggcgagagcgggccgccgcgtgccggccgggggacggaccgggaacggccccctcgggggccttccccgggcgtcgaacagccgactcagaactggtacggacaaggggaatccgactgtttaattaaaacaaagcattgcgatggtcctcgcagatgctgacgcaatgtgatttctgcccagtgctctgaatgtcaaagtgaagaaattcaaccaagcgcgggtaaacggcgggagtaaccacaaccagaacctgtcaggtctcacgattcacagcatgtcggccgcttcatcctcgtccgtcgcggcgccgcccgactacaccaaggctactgatggcaccggcgtcatcggcggtgatccgtggctcgagccctttgcgcccgcgctgcgagagcgatacgcgctctaccaagactggaagaacaagatcagtgtctccgaaggcggcctcgaggccttctcgggctcctaccgcaacatggggttccaggtggatcccaagacacaagccgtcacctacaccgaatgggcgcccaacgccgtcgaggcggcgctcatcagcgacttcaacaactggtcgcgcgattcgcacaagatgaccaaggacgactacggcaagtggcacatcaccatccctccgctcgccaacgccacctgcgccatcccgcacgactccaagctcaagatctccatgctgctgccctcgggcgagcgcatcgagcgtctgcccgcatggattctccgcgtcacgcaggatttgaacgtttcgcccgtgtacgacgcgcgcttctggaacccgcccaaggaagagcgctataccatcaagaaccccaagccgccgaagcccgacaacatcaaggtgtacgaagcacacgtcggcatcgccacccccgaggcgcgcgtcggccagttcaaggaattcacaaagaacgtcctgccgcgcatcaaggagctcggctacaacaccatccagctcatggccatccaggagcacgcctactacgcctcgtttggctaccaggtcaccaacttcttcgccgccagcagcaggtacggcaaccccgaggacctcaaggagctcatcgacgttgcgcattccatgggcatcaccgtactcctcgacatcgtccactcgcacgcgtgcaagaacgtgctcgacggcctcaacatgtttgatggcaccgatcacctctacttccacgagggtgccaagggcaggcacgagctctgggactcgcgcctcttcaactacggccaccacgaggtgctgcgcttcctgcttagcaactgcctcttctggatggaggagtacggattcgatggattccgcttcgacggcgtcacctccatgctctacacgcaccacggcatcggcaccggattcagcggcggctaccacgagtactttggcccttccgtcgacgtcgaggccgtcgtctacctcatgctcgccaacgacatgattcacaagtacaacccaaacgccatcaccatcgccgaggacgtctcgggcatgcctgcgctgtgccgacccgtctcggagggcggtgttggcttcgactaccgcctctcgatggccgtaccggacatgtggatcaagctactcaaggaaaagtcggacgaggactgggactttggcaacatctgcttcacgctcaccaaccgtcgtcatctggaaaagtcgatcgcctatgccgagtcgcacgaccaggcgctcgtcggtgacaggacgcttgccttctggctcatggacaaggagatgtacaccaacatgtcggacctcaccgagcgcaccgccatcatcgaccgcggcctggcgtaccacaagatgatccgtctcatcacacatgcgcttggcggcgagggctacctcaactttatcggcaacgagtttggtcatcccgagtggctcgacttcccgcgcgagggcaacggcaactcgttccactatgcgcgtcgccagttcaacctcgtcgacgaccacctgctgaggtaccagtatctgtacgcattcgacgccgccatgaacaatgccgagggcaagtacaagtggctcgcgagctcgcaggcgtatatctcgctcaagcacgagtcggaccgcgtcgtggcattcgagcgtgccggcctgctgttcgtgttcaactggcacgccaacaactcctacaccgactacaggatcggcgtggatgtaccaggaaagtacaaggtgctgctcgacaccgatgcaaaggagctcggtggccatgcaaggatcgaccacaacacagagtggttcactaccgacatggagtggaacggtcgccgaaactttgtgcagctctaccttcccagccgatccgccatcgtgctctaccgcgccgattagatggtgcttctgtcgtgacatatgtatatagcaagacacaatccacagtcgtttcgtcc

SEQ ID NO: 12840 - DNA, 3343 bp, Oryza sativa
  ref <308>: DATABASE ACCESSION NUMBER: AK110188
  ref <309>: DATABASE ENTRY DATE: 2001-12-06
atcggcacaccgacatcagcacactccacccgacctcttcgcaagcacctgctgcacacacgcacacacacacacgcacaatcctcagccccagcaccgctgcgtgtccacatcgcgatcgttgccgcattattcgaacgacaccaattctacacatccacgtccaagtgctacccgcttgccccttcgccgagtccattcacgtccaaactctggtccaacgctacacaaggcttccaccgccgctacacgctcctcctctcccatccaaccgcgctgactgtccagcaaagcaaagcgcgaggcttcaactcggcgcaaactaagctctcatcatggcagccggaccaccgcccggcctcggcatagcagcaccaccagccgcagcgttaccacccaatccgttcggcaccaacggctcccaacactctcacaagtcgcccttgcaccaccactccgacctccaaacacccgtcaaatatgagcgtccatccgactgccctcgcacctacagccgtggtgcacttctcgccttcagcgcttccactctggtcgtaaagccatcctccatggcctcccttcgcgaatggtttggcgagtgggaagcctatcaccccaagagctcctacaactaccgcgaaaactctcgcagagcccacgccgaagacgctgctgccgcacacgcagcagcagacgcacacgcagtcgagtcggaagaaggcgccaacaacggcggtatcatcggaggcgcgctcggaggtttcgcgcccaggagggaaggcgccggcgcgcgcttcggaggaaggaggaacgaagaccgcgaacgcagcgaaggcctccgtctcggcgaagtcggcggccgcagagtcgcacccgccggaaagaacccgttcggtcagatctcggccagcggcactttcaagccagcaggcactcccggtggtggacgcggccttcctcgcgacgccaaccccgacgccatgggcgatgttcgccgcggaatgggagaacgctccacctcgtacggcaaggaccggatgcgcgagctgcttcccgacgaccgtagacgcgacccggctcgcgaccgacgacgtggcgatcgaggcctcgacgccgacgacagtcgcgaggaaggcgagatcgtcgattcgcccaggacacgacgcaccggtggcgcagacaccgcttccgactggaggagacccggcgaccgcgaccgtgccggacccttctccagcctcccatccgaccgcttgcgcccgggcgagcgacgaggagctcagcgtgcaggcggagctccctggacaggcgatgcggacgacaatccggcttggctcgaagacgactcggaacccctgcccgtcgacaaccgagctccctttggacagttcggcagccgtcgaaaggacgctgacgacccgctttcgcaagccgatggcatgggcggcgccgtcgatagcattcaggccttcaaggctcagatgaaggaacgcgagcgtcgcgagaggctcgcgcgcggcgaacccgagcccgtcgaaaaggcgccgctcgaatctcactccgaatccctgggtgcggagcgacactcgtcgcacgagtatcccttcggctccgatgctgcctcgcaacaatccgagctcgacgccattcgcgcagaaatgatggctgccgccaaccaacgctccgcatccggcaactcgatgttcgacagcatctccaacagccacggcggtgcgggagccgagggacaagcgccacccggccttcccggacgctctagccgatttgcccgattcttcgacggacgcggcgcaccgccgcgcgacccccaagctgccgcccttgctgcacagcagaagatgctcgaatccatgggcgcccagcctgcgccgcccgcctccgacgacaaggaggcctccaacatccacagccccaaaacgccccaaaacgcctcctcgtcatcgatcaacatctcggatctcttcagcaagtcgtccatccgcgacaagccagacgcgacgggcaaggacgcctcgggcaagaatgtgtcggatgcggaccagcagagcatgcagaagctcatggccatgctgcaaggcggcggcggcggtggagcaagcggcgcgggaacgcccacgtccaacaaggagcatgccaacgagcatgcgcaccaccatcagcgagccgacacggacgaccgactcaaggagcttctcggtggtggcggccaagctcgtcatgccgaccacctcggcgatcgacctcgcagcatcgtctctcccggcctctcgtccgccgaggctcatggtcacgccatggaagctcgctcgccgctgccctacccgcagcaacagcagcagcagcagcatcagcgcgaatcgagcacgtcgtccggcggcgtgggacacggacagcatttgggtccgcagcaccagcaccagcaccagcagccgcacgagtcgcagcagcaattcccgcagtaccagcagcagcggtccgactcgcccgccatgggcggcggcaacgcgtacaacgatcctcgtcagcagctcagcagtgtgggatcgcccacgagcccgggcgcgccgggcgtgggctctccgggcgcagcgccgggtatgggaggctttggcggcttcgcgggcgcgatggcgggccgaccgccgccgccgggcatggatcctcgcatgatggcgcggccgccgatgggcgcgcccgggttccagcagctgccgccgcacctggccgcgagcctggggctggcgcgcggaccgatgccgccgggtatgggcagcatgccgcctccgccgcccatgggggtgcccggaccgcgcggacccaacggtggcttccccggcttcgcgccgttcccgggcggacgtccgccgccgcccggaatgccgccgcagctgtaccagcagctgatgagcatgccgccgcacatccagcagcaggtgctggcgggacagggattcccgcccggcatgccgccaccgccgggatcgccgtatgatcccagtgcgcccgagcgcaggtcgcagtcgcccgcacagttcccgtactatgcccagggacctgggggtatgcagccgccagcgtcgccccagcagcatcagccggtggccgtgggagcgcatgcgatcaatggcgccaatctcatggcgctgcttagcggcggtaggaacacgcctacaaactgagcgcgcgcggtcgtaccaagcgggcgcagtgcatgcgtctcactccttcctttttttcagtctctcacacacacacacaagtgtcgcggttcttggttctcggtttcgtggtttgaattctagcttttgcgctttcactcatt

SEQ ID NO: 12841 - DNA, 3387 bp, Oryza sativa
  ref <308>: DATABASE ACCESSION NUMBER: AK110189
  ref <309>: DATABASE ENTRY DATE: 2001-12-06
accatctgcggctgcctcgatttagagtagtagcaggcgcaaccatccgacgttttacaggcacactcaagagggcattagtctcggatcacgccaggaaagaagtgcacttcccgcgatggtggacccacgagtggtgccacggacgtcgtacgactcgcaggcaacagcgtcggatgctacggtggaggagcgagatgagaagccttatcgcgacgacgcctcgtccgacgatgctcctctatacccgccaacccgagtctcatcgcgctaccatgcacacgacgagctggaggacggccttggcggggtgcggcttgacgatgacgaggaggtcggactcatgcaggctgaccgtgacgcacgcaaaccgcaccaaggctcgcgcatctggagccagctgcgctccttgccgcaccgctcgggcaagcgtagacctactgcgttctcaggctgtttgatattctccggcgtcgtgatcggcttcatgctcgctttgccactcctgcagtggctctcgtccaacacagcctctgcagccccagcgagcacctccgtgggaacagcaaagccaagcaacaacatttcggcggatgcatcgatggaatcatcgcagagctggaagcagcctgcctcgcccaacacgccagcgggtcactacgcgctcgccaacacacagctattcaaagtcgacttccaagaccctggctgggaaactgtggcgcaggctgctgcgggtacgggtctgactgaggccgaagtgacctcgttcaagacgcacgatgggcacgatctgatgccgctcggtatggacacggtgttcagcggtacacttgcaccgcaaacgggcgacctgacgtggagcgaagaggatccggacgagggtgtgttcagccatgtcgactggactaagcgcgacatctggctcgaggacgtcacgcacgcacgccaccaaaagacgggcagcggtaaagtggcgccgttcggagggaaggtgctggtggtcgagggcaaaaacgtgctggatgccaacggcaggatgctcacctggacgagcttcaagctatcacccgatctgcgctgggtgctcttcttcaccgaggagaccgaccagtggcgatacagcaagaagagccatctgtggctacacgacattgcggccaagaggaccacacagctaggatcgggacccaaggctccgcccaaggtgacctatgccgcctgggcgccgcgtccagcgggggcgaacaaggacgaggcgccgacgatcgcgtttgtcgaggagaacaacctgtacgtcgtgccgcgcgcgggcgagagtgcggtcaaggtgaccgacgacggggcggcgacgatcttcaacgcggtgccggactgggtgtacgaagaggaggtgttcggcaccgactcggtcatgtggttcagtccggccggctcgaagctcgtcttcctgcgcctcgacgagacggcggttcccgtgtacgagttcccggtctacaatccggacctgtaccgcgcggggatgacgcaggcgtaccagaagatgacacgcatgaagtaccccaagccgggctttgcgaatccgacggtgagcgtcaagatgatcgatctggacgagatccgttctgcgacgcgccagggcggcgcggtgcggccgacgcagtatacgctgcacagtccgatgtcgagcaagggcaaggcggcggacgaggtggatcggctgctgtcgacggacgcgggcgtcaaggagcggctggtgactgaggtcaaatgggtgtcggacagcgcactgctggtcaaggagacggatcggtacagcgacgtgatgcgcatcgtgcattttgacgttgcgcgcggcatgctgccgacgatcaaggcgggaagtgccggtgcggatgtagagggtgaagtggtgcggaagcaggatgcacgtgcggacaagagcggctggatccgtgccgcacagaccattgagccgctctcccaccacaatctctcggtcggctccacagcctacctcgatattgtcgtttcgccacagggcttccgccacctggcgtattacgactctgcgacgtcggatcagccggtcttcctcaccgacggcgcgtgggagatcgctgcgctcaagcacgtggatgcgcggcgcaggtgggcgtactttgtagccgcacgcccggcgcccgcgctgcgcaatgcgtactatgtcgagctgccggactggcaggcttcggcatcgtcgcgcacgccggcgacctacacgctcaaagagcccgtgccgctcacggatgtgtccaagcccggctcgtacgacgtgcgcttcgaccccaagggtgcgtactacgtgctcgactaccaaggccccgacgttccgtaccagaaggtggtgggagtggacgatgcgtcattcgagctgatgctcgaggagaacgtgctgctgcgccagatgtcgagccagtacgtcaagccgagcagcacgttctaccagctcgtgctcaacagcacgctggcggatggcagccgcgcggtggcgagtgtgcaggagatccggccgcatgactttgatgcgtctggcgcaacaaagtaccccgtgctggtgcgcgtgtatggcgggccggactcgcagctcgtggatgcgcggtgggcgcgtgctgactggcaccagtacgtcgcctctacactgggctacattgtggtcgttgtcgatgcacgcggcactggcttccgcgggcaggcgtaccgtgccactgttgcgggaaagctgggtgatgccgaggcgcacgatgtcaacgaggctgctgcagccatcgccacgctgccgtacgtcgacgaaaagcgggtgggcgtatggggctggtcttacggcggctacctgacggccaagagtgtcgagctggaccaaaaggtgttttcgctcgccgtgtcggtggcgccggtgacgagctgggcgttctacgactcggtgtacacggagcgctacatgaaatcgccgcacaccaaccgcaaaggctacgacgcctcggcggtacacgtcaacagcgcatttggcaagaccaagtacctgctcatgcagggctcggcagacgacaacgtgcatttcagcaattcggcgcatctgttggacatgctcaccaaggccaagctccgcggcttccgcttcaggatgttcaccgatagcgcacacagcatcagcgtgcgcggagcgtaccgagagctgtttgaggagatgaccagctttatcgccgagctgtggggcgctggtgggcgcagggagcccaagggcgcaaaggccaagaaccgacccgcactgcacaattcagtggagcgccgggcgtagacatttgtccccacatgtattgccgaatggacagatgctttgccattgat

SEQ ID NO: 12842 - DNA, 2818 bp, Oryza sativa
  ref <308>: DATABASE ACCESSION NUMBER: AK110190
  ref <309>: DATABASE ENTRY DATE: 2001-12-06
aggccttctcgcccttctcgctttgttgttctccgccatcgtgactttcatcgtccacgtcattcaccgtttgatcaggacgcaacaatgtcaaagttcgcttctacctcttcgccatcgttggctgcggcagccagccgggcgagccgggccagactggcagcaagctcgacacggccagctgctcctacgccgctgctacaccaacgcaccacgatgcgctccccgcgctcgtctcacgcggcagcatcgagcgcctcctcgcgcccagtgctgcatttatccaacacactcttccagcaatcggctactcccaaccgcacgtttgcctcagccgcctcggacacgctcgactcggacattgtcatcgtcggcgctggcgtcgtaggcctcggtctcgcctgcgacctcgttgcctcgggcgccgtcggcgacccagccgcacacgcggctgcacccatcaccatcatcgaggcctccgacctcgcgcgcctgcgcagctggaccgccgaccgcgccgcctatctcgcctcgcacccgtccacctcctcctcctctgacacactcgactgggagaaccgcgtgatctcgctcaccgccgacaacctcgcgtggctgcgccgcatcggcgtatatccctacctcgtcgagcaccgtctgcggcccgtctcggccatgcgtgtctgggacggtctctcgggcgctctgctcgactttgactcggccgacctcgagcccggcgccgcatcccagatcagcgcaatggtcgagatcagtaacctccaacaggccatgttgcgcttcctcgagcaagggccgggtaaggatgctgtcagcgtccaggacggcgtcaaggtcgacgcgattctgccggggtccaaggtggaggcgggcagtgcggtgggggagaaggacccgtggcccgtggtggggctgtcgagcggggagagtgtccgggccaggctgttggtgggtgccgacgggcccaactcgcccgtgcgcaggtacgccggcatcggcgactacggctgggcgtacaaccgcaagggccttgtgggcacactgcgctgccacggcgccgaggctggagagccacctgtgggctacacggcataccagaggttcctgcctagcggaacgatcgcattcctgccgctgtccgactcgaccgcatccatggtgtggacactcgaaccgcaggtggctgcggtactcaccatgctccaccgcgacacggccgggtcgtcacacgaaccgctggcacggctggtggatgcagcattccgtctgccgtgggcgcacatcgagcggctgttcgagcgtgtcgtggcgtacaccacccacccactgcccgagggcattggcagggactggagctggttgtccgccgggatcccggacgaagcacagtgggtcgagcgcgcgcttggcgagccactcgtcgaaagctccaccggcgacgtaccgcccaagatcgcctcgctcgatgccaagagcgtcgcgagcttcccgctcaacctcaagcacgccgatgcgtacctcggcgcctcgctcaatggcgcatctctgctgccctcgggtctgctcgccggcgcgatggctgctgtcggacttgcaccccagggcgctggccaaggggcggggcgcggccgaacggtgctggtgggtgacgcggcgcatacgatccacccgctggcgggacaggggctcaacctgggtatcgccgatgtccgatcgctctccgccaccctgcgcagcgcgatgcagtcgggtcaggatgtgggatcgtacaatgcgctcaagccgtatgcgagggagcggtactgggagaaccagaagatgctctcggctgtagaccatctgcactggctgtatgccggtgtgcccgtgccgcttgcgcagcaggccgatggcggtagacgccagcgcagcgtcgacgggctcgtcaagagcgctgccaaggaggtggtcggtcgcggcgtcgtgtgggcgagatccacgggcctcgaggtgatcaatgagctcggattcgtgaagaatgcgtttatgcgacaggccggatcgactaggcagacacgaagcctgcactcgtcgcaccgtccacgagccgttgccaggcaggcggtgcaggtccgcatgcattcttcgagtaccaccggtccgttggcgtcggacgcgtataccggggtatcgaacggcgatgcagccacgacctctacgccgtcacttgcgtcgctgacgccatcgcagcggcgtgcgctgcaggatatgctgcgcgtcgaccactcgggcgagatcgcggcgaatacgatctaccaaggccaggcggatatgtttggggcgctgggcgaccgagcgaaccgcgatatggcggtggaaatgtggaagacggagaaaaagcacctcgacgtcatgcgcgtcttgctacgacagcacaatgtgcgcccgtccttactacttcctctgtggagcgttgcggggcgggtgctgggtggtgcaaccgcgctgctggggcctcgtagtgccatggcacgcaccgaggctgtcgaaagcgtgatcggcgagcattacgacgatcagctcaaggagctcgcgacgatcctcgagcaggaggaaaaggcgcatccatcgctgccgttgctgtcggacatcatcagggagttcagggacgacgagttggagcacctcgatactgccgtggagcacgagtcgcagcaggccgcgggtcatgcgttgttgtcggctgttattgccgccggctgccgaggcgcgatttgggttgcctcgcgtgtgtgagcaatgcaaacagcgtcgccac

SEQ ID NO: 12843 - DNA, 4067 bp, Oryza sativa
  ref <308>: DATABASE ACCESSION NUMBER: AK110191
  ref <309>: DATABASE ENTRY DATE: 2001-12-06
actaccatcagcacccgcattcgcacccgcatctgcgaccatgttcaccacaccgtctcgagcgagggatgcgcgctcgtcgacgccgctagcaggcgccgcacgctcgggcaaccgaccctcgcgtgcaggtacaccggtgtttggatcgcacgatcccatctccccgccctcgttcctctcgccatccaccttccgccgcgacgacaacacgcacaacgacgccggcgacgtctcggccagctcgctcttcctcaatggcgcaaggacgcgcacttcgcgcgcacgcccacgcccatcgtcgatgctcgccgccagcgcaggtcctagcgcctcgctgctcagcccaagcgccgcgttcgatcgagaggggtctgtggtcagcgaagacgcagagatgcggtcggttgcggacactgtccactctgcttctcacgccggctacaatcgtcgccctgcgcccgcaccaaaggatgcaaaggcgcagctcgacgagggcaccgtgctcctcggcgatcagtggctccacgtctcggcctactcgcgcctgcccaccgaggtgcttgaactgctggccgaggcggatatgtacattgatgcttttcagggccacctcgacgttcacaccggatacgcatgcctgctctcgcgcacccagtgcttcgtgtggaactacgccagccgcggcatcggcaccggctcgcccacctgctttgtcttccccgtgcctcagtacgcatcctcaagcatgtcggcgatcaacgacctgtcgcacgcgtgcttcctgccgcgcggcgggtccgagcgcgaacccgctctgctgctcgtcacgcccgacggtcaaacgtgcctgtgggaaggcatttcgtcgtcgctcacacgccaggatcgcgcacagcgcatcgccgcaccgctctcgtcgggcgaggcaatcgtcaagctgcagcgtatcgacgagtcgaccgtcgtgctcgccacgagtgcgtcgcgcctgcttcgcgtctcggtcggcagcagagcgggcatcctccaggccgaggtgaggccattctcccaaccgcgcggtctgctcggtcgcatctttggctcgagctccgccatgggctcggccaacgaccacatccaggccatcgccgtagcgcccgcccaggcgtccaagcagggccgcgaggtgtatgcgatcggccgcaagacgctccaaaagtggcacgtgctcgaccagggtggcgaacgcctgctcgccgagcaggacgtgcagcaggtcgtcgccagcagcgtgctccagctcaacgacgagcggtacagcgccgcacagagtctggcgttcgatctcctcgacggcgccgtccaggccgatgggaaactcgtgctgctcttctcccagtccaagaccgagcacgagccgctgcagtacggtcttgccgcactcgacgtcgtcaaagacgcggcgtcgttcgtcgttgcggcgatccagcccatcaagtacaccagctacgcggatcccaggccgtacgcaaccccctcactcagcctgcccaacggtgggcctgctgcgttcgtcacgttcgcggatgccgtcgtggccaagcagctcgaaaacggatgcgagtcgttcgaggaactcatcaagctcaaggacgacgtcaagaatagattcatcggctcgggctgcgacaccgtccatgtcggtgccaacaatgccgtggctgcactctcgctcatctcggccgcgtcgggctcgctgctggtcgagacgagcatcgacgcgatccgcaagcgctgcaccgcatccgcagctgcagcggaccgtcagcgtgcagacaccgagcgtctcaagggcaagctcgagcaggcactctactactccgagtcgccgctcaaccctctcaccttccgcctgcccgaacatcttcagggcacgctcatgaccgcgtgccaggacctcagccgcgagctgctcacattctccaaccccattgcgcagagcgtgccgccgcccgtcgacctgcgtgctgcgctcaaggaccggctgggcaagctgcgctttctggtggaattcgtggcgagatgcggccacctggagaagctgccgcagacgaccaagcgccagctgcgcgcggacgccgagctggctgcggcgctcgcagagctgtgggtgtatcagaacgagttctactcggcctcgcacgcgcaggcttcggcggcacagagcccgctggcgcgtgcgatcgagacggtcatggccgagcaggggctcggcgtcggcagcgacgatgtggtgcgccgcttctttaggcaccatgcggacctgagcccgcgcgtgctggaccggctgctgcgccaggcgagcacggtgtcggcgcagccgctgcgcacgcgctcgaccgacgtgctcgagctcaaccgcaccgtgctcgctgcgttccgcgccgctctgcgataccgcaaggagcacggccgactgtacggcatcgacgccaacaaggacgcggctttcgaagcgtggaccgcccagagcggcaacgtgcagctgctcgagacgctctattcgatcagcgtcaacctcatcccggaccgcacgcgcgagctgggctcgagcatcgatgtggcgcccaccgagtactcgggcgcgggcgacgaggtgaagcgcgagcagcgcgtgcaggccgagctcaaggcgcagctgtgtacgctcgctgacgtcgccatggcgtgctacgaggagcgtctgcgctatctgcaggcggcggcggcggcggatgcggcgtacgagcgcgagctgagcgtgtttggcgctacgctgcgctctgcgcggccgctgttcattcgaccgctggtggggatcggtcggtcggaccgggcgtttgcgctcgccgagcagtacgaggacttcggcacgctggtggagctttgcaacgaggcgcagctgcgctcgcccgcgcgcctcgactcgtacctcgagcgctacaagcagccgtttgcgttcgagctgtatgcgtactacctcgcgcacggccagccgcgcgtgctgcttgagcagaagagcgagcatgcgcagctcgtgctcgacttcctcgcgcagcccgggcacgagcgcatcgcgtggctgcacgaccttgcgctgcagcgttacggcgaggcagcccacacgctcgagcgtctcgcactgggcgagggtgtgcttgcgcagaggaggctcatgatgagcctgggcaagctcggcgtgctctcgacgctcgcgctgcaggacctgcagacggtgggaacgcaaaagcagatcgagttcttcgacgaccagctcgacctcatcgccgtgcaggacagtctggcgacgctgtgggagaatgcgctgggcgggcttcccgccgatctacccgcagctggcagtgcgcaggcacgtgagcttgcgaccgagatcgtcgatgccgtagcaacgaggctgcgagagtacccggggtaccgggagcactatgtggagctggtgcagaggctgttgttcgagaaccgctacctgggctcggaggatcttgtggatgtcttgacgctcaaggacacgcccgagaaccagctcgaggactttgccacggcgctcaaggttctagttcgcgccaaggatgcaccggagccgcggctgcgcgaggcgctcaaggcggtgtggcgccgcgcagtggtgcgcgacgactggttcgcgctgtccgagaccaccaatgtttcggaccagaccgtgcttgccgacctgcaagctacggcgttgtatgcggtgctgggcgaggtgcttgcggacgatgcgaatcggtcggcgtatctggatgtgcacgagctcgtgggcgatggcgaagatgcaaaggcgctcgtggcggctaggatggcagataagggcgatgtggaggttgacgctgtctggcacgatcgacagaaggagcaggcgaccgtagcggcgttcttggacgactcggatctgccccgcctcgcggtggaactggcgcgcatcgccgcaggtcatgacacggccgacgtcgaggatagcatggccctcgagtagaagcaatgaagctgtgtacaatgtg

SEQ ID NO: 12844 - DNA, 3034 bp, Oryza sativa
  ref <308>: DATABASE ACCESSION NUMBER: AK110192
  ref <309>: DATABASE ENTRY DATE: 2001-12-06
accacctcctcgctcaccgtatcgatcggtgcctacgtgtttcggtctgcattcctcgtcctcactcttgtccgttccttcaccggctctatattctctgctttcccggctcgactctgggcccattgatccccgcccgaaggcatcacaccgagccactttcattcgtgtacacacgggccctgagccctcatcgccggctcatttcaccgcgtccaatccagctcgcatcgttccaaagctttccagcacgctgctcgtcccgttgatcgcagcctgcctcactcccagccatggtcaaccccaggagccccggctcgctttcgcgaaagattcgcatcaccgttgttgccgccgatggactggccaagcgtgatgtcttccgtcttcccgatcctttcgccatcgtcaccgtcgacggggagcagacacactccacgtccgtcatcaaaaagacgctcaacccttactggaacgacagcttcgatgtcaccgtcaccgactcctccgtcatcgccgtccagatcttcgaccagaagaagttcaagaagcgcgaccagggcttcttgggcgtgatcaacatccgcgtcgccgacgttctcgacctcgaacttggcggaaagcgtctgctcaacaaggagctcaaaaagtccaacgacaatctggtcgtgcacggcaagctcatcatcgacctcaacaccaacgtctccacccccatcaacaacaactccaccgccggccccaccaacctcctcgtgcccggcacatccaacgcctcctccgcctcgctcgccactccctcctccaccggcgctgctcgctccgatgcccgcccctcgacctccggtagcggcaccaccacacccgttgccgcatcggccgcgaacggagacgtcgccagtcgaccagcatcgacggccgatggcgtgtcgccctctaccagtgccactgccgccgcccccaccgccgcctcgagcacagctgcccctgcttcgtcgggccctgcttcggacgccagatcatccgccgccccagcatcctcggcagcgcgcccagcaggctcgcaagatgcgcgatccgacgagtatggtcctctgcccactggctgggagcgcaggaccgaccatctcggccgcacctactatgtcgatcacaacacgcgctccaccacctggacccgcccttccaccagctccagcgccaacacggccgccgccgccagcaccaccgctgccgatcgtcagaggcacagcaaccgagccttggccgacgacttcctcggcgtcagcgatggcgatacctcccgctcctcggcgactggctcggccatcgcgagccctggcgctgccgccgccgccaactcgctccctgccagctcgagcaccacggctggcaacggcccgcttcccgccggctgggaacagcgtcacactcccgaaggccgaccctactttgtggatcacaacacccgaaccaccacctgggtcgacccgcgacgacagcagattctccgaatcatgggccccaacggcagcaacctcaccgtgcagccccagagcgtctcgcagctcggcccgctgcccagcggctgggagatgcgtctcacctcgactgcacgcgtctactttgtggaccacaacaccaagaccaccacctgggacgacccgcgactgccttcgagtctcgaccagaacgtgcctcagtacaagcgcgacttccgtcgcaagctcatctacttccgcagccagcctgcgctccgtccgatccctggccagtgccacatcaaggtgcgccgcacgcacatcttcgaggactcgtacgccgagaccatgcgtcagcagcccaacgacctcaagaagcgtctcatgatcaagttcgacggcgaggacggtctcgactacggcggtctgtcgcgagagttcttcttcctgctgccgcacgagatgttcaaccccttctactgcctcttcgagtacagcgcgcacgacaactacacgctgcagatcaacccgcactcgggcatcaacccggagcatctcaactacttcaagttcatcggccgcgtgctcggcctcgccatcttccaccgacgcttcctcgacgcctacttcatcgtgtcgttctacaagatgatcctcaagaagaagatcacgctgagcgatctcgagtcggtggatgccgactaccaccgttcgcttcagtggatgctcgacaacagcatcgagggtatcgtcgaagagaccttcaccgcggtcgaggacaagtttggcgagatggtcaccatcgagctcaagaagggcggagaggaggtcgaggtgacggacgagaacaagaaggagtacgtcgagctcatgaccgagtggcgcatcagcaagcgcgtcgaggagcagttcaaggcgttcatcagcggcttcaccgagctgattccgcaggatctgatcaacgtgtttggcgagcgcgagctcgagctgctcatcggcggcatgtcggagatcgatgtggacgactggaagaagttcaccgactaccgtggcttcaccgagcaggaccaagtggtgcagtggttctggcagtgcgtgcgcgcatggcccacggagaagaagtcgcgtctgttgcagttcgccacgggcacatccaggattcccgtgaacggcttcaaggatctgcagggatcggatggaccgaggcgcttcacgatcgaaaagtcgggcgatgtgaaccagctgcccaagtcgcatacgtgcttcaaccgcatcgacctgccgccctacccgtcgtttgagacgctcgagagcaagcttgcgctcgccatcgaggagggcatgggcttcggaaacgagtgatacccccgcgcggatcccactgctgctcgttcaacgtgtcgtggactcttttcgcttcttgattcaaccctttcttttaggttctggctcacgcagcctctcattgatagctatgcacgcatcctttttctttcacacaatctcttttgtaccattcctcacctttgcaagttagtcttgattgtctcttg

SEQ ID NO: 12845 - DNA, 3223 bp, Oryza sativa
  ref <308>: DATABASE ACCESSION NUMBER: AK110193
  ref <309>: DATABASE ENTRY DATE: 2001-12-06
cgcaagcaagctcgcacgccgccacaatcggcgaacacgacgcaacaaccagcgtctatggccacgtacgccccaccagcatcggcagctccatctttgccggccgcggcgcgaaatccgaacgcaggcgcagagaggctcctccacccctccctaccctgccactctccgctcagcatcagcatgccaacctcgcctttggagcagacgccgccggccggctcagcccatccgcacagagcatgctcacgcctcggagcgatgcaagtggcttcgaagacaccagccagtacagccccagcgtccatcaagacccctttgaagctgacgagctttctcacggattcgacctgcagaatggccataagcgcacccgcgccccgcagccagccgctcagaacggccatgcagaagacccaaccgcgacacagccagtgcctaaccgtgcctcttcacgcgcgccgccgcccctccctgtcaaggcggcctcgagaagcagcaacgaatcgctccatcgcgaccactccacctcggcagacctcacgctgaccgacggaacgcttgcacttcccaaacgcagtccagccagactcgccgatggcacgctcgtgcccaagatgcccccggtcccgcacaccagcgacttgatgcagccccgcaaggccaaagcgcgtcgtgaccgctcgcccatcctctcgttcgacggtggcgccgcagaggaggaaaagatgctcgtcgagctccaagacaggctcgccaacgacgtccgtcgcatcagcacgcttgggcccaaggtcaagaagaacgctccggctccctgggagcttggcggtgacgatgcagtcactgcagcaggacgaccgtcgctgcgtgaaacgctccgcccgagtgccgagacgttcgagaagcccttctcccggttcaagaccagaccctcggtagatcatgcccactccggaggtcgaagcccaaacacggcccactctccttctgcccttgcccacagcacgagcaatgccgactcgctcgaacaggaggccaagaaggaagatgacgctcagtcgctcttcgccacccagcgctcgcgctccaagagcgtttcgagcagcgccgtcggcatgctcaaaggcctcggtctcgctgcggctgccgcgcccgcctccaaaaagggcaagctcacaaaggcgttgcgcctcgtcggtggaggaggctcttctgccaacgacgagcgtcgccctgcctatcccggctcgggcccgttctcggagcacccagcgggcgccaacgtcaatgcctctggtgctcagcacgcatcttcgctgggcttcgccaagccgcaggcgcttggcgaattgccgcacagtcgctcgtccaggaccatcaacagcaacggccccagcgcagtgcccagcaaaagcaccgctgatctcgccaacatcatcatgtcggccaacgcaaagtaccgagaccaggcatcttctccacccatcccctctcccaagcatgccaacggaactctgccttccccgctgttgggcggcgcccgctcgttgggatacaagaaagacaccctgagtccgatcccgggcaattcgttcttgaccgagcatcgtcgtggctcgggctctctggagcagaccaggtcgcgcacgccgccatcgcgcgacgcgagttcaaggcagccgtctgaggcgaacagcgacgtggtcatggcgcgcaacagcagcatcgagagcgaaggcgcattcgcttcgaccgtacccgagggagagtcgactccagtcggcaaagcggcggcagcagaggcgtttgcggctcgcggcgcaccgggctcgcctgtgggccccaacggcggagtgctttctgcttcgtctagccagaccttggggagcctgccactgccaggcaacatcgaaggcgtgccgtacaagctcatttcgctcgaacaggcccgcgagcaggcgaggcaaaagcagtccgagtggctcgcatcgtctggcgcggtaggagcgggcaggaatgcggccgagtccatccacgacgagcacgcaatgtacagagatccctcgagcgacggacagaccaactcgcgcatcctcaagaacaaggagagcggctccctcatgcgcaagctcaagaaggagaagggcgtgagcatcgacctcgacggcgtttcgaccttccctcctagcggcagcagcagggatttgaatgcatctgccaagtcacccatgccgtccttctccgtgactgggctggacgaggagaacgatgcgctcgggccgctgggtctgagcgaaaagccggcgctccagatccgacctgtctcgtccatgctctcgggctttgccgccgacttcctcgacgcctcggcgctctccgagggacatctgcgcgaggcgtccaacggctcgtcgaccagctcaaccggactgctggcgccgcacagcccggcgccttcttcgttccgaacgccgtcgcccgtgctctctgattcgggtcgattcgcgccctcctcgacgtcgcacaagccgcagctcgctgacatccgaccgccaccgcacggcgccaagctgcccgggccggcggtgcccggatcggcggacagcacctggagcggcaacggcggcgcctcgggcgcgagtcgactgccgagtctggatgctggaggcagcgtgtcggacacgcagtcgcagttccactcgcctgccacgtcgccgctcacgccgtcgttccaccactctgtgcacccgccgagctcgaacgcggcgacgacgccgttgctcggatcgagcgaggctgagacggcgctgtcggcgcccgccagcccgcagatccccgaggaggtgcgccagcgcgcgcgcgagatcgaggcgcagatccaggagctcagcaacgagctgcacgagctgcgcgtcaagcatgtcggccacggcactgcgcccgtcttccggcccagcgaggcggccgacggcgagcgcaaggagcattgtgctgtgggcgcgtgtccgtcgtgcggctgcgggtgtgctgagcagaggaggctgcagagcatcaacgaagcggcggtgctcaagggcatcagcgtgctcgatcgcggccgtgcgctcaagccgagccagaacatgggcaacacgggcaagtttggcggatacaccaaccgctgatcgcacatctttgcgtcgtagagttccactcgaaatacccagatcgatacccaggc

SEQ ID NO: 12846 - DNA, 3479 bp, Oryza sativa
  ref <308>: DATABASE ACCESSION NUMBER: AK110194
  ref <309>: DATABASE ENTRY DATE: 2001-12-06
ctttttcttccttctcctcctttccccccctctctccatgacccttgctccctcgcccagcgctgcatctcgtccccatcccctcgcctgcctgggtccgctcactgccctttgcctgtgccaaagggtctagtcggccagacccagttcccgcgcttcttcttgctcttgctttggctcgccctcgctccctctgaggaatgatcctcctgcctgccacggccttctagcgatccgcgctgcgtcgtaagccacacacacacacaccagacccttggacgccccttcttcccaagcaacctcgcacatcctctttcgtcatcgcctcttcgtccagccttccggcctccgagctcgctcttgacgacccgcatccatcccacccacgcgaacccttatcgaccagcgtgacctcattccacctgcaccctgccactcgttgctcgacaccgctcatagccagtaacagacgccggccatctgcgcgtgccctgcctcccaagacgccgtacagcacagcgcctgcatcttctcaagtcgcctgctcgctgtcgccgtcgtcaccgcgcctagctccgaaccgtgagacgctgctattgttagccagctcgcgaccgtccgcaagaccacacccaggttgtcgattgctgctgcattctgccttcccgcgtgcggcctcacccattgtcaaccgccctacgctcatcgcacattgttcggggctcatcgctcctcctctccctccatcatcatctatacgttaccgctagcaccagcacgctccaccagcgatacatcttatcgacaacgtacagcatacaactcgcactcttgctcgccatcatcagcttatctgcagctttcgtctaaacccccgtcactgctgcttttctcgacaaccttggatctcgaccatcctcgcctctcttcacctggaagttacatgtcaacttaggccatcgagtccacccatcgacaccaaccgttactcggcttagacgctcatcctcggatccagccctagtcgcgtacacttcagctcaccacccgtcgcaacagtcaatcgagcgactcctcctgtcagatacacgatctctcgcaccgcgacgagaagacaggtcttgctttccgtgtctcgttccgtagcagtccagcttccgctctcgctgtctacctccgtgccacctttctcggcacccttcgtcttcgagcttgctccgcactctcgcgtttgcttcgttcgtctcactcctttatgggatcgttctccctaccttccgctggaggcgtcgtttctttgctcaacgaccgtgctccgtccgcgatcaaacccgagcagacccatccgtcgttctcggaccatcacgatccgcgttatcatccctccccctcgattatgtcccattcggcattcgattccacctcctcgtctaccgaatcgctcttacgcagtggcgaccgctccactgcctccacctccccacccacctcgctcgactactcgtacgactcgcgtgcccacaggcacaaggcgtacgcagaacccgtaaggctcccgcgcatcgaagtgcccggcgaattcagcgacccgcttcccccacgtggactgcaggggcacaaggtgctccgcggcaaccacatctcgtcgtcgccccaggcgattggcatgcgcccgggcgagccgctgcctccctcggccaccggcgtctttccccccggacagtgggaccgatcgggcgcctacctcgatcccaacgactacagcaggcgctcgtctagctcgagctcggacagcacctacccctacgaccgcagcatgccctacggcgacgccgccgctcacgcaggcatgccaaagcgaacctccaaggatggtggctccggtgccatcaccatcggcggcacgaagcgatacccttgccagcacccgggctgcgacaagaccttctccaccagcggccatgccgcccgccacaaccgcatccacaccggtcagaagccctaccgctgcaccttccccggctgcaaggcgcgcttctcgcgccaggacaacagcctccagcactaccgcacccacatcctccatcccaagggccgcgccagccagtcggcccaggcacgcgatgccgccgcccagctcgaactcgaccacctcgaccttgacgccgccgacgccgaagccgaggccaaggccgagctcggcaggcgcgcgctcgaggacggcaccgccatcgccgtcgtgcacgaagtcaaggaccagcacggccgcaagaagggcgagaccatcgaacgcatggtcggcatgccgcgctcgcgccgcgaatcgctgcgtggcctcgacgacgatgcgcgctccgcctcgccctcgtcgatggacgagcgcgtcaagcgcgaggcgagtctgcccggcgggcccggcttgccgctggatgccgccgcgtacgaagcgcccaacgactactggtctgcccagatggtcaagcagggccgactgagcttgccgcatcaagcagcagcgtacgacccgaggtaccgcgagacggtaccgccggctccttacggccgcgagatgaatggcgcgtacggtggtgcgcctccgccgccgcctccggcgtggagccagagccagcctgcgtatctggacccgcgctttgcgcctggctatgcgcgcaccggcgtgtccgtgagcccgcaccgccgcgacgtgtacgatccggcgccgcgcatcggatcggcgtcgctcgacccggaactcgccggtgcggtgggcaggcccgacgagaggcagtacgactcgcccgccgagtaccatcgccgcagcgtttcgacgagcagcagccgtggcggaggcgtatcatcgctgccgccgccgctgccggcatcgcgccccagcgcggcggcacatgcagcctcggcgcccgtctcggtggtgccgtcggcgcgctcgtcgcagagccccaagtcgagcccgacctcgagcgcctactcggtgcctgaaggcattgctgcatcggcgctggacaagcttgcgggtgccgccactgcgccagcagcaggtgctggcctcggcgctcggggcaggctgatggcgcctgcgtcggccggctaccagcatccgtacagctcggatcgttcgaccaactacggcggcgcgttgccgcccatctcttcggcgcgcgaccgcggcgcggacgacgagctggaccgcaaaacgtcgagcctcaggagcggcctcgctgccgatcccaaaaacacgctgcccccgctcaacccgccggcgaggcgatggtgaaggcgcaggtcggctgccccaaggatttgtttttttggtgtcacatgtaccgagtagcgatgtaatggttctccttcccctcccgctttcttttccctcctttctcgagatcgctttccttcgtagcctcgcccgggatcgctgttgtatgtcgattctagtgtcgcaatatcgtgtatacgctagg

SEQ ID NO: 12847 - DNA, 3598 bp, Oryza sativa
  ref <308>: DATABASE ACCESSION NUMBER: AK110195
  ref <309>: DATABASE ENTRY DATE: 2001-12-06
ctccatcatctctaccctcttctgtcatctacctttgaagcgcgtcgaagcacgtcgctctgctgaagagagcattcggtggcgtcgctctaagccgctgttctctgctcgaaacgacacggtgccgcattcttcccttgctgatccgaccagcatatccacgggttcatccaggcagcccagcacacacaccgtcttctcgatcgacgcaagctcgatatggagccattctaagtgcacagcccgcctccatccttctctctcaaacagcctcgttccgacatcttcagcgtccacggcagacgcttggcggcgctagtgttcaccctgcccgcagcctccgattccgagcggacgagtgcctaccatccaaactcaacacctttctcacactccaagcgtatacccagtcatgagcagggcccctcctctgatgccgagctcgtccggctcgcatagctactcgtcgcccaagcttggcgctgcagccatctatagcaccagctcccctaccggctcgccgcggccgtactttgcgcagcatctgcccggcactctttcgccgtaccgcgatgcatcctcgcgctatgctcatctcggtagcccacgcatcagctcgctcagccgcgatgccaccgcagccttgaaggcgagcagctaccccacatcatcttctcgacccacatctcccacccccggctcgcggtcaccatcgcccagcagcgacagcggtgcctctgatgcctctgtctctcgcgagtctcttgcacccggccaacaccatcaccacgactcgcgcgaacacgcacatccgccgctcagcaggcacgactcgtccgggcgtggcgactcgcaatttgcgcgacacgatggtcacgacgaacctggcacttccgcatcggccaaaggggcgtccgccgatcctcccaacagcctcaggcgtgcacatcagctgcagccaatagataccaaaaacgctgccacccgacgaacatccgccggtgagcctctgagcgccagttcgccgcgcatcggcgaggcatacgtcaacagccccaaacgcgatccacttcgcgacggctatcgtgccacaccaccctcatctgcatggaggcattccggctcttatagcggacgcgacggctcgccatggtacaccgatgcgcgctcttcgccttttgcctcttcggccgcacgcgactacgccaccctcgagctcgaatcgagcctaggtgcgccaacacatcccgccggtgacccctcgatgcactacggcgacaccagcaacgccgacaacgtcgtcgcgctcctccacgccgctgcagccgcagacgaagccaacaagcacgcggatcgctccaacgagaaccggttcccttcgccgagcgcgttttaccagcagggcatgcctacatacggtatccctccgtattcggccgcctaccgatccagctcgtccggtctcagcttcaccaattcgcccaatctcggctttgcacgaccctaccgcggcgtcgacggctccatggatgccccctcgccctacggtcaggcagccgccaccgtccagccctcggcaaccgcatcctcggcgcaagacgaagacgtcaagacgcagatcaagaccgagcccgcaacagccgaggttgacccccagcctgccgccaaaaagccacgcgcacgcggtcgcaagaagagcgtcgtcaaggtcgagaacgacgaggcgtcggcgagcgtctcgacatccaacgcaccaacggcgctggacagcgtcgtctcggccgcgctggctgcttcggaggcccccgccgcctatgctagcactgcttttgcgccatacggatatcccgactacagcgccaccgccatgcctgccactgccttctccgccaatcctctggtctcgctggccgcgcaggtgagcggagccctcgccgcgcctgccactacatcgcaggctctcgtctcgtccgagccaactgcccaagccgcgcctccagcagccaaggctggctcggcaacctctgccgcctcgcctacttcgcctggaaagagcaagaccgagagcgacgcgggtggacccaaattgcacgagtgcgagacatgcggcaagtccttcagccgaaggtcggatcttgcacgacaccgccgcattcacactggcgagcgtccttacccgtgcgactatccgggctgcggaaagagcttcatccagcgatccgcactcaccgtccactcgcgcgtccactcgggcgagcgtccgcacaagtgcgagtttgaaggatgcgacaagagtttctcggacagcagctcgctcgcacgacatcgccgaacgcacacgggaaggcgaccgtacgtctgcgactttcccaaatgcggcaagatgttcacgcgtcgcaccacgctcaaccgccactcgcgatgtcaccagcccggctacgtcaagcccaagagccgcggcaagggtcgcggcaagggaaagaagtcgggcgccgaaggcgatgccaatgcgggcgacgacgacgatgacgatgatgaggacgacgacgacgaagatgacgaggacgaagacagcgaggacgatgaggaggatgaggattcggaggccgagtctggctccggatccgagccagccgagtcggtcacgccgcccgaaacctctgcgcaagtggccaagggcgccaagcgtgctgcacctgggcgtggacgcaagaattcaaacgccaaaaaggccaacactggcaacgccgccggtgtggtcaaccgcatgaaccgctcggcgagcgacgcggaggctgccatgacgctggctcaggccgcattgcaggcacagttcaatccctattacgccgagcagattaacgctcctggcacagatgcaccttcgtccaacgcaaccagcagcatgccctggtcctatcccatgtcggctcaggacggaacggcggcactgctcgccgcgagcaaccactcgagcttctcgccgggcatgggctcgaacgactcgaacgaggcgatggaggctgccgctgccgtcctcggcggctttgccaactcaccaagcgccacgagcaacggcgccgatgcggcacacgcgagttcgctctcggaagcacagctgctgctcgacgccgccatgagccccgtgtcgaagcacgccaccattccgggtacttcggatgccaacaagggcgccgccgcgcgcggtcgtggtcgtggacgcggtcgtggagctcaagctggcggtcgaagcagccgtcctagcaacctgtcgaccgccacaggcgcagagtcgtccgaagcggcgtcggatgagacgcccgctgccgagccgtcgtcctgattgcccttcacctccttctccctcttgtcatcttcgggcctctttctccaattcccttgtattcttcccgtaacgctttcctcgcaactgtccctcgacctccttaactctccctcacgcgtcttgtgttcaagacggtgtacttgtacctgcccttcccccacttttcttactgtttgttcttctcatcgcacgaatgtctgtcctttccgctgttgtggatcgggtcaggcctgtaatccatagattcgattg

SEQ ID NO: 12848 - DNA, 3070 bp, Oryza sativa
  ref <308>: DATABASE ACCESSION NUMBER: AK110196
  ref <309>: DATABASE ENTRY DATE: 2001-12-06
cgcgtcgcgaggattttcagaggccaacccaaccaaacaaacaacctccaaaaaccatcccccgggattatctccgcgatctcctcttctcccccgccgccgctgctttgcggttgcacccgcccatgtccgcgccgccgccgccgccgcctaatgctagcactcctgctcctgcaccgccgttgcctccgtctcttggtgcacccgacccgccgccaccaccaccacctgtgatgccatctcgtccgccgccggctgctccgcctccctcgccaccggcagcgtctcctcctcctcctcctgctccaccggtggcgccgcggccaactccgtcgcctcctcctcctccaccggtgatgccgtcgaagccagtgaaacctgtaccgccttcgtcgcctcctcctcctccggtgatgcagccgccgtcgccatctccaccactaataccgccgccgccgccgcctactccggtgatgccggtgctaccaccgacgccgtccccgccttcaccggtgaatccaccaccgccatcgccgtccccgccgccttctccggtgaacccactgccgccaataacgtcaccaccttccccggtgtcaccaccttctccggcaaatccactgccgcctgcgacgtcaccaccttctccggcgaacccactgccgcctgcgacgtcaccaccttctccggcgaatccactgccgccgacgacgtcacctccttctccagcgccgcctccaacggtgccttcccaaccaccggaggctgcaccggcgccgacgacgaagccaccaccaaccccgctcccaccagctcgatcgccgccagcgccatctccagcttcccgcgaaccgtctccctcgccgtcgccgtcagtagcaccaccgtctcttccaatcttcaccccgtcaccccccggtggtggccgcggcgccgccactccttcgccgccgtcgtcgcggccgtcgcctagatctccgccgccgccgtcctccgccccgcaaggagtgatgatcgccatcgtcgcggccatcgtggcgttgctcgtgctcggcgcagtcgccgccgggctgctgtgcttctgctcgcgccgccgtcgccgccgccgccgccgccaaccaacatcgccgggtgatttcctcggacccttaccggtgacatcgcgtcatcaccagcaatcacaattcatcaagccaacagtaacatacccaccacagctgaatgcacactcgccgctgcaaagcagcagcaactccgacccaccgtcaccgctgctgcaaccgtctccacctccaccggcggcgagcggcggcacggtgtcgtacggtgacctggtggcggcgacgaacggcttctccgagggcaacctgctcggggagggcgggttcgggcacgtgtaccgcggcgagctgctcctgcacgacggccggaggcagccggtggccatcaagaagctccggccggggagccggcagggcgagcgcgagttccgcgccgaggtggacatcatcagccgcatccaccaccgcaacctcgtctccctcgtgggctactgcatccacgccgaccaccgcctcctcgtctacgagttcgtccccaacaagacgctggacttccgcctccacgggagcagccggccgacgctggattggccacagaggtggatgatcgccgtcgggtcggccaaggggttggcctacctgcacgaagactgtcgtccaaagattattcaccgagacatcaaggcagccaacatccttctcgattacaaattcgagccaaaggttgcggactttgggctagccaagatccaaccgggagacgacacacacgtttccacccgcgtgatgggcaccttcggctacttggcgccggagtatgctgctactggcaaagtaaacgacagatcagacgtcttctccttcggtgtcgttcttctggagctgatcaccgggaagaggcctgtcatttcgactgagcccttcaacgacgagactctggtttcttgggcaaggcctcagctgacaaaagctctagagcagcatgtctacgacgatctgatcgatccaaagcttgacgccttgtacgacgcccacgacatgcatcggctgatctcctgcgctgccgccgcggtgcggcacacggcacgctcccgccctcgcatgacccagattgtgagatacttggagggggagctgtcaatagatgacctgaacgccggcgtcgcaccggggcagagctcgctgcgctcgcaggagcactccggcgacatgacggagctggtgcggcggcggctcaggagggtcgcgttcccgccgggcagcggcgtcaccgtcaccggcaccggcgccgtcaccgacagcggctacctgagcgaggcgacgagcgagtacggggtgaacccatccatcagctcgagcagcggcggcgacgacgacgacacggccggcgaggtggtcggcggcgtcaccgccaccagccggccgcacgccgccgccgccgcgtccagcccggacacgtccgaggtggcgtcaccgcacgccggcgagctcgccgccgacgccgccaagccgatgagcagacgaacacgcctcggccgctttccgtgagcgcactggatctctctttttcaccggtggtaagtggtataattgtacatgcgtaaaagtggctaatagtggatgaatttttcagctcattttttcttcggttttagcaaggttttgtctgaatttattgtcgcgattaatttcgcactaagggcctgttcattttatcaaattttggcaatactaaattttaacaactttaccaaaatttgataaggttgaaaatgacatcaaagtgaacaggccctaaacgaaaagagagcaaagttggattagcagtcaacgtgaaccacatgggacggatcagtgatgagtgagctgtacagaactttcatgtttcttccatttgttaggttgtcaatacacctgtccttgagaagatgccatgtggataattatcatccacgcctctgctatcagtcactatcattggtcatgcaacacaagcgtacgatccaatc

SEQ ID NO: 12849 - DNA, 3667 bp, Oryza sativa
  ref <308>: DATABASE ACCESSION NUMBER: AK110197
  ref <309>: DATABASE ENTRY DATE: 2001-12-06
atcctcttgacggcgcctctttcctcattctcatccttgtagtcgctccttgcatccacaatcgctagcaagagctcgtccgcagcttcgctcaccgcactcaccgcgcacagcgccccattagcccaccagcccctgccgcactcgctttccatccgtggctcgatcgcgtttctcacgcgtcgtccgcctccaacttcatctctggatcatcatggacggcagccacgaacaccacgacgctccaccgtctgcgtacgacgatccccaccattcgcaccctcctgccaagcacgagcacgaccacgaacacgggcatgagcacgagcacgagcacggacacaacgaccacgaccactcttcgcactaccagcccccaccctcctactcttcatcgtccatgagcttcagcacgcccgtccgctcctcccatgcagaggctcaagccgcactcgaggccgtcgccgccgccgcaagcgctggcaagatccagatgacgccggaccacaactcctcctccaccggctccaacagctacatgaccacccccgcaactgccgccgccgccgccgccgccgccgctgcagctgcagctgccgccgtatcgggctccgaacccgcttcacccggcaatccatcctcgccctttggcacccatctcggtcgcaacaaggcgtgccagagctgtcgcgcccgcaagctcaagtgcgacggccagaagcccgtctgcggtcagtgcgccaaaggctggcagatcaagttccgcatggctcagaacaaggccaagaacaagaagaaggctcaggaccccgccgtccgcgcagagctcgaaagcctccccgaaaccatgcctccgtgcgtctacctccccatcacccaacgcacctccagccgctccgcacgcccctccctctcgggccaggatccggacagctccgtcgcgccagataccccgcagccctccggcgctgccccgcccatggacgcatcgcccatgccggcagccgccaagaagcgcaaacgcgccgacgacgcctccgacgaacacgtgctacagatgcagcaggagatccaccacctcaagcagcgcctcgcacaggtcaccggcgtctttaacggcgctcaacagcccctcgatcctcagcagcagggcaatcacccttccggccgccatccctccaaggatgagctcgccatcgctcatatgctcgccaccagcatgccctcgggcgaagggccttcgagcggtccgggtctgcctttgacctcttcgttcgactaccagcaagccgtggcggcggtggctgccaacggcggcctcggtgcagccgacggcgccagcttcgatgtgctggatcccgccctgagcgcacccaccgctccgctccctggcaccgccgcagccgcctacccgcatgcccatgccgccgacgcacgcaccgatccgcgcagcgccgcacacaagcacgccaaggtcaccgccgtgcaggacgagatggacgaagacgacctcgccaatccgctgctcgagctcatggtcaccagctggcccgccgacttcccgccgcccaacctcgtcaaccagctcgtctccacctactttgagaggaccaccgcacagtcgctcttcctccatccgtctcgcttcatggagaacctctcgcacggcccccagcatcctcgcttccccagcttcggcctcctccacggcatctttgccatggcctatccgcgcctccacgactccgaggtgcacagcgacacgtcgggccaaaacatcttcctcggcgccgccacgggcgaaaagctcgcgagtctgcaggcagccgcctccttccacgccaaaaaggcaaagcacctcggcgatcaggcgtgctcccagggcaggttcgaggaggctgcgcagatccaggcgctcctgtgcgcatactactacctcaacgatcgctccatggaggcgtggttctccgcaggcaacagctgctcgctcctcaagggcatggagctcaaccggctgccgcccatcaagtcgtacgcctccaactacaccgcgcccgacaggaatcagcccaagcccgccgtgtatcgcgccgtggtcaaggcgcccgccgccacgccgctcgagcacgaggagcgcatccgcctcttctggaactgcttctacagcgaccgcgccgcgtgctcctcgacgcactgggcggcgagcatcgacgacctcgacatcaagaccgagctgcccggtgcgtttgacgactttatcaacggctcctccgacctcgtctatcgccccaggcagacgctcgagtcgcccgacctcttcaccgacggccactacgacccggccatcctgcatctcaaggcggcgatcctgcattccaagtgcgtgagccacatgtcgaggctgcccatcgatgcgagcgtgcacgacgtgctcagtccggacttttacaagctcgacggctgggtgacggcgctgctgcagagcgtgccgggcaagtggcgcgatctggcatcgtttgatgcgacgctgcgtgcgtcgtccggacacgaggagatgccgtatctgagcgatggcgtcaactaccggccgcagaagcagatcagtctcatgacaaaccagctggtgctggcgcatgcgctcatgtacggcagctgcatctcgctgcacgagcccgtggcgcaccgcatgcccgactcggcgcgcaagtcggcgcaggcggcacagagcatcatcaagatcctcaagacgtttatcgcggcgagggtggagctgctccaggtgagctcgctcatgacgctcatgattgtgctggcggcgcgctcggtgacgcgccagtacaagaagatgcggcgcgaggcgggcagcacgtacgtgcggctgcgcaagacgcagccggagctggcgcagcgcgtggccgaggcgggctatgcggcgggcggcatgtcggctgcatcgccggcgtcgagcagctcgcgcggtgccacgtacaatgcgctgggcatggggctcgacacttcgtcgtccgatctggcgggcgaagacgaggcggtggacagcaacatcgccacatccgagatcaacgagagtctcgaggaggagctcgagtttgcgctcgatgtcgatccggcgctgcgtgcgcagatcgatcccgagggacagctggcgtcgctgcgcgacgatctcgaactcatcttctggagcctggtcaagtacggtcagatgtatccgctcggtgtggggcaggcgaaagtggtggctcagctgctgggcaaggactactcgagcgagctcgagcaggcggggctgttcagtcggtcgggaggaccgagtgttgcgggcagcgcgagcgatgttggtagctgggccgagaagagtccggcgcagtttgcgcagcccatgcgaccgcctgctgcgccgcaagctgcacctccgccggttccgcagcaggggtatggaggcgcagcgcctggatttgcacgtgcgcccgtgcagggtgcgcagccgtcgctcttccatcccaccgaaggcgggtataggctcggaagcttttacctcgaccgaccccaggtgtcggactactaccctgcgcacgcggcgcactttgctcccacgcacaagtaggttctgtgcatgtttatgtttttgtaatggcatttttggtttggg

SEQ ID NO: 12850 - DNA, 3153 bp, Oryza sativa
  ref <308>: DATABASE ACCESSION NUMBER: AK110198
  ref <309>: DATABASE ENTRY DATE: 2001-12-06
gatccaacgatggtcaaggaagtcgtctcagccaccgagttcgatgccgagcttcaggcggccggctccaagcttgtcgtcgtcgacttccacgcgctctggtgtggtccttgcaaagtcatcgcgcccgtcttccaacagttggtaactaggcatccgaacgtcaccttcctcaaggtcgatgtagaccgcgtgcaagccgtggcgcagcgctaccgtgtccgcgccatgcccactttcctgttcctcaagaacaagaacgtcgtcgacactctgcagggtgctgaccccaaccgtctcaccgccctggtcaaacagcattcttccggcgcctcctcagccttctcgggctcaggtcagacgctctcgggcactggatcgtccaactccaactcaaattctttcggcgcacgagccgtcgcaggcatcaccgatggccatacttcgctgctcaaggtggtcgaacccaagcagtcttcggcgctcaacgaaaagccggaccgtcgcctccacgatattctcgccggaccaagcggcggcaagtggctcgaaagcgatgccgacgaccaactcctcatctccctcgcattcaaacagcaagtcaagctttctggcatccttctccgcacgctcccctcgcatttcgcacatgctcccaggcaagtcaagatctttgtcaatcgacctggactcggcttcgaggacgccaccaccgaaaacgccgatcaggaattcgagcttcccgacgaacacgttcgaggcgccgagaatggaggcggaggcaaggcctactcgctccgcttcgtcaaatttcagaaggtcgactcgctcaccatcgccgtcctctcgaaccaggaagaagccgagaccacccgcatcgatgccatcgacgtctttggcattgccagccacaccaccgacatgagcgagctccaaaagatcgccgcagagggccgtggtcgcgacatgtttgaccgcccggcctccaggacaggcctcaaaggtggcagcccgtccagcgcaccagccgccccaagtggcttcgcagcaccaagaagctcctccattcccaacatctcgacctacaccgaaagacccgctcgccacacccgctcacactcgacctcgagcttaaatccgcccatgccgcgctatcgccgctcggcttcttcctcctcggctcctcccatgcaacacctcagcgaggaagaagaggaagacgctcccgacttctccgccaagcagtacaccaggcagaatgccacgcacccaggatttgtaccacacgctccgccttccatgaccgagggcgaggaagccgaattcgaggccgcacaaagcgcagcccgagacacgttgggaggctggcactatgccccgttggctgtagcactcgcgcctccgctaggcgctctgctcggcggtcactcggacgcgtggtcggatgcgatcctgctcatcctcgccagcttttggctctaccagttccttcgggtgccgtgggagatctactacgcttcgaggacccgtcaggttctcgcacacgacgaggagcaagaagacgaagacgttgcctccgatggcacaacccctcgcccgaatccaacctctgccgaatccgagcagcaaaacgagactcgtcagcaagccgccgccgagcttcggcgctcggagctgctcagcctcctcttttgcgtcctgagccccatcatgggagcctacatgctctactggatgcgcgagaccatgaccgacggaaacaagtacctcaacgccttcaacattcgactttttacgctagctgcgggcgtcaagccatggtcgcatgccatgggactcttccgtcgtcgcatgctccacctccaggagcaggtgcattacccctcgtccaaagtcgagcgcatgaaccaacgccttcgccgcctcgaagctgaccttacgagcttgcgcaaactctacgccaccaagagcgaggtgcgcatcctacgcgactacgacgctcagcttagccgtgccgttcgccgctctgagcgcaaggaagaacatctgcgactctccgccgaggaaaagttcagcatcgtcgagagcaggctggaggatcttcttcgcgagaccgcgatcaatgccgagttgatcgaagaggagcgccgagaacgcgagcgagcagcaagtctgcgcatctcgctgttcgaagctgtcaagtatctgctgggttcggggcttacagttcgccgcgcaggacccaagcactacctgcacgacatgccgcgcagtcttccttccactgccgcgctcggcatcggcacaggctccacagaagccgaaatgagtccggccgacccatcggctggcgcacattcgcagccgtacgtgagccaggcttacggctcagtcgtctcgtcgcgcgaagtgggaggttcggccccagcgtctggcttggtctctcctccaggcgccggcactccgcccaactattcggcgacgccgccatcaggtgccgactcgcgcgcatcgcgagccaggaatgatgcgggtgcacagcgatcgcgctcgcgaagcacgccgcatcgtgtgtcggatccttggtgggaacgcggcgtggcattctacctctttctgcccttaaacttttcaagcgccgccatccgtctggctggcgaaaaactcaagacggtggtggaagattcggagaacgagatggcgcgaagccagaggaagacgctgcagtaccagaagcatctggcggaccaacagctgcagcagcatcatcgcaaagtctcgcatcaggtcctcagtccgccgcgcaatcgcccaactccgcccaccatcaaggtcgtctcgtcaccaccggctgctggcgcaacagcgcacggtgtcagcagccgtacgagataagggcgatcaccgataccatgtcactctgtgccgaacacagccctgtcctgtccgaaggcaggcagtaagctttgctcgcagtgtgactggcgataccactatccatacccccaagcagcgcaagcatcgctgccccaatccgaacgtcacgttccgatcctttcatactgtatatcattgtcgctttcgcgttttgtatgccttcgtttctctgcatgtatcctactcgctctcgtcattcgaaatcgttgtcacggt

SEQ ID NO: 12851 - DNA, 3560 bp, Oryza sativa
  ref <308>: DATABASE ACCESSION NUMBER: AK110199
  ref <309>: DATABASE ENTRY DATE: 2001-12-06
gtcaggcgcatgctcttgcagctagcttgagtagctcgcttccattcgcccctctttcatcaccacacccaccttcaccagcttcgtcgtcgccgtcgtcgtcgctgtcgtcgccatctgtccaatcgctgctggctcatgtccatttcatctcgccacgcgctcgttggtctctggctctgacgcagcccatctcccccgcgcagcatcgtctcgcgacccatgacgccggctcccacttcctccacctccaaccatcccagcgcagccgcgaccgcaaccgcaaccgctgccgactccaccaattcgccccatcgcactcccttttacgctagattcgcaaggcgtcccaggacctccagcagcgccgtcaaccctgcctacgcagccagcacctccaacctcctctcgcctcccgcacgcggaaacagcttctccgacctgctcagaagctcctcctactcccaggtcaacctccattcgcctgccaacaactccacctcatcctcgccgcaccgcgaatccccttcgcgtccgccccgacaagccacctcgacacacatggcaagcaccaactcctcccccgcgccgcccgcaaccagcggcagcgccctcggtcgcatgttccgccgatactcccagggcggcgcttctcgcaacgacaacgcgcgtccgtccacacgcgatcgagactcgttcaacgtacaacgcaacaccagctcgcccgcactcgacagagactccaccggcagccccatgcgcccccagccccaccacatgccccgctccggctcctacgccaccaacattccgacacaacaatcctccgaaaacctcatcaccatgcctggctcgcgcaccttgaccgccatccccgccgcatcagctgccccggctagctcgcccgtcgcctcgcccgcgcccgccgttgctgcaaccgccgcaccagcccaacccaatcgcacctcccaagacgcgaatgtcgccagccaagctgatgcaccaccagctcctgtcgaagcctcttctgctgctgccgccaaccctgccgctgcctcctcggctgccccggcatccggctccgcccggcccttgaacggcatgcatcgcatccgcctcgtccctcacctcgaggccacacgctcgctccactttgagcccatcgaacgcgacctcaaggaaggcgctggcgtcgtcaaggtcggaggattcactgaccgccagccttcgcaacgcgacaactcggccgctgctgctgctgctgccgccgccgccgcctcggccacagtcggcgccaacggcgacctcacaatcccggcaggcacagactcgtccctcaccccacagcagactcgaggacagccaggcgcacgtggaggcgccatccccatcagcggcaccaacggcggcggcggtcgcatcgactcgtcgcgcatcgccttcaagagcaaggtcgtcagccgaggccacgcagagttctggtgcgagcccggcggaaaattcttcatccgcgacaccaagtcttcctcgggcaccttcctcaaccacatccgtctctcggcgcccaacaccgagtccaggccgtttgccatcaaggacggcgacatcgtacagctcggcgtcgactaccagggcggcaccgaggagatctaccgctgcgtcaagatgcgcgtagagctcaaccgcggatggcagcgcgaggcaaaccagttcaacgtaaacgccctgcgccagctgcgcgcgctccagggctcgcccctctcgccgccgaccgaaaagggtcagccgtcgtcggcgtcggcgctgctgcccaccaaccgccagggcgtcagcgtgaccgactgctgcatctgcctcttctccgtcaccgtgtgccaggcgctcttcatcgctccctgctcgcacgtcttccactacaagtgcatcaggcccttgctcaacctccaccatcccggcttctcctgtccgctctgccgcacctttgccgacctggatgccgacgtggaggaggacgaggcgtggcaggaggcgctcatgcgggaagcagccgctgcagaggccagactcgctcagggcaagctgccaatcgaggtaggcacgcctgcagtcgagctcgatgctcccatcaccgccgccgcgcttccttcgcatcccgaagcgcttggtggcgacgcagccgtcacagccggcgctcccctcaccaacgccaccgcctcgaggctcaccgccgtggcgctcgccgaggcgtccaactcgaatccgcctctgcccaaggccaccgtggcgccaagcaggcgtaagaacgactgggctcgcccggacactgctgtcggatcaagcgccgggccgctcggaggagacgagactctcgccgtcgccgaatcggcagatgcagcgcgaatgccagccagcgtctcgcgcatttcggccgagctcggcgagatggcagtggctgaccggctgttggacgaaaacacctcggtgcccgccgcaacgcttccgactctgttgggtgcccatgttccccgcaccagtttgggagccggcgatggcggctcgcccgcgcgcaggacgtcgggtcccattgtcattgggcaatcgcaccagcagcgcgctgcttctggcggcctagcgggaggacagccggctctggacagcctcgaagagggctggcccaacgtcggttcgctcggcggcttttcgcccggtctggaggagtcgggcacgccgctcaaccacacctttttgagtacgttagcagaggcgccgcacgtcgcgccgacctcgtctgcgccgcgggattttccgccaggccgatcggcaccggccccgaaactagtgccggccgccgcctcggtggggacgagtcgagtgcgccccgctgagcacgaggcgagggaagctagggaagctcgggaggcgagcggtggcgaggctggcgctcgcaccaagcgctcaagcgacggagacgacgtcgacacggcggaagaggaagcgggcgggatgggcaacggtgcttcgcccgaacatctggccggaggcgatgcacccaagggcaaaacgaggatgggcaacgacacgtcgccgagccgcggcggcgcgtacgatgccatgttgtctggagacgccttgggcaagcatgcggcgcacgatgcgcttgcctcgaactcgccgccggccaagtcggcgagcgcgaggcgacgcagccgcagccgcagccgcgctggacgcgaagcggggccgagcgactcggacgagcaggaggccgcgccgttccagtcgtacgacctgccgcgcacgccacgcaccggtcccaacctcaatgcgagcgcgtacatgtcgcatcagctgcaccatggtcatggccacggccagcctgcggtgcagggcgccaggcagccgggcgaccgcagccagaatgccgacggcggctccgcacccacgtcgccctcgaccgaaggcaagatggcgcgcttcaagaggaggatctcgcatgctatctaggctgcaacatccacattccggctgacaggaattgcagcagtcttttcggtttcttc

SEQ ID NO: 12852 - DNA, 3129 bp, Oryza sativa
  ref <308>: DATABASE ACCESSION NUMBER: AK110200
  ref <309>: DATABASE ENTRY DATE: 2001-12-06
ggacgcaatattgcacccaccgcgactcttccacctccatcgcataccgcactcgccaccaagggcgattactgcggttcgacagctcaataggcacgccgcctcctcaacgcgccccgccctaccattggacatcgacagcagcctcaaatgtgccttttacgccatgaccgatcatttggctctgcagttgacgattttccttgagccgccggtttcctgaggtcctttcggttttctcgacagacattacactttccccaccgaacaaacgcgtagcactcttcgcatcgcgcccaacccaggaagcagtcgctctcggctccgtcgcttctcacttggaccggatccacgagtcttcacgacctttcacatcgcactcgacatgatggcttcttcagtagataccggcctcaattcgagcagaccctcgtttgcacggattgctgctgccggcatccagccttcgaatgcgcaacaacacccccaacatcgggtgggcaatatacacagcccatcttccacttcaccttcgcctattggagctgccagaggccctctttctcaaaattcccaacaaaccagcaatcacgcacagcaaacgccggcggctcatataagcggaagaaatctgcaggagccgggacaactatccactttcggtggaccagaggttcttgtccaagccgcggacatgacttcacctcagtcgaggacagtccttacatcaggcggattacttcagcccaccagcaccgatgagacaggcacgctcctgtcgtcgtctgacggggacggcaagccgcctagtctggacggaaagagcgtcgcatcgggaaccaccttcgccttggatgagaaggagtctctgcgtccagacgacagcgccagtgtgcaggcttccgccgaagatgatgatctttgctacccacctggcacaggcgtaccgacctcgcgtatgggctctgaagatggcgtgcgcgcgttccgcgatcagctacacgagatccatgccatggaaccagctagacgccctcaagctggacctggcgccaacggtgccctccctcaaggtgtgttatatgtaccacctgagggacctggggtgggtagcatcccacgcccgagccgacaggctgctctggcgaccgaaggtgctgcggttgcgcccgacaccaagcttcttgaggcgctggagaatcctcgtgaccgtatttgggtgctgaagcttgagcaagacgtgatcgatttcgtgaaggacgcgaaagagtcttccctcaacttgccgcagtgcaattccttctatcgcatgttggcgcacaagatcgccgactattatatgcttggacactctgttgacgactcaaattcggctgtccgccttttcaggactcctcattgtcgtataccacaacctttgacgggcgttgtcaccccttcaactgctgctagcacgccgccaccctcgggccctcaaatcaagctgcttcgtaggggtattgatcctggccctgcgatcgcaaatggctccaacgtcaactcgaagaccaattccgatgacgatagcggagacgacaagaagaggcctgtgactagagaagagcgagaggcgaggtatgaggctgctcgtctgcgcatcatgggttctgcaaagccaacgggctcagagacgtccaaggagaaggatgactctcgttcaagctcagctgctggcaaacgctccaagaagaagcagcgcgataacagtgacgacggattcgaggctcgctcagcttacagctcgtactttgcgccttcattctcgtctgctggatatacaagccagccagtggcgtatcagaacccgcaaggcacaaacgctgcccagttttcgcccagcccttatggcaaccaagacatgggtgctgcttccccgtacggtgttgtacagaaccaaaactcgcactggagcggttcgccgtatactggctccgaaggaagtcagtcatggtaccaagttccgcagccatacgacttgtccaagaacttcaaccaagccatgtcgttccagaattcgtcgatggcggaccagcaacagccggtatatagcccttatgcgcaagtgtatgcgcaacagtcctacggaacttccagcgcctggcagcaacaccaacaccaacagcagcagtcccagcagcatcagcagcagcagcaaggatacaacgctacacaacccccatcaactgggttcgggccttctccaaatttctccgacaggaaccagatgccagtgtacacgtctcagcagcagcaacagcagcagctccatcagcagcagcagaactatcctttcggacagctgcccagtcaaaatttgggtcgtgtacccagtgccctggagcatcctcttcctggcagctggaagagtcctcacttcaatccacagagtcagacttttgttcctggacctataggaaattcaaatttctcgtcgttcacgcctcaaagaccggctactggtaacagcaacaacggtatgcctcaaggtgtgccgtattcattggagaggcaaatgtcttcgcagtctcagggctccgcgtttggatctcctcatcatggtatgcacggcgcaggtggacctcgtatgccatctcagccgctcacccatcctctacctcagccagttttcccgaggcagccttctccaaatgttgctcttcctcccaagcctatctccggacaccagatgccgctcgagcacgcgcggcagtcaccttccaacgttcaccagatgtcgccacaaagctctagtatagcaaagtggggggctccggcgtcgttgcccgccaagccgccgccttctgtcgaacctttcgatgcgtctcgcttcaccccatctcaaaggactccttcgttcaataatgctgctgctgcgcgacttcctggtggcgggctgtcaggatttggacccatgcagccactcaacagtggttcgatggccaacggaaatggttctccttccagaagcagatagccaaacaacgctgttgaagtcagtgtatagacccctagcgacggaagcttgcgtcgcaagttgcgctgggccaatggtatcgactcttctacataatgtctcaacaagtcaacaac

SEQ ID NO: 12853 - DNA, 3168 bp, Oryza sativa
  ref <308>: DATABASE ACCESSION NUMBER: AK110201
  ref <309>: DATABASE ENTRY DATE: 2001-12-06
gtcgagtaccccgcctggctcagcggcgagtgcaagcatctcttgtcgcgcatgctcgtcaccaaccccgccaaccgcgccacgctcgccgaggtgctcgcacatccctggatcgtcaagggctacgacggcgcccccgacccgcatttgccggaccgcacgccgcttcgtccccacagcctcgatcctgaggtcatcaagggcatggtcggcttcgagttcggcacgcccgaggccatcaccgcaaaaatcaccgaggtgctcacgagcgaagcctaccagacctcgctccaccactgggagctcaaaaacctgccggcaagcctcaacggcctcagcaccgcagccaactccggctcctcgctcgattcctctacgctcaaccgtctatccacgcgcggaagcatgagcgcagccggcggctccgacacggtcaagtccaagacgggctcacggcgcttctcgggcatcgaattctaccgcaagaagctcaccaccaacccgcttgcggcggctttcggcagcaaggacgactcgtccatcggctccgccaacggctccaacggcctcggctcgggcacaggcctcctgccgttcggcaaggagccgctggatcccacgcgtggcttccacccgctcatctcgatctactttctcgtcaaggaaaagatggaccgcgagcgtctgtatggtcattcgttctttgcatcgtccaatctctcgctcaatggtccgcccgtgccgccttcgggcgccgccggtatcggtgcgggtgcgggtgccggtacgggcgccagggcagccgcgagcggcgccatgcctaccgccgccgacattccgcaagaagcgctgcgcgtgcccgaggcgccgcatgtgtcgcaccgcgcctacgatccgtcgcgtcaggaagcggcgctggcagggccggcgccaccacgttcagtggccgccatgatgccggtgcctgcgtcgccgacgcccgtgttcgagtcacgtgagaagtcgcggccgacgggcatcatggctgggccgccgcgtgcccgcgccaacgccgaggagatggaggcggcgctgcgcgaaaagggcctgccctcgccgaacgaggcagcgtttgcgcagagcagcatcggcggcatgacgccggtgccggccgcaagcacggctggcaagcggcagtcgttctcggtcgccccgcccgtcgcagagatggtcgcaccgccgtcgcaccgacactcgatgatggtgccggacacgagcatggcgatggccaacaaccacaagcgcagcgtgagtctcacatcgcgtcgcgcgcccgtcgctctcaccacgcctgccgtcgctgctggcgtggttggcgttgctgccgacgcagccgcggcggacgggcgaaaaagttcaaccttttcgcctgcacgcgcggacaagaatgctgcgcaactgcagacgccgcccaagtcggaagcgggcacggcggcgtcgtcgccctcggccgccaacaccagctcgacgctcggatacggagcgacgctggcgcgccgcttcagctcgttcatgagccgctcgccgtcgcagccgctggatgccgaggcgcgcgagcgcaagaagcagagcaggatgagcacgggcggcatgctgctgggcaacaatgcgcagcagcagcgccgcggcagtgcgcacatggcgctgagtggggtgcaggaggacaaccgtgcgtcgggcgatgcctacgactacgacgaggcggaagagcacgccactacgcacgaggacgacgacgatgtgccgctcaacaatgccaccacggtgcgccgctcgggcacgcttggagacatgccagtgtcgcgtccgaacgcgcgcaacgtgcgagagggcttgatgggcgcagcgtcggtggggcgtgcggcggggctgtccatgtcgcccaaggcggcggctgcgtccaacgcgcgacggccgagcacaggcatggcgacgtcgacgagtgcgcctctcaacatgttcagcgctgcaggagcgggcgatgcggccagcaggccgggcggccagacgtcgccggcgcaagagatcagtccgagcaactcgggcaccggctggatggggcctacgacgcccgggcaggccgaggtgctgccggtgctcgccacgcgacgccagcgctttggcggcggcggcagcggcagcggcacggcgggctcgccggggggcgcgcaaaacggcagcgtggcagccgagggcgcgtcgaagccgatcttcctcaagggcctgttcagcgtgcagacgacgtcgaccaagccgcgcacggtgatccatgcgtcgctcgtcaaggtgctcgaccgcatcggcgtgcagtaccgcgagatccgcggcggctacgagtgcgtgcatctgccgagtctcgacttttcgggctccgactcgatgggcaagggcaatgcgaggatcccgctcgagacggtggccgctgctgcggcggcagaggccgagacggctgagcgctcgcccacgtccgaggaaggtggcaagggccccaagcgcaagccgagccgactttcgtttgtatcgggtcgaagcaaggataaggatcgtgcggggcgcagggatggttctgtggccgacagcatcggtggtggtggagagcgcggggcgggtacggttcgcagtcggacgccgtcgttgacgagcagtgcagcgtttgcccaggcaggaaaggcagcagcttcgccgcccctgccgcccaagacgccttcgaagccgtcgctgctaacgcggtcgccgaggcagcgcgccgattcgatgggcgccaactcgatgctgcgccgctctggttcgcgcgactcgaacctcatgctcgatgcgagcgtggccggcgacacctcggttgcctctcctgcaacaggtggtggtggagcggtgatggccaagaccatgggtgcggctcaggccaccgagctcgcagtgcgcttcgagatctttgtcgtcaaggtaccgctgttgctgggtgtgaatggtctgcagtttaggagggtcggtggcaatccgtggcagtaccagatgcttgccaagcgcatcctgcaggaactcaagctgtagccgggtgggtactggtccgaggatggttgtgtttttgttattctgcatactctcgtcgcaaattttacgaatggcatc

SEQ ID NO: 12854 - DNA, 3368 bp, Oryza sativa
  ref <308>: DATABASE ACCESSION NUMBER: AK110202
  ref <309>: DATABASE ENTRY DATE: 2001-12-06
caccgcttcactccttacggcggcgcctggtctagtgtttctcctacacaataatctctccctcactctcctcgactcaatacctgcccagtatggacgtcaaccaggttctcgccggcaccctctcgcctgatgcccagattcgctcgaccgctgagcagcaactcgcacaggccgccgaggctgatttccaaggctacctcactactctctcccgcgagctcgcaaacgaaagcgccgaatcacaagtccgcatagcagccggtctcgcgctcaagaactctttctccgctcgcgacttcacccgcctgcgcgaggtgcaaaccagatggcttcaggggcttactccgcaaatcaagacggaggtcaagggctacgcccttcaaacacttacaagcgacgacacaagagctgggaactctgccgcaattcattgctgctatcgctgccatcgagctgcctcgcgaacaatggggtgagttgatggccaaactggtcgagaacgtcggcaacggaaaggactccaccaagaggagcagtcttcagaccattggttacatctgcgaaacagacgactcggagctcagggatgctcttgccaagcacagcaacgccatcctcactgccgtcgtccagggtgctcgcaaggaggagcctaacaacgagattcgtgttgccgccatcaccgcgctcggtgactcactcgagttcgtccgcaccaacttcgagaatgagggcgagcgcaactacatcatgcaggtcgtctgtgaggccactcaagccgaggagtcgcgcatccaggagggtgcttacgtctgcttgaaccgcatcatgggtctttactacgagaagatgaggttctacatggagaaggctctcttcggcctcaccatccagggcatgaagaatgacgaggaggatgtcgccaagcttgctgtcgagttctggtgcaccgtctgcgaggaggaaatcagcatcgaggacgacaactccgccgccgagcaggagggctccaccgagctcagaccctactttaacttcgcccgtgtcgccactttggaagttctccctgttctgcttgagctcatggccaagcaagacgaggacgccaccgacgatgagtacaacgtctcccgcgccgcctaccagtgtgttcagctttggtctcaggctgttggcagccaggtcgtcccgcctattcttgccttcgttgagaagcaccttcgcgccgaggactggcactaccgtgacgccgccgtctctgcttttggtgccatgatggagggccctgatgaaaaggtccttgaccctcttgtcaggcaggctcttcccgtcctgatcgagatgatgaacgactctgtggtccaggtcaaggactccgttgctttcgctctcggccgtgtctgcgaggccgcttacgagtctattgatgacgagaaccttaccaagctcatcacttctctcttcagtggcctcggctcccaccccaagatggccagcagctgctgctgggctctcatgaaccttgctgaccgctttgccggcgagcccggctgcgagaccaaccctctctcccagcactggcaggcaagcgcacagcacctcttgcaggtcaccgagtccacccaggacaaccagctccgcaccgccgcctacgaggttctcaacgcttttatcaccaacgccgccaacgactccgtccacatggtcgctggcctcagcgacgtcattattgagcgtctcgagaagaccatccccatgcagcagcaagttgtctctgtcgaggaccgcctcaccctccaggagatccagacttctctcacctccgtcatcatcaccatcattcagcgtctcgagagggagatcgctccccaggccgaccgcatcatgcagctcctgttgtctctcctccagtcccttcctggcaagagctccgtccccgacactgtctttggtgccatcagcgccttggccaacgtcctcgacgccgacttcgataagtacatgtcggctttcgtccccttcctgctcagtgccctcaacaaccaggaggagcccgctctctgctccgttgccattggtcttgtgagcgacatcagccgtggtctcgaggagaaggtccagccttactgcgaccagttcatgaacagcctccccaacaacctgcgcagcgctgtccttggcaaccagttcaagccggccatcctccagtgcttcggtgacatcgcccaggctatcggtggcgctttcgagacctacctctccgttgttggccaggtcctgcagcaggctgctggcatctccgcccaagaggagaccagcttcgagatgctcgactacatcgtctcgctccgtgagggcattatggatgcctgggatggtgttatcatctctatgcgcgcaggcggcaaggtccagctcttgcaacctttcgttgagtcgatcttccagttgctgtctcaggtctaccaggattccaaccgcaccgagggtcttctccgctcaagcatgggtgttgttggcgacatctccgaggctttccccaacggcgagttcgccaacctcttccgcgccgactggcttactcagatggctcgcgacacccgcagcaacaaggacttctcatcccgcacccaggacactgctcgttgggcacgcgaccagatcaagcgccagtctgcttccactggcaatgtgatgtcttaagctctcgacctcgagtcctcatccccacccttggcagctcggtaccatctgagcgccctccatccggctgtgcatgaatggcattcatttagtcatcggcaccatgcctccctggccacacagcgacgataaacatgttatatgatgcgcgccgccgagccgaccaacccctcccgtgcaccacgaacactgcctcgtacgcacattcccccgtaccctaccacgaccccagcatcaagtatgctcctgcacgccgtccgcacgattccatggcaacccaacatacgtcccgactacgcccgatacccaattcgcttcgcctatcattgtgcctgctaccgctcgaatttcccgactggtctttgggaatggacgacgacttttatagaatgcatagcgcttatggattgaactttgggctttttggaagcgcaatttgggttcggctacaattgccatgcgatacactttacacggtccaacaacactttgttcccccttgaatcccattcgccgacccttgttttctctctgctacaatattgtgggttttatgtcgcttgtcggagtcacgcgcctcgcccccgaaccgaagaccatagagatggaatggcgcgagtcgtcgttggcctttcccgtagtagtaatctttttacaatccc

SEQ ID NO: 12855 - DNA, 4085 bp, Oryza sativa
  ref <308>: DATABASE ACCESSION NUMBER: AK110203
  ref <309>: DATABASE ENTRY DATE: 2001-12-06
accaccaccactgcgcaccactgcgactgcatctgccaccgacctcggacggctgccgatggtgcatcatcgctcgtgctgaccggcgtggagagagagcgacgatgaccaacaccaccaccgagtccgcgtccgcgtccgcttcggcgcatccgtcgccatcctcgacggctgacgctcctgctgcatctgctgctgcaccccacatcgcagtgagcgacgccaaccaggccgaaaagcaacaccacgccgacgcgatcaacgacaatgcccacaacgcaaaacgcagtaccctcgcacgacactggaagccgttcgcgcgtcgcgtcggcctcgatccgttgccatcgtatgtggcctgggtggcgccatgcttgacgtggcccaaactcaagcccgtcatccgctcggcgctgttggcgtggatatgcctgctgatcttcctcatctcgccgtcggagcgcgcgctcgggagtgcgtcgttcctcgtgctcgtcgcgtgcgccatccagcccgccgaggtgccgctggcggcggtggtggaacgcgagttcttcacgctcctcttcgtatgcatcgcctgggcgtggtcgaacatcgggatcgccatcgcccacgccgcacgcaccacccagctgccgccgacgcagacgagcatccagcgcgtgctggcgggcgactacatcgaggcacgctcgagcatcgtctgcgccgtcttcctctccatcggctccgccgtcgtgctctacatcaaggtccgcttcggccccagccctttcctctttgccacggtgctcagctgcatcctcatgaacatctgcttgacccacgcaccgctctatccgtacgccttctactcgctcggccaggccgtcgtcgtgccgctcgccgtcaaggccgcggtgaacatcgtcctttcggtcatcttcttccccaagtccgtcaactcgcagttcgtagagcggctcatcgccgtactcgaccccatcgccgccgcgtgtggcgaccaggtcaagctgctccaaacctcgccgctcgacacggctgcgcctgcggacaaggatccgaaggaaggcttcgatttcgacttggtcgcccgcaagctcgccgcggcagagggtgggctcatgccgctgtcgctgtcgtcgcggctgctgacgcgcgaggtgtcgttcggactcgcgaatggcgacgacctgcgcgagtttgagcgactaacgcgctcccttgtggctcctgccgacggatgggcgtactactactcgtcgatcaaggcggacatccagtcggcgcactttcccaagacacccgtgccctcgcggctcgcaacgcttgccatcacgcccgccatcacgccacgcacctcgctcgaccacgcgcgcaacacgtccgactcgggccaccatgccacggcgcatcatgtgcagctccatcctccgtcgcgcccgcactcgcccggtcccgcaccggcgcagcaccaccccgacacgccgcatgtgctgctgcccgcttcggcctcgggcacctcgacgccgcaccgcgagtcgccgctgcacgcacagctgttcccgcacgactcgaccgccgactcggccagcgccagcgccaccgcgttccgccagctcgacgagcatccgtccgtgcagccgggcaacgagctgagctcgtcgcgcttccgcaagatggcgcgctccatcgcctcggcctcgcgcagctcctcgccgcgccgctggatccaccacggcccccacagctccgccgacgcgcgcgatcactccaccccgcaccatcacgcgtgggagcgctccagccacatgctgcacaactttgtgcacagacgcgacccggcgcccgtcgccatctgggagtccatccgctttggcaatctcgagacgtacctgcacacggcggcggcgaatcacgtcaccgagatgtttgcgcgcctgatccgcgagacgtcgagcgagctgctcgccacggatgctgctgcgattcggcacatcatcgcgtggttggcgcacctcaattcgcaccgctacgcctttttgcgcgatcggctcatgctatccgcctctcagcgtgccgagaagggacggcagcaggccgaagccacacgcacggtgatcgcttccgtcgagagcgcactgtcggacttccgcacctcgaagcggctcgcggtgctcgagccgtacaaagccgccttgcgggcgcacgatgcgtcggggggcaacgacgatcttgctgccgagctggacctgcgcacgggaccgggcgagatcggcaagatccaccaccgctacctctaccaggcgtggctgcaccaattccacacgatcaacttcaccgaacgtttgctcacgctgctgcgcgacgtggagcacgtgcagtccgagcgaacggcggcgcgcgtgtggttcccgcactggccgcgcatctttcccgccgacgtgtggcgcaatgcgtcgggggatgcgcacgacgacgacgagccgagcaccgacccggagcatattccggacatcagctccgatacgccgctcgcctcgcgccagcgcagccgcagcaccaacaccgccgtcgacgagcacgtccctcccaagaccgcacacgcgcacgcccacgcgcactttggcggcaccgaaacagacacggccaccgccgccgagccgattgtcgatctgggctcgacgcggcgtcgcgatccggacgcactcgacccagaggggctgttgcaggtggtgggccacacgatctacacctggattcggcgtcccttccgcggcaacgcgctgttcggcatcaaggcggcggtgctgatcgcgctcgtgtcgctgccggcgtacatcaagtcgtcggcgccgtggtgctactcgaaccgcgcgatctgggccatcttcatggcgcagttgacgctcgcgcgctttcgcggcgagacggcgtttgcgctgctctcgcgcatcctcgccaccgtcattggtgccgtatgggcgctcgtcatttggtacatctccacgggctctggtcgcggtaatgcctacgggttgggcgccacgtgcgcggtggcgtttccgctgctgttcctgtacaggatctactatcccggtccgccaattacgccgattatcgcgagcgttaccacggtgctcattgtggggtacagctggaaggacgtgacgaatccgacgccggggtcgcccgggtatgggtggagcacggcgtggcgcaggttggtggcggtgatcgtgggtgtgtcggcggcgtacattttcagctacctgccgccttcgtcgacgctgcgcgagtaccaacgcctctcgcatgccgctacgatcgccgagctcggcaagatctactgtgccgtcgtcggcattgccagtcacggccaccacgaccactcctctcgcaagatcgaaggcgggtcgctggccgaggtggaggcgtcggagctggtgcgcaaacgcatcatcggtgtgcgcgccaagctgcgccggctgtcgatgatctcggtcaacgtctcgtacgaattctccctccgcggacgatggccttcgtcgcgatatgcagcgctcttctcggtgcagatggagatctccaaactgctctcgcactgcatcgccgttctggagcgtctcggcccggcgtactcgatcgcactgctgcgccggactcggtttctcgatcctcgcttcctcggcgacgtgttgagcgtgatcagcatgtgctcgaccgcactcaagaccgccgagccgttaccgcaagtgacaccgtgcccgctcgtggaccggttcatggacaccccgcacggcttcaacgcctacctccccgacgatccgcacaccaccgccgatccgctgctcgccgaactgccaacaaagatcacgctgcagacgctcgaggacgccgagtacatgaccttcgccgtcggggtggcgacgctgttcggattggtggtgcgaatcgaccgcctgtgcgtggcggtcaaacagctggtgggcgagagctacgcggtgcccgtcgatgtccatcgcatgctcagcacgcgcaagacccagtaaactcccgctttggaatcaaggaaatgcttt

SEQ ID NO: 12856 - DNA, 1569 bp, Oryza sativa
  ref <308>: DATABASE ACCESSION NUMBER: AK110204
  ref <309>: DATABASE ENTRY DATE: 2001-12-06
agcacctcctcgtcgcctcgacacgtcggcatcctcatcccatacacccttcccataccaatcactacccaacaccgcaaccatgcgcgagattgttcacctccagaccggccagtgtggtaaccaagttggtgctgccttctggcagaccatctccggcgagcatggcctcgactcctctggagtttacaacggtacctccgacctccagctcgagcgcatgaacgtctacttcaacgaggcctccggcaacaagtacgttccccgtgccgtcctcgtcgatttggagcccggtaccatggatgccgtccgcgccggtcctttcggccagctcttccgccccgacaacttcgtcttcggtcagtccggtgcgggcaacaactgggccaagggtcactacactgagggtgccgagctcgtcgaccaggtcctcgacgttgtccgtcgcgaggccgagggctgcgactgcctccagggtttccagatcacccactccctcggtggtggtaccggtgccggtatgggtacgcttctcatcagcaagatccgtgaggggttccccgaccgcatgatggccaccttctccgtccttccctcccccaaggtctccgacaccgttgtcgagccctacaacgccaccctctccatccaccagcttgtcgagaactccgacgcgaccttctgtatcgacaacgaggctctctacgacatctgcatgcgcaccctcaagctctccaaccccagctacggtgacctcaaccacctcgtctccgccgtcatgtccggcgtgaccacctgcctgcgtttccctggtcagctcaacagcgatctccgcaagctcgccgtcaacatggtgcccttcccccgtctccacttcttcatgattggattcgctcctctcacctctcgcggcgcccacagcttccgcgccgtctctgtgcccgagcttacccagcaaatcttcgacccgaagaacatgatggctgccgccgacttccgcaacggccgctacctgacctgctccgccatctaccgcggaaaggtctccatgaaggaggttgaggaccagatccgcaacgtccagaacaagaacaccgcctacttcgtcgagtggattcccaacaacgtcatgaccgccctctgtgacatccctccccgcggcctcaagatgtcctccaccttcgtcggcaacagcacctcgatccaggagctgttcaagcgtgtcggtgaccagttcactgccatgttcaggcgcaaggctttccttcactggtacactggtgagggcatggacgagatggagttcactgaggctgagtccaacatgaacgatctcgtttccgagtaccagcagtaccaggaggcctccatctccgagggtgaggaggagtacgacgaggaggctcctcttgaggccgaagagtaaatttgctcttgacagaattcaggcgtgtcgccccaactagggttatgggtaaagcaaagcgattgttttaattttcagtgttctttttttctgcagaaaagcgaggagtaaaccatggtagtattgtcaaatcactctcctcg

SEQ ID NO: 12857 - DNA, 3425 bp, Oryza sativa
  ref <308>: DATABASE ACCESSION NUMBER: AK110205
  ref <309>: DATABASE ENTRY DATE: 2001-12-06
caacgcctcgtcgacttgcgcctctcagctaagcccagatcggatacgattccgctgccaggaggacgcctaccgtagtgccggagcgagagcccaaagaatcgctcacggcaaagacctcctcttcctcgctcaagcgtccagatccgaccccatccttccgcctccaccactttcccccttccatccttcggccgcaagatggacttcggctgctaatcacgacctcgaacacatagcgtgctcgccgcagacccgggcctacgtcctaggccgcccctcctcgtcccgtcctccgccttctctctctgcgttctatagacttcggtcaaggtcaaatcaagcggcagcggttcttaagatgcgtttcacttccttcgccagcgtggccgtcgcgctcgctctggtctcgcttccggcatcccgagcacaacaagcgtcctcgacatcaagcgttccgggaagctctccaacgcctgcgcccacggctcccgcatcgtcgacgccagccaataccaccgtcttgtccaccatcaccaccacactcagcagcggtcagtcattgcctaccagcctcaccgcttcagcgtcctcaaacgggagtgtctggtacattcccgtctccaccgtggtgcctgtgtcccagaatgccacgtccacaacatcctcggccgctagcgccacctcgcccgcctccgtcaaggctgcaaacacctcactaccacttgacaccatcattgaccccgcctttggtgtcctcggcgtcatcctcatcggcgccggtcttcccatgggcttttacggccaccgcaaccgatggtcgagctacttcctttccggcttctttgcccttgcgctcatctgcatctctatcatcctcaaagtcggcgtcgagcctgccatcaaccctccgtccaaggcgattcgtggcctcttcctcgtagctgccgtcattgctggtgcagtcggtggcatcatttccatcgtgttttggcgcggcgccggtctactcgcctgtggcctcggcggcttctttttcggcctcttcatccaagccgttcgcccaggtggactaatccgccccatcggcctccgcttcatcctctacattggcctctatgccctcttcttcacggttagctgcatagagcgagtccacccgctcatgcttgcgctggcgaccgccattatcggtgccaccgccgtgacgctcggcatcgactgcttctccacccaaggtctcaaggaattctacgtgcgcaacctcggcttcgatgcactcttcagcaacaagtacccgcccgtcttccagaatggtcacttccccatggtgcaaggcatgcagatcgagctcggtgtcttgggcgcgctcgtcctcatgggcttcgcattccagatgcgcctctggtccgatcttcgcacccagctcgccgtgctcaagcattccgacgagaagcgcaacctgcgttccaaggccgagcgtgcagcgcgtgccgtcgctcgaacggccaagcgcgacctggccgagtgggaagctcgtcacggatacaagaagaccgccaccggcaacccagcttcgagggacgaagagatggcacttcccgccgcctcgacgcctgatctcaaggacgcccgcagccgtacgagctccttcatgactctcttccgctccaacaccgacaacactcagctggccacaccgacctcgcatgctgaaaagctcgccgactctccgggcgcctcgagcacactcgacaatgcggccttccccttccccgcccaatcggccggtcgtcgtagctcgcagttcctcgagtacatccagagagggcccgaacgcgtggagcccgaaggccctctgcagctcgacctgagcaccatcggcactcctcttggtgacatgcaaccacctgctgaaagcttccccatgagtccgatgagcaacgctccgcgaccgggcgcatacactccacagccgccgaagtcgctcgacatggcgcgcgccacgtcgcctgattccgctggaggacctgactcgttccgcagacgatcagcctcaacggctgctttgatggaaaacaatgccagcttcctggaccctgcaccgcccagactggatctcgaaaacagcacaggccgcccgacagtcgactcgaacaggacaatgagcaccacaagctctactttcgcagaagatgccgctcggttccttccatcggctcagccgaaacgcagcgcgagcgcgacgtccggacctcaaatcggcctgacggcagcatctgcagcggtttcacacgaacgcaccttctcaaacccaagcgcaccaagtgggcccgggttggcaagcatgactccaatggccaagagtcattcccatcagggccagctgcagcttcatacggcagctctgtacgcggacgcgcatgcagaacgctacactgcagagatgcagcgacagagtcctctggcgtcgcccacgtatgctccttccatctccgcctccaagatgatcagcggtggccagagcaatgcggtcatgcaagctcgccagtctctcgcgaagcgtcgcagtgatcagccgatggtgccgtggaccaaccccggcgccacgggacaaggcggctctgcgcacaagcgcgctgccagtgccgattcgcagccgcgagtccgcgccatgtcgattgaagaactggaggcgcgccatcgtgccaagctggctgcgctgcaggcgcctgctacccagacggtgcacgaagccgatgctctgcgcagggccaaggaggactgggagcgaaagcagaagttggagaggaggcgcatgcaagaacgtgaagctcacaaggatgcagcggcagcagcggctggcgacgggctcgtctcgccttcccatagccgaatcggttctcccgacatgcagaggcctgtctctggtagctcgcgcgacgaacgtcggcggtcccgcgcgctaagcgcgacactgctcgaggctgtcggcgaagagagccgtgactcggcgggcatgagccgggctgccgaatggcgcaagtcggtctctgggatgaatcagctggacccccgggcggcgaggccctcgaatcctcctacgccgagcagcactcgtccgacttcgccgcagcccaatgctggactcgagcgatcgacggccaatccgttccctgctcaggccgcacagcagcgtaagcgcttgagcgagaccgacaggcgacgattgagccaaggagctggcgaccgatcgcagcgtcgccacagccagccactgctcgacttcaacctgcctcgcggcggcagctagtcggtctagcttcggcatcagctgctgtctttgctctctggtttctgcttttccttccctctgcacccgccccattgcatcatgaacaatacatttgtcgtggcttttcttc

SEQ ID NO: 12858 - DNA, 4348 bp, Oryza sativa
  ref <308>: DATABASE ACCESSION NUMBER: AK110206
  ref <309>: DATABASE ENTRY DATE: 2001-12-06
aaccctccgccttacgccattacactagcgacgacgcatcgccatggaccgcctcgcgcctatctctgggctgcatagtgcgccaccaatcagctcactcgcctgatcgccaccagctgccttggcccgccatgcacaggccaagcatcaaacagcaatccgccacggatccagagccaggcccatcgcgcaagcgcaaggtccagtgggctgacgacgacgatcgcgatgatgtacggccacttgcgcttcaagatgaggcgcaaggcgacttcgccgaaacccgcgtcgatgaaaatggcatgcccatcatcgctcccacaaccgacaccgagcatgtcgatgccgcagaccctcagactcacaagctcgagctaggctccgaaatctacaaccccatcgagtatggagacttccgctcctacatgaagcacaagcgtgccaagctcaaggttcaggaagccgcactcctccaagaggaagaagctcttctccgcgtacaagccaacgcaagcgaaagcacagcaaagcagagctccttggcagccgagatcgaagctgaaggtggacaacgctccaacgccctcaaaggctgctgcatctacatcaacggccagacgcatcctccttacagcgaactgcgccgcctcctcgtcctgcacggcggcgacctaatggcatacctcgatcaaaagtcgcccgtcacacacattgtcgcctccaatcttacgccgaagaagcgcatcgagttcaaggactataaggtggtgctgcccggctggatcctcgaaagtatcgagctcggcagaaaggcggattggcgcaagtggcgctgcgacgcgatcactggttccaatagccacacttcgcacagcatggtcgcaaaatcagcgcatcagcagcatggaggaaatgcgcgtgtgtcggactggaggaacctggaccgcactgccaagctgccaaagccgctgcctcgcatcggagacgaagatcaggatacgccctggggcaagcctaccaaccagacgacgctccttgatcggttcacgcgcacagacaaccagccattgatagctctctcaagaccgcagcaaaacgacgtcgtcgctgatgtgacagagtcagctgacgcaagtacggccagcaaaggcaaaggcgttcgctttggtgagaatcacctcatcgagcccgtggctccactgcccgaagagaaagcacagcctgccaggcccgagcctgtcactccgatcaagcccaaagacgacacaatacccgccagtgtgggcaccgacccggcctccaagaaagcagcgcttgccgtcaccaagagccactacgcctcacgcccttccaacacgcatgccgcacgtctgctcgccagtcccagctggcgcgaacgcaacacggccaccagcgaaggcttcctcgccggctactttgccaagtcacgtctgcaccacctcagcacctggaagacgagcttgcaggatatggtcagctcagccctccgcgaggccggccggccgctctcaagtgcagaccttcccaaaggcgtgcagcgcgtcatcatgcacattgactttgacagcttcttcgtagccgtcggcctcaggaagcgcccggatctgcacgacaagccggtcgtcgtctgccacggcactggtactggaatgccggctcagaagccaggcgacgagaacaggccggcggacaaccagtcatccagcacatccgagatcgcttcctgcagctacaaggcgcgcgagttcggcatccgcaacggtatgagcctcggccaggccaagcgactctgtccgcacgtcgagacgattccgtacgactttgaggcgtacaacaacatcagcctctcgttttatgcgtttctgctcgagcactcggacgcgcttcaggcagtctcggtggacgaggcactcgtggacgtgagcctgctcttacaaggcatgcgcgatggcgacgcggcaccaggctcactgtacgaccgctaccgcgatcacctcggctcgcaaggcgacgcatggagcgccgagaagcagctcgccgaggcattccgcgacgagatccgcgatcgctgcggctgcgaagcaagcatcgggatcggatccaacatccttttggcgcgtctggccacccgccgagccaaacctggcggctcgttccatctcaccgacgactcgaagcagccgttcctcgacgcgctcgacgtcgacgacctacacggcatcggctggagcctgcgcgagagagtgcgcgagatgtttgagaccatcaacgtcggtcagatcctggcaaagaccaccgagcgcaagctcaccacggaattcgggcccaagaagggcaagatgatctgggacaagatgcacggcatcgacgccgatcgactcgagggcaacaagctgcgtcaatcggtcggctcgcacgtcaactacggcatccgcttcctcaccgagcaagaggccgagacctttgtcacgggcatgtgccaggaggtcgcccagcgcacgcgtgcagtcaagttgaagggaaggcaggtctcggtgcaggtcatggtgcgcgccaaagatgcgcccgtagaagcaccaaagtttctcggccacggcgtgtgcgacacgcaccataggagcgtccaggtcagcgggcctggtggagtggcgatcgacgacgaagagcgcatccgcgctgcggcctggcctttgatccgcgatttgagggcggaccccaaggagctgcgcggcatcgcgatcagcttgaataagctcgagcctgcggaggggaacgcactttcgcctgccaagcctaaaggcggacaggccgtgctcaacttcaataatgccagctcgtcttcgaaggcagcgccgaagcagccagtggtcggcagagagaccgtcttgaatctgcacaaggccagcgaaacggaccaagacgacgacgcagatggagaagcgtgtgggcagatcgacgagcctggtctcgagctgcccgagttcctggagaaaggcccgaccgcgggcacaccgcggccacccaccgcagcatcggcaccccagggaagtgtcgagcgcactcctgcagctctgcctctgtcgacgcagctcatgctgccgtcacgatctcagatcgattccgacgtctttgacgccttgcccactccgtaccggcggcagatccaggccaagttcggagaagattcgatttccgagcctggctcacagacgcgggcgcgaatcttgccgcggtcgacgccgactacacctcaaaaagccaaagcggcgccgtcggctgcgatggcggaagcgctcatgctgccgtctgcctcacagatcgaccccgccgttctcgccgagctgccggcctcggtgcgcaaagagattgagcgtcaagtcgggcttgtccctgacgactctgcaggctcgtcgtccgtcgagagcacgccgacacgccgaaagaacgcgaccaccgccacgctcacgcgctttctgaagcaggatcccaagcaggcgctgttccgatcggcgtccgagtcgcccacgaagaagcgggttgtgaatcggctgctgcatacggcggggcagtatgcgcccaaggaccagcgcgcggtggatagggaagaggtgcttgcgatggacccgagcaagatcgcgaccgagacgctacaggggctggggatcgacgccgaggtctttcgtgcgctgccggtggagctgcagcgagagacgttccgccaccactcggaacagcgaaagtcggaacaggcacgattcaaggcgggcaagacgggcactttcggggagctgacgcatgccgagcagcgccgacgcgacacgctgcgtgcggcgcacagcgatcctactgcaccgcctgcgtacttggtggcgcgtccgcgatggcgtatcccccgtgcggaagcgaggattcttgatagtgcagtcccgagcgcggtggagacgccgtcgatccggggactgacccggtacgaggatgtggagcagctgatccgacaatgggtcggggcgtttgcgtccaagggaccccgaaagggcgacgtggacaggatcgcgacgtaccttgcagacacgctgcgtgtggccgcacaaacgagggtcgaggaggcacacaagaccgacgccattgtgcgcttgatcgacgagacgatccgtcgagaggaggacaggggcaggcgactcgcacgcgatgcgtgggcagacgcggtgcagcgaatccgcaacgcagttcagacgcaggctcacagctctttccacggtgcgcgactgtagccgcaaagcactgaatcgattcggcaagtatgtacaatgaagctattatcttatgg

SEQ ID NO: 12859 - DNA, 3523 bp, Oryza sativa
  ref <308>: DATABASE ACCESSION NUMBER: AK110207
  ref <309>: DATABASE ENTRY DATE: 2001-12-06
aagttgatttcaatgtatcccgactaatatctactcttgcgaacaattctgttgtccaaaatatatgttggttgttgaagcattacaagagtaactcctttcgaacaaatcactacataatatgcatgctgcggagattttgcgaagacctggaattggcaccaatgctctatcagctgtcccttctaactaccttctatgatatattagctgacgagaaatcatcaaattcaaaggagtatacgaacattgtaaattttctttctaaaattgtaagaaagatgctgagggtaatgaagaaacaaccattgctatttgttgatgtactcttttggaaaacacgcaaggagtgccattgcattgatgctgatgctcttctgagtgatatcacaaaaggtgctacaaacaagggtggcgaaattggttcaagtaagggatggagaggttcaataaacatagcagattctcttggtgatgacgaagtggacttggttataccacatgaaccatataatgctgataaggatgatgattcatcgtctggcgaacatgaagatgtttctaagagaagcatgggtgccacaaataaaagtaacaggatattgtcattttcagacagtgaagctgacgataatgataggaacactgtatcaagaggttctcagaattctgaagcccccaaaaggcgaggtcgttccatttttagtgaagagcaagagaagcttatgagagatctttatgaaaaatacaaagatgaccgcaaatgcactcatctcattgctgaagctttagaccccagtggaaagatttcttctgttcaagtttatcgaaagctcacacagctaggcctgaggaatgccatgaagaggaggacaaaagttccagaggcacctctttcagctcaagaattggctacacagacggaccagatgctaggtgaacacaactgtgatcccaagccagaaacgacccggcgcagaaggaaaaggcaaaatgtgtcgcatgctagctatgaggacaacactaccgatggaaaatcatctgatgaagaaacattacaagcaattaaaagcagaacaaaaaataagaaggtaccacttgtgggtttctcacctagtacatcacagcatcaagatggtttggcagacccggattctgatgatgagaccataggatctatgctcagaagtggaaaaaagaagaggctgttgacgccggacaatgcaatgaatatagagaaacatcaggagtcaccagacagtacaaacaccagtaattattcaccggaaatatctcaaaaacaagaagccctgcaagacacttattctggtgatgagatcatagactctatgcatagaagtgggaaaaagaagaggttattgaagtcaggttttgcagcaaatacacaagaacatgaagagcctttgaaaaacataggtcaagacgatgaaactatcagttctaaggataatctgcaccatggattaaattcgtctaataacagtggcggtgctggtgaaacagaacttttggatgacttcattgagcctgagctagataacgttgaaaatactgagcaaagggtaatcgatgatataaatatcaccgaatctggggacatggaaagctcttttgctgatcaaaagcctggtctgaaaagaagacacaagttggtaattgagccgccatctcatcttcccgttctctccccaccccgagcgatccatccattccccctcccctcgagcgattccccggttctcctccgcaatccgcacccaactcccttccaagatccgatttccccaccaccgctcggtcgcctaaaccctagcgccgccatggactcggcggcgctctcgctcacctgcgccggcctcggtggcgccgaggaggacgacggcggcgccgtcgtgggctacgccaagggcgagcactgcctcgataatctgaaggatctgcagagattcctgcggcgggatgacccgcagcggcgggaggttttcaagcaggtttgcaagtggaaaatcgcatctagagatctggtgcccatcattgagaattaccaggctgatcgcaacctggtgatcacggcagtgaaagtgctggtactccttacaatgcctgtggagccgtcatcagagaatgttgcacaacagatagagtatctttgggatctgaaggcagcactgacgcgcaatgttgctatggctgtcattgtgtctcttcttgaagatccactggaccatttggaaagagcttcattcacagaagatgactggaaactagttcagttggtgcttactttgttccgcaacatcttggctattcaagaaatcacattgggtcagaaggcatctggagaagctacccagttgctctgtctagctgacagctttttagagctcatgtttcaagagaatgtgatggatctaatattagtgctgactcaacatatggatgagccatctggttatctccagcaggaaaaccttcttcttttggaaatctttcattaccttttcttaggccgggatccagaattgattgctagagcttctactgcaggttcaaaggaacatgttgaaggaaatatcgatacatcagtacattcattgagattaatgatggaggaggaagagaggaaaaagaggatgttcaggcaacgaaactcagagcatcactcaatcagtggaatttttacatgcacggcagtggacggatctaaatccttgtgcaaagggaaccccaactccgcatctgcaaatagcctaaggaaaatacgtaatgtccaaagagggccccagaaaaggattgcctgggataatgagcttctctacacaccgagagagggcacaatggagatgataagaaatttcctggaacaatttttatctggaggatacaatgtcctcatgcagtctgtctgtgatgatatcgtaaaggagcatcattctatccagaaatctgacatcactacattcttcaaagttgctcgctttgtcttagcttttcaacacgagaaggcatcaaatgctcagaaatctaatgctgcggtccaactgcctgaggcttctcctagcgatcatcttgatgataatctgccgtttcttggtgacatatgcggacctgttgtagccacattgaatgaaggtatgtttaacttggtcatctccaggtggcgtgaggcctatgatagcctgaaggaaacacatgattacaagactctttcagcagctgggtctctaatgaagagcatgattgacatggtatatttggtgcttaaagtacttcctgatgattcaagagaatctcaaacagctcgtgttttactgtataagctgttttatgatcagacagaacaagggctcactcaatttctgctgaacttattcagatcatttgatactcataagcaaccaaaaagtgatcttgcagatttactaggaacaatccatatcatgctacagctcatggagaagcttcaagcacgtggtgcattaagggttgcaaaaaggacaag

SEQ ID NO: 12860 - DNA, 3632 bp, Oryza sativa
  ref <308>: DATABASE ACCESSION NUMBER: AK110208
  ref <309>: DATABASE ENTRY DATE: 2001-12-06
acctgcatccttttcgcatcattgcacgagcttttgcagtggagcggggagagtcgaacgaagcaaacgaccaactttgggcttcgatttgcagtgcaggaatacgcttgggtttgtacgtcgttggttccaccatctgcacatgctagtgcgcgatacggctcggcgatcggaagttctcaaccacacggctttggctcgcgctactaggcggaatagacaaacacacccggcgggcgagctacaccagcggcacacgtccagtcttggtacgatcggctcaccacagccccccaaacatcgaagcgtttcggaggatcgaacgtttaatcgctgggacgacggggaacacttggccaccaactgcgctcggtaaaagggtgcgcaagagatagcatccggttgtctcggtgcttcatcgcagcgatagcgggcttgactttgcccagccaagtctctccaacaagcgcactcgacatcggcttcactgcaccacagatacttccaacatcacctcgttcgggtcagcatcagccaacaaccactcgacaccctcccgtcggcacaaaggtcgagcggtaaatactctcgccaaccgcgcacagtcacttgccccgagagctggcatcccctcacagcagcacggttgcgctcaggcccattcccccttcgatcgggcagcaaagccaacagtactgtctttggcggtacgaagctcacgacaacggacgacttgcacgccagtagcggctcgtacagcaccagctagaatcatacgaccagcgctcgcccccgcttagatttacgcctgctccaccaaccaagacagccgccaattgcaccgcgacatggcgcgcaaggcgctggcgagcgatgccaagatcgttgtggcgtcggcttgcgaactcgaagcgcactttgctgagctgcaggcggatctgcacctggccgagacggagcatacgtggtacaagatcgagcagtcgttgctgtacatccaagccatcacgcgcggtggcgccaccaagttggccgactttgtcgcgctgatcaaagaagcggcgggaccgatcaacggcgccttgctgagcgagcgcaccaagctctccggtacagcagcggatctgctcaactcgattgcacctcgacttggcgagcgattcgaaccgctagtaggcgtgtttgtaccgacgctgctgcagatctgcgcgcgcacgaacaaggtggcggtcaagagggcggaaaagtcgctgcatttcatcgtcaagcactgcagacccgtcggcgtagtgccgctgctgcgagaggcggtgagggataaaggccaaggactgcgtgcggtcgcagcaggcacgttggtggcggtgctcgagtgcacagacagggataggttggcgaggagggtggcggatgtagaggcggcgataagaagcggtgcgaccgattcgaatgcagaggtgaggcagatcagcaagaggctcttcgagcagtatgtcgccgtgtggccggaaagggtcgaggcgtttacgaagccaatgaccccgaccattcgcaggtaccttgcgttgccaaagaccggtgcactggtcgtagacgtccccacaccacaatccaaggtgcaacaagccgttagggagacacaaccagcgccgacgacgacgacggcgacgacgacgacgcagccaacaccgcagtacagctttttcccggacctccatcgtgctcctgccgcctcgacatcgcgaggctttggtgtcaacgatgcgacgtatgcaaaacgcgggctgtttgcggatcagattgcggcggcacgtaatgcgcgattggcccgcatgccctcgttcaactttgacgacaagccggtcgagaccgcggcgacgacagcgatcaagcggcagccgagctttgagcagcggcgcggcgacatcaactcgcacacgcctggatttgcaacgggcggacatggcaagagtgtgctgctcgcagcgtacaagcaggcgtttgtcgaccagcactctgctccctcccgcgaaaagtcgcgcgataaggagcagcgcaagcacgtcgagcggaagcgcgacaagacagccgtgcggttcgagcgcgtgacgctcgatgccccccgcgccgcggaggaggagatgcgcaggtccaagtccgcgccgcttatccccgccaccgaggcggagctgggtgatgagccgtcgacgcccacggagagtggggaggatcggccgagtacgccgccgcagcgggtggtgcagaccccacgcacggcggtcaaggcgagcagggtgcctgcgcagcgcgtcgtcgcctcggcggtcaaagtgtccgcagcgagggtggtggtccccacgccgtcggccaaggtcgcagccaccagggtggtcgagtcggcatcggtcgaggcgagccctgtgcccaagccgaggcaggcaaagacgccagagcaagccatccagcccgctgcagccatgcccagcaaggacagccaccccaaggcaccggtcaagaaggccgtttcggtgccaagcacggatcctcgcgaggcggtcaaagcggcaaagtcgaccgaggtgggcaaagtcgcctccaaagtggtcgctcgtccagcagtgaaaaaggcggtaccaaccaagccggctgcaccagccaagcccgccatcaccactgcaactgcaccagccaaacccaccaccaccattgcacccgcaaagaccgtccgaccggctgcggtcaagcctccagccgccgccccaaacagtgctacgatggcacgcgccaagcttgctgccaccaaccggctcgcctccgcctccaccgcgtcgaaaaagcccgagggtggtggggttcgggtatcgacagcaacagcatcgaccgcctcgacgcgcaacaagatcgtcccctctgcggcggtgaagaagttcacgcccaaggccactcccacggtgggaggggcggggatgagacgtgcaaagagctcgattgccgaatcgatcgcggccaagagcaagatcgtgggtgcacagcaaaaggcgagcgacaaggcggtggcggtgcgaaaggcgagggtgagtgcagcgctcaagatgcagagaagagcgtccgcggttgcagccaccaaggtctccaccgctgcacccaccccagttccgaaggaggagaaggcggtggtgggtacaccggtgcagtcgcccagcaagacggctgcaccgggtggcggcatgcgcactccactcggcgccaaagatcccaacgtcccctcgactcgttcctcgccgctcaagtcgccgctgcgaccgactccacgctccaccaccgcccctcgtgtgctcgacgtcaacgttctcgacagtcaaagcgagcgaccaacaccgctcaagcccgcgcctcgtgtgctcgacgtcgacatctccaacggcgaaagcgaaagcgaaagcgacagcgagagtgatggggaggaggtggtgcagctcacgttgggctcgaaacagctcgtgctaggtccgggctcggcgagcagcgacgcctcgttcggcgcaagcccagacgacgagactgtagtgctcgaggcggtacccgctttgtgatgtatacccgcgattgcaatcgataccgactgcgacttg

SEQ ID NO: 12861 - DNA, 3456 bp, Oryza sativa
  ref <308>: DATABASE ACCESSION NUMBER: AK110209
  ref <309>: DATABASE ENTRY DATE: 2001-12-06
acgatgcccgcctcgacatccgcagcaaccgcctctccaggcccggcagacgcagcagatccactcgcaggcgtcgaccacatcatcgtcatcgacaatggcgcacacaacatccgcatcgcttccataccctaccccttccccatcgccgcctcatcaacctctcgactggatccgaccgtactcgcccaatccatcgcggtggatgtctttcccaacgccattgcacgcacgcgctctccgcacaccatctccccgcacgccgcgtcgtcttcacccaccgctcccgcacccggcaccaagacgagcgtgttcgtctcatcgcacatccacacgctgctggatgattacgctgcgttgcatctgcgcctgccgcaccagagcggcgtcgtcgtcgactgggccgcccaaaagaccatctgggatcatgtactcgccaaccacctcgcaaagctgccgcagcgtccaaaggccaagggcaggctgttggcaggaaaggcggtagtgatagcggaaacgtacctcaacctcgaaccggcacagtacgccacagatctgctgctctttgagcattacggcgcaagtgcagtatggaggactacccccgctgcgctcgtagggctgggcatccccgcgttcgcaacccccagcccgattcccccgccgcaagcatcttccagcgccgagatagcggaagtggcagcctcgggacccaaacgatctcgatctgcaagaacagaggcggtagacaaggagcaagcagctggtctgccgcgcgtgcttgcgccccgtcggccacagagcatgctggtgctcgacttgggctactcgttctgccatgctgtgcccatcgtcaacggccaggtcgtctaccccgccgtgcgcaggctcgagctcggcgccaagatgcttatcaacctgctcaaagagacgctctccttccgccagctcgacaccatggacgagtcgtggctagtcacccacatcttccgacacaccagcttcgttgccgccgaggtaggcgcacggtctcacggcgcgaacgacgaccacctcgccaggatcagagacacaccggcggcactgtggacgtacaatgatctcatgctgctcgcgaagcagcgagccagcagcgggatggcggttacatggaggttgccggactatggcgggacgacgccaggggctggggaggcgcagcgcgatcgggcgcggtacgggtacattgtcgacggtccgaaccctgcaagcaaggggagccaggatgtggagtgggagtcggcgtacatcgcatcagagggctcgtcgggtaggaggggccatgcggaagagcacgacgaggtgcagacgctcatcctcgagtcggagcgatacagcatgctggagcacctcttcaaccctgctgcgctcgagctcgaccagcaggggctacccgagctcgttgcgagtgccatcagcgccgttgcgtcctcatcccaatcgctgcgtgcggcggcggacatgatgtgggcgaacatcgtgctggtgggcggactatcgggtgcggtcaacatgcgacgccgcctgcatgccgagctcgcaccgcttgcacctgccgatgtgccgctgcacatcgttgtgcctgatgatccgcagcgcgcggcggtggatgcgggggtggtgctggcgtgtgagatcgcggcggagcgtgcggtgcgggacgacgcagacaaaccgcgcaagaaacggccgcgactcagcagcgatgcgaggagccagagatggatgacgtacgcccagtgggcagaggtagatggtgctaccaatgcgcacttttaccctccaagggcgtgggttcaccaatcaagcgatacaaagtagacgaatgcatttcaaacacgaggctacagatgcgcgggacgcatggcggagagcaactcggtcgacggcatcgacggtctccacgctgccaccttgttcttcagctcggttgcgcccgcagtgatcttgtcccacacgctcctggctgcagccttgaagccaggtctagccgcctctcccgcaacagcagggttggctggagctggggttcggagtgccgcccaacggtcgcgcagggtttggcggagcttactcggccagcgcggcggaacatctttggcatactggcctgcctccatcgccttgatgcgcgtaagcgcgtcttgtgccatatcctcgtgaccctgccacgccttggggagcgggagcgcctgtttgcgcggcacgaccactgtcttaaaggccgactcgggcgccaactcccccttcgccaccgtgccaccgcgataaaccagcttcgtctggtcccacggccggtaggggtcgtaaaacacgcgcacctcgccgaactcctgtgcgagtcgacgcgcctccactgggatcgtcttacccaggatggggtcggtgcgaccgtagatggcgggcacgccacgcgtggtgtagacgtgctcgagacgaggatccaacccgacggcgatggcgtcttgagccttgcggagagccgagcgtgccgaagcgagcttggcgcgccatcctgtcgccgcaggttcggcgggaacaatcggccgcggcagggtcacgcgtccaccggcagcgaggggcgcacccgtttcgaggtgtcgcacttcctcgaggaactgcgtggtgacaggcacgcgcttgcgttccagcccatagcggccaagggtgtactcgtacagccgcatgcctccgaccgaagcggggtcttccatcgagacgaccacggtgccggtctgcttgagctcgcgcatgatgtgagcgttggcggcgccgccgaggtggaggtccagagcgccgtttggcagacgttgcgcctgcatcaatcgtggcgcatcgccgtccctcataccgggaaagcgaggccccggtacagatggctgctccgcgtggatctcggcagcctcgcccgcgctcgaggccggcgatccagagggtgaggtggcgggatactcgcctcgacctgccgactgcagagcgggcgatgacggtgcggagtgcaaccgcgtccagccctcgccctccacacccggcggatatctcgcaggcgttcgcggcgtgctcggtggcgtccactcctcgctgtccaaggcggtcttgaaactgtggccgacgtcagactcggtgcgagccggagtcgtcggtggcggtgcgagcggctcgccatccgagccagtcgacagccgcggcgcactcgtactgcgctgcagagcgtctgcaccattcggagcggtctcgatccgcagtgcgcttgaacttcgctgcagagtcgctggagccgaggctgcgtgcggtgcgccggtagtgtcggcgcgcttcgtgtgtgcgatgggaaccgccgtgactacgcagaagagcagcacgaccagcaggaacgccgaccagcgacgtcccaacccaatgcaaggtttgggcagc

SEQ ID NO: 12862 - DNA, 2826 bp, Oryza sativa
  ref <308>: DATABASE ACCESSION NUMBER: AK110210
  ref <309>: DATABASE ENTRY DATE: 2001-12-06
atctctctctctctctcagcaacctccctcatcggaagacttggccgggatggcgcatttgtacccgcacctgcgcttgcaccaggtgtttggcgcaaacaccgatgtgggcaagaccatctttacgacggcgctgtgtctggcgtcgtcggcgctgccgctcggctccacctcggcggggccggaggatgtgtttgcggcatcggcacaggggctgggagagcgcgtgcactatctgaagccggtctcgacgggtgcgctgacggacgccgacgatgcacacgtttcgcgccacgtgccgcgtgcccagtacaagacgctgtacaggttcaccgaaccggtgagcccgcaccttgcggtcgagctcgagcgtcgcgccaagctggcggagcgggagacgggacaggaaccagcaccgcctagcgacgaggagtttgtgcgcgacgtcggcaactggatccacgcagccgcggcagcacagcacgagggcgcagtggcgtacgtcgagacggccggcggcgtgcattctcccggtccgagcgggctgtcccagtcgcatcttctgcgtccgttgaggatgccgacggtgctcgtgggatcggctgagctcggggggattagcaccacaaggtccgcattcgaaagcctgctggtggcaggatacgacgtggaggcggtgctgctcttcccctcgccgcgctacggcaacgtcgagtacctgcgcaagttctttgctgacgaacacaacatccccgtgtttggtctgggtggtccgaacgattcccacacgtacggtccaccacccacgcgcaacgttgacagtgctgccgactgtgcagccatggcgcgcttttaccaggggctcgtcaggggtcgcacgcccgagtcggcggaagaaagcgcggacggagtgtacggtgtggtgcgacacctgcgcgggcgacacgcagcgcgcatccgcgagctgggcagcatggcgcagcgcacgcgcgacacgtgctggtggcccttcacccagcaccagctcacgcgcaccaacgccgaggtcaacgtgatcgacagcgcctacggcgacttcttcagcatgctcgaccaacgccccgccaacagcagcggaggtggtgggggacttttgcagcccgtgtttgacggaagtgcaagttggtggacgcagtgtttgggacatgcaccccagcgactcgtgacggccgcagcgcatgcggcggggcgatacggacatgtgctcttccccaacggcacgcacgaaccagccctccagctcgcagaacagctcacgggcaaaaacaccgccgaggcttcgctccagacgaatccagggtatgcatgggcagacagggtgtttttcagcgacgacggaagtacgggcatggaggtggcgctcaagatggcgctgcaggcgtcgattgcgcgctatggcgtgcgagcctcgagcgacagggcggcggagaaggccaagccgggccagcaaccggggtataggggtggcagacccaagcaggagtgggaggtgctcgggcttaagggcagctaccatggcgatacgattggcgccatggatgcgtgcgagccgagcgtgtacagcgaggccgtgcactggtaccgcggccgaggcttttggttcgaccctcccactgtcgaacagcgcagcgcaggaagtgtgaccatctcgctccaggtggcggatagggaccttgccgaccgcatgcgcacgctccacctgcccaacgagcttaagggtgccgaaggggccgtgttcgaacgcacctactcgtcaatgcaagaggtgtacgacgtcgaggcccgactcaaggcaaacgatccgctggtgcagttctacaccgactcgatccgcgatacgctgcgcaggctcaccaaggagcagggacgcaagtttggcgcgctcgtgctcgagccgctcgtcatgggtgctggcggcatggtgtttgtcgacccgctcttccagcgtgtgctcatcgacacgtgccgtgctagccaggacctcttctcgctcaccgaccccccactctcgtcatccaccgccgtcgctgcggaagggtggcaggggatccccgtgatctttgacgaggtgttcgcggggctctatcgtctgggtgcatgcacgaccgcgtcggtgctgggaactacgcccgacatctcggtgctcgccaagatcctcacgggaggcatggtgcccatgtcggtcacgcttgcgtcttcggccatctttgacgtgttcaatcgctccgactccaaggtcgatgcgctgctgcacggacacagctacacggcgcatccgatcggatgtgcggtggcgatcgagacgctcagtgcgatcgagacgctcaagcagtcgtctgactggaagcaggctcgggcacagtggcaggcgggggagaagggcgtctggtcgttctggtccaaggatgcggtggaggagctgacggcgctggagggagtcgatcatgctgtcgccatgggctgcgtcctcaaggtcgcgattaaggacaaccagggcggatacacctcgactgcggccgtggacgtgctcaagaagctgcggtacgcaaagtcaaccagccagggccatcccagtgtgcccacgcagcagccggaggatgaggaggctctgccgtacaacgtgcatgcgcgcccgctgggcaacgtcatctacctcatgtcgtcgctcaacaccccgcctagcgtgctgcgcacctcggaacgcgtgctgcacaatgcactgcgctccgccacctcgtagccttccctcagttccatcgcttaatttccacaaccgttagactctgg

SEQ ID NO: 12863 - DNA, 4725 bp, Oryza sativa
  ref <308>: DATABASE ACCESSION NUMBER: AK110211
  ref <309>: DATABASE ENTRY DATE: 2001-12-06
catcctcatccacaacctccattcttggggaccgcacgtcttccaggttcaagaacgatggcggcgtgcaacgatggcgtctttacgcctgtctccgactgccgcttcttcgacttcaccatcgccttctccaacgccatcttcgtgcttctgccgtcatgcctcgctctgctcctcatgaccgtcaggctcgtgcgcctgcgccgcaagcccgacatccccaccgcatccgcccagccccatctctcgcttttgcgctcgtgcacgccccactcggaccccatcagcctcttcggcgccttcgtctacgtcgttcatgcaatcctcagcttggtgctcgtcgcggtccttgctgcgccctcgtctcgctcgctccgacatgctctcgatgacagcaccggcatggccagcgtcgtgcttgcattcctcaccgctcttctcgccgtgcccctttcggtggcagagcgccgaaagacgcgtggaggctacatgcttcttcctctgtggctcctcgcatccctcttcttcaccgcctgccgcattcgaaccttcaatgccatcccggcgatccgatacagccccttcttctacgtctacatcctcacctttgcctgccaggccttcatgctttcggtcgagaatgccaacggcgttcgttcgacgcagctccagtccagccacgagtctcgcgcgagcttcttttcgcgcctcctcttcatctgggtcatcccgcttctctggactggcttgcgcaagccactcgagatgcaggacctcgacgagctcaaacccgaatatcatggccgctctcttgcccgcgcctttatagcgagctggacgggcgcgccgatcgagcccgactcgggatcggatgcctcggagcacgcacaactcgcacgtacggaacacatcgccgacctcaaacagagcccctcgcgcaccagcagcgaagcctacccgctcgagaagctcggtacttctgcgtccgaatccgaatcgggtgcacatggatccgtacccaaagctatgcctccctacacgcgcgcctcgttccccaagaggagggtgtcgcgtagtctgctgcacgccaccctgcacgcctttcctctcgccgctcttgcgccagtcccttggaagctgctgctcaccgccacagagctagcccaaccgctgctcgtctcgactacccttgctttcgtccaatcgtactccgacgtcagcgagggcggacaaccttccgcggcacagcctgctgtctacggatggggtctggtgggtgcttatgcctttgtctatctcggacaggcacttgccactggtcaatactggtacgccagctcgcagctcatgacgcgacttcgaggagcgtacatcgaagcgatctaccgcaagggtctcaacctgcatctccgcactgcgcgtaccagcggcggcggcaaggcggccaatctgatgagtgtcgatagcgagcgcgtagtcaaggccgtcgatgtcatccactcgctgtggagcggtgtgatcaccatcgccgtcggtgtctacctcctctacaaccagcttggcctcgtcttcttcgcgtccatggcgtccgtctttgcctgcttcctgctcaccccgttggcgagccgcggcatcggcgccaagcaagctgcttggagcagccagacggacaagcgtgtcaatctcaccgccagcgtcacctcggacatcaaaggcgtcaagttctcggcatacgaggacgtcctccacgacaagatctgcaaggctcgtgccgacgagttgtcggttcgcagcaacatgatgaagcaggtcaccggtgtggttgtctttaccaactgcactagcgagatgctgggtctgtccaccttcatcacactcatcatcgtcgataagctcagtggctcgtcccgcttcgacctcaacaccatcatcactacgctcacgatcttcagcgtgctgcaggacccgctgctcaagatcggccaagagtactcgtacctgctccaggcttatgccagtatgcgacgtatcgaggagttcctcaacagcgaagacaagccggacgtgcagagtgcggtggatgacggacttgcggctcgagcagcagcggcgtcgagcgcagaccgggagccgtctggatttgccgcccgctttcagaacgcagagcttggctggcaggatcaagcggtcctgtcgcaggtcaatctggaggtccctcgtggatcgctgaccatgatctgcggtcgtctgggtcagggtaagtcgacgcttctgcaggccatgctcggcgagtcggacctgctcagcggcagtcagcagcttccgctcctcgccgatcgcatcgcctacgtgagccaagatatctggctgcaggagaagcgctcgattcgcgagaacatcatctttgccacgggcgagtacgacgaagagcgatacgtgaccgcgctgcgtgcatgtgcgctgttggaggacatcgacggcttgcaggagggcgacgccaccacggcaagctcgctcagtggcggtcagcgccagcgtgtcgctgtggcgcgcgctatctacagcgatgccgagtcgtacctcttcgatgatatcaccagcgctctcgatgccgagacggctgcacacatgtggcggtcgctcatgggtccctcgggcctgctgagcggcaagacggtggtcatggctaccaatgccgtgcacttgctgcaccacgcgcagctcatcgttcgtattgacggcgggaagatcgccgagcagggccggtatgaagagctctcgttgaagggcaaggatgccatctcgcgcgccagtctcgactcgaagagggccttgcctgcggctgacgttgccaacgacaagcccgtcaagagcggagctgcggaaaagcaggaggcagtcatgacgggctccgtcggttggggcgtctatgccaactgggccagggcggcgggtctctggaacttcggcgcctttgtcgcctgcagtgtgctttcgacagtggcgcagatcggtacgacctatctcctgcaggcctgggcgacttcgcagcagcgcgacccgttcaaggcgctgggtgcctggattgccggcttcgtcgcgttgatcccgggcaacgctgttgctctcggattgggattctgggtcatctcgctctactgcgtcgaatcggccggcaacaagctgcacgccggcgagctgcgaggcgtgctctcggcgcccatctcgttcttcagcaagtggagctcgggccagatcaccaaccgcttctcgcaggatctgtacaacctcgaccagacctttacccaggcgttgaccaacctggtctttattgcgtgtggcgtggtcggcgctctgatcaccatgatcgtgcccgcaccgtacttggccgctctggctgttgggttgattggctcttcgtgggcgctgcagcgactctacatcccgtcgagtcgacagttacgtcggctcgagatggcagccaagagtccgctgtactcgctcttttcggaaacgtcgtcgccgtcgggcctggcgacggtgcgtggactgaagcgcgaggcgtcgctggtggaactcaatacgcagtcgctcgacgtttcgcaggcgccctactaccacctgtttgcggtgcgcaggtggctgcagacgtggctgctgctgttgacgacggtggtcaacgtgatgctggtgctgctggtggtggtgctgcgtcattcgtccaaggcaggtctgtttggtgtggcgctggttgaggcgacctcgctcggtatcatgctcaaccacaccgtgatcagcatcaccgaagtcgaaatcgccggcgtggcgctcgagcgcgtgcgcgagttcacggatctccagcctgaggaagaggcaagcccggagcgcaagcttacgaatgacaatgcgcgcgagacgattcgaggcgatatcgagttcgacagcgtcacggtcgcatacggcgcggatctcgagcctgcggtcaaggagctcagcttcacactgcaggctgggcagaggttgggcattgtcggacgcagtggatcgggcaagagcacgacgctgctggcgctgttccggatgatcgagatgcggtcgggagcgatccgaatcgacggacgcgacatcagcgcgatgggcgcacgtgagcttcggtcgcagatgacgatcgtcgcgcagaatccgctggtgctggcggcgtcgattcgcgagaatctggaccccgagggtgtatgcagcgacgaggagatgtgggatgcgctgcacaagtgccatctggccgagtttgtcaagaagcaggacaacgggctggaggaggtgctgctgacgggcaagtcgttcatcagctccgggcagaagcagttgctgtcgctggcacgcgcactgctgcgaaagcgcaagattcttgtgctcgacgaggcgaccagcgccatggatgtcgagaccgacgcggctgtgcagaacgtcctcgagacccagttcgcagactgcaccgtcatcgccgtcgcgcatcgcatcgccacgatcatcgggttcgatcagatcatctgcatgtccgctggtcgcgccatcgagagcggcacaccgcaggacctccttcaggcccgcggcgagttctgggcgctcgctgccgagcagaagtgcgtctagccttgttgatatgcagacactttgttaagatgcggaactcgccttgttgcaatggatacactttcacaccttgag

SEQ ID NO: 12864 - DNA, 2391 bp, Oryza sativa
  ref <308>: DATABASE ACCESSION NUMBER: AK110212
  ref <309>: DATABASE ENTRY DATE: 2001-12-06
gaccctgttgaaggcatctgcgacggctcaaagcatctttctcccaccacggccgctgaccgcaatcttctcctccagaaacactcccacctaccgactgtacaaccaaccctcatagacacaacaacaatggctcccgctgctgtgcccaacggcgaggcctcctctgccaacgacaacatcacacgcttcgctcctcccagcagagctttcactccccagcccgaccacaagctcttccaccccaagacaagatgtttcgcctacggaatgcagaccaaggccgtccagggtatgcttgacttcgatttcatctgcaagcgcaagcagccttccgtcgccggtatcatctacactttcggcggtcagttcgtcagcaagatgtactggggcactaccgagaccctcctcccggtctaccagtccactgccaacgccatggccaagcaccccgatgtcgacaccgtcgtcaacttcgcttcctcccgttccgtttaccagtccaccatggagctcatggagttccctcagatcaagtccatcgccatcatcgctgagggtgtccccgagaggcgcgcacgtgagatcctccacgttgcccagaagaagggtgtcaccatcattggccctgccactgtcggtggtatcaagcccggtgcttacaagatcggtaacactggtggcatgatggacaacatcgttgcctccaagctttaccgcaagggttccgtcggttacgtctccaagtccggcggtatgtccaacgagctcaacaacatcatcgcccagaccaccgacggtgtgtacgagggtgtcgccatcggtggcgacaggtaccccggtaccactttcatcgaccacatgctccgctaccaggccaaccctgagtgcaaggttctcgtcctcctcggtgaggtcggtggtgttgaggaataccgtgtgattgaggctgtcaaggccggtaccatcaccaagcccattgttgcctgggctatcggtactgttgccggtatgctcaccactgaggttcagttcggtcacgccggttctttcgccaactctcagctcgagaccgccgctgtcaagaaccagaccatgcgtgaggccggtttccacgttcccgagaccttcgaggacctgcccgctgtcctctccaaggtctacaaggacctcgtttcccagggcagcatcaagccccagcccgagcccgctgttcccaagatccccattgactactcctgggcccaggagcttggtctcatccgtaagcctgctgccttcatctccaccatctccgacgaccgtggacaggagcttctctacgccggcatgcccatttccgacgtcttcaaggacaacattggcatcggtggtgtcatgtctctcctctggttccgccgccgtcttcccgactacgctgccaagttccttgagatggtcctcatgcttaccgccgaccacggtcccgccgtgtctggtgccatgaacaccatcattaccactcgtgccggcaaggacttgatctcggctcttgtctctggtctcctgaccatcggatcccgcttcggtggtgctcttgacggcgccgccgaggagttcacccgcgcctacgacaagggtctttctccccgtgacttcgtcgacaccatgaggaaggagaacaagctcatccctggtatcggtcaccgtgtcaagtctcgcaacaaccccgatctccgtgtctctctcgtcaaggagttctgccaggccaacttcccctccaccaagctcctcgactacgccattgccgtcgagactgtcaccaccagcaagaaggacaacctcatcctcaacgtcgacggtgctgttgccgtctgcttcgttgacctcatgcgcaattgcggcgccttctcccccgaggaggccgaggactacctcaagatgggtgtgctcaacggtcttttcgtccttggtcgctccattggtctgattgcccacttcctcgaccagaagaggctccgcaccggtctctaccgtcgcccctgggacgacatcacctacctcctccccgagctcagccagggcaccgcccccggccaggcctctcgtgtcgaggtctctgccaactctgtcaaattgattattctccagggtttctgaggcagtgctgtcggtctttattccaggttgtctctaatgtcatcgcaatggcgtttgggagatttccggggatttccaggaagtgcattatggttcgttcattctcgaatgatggttttatagataagttgcggtccatgtcgatcgctgtacgaagggcgaacgtgtggcaacaagcgttgataacgaaacacctcgcttttgcacgcgcaccccgcccagatacgaaatgttataatttttccaatgttc

SEQ ID NO: 12865 - DNA, 2878 bp, Oryza sativa
  ref <308>: DATABASE ACCESSION NUMBER: AK110213
  ref <309>: DATABASE ENTRY DATE: 2001-12-06
acctgcatcttcactaacccgtgattgcctgacctttgctccttgctccctctccttgctctccctcgcactcgccattgccatcctgcgggaatcccattgctatttaaacttccacctgccttccaccttcacctctcccaacaatctgcagagacccgcctcgagccttacaccgccaaccctggcctctgcctaattcgctgcctcgacctcacccttttaccaacaatcctctcgactgatcggttcccgactcaggaagctgcaccccgcagcccttgttccttcctcgagcaagctcctctgcaccaaaacaccaccacaatcacccaattcaattctgcacacaatggcacccgccgacatccccccgcccctggaaggcaagaagaggagaattggcgtcatgacctccggaggagatgcgccaggcatgaacggaagcgttcgcgccgtcgtccgtatggccctgcacagcaattgcgaagcctacgccatctatgagggctacgacggtctcgtcaagggcggcgacatgatcaaggagatgaagtgggaagacgtgcgagggttcctttccgaaggtggcgcgcttattggaacggcacgctgcatggagttcatgcagcgggacggccggagaacagcggccaagaacatgatcctcaagggcatcgatgccttggtaatctgcggcggtgacggaagtcttacgggagcagacagattccgcgacgaatggcccagtcttctggaagaattggtcgagaggaaggagctcaccaaggatcaggtcgctcctttcaagcacctcaacatcgtcggcctcgtcggctccatcgacaacgatctcagcatgacagatgccacaattggctgctacagctcgcttgccagaatttgcgaggcaatcgactctgtggatacgacagcgacaagtcaccagcgtgctttcgttgtagtgacaatgggaaggcattgcggttggcttaccctcatggctggcgtcgctactggcagcgacttcatcttcattcccaagcagcctgcaaaggagggctgggaaggaaacatgcttcacatcatccagaagcatcgtgccatgggcaagcggaagaccatcgtcattgtggctgagggcgctatcgacgaaaatctcaacaagatcacaccacaccagatcaaggagatcctctccgaggctggactagatacccgcgttaccacactaggccacgtgcaacgaggaggtcagccggccgcttacgatcggatgctctcgacgcttcagggcgctgaagcagtcaaagcggtgttggaagctacccccgaaacgccctctcccgtcatctgcatgatcgaaaacaagattgtccgtcgtccgctactcgaggcggttgcgcagacaaagaaggtcgcagaagccatcgagaagaaagatttcaagaccgccatggatctccgcgacgctgaattctctgagtattttaaggcataccagatcaccacagctgccgagcaacctaaccttatgctgccaaaagagaaacgtatgcgcgtcggtatcattcacgttggcgcccctgcgggtggcatgaacgccgcgacccgcgctgcagttgcttactgtctagcacgcggacacacgcctgttgctctccacaacggcttccctggattgatccgacaccactctgacaagcctcttggggcagtacgcgacatcgactggctcgatgctgagacctgggcaaacaagggtggatcagaaattggcacgaaccgtggcctcccgagtgaagacctagagaccgtggcatacgtgtttaaggaatacaagatcgaggctctctttgtggtgggtggcttcgaagctttcactgctgttagcgagctgcggaagggcagagagcactacaagtctttcaagattcctatggtcattcttcccgcaaccatatccaacaacgttcctgggaccgagtactctattggttcggatacatgcctcaacgcccttattcaatacagcgatgcatgccgtcaatctgcctccgcttcgcgtcgcagggttttcgttgtagagactcagggtggtgagtccgggtatattgctaccatcgcaggcctttcaattggtgctttcgccgtatacactcctgaggacggcatttcgctcaagatgctggaccacgacattgatgctctacgtgatgcgttcactaaggacaagggccagaatcgtgctggcaaagtcattcttgtcaacgagaaggcttcgaaaacatattctgtccagatcattgccgacatgatcgccgaggctggaaagggcaaattcgagtcaaggcatggcgtacctggacatttccagcaaggaacgataccaagcccgatggatcgtgtgagggcggtgcggtttgccttcaggagtatggagcacattgagcaatacgcaggtatggacccggacgatatcgacgatgacgccatgagcacggctgttattggtatcaagggtgcgaaggtgctgttctcgccaatggaggctattgagaagaaggagactgactggcaccgacgacgacccaagaaggagttctggatggagttgaaacaatatgttgacattcttagtggccgcccgccgaacaacaaggcccagcactaggagatcttggctgaacgaggagggcattttgtctccaagcgggtgatcagggcgtacaaactttagtgcgccatgtcagctgttgattagtaggaatggcatcggtgggtttggatggtatgatgaattttcggacatgcacgttcatgtataaagacctatgagcaacacgcctcgtgtagaatgatttcaatgagagtatgc

SEQ ID NO: 12866 - DNA, 3069 bp, Oryza sativa
  ref <308>: DATABASE ACCESSION NUMBER: AK110214
  ref <309>: DATABASE ENTRY DATE: 2001-12-06
cggcgaccaacgatatcatcccgctgctcgccaacctgcctgctcccgacgcgccgtccgcttcacccatcaacctcgccgacaaggtgtgggcgctcgcttcggtctcgctcctgctctccgtcagtcctactcagtccgcggcagaggtcaagctgcatcgcaagctcctcctctcgcacaacctcgtcggcaggctcatcctcgcgctccactcccacaccgaggtcgacgtgcgccgcgaagccagcggcgcgctccgcaacctctgcgtcgacgcaggcatcgatgtgcgcaacgagctggtcaacaagggcggcatccccgccatcctcgccgcgctgcgctgggcaagcaatgcgcttggcttcgacgccgcccccgccgccagcgccaatccgtccatttcgttcgtcgacgacgcacccacccaggagcaggacatcgaggccaaacgtgccctgctcgcaaagccgctcgacaagatgaacaagaaggaaaaacgacacgccaccaagctcgccaccgcgctcggcaagacgctcgaacagctcgccggtcagggcctctcggcagacgacgaggccaagctcactgcatcccatcagccctccaacggctcctcggatcaagtcatggacacggcatcctcggtcgctcccgcagctgtgcgcgccgcagagccgttcctcagcctcgactccaacacgcgcaaaggtctcgtcgagatggccgacaacctcgtcacgctcgtctggagcctgtgcgagtccggagacaaggccttcgccaagctcgtgtcgtggaagtggctcgatcacgacattgtcggcgcggcggctgccaatgacgaactgagcggtgagggtctcgcctcttggctctcctccgccatcgccctcggctcccgagccgctgctgttctgtccacggccggcgcagacggctcgcgagcatcgtcttcgtccgcgcacgatgcggccgatgcgctcggcgtgctctccaacgaggagctctcgctgctgctcgaccttgccttggcgtcaggtaatgcgctttgcgccttgaccgatggcggtgaggccgactttgtcgatggtctgctctctcgcaagatgcccgcgcacattcccaaggctgccaagaagaaggcggcatccgtctcgatcgacgtgcgcgtggtgcagtcgattgacgagcagccagaggcggctacgcgccgcctcgccgctattcagacggccgtgacgctgctcgaggcatgcgtgcagacggaccagtcgggcatcgacaagctcaagcgctacattctgtcgcagtcgaccatgctgggtgtgctttgtgccggcgtgctgcgcaatgtggcagcagccgtcgactcgcacgcctcgacacggtcgagcggcaaggcgcgcaagaacgccgccgccgccgcttttagctcggacaacgtctttctgcccgcgtcgtctggcgcgggtgtggcgagcaagagcgagaagggaaagctcgatgcatcgcagggtgtgtcgctgaagcgattcgaggaggcgacggtgctgccgacgcttacgcggctgctggcgggcgtggatatgacgcggctcgcgcacgatctcgatggtcgaggcgatgtgggcgacgtgtcgctcgacggatccaaggacgcagacgaggcggcggtgcgcgccaagatgcagcgcaaggccgaggagcaggcgcagacgctcatgcttgcgctcgaggtggtggccgagatggcgggctcgctcgacgcgcgtgcgggagcagatggcgatgagggcgagtggctcgaggacctcgatgccgaagacgccggtgacgaggatatggacatgggcgatgaagacgacgacgtgcccgaggacatggaggccatgctcaacgacgaggcgggtgacgacgacatgcgcgtggatgcggagcaaaaggatacctttgccgacgcggtcaagcgcagtggaagcatgccgttcgaggcgtatgcgcccgtgctgtgtgcgatctttggcgatgcctcgtcgctcaccgacgcgctgttggcactggctaggccgtttgaggcgagctttccgtcgctgtcgtcgggggccaagagtgcggatgcggatgcgacgacgtcgggacagctgcgtgggctgcatctgcgctcgctgtcggtgctcaacaatctgatgctcaggctcgcgtcgttttcgccgccgccaccgtcgcagcccgcaacggaaccgaagctgcagcgacgcattgcggcgttgcgcgcgtggacgcagcagcccacgcctgcacgcacgctgggcagcgtgtggacgagtctgtttgacatcgccaagggatgtgcaagtgttcctgccgttgccggggcgggcgcgggcgcgattgtcgaggatggcgtggtgggctcgatcggcagtgcagacggcagggaggtgggagagggcgagggtggcgatgggatggcgatggtcgagacgtgcattggcaccatgtggtcggtggcacgaatcgtcgaaggcaacgttgcgctttcggccgagccggcggtgagggtgacggacgcgggtgcggtgtctagcgaggtggtttcgctggtggcggggtatgcgtcggcgaggagcgatgcgatgcgcgtcaagtgcgtgctgctgctctcgaccatcgctcgtgcgcccgccgtgcatgcgaacctcaacgctcacattggcaactggctcgtatcgctgctcgaggccatccccgagcgtggctctgctggaacgacgccggagagcatggttgcggcgatcaatgggttgatcgacgtgtatgcggacgaaacggcgacgtacgatgcacatggcttccgcgaacagggtctgttggctaggatgcggctcacgctgttccggtgcaaggcgctggcgaggacgatcgaccgacgcaagcagatctcgctgcgcgccagtgccgaggaggcgctcgagaatctggcaggtttcatccagtatcgccagagccttgggttgtagcgtcgatccaagctgtatgccattgaaagttgatccttgc

SEQ ID NO: 12867 - DNA, 2833 bp, Oryza sativa
  ref <308>: DATABASE ACCESSION NUMBER: AK110215
  ref <309>: DATABASE ENTRY DATE: 2001-12-06
gttgttctggccacaagcgtctccttgctctcgctctcttcatctctctgctaacccgcactggcggctcactagtcctctcactcctggtcgccagccgaagagccgccgagtcgtcgccatgtcgaccttcttccagaagcagcagcaggtcgctgcgctcgaccctcgtctcggaggactgatggcgagcgccggtctgtacaacctcaaggcgctcatcaaggccatccgttcgtgcaagacgctggccgacgagcgatccctcatccagaaggagtccgcctccatccgaaccgccttcaaggatgaggaccccttcgcgcgccacaacaacatcgcaaaactcctctacatccacatgctcggctaccccgcccactttggccagatcgaatgcctcaagctcgtcgccaccccccgcttcaccgacaagcgcctcggctacctcggcatcatgctcttgctcgacgaaaacacagaggtgctcacgctcgtcaccaacggcctcaagaacgacatggagcactccaacatgtacgtctgcggcctcgccctctgcacttttgccaacatcgcctccgaggagatgtcgcgcgacctctgcaacgagattgagaagctcatgggcagtagcaacacctacatccgccgcaaggccgccatctgcgccatgcgcatcgtccgcaaggtacccgacctcatcgaccactttgccgaccgcaccaggcagctgctctcggacaagaaccacggcgtcctcctctgcgccgtcaccctcgccattgaaatcgtccgacaggacgccgacgccctgcaagacttccgacgcgccgtgccactgctcgtacagcacctcaagtcgctcgtcaccaccggctattcgcccgagcacgacgtctcgggcatcaccgaccccttcctccaggtcaagatcctccgcctcctccgtgtgctcggcaaggaaaacgcgcaggcgtccgaagccatgaacgacatcctcgcacaggtcgccacaaacacagaagcatccaaaaacgtcggcaacagcatcctgtacgagaccgtgctcaccatcctcgagatcgatgcggacaacggtctgcgcgtcatggccatcaacatcctcggcaagttcctcagcaaccgcgacaacaacatccgctacgtcgcgctcaacacgctcagcaaggtggtctcgatggacaccaacgcggtgcagcgccaccgcaacatcatcctcgactgtctgcgcgacggcgacatctcgatccgccggcgtgcgctcgagctgagctatgcgctgatcaacgagagcaacgtgcgtgtgctcacgcgcgagcttctctccttcctcgaggtggcggacaacgagttcaagctgggcatgaccacgcagatctgcctcgccgccgaacggttcgcgcccaacaagcgctggcacatcgacacggtgctgcgcgtgctgaagctcgcgggcaactacgtgcgcgacgagatcctctcggccttcatccggctcgtctgccacacgcccgagctgcaggcgtatacggtgcagaagctcttctcggcgcttcaccacgacttttcgcaggagagcctcacgctcgccgccgtgtgggtcattggcgagttcggtgacgtgctcgtgcagggaggcaactttgaggacgaggagctggtgcgcgaggtgcagcccaaggatgtcgtggacctgctctcgtccgtgctggatagcccgtatgtcaacggccacatcaagcagtttgtgctgacttcgctggccaagctgcatacacggcttccggattcggcgcagcagaaccgcatcgagcagatcatcggcagcttcgagagcagtgtcgaggtcgagatccagcagcgcagcgtcgagttctcgagcctgctgcgcaggagcgacatccgcgagggtgtgctcgagagcatgccgccgcccgaaatcaagcagaccgtgctgggcaccgtgagcgaggccaagccggtgggctcgacacgcacggacaaggatgcgctgctcgacctcatgggcgacgagatgccggtggcgagcggcggtgcggcggccagcgcgggtgccagtacgcagcagagcacgcaggatctgctggccgacatctttggcgccagcgacatgggtggcgctcccgcgcctgctgctgcgccggcggatcaaccggctcagaagcccaagagctcggtcaacgacattctcggtctgtttggcgacagtggcagcacacccgctgcaccagcggcggctcctgctgcaacagcttctgcatcctcagcctttgggggtcttgacttgctcggtggcctgggcggtagctcgtcgtctcctgcccctactcaagcagctgctccgcctgcacctgcacccgctgctgcacccgctgctcccgcaggatcgagtgccaaggcgcatacagtgtacgagaagaatggactcaagatcacgcttacgcccacgaccaacccggcgcgtcccgagattgtcaacatcacggcgcgcttcaccgccacggctggcaacgtgtccggggtcaacttccaggcggcggtacccaagacgcacaagctgcagatgcaggccatctccaactcggacgtggtgcctggtgcgactgagacgcaggcgctgcgtgtcatggtgcccaacagtgcacccgtgcgtctgcgtctgcgcatcgccttcaccgtcaatggccaaagcatccaggaccagacagattggactcaaccctccgcctaacacgccccgccacctctagccatccgcatgtttccgaatccatgccttgcctccgtg

SEQ ID NO: 12868 - DNA, 3751 bp, Oryza sativa
  ref <308>: DATABASE ACCESSION NUMBER: AK110216
  ref <309>: DATABASE ENTRY DATE: 2001-12-06
accattcccctcatcacaaaacatcttattcccatcaaaccatcaccccttcttgtgtgcatcacggcaacaacccacccagtattggcgacagcacaactgccttttcgtcaggtagctagtggaggattcaacacgggctctcttgatttgcaccggcgcgtcttgggtcattgtcgcccctccgcgtggtaaaacccagacgcaacccaagaagcaaaaaaaaaaagcccagctggggacgtcgcgtgcgcatcgtcttgttcgcgatacccacaccagctacgcgccttcacccttgcttcgtcgcgacaaacaatcgaggttgtcgttgatcaacctgtcgaggacaaccaccaactgctccctctgacaatcacctcgtgagacagactcctcggaccagctgtctgcctcgcttgggcgacttctgcaactcccagccaactttgcgttactgggatatggacaaccctcactaccctaatgtcataggcacatcgggttctagctatccatcgcacgcagccgccatctcgcctcaccagctccaaaacagccagctgccgcctcagcaccaacaaaaccacctcccgccgcacacgctgccccctctgcagccccattccaacccggctatgcactctgtttacaacagccaccctcatacgcctcgcacgcccggcacgcccaaccctcccacgccctccaacggaatgagcaactatcctcagccgccctcgcagggagctccccgcggctaccctcagatgatgaactaccctcaaccccctcaacacggatacggcacaacctcgtccgtgatgccccagtcctcggtggctcagtctcacccgcaacccatcgcgcccgctcccgcgacgcgtcctcctgtcttgcgccccatgcccgctggcggtgtcatgcctcagtccggcatgtcctcgccgtacggccagagccccctgatgccccagcagcagtccatcctgcaagatcaggagcagccgactcacgtggtcggttcccagggtcggcgtggtatcctccccagtgctcctggtcgacctgctgcccccacgggcgccggtgctgccaagaacacagtcatccctcagaaggacgccgacggcaaattcccctgcccccactgcaccaagacctatctccacgccaaacacctcaagcgccaccttttgcgccacacgggcgatcgcccctacatgtgtgttttgtgccgtgatacgttctcacgaagtgatattctcaagagacatttctagaagtgctccatccggcgaggaaaccccaccggggccagtcacctgtctcacccccaagctcacgttaagaagcaccaggctgcccagcagaaggcccaagaaaacgagatgaaccagatgaacggaatgagccaaatgcagggagacggcagcatcggcccctttggaatggtccagatgaacgacggtatgggaaacctggccaatgaccagaaccagctgtcgcggtccagcagcatgagccgaatggatgaccagcagaaccgtgaccgacgtagcatgactggcggcggatcggtgtacggcaatgatgtccagaactccatggcctccaacatcaacccgcagctcgccaactacagcatgcctcagggtcagaacggcatgcccatgttcggaggagccaaccaaaatcaacagatgcctacagaatggccgttgttcccgggctcaacaaccggtcgcgatgaaagcagaacccagtaacggcgatactgagaggacctccccgagcgaccaaaccgaccgatccctcttcttcaattgggacagtccttccacaatgcttgacccataccagcatctttccacccagattcttcatttcctctgccctccaggaaccgcgacccagacggccggtttgaacgcccacctatccccagccaacactaaagacttcattgaaaaatatactcacttccacgtccatttctccttcttgcacataccgacattccgcatcttggacgcttacactgggctcctggccagcatgtgttgcattggcgcatgctactcgcatcgcctttcgccggaccaggtccgtgacatgacaaatctcctccaggcggccctggagcgggacaccgaacttcttaccggcggtctccatgccgaccccaaatccgggacagctatcgacaaggtacagctagagaagttgcaggcgctcacgctcctaatcatcctgttgacttggaacggaacgccctcgcagcgtgaggacggggggcgttttttcccccacgtcgctgaggctgcacgacagcttggactattgcgcgtctcgtctggtccctacttgcgcagtgttctgcaccagccagatttctccctgcaaaacgtgcgccccgaatatgactttgattgggtcacgtgggttgagcaggagaggcgtatccggctgatgtacatgatctacctgacggatgtggctgaggggttgtatttcaatgctgcgccgcggttcgacagcttggagctccacatacccctgcccgcagatgatgccgcatgggaggcacatacgcctactgaatgtgccgaagctctccacttgtatggatcagacgccgccaaaattcgcaaccctgacggttcacagcggagcaaacagccggagcttgaccttgccctccgcgccttgttccatgaatcttaccagattcaccccggcagcaccaatctgtatggaaagttcatccttatccacggcctcttggcccagatccgacgagcccatgccgaaggtaacttggtatctctcaatggcttctcgacacctctgtctcacaatgactgggttttcaagcccggctcggagcccccaagtgctgccggcagtgccaacaacagcggaagggctacccccgtctcgggcctgggccaaggcatctcccctcaagcgtataaaagcatttatacggcgctggacaagttcaagtcaaattgggatatggacatggcgattcagtttcctccctcgattcaaaatcacaggcggtatggcttctcgcgcgacgggatccactacttctggctcgccaaatatattgtcaaaaacacgcgaccaggcgacctgcacctgccgagcgaccatcgctttatgcaagtcatccagttgatcaagtctgtcaaggcttgggtcatgtcggacggcgcgcaacgaggcgaggagctgggctcgatgggccagattgacaacgactttggttcccacgatctcaccttgaatatgccgagtctcttcaagcctctgcccgaggtcgtcgattcccctggcatggcggtggtcaaaacggaaatgtgagagagtgtggccggcgaattccatccggccaggggcagcgcattcttcagcatcggtggcgtttttttctccctcgcgatttcctcatccggtttccgttttgagcaaaagtttcgattccccttctctgcattggaacggcatgatggcggctctttgctctgcattttctctggcgtggtggttgcaatacttagactggttttaacttcagcattagactcgacacatagacaaaggaaggcaggtggacggttggaactcgtcacgatggagatgtggccatggcggttcatgtttgacgttgacgtttgggaaggtctccctcagtatgcgtatatacggttaacggatgaaaagaaattgtgtgtcgagc

SEQ ID NO: 12869 - DNA, 3103 bp, Oryza sativa
  ref <308>: DATABASE ACCESSION NUMBER: AK110217
  ref <309>: DATABASE ENTRY DATE: 2001-12-06
accccatctacaacctcctcggcgactggaacaaggccgcctggttcaagtacagccgcaacatcgaaatgcacaacaagctcatggccgccatcctccgccatcccgctccgcgcatcggcgagaccttccgcctcccttcgcccgacgaggacctcgccttcgtctgcaccttccccggcgcactcgactggggcaggggcctcctgggcatcgacttttccatgtggcccctcttcaaggcgctctccatcgacaacgtgctcaccatctgcgaggtcgccctcgcaccagcaggtcgcatcctcttcatgtcgcgtcaccccgccctcatgggcatggccgtcgagacggtcaagtacctcgtcgagctctgcggctggaagggcgtcgcacaccaaaattgccacgccagagacgtgcgcatctacctcgaggaccccggctcctggctcatcgccatcaacaccgagctgcgcagcatcatcaagccgcccaaggaggtctgcatcgtcgacctcgacatcaattttgtcaactgtccgcgcccgcccctcaaggcgccctccaagggcgccgccagagacaggaagcgcagaaaactcatcgccgccctcggcttctcctccgccgactacaccatcccgcgcgagtacgtcgaggccttccccagcggccgcttccgcccgctcagcaaggtcgagtccacctcgcgcgacgtcgcctacgagcgcctcgagacgccccagtggtgggaccagggcgcgctcgtcggcgcctttgaccacatacttcacgaaggcaccaagcccagcttcctcaaaaaggtgctccgcatgcgcaccgacaagcaggccgtggcatccgagaccgaacaggccgccgtcctggcgctgcgcaagcgcgccagcacctttgtcgacgcgcgcgacggtctcgagaacaagatcggcaggctcaacaagcgactcgccttcctcatgagcgagggcgagatgtggcgtcagcagtttgacaagatccagcagctcgtcgaccgcctcacgcgcgaggcgggcgacctgcgcgccaaactcgacaaggagcgccgcgagtcgcgcaggctcagctcgacgctccagcagcgcgatctcgaatacgtccaggcgcagatccagctcaaggagaccgagcaggcccgcgaaaaggcacagggcgagctgctccgcgtgcgcaccgccatggagaacctcgagtcggagcgagaggccatgatggacgagatccgcaacgtcctctccacctcgggcgacgactttggcatggcttcgctcggcaatctgcagagcatgacccagaactacacccgactcgacggcgccggctcgcccgcagctagcgacgccagccacaacaccgagatgcacattatgaagtcgcgcgcgctcgccgagcagcgcatctccatgggtcagccgcgtacccccagccgcctcaacaaaggctccgtcgcgccgtcggaagacgcgcatgccaatggcgcccagcccaacgcgtcggcgtccaaccacttccccgacgagcagatgaacaatgagatccagaagcgcaccacggcggtgacggatcagatcgccaaaatccagcagcagctcgagtcgacgctcacccagctcgagggccgacgctcggtcacgttggagcgcagccgccgcctgtcgtcctcgtcgtccgtgggcagccaccgctttgatgccgcctcgagtgtgggtcaccacaatgcggttgcctccagcattgggcatggggatgacgggctgtacgctcaccgaccgtccgaggaggtcgagacgatgaacggtgagcgcgctgcagtgccacgacgccagcgcacggtgtcttcgacgaaccacgcgtcgacacagcgctccaaccagctggctcggcccacgcccgtgctgacgcccaagagccctgcgcgcggccagcgcgaatcgttagtctcgtccaccgcaccgcacaccgacaacagctcgctcgaggcgaatggacacgacacctcgtcgccacccagcgagccacagcctgccgaggccaccaaagacgcagcaccagtggccactgctgctacagcgggtgctgcggcagcaatcgtcggtgcggctgcctcgcctgctgcgctcggcagcagcaagcaagaggtcaaactagctgagattgaggctgcgggcgaccgcagcaaggatctgcccgacgtacctgcggacttgagcagtgccgatgtcgacgcctcgaagctcgacgagcccgacgccactgatgatgaagacggggatgcgctcaacatgtttgacgagcccgaggatttccgccccaagacgccacctgcaacggtgacgtactacgaattccccggcacctcttccaaggtgacgctcaacctggtagggtctcatccgttgtggggccacctggcgtggaacgctagtttcatcatggcggacttcctctgcgcgcacgctctcacactcaccaagggtaagcgtgtgctggagttgggtgctgcagctggattgccaagtatcgtctgcaactgggcgtctgcatcgcacgtagtcgcgaccgactaccccgataaggcccttatcgacaacctcacgcgcaacattgtcgaaaactgtcaggacggagcgagcccactgcggggagcgggggagacgtttgtagagggctatatttggggtcgggatgcaacgccgcttctggaaaaggccggtggcaagtttgacttgatcctcatgtcggatttggtctttaaccatcaagcccatccggcactgttggatacctgcgatgcgtgtttgtcggatgcagtagcggacgaaggcgtagcgaccccttgcgtgctggtcttctttacccaccacaggccgcatttggcgtacaaggatatgcagttcttcgacatggccgaagtcaagggctggaagttcgaaaagctcggagagtggttcaagcagccaatgttcccacaggatccgggtgacgaggtcgtgcgatccaccatccatggattcaagctctggagagcgtagagaccaatacaattcgttcttgcttcggt

SEQ ID NO: 12870 - DNA, 3457 bp, Oryza sativa
  ref <308>: DATABASE ACCESSION NUMBER: AK110218
  ref <309>: DATABASE ENTRY DATE: 2001-12-06
ctgctccggcaggtgctgccggtgcgaggcagcggcgccctcgctgcggttgctgctgctccgcccgttttgttgccgctggatgacctatcgtccgccacctcgctgctagtggcgttgacctcctgccctcctgcgtcggcggagcagtggggcgcgctgtacgcgctgacgcagctggcggtgcagtcgctgacagcgctggacgccaatctgcccatcgcccagctggcacccatcgtcgccggcctgcagaaaacgatcgacgcgcttctcagcgactgcgcctacctcgatgcggtgctggctctgcaaaagagtttgctactcgagcagctgcgcttcggccgcagcgctgcgctgtcggctgtggtggcttcttacggcacagcgctgctgtttgcaagcggcagcagcagcggcggcgctgtttctgctcccccactgtcgagcttcgattcggcggcgggcgctgctgtcgctgccccctccacatcgacgcagctgctggtgtcgtctcgcttcgccagctgtcgcacggcgggcagcagcatgggctcgccgctgctgatcaacgacaactggtcgaaccacatcgacttctcgctgccgctgacgctcgatgcgatcagcacggcgcgcgcggaagccgaagacgacagcgagagtggcgctgtgtccactgccatctgccaggcgcgcgagctgtgcgagtgccagacgcgctgggggtggcgcgcgcagcagaagcagtgtagtatgcatctggacgagcagtgcgaggcggaggcgagcgcagcagcgcagcagcgcacgcaggtgacgcgccaaaatcaggcgagcgctctcgcttgcgcctggtacaacgccaccgcgcgcgccatgtcgaccgctgggtgtcagtcgcacggcatgattgccgatagcgcgacaggcgcgctgtcgatgaactgcagctgcacgtttggctcccaatttggcgttcttgttgcccagcagcaggcaaaggtggcagcgccgctgccagtgaactgcgctctcacccccgcctggtggtacctcgtcttccttgttgcttacatactgctgggcatcgccgcctcgcgccagttctggcgtctgttgggcgcggcgcgctggtactactcgctgctgctgtcggtgcacgcttggctagtggcgctggctgcgctgagagcgatcaacgtggcggtgctgtggctcgcctaccagcagctgcagatcggaacgcagtcgctgctgtacgcgctgccgtggctgtgcgtggcgccgacgctaagcgggctgctgcagcactggcgcgaggtgcaggctgcactggcgccaaagagcgcggcaggcgctggtgccgctgcaaaggtggctcccgcgcagctgcaggcagccccagtcgacgccatctcgcgtgtggggctgaccgatgtgcggctggcggagtacaatggagcagccagcgacgccccagtctctgcgaaagcgcatcggcgcgcgtctgtggcgcagctgcaactgcacgcgcggcagcagacacgcaaggtgacacggcaccgctggcaggtgctgctgaatctgctgctgggcgtggtgttcctggcgctgacgggtctgatcggcaacacagattcgattgcgcagaaggagacgtacacagacggagtgctctggctagcggcgctggccaatctgctcttcgccactgcactggcgtatgaagcttcgcaactcaatgcgcagtggcgcgccgtgctgctgcgagagcaggaggagccgcagcatctggatgcgaagcaatctgaggcggcagtcgctgctgcagcagctgcagtcagcgctcgtctcaaagctgcccagacggtgcgcgctcgcacagcgaccgccatggtgctgcttgtgctcggtctgctcggcgccgcagcagtgctgctggtgaccgtcgccttcagcggcgcgcggctgcacctcgatgcggtcttcgacgccaccttctactcttgcgatgtggtggcgctgggcatggtgctgctgctgctgtgggctgcgacggcgcaggcagtgcgcactggcgtcccactgtcgaccaaagcagggccgcacgcgcgccgcgaggtcagctcgcagcagaacgggtggctggaagaggaggaggaccaagaggaggaggaggaaagccgctgcagcacggacgaaggcagcgcggagcacagcctcagcagcctcagcccgtccatgtacggtcgagcccacgcggcagccgaaggcgaagaggaggcggaagatgtcgcagccgcagctgacgacggcccgctgcatggcggggaggaggacagctctgctgcagctggagcccagcaagcagtgtcgcgcgttgcctctcacagctcgcaccagtggcgcatcactggcgcgctcgagcagcgcaccaacagctggattctgcgcacgcccaattggtcacagcctgtgcgtccgatgcgcttgccgcctctgccggccacagtgacgttgaagaaagctccctcgcagacgtcgccccccgccaccgccaccgtcgccgacgacgacctcatcgctcctcccatcgatcgcctcggcgtggtgcgcgtgcacagctacagtggcagcggtagcagcagcagtcacaagtcggacaagagcgagtcaagcgagtcgctgcccggaagcagctccactgaggctgagcgcgtcaccagcgctgccactgagacggtagacgatgcccacaccagcaagcgcttgtcgggcggcggcagcagccgcagcatggagtcgtctccctccatgcagccgcgcgtctctcctgcttccccttcagctggcgctgccctcgctcctcctactgctggctcgctgagcttgagttcgcttgctggctctgctgccagcgccgctgcgcaccggcgacgcgagcagtccatcacgcgcaagatgacgctgctgcgctcgcggtcggtctcgcgctctcgagctcatatgccgctcgtatccaacaagatcgcacatgcctaccagcaggccttcgtgcaagcctacgccgacgccacacggagagcagcgccaacgcaaactgcaacggcacccgcaccacccgccactccactcactccgccctcacaaccatcacacacgcaatcactatgatcacacacacacacacactgcgcgcgagtttgatgggcagtcactccatgcctcggatctcgcagcgacggtcttctctcctctcagacccagagtcttttttctttctctgctggcagtgttttgtccaatgctcttcctactttccttttaccctgctccttggtgtgttcgtcatttgctgcttttctccctctcgctctttcttctcattacagtcatgggcagaattagcgttcacctctaacaaaatctgagaacaactcaaacttgtctc

SEQ ID NO: 12871 - DNA, 3721 bp, Oryza sativa
  ref <308>: DATABASE ACCESSION NUMBER: AK110219
  ref <309>: DATABASE ENTRY DATE: 2001-12-06
ctttcaagtaccctggcgccgttgctatccgcagcgaagacggtacggagactcagctcgacaagctcagtgtagaggagaggaccgctctggccaaccagctcctcacaccgcaggagcactcgtccaagcagaagcgcggcacctttgccggtctcggcagctcgacccgcacgcctatcgccaacaagcaggtgctgcgtcacctgcgcgacggcgatatccttctgctcaaccgacagcccacgttgcatcgtccctccatgatggcccacaaggctcgcgtcctcgtcggcgagaagacgatccgcatgcactacgccaactgcaactcgtacaacgccgatttcgacggtgacgagatgaacatgcatttcccgcagtcgcaggctgcccgtgcagagtgctactacgtcgccaacaccgacaaccagtacctcacgcccaccagcggtaatccgctgcgtggtctcatccaggaccacgtcgtggccggtgtgtggatgacctccaaaaacacgctctacacgcgtgcagagtaccagcagatgctctacggcgctctgcgtcccgagggcaagtacacgggtggcggccgcgtgctcaccgttccgcccgcgttgctcaagcccgagcctctctggactggtaagcagatcatctcgactgtgctcctcaacctcaaacccgccaaggccgacggcctcaacctcacctccaaggccaaggtggcgggtcgcttgtggggcaaggatcacgcgagcgaagagaaggtcatcatcgaggacggagagctcctgcagggcgtgctcgacaaggccgctttcggtgcctccgcctacggtctcgtccatgctatctttgagatctacggatccgagacggccggcaagctcctcagtatcctctcgcgtctcttcaccaagttcctccagtcgaacgcgttctcgtgtcgaatggacgatttgctgctgagcaaggagggtgacgaggtcaggcgcaaggcgctcaatgccgccaagggcgaaggcaagggcgtcgccatgaagaccgtcggtctcgagggcgaggacgagaacaacccggacacggacaggaatctgcgcatccgtctcgaagaggtgctgcgtgacgacgacaagcttgccgtcctcgacggtgagatgatgaactcgtccaacgccctcacgtccaagatcatcgagtcgtgcctgcccagcggcctgtacaggaagttccccgagaacaacatgcagatgatgaccggctccggtgccaagggttcggccgtcaacgtctcgcagatctcgtgtctgctcggtcagcaggctctcgaaggtcgacgtgtcccgctcatggtcagcggcaagtcgttgccgtccttccgccccttcgagacgtccacgcgagctggtggattcgtcagcggtcgtttcttgacaggtatccgccctcaagtacttcttccactgcatggctggtcgtgaaggtctcatcgacacggctgtcaagacgtcgcgttcgggttacctgcagagatgtctgatcaagcatctcgagggtgtccacatccagtacgacaacacggtgcgcaacgccgacggctccatcctccagttcgcctacggtgaagatgcgctcgacaccaccaagagcaagtacctcggccagttcgacttcaccgccgccaacttcgagaactacaacaagcgctacgaccccaagcagcttggagaggtcgtcgaggccgagctcgccgccgagcacatgaagaaggcgctcaagaagccgcacaagtacgagcctgtgctcagcatgtacaatccctcaacgcacttcggatccatgtcggagaagtacgccaaggagatcgaggcgtacatcgagaagaacccgagcaagctcttggccgacaagaagaagaagagcaagaagcgcaagtccgaggctgctggcgatgccgatggcaacaacgacggcaaggtggccgagaagctgcgcttcgccaaggagaagctcggtgtcgaggccttccgtgccatgtgcaaggtgctctaccaccgcggcctcgtcgaccctggtgaggctgtcggtctgcttgcagcccagggtgtcggtgagccctcgacgcagatgacgctcaacacgttccactttgccggtcacggtgccgccaacgtgacgctcggtatcccgcgtcttcgagagatcgtcatgaccgcgtcgcagaacatcaagacgcccatcatgcgcctccccgtcctggacggcatcaccgaggaccagatcaagacgttctgcaaggacggcagccgcctcgtgctgagccaggtgatcgacgaggccatcgtcaccgaaaagatctcgcccaagtcctcgcagaccggcttccaccgccagaagacgtacacggtgcgcctcaacttctacccggccgacgagtgcaaggaagagtacaactgctctactcagcacattctgcacggattgcaggagacctttgcgccgaatctggaaaacaacatcaacaacgagatgcgcaagcggaggcgcgagcacgccgtacaagcggctgccatcggccgaggccgaacgttctcggacaacgctgcggcgggcaacaatgccgacgaagacggcgaggagcgcgccaatgctgcccagcctcgctcgaggggcaacgatgccgactcggacgacgaggaggacgcctcttccgaagttggtgacggcgacgccgacgaagccaagaggaagcagcgctcggctgcgcacgcctcgtacgaagagggcgacgacgaggtgatggacaacgtgccttccaccatggaggacatcgaagctgccttttcgggcgagagcagcaagaagtcgtccaacgcgatggatgtcgacagcgacagcagcgactcggagtcgtcggacggttccgtcaacgaggactgggccgagcagacgtctgcgctcgaaaaggcgcttcaggagaactccaagtacatcaacgccttccgcttcgacgaggtcaaggcgcgatgggccgagttcgacctgacgctcgctgcgcagtcgcagaagctgctgctgatcaacattgtggagcgcgtctgccgacagagtgtgatccacgagatccccaacatctcgcgtgtcatgaagccgcctccgaaggcgggcgaggacggtgtctcgctcacggccgagggtatcaacttccgcgacctgtggaactttggctttggcgtggtggatctggacaacctgtacaccaacgacattggtgccgtgctccacacgtacggtgtggaggcagcgcgtgccgcgatcgtggccgagatgcggggcatcttcgacacgtacggtatcgctgtgtcgccgcgtcacctgttcctcatcgccgactatcagacggctgccggtggcttcaggccgttcaacaggtccggtattgccgagtcgtcgtcgactctgctcaaggcgtcgttcgagatgaccatggcatttatcggcggatcagcgctgcacggagaggtcgacactctcaagacgccatcgtccaagctcgtcgttggacgaccggtttcttcgggaacgggaacgcccgagatccgtcttgcgcttccaaacccgattggcgcggctgcctaaagcatagtcgcactatctgtaccaacatcatgttcatatttacagcatacgaaagaaagtattccgttatatcatg

SEQ ID NO: 12872 - DNA, 3200 bp, Oryza sativa
  ref <308>: DATABASE ACCESSION NUMBER: AK110220
  ref <309>: DATABASE ENTRY DATE: 2001-12-06
atccctctcgaacgctagctgcaacaccgacagcgatcatcagtatggcgtcgttcttcgcaaaggctcgtgagcgcgccgaggctgcggcccagcagcttcaggcacaccacgccgcctcttccgccagcaagaccggcgacacctcgagctcctgcaccacctcaggcaccggttccagcttctacaccggctcggttcctcacctcctccgacacggtatcgcctcggtcgaccctcgctacgagtccacccgccagttccacctgctcagccaggccgtcaaaggattcaacatcgatcacgaggcggcgggccgagaggccaagaacctcgccaaagccacattcacctggggacagcatcatctcccggagaagcgcgacgacagtgtcggcgatgaagtgctcgtcgatgtcaccgatcgtctcgcctacgtctggcacgagatcggacagctggagaccgcgcacagccagagcgccgaacaggcccgcaaccgcctcaagcgtttcgaaaaggcagagatggagcttggccagcgccgcgcttcccgcaacaaactcaagaaggagctccatgccctcgtgcccgagcgcgccatgtccgccggcagcgaacgcgctcaggaagccgagaagcgcctcaaggacctcatcgacgatgaccaggccgacgaagagtccctgagcagaagcaagcgcgagagcctcaaggagggctactcggccatgttcgacagtctcatcgagctcggagagaagatggctctcgtcgcccgctacggcaagctcatgactacgctcatccctaccgacaagtcgcccttcccggccacagtcaagccgcgcggcgagaccatcccgctctgggaaggcgcggctcgcaccgcagaggtgcgtgcggcgcttgcctctgccctcacgtccttccgtccggacctgtccgtaccgagcttgccctcggaggccgcactgtcatctggcacaagcctcggccgtgcagacaccgtctcctacgccgtctcgcatcgcgcggagctgcagcgcgacgaggctgcaagcgatgcagcgacgccagcgactgtcgccagcgctgcaccttcgtcgccccgacgaagcagtctgtcgctcgatcgcaatgatcgacttcagccagccagcgcagatggtaaaggatcgacgcagaaactcaacctcagcccgtccacgcttcccgcgccccttcttccgcctcggcccaaccgtagcccctcagcaacttccgacacgctgcgctcgcctcagccggatcctttcgctgaccccgtcgccgccacatcggcggcccatccatccgttcaagacgaagaagcatccggtcctcccggtccgacggtcgcagagaccggtgtggttccgagcggacccggcggccccaagtcgggcacgcttcgccctcgcagggcatctgccggccagcgatccgcctcgatctctgcgggtgcggtggcttacctcggccctactggcacctacagccaccaggcggcgctcaaggtgtttggcgagaccggaacgaacctcatccccatgcagagcatcacgggcgccatcgactttgttcgccgtggcacgcccggcaacgccaagatcgccattgtgccggtggagaacagcacgttcggacctgttcgggacacgctggacaatctgctcaacatcagcaatggtgaccgccacgccatgcggccctcggagggcgcccacctgcatgtggtgggcgaagcatgcttggcggtggaccatgcgttgctgtgtgggccgcgcacgtaccagaggctcctggcgcttcaggacgattcggatgccaacgcacccattcgcgacgacacgctgtccaacatcaccaatgtgatctcgcacgagcaggcgctcggacagtgcgcacgctacctcacgcgctatctgccgcaggcgcgcaagaaggcggtggactcgacggcggcggcggcgatcacggcgctcgagttcgaggccgggactgcgccgggcatggcatcgggcgagtcgctcggcttctcatccaactcgctcgtggtggcggttggagccgaggcggctgtaaagaccgttggcgtgagggtgctgcgttcgaagatccaggacgtgcaggacaaccgcacgcgcttcctggtgctggcgagcgagccgctgcagagcttgctggccaccaactcgctgccggcctcgctgtcgcgcctgtacagcgcgtctgcgccggttggcatggtgggccgctcgctgctgggcgtgcacgatgccgtcagctcggacctggtggccgagtccggcagctacagcgacctgccgagcgtgctggacagagtggtgccggagctgagcaggtgcaccgaggtgtcgattcgcaaagtggaccgtcgcccggcttccatggtggcggcatcaggggcaagcagcgtgtggaggggcagctacgtgtttgagctgcagtactcggcggccgctgctagcatggcagaggcgaaaatccgacaacttgtcacgcagctcacggtgggtagctcggcgatcagaacggtgggagatgctgcgcccgtagcgtacctgggcagctggctggtggacggagcttcgctgcggggcgagccgctgctgggtgcgcagtcaggtgcgccgctttcggctacgccgcaacgaatcggtccgggtatggcatcgtctgcatcggcggcatcgggcttctcggatctggccacgcctggacacagtggtgcggtgcatctgccagcatccggatcgacgtcgtcggatctgtctcagtcgacgctgcacgcgggcgcaccgatgagcgagagggagcgcaaggaacgcgaggcgaggcaagaggcggcagaggtgcagcagcacgcggcgcaggcgcggttggtgcgacagcaacagcaggcagagctctacggtgtcgaggcgcagccctctggggccggtgccacccgcccagagccactggcgggtctgcaagagagcgaggcggaggaacgcctggatgagggcgagggcctgcccgcgtaccaaccctttgatccgtcttctcggacctaacctcggaaattttcgccggagttggcttgtcgtgacaccgccagtcggtgtatccgttgttccgtctcaatagcttcaaatcgtagtttgtattggctc

SEQ ID NO: 12873 - DNA, 3079 bp, Oryza sativa
  ref <308>: DATABASE ACCESSION NUMBER: AK110221
  ref <309>: DATABASE ENTRY DATE: 2001-12-06
acatcctcaccccccagtctcgcttcctccgtcgaatcacttccctctcctcgcatacacgtatcccaagttgctggtcttctttcgatacgcacccatctgttcacctgctctgctgcgcggaactgcttgaactcgacatcaaaaccaactcgactggacgtcgtgatccatctcgtccccccctctctctactactaaccctctcctctcatcctctcctccttctcgtccccgtgtggttcgacaccatcccccctctctcctacgaatccattccgaccttgcaccgctttggcaagatacttttgacaagtcatctgtgcctaccgacatccgcttcgatcgcattcgctcgtctacttctagcatagcatcatcacctttctactgaacacagtcgttcgctgcattccccctctccaccccaacatcacctgatcctgcatctcttcgtcatcatagctcccatcgcaaagaccgtctgcgtggcgcttgccgccatcgccctcgccgccacgggcacccagcccgcccaggcccatcagcttcactctcgccacgccgctggtggtagcaacgtctaccacaaccttcactcgcactctcgccgcatggagcgaaagatccgtcgcaacgactccttctccatctcgggctccggcagcctctcgggcgccgctgccgtcgacggcgcttcctcctccgcctccatctcgggctccggctccatctctggctcggcctccgactcgggctcgcagtccagcgccaagtctcagtccgactctggtgctgattcgtccgccaagttgggtgccgactccggagcgcagtccagcgctcagtccagcgctcagtccagcgctcagtccagcgcccagtccagcgctcagtccagcgctcagtccagcgcccagtccagcgctcagtccagcgctcagtccagcgctcagtccagttccgaggctagctcgcaggccagctccgagtcgagcgctcactcgagctctcagtctgatgccaactcgagctcgtccagcagctcgtccaactcgtccagccagtcgagctcccaggccagctctcactccagctccgagtcgagcgcctcgtccagctctcatgccgagtcccagtcgggctcgagcgccaactcgagcgccaactctgacgccggttccgatgccaacgccggttccgatgcgaagggttcgagcgatagcggtgcacagagcaaccatgcctcgggctccagctcgtcggccggccctacttcgaccgcttcggcatctggcacggctgcgacgacgtcgagcactccttgcaccgaccacaagacgggcactcactcgagcagcgcctcgggtgcctctgccacctcgaccgcctcgcacgccagtgccgccagcgccgcctctgctgcctctgccagtgcaacttcgacccactcgagcggctcggccagcgccgcctcgtctacgccttgcaccgagagcaacaaggccagctccaccgcttccgccgccaccgctcaaaagacccccgaggcagagtcgtcgtccggcagccaggctgcttccgagtcgtcgtcccagtccgatgctggcgcgcaggccgccgccagctccaacgccgactcgaccgctcagtccagctcccagtctggttcttccgatgatgacgaggactgtgacgatgacgacgagagcgaggcttcgtccactgctacctccggtgctgcctccggtgccagctcgggctccgcttccaactctggctccagctccaactctggctcgggctcgaactctgcctcgaactctggctctggctctgcctcccactctgtctctcactctggttccaactctggctcttcctcctccggttccaactcgggctcctcctctggtgccgtctctggctcgagctcgggcagctcttcgaacgctggtgcttcctcgactgctggtgccaacgctggctcttcgtcgtctggctcttcggacgccaacgctggcgacgatgactgcgacgagggtggcgacgccgacgccactgccgacgacgacgaggactgcgacgaagacgagacgtctaacactggttcggatgagaccgacgaggactgcgacgatgaggacagcggcagctcgtccaacgcagctgctgccgccgccgcttcgtcttcgtcttcggcttcgtcgtcgtcgaactctggcagtgacaacagcagcaacaaccagcagcagcccaaggcggcatcttcgacctcgtcgagctctgctgcgcccactgccactcctcaagctcagcacgaccagaacagcaacaaggctagctcgtcgtcgtcggctcctgcctcttcgacctctgcgtcgggtgccgtggcctctgcggctgcatctgcttcgtcgtcggccagcagcctcgccaacgctgtcagcggtgggtttgcgacgttcttctaccagaacggaaacgcgggcgcttgtggcaaccgcaactcggactcgtcggctgtggcagccctccagtcgcagacgtacgcaggtggggctcactgcggtaagcggatcaagatcttccgcgccgacaaccccagcaagtcggtgctcgtcaccgtggccgacgagtgccccagctgcgtgaacagcgagtcgatcgatctctcggtcggtgccttcacccagattgcctccgagtccgagggcatggtcggcatcaagtgggagtgggcctgagcgctctgaagcctgatacgaggctgccatcctcgctgcgttgattgtcactaccccaagctttgtttcgtttcattacgtgcggaccgggtgttcgtcacgttggcatctctctgttctctgactctttcgtctaggtccttctgtgcattgctgcagatcacacggacgcccgtcggagcgtgcatgctgtgtctctcgactcgagctggtctcgatgcccgggatgcactgacgctccgactgctcgtcgagatggatcgccgcgtccgcagtcaatcgggcctggtcaaagccagaacttctccccctccaatctcttgtttcattcc

SEQ ID NO: 12874 - DNA, 3051 bp, Oryza sativa
  ref <308>: DATABASE ACCESSION NUMBER: AK110222
  ref <309>: DATABASE ENTRY DATE: 2001-12-06
atcacacacacgatcctggtcctgatccgcgagcgcaagcatcgcagcggcgcgtcttgacgaaatcatacaagctgacggatcggctagcaagccaatcgcgccgccacagcacagtcactctttcggcggtcccgcaaagacgctaccgtccttgatcagcgtagcaagcgaagatgccctcttccagcatggccgccgtcgaggccacgctgcagtccaatggccaggcggacggcgcgcgtcctccgctctcggtcgctctgcacgttcccacctcggcagtcgaccaagtcaactcggtccagggcggctcggcgcctctgtcgggcaatccgaaccgacgctcccacattcagcagaacgtccaggcacttcccatgctgccagaagcatcacatgcaaatgcgctcaacaccgctacaggtccggcgccagccgcgcttggtctcaccgtcgaccttgatcccaccacctcggctgccctcaatggcctcagcccagcacagaagacgctgacgctctcgcgctcccagggctacgacgccattgtcttggaactcgccaacgagcgttggaaggatcgctgggagcgactctgcctagccaatccagcagaccttccatccgcgtccggctcctccgctacaccctcgcctctgtccgcagtgcagatgtcctccggcggcgccatgctcgcccgcagcagcagccggcagggactcaacagcttcacgcccggcggtgtccggcagtccccctctcccgccgtcagcagcgccggtcaatcgccgtttggcagcatcgcgcgcgaggcagaggaatggcgcaaggcacccgccttcaagcggtccgaagtgaacctcaccaagctcgaagagaccgagggcgtcatcgcgctcgctagccaatggatcgagctcgactcgcccgacgaaggtgtgcgtctcgattgcgagctggcgctgcgacaggagctcgcgtacgcctcctacctcggcatcccgaacgtcgtcatcccaccgccctcatccgacccggcccgcaaacctttcctcgcggactatgcgcgcgcaatcaactcatgcctagccagcggtagcgccgagaccgcaccggctggatcgtggatgacgctcaccatccagttgcccgtatcgtcgccctaccagctcaacaagatcctccagcgtcagaacggcaagaacggcttcggcctcaccgcatccaccacggcgggcagtaacgcctcggcgagctctcaggcgtcgcacgccagcgccacctcgtccgccgcactcctccgggccgaggacgactgggcctgggaaacgtgggagcagatccgccagctgtgcgcgtacaacacgcgcctccagatcgcgctcgatctcggcagcccgctgccgggtccgagcattctggcccgctggatggccgagccagtcagcatgctgtgggtgccaagcgtatcgtacctggccaatgcgaaaggcttcccagtgctgtccaaggcgtcgcagtcgttcttccgaaccatgttcaagaagaatcccaccgtcgtgctgagtggcgtgcagagtccgccgccgacgcactcgcgcggcggaccgctggcgtacctgcagtatctgcgacatctcgagaaggcggcaccgccagatggagccgtcgactcgtttgcgcgtggctacaccgactggcttcaggcaccgctccagccgctgatggacaatctcgaggggacaacgtacgaggtgtttgaacgcgatccggtcaagtacgcgctgtacgaagaggccgtatacaaggcgctgctcgaccgacctgcctcggcgagcacgctcatctgggtgtgcggcgcgggcaggggcccgctcgtggatcggtgcttgaatgcagcggaccgagcgggcagatcggtcaaactcgtggcgctcgagaagaatccgaatgcgctcgtcacgttgcaggagcgtcaggcgctcgagtggggcgaccaggtgcgcgtccagtgtggcgacatgcgtcgccaccctgtgccgccgagcatggcagatcggcccgatatcgtggtcagcgagttgctcggcagcttcggcgacaacgagctttcgccagagtgtctcgatggtgcgatgcgcttcctcaagcccaatggcatttccattccttcgtcgtacacggcgttcttgtcgccgctctcgtcggccaagctgcacaccgaggtgctgaacgggtccaacgcggcgctgacgtcggcagtacaaaaggcggcagaaacgccgtacgtggtgctgttccagaacgtggccttgttggcagcccgcggcggccgattgaactcggagcaggtccaggagtcgtggacctttgaacaccgaccctctgcggtaactccgctggtttacgacgagcaagggctgcccgcatcgaacggacacaacatccggtcggccaagcacacattccacatcccgcaggcaggcacgtgccacggtttggcgggctactttgaagcgcatctctacgacaatgtggtgctcagcatccacccggacccggtcagggggtcgaaagacatgctgagttggttcccgatcttctttcccttcagggagccgctctatctgcccgccaatgccgaactggacgtgcacatgtggcgcatgacggccagcgaccgcgtttggtacgagtggagcgccgaggcatttttgcccatcccgactgccgtggatgcggcaaagcagaggccagtatcactggacgcaagctcgtcaatcggaagcacgagcactgccgcagaccagcactttgcaaacgcgcccaacacgcccaggatcccgagcctgaacctgcccaacgggcccgacgccttacaacccagcccgatgcagatctcgaccagggccaagatcaacatgactcgactgcacaatcctggcggccgcagttcgtggatcggtctctaggacccctaaccaccccacaagactatctttatggactatgtcggtatgcagtgatatcgcaagcaaaaggacgagc

SEQ ID NO: 12875 - DNA, 2451 bp, Oryza sativa
  ref <308>: DATABASE ACCESSION NUMBER: AK110223
  ref <309>: DATABASE ENTRY DATE: 2001-12-06
aagcagcgctagctccacccagctaggccgtacgtcggcgatggggccaacggcgagcgcggctgcacgccggagcacgcggcaaccgtcgacgatgacgacgacaatgtcgcgtcgcacggcggcggcggtggccgtgtccgtggtgctcctcctcctctcgtcgtgtctcccttgttgctcggaggcaaggctgcactaccaccggaggcagcaccggagggcgccgcaccgcgggcaccaccgcgcggcggcggcggcggcggcggcgacgaacggcggcagccacatctctcagccgcccgccgcgctgcctcccgacttcgacagcggggaatcgccggcggagacgccgggcttgcctccggctggcgtcgaggacgctccgccgcggcgatctccgcgtgagaagccgtgcccgacgatgcagcctcccgtcaagccgccggaggagttgtcgccggtgggcgcgccgaggtcgcgcgttcgggccatgccaccgtcaccctcgctgtcgccgccggccaaggcgccgtcacattctcacgctaagacgccgtcgatgccgccggcggagcggccggcgcttcctcccaccaaggcgccggcggcgatctcgccggccacgccacctcaactctccccagcgaacgcacattcgacgcaccatcacgcgaagccaccgtcattgcctccggccgagccaccagtgccctcgccgtcgccggagcatccaccgcggcactccccgtcaaagccaccggcgtacgctccggccaagccaccgacagcactacgtccggcgatccctccggccgcaatgccaaagccaccgtcagtcgctccggtgcagccaccgcagcggccgcctgccccggcaacaaagccaccgccgtcgtttccaccgcagctcgccccgacgatgccaccaccggcgcacgcgccggcggagacaccagcaccaccaacaacgccaccggcgctgccaccggccacgacggcgccatcaccgaagaacagctcatcatcaccacctccaccctgcaccggcggcggcggcggcatcagcaacgtgttcgacgtgagggcgttcggcgcgacgggcaacggctcgagcgccgacggcgacacgcgcgcgttccgcgcggcgtggaaggcggcgtgctcggcggagtccgccaccgtgctcgtgccgtccgacggcgtgttcaccatcacctccaccatcttcgccgggccatgcaagccaggcctcaccttccaaatcgacggcgtgctgatgccgccggacgggccggcgagctggccggcggcggacggccggcggcagtggatcgtcttctacagggccgacgggatgacgctgtccggcaagggcaccatcgaaggcaacggcgaggagtggtggaatctcccgtgtaaacctcacaggggccccaatggatcgaccctacccggcccatgtgagagccctgcactgatcaagttcgtggcgagcagcgacgtgagcgtgcagggcctgaggatggagaacagcccgcagttccacctcaagttcgacgggtgcagccgggtgctggtcgacggcctcgtcgtcagctcgccggcgtcgagcccgaacaccgacggcgtccacgtcgagaacacgagctccgtccggatcctcaactccaggatcagcaacggcgacgactgcgtcagcgtcggcggcggctgctcgggggtgcgcgtcgagaacgtcacgtgcgtgcacggccacggcatcagcatcggcggcctgggcgcgcgcggcgcgcgggcgtgcgtgtcgaacgtgaccgtgcgcggcgcgcgcgtcgtcgactccgacaacggcgtgcggatcaagacgtggcagggcggcgccgggtcggtgtcgggggtggtgttcgacgccgtccagatggtgaacgtcaggggctgcatcgtcatcgaccagtactactgcgatgcgcacggcggcgccggcgccggctgcgccaaccagaccgccgccgtgcgcgtcgacggcgtcgcgtacagggggatccgcggcacgtacaacccgcgcggcggcggcggcgcgccggtgcgcttcgcgtgcagcgacaccgtcgcctgcacgggcatcaccatgaccgacgtcgagctgctgccggccggcggcggcgacgaaggcggcggtgccagcgccggcgcgaagctggccgacccgtactgctggaacgcgtacggggtgatggagacgctgacgcagccgccggtgcactgcctgcaggaaggtcgcccagagtcgctgcaagatcagctcgcaagctgctgagcagtagcagacatgacatgcctcttcttttgacaatagatttcttctccgcgattcatgctaatctatagattttctttctcaacgattaactataactaacttttgagtcatccagactccagagttcc

SEQ ID NO: 12876 - DNA, 3184 bp, Oryza sativa
  ref <308>: DATABASE ACCESSION NUMBER: AK110224
  ref <309>: DATABASE ENTRY DATE: 2001-12-06
atctcgctcgccgatcgaactgatcgtccaccacaactctctctctctctctctctgcctcttccatggctggtcacaccccgaatcctctcttcctcctcctcttcctcggatacctcctcttcgcggcggcgcagccgccgctgacggtcaccgtcggcctcatcatcgacggcggctcgccggtcggcaagatcgccaacaccaccatccccatggcgctcgacgacttctacgccgccttcccgcggtcccccgcccgcgtccgcctcctgcaccgcgactcccgcggcgacgtcgtcgccgccgcctccgccgcgctggagctgatggaggggcggggcgtgcgcgccatccttgggcctcagtcctccgtggagtcggcgttcgtcgccgacctcgccacgcgggcggaggtccccgtcgtgtcgttctcggcgaccagcccgtcggtgtcgcccggcggagggaggttcttcgcgcgcgccgcgctgagcgacgcggcgcaggcgggcgccatcgccgcgctcgcgaggctcttcgggtggcgccgcgtcgtgccggtctaccaggacgacgactacggcgccgccttcgtgccgttcctcgtcgacgcgctcaccgccgagggctccgaggtcccctaccgctgcgcgctcccggcgggggccgacgccgacgccgtcgccgccgcgatgtaccggatggagtctctgcagacgcgcgccttcgtgctgcacgcgcgcccggacctcgccgggcgcgtgctcgccgccgccgaggccgccgggatgatgggcgagggcttcgcgtgggtcatcaccgacgggctcacgggcctcctcggctccatcaacgcgccgcagggggtgatcggcctcgccccctacgtgccgacgacgccgcggctgcgcgacgtcaggcggcggtgggtgcgccgcttcatggccgagcacccggccgccgacgcggagcacgccgagatgggcagctacgccgtgtgggcctacgacgccgcgtgggccgtcgcgtccgccgccgaacacctcaccgccggcgacctatcaccgccgcagggtgggctcgtggggggcaagggcggacccaccgacttcgccgggctcggcaagtcaaggtccggcaagaagttcctcgaggcgatcaccagcacgacgttcgacggcctcggcggcaggttccagctcgtcgacggcgagctcgcggtgcacgccttccgcgtgctgaacatcatggacagagggaaggagaggagcatcgggttctggaccaaggacggcgggctgacccggcacctcggcgttggcggcggtggcgggggcgagctcgcgccggtgatctggccgggggagtcgacggtggtgccgagggggtgggtggtgccgacgagcgcgcggaggctgcgggtggcggtgcccggcagcgtcaaccccgggtaccgggcgatcgtgcacctggacgtggacgcggcgacgaaccggacgaccgccggcgggttcgtcgtcgaggtgttcgaggcggcggtgcggctgctgccgtacgcgctgccggtggagtacgtgaaggcggagtcgatgccctacgacaagctggtgcagatggttgctgatggggcattcgacgcggcggtggcggacatgacgatcacggcggcgcggtcgagctacgtggacttcaccctgccgttcatggcgtcgggcatcgccatggtggcgccgctgcgggacgtcggccgcggcggggagcggacgtgggtgttcctgaagccgctccgctacgacctgtggctcgccagcgctgccttcctcctcctcaccggcttcgccgtctggttcgtcgagcaccgcggcaacgccgagttccgcggcccgccgtggcaccagctcggcaccctcctctacttcggcttctccaccctcgtcttcgcccaccgcgaggacctccgcagcaacctcgcccgcctcgccgccgtcgtctggttcttcgtcgtcctcatcctccagtccagctacaccgccagcctcacctccatgctcaccgtgccgcgcctcgagccgtccatcgccggctacgcggcgctgtggcgcggcgcggagcgcgtggggatcatgaacaactccttcatgcggggggccatgaccaggtccgggttcccgccggcgaggctggtgccgtacggggcggcgcagagcttccacgaggcgctgctcaacggcaccatcggcgcggtggtggacgagacgccgtacctgaggatcttcctcaagtcctactgcgacaggttcgccatggccggcggcggcggcggggggcagcccaacaagaccggcggcttcggcttcgccttccccaagggctcgccgtacgtcgccgacctgtcccgcgccatcctggcgctgacggagagcgaggagatgaacctcatcgagcgcaagtggttcggcgagtccgacggctgcgcggcggcgcaggcggccggcgggccgttcacgtcggacagcctcagcttcggcagcttctggggcctcttcctcatcaccggcgtcacctcgctcctctgctgcgccgtccacctcgccaccttcgtcgcctccaaccggggcgccatccgcgacatcgtcgcgacgtcgacgcacccgttccggaggctcgccgagctctacgacggcagggacctctcggcgcacacgttcaaggccaaggacggcggcgccgccgcctcgccgcccgtcgtgcacgacgcggccggcagcccgatcagcctgcacatgggcgcctggtcgccgcagccgtcgagcaccatggccggcggcgagatcgagccggccggtggcgaagccaacgaggaggaggcgacgacgacgactgcagctcgcgatcccgacggcgctggagagaatggcagaggccagtaacaacggatttaactgccatttttctgacagcttctggagcaaaacctgaagagtgaccggtgctccatgtccttagcgaaattgaccgatgatgaaaagatgaacagattgattaattagtttgaacaagaacaactaataattctaatagggggtgggaatttacaaattacagttcccctgtcgccctgtcattaattgtatatattgattcaactctacattgtaaaatttgcaaagtttcagtagtg

SEQ ID NO: 12877 - DNA, 3078 bp, Oryza sativa
  ref <308>: DATABASE ACCESSION NUMBER: AK110225
  ref <309>: DATABASE ENTRY DATE: 2001-12-06
atttgaacccttccttccttttcatcttcatcgcagcatcttgcacatttccagagtcttgtctgggtggacgcgcgagagacattccaaacgaacagaccatccttcggtgtgtgtagcaccgtttgcggagtggtacattaagcaccggacggacattgctttgtagcagtgcacaactgtctcctatcgagggcaatcttgtatagtgccagggcttgaacagagtattttacacatcatggcaccttcggagctgaggtatgacggccagacggtggtggtgacgggtgcgggtggtggcctgggccgcgagtatgccatcttcttcggaagccgtggcgccaatgttgtcgtcaacgacctgggcggaagcttcaagggcgaaggcgcaggatcagcggccgcagacaaggtcgtcaacgagatccgctccgccggcggcaaggccgtcgccaactacgattcggtcgagaatggcgaagccatcatcaagacggcgattgataactttgggcgcatcgacgtgctcatcaacaacgccggtatcctgcgcgatgtctcgttcaagaacatgaagcaggccgactgggaccttatctacaaggtccacgtccagggagcgtacaagtgcgcacgcgccgcatggccgtacttcaggaaacaaaagtacggacggctgatcagcaccgcctctgctgccggcctgtttggctctttcggccagaccaactactcggccgcgaagctcgcgctcgtcggcttcaccgagacgctcgcaaaggagggcttcaagtacaacattttctgcaatgtcattgcgcccattgctgcgagccgcatgaccgagaccgtcatgccgccggatgtcctcgaaaagctcaagcccgagtggattataccgcttgtcgctgtcctcacacacaagtcgtcgactgagacgggttccatctacgaggcaggtggtggtcacattgcgaagcttcgctgggagcgatcgaagggtgctctattcaagcccgacgagtcgtacacacctggcgctgttgcagcaaggtggaaggagattgtcgacttctcaaatgccgagcaccctgagggtcctgcagagcccatgagcctgctagaggctgctacacaactgaagcccagccccaaggttgagcagcccagcttcaaggacaaggtcgtgctggtcactggtgctggtggcggtcttggtcgcgcatacgctctgctcttcgctaagctcggggccaaggttgttgttaacgatcttgttaacccagatgccgttgtgcaagagatccagaagcttggtggacaagctgttggcaacaaggccaatgttgttgatggagaggcagtcatcaagaccgcgattgacacatacggccgtattgatgtgcttgtcaacaatgccggtatcctccgcgacaaggcctttgccaacatgactgatgaacaatgggatctcatccaccaggtgcatctctttggcacctacgcctgcagcaaggctgcttggccctacttcctgaagcagaagtatggccgcgtcctgaacaccacatcaaccagcggtatctacggtaacttcggccaggccaactatgcctcggctaagtgcggtatccttggtttctccaggtctcttgcccttgagggaaagaagaacaacatctacgtaaacacaatcgcgccaaatgccggtacgggaatgacccgcaccatcatgcccgaggagatggttcaggcgctcaagcccgattacgttgctcctcttgtggtgcttctctgctccgacaaggctcctgagccaactagcgggctctatgagactggtcagggatgggtcgcagcaaccaggtggcagcgtactggtggccatggattccctgtcgatgtcaagcttacccctgaagctgttctcgagaaatgggagaggatcaacaactttgacgacggccgcgcagataacccattcgacaacgccagtgggctcaagagcatcatggcgaacatggagagcacaagcaagggcaagaagtccgactcttcaaaggttgactacctgaaggccattgaagacgcaaaggcagcgaaggccgaaggcagcgagttccaatacgacgagaaggacgtcattctctacaacctcggtatcggcgccaaacgaaccgacctccccttcgtcttcgaatccaacgacaacttccaagtctaccccaccttcggcgtcatcccccaattcaacgccgtccccccctactccttcgacgacatcgtccccaacttctcccccatgatgctcctccacggcgagcagttcctcgaaatccgcaaataccccatccccacctccgccaagctcatcacctaccccaagctcatcgaggtcatggacaagggcgccgccggcgtcatcgtccagggcaccaccaccgtcgacgccgccaccggcgaggaaatcttctacaacgagtccaccgtgttcatccgcgggtctggctccttcggcgggaaccccaaggggggtaaccgcggcgcggctaccgccgtgcacaagccgcctcagcgcgcgcccgatgccgtcgtcgaggagaagacgacagaggagcaggcggcgttgtacagactctctggggaccgtaaccccctgcatattgaccccgagttcagcaaggtgggtggcttcaaggtgccgattttgcacggactgtgcttcttcggcatcgcggctaagcacgtgcttgctacgtttgggcagtacaagaatgtgaaggttaggttcgcggggacggtgcttcccgggcagacgctggtgacggagatgtggaaggtggggaatacggtggtgttccaggttaaggtgaaggagacgggtaagctgtgtatttcaggggcgggcgcagagttgctcggtggagggagtaagttgtagagggggcgaggaaaagaagttgaaagtgatgtgatgggcgttattgtgcgtgctgtgtgtatatatttatatatagtatgtctggatgcgatcgatacgtctgattttacgtatccaatggaattgtctacctc

SEQ ID NO: 12878 - DNA, 3725 bp, Oryza sativa
  ref <308>: DATABASE ACCESSION NUMBER: AK110226
  ref <309>: DATABASE ENTRY DATE: 2001-12-06
gctcaatgaccacaccaaagcagcacccagtctaggcggatcgcgcagccttgcgcaggaggtctcggaactcaacctcgactcggacgaatcggatttggacgccgatctcaatccacgcctgccaggcaagccgcccaagatggccgcttcggatgcagctcgcagcgcacacgcctcgctcggcgcagcagcttttgcgcaccatcccgcgctgtcccaaccacaagcagcgcccgacaccctgtctcaggaggagtcggccgcctatgaccttcagaaagccatggcgccatcgccggtagctcccgtcagcctcctggttcgtcgcgcaaacgaggtcatcagacagctcgcagccattgcgaccgagcaggtcggcacgaatggcctcgccgagtccgatggacctctctggagcccgcagagtggcgtctaccttccgaggcttgcgcatgccacctcaagcgtggtttccgccatccgcgatgtcccgtacgccaccggttcgctctctctctcaactagcgatctcgctgccatctccaagctcgtctcgccctccccagccgaagcagacagtcgcaccgcgcttgcgcccgacttccctctggagcacaaggacattgatctgaaccttctctcaagcgtgctgcaagcttctcacgcttctgcccacggcaagggtgcctctactgcacttcaacgctgtggcgtttattccaaggactcgcttgcccccatcccgagcagcctgcaccccgttggtcgcaagctcaacgccgtcgtctcgaagctcgtgctttcttcgcgccaggtcatcgaccacaccgtcacactcgcctcgtcgcccacctcgagcatggagagcaccatgaccgacctcgatgccgacgtattctccaagctctatcagtgccgacaacgtcttcgcgaagatgcgctcgagctcatgcgcacgctgcagagcctcagctccgaggcagaaaaggtcaggagcacggccctgagtgctccgcagagccgcggctggctgcgcagggtcgagggcagcctcgagagcgacttggggctcaacggcatcggctctacctcgttcggcagcggcatggccgcctcatggctcggcaacggctttgtgcttccgtccaaattcgaagtcgccttgatcaaggcagagggcaaaggcacccgcaagcacaaccctttcgaccaacgcagggaagccgagtccgcagtcgtccgcggcatgctcacgttgcggcgcattccggacacgcgattcgatcagcacgtggtcaagcaggcccagcagctctcctcccagctagaagctacgaacgacacaattgtcgccgcagcaaagccggctgcagccgtccaacctggcttgtctctcctgtctcagtacggtgctttcgaggcgctcgtcgaagctattgaccttgcctcggctctcgacgtcgatgggcccagtccaggcgaagccaagtcgtcgtcgatctcggcgcggaacttgacgaatgcgcaaaaggcgcgcagcctgatgcgccgcctcgtgactctcaagcagaccgcctacgacctttcctgctccctgttcaccgctgtgcaggagcatggcgagcagacaacgacctcaagtgcgtcgtcgcatctgcagcgagaggcaagcaggctgaccaggctggtttccactgtatccaagacgctcgaggagctcgttcaggtcgctgaagagcagctgcgcgacgcatcgccgtacttgggcgctcgtgcggcggtgcacggctccgaggagggcttcagcctgccatcgaccggtatcttctctcacaagatcaacaccaccagcaacggcctgcacgaggaggtggaggaaatggcacgttacgcagccaacggtggccccgacgccgaggaagagtccgagttcatgtacctgggccccggcatcgccgttcccaacgggccgagagccaggtccggctctcgtgccactacaggctcgacaggcaactcgcccagtaccagcttggcccccgcacgattcggcatgtcgaacagctttcgcaatagatccacctccgtcacgaccggcggctcgacgcgctcgatgcagtcatacaccgacgcttccagccgtatcctcagccgtcgaggcaccttggtggacggatcgacagccgagagcatcgacgaggacagcgaatcggtgcgcaccggcggcggcaagctgcgtcggctgctgggcgacgacgcgccgcttacgcacaccttgacccacgacagcgagaacagcgccggcaccggcaacacaggttcgacgctggcgcgtcgcaaggaggacgaggtgccgtggttcctcgagccagactacatgggcgacgacattgtgatcgcgcaggacggctcggtcaagggcgcgacgctcgaggcgctgctggcgcggctgacgatgcacaactcgtttgacgcatcgttcaacaacacgttcctcatgacgtaccgctccttcaccacgacgcagacgctgctcgacctgctggcgcagcgcttccgcatcttgccgcccgacgggctggacgaggacgaactggcgctctggaccgagaagaagcaggtcccgatccggctgcgtgtgttcaacgtgctcaagatgtggctcgagatgcacttctacgagggagaggacgagccgtacctggaccaggtgcgccggttcgcggtcgaggaaatgggcgagattgcttcgatgaaggcgccctcgcagcacctgcagcggctcgtcgagcgacgccagggcgagggcgagcagatgatccgcaagatggtgctgcccacgtcggccccagcgccgatcctgcccaagaacctcaagaagatcgagttcctcgagattgatccgctggagctggcgcgccagctcacgctcatggagagccgactgtacaacaaggtgaagcccgccgagtgtctggggctcaaatggaccaagccgggcaacgaggtgcatgccaagggcatcatggagagcatcaatacgcacaaccgcatctcggcatgggtggccgagacgattctgcagcaggaggacctcaagaaacgtgcggcgctcatcaagcagtttatcagcatcgccgaccgctgtcgcgcgctcaacaacttttcgggcatgtgggccatcgtgtcggcgctttcgacggcgccgatccaccggctgcggcgctcgtgggacgcggtctcgcagaagcacgtggcggtgtttgagtcgctcgagaacctcatgtctgcctcgcgcaactgggccaactaccgcgagatgatccacaagctcaacccgccgtgcgtccccttcctgggccgctacctgggcgacctgactttcatcgaagacggcaaccgcgaccgactcaaggagaatgaccagctgatcaactttggcaagcgccagaagacggccgaggtgatccgcgagatcacgatccaccagtcgacgccgtacaacctggcggtggtgccggcgctggaaaagtacatcgagaccaacctggtggatgcccggtccgcagacgacctgtacgagcagagtctggcgctcgggccgcgcgagcgcgaggacgagaacattgcgcgtctgctgcaggagtctggcttcctctgagccgagtccaagtttgccttcactcccagcacacagcacaggcaatgtcacgctcatgccg

SEQ ID NO: 12879 - DNA, 3028 bp, Oryza sativa
  ref <308>: DATABASE ACCESSION NUMBER: AK110227
  ref <309>: DATABASE ENTRY DATE: 2001-12-06
accattgcccctacctcccgcccacagcatctgtcgcgcagcagacacacatgcgaattgcatctcgggtccggcgacactcaccaacatcttgtgatgagatccaccgtctcgaaggttcgttaagcatctctctcaaccatggcgatcgtgagcggtgcctctgcggctgatctgcgccacatggcccctaccgacgaccagttgtcggcgctaccgatgcagagaggtgcactcctttctcgccgcatcagttccagcgcatcactcggccgttccgatggcgccgtgctcggcactggcgctctcacccgcgggaacctcgccgcccttccgaacggctcttacaccctgccgggtcgactgcggtcgcatacgctggcgcatgcacacacgaacaacgagttcgcaggccggcccgcactggctcgcgtcgctaccatggacagctgccgagcgtccatcctgaccgacagcaccgagttcagcacatccagcaccgtcaaccgcggctacgccgcccgtatcgacgtcaatggcaaggtcaagccgctctcctcggcgccagcgcgccatgcgtgccagacaatcgccttcctcgaaggccccaccgactcgctcgactacaagacctaccgtcccggcgacgagatcaagggtgccgtccatctcctccgcaacgatcccgagcgcggctacatcaccggcatcaaagcccgcatccgcggcgacctcgagaccagcgtctttggcgtcggcgactcgagctactactcgatggacaacgagcacggcattgctcgacgccagcttctcttcttctccgaacaaaagaccctcgctaccaaggccgacctggagtccggctcctttgagctcgaatccaccggcctcgtcgaccatggccgccgcaacaatctcgcggtcccattcagcttcgtcctgcccctcaaactgcacgcatcggcactcgacatgctcgacagcaagctcaaaaagtcgttcaagcgcggaaagcagtacatcgacctcccgccctcgatcgacatggaaacccgctatgcgccgcccaggcccaaccagctctttggccacgtcaaggagaagctccacggtcagaagctgcgacccatggcaaagatcaagtacgaaattgacatcatcgtcagcagacagcgctttggctcggtactgctgccacacaagcgaggtgagcgcatcattctggcgtttgccgtcgagccctacccgccacgcaccgccggcctggccgtgccgacgctcgagcccatacgcgcacgaagggtcgcatcgcgcgacaaccgctcgccgtccaccgagcgtgtcgccgcccccgacgccgcctctgtccactcggcagatggcgagggcgaggacgccatcgacgaagactcgtgggcacccgacctcggcggcttccgacgaacccaggaggtgttcggcgcgctgcctctcgaagacgcgcctgcctttgcgcctagctccatcgcccgccctgcgtcagtgcgaccaggcttgccgccactgcgacgcaagagctatatcaatgtcaaggagggcgtcgatggccgcatgaagggttggctgacgcactcgctcgaaagcatgctgccggacggcatgggctcgttcgaggccatcctctcggtgcccgccatggccgcgctctacatggagaccaagatccccttcagcctcgagctgcgtatgcccgcgcatctcgtcgacacgtacgtgccagacgtcgagctcggcctggtccgctccgtcatgacctactcgcgcctgggcacgctcgtgatcgagaaggaggatccggacaagctcgctggcttcagcggcccgcactcgtggtcggagcgcatccgtctcgtcaatatggagcgccagaccgacaaccatctgccgcccttctacgagcagggcaaggcgcgtcagttctacacgggcaactttgccatcggccggtacgaaaagatgatcaaggccggctcgtcggcgccgctcaagcagaagctcatccgggcaccggaactgcgcctcgtcgtgcccagcttctcattcaaggcgctgcgtgtcgagtaccgcctgcgcgtcaagatctccctcccgggcgcgaccgaggcgttcgcgtcgacctcggctaagccgggggctgccgcagacagcttggtcatggagacaccgccggtgcacgtggctgccaacccggacacggtcgactttacgcgtcagaacgccgccgaggcgctcgacgacgacgctctgtcgaccgtcgacgtgcttgacgaagacgaagagcgtctggtcgaggcgtcggctactcgcatcatgcggtccgcggtggcggcgcagtttacttcctcggcggccaccgccatggacgaagacgacgaagccgacgaggacgctgatgactcggctcaggccacgcctttggcgcgcactccgctgcgacgctcgctggacatgaccatgctcgccaactctggcgatgtggctgctcgcgggcaagaactcgcttcattcgccgcgtccatctcgagcgactcggcgtcgtcggttctcgaagtgccctcgctcgaccccatcccggacgaggcagacgtcgacgaggaggacgagctgaccgaacatctcgccctcggcctcattgaccgcgagcacgccgccgccgccgccgcccagtcgcgccgcagggcaaccatctcccagtcgcaccgcgacaccaactcccttcccagctattcggacagcatcggcatcctcggttgacccacgattttcggcctgcagtcccgatccctcttcatgttcatatctgaccttccccgtagattcctgctgctcctctctgccgttttctgttggtatcgttcgtcgtcagcatgcattctctcgcctcagtccctgtcgggtcagcatcttccagcatctgtccagtctcaaagcatcacaaagcatcacgttcgtcacggcatgcagttcagttctcccgtctctcgcc

SEQ ID NO: 12880 - DNA, 4976 bp, Oryza sativa
  ref <308>: DATABASE ACCESSION NUMBER: AK110228
  ref <309>: DATABASE ENTRY DATE: 2001-12-06
agaccagcttcagctcggtttattcagctcctctctcctgctcctgccctctgcatcatgctgtggcttgtggcgctcgtggcgctggcgatcgcttatctggtgtggctgcgctcgatgcgcgctcccaccgctgctcctgctcctgcggctgagcgcaggcagcatcggcgcaactcgtcagtcgagcggactgtctcctctcgcagctctggctctagctcgacggcagctacgacggagcctgaccacagctcgagcgacagaaccaccagccgtcggcgccgcggactgccggcttcgccctcgagcaaccaggctgccgcgggcctcgccatccgccctgtggatgagctgccgcagggcgtgccacagggctcgccgatcagcaagcacgccctacaatcgccgtggggcgccaatgcgccgctgcaacgatacacctccgagcagcgggagcccgtggcgcagcctgtctattccaccagcggcgcctcgatgaccgcgttcaccccggcgcgaggcaacaccactgcagctcgcgcttttggcgccgcgacgccgttcagcttcggatcgagcgcggcaactcctgcagctgtgactgttgcctctgcagcggcagcggcggctgcggcaggcaatacgcacgtggcgccgtcccccttcggcacccgcacggctcagctgcagcagttgcagcaggcgcagttgggggctgccagcaagttggcgagtgcatctgcatccgtgccgccatcaagcagcttcagcacacagcagccgctgttcaaccacacgccggccaagttcgtgccggcattccgccagcagcagcagcagcaacagcaacaatccccctacggctcgctctactcgcagcccggcaacacgagcagcactctcgctgcgggcgcgcgtacgcccttcggccgccagcaacaacaactaggcttgatgacgccggtggctgctgctgtcgctgcgaaccctgcgcgcggagctctgccttcgcctcccgccgcgctggccgagcagcgcggtttggcctcgccgcctcaggcacaaccagttcccgtgccagcgctacagttcacggtgcgcggcggcaaagagtccgtcactgccatggataccaccagcagcgagcagacaaagagcaacatcagcaactccgatgaaagcaagcctgctcattcgcgcaatgccagcggagcggcggcgatgcgcaagcgtgctcgtggagctgaggaggaagaggaggcagaggagtctaagcgcgcgccgagcagcagcagaagcactgctgctcgtgcggaggagagcgctgccatggaggatggcgaggccagcggcaaggtgaacccatggctgcagtgggtcaagtccatcccgcttgcggggggcagcgctacggcgcagcagggagcagcgaagcgcgcaaagcccgctgcaccggagcctgtcccagtcagtgatactcaggcgcccgctgtcatggccatgatggatgagacgggcgatgcgccggacaagcagcgggcgggcacgaagcgggcggcggcggagactccaagctctccatcctcagttgcagcaagccgcaatcgctccgacgcggaaggcaaggacggcgctgatgatgagatgcgcgaccaggccgacgctgctgacaaggacaatgcagcggatgcgcgcaagaagagcaaagtggcgcctgtggtggtgcccgcggccgtggctgccgaggaagatgcccgcccgcccactcgtgcgcagtcgcaggaggtggtggttgtgtctgccgccccagccccggccccgcagccgattgtgctgactttccctcccgcaggcgctgtgcctttggcgctgcctctgaacggcgccccgacacgcgagccgcagggccgtctgcgcttccccacgcgctctggatccgtcacacgcacgggcagcaacacagcggcagctgctgcgtcgcgcagcaagctgttcgccagcggcagcagcacggcggagggcagtggcgacgagagtgatgccggctcacaggccttggcgctggtcccggcttcgtcgaccagtgcagtggccaatttgatcggcgagcaggagcggctggcggatcgtgtgcgcagccaccagtctgtcatgaagatccttgccacctccgcatcgtccagcaagaagccgcgcaagcaggacagcaccagcggtgcacctgcagtggcagtggcagcagcgccgctggcatcgtctcccgcgccgagctttggtggctttggcgctgcagccgctccgtctaccagcgcgctgagctcctccactgccccttcgttcggattcgctgcgccagcagcggcggctactgattccactgtggccgcatcggcgactgcgcccactgccgctgcatctgctcccacaggcttcgcattcggcgctgccacgcctgcggcatcgtcatcgtcgtcgtcggcggcttcgactgcagcaagcagcagcagctctagcagcgacaccacgtctgcgtcggcacctgggttcgcttttggaggcttcggctccaccacagctgcagctgcttcgagcacgggttccgcactgggcggcttctctctccctgcagcgtctgcgtcttctgctgccagcacgtccagctcggcgagcgctgcatcgagctcggctgccccttcgttcggcttcggcgcagcaccttcctccgccgcatcatcggctgctgctgccccgtctttcgcgtttggtgccagcactgctgccagctctgcagcagcggagtcgagctcgacggctgcctccacgtcggcccctgcattcgcgttcggcgcgccggcggctgcgagcgcttccagctctgcagcggcaccctcattcggattcggagcatcgactgcccctgctgctgctgagatcactgcaccggctgccgcttcgtccacgggaggcttcggcggctttgttctgcctgcggcaagcagcacgctcggcggcgcatccacgaccgcttcctccgctgctgctgctcccactttcgcattcggtgcttcgtcgtccgcagcgccggcaaccagtgctgctcctgctgctgccgctgctgctgcggctcctgtgtcgactccttccttccagttcggcggcactgctgcagccacgcctgcacctgctgcgaccggtgggctgtctttcggtgcagcagctccgactggcggactgtcgttcggcgcatcggctcctgctgccacagcgagcagtgctccttcgttcggggcggcagtggctgcacctgcatctgctgctgctgctggcggtctgtccttcggcgcgcccagcacgggaggcgcgctgggtggcttcggcgcaggttcggctccttccgccgcgactcccgcggctgcgtccacttcttctgccgcagctcccttcgccttcggtgctgctgccactccatccttcagcacgccggccaagcctgcggcggagagcggtggcttcgcattcggtgcagcagcgacgccagcggcaactgccactcccacgccattcgctttcggagcctccgccgctcctgtggcgagcagcagcactgcgggcggcctgggcggcttcggcgctgctgcagcgccgacatctaccccgagtttcggcggcggctttggtggtgcgagtacggctggcctcggtgctcctacctcctcgctgccagcagcctcgccgttcggcgggtcttcttccgcgctgccttctgcttcgcccttcggagccgccagctctgctgcgcccgccttcggtgctccggcctctgcggctgcttcctctggtggctttgcattcggagccagcactgctgctgcacccacctccaccgccgcgtccatcggcccgttcggcgcgcagtcttccatcggattgggtgcttcacccgcgccgttcgccttcggtgcgtcgactgcatccgccccggtggccactccgagctcagctggcttcggtctgtctatggctcctcccgctgccactcccttcggcagtgctgctgctccggcaccttctccgttcggaggcgctcccgctgccactccgtttggtggtgcagccccgactgcctcgcccttcggaggtgcagcgccggccgcttcgccgttcgggagcgcggcaccagctgcctccacgcccttcggcgcagctccgtcgtcgttgtcggggggcttcggcagcggtgcagcagcacctggggcctcgcccttcggcggcgcccctgcatcctcgggtggattcgcctttggcgctggtgcgcccagcagcacccctgcagcgagcacgccgttcggcgcgcccacgccttcgtcgggaggctttggtgcgcccgtcgccttcggtgccgccacgcccagcagctccggcggcttcggtgcgccgtcctcctcgtccgccggctttggtgcattgccagcctcctcgggcttcggcgctccatcgggcggcctcacacagtcggccagcacgggcttcgcattcggacagcagcagccacaggcgcaggcgccgcagatgtctcagtcgttcggcgcaccgagctcgggcggcttcggtgcacctgcgccggctcagctcacatcgcaacccagcttctccgctggaggcttcacagccaagccgactggccgccgcacgggtgctcgcaggaaataagcaggagcatgcgtcttctttgcttgctgctttccttctctccccatccgttctcgtgccctcgccctctccctctcctctctcttcctcctcatgcactcagccagcgatcaagttcgcctctcggctgggccatgcgcatccttatccatgatactcgcacccaccaccactgtctctctcgccctctttctcttctcgctcattccattgctcgcccctgtactttgctcgccattcacacaaaaacgcttcgctgtttc

SEQ ID NO: 12881 - DNA, 3639 bp, Oryza sativa
  ref <308>: DATABASE ACCESSION NUMBER: AK110229
  ref <309>: DATABASE ENTRY DATE: 2001-12-06
agacttcaacaacgccaatgcgcctacagccgctgccggtgcaagtgcctccgcctcgggctcttcagcgtctcgcactggcgacacgcccgtgtctgcccagtcagaaggatgcgtcgtgcccgccacactttcgcccagcacgccgtttccgattcaagccgcccgatccgagcgcgatccgtactcgcacattcacatctttgagtgtgtcctcgagctcgtcgatccgcccgcagacccagccgacaacgagcctcagagcctggtgcagtccatcttcagcgcgctcagcttcggcagacgccctgccaatcgacgttcgctctctacaccacccaaacccgagagcttgcgcgccaccggcatgccaaggccacccggtacgcccgccgatgctccggtctcaggctccagcagcacatcaggaaaagcaggcgatgtcaagtgcctcaccttctacctcgtcctccgcttcccacgacgcccctctggacacgtaagcttcgtcggctcgcgtccatcgtacagccgctcctccagcgtcgccggtcgctcccaacgcacacgctcgcgagcctcgtctgccgttggcgccgaccgagacgcgcgcgagctgcaccgcgatgccagtaccgacagtcttgcgcgcctcggcagactgcacaacgcacacagcgaatttgctgccgccatccatccgtcccgcaaagccatgatcgattcgaatcacaccacacctcgcgcaagtcgtacagccagtcccgctcatgcgcatggcaatctcaagaaacgcgatggaagtatggcgtctcaccgcgaaggcgaccgtcatcgacgagaccctcacgagctcgaacgcagcagcctcggactcaccatcgagacatctccagagctgctccgcctcgctgccaagcagagttcggcgcagaacagtccgtcgccccagtcggctcccaactcgagggcgaccagccgtgcacgctcgcgcaagtcgagccgagctcgtggaatgagcgcctcgcatcgcagtcacgcatccaacaaggtctttgtgcatgtcaccgacacgcgcgctctcgatgcggtccgcaaagcgctcagcattggcggcaccaccaccgactacaatcctgacatcgagcccgactacgatgacgccggcgcgctctgggcaagcccagacttgcgtgcgcgtgaagcgatgctgggagaggactccgataccggcttttcagccggtgcgctcgatctcaagttgcgccgccctggctcgagccggcgccgtcacgcctcgtatcgcttggcttcgggtcttgctggagccgcgagtgaggatgcagacgtcggtgagacgcctacgactcctttccgcccgacgtggtccgagataccggcgggcgcaggcaaacagcgcagcaccatatcgcatggtagcgacgatcacgagcaatactcccgtggtcgctctctgggtcctgcgggcagtgtctccgcaccggctgcaggcatacccttcccagaaaatcccccgcgtctccgggcttcgtcgaacctcgccttcgacgtggtgcaggaagagtcgtcgccctcgaccacggctcagtcggcttcccagtctcgaactatggtcgacttgtgggagaaggtgggtgccactgcgaccgcctcagctccgaatgaaaccccgaccaccgatgatgccggtgatttcgatttgtccgtcacgcttgcatctctagcggccttgaccggcgctttctcgcgcgaggatcaaccgccgagctgggacgaaatcaccaagctagtctcggcagtctcatcgtacttgtttcgtgtccagggcgaggatctcggacgctttgcgcaggagctcgacgcgctctcctttgatcttttcaagggcctgacccccgtagccggtgtggtagatcgagattcgggcggcacggtccaggctgccgacatggcacagcgtctgctcgacctgcttggagagaacgcgtcatcgcgcgaggtgtacatggcagtcgacactcgatgcggcgagatgctcgagacgcaaccgctctacttcgagctcgtcgcgagcggcgaggtgggatggagttcggcggccgagacgatctatctgatgcggctgttgaacacggtgcttccgcgcatccgcaccaagaagccgcagggcttctcgcccgtctttggacgtctgccgcagtgtctcatgctcggccttgacgccatgtccggagtggctgaggctatgtgccagaaactcgccgacgaggcgatcaagacgtgttgctcgacggcgctcatcgtggccgactgggagctgcactgcatgggcacgtgcgagagggagccggtgcgcaagacgtcgcgcgaggtgctcggccgcttcctccaaggcgtcaccgtgtgtctgccgcatctggacggcgccaagcgcgcattggccgaggagctgttcttctcgcagaatccgcgctatgcaatcgcggcccgagccgaggcaagttcggtgaagcgcaacgagccgctgttcgccgaggtctccaagacgctctcgtcgctcgaggtggatttgggctcgatctggtcgagcgcgctggcgagcatggctcgcgctcccgaggacgacgacacgcgcgagacgctctcggcgcttggcgtggcgggctttgtgttgcatgtgcacctgctctactcggggtatgcgcgagatcgcccgtccgagtggaagggcgtgcgtgcgcaaacccagctcgaagctgcgctgcccgtggcgctgctcgcgctcggcgagcagaccaaggcagcggcgtcgccggagctcgacgagggcaaggaggatgcgctggcggacacgagcctggtgtggatgcagtggtgcatgcacgggctggagcgcgacgcttcagcgagccggtacatcctgtctgccgacttggcctcgtgcttggcgcagacgctggccacacagagcgtcatctcgcccagcccgtcggcgcggctgatccgcttcaagctgctgacgagcctgctggtggatcggtgcgaaaaggcggtgagcgtgcgggtgctgggccaggtgatcagcgagtcgccgtttgcacagctccgcgccggagccatctcgatccttcgcacggcgctggcgacgtggacggcgccgatgcaggcgggccaagatggcgacgaggtgccggtgcagggcattgtggcgctgctaggtcagattattgtcgtaccagcaaggctattgccgaccaagggtagagtttcagaagacaagcaggcgcaacttggagcagtggcagaagagggcgcagggttgatcgagacgctctcgctcctgtactctctggagatgcagaagaaggccggggttgcgagcgcggcactcgacggtatcgtcaggggcatcgacgggtacaaggcatcctttgtcgagccgctcgctgcggtgatggagggactgggctcggtggagcccaacgcatcagatgacagcgcggctcagcagcgcatgcagctccagctggtgcagagcgcattgcatcgtctgcagtctttgtagtcgtcgcaccttcatgcgacggaatcacgaaatctcacgagctttttcttcgg

SEQ ID NO: 12882 - DNA, 4246 bp, Oryza sativa
  ref <308>: DATABASE ACCESSION NUMBER: AK110230
  ref <309>: DATABASE ENTRY DATE: 2001-12-06
acaggcacccaatcgagccaccaccatcacaggccaacgcaagcaatgcgacaaagcactgttcaccaaccaacgatccacactcggagcacaccttcggccatgtcttcctcgtggataaagacgctgcgagaccgcgcagcccaggcaggctccaaggtgcccgagcggctctaccacaccgactagtcgcgatccttggcaaatgcgcatctcagcagcgcaggcaccttcaatgagggtctcctcgccggactcgctctgccaggcgaggtcaccaccatggcctttgagcccgtccggggattcctcgccgtaggcaccacactcggaactattcatcttttcggttcgtctgccgttcagctctcattctcgctgcgacccgcgcatcgcgtcagtcatctcgcgttcaagtccgatgccggtctgctggtttgtatcgacgagaaggacaacatcagcatctacgatctagccagaccggatcctcagatcagagcggcccacgggacttcctcgaaccagtaccgcccttcgactgcatcgacgggacacagtatcactggcccgcctcatccggatacgccgcagcgagtcggcgtacactcggtgcgcaacaaggtcatctgcgtcgaagtctcgtccgcccactctcacatgtttctgggcttgcgcgatggcactgtggatgcatacgatctcgaacgcatgtgtccatcgccctatcgcgtgcctaacctctggtgggaggaagaagagattcttcgcaagtcgggcgtgccggacgcgccgaaccgtcgtcacgtgccgctcatcattgatatcaagacgcatccaaaggacatcaaccagctgctgcttgcgtacgaaggcggcgccatcctgctcgacgtgcgtgagcgtgcggtgctcaagacgttccagctccgcctcttgcccggcgcgcgcggggcgggaggccatccggatctcgtgtggaccgaacgcgctccaccggcaacgtgcgtcgcttggcgcccggatggagaagtctttgccatgggacacgaggacggctgcatctccttttggcatgctcgtgatgacgacaagccactcatggtgcgcacgctcgactgcctcgatgtggataagcccattaccgatccttcgctcatggacatgcctcgaccaccaaaggagcccatcttcaagctcgcctggtccggctttcccgaaaagagctggatgagcatggccagcgaaagcgcagccagctggcagtcccaaccgcatcagcgcgcatcgtcctccaacgagcctatcgacgagcccgtcaagggcaccctgctcacggtgctcggaggtgcgggtccagagatggatatgcccggtctcttctgctccaatctcccgccgtatgctgctgcgataacgttgtggggaggagcgaatgccgaggcgagtcgcaagctgcgccaggcactgcgcgactcgctcgtgcccacgttcgagagcgtgtgtccgacgtcgagtcaggtggaggactttatgctgctgccgcgcaacaatcctcactactcgggaagctacgatccgacggcggtggtggtgctgcttgcagccgatcctgcgttgcccacgctgccgcctcctgctgctgcacgcggtctagcgtgctttgcctacccgccacggacgaggtcagattcacgcgctgcgccagatccacaggctttccagccgggcagcaactcggtgccgatccagccacagaaggagctgcacctgcctctgccgctcaccctggccggtccaggtgcgatcttgggtgcaaaggtggagacgctcatgccgcacgcctaccgtaagctggtcgggccgttggatgtcacgggcttgaatcaaaaacaggagcaggaagcatcgggctcggcgctgcgctcgtcgttcaaccacgacaagccgccgctggagctggcgggtggcaaggcatcggcatgtctgtctggcgaaggatccgacggcatccccgagctgcttcgttcaagctcgttccgcatcctcatcacatggcatctcgacggctcggtacggttctacgatgccagtccgcacttgctgctgatgggacgggtagatgaagacgacctcaagcgccagttggcttcgccgcgcatctggttgcagcagagctttccgtcacctctcccgcacctcacgatcgacgcgcgagctctgctgcacagcccggcgatgcagggccatgcgacgttcgatcggatccgcgcacgcgcccgcatccaagatgtgcagttcgcgaccgaggtgctcgaggcgagcgtcgtgctgtcgacgggccaggtgctgcatatgcgctttgggttcgcacagctgagcgagaccgagatgatcaacgacgaggtggaggagtcgatcaagaggcaggaggaacagacgcatctgcttatcccgcccgtcaagagcccacgctcgagcatgcaccgctcgtcgatgtcgatagcatcgccgcagtcggaagccgctgcagccacgtcgcaggcgctggacgcagagatgtcaaaggcgatgcaagagctcgaggtggggacggacgcggcagtgccaggcacaacggcacctcctccacgaccgcgcagagacccgaagcgcgcgagtctaaacccgggccagcaggcagcgctgcaacagccagctcgcattcctcctggccctccggctccggttccaggtccaccagctccaggtagctttgaacatgaagagatcgtgctgctgcatcatcttgcggatccgcgctacgatgggttcaagccgaacctcatggtggatccgatgcgcggcgagatcacggcgctggcgtcgagcgacattggcttcctggctgtagcatgcggtacggcgctggcggtgcttgacttccgatgcggcgagctcattctcaaggaaggattcggcggacacgaatcggaggcaggcgggccgggcgacgccaagacgctgcgcaaggcgatcgaagccgagtccaagagcccaattttgcagctcatgttcagcatgtgccggattgccgaggatccgagtctggcgccgcggctgatcgtagtgcgcgccaacggcgtgacgacggtatggactctgcagaggacactggatatgtggatggtggaacggagcggcacgcacaagctcgaggaactcgtcgatgcgcgtgggctgcacgtgctcgacaccaaggggcgggcgtgcaatgcgcatccgcaggatctgcaacgtgcgttacgcgagcaagaggtcggcttggcggccggatcgacaaccgaacttcccgaggcagatgttctgctgggctttagcgagcgacaggtgacgctgcgatacggcattaccggcccagtggtatcccgcgccgagatgggcgagggtgtgctggggtgcagcgtggtagagcgcgcgcacgacaaggtggcagcggtggtgacggcgtccagcatccggctgctgagcctgccgaagctggagccgatcgtgcggctgcagcgccaccatcgcgaggtgggcgagtcggcgggctggcgggcatgcatctcgtttgacgccaatggcgactttgtcgaggtgtgcagcagcctcgacgttcgtctctggacgatgttcgcctcgctccgtcgaccgggtcagccgagcctgacgctggtggatcccaccgcagctcctacggtgccgcttcaccctggagcagtggggtcggcggctggggtggcaacgagcattgctggatggttcggcaccaagaccacgggcgtcttgtcggtgggagcacagatggacgcggtgctggcgggcgataagcgacctgaaccacctaagctcggtgaagcgcttgcaccgcgtgactaccgtccgcccctgccgcctgctgccgacaccgaacgtgtcgagatgagcgagcgtccaacagcgacaggatcgagtgcagcaacagcacggcgcgatccaagtcggtccaaggccgttgcagcctctgccgactcggcgtgggcaaccagctatcaaaacatcgacctgctcaaggcgcgcggagccatgatgagcggcatcgaagacggcctcaccaacctcgagcgaggcgccagcaacttcctcaagagcacacgcgaagccgcgatcaagggcgccgccaaggacaaactcaacaagatgttcttctgaatgcaaatctgcaatacgatggctggaaagg

SEQ ID NO: 12883 - DNA, 3248 bp, Oryza sativa
  ref <308>: DATABASE ACCESSION NUMBER: AK110231
  ref <309>: DATABASE ENTRY DATE: 2001-12-06
acttcgccgcgttcctcctctccatcccactcgttcggtccttcatcttgcatctcccgtctctcgcaaagcagtcacatcggttgcgactcgcgcatatcacaccgacggaaccgccaagtagcgccctcgcggctcagccgacgcgctcactcagcctgcaagttgcggcttttcctggacgataacctgttcggcgcttccgaagtgaacattacgatccagtctcgctattgcgctccctctacgtcgtcgctttgctcagtcaccaactcgctggaaggggtccgaaggatcacgcttctgataccgtttgcattgttgcgcctgcacccgagcgatgagcgttcttgcaccgccgccttcgccgtcgccttcatcgtgctttgatgcgatgctctccgacacggacatcaacatcgaccgagccatgccacccaccagcctcaagcgcaaggcatccagcacaaagtcgcgggcagcggcggccacccacgcctcgagcagcgacgccgagaaccgccctttgattcagtccagctcggcctccaccatcgcaaagccaaagcgtgctgccggggtcgccgacatggcgccgtccaaatccgcatcgacctcttctcccgccccggctgcaaagaaggccaagctcacctcctcggctgcgctcgtcgagctcaaaaatggcaagctcgtcctcaagcagaagccgttcaactgggccagcaccatgcccgtcctcaaggcggtcatcaccttccaagagttcctcgacgttcacgaaaagctcgacagcatcccccaggaccatctgcatgtcattgctaagctcgcccaggagagcgacaagtcgctcgtcgagctcgccaaggccattcgaagcaagattttgcccgaggctgacctcggttcgagcgagtccgacgactcggccacgtctggcgcaggagccaaggccaagctgccgctttcctgcattcaggctgccatcagtgcagtggccgagaggagaaactacggcatcgacgccgccatcgcagccccgcacgcgtcaagcagcgatgctgccgatgccgtcgctgtgcctgcacctctccagctgtggagatgggaggtgacagacttgaccatgctgccatccgaatttatagagaagctcctacaacgccgaagcgagcgcgaatcggcacgcacacaggcagaacagttgttcagcagtctcaccgaacaggaaaagcaggcgctcctttccaagagcacaaaagccaagatctcagccaccgttgctgctgacgctcaagtgcatacgccggcgggttcgagcgcttcgcaatcaatcgccatcgacgatgacaatgacgacggttccgtggctgacaccgagcacgaccgcaaagccgcacaggctccttcgacccctgttgcctcacgcaagcgcaagtcgccctcgtccacttccaccccgcaatccactgccaagagctcggcgatggccggcgacacgtccgcctcggctacatcttcaccaagagagaagaagagggccaaggatgctgtggagctgtcgcccgagaagcaaaaggagaaggaggagaaggatgctgcaaaggcagagcgcctcaaggcgaaggaggccaagcgactcgaacgcgaggccaaggagctcgaaaagcaaaaggcgaaagaggcaaaggaggctgaacagaagaaggccgaggagctcaagcagcgccaggtcaacttcttcacctcgttcgtcaagaaggccgccccgaagagcccgtccaagtcggttgttactgctgccgcgagcagcactgcctccgggaagccggccgaagacgtctccgactttgaccgcaccttcctgccttgccagtacaaggacctggcacccatcaaccgcttcgcatcgagatccggcagcaagccagagctcgagatgggccaagacgacctcagccgcgatgaaatgctgtcgcagttcctcacgcgcgcatctgctctgagcggcaatgccggcacacgtgccaggcgccgcaaaggggtccacccgcccgcgtcggtacgcgagatcaagcgggtcgtgaccgagtccgacgtgctcggggggaacgcccaggagcaggccgagaaggcgctcgagacgctgcaagaccgcggcaaggtgcagatgaagctgctccagttcgaaagcgatcgtcgtccgggctggtacggcacgtggaccaaatccaccaacctcatcagcccgcgttgtccgctcggacaggacccggtgtcgctcgactactcgtacgactcggacgccgactgggaggagctgggtcaggtcgagggcgaagacgtgcaggacggcgaggaagagaaggaggacagcgtcggcgactcggacgaggactcggagatggacgactggctcgtcgacgacctcgaagtcgaggaggaggaggagcaggctcgctctgcggccaacgcgatggacgtcgacgacgagatcgtcgaggtcgacaagttaggcatgcccgtgcccgctcagccagtcaccaccaacttgctccaccccaagaagaagaagaaggtcaagctattaggccgccgcttcgacgccaagcttgtgccgttctcgaccggtccacactgggagagcgagttcggccgctgcgactacgacctcttctcgtcgtaccgtatcgagctactcaacgacgcgtgcttcggcctgaacccgttcacgttcacgtcggccgagcccgcctcctccacaaccgagcctgacgaggcgggcatcgtcgatacgcccaccaagccacgccgcggcctccccgctggcggcgtgctggcggcgctgtggggcgatgttgcagtcgcgtccgatgctcctcctgcccatggcgctcccgctgccgacaagcccgaagccgctgcgccgacggcgttcaagcaccagctgcatcccgacgcgatcgcgccgctgctcgcgcgcatccacggcagcaccaagacgcgcgccggcctggtggacgacctcaaggagatgctcgaccagctcgccatgcccgcatccaagaacgccatcggcgagcgcctcaccgcctacgccaccaaggagaagaagcccaatgcgccatgggtggtcaagccggcatttgcgcatctgctcccctcttagcttcgatccttctttctcatcctgtatctagcacgcatagtcggagacaacacacgagcacgatttgtacgcagcg

SEQ ID NO: 12884 - DNA, 3380 bp, Oryza sativa
  ref <308>: DATABASE ACCESSION NUMBER: AK110232
  ref <309>: DATABASE ENTRY DATE: 2001-12-06
tcgtgtatggaagtgcgacccgctcgggcgtcgatccggaccagggccccgttacggacgccatcaccgtcacactctacctgcttgcccacgtcgacgatgcaaccacaaaggtctccgccatcgagaccgtgtcctcggtcatcggccaaggactcctcatgacctttcagacgaacgcgccgttcaaagtcgcagatccgtcgctgctggcgctactgcaaaggctgttcgccgacaaggaggtccaggatccgtcttcgtcagcatccgtcgtgtcgccagcgccatcggcagagccaacaagaggcagcgaggtggcacccgcagcgctgcggttcatcgtgtcgaacctgcgtctgctcgcgctggcagcggacgcgagcatcgctgcgccgcagaacctacttgcgccgcgtgctgctattaccgtgctcatgaacgtcggctcgagcctcctcgcccacgtcatccagagcctctctaccctccaggcgtccaaagacaagcccgcggccgacactcctctgctgcagcagacgcggtcggaatgcaaggcggcgaccgccgacgtggagacggtgctgcactcgatgaacccggcatggaaggacgagatcgcgctgctgcgctcgctgagcagccagatcggcgtcatccaccagctcgcccaatcgctcgccgggtcgagcaccgcatcgacatcgcagctgcgcggcaagaaggccgagaccatgcaggatgcgcagcgacgagcgacctgggaccactttctggacgcagcggccaccacggcggcagacaaggcgcccgtcgagcccgagatggcgttgctcatgcatctggtcgtcgacgagcgcgcagcgtggagcgccaagctcgatgcgatcaagacgctgtttctggcccgaagggggcagcggcgccgtcggtgacgctggaaaagtcgctcaccgcgttctactttgagctgctggtggcggcgatcgatgcgtgcgcgagcgtggtcgagatgccgccggcgttcaagggcgccgaggtgtacgcggcgatctggaggaacgcgctgtgcggcatggtgcccgagatcgtgctgcagctcgagcagtggctggatgtgcatccggatctgccgctgcgaggacagcgcgtcgaggccccgcatgtgcgctttgagtgtgcgctgcgcgcagcgctgctcgtcatggccgcccgtctggacgtgtgcgagacggccgtcagcgagcctgcagtcgcaaatggggcgaccgatgcgacgacaggcgccgagatggatgtggtcgggctggatacgccgccgtcgcagccgatcaaggcgtggctgttgcgtgcgtgcatcgagcactcgcttgcgcggcccgaggccatcgccgacgcgtttcccgagggccacaagctcgcatccgaggttcagagcctcgcgcaatcgctgcgcatggacgcgcagctcgagggactggcactcaacacgctgttcgagacgcgcgtgcccaccgacgatccgatggagctgctgcagcgcgtggcatcggatccgggcacgcactttagctttgcgcgccagctcgtggtgcaggtgcacgcctggctcgagcagcacgacctcgaaagcatcgcgaggtggtgcagggcgctcggcgacgacgccacgcacggcggcgccatgctcgacacgatcatgctctacatcgaccctgccgagctcgtgcatccgctggcgggcattttggaccaccaggatctgggtcagacgagcgacgagccagcgacactgtcgaacatcatcctgtttgtgcagctgctgtgctaccgctactctgtggcgccctcgcgcatctcgcgctccacgagcggtgccagcggagagatggagatcgatgatacgacggggtcctcggaggcagcgggagggcgaccgtttctggcgtcgtatctggcgtcggcctcggtgtgctacccactcgctgcgctgggagaggaagagagggggttggtggggaggtgggtgcacgcgctgtttggcaacgaggggatttcggacgacctcatccaggcatcgccgccgacgacgctgttgcggctggcgccgctgctgtttgcgcagagcatcggcgcgtgcgtgcacggcgtcatcgatctcgagacgctgcgtggcgggctgagctacttcttacaggacctgctgtcgtttacgctgccgggggcgctggcgtggctgttggccgagatcgcgcgcgtgccgttgcagcccatcctcgacgtgctgaccgaagcagggctgcaggcttccgtggtcgatgtgccatcgagcgatggaacgctggctaacgggctgccgaggaacgccaattcgcgtacggtgcatctcgaggtggtggcgctgctgctcgataccgacgcgtgtccggcgattgtacggcatctgatcgcacggccgtttgacgcgttcgtgcaggcggtggaggcgggtggagcggcaacgctcgaggtcggcagcgagacgttcaatatggcctcactcaaggcacgcatggaggcgacgggcgtcacggcgcagctgctgagccggcgcaactcggcatggctgcgtgcactcgccaaccagactgtggcgcagcagtatgcaagcgtgactgccgagtcggagacgatcacgatgctgtgtgggccggatgcggcgtcttcgacgctggatcggctcatgggtgcccagggacgcgggctgacagcacacagcgttgcggagcagaaggcgcttgcaacgtggctgtgcctcttggcaccccaggccaacgaggtgcatccggcactgatgtttgttgagcgcgtccagctcgccgacgagtcgaacgtcgaggctacgctgcgcaccactgcgctcgtgctcagcctcgcgcgtgcggccgaagctgtgcgcagccacgacacatccacgaccagcacggcagaagctatctttgcattggccaccagcaccgagtccaacgggttgcgcaaggactcgtccgctgccgacctgtttgatgacgagccgaccacaccgcctcttcccggcgtcaatggggatgctgcgaacgactcgcagtcgaatggagccagggcaggccagtcggtggcggctcttttgagctcgcgtgcattcggactcacttcggctcaggtggaagatctgctggcgcgaaagctcgtccgtctcgaaccgagcacgcccgccatctggcacagtgtagaggctgcactgctcgacccatctgagctaggaaacgacgagggcaaagaatctgctcacaaggacgcgatcaagacgtggatcgaggtcctccgatcgtgactgcaatcaacgcgggtttcatgcctcg

SEQ ID NO: 12885 - DNA, 2908 bp, Oryza sativa
  ref <308>: DATABASE ACCESSION NUMBER: AK110233
  ref <309>: DATABASE ENTRY DATE: 2001-12-06
ctcaacggtatcacagcatcgcctgccgccaccagccccattgacgccgaagctcgacagtctctcgtccagccacgcggtctgcctaaagaggctttccaaacacagagcaccgtcgccggctggccaggcagcaacacctcgcctgccaaagagggtgcaaaccgtgccgctacaggctcgctccagttcaacctcgcttctcaccagcagggccagtcgcaatccggcaccaatgatcccgaggccaaaggccccaatcgggctgcggctgcatgtgccaacccattcttcgacaacatccgtcaaaacagagaactgcagcacggcatcaccgaaaagatccccatggatctgccctccatgtccgatgtgcaggtcagcgagctgccaccgttcctgcagaagctcgtgcgcctccctcctgccgaccgcgccctcgccctcgcacaggcatttttcgacatcgaaaaggctgagcagaaccgtctcatcgccaccatgcaacagcactcggcagagtctgactgcgatccgcgcgccaaggactttgccgccgcccaggctgcggccatgcagaagccctcgcttggcgtgcgccatctcgacgccagatcgcacgctttccccttcagcattgcagccgcgctcgagcgaggcgccgacaaccgctacaacaatatctggacctacgagcactcccgcgtgcgcctcagcaagcctcaatcggcgcacgattccggctccgactacctcaacgcctccttcgtccagccgccccagcagctcggcagtcaacgccgctacatcgccacgcaggcaccgctgcccagcacctttgacgctttctggaccgccgtatgggagcagaacagccgcgtcatcgtcatgctcacccgcgagcacgagagcggccgcctccagagccatccctactggctcgcctcccaatacggcgaccacatccgcctcaccaagctcgaagagatcgtgctcgaccagcaaggcaacaagatgcgctccgacgagtgcgagggcgtgcttggcagcagcgcggatcagggcggcgcgctcttcccctccatgccgtctcagccgcagcatcactccgcttcggccgccaagcgagaacccacaacggtacgcaggacattcctgctcaaaaatctcgccgagccgcacgccgagccgcgcagggtaatccagcttcagtacatcgcctggccggactaccacattccagagacgcccgagtcgctgctcttgctcatcgacatggccgcgggcgcgcagaacgcagcggacgccgatgtgcgcaacgcagtttcgcgcggaaggaccggcacagctggtcccatggtcgtgcattgctccgcaggtgtcggtcgcacgggcgcctacatcgtgatcgatgccacgctcgacgcgctccgcagagtgcgtcgccgtcagaagctcgctgccactggccgtgtcgacccctcccaggtgcccgagcctcccgcgtgggagaacgcgcttgcaggtgctggtggcgcagttgcggctgctgccgatgccacgcccgaggtcgagatggcgccagcttcgtcgccactgggcgatcgcttcccgcgaacgccgaggcgcagcttaaagcgcgaactgtcgccgacgggcatggacatcgacatgggcagcacgcatggaggctcgagcttcggccgcgatctgagctcgccaccgcccatgttcaggtctaggtcctacgagagcagctccggcatcgacgctgcgagcaacctcagcagcagcctgggcagccagcgcagtgcgggcggaatcagccagcagctggcgccggaggcgcaggcccaagctggtgagagtgcggcaggaccgagcggattcatcaacccgttcagctcgcccaccttcaagttcaacgcggccgccatgggcaagttgcgcgccagcgccatgcattctggcggcagcaacgactcggccgcgagtgccgtggcttcgcccaagcaggagggagacggggcgggattgaagctgcactcgcccacgcgcggcggcggtgcgctgcagctgccgccgcacctgtcttcggatgcatggaggcaggcgtcgtcgccgttttcagaggtttcgacgccgtcgttccatggcggtggctcggcgaggtcgtcgttttcgtcggcggcaggcgtgcattcgcgtctgtcgagtgccaacggcctttcgcctacgaccggcgctgtggccgatggcggctcgaggtcgatcgaagaggcgcttctgtctgccatgaacccttttgagcttgctctgagccagagctcgcagggcgacgaagcgggtcaggccgacaccaacgggccgagtgcagcgggcgatcagtcgacctcgacgattacgggcagcaatgagccgacgccttttgacgtggcgagcagcaactcgtttggctttggagcggcgcgtggagatagcatgtcggcaagcgactctgctgggtcggggtcgtttgatgcgctgacgggtacgccgagcacgagtgcgtccatgacctcggtcgccgataccgccgccgaacctcaggtgttggtggccaaggacaacgtccgactgacgagcgcgctgaagcacgacggcgcttcgccgcaaaaggctgccgaccaggcgtatgtcgagggagttgacctcgtcaagaccacggtcgagacggtgcgcgagcagagaatgtcgctcatccaaacgggcaggcagtttgtctttgtctactcggccgtgcttgcgggtttgttggctgatcttgagcgcgagggcgttcattagagccgctgttggcatttgcactcgaggcaccttttcttcctttgcatgtagaaccggaatctgcattgttctttttttctgc

SEQ ID NO: 12886 - DNA, 4230 bp, Oryza sativa
  ref <308>: DATABASE ACCESSION NUMBER: AK110234
  ref <309>: DATABASE ENTRY DATE: 2001-12-06
accgctcctatcaccgccaacgtattgcgcgcccccctggcacatctgcatccgcctcagttcgcttcgacgctgcccagcaccgtcgctcgtccctgtctgtccaagtcaggcactacaaccccgctcacagacgaaccgctacaagattcattgctaatcacctccactgtgcatgtcgacgcagccgacaagctggcacctccatctggcttcaccgcttcatcgctttccaccgaaacggacaagccacgctccactgcaccacaccaacagtctacactagcgcactaccagcaccgcgcatccctcgccaacctgcgcaccggtcgtcctctctcttactacgacccgggcgagaacaaaccacccaccccgccttgggctgacgccctgccgcccacctccggacccggctccatcgacagtctcttggactccagcacagccatgtcgcagggcccttccatgccccagatgtcgctgctctcccaggccatgcagcagcatctcacccgtcagcagatggacgcaatggcaagccacgatcccaacgcagccagtgccacgcatactcccagcggctcggcgctgccttcgccagcactcgcggggccgggctcgcccttcagctatggtcccatgtcagctggcgccgatgctgcctcgcgaccgtctttcccccaccagggcagcttcggcgccgcagcagctcagatgccgttcggctcatatatggcccaatcacacagccgcagggcaagcggatatgcaaccaacccgcactcggccgcccccagcgcgggcccatcgcgctcctcatcgccctctcgagctgcgcatgctccttttgatgcgacgtcagacctcgcttcgcacccagcacgctccttctccggcgctagccaggcgggtccagactacggcacttccttcggcagccagcgcacccacaccaacggcgtcccccacgccatgcctgttcactccaaccctgctgccatgaccggtcccggatcatggacaggccagcagggtctctcctttgcaccgaccccgcagaactcgttcgttcccaaccaatcggccatgcttccccccaacaacttccagcccgcctccctttaccagcatcagcctcagtcgcacccgcaacatccgcagcacctgcagcaacattctcagcatgctcagcctttgtccttatcgcaccagcaggccgcccagttcaacaactatcgaggcggtccagacgctctcctcagcccagaagctgtcgcctcggccgactctgcgggtttctttgcttctgctggaggtgcaacagccgccgccgctgcagcaggcgcagcccctttgacagctccatcagcggccgcgagtcgtcgctcaacccaagatgctcgctccaggcagagcaccgccggctttccagacgagctcggtgtcgacgcgctgccaggaagcctgaacatgagccgacgcggctcggctggtgccgaggatgcagccgacgacgaggaccttgatcccgacgagatgtccaagaaggatccgctcgccactcaggtctggaagatgtacgccaagcaacgctcgcagctacccaacggcgcccgcatggagaacctcacctggaggatgatggctatgacgctgcgcaagaagaaagagcaggaagcagcggaagccaagctagccctcgaagcgcagtccaacgcgagccgaagccacgcatcgagcgcacgtcactcgcctactctctcgtccaaatcggcaggaggctcgcgccgtagcagcggctccttccctggtgatccagccgcgtttgccggcggattcaccgcgattcagagtgatgcatccgatgtcccggagcagcgttcgcgtgctgcatcaggaacaggcgccaacgctgtgaagggaaagacccgctttgctgaggtcatccagcaagaagaagaggaacgtggtcgccgaggacgcagcccccgaacgccagaaagtgccgccacgcccgccggcgccgtagacattgtcgactggaggatgaagagcaagagccgctcgcgctcgcgctcggtaagtgcaatggatgtcgattggcgtggggtgagccgttcgcgctcgcgtgcgcccatgcgcctggatacgttcgatgacgagggaaacatggacggcgccgccctctttagccgatcggcgcccaacgccaacgcatttgacggcttcaactttgccgatctggcgcagttcgacggcaccgacgctttcggcgcgttcgacagcgcgctcgacacggacgatttttccgacctgctccgtcccaacggtgccaacgctttccagatgcccggatacggaggtgcttccgccggcggcagtgcacgcagaacctcgagcgccgcacgcaaggtgcagatgcagaatgccttccgcagcgcggccaacacggacctcttcggggccgatctggacgcatggtcggccgcgcaagccgaatcctctcgagccgcagaactcagaaaggcgagtatggacatggcctcgatcggcgctgccaacagcttcggcgcccccttttcgacgctcgacagcattccaggcattggcgactttgtcagcattgccgccaaccagcacccggagtacggtttcttgccccgcttagtgcgaaagacgagtttcgaccacaaggtgcgcgagaggagcatgtcgcgaggtcctcgcagggatcagcttgcggccgaggctgccaacaaccgcaagaggccgttccgcgacgatctttcccccgcacgcccgcccatgcagatccccatcaccatggaccaacgtattgcggcgggtctgtctcgaaacatcgcctcgctgggctcgcgcggtgcgccgacctcgtcgctgtcgctatcgagcgtgccttcaggtagcttcgactttgctgtgccgcatcctggctcgcttccgcaccagcaattgccgctcggagccaacccggcactcggacacccgacgaaccgtagtcacgaaactgcgaccgactttgactgcttgctcgagacacttgcttcccaggcgggcacgccgaccacgaacctcatgactggcgccagcgcctcgcctcaaacggcactaggcagcgggtcgggtgcttcgcccatcactctgccgaacggcgcagcagcagctggccagcagaatccggcggacctggaagcgatcatgaatatgttctacaactcggacgccggtcttggcggaccacagccgtcgtttacgcacatcaacccgaaccaagtcttcgggggccctatcgacaacatggcaagctcgctcggcaacctcacagcttcgggagacgaagcgtcgtcgaactggacgtatagcccgtcgagtggcgcaccgtcaaacgcagccacgccgcccggcctacagcaccacgctcagtatcatcgctcgccgctgtcgggcagcgccaaacgagagctggcgcttgctcccgagtcaagtgcttcagctgcgtcgcggtccaacgcgtcgccaagcatgcaggcgatccagaaggcggctgcgatgagcgaggcttcgcgcggcaagaaggtcggttctggaccgatgcctggcggtccaggcgatgctgctcgcggtggtccgggtgccggaccaggcccgagtgtcaacctcaaggacctgccgtcggcgagctcgatggcgacggccgaccctcctacggtgtgctccaactgccatacgaccaagacgccgctgtggcgacgcgatcccgagggccagccattgtgcaatgcctgcggcctcttcctcaagctgcacggtgttgtgcgaccgctctcgctcaagacagatgtgatcaagaagaggaatcgcgccagcggtgctcagcgcgccgatgcgcgaggacgcggttcgtcgggtggcggaagcggcaacgccaacatcgctccggcaggcggcgccaacagcacggccaagaacggcacgggcagcggcaatgcgggatctggacagggctcaggcaggagcaggacaaacacgaacgtgtcggtcgcgggcatcaggacgggcaacatcccgatcgccccggcgccgacaccgcctgtctcgtcgccaggcagcacggggctaggaagctccgtcaaggtcgagaagcgccagagaaagtgaagagaaactagcggaatggttctctcgcaatggatgtgattaattctg

SEQ ID NO: 12887 - DNA, 2905 bp, Oryza sativa
  ref <308>: DATABASE ACCESSION NUMBER: AK110235
  ref <309>: DATABASE ENTRY DATE: 2001-12-06
tacgctttatttacgtttggaactgtatattatttgtcgttttgtgtaccctggctggtcctggacagggatttaatacacaaaatagtctggaaatttgggctaaatttctgggcgtgacagttaaccacggaggacggcacagaattgcctaacccctggaatatcgaacacctccatcgcttctatccataatatcgagacttttttgctttcttggagctcgggccagcccccgcacaacccctcggtttgtgcgcgcctggccgggggctaccactgtgtatccttttttcctcttacaagcaatgaactcttgtgtacttttacccaaagaccgtttctttttcccttcctctggcttgtcctggtttaaggggtaatctgcgtttgctctgaatcctaagtgctgtgaggcggcctagaaaccccgaaagggagcacgaacgcgggccgtgccctgggttgcgccgaaccccggaggatcggaagggcctacacacggccgtccccgacccccggtcgacgcggcctcggtctggccagtcccgctaggcggctccctcggagcggtgggtttgtccatcaccacttaggtgccctggaccaaacgcggattcaccatctcgctagaacaagcccgagggggggtggggtcaaagcggcgtctcgatcacggactgattatcccctttttcccttgttttttgtttgttgttctctctgtttcaaagacattcagtggaaggagcaatgaatagaagaagcgaaaggggaaaaggagctaagcaagtttcaattgcaaaacaaggcaggatggcacgacggcctaaatacaagaggtgcccgctacgggcgcacaacaagagggaattgaaggcgcggatagtcacggggtgcccggccctccgaggccggcgccgctgacgatgtcgtcctagtcttcgtcgctatcgtcacccccgctcccgctttcttcgtccgaggcgagcccgggggtgaagcggggggccgatccctcgaagcccgagaaaatcgcgtcggctgcctcccgaacttgctcccgggccctcgcttcagttcctgggggaaaatcttcaagtgcgcaccacggcatgaagtcggggtcgcgcgcttggtggcttgcaagaaccagctccaccgcggcccgtgccaaagaagctgacgaggactttatggtctcgccgacctcctcttccagtctctccaggcccgccgctagcccgtccaaccggaacgcgagcgctggttgtgtgggcggaagttggctatgctggcgcatgggaacgccgactcggcgcgccgcgcgctccagccgagcgacggcgtcggagagctgcccgggcccgagttcgttggtgaggcgaagggccgcgatctccccagcctgatcttgcaccaggcgccccaggtcggcaagggtactctgagccttagcgagctcgctcgccaaccccgcgccgccgggcggcccgccggctgccaggtgcttctcccgggcctccagttcggaagccctcgccgctatcgccgcgcgctcagcgcaagcgctctccagatgccgggcctcgcgcccagcagcagcctcctcgcgcttcgcaagctgctcgcccagccggcgcaaggctacctcgcggcggtttacctcggcttcgcgctcggcgagtgcggcgtcccgttcccggcacgcctcctcccgcagccgtagctcttccgcgcggcggcccgcggaagcttccgcggcgagagtgatccggtcgtgctcagccgcggcctcttcacgaaggtgaagggaggcctccgtttccgccgccgttctctcatgggcggccaaggtggactcccgctgatccagcaggcgtgcttgctcctccagctcctgggcccgctgcgcctgttcctggccgcgcgcgttttgttcgcgctggctccgatcaaggacctcaatccgccgacggatcgtggcttcaaactcctgcacggagcgggcacgatcgtccaaggccttgcgttcagcctcgagtgccgcagtccgggcctgcaacgaggtgtcggcctccgctgctcgccgctcgtgggcagcggctgcgtcgagggtgccacgcgcattcctgaccctctccgccaggtcctcggcatgggcctcgtactaaaggcgaatatcgcccagcgcttcgtccagggcgctcgaggcgatcagcgccgcctgccgctcctcctccgcctcccgcatgacggagtccagcacctcctcgcgcgcctggattttagctaggtgggcttggtgttttttgcgccccaccctcaccatgtcctccacggcacggtgcccctcgtcgactcgcgcgcggtccgccacaagctgagcccattcggcatccagggccgtccgctcttccgccagggcttgaacttgggtgttgagcccctcccggacagtggagtcggcggcggcgagcacctgcagaagtggctccatgctcgccggggatggggaagaaaagcccgcggttcgcccccgggacgacggagtgctgctggaccccccgcgagacggggcctgctctcggccccccttctgcgaggccagccccgagggtgccccaaacgcaagggggggcggctgttcttttcgtcccccgctcccagtcctcgggtggattcggcctcggcctcgggctcaggaccgcccccagcctcgacctcaacctcgggcccggtacgtgtcctgtggaccccaccgcgaggttgcgaagaccccgtggccttggattggccaggcccggaccgctccggttgtgcggatttcgtcctccgcgaggggtccgaccccgaggtcccctgagaaggaatatcgctacaagggaacccagatcgcgttaac

SEQ ID NO: 12888 - DNA, 4386 bp, Oryza sativa
  ref <308>: DATABASE ACCESSION NUMBER: AK110236
  ref <309>: DATABASE ENTRY DATE: 2001-12-06
aatcgtcacgcagccctgcgtgcgatcaacccaacttgcctctcctcgctcttgcctgacccaaccgacccgtcgttccgctgcaaccgagcacacggtagcagctgtacaggcttccggcaagatgctctcgctcatcggctcgtccgtgttccacccctcaaagcgcacccagctgctcgagagggccaacgccaagctcggcggtgacaagctcgcatccatcgatgccgtctatgtccactttgtcaatccggcaaacgaggcggcgcaggccgtgctcgcagatgccgctagcccgcagcgcaacgtgctcgacagcctcctcgtctatggcgacaatgtcgacctgcccaacacgcgcgccgccgtgcagtctgccctcgctgccaagcccgacccgtcggtgctcttcgtgctgcctcgccccggcagcgtctcgccctggtccagcaaggctaccgacatcgcccgcatgtgcaccctcaaggaccacgtcgcacgcatcgagcgcggtatcgcctacgtcgtccagcccgccaccgcctcgcacctccagcccgacgagccggccggcctcaacgaccttctgcacgaccgcatgacccagttcatctccgccgtgccccccaccgcagacgccctcttccacaaggcgcagcccgctcccctcacccacgtcgacctcctcggcgcagacggcaccgaggaccgcgccgtcgcaaagcagcgcctcgtgcacgcaaacgagcagctcggcctcgcactcgccaacgacgagatcgactacctcgtcgacgccttcatcgccggcaagggcgacgcctcggccgcgctccgccgcaaccccaccgacgtcgagctcttcatgtttgcgcaggtcaactccgagcactgtcgccacaagatcttcaacgcagactggaccatcgacggcaaagacatgcccaacaccctcttcggcatgatccgcaacacccacaagctccacccccagcacaccatcagcgcctactcggacaacgccgccgtcatcgagggctacgaggccacccgcttcgccccctcccccgccgccgccgccaacggcctgagcgtctaccagggcgtcaaggaacccatgcccttcctggccaaggtcgagacccacaaccaccccaccgccgtctcgccctaccccggtgccgccaccggctccggaggcgagatccgcgacgagggcgccgtcggccgcggctccaagcccaaggccggcctggtcggattcatgacgagcaacctgctcctcgagggcgacggccgccagccttgggaggaggactttggcaagcccgcgcacatctcgagcgcgtacgacatcatgatcgacggcccgctcggcggctccgccttcaacaacgagtttggcaggccgggcctcagcggcttctggcgcacccggtgcgagcgcgtccccaccgacgacggcaagcaagaggtgcgcggctaccacaagcccatcatgcttgccggcggcctcggcaacgtgcgccccaagaacgcgctcaaggacaagatcacgccggacgccgcgatcatcgtgctcggcgggcccggtatgctcatcggcctcggcggtggtgcggcctcgtccatggcgagcggcagctcgtcgcgtgccgcgctcgactttgcctcggtgcagcgcgacaatcccgagatgcagcgtcggtgccagcaggtcatcgatgcctgcaccgcgctcagcgatgcaccgggcgtgatcgagggccaggtgggacaggggaaccccatccagagcatccacgatgtcggtgcgggcgggctgagcaacgcgctgcccgagctcgtgcacgatgcggggctcggtgcgcgctttgagatccgcgacgtgctggtcgacgacccgtcgatgagccccatggagatctggtgcaacgagtcgcaggagcgctacgtgctggctgtcgccgcggcggatctgccgcgcttcgaggcgatcgccaagcgcgagcgctgcccctactcggtggtgggccgcgccacggtcgagcaggagcttgtggtgaccgaccgtctgctgggcagcacgcccatccatttgcccatgcccatcctgttcggcaagccgcccaagatcgcacgccaggcggcgagcaagacgccgctgcgcatcccgttcgactcgtcgctcacgacgtacctgcccagcctgcagagcgagccggtcaggatgttcgccgaggcggtggagcgcgtgttgcacctgcccaccgtggcgagcaagaacttcctcatcaccattggcgaccgcagcatcacggggctcgtggtgcgcgatcagatggtggggccgcaccaggtggcggtggccgatgtggcggtgacgcgcacctcgtacggcttcaacgagagtctgacgggcgaggcggtggcgagcggcgagcgtacgccgctggcgctcatcagcgccgctgcggcggcgcgcatggcggtggccgagtcgctcaccaacatcgccgcggcgagcatcgagagtctggagcgcatcaagctctcggccaactggatgtgcgcggcgggccactcggacgagggcgcgcgcctgtacgaggccgtccaggctgtcggtctcgacctgtgccccaagctcggcctggccatccccgtcggcaaggactccatgtcgatgaagatggcgtggcagagcgacggcgggcaacgcgaggtgacggcgccgctctcgttgaccgtgaccgcgttcggaccggtggacgatatcgcgtgcacgtggacgccgcagctgcgcaccgatgtggccgacacggtgctgctgttcgtcgacctcgcggcgggcaagcagcgtctgggcggttcgtgtctcgcgcaggtcttccggcagctgggccacgaggcgccggatgtcgaggacgcaggcgtgctcaaggcgttcttcgaggcgtgctacacgcttaagcagctgcgtgtgcagaagcgcgacgagggcagtttggtgctggcctaccacgaccgttcggacggcggcctgctcacgacggtgctcgagatgtgttttgccggtcgatgtggtgccgagatctttgccgacgttgtgtcgggcgacaaggcggatccggtggcggcgctgttcaacgaagagctgggtgcagtgctgcaggtgcgtgccgcggacgtcaaggcggtgagtgcggtgtttaccgccgccggggtggcgtcgaaccatctgcatgtggtcgggcgcgtgaccgaggtggaggagatcaaggtcgccgcgggcgggcaggtgttgatggcgactacgcgcgcagagatgcagaagaagtgggccgagacatcgttccgcatgcagagtctgcgcgataacccgcagacggcagcggaggagttcggtctcatcgatgacgagtcgggtgcggcggcgctgcggtacgagctgacgtacaacccgcgcgacgatgttctcggcagcgcggtggtggaggccgagatggaggcgcggcccaaggtggccgtcttgcgcgagcagggtgtgaatggccagatcgagatggcgtgggcgtttgcacgcgcgggcttctgtgcggtggacgtgcacatgtcggacctcgtcgagggccgtgtgacgctggatgcatttgtgggcctggcggcatgtggaggcttttcgtttggcgatgtgttgggtgcaggtagtgggtgggccaagtcgatcctactcaacccctcggtacgatcgcagttcgaacgcttcttccagcagcgtcacgatacgtttgcactcggcgtgtgcaacggatgccagctgctctcacagctcgctgcggccggtctgattcccgaggcggaacactggccgctgttcaaggccaacgtgtcgggacgcttcaaaggtcgactgtcgaacgtcgagattacgtccacgggtggggcgcagtcgatcttcttgcgcgatacggccggctcggttttgccggcgatcattgcacatggagagggcagggctactttccgcgcagagggggatttggacgagtgcaggcgcaggaaccaggtcgctatgcagtacactgatcagaggtatccggtcaaccccaacggcagccccgagggtgtcaccgccgttacggccaacggaggcagggtgctcgcgctcatgccgcatccagaacgtggcgttgcgctgtcgagcatgagctgggctcctgtcagtgcacatgctcggggcgacaagggatggaacggcaaaggtccctggtttaggatgtttgaaaacgcccgcaagtgggtcgactcccactagccactcgcagtcgtcggtttttgtaatgtcaaaaagaatagattcaatcgtcatccgaatcatgg

SEQ ID NO: 12889 - DNA, 3304 bp, Oryza sativa
  ref <308>: DATABASE ACCESSION NUMBER: AK110237
  ref <309>: DATABASE ENTRY DATE: 2001-12-06
acatccaccaccacgttcgaggcattctcatactcgtcgtagatctacttttgtccttgcacgcttcgtcgacgcttggtccgtctctctgtgcaaagatcaagcccaccttgctgctggtcagaaggtggaaggtcgctttggtcccaccggcgcccctgccagtagccgcagctgggtctcattacgcggacttctgtcgcctgcaaacctcgcccctgtaacaatggcacagaacccacgccccggcctccgctcgcaggagtctctgccagacagcttcgtgcagaacggtccggcttcaccgccataccagcctcaaaacccgttggatgccatgccgcccatctatgcgagccagtcgaacctcgccgagcacgcctcccatcccgaccagcacatgattcgcgacgctgcactcgctgctctcgcctccggcgatgccatcacgtcgggctcacaagcgccctcgccggatcgcaaggttcctcaccaggccgctcacgacacgggcatcctcaccgaatccaggaccgactccaacccctcttcgcgtcccggcaccgcaggcccccgtgtcgcaatcaccgacccgctcgccgaattccgcgaccgcaacctctccaagcctgctggtctcggtcccaagtccgactttcctccacacgagaccaaccgcacccccggcgcattcaactaccagcacaacgtcgcataccgcccccccttcgttcggcaggacagcgagctctctagcgagaatggcgaccgcgactacggcgagttcgattggtccgacgaggacgatctcgacgaagccgcccgcttcgagaacgagcaggcaaagcaggtccgcatgggccgcttgagcctgtggaagatcctcaacttcctcgccaccacctttctcggcaacctcatcatctcttgctgcctcctcgtccccgtcatcgtcatccagtacgtctaccgcaggcgcggacccgacgaaggccaccgcgatttcgtcgcagacaacgtccaagcctggttcatctgggccgccttcaaccttcacgtagaatggtggatccatctgctcgtcgagctcttccccaaggccgtgcttggcgtcatccaactcatctggggtcgtcctagccagcgcgtcctttcgctcgcagagtacttcaacgccatcaagggctacctcaagttcctctgctacgccgctctcagctggggctcctgggccatcatcttcaactcggtctacggtctctataaccacacacacccgcgccagagcagggccgcctatctctaccgcatctatcagatcatcgagttcttcttcttctttacgctcaccatctgcgccgaaaaggtcatcatcaagcacatcgccatgtccttccacaaaagcgcctacgcagaccgtatcgccaaggtcaccaagtccctcaaggtctttgactggctgcgcgaccacaagcccaagctcaagggtcgcgagaccggctccgctttcggcatccccatgcgttccgcacgaggctctcccagcgtgagtggcgccaacacccccatgacgcccaacgactttgtcctcgacggcgacaacaccaactcgcgcaacgcctccagctccagcaagggcacctggttcgagaagcacagcaagaagcgtccctcggaccaggctgcatatgcgggcgaaaacgaccgcgcaatcgaccctgccaccggcaaacctgccgagggtcaggcgccggctcgtggcagtggcaagtccaacatctttgctcgcaccgcagcccgcagcagacatcgcatccgcgctacagctggacaggccagtacgctggctcgcgtcgccatgaacgatccattcggtctgcttcgcaacgaggcgctcggcatcggtaccgacgtcaactcgcctgctgaagccaagcgtcttgcacgttccatctttatcgccttccgcggatcgcataagcgcagctacctcgtcccctctgactttgactcggcctacaccaacccacaagacgctcgtgacgcattcagcgtctttgaccgtgacggcaacggcgacatctcgcagtccgagatcaagaacaccgtcatgcaggtgtataaggagcgccgcttcttgggcaggtctatgcaggacgtcaaccatgccgtcggtcagctcgacggcatcttcctcgtcgtcgcgctcgtcatcatcatgtttgaggcgctcgccatcttcaacgtcgacatcggcaagacgctctccaccttctactcgcttgccatcgcatttgcctttgtcttcaaggagtccgccgccaatgtgtttgattcgatcatctttatcttcatcacccatcccttcgacacgggtgaccgcattcagatcggcgaagcggtgcttgtcgtcaagcgcatgtcgctgctctcgtgcctctttgtcgactcgctcaaccaggacgtctacatcagcaacgtcatcctcgcaggcaccagcatcatcaacatgcgacgctctggctaccagtgggaagccatcacggcgcagtttgacttcaacacgccgctcgacaagctcgatgccgtggaggaggacatgattcactggctccagaccgagcccgagagattgttcgttccgagcacggcgattgtgccgcagaagatcgagtacatgcgagcgatggagtgcaccatcggtatgacgcacgccgacacctggcaggactggggccgtcgcttctaccgcaagaacgccttcttcgccgctttctcgttctactgcaagaagcacggcatccgctacgccaaccctgtgcagcccatcgtctactggaccgaggatgccgctgctcttcctcccagctacgacactacgtctagcgcccagcgccgtggctcgcaggagggtgaggacgagagtaacgggtatgtgctcgacgactttaccgcgtctccgtacgccagcccgcagattcgcgcagcaggcggcgcggctgccttgcctcccaagaagccaaagtcgttcatgaactttacgccgccgctcgacgagctcgaggtgtcggacagcgccaatgtgcgactgcgcaaggtcaagcgcggcgacaagatgctcaccacccagggtggcgatggctagttgctccttggcctcctctggctcagattcgcctgggccgtctcgacgcctttttcacttgcttccgtgtccctcgtcatttgtttctccccctcgcatttccctcgcattagactcaactttcccagccgcattcaattcatttggactctcttctcg

SEQ ID NO: 12890 - DNA, 2891 bp, Oryza sativa
  ref <308>: DATABASE ACCESSION NUMBER: AK110238
  ref <309>: DATABASE ENTRY DATE: 2001-12-06
ggattgagaagaacaaaacaaattgacattcattacatgggagagattttttttttttcctttcaagtgtgtactggcgctaaattcgccttgtagaagcttttcctcctgaacaaatccccgaacttgcgaagtatcggcctcttcttcttctgcttcatggattgatccatgctgtcgtagtggctctcgtcgacgtgatcgaactcatcgtcgaagtcgctcatggcggcttccgccgccgacttgaggtcggcgatgttgctcagcgacgcgaacacccggtccttgtggttcaggttgcccatcctcgccgactgcgagaagccgcccttgaacttggcgggctcgccgatcgagtacctccggctgctcggcgtcctggacttgtccgccgccgtccaccggtgcgacgccgcctccggtgtgcccttggcgctggagacgagacgaacgctcggcaggtgctggtcgaagccgtagtccgccacggaggcggtcctcgccgacgccggggtgctgtacgcggtggccgtcgtcgtcgtcgtggcggcgagcaggctgttgagctccttgaggctgccctgcggggcggcctcgctgaccttgatgcactcgtactcctgccggaggctctgcagcgcgccgtccttctcggcgacgacgtcgttgagccgggcgttctcgccacgggcgagctccagcgactccttgacgacgttggcctcggcgacggcctgcttcaggatgtcgcggagccgggcgttctcgacgcggatcacgcgctgcgactcgacgagcttggtgttctcctggcgttcgcggttcacctcctcctcggacgcgcggacgcagtcgaggagcacgcgctccttgtcgccccacgcggcggcgcactcctcggcgtcgagcctgcaccggtcgtgctcgtcggacacgtcgcgcagcctcgcctcggcggcgtccagctcgtgcctcagccgctcggcttcggcattggcggcctccagctcggcctgcgcctcggacagccacatcttcacctgcttcgcctccatcgtcacgtcggagagcgcgacggacaggtcgtcgagcgccttccggctcttctcctccccctgcatcgccgtccggagctcgcagcgcagggccctgatctcatcgtccccgccgccgaacacgaggtccttgacgctcctctgctccaccgcgccaccccgccggctcaccaccgccgccgccgccgaggcctcgaggctcgcgttggcttgctgcagagtggtgatctccagcttggcctcctcgagcgagatcttcgtctgctccagctgcttcgtctggtatattagcgactcgagcatcttgcgctccgactccttggccttctccacctcccgctgcaagagttgcaccttctccgccgcgtccttctccttcctcagctcctcctccatctccgacaccttctgccgcatcgcgccgtcgcgacgcctctgccagaaaaaaaaaacacgacaatcaaaatcaagcagagacaaaaaaaagggaaaaaaaaaggggcacaggctttgaaggtaacgtaattaacgtggcgtaaccttacatctgggggcggggacggcgggggcttggaggtggcggcggtggagcggctgcggtggagacgaggggacggcttggaatccttgggagaaacggtaagaggaggaggcgcgggtgaccggaggccggcctcgaaggagccggatctgcagggggaatcccagctcatatcgaaatcgaatcggcggaagtacttactaccactaaatagtcaagcaataataaaagaagagagacacggccggaaaagaaggatcttgaggaggaggaggagggctctcgctcatggcgtggcacgccgactcgagcggagcgcgagccactcctctctttgaaaactctcactcacctcggcagcgtggaggcggggcacgcgggcggcgcgtggtccgaggcaaggagcccccccggagggaggaaaaaaaagaagaaagaagcggtttccgcggcgacagccgtgtcagggaaccgaattagaagaccctgcccaacacggcgccattaatactcactcaactgggtttttttatttttatccgcgtcgtcgcgagcgatcgagcggggcgaggaaggccgcaaatggcgttcgcgtgggttgggagggtggcccgtccgtccgcccgtgcctccgttcgtttggctcctggcggcgatggggtcaacgggggaggcgttctcctctcgttctttttttttttttttgggtttgatcggaaccgggcggtggggcatgtaccagtggcgcgcggcgcgcgggcgcgggtggaaacgagggtgttcgcggtcgattcgatttggtgaggtggggatcgtggaaaaaaattccgtggaagctgctctcacgtgacgcgccgcgtagggcggctccggcctccggctcgtctcggatagtcggatgcggtgggtgggatctcgggtgggtctcggcgccacgctgactgttgaacgaggttaggcggagccgcggaggcggcaccgcgtcgtgtcgtgcaaaatgggtttggccatcgcccatcggtaaatcgggatgaagcttctcctgctggctgactagctgctgtgtcaacaacaccacgtcgtgaaccggtgaatcgctggatccccaattgtttttttctccccgtccaactcgttgcgttcacagttcactcaagagttaccggtgaggcagatattactactactggattattactgctgtcacttgtgtaataagttggaaacattggcagtgaagctctggatgttttgagttgaaacttgtaagttgaaaggctgcattccgcgag

SEQ ID NO: 12891 - DNA, 3199 bp, Oryza sativa
  ref <308>: DATABASE ACCESSION NUMBER: AK110239
  ref <309>: DATABASE ENTRY DATE: 2001-12-06
aaacgcttttttgtcctttccttccctataaccagctctttgacagagcgtccattcgttctttcgctatcttgtccatctttactgcatagacaccctcccggcgaggcatcatgcagctcattgctcttttccccgtttgtgcccttctttctggagctcttgctcaaatcaactatgccgccgccaccgacgccaacggcattgaattctggaacgccgagctttctaccgatgtaggaactggagatgcgcagttcggtatggcgcttccgcctgcggatgcggacgacctggccgaggagtacatcggtcgtttggtcgttcccattcccgcgtcgggaacgtggttcggtctcacgcacaagagcggaatgacgggcaacctcatcctgatggcctggcccagcggcgacgaggttatcactgatttccgctacgccagcggctacacgtctcctgcctcctacactggaaatgctactctcacccaaatctcgagctctgtcaacgagtcctacttcgagctcacctaccgctgccaaaactgttgggtttgggaccacgaaggagccgccggaagcaacatccctggcactgaggagaccagtaggcagatcatgggttgggcacaggctgctaaggcgccttccactcccgatgacaaacacagtgcgattacccagcacgcatctgctaacatgttctacatggtcgctgcatctgctcgcaacgccgactacacgaaatgggccgcattggcaaagccttccgagactgaggcaccgtacccttctggtactaacggtacctctactgctggccctacctctgttcccactggcgttgcttgccccaccaacaacatgaacgccaatcaaacttacgactacatcgtcgttggctctggagcaggtggcatccccctcgctgctaagctcgcggaatctggtaagaagaccctcctcattgaacgcggccccgcttcatctggtcgccacggtggcaccatgaagcccgactggctcgttggaactaacctcacccgcttcgatgttcccggtcttggcaacgagatctgggttgactcggacggtatcgcttgcactgactactccgtcatggccggttgcgttctcggtggcggtactgccgtgaacgctggcctctggtggaaccccgatccccttgactttgacgaaggcttccctgaaggctggaaacacgcagatatcgagccggctatcagccgcgctttcgagaagatcccattcaacgagcgcccgtccaaggatggtgaattgtacaaggctcagggttacaacatcgttggtggtgctctcgctgctgctggctggaagaacgtttctgctggtcttgagcctgctgagaagaaccgttcgttcacccaccccaaccatatgttctccaacggtgagcgtggcggccctatggctacctaccttgtcgaggccaaggagctccccaacttcactcttatggtcaacaccaccgtcaaccgtgtcaaccgtgacggcaacgtcgccactggtgtcaatgtccaggccttccttcctggcggacagtgtggcgacatccagcttgcgaccggcggtcgcgtcgttctctctgctggtgctttcggttcccccaagattcttatgcgctctggtatcggtccccaggaccagctcgagatcgtcaagaaggctgaagccgacaagatggtcgacgaagctgactggatcaaccttcccgtcggcgagaaccttgacgaccacgccaacactgagatcgtcatcactcaccccaacgtcgagttctacgacttctacgaggcgttcgataacccaatcaagtctgatgccgacaagtaccttgacgcccgctccggcattcttgcgcagtccgctcctaacctcggtgtggtcttctggcacagccaggttggccccgacggcatcactcgctctaaccagtggactgctcgtatcgagagcggccatggcgtcaagagcaacaagtccatcagcttgtctcactaccttggccgtggcaagacctccaggggtcgcaccactataacctctggtctcaacatgatcgtttcccagaccccctacatcaataacgagaacgatcttgccgccaccaagggctccatcgagatggtcatcgccgctttgactgccgacaagcaggtcgaggtggtcttccccgctaagaacaccaccattgacgctcaccttgagaactacgcgcagaccactggtggccgcagcggcaaccactggatgggttcctgcaagatgggtcccgactctggtctcgagaacggcactgccgttgtcgacaccaacaccaaggtctacggcatggagaacctcttcgttgttgatgcatccatcttccctgagatgatcaccaccaaccccagtgccctcatcgtctccgtcgccgagcacgcttccgagaagatccttgctctcgagggcagcagcagcgccggcaacaccactgtggtccctgaagtcgctcccgtcgccagcaacgccaccctttccgctcaacctactgctcctctgtctactggcattgccactatcgagtcctctgtccccgcgggcaacaacactgaagtcgccacccctaccgccacaaccgtccccgagcctgtcacttccgccgctgaggccacctctgccgctgcagctacctcctctgccgcctcttccgctgccgccccctctgcttcaagcgcaggcggcagcactgctgcagtcagcgagtggggcacgtgcggaggtaacagtgactacaagggttccactacttgcgccgaaggcttgacctgcaagaagtggaacgagtactactctcagtgcatcaaagcgtaaatctgagagcgtgtcgacgactatctaacgacttgcattgttgttgccttgcatggtggcatcgttcggttcttcacaccaaacgatccacccccttttattcgattcttgacgtgcagtactttttgagcggagcgctttataccctttgttgatatgggagcacgagatgaggagcatcgacgttggcgaagtgtttgcctgatgttcgtcttatcttgtggctcgccgtttgattttctgagatgggagatacagaccgtattcatgtattttacccaatgacattctgataaaaattg

SEQ ID NO: 12892 - DNA, 3624 bp, Oryza sativa
  ref <308>: DATABASE ACCESSION NUMBER: AK110240
  ref <309>: DATABASE ENTRY DATE: 2001-12-06
gcgccgcgggctcatcatctccagtccacgtactttcgccaggctcacggaccctggccaccgcaacccgctgcgtcaagcgcctcgtaaccaacacatcgtcagcgtggctggtccaaccacgtcgccccaggcctcggcatcgcaggttatgcccgacgcagacaccccgcaagtacggactcagtcccaagatccaagcagaagagggcatcatggccgtcgcagagctcgcggcggcagagctcgtggtccagtagatggctcccatagagggggcagcaatgcccccggtgacgatgtcgcctctcaagccagctcacccacaccttcagccccaaggacctcgaatgaaccatctagagcatcgggggagcaaagggctcggagaggccgcggccaaagaggcggaggccgtggcgcttctggccgcggggccgcacaacctccagctcacagagcatttgggggacatttaaccacgggaacagacgatgctacgccttcagcccggaccttaagcggcgatgccccagagttcgtcccaggacagcctcttgccactagaactaaacgcccgaaagctccagtctctcaggagccacatgtgaagcagccaaagtccactgctgctgaccttggaacaaggatacatgacgatattagcaattggaactacgaatgcgccatctgcacggacgatgtcttgaggacatcgcacgtgtggtcctgcacagtctgttggaccgttgtccatctcaaatgcgccaagagatggtatggcaatcagaagaagcaggatgacctacagtcgtcggagccacagcgagagtttttgtggcgatgccccggatgcaattccaaactcgtcgacgaccccggctcttaccattgttggtgcggcaaggaaatcaatccaccaccaaccagcgcagctttgccccctcattcatgtggacaaacctgctcgaaaccccgggcaacctgtcctcatccctgctctctccaatgccacgccggaccctgtcccccctgtggtttggtgggaccaaaccagtcgtgtttctgcggcaagaacgcttcccagaagctatgtcgggagacggattatgaaaatggttggagctgtcaggagacatgcgaagacttgctcccgtgcggcgagcatctctgctcacggccctgtcactccggcttgtgcggcgagtgtgacgtcaaagtcgaggcgagatgctactgcggccgtgtagacaaggtgattccttgctacgaaagggacgagcttcaacaatcctacgatacgaccaagggcacgtggtttgaggggtccttcaagtgcgatcagctatgcaagcggcccttcgactgcggcatacacacatgcaacgagacgtgtcacacgcaagaagagctgccatcgcattgtccatattcgccagacactgttactcactgtccctgcggcaagaccccgcttgaggaactcttggactcacctcgacagtcctgcgaagatgatgtccctccttgcgacagaccgtgcgagaagcttcttccgtgtggacacttgtgtaaagcaaagtgccatgtaggggactgcggcttttgcgatgagacaatcgatatttcctgccgatgcggaaggacgacaacgaaatcgatgtgccaccagggagacctacagcatcccttgtgcatgaggacctgccaagcaaacctcagctgtggccgtcacaagtgcggcgagcactgctgtgcgggtgagagaaaggccacagagagacaagcagcgcggcggaagaatagggcggccgcagacgtcaactccatcgagccggagcatatctgcatcaagacttgcggcaggcccctgaagtgcggcagccatgattgtcagcagatctgtcaccggggtccttgcgggagctgtcccgaggcggtatttcatgagatcagttgcaactgtggccgcactgtcctgcagcctcctcagccttgcggcacaaggccaccagaatgtcggttcaactgccagaggcgtcccggctgcggccaccctgctgttgaccatcactgccacccagacgacatcagctgcccgaagtgcccatttttggtcgacaaatggtgtgcttgtgggaaggagaagctccacagccagccttgccatcttcaagaagcccactgcggccgcccctgcgggaagaagctcaagtgcggattatatacttgccgcaagctttgccatcgtgcaggagaatgcgaagatgctagcttgactgggactcattgcgagcaggtctgtggcaagaccaagctattttgtgaacacacctgccaaaatacttgccatggacaaaccccctgcaatgagaccgcggcctgcagtgcgaaagcggtagttagctgcccttgtggtgggcggcagcaggaagtcaaatgtcttgccagcagctcgaacccaactcccacaaggccagaaatcaaatgcgatgatgaatgcctccggttggagcgtaaccgacgtctcgcagccgccctcaacatcgacccctcttctcacaccaacgaccacataccttattcggacgctaccttgaagctgttcaaggaaaacctctcctgggctgaggcgcaggaacgcgagttccgtgtcttttccaagagccctgatgaggtaaggatgaggtacaagccaatgtcggctacatatcgtcagttcctccatctactagccgaagactacggcctggagagtcggagtgaggacttggagccatatcggtatatcgtcgtcttcaaaggtcctcgtttcgtatctgcgccgagcaagacgcttggacaatgcgtcaagattcgggagacacaggcggcggaggcagcagcagccgctgccgctgctcggcccccgagcccgcccatgctagcggcgagcgagccgttcaacggcttcttattaacgtcgccacggtttggcctcacaattgaggatataaaccaggcttttgcggccgatttttctacacagccctcggtccactttgcaatcagcttcttgccgacagaggagatcctcctccgggcaacctcaaattattcagcgttcttatctcctgccgggatggaacaggccctgacggcgttgaagccccgtctggccaagaccgtggagcatgtggacctggctggcaatatcttgctatgccacattgacgcaaacgatcatataggacggcgcgaagacctcagcaagaaggacgccctggggtggagtgcggtagcaggacgggccgcgtctcggtcagggactgccacgcccacggaggaaccaccgactaggggtggccgtaagctgctggggctcaagaagaagaaggtcgacaaggagatggacaagccgtgggctgcgcttggtggagatgtcgagtgctgagctgacatggggtatgatgggattgatatctcgtgaggaatgggtgattggcaagcgagcgcctcgccggggagttgcaaacgcgagattcagcatgtttaaggaccgccagatgttatggcggactgtgcatatcgtggagctttgttatggcattgcattgaattaaagaaatactaggttctcgacgc

SEQ ID NO: 12893 - DNA, 3614 bp, Oryza sativa
  ref <308>: DATABASE ACCESSION NUMBER: AK110241
  ref <309>: DATABASE ENTRY DATE: 2001-12-06
acctgttttgtcctgaaggagttccgaatcttttgggatgagcatacgatcagcttcgtgtcgggcgctgcttgaacaggcggcgtcgccgtcatctcgcacgtttcattctgcatctgcgttactcgccagccgcgacgccaaaagcagtagcgccgctaaaagcaagaagatcaaccagcggcgcaaggaggacgaggtttcagacacactactcactgcatctcgccttggaggacaggctgcacggatcgaaaaggctatctccgaccgcttttcgggatggaagccgacgccgggaccgagctcgcggcgcaatgcgggacgaccgccactctcacccgatgcaaggaagagtctggcacgcgccacttcaccaagcaacctcgagcatctcctgggtgcacattcgaatgcagtgctgtccgagtcgctgacggatgtagacagtgcaaggccaggcgccaaaatctcggcacgcgactttgtcatgccacgcagagacctcagaccaggcgacttcgtcgagattcgacgcaaggtcgccgccataggaatcgttctacccgtgccggaagatgaaatgcccatagagacggatgcggacgacaagagtaaaaaggtcgggcacaaggacttgtacgtgctcgtcactacggggtccgttgtgctgtacagggatacagatgtgatgttccagatccccaacgtcatcgagcctgagctcgtgcaggctgcagccccgactagcaggagattcgtcgtcaccaccaacagtcacgagacgcccgtggacaccgatggcagctacgaagatcactcggctggcacaagtgcagatgccgatccgattgatggtgccgcgctgcaggaagagccgatcgaccaaacgcgcttcgaggcgcgcgcagcaatctgcaccaagatgcgcatcctcgagcgccagaaggagcgagaactgcagcggttgcttccaagcttccagtcgctgttcctcgtgcctggtgcttcgcagcagtcacgcgaggtggcgaaactcaggaacaagaggacggacctacgcacgggaaccatcaccacttacgaggcggcgaaactcatgcaggagctgtttgaaatgcgggcttctagagctccggacggcaagaagaaggtgggttcccgggagcccgcgccgtttacggcaagcaccgtgtacgcagcgtacgcgttgctcatcgagcagccatcgcatttcctggcggacggactgtcgcaccgcaaaagtcagctgttcaactgccgcagcgaagccgagcgtgccaatctggccacgatctccggctggattgccgctcctgcaggctcggaaggccaaggcttcatcgattccttttgccgcaaggcaagcaaggtccgccaatggtctgagtcgcagcagtacgatgcgtccggcgctccgagggtcattgatacgcccgaaccactcaaggacatggagtggactgcggaggaccgggcgatcatcgagttcttgcaaatcagtctgggctcgcgccgcgagctgcaggccgacactcacggcagcatcgccagcgagatcatcaagcgcgccggtggacatttccgtctgctaccgcatcccaacaccaaacagctgctgggactcgacgaggccgcgcgaatgctcctgactgacagcgagcagctgctgggcagggcgatcctcgagacggtcggcacggatctagcgggagggccagacctgcagcacgcgcttgtgacgcggttcttgaccgagatcggtgcgatgccgccgtggcggaacccgactcgactcgatgcgaccttccgcagcgcgatgatgagcgatgatggcggcgagcccgagcgcgatccgacggaggccgaacgagcccagccaaccgtggtggacagcaagagcatcgcgaaaacattcggcgtgtccacggacgagcaggtggaagcgatccgacacgattttggcagggaccatccggtgtatgtcatcgacgacgagacagcgttcgagctcgatgacggcgtatcagtcgaatccgttccgggaagagagaaagagcaggcatgggtgcatgtgcacattgccgatccaacggcgtggatgcagccgggtgacagcctggccaagcgttcggaacgccgtttctcgacgctctacttccccgaagcacgctgggcgatgctgcccgacgactttgtccgtagcggcgttggtcttcgctcctcatcctcctccgactcaggggaccactcggagggtcagcgcgtgatgaccttcagtgcgctcgccgacctttcctccggtctcgtacaagacaccaaggtccgtccggcgttcgtacacgatgtccaggcgatcacatacaagcgcgcgagcgagttgattgccggcgccccgcctgcggcgtccgaagcgcgtcgtgcggcggatctctcgttgctgagcctggcggcgacgcgactgagcgagaaccgcacgcgcagcacggcattgtttccgcacaggcccacgtcgtcggtaagcgtggcgccgctgccgctgccggacgtgccagcgtcggcatcggcattgcagaggccgtatttctttgccggcttcccgcagatcagcctgttgtcgcgggcaatggattcgcagcagggcaagaaggacgaggtgccagcgatggcgaatttcgtggtggccgaattcatgattcttgccggacgagtcgctgcggcatacggagctgagcatgggctcgcgatggcgtacaggtatcaaaatgcaccgcagacacggtcggtcatcgaggagctgctggcgatgcgcaccaacatgccggatctgagcacggtaggtgctcctcctgtatcgccgattgatgacagcgggctcatcgctcacggcttggttccgtatgacgacctgatccagcgtggaatcacgctcggctctggtggctattcggtgcgatctggtccgcacttctcgctcggaatcacggcgggtacagatagcccgtacgccccactgccgcacatgcgagatgctctcacaaacggaggttacgtgcgcacgactagtccgctgcgtcgctatccggacattctggcgcactggcagctcaagcaccacctggtgcatggcaagccgcgcttcggcgagcacgacatcgaacgccttctgccgcagctggagaggcaagagatgagcggcaaacagctcatgcgcatctctgagcgtttctggctccaccttttgctccaacgctccattttgggcacggatgctggagcaggcctcctcaatcgtccgttgacggcggtcgtcgcactgtccgaggtgcgggtcaacattcaaactctgaccgcgcgcgtgcgtgtgcacatcgaggaactcaaccttcccgcggacctcgagtgggagacggacggaccgctgcctgaaagcggcaagtcatacaaggtcgaacttgtcgccgtcagcatggctggcatccgcgctgctctccttgtgcgccgcgtatgagaccgcttctcctgatctgtacttctttcgcaacatagagacgttcccgtcgcaattccagtatcccagctggacttctgag

SEQ ID NO: 12894 - DNA, 2733 bp, Oryza sativa
  ref <308>: DATABASE ACCESSION NUMBER: AK110242
  ref <309>: DATABASE ENTRY DATE: 2001-12-06
aaccttgaacttttgtctttgcgcatcgcaatggcgaagaccagcacctcaaagaaggcgggcgccagttcatcggctgcgtccgcctcatcttcatcctcgacctcgttggaacaagtgcaggcatagcaatcggcgctcttgtcctcgtccgacctcaaccctctcaccgacctcctcgccctcgcgaaaaagcccgccaagctcggcgcttcctcctcgaccgaacgctcgagcaaggaaaagaaggatgctgctgtcgctgttcaccgtgctgtcctcgtgctggtccgatccatgaagtcgctcagcgccgacgacaggatcgccttcgataaggatgtggaccaggacggctacatcctcccctacggtgccaaggcaggcaacaatgcagcggcttcagcgcctttttcgtcaacaaaggccaaggaggcgcagaacaaggtggccgactggatcaggatgcgttggaacgagacggtcgagctcctctgcgccctgctcgctcacgaggtcgaagcactccgcctggaagcactccagatgatcgtcgagctcgagacctccgcttcctcttctctgacgcgtatcgccgccgcttccaaggcttcatccaaagcaggctcgtccagcaaagaatcgcctctcgccctctccactacgcccgccctttggtcggcatcgccgtggcgtgcgctgactcttgcgctcatcgcaggaccgcctagccttaccaagcttgggcacggcgacgcaggcacgcgctaccaggtggtgcgtgtgcacgcgggtgtgtccgaggacgtgcgcagcaagttgatccagagcggcctcgaggagtacgacgacgtccgcttcgccacgctccgcgagatcagcctggcgctgcgaaagcccgcaccgagcactctcggtaacacgcagcttcgcgcacacacgcttgcgctcctcatccagctcactgcaattccgacttcggccgacgatctgaacaacttcctcgtcgacgagctgtcgattccgccgcttggatccagcggtggaaagaagaagaagaagaagaaggctgcagctggcggcaagggcctctcggtggtggatgacggtgactcggacgatggtcaggaggaggaggacgacgacatgactggctggttctcggactcggacgacgagggtggcgtgcgcgcgggtgccactgaaggcgagcagcgtcgcgcagcagataagaaggccattagcggattgggcgcagccgcacgcgctgctggagcctccaagcgcaagaggcgaaccttgcacgagatggtacacagcatcggtgcccagcgcggcgcgttctcggccgcctggctcgaacttctgcttcctcgtcgccagaccgagaagtcggctgctgccgctggcgtcgcgccaggctcgctcatcggtggtgagctcagtctggccgccacgcacgaggtgctggtgcgactgcacgcgcagatcctgccacatctcagcaggccgacgctgctgcacgactttctggtatcgtgcctcgactctcgcggcgccacggctctgctggcgctcaatgcgatcttcacgctcgtcactaagcacaacttggtctacccgcagttctacacgcggctgtacgccatgctggacgcgtcggtgctgcacatgaagtaccgcgcgcgcttcctgcggctgctcgagacgttcctctcgtcgacgcatctgtctgcgacgctcgtggcgagctttgccaagcgactctcgcggctgagtctgcgtgcgcctcccgcagccatcgcgtcggtggtgccattcgtgtacaacctgctgaagcgccacccacgatgcatggctatggtgcacaaggagtgggacggtgaccgcctcaacatcggacctgctggcgtcgacgacccattcgacgctgacgaacaggacccgctcaagacgcaggcgctcgagagctcgctgtgggagctggcgagcttcggcgccgctgccgtggccaagggcaacagcggtggtcttgccatgggcggcgatgaaggcagcatcctgcctggcgaggcgcactacctcggctccgtcacgagtctggcacgtatcttcgctgagcccttcacacgcgagcgctacaacctcgacgatttcctcgacatcacctacggcacgcttttcgagaccgaggcgaagaagacgctgcagaagctcggcaccaagccggacggaactcctcggcgtcgaccggtgcctgcgctggcttacagtctgccgggcggattcggtgccggtggctcgagcgacagcacgacgtgcaatcgcgtcgacatcttcccatcggaatcgggacgcgcgagggccaaggcgtcgctggctgcagccaaggaggaggagcagcgcgaggtggagcgcgaacgcgaggagcgcaagcgtaagctcggcgtcgacggcgacgacgaagacgacgacgagcgcgaagcgagggaggccatcgagcagctcaagagcgccgagcgggctaagaagcgcaaggtcgaccagacgggcacccacgacgcctgcgccatgctcttcagctttgcatgagtgcgtcggatgcgtaactttcagcactgcgcagcgacgcctccggcccaacgcggcgcggtggctgcacctgtcagaaagctcatcacgaatagaaaatcgcatcgcatcgtcactttgaagcgcgcatgcgaaaaatgg

SEQ ID NO: 12895 - DNA, 3110 bp, Oryza sativa
  ref <308>: DATABASE ACCESSION NUMBER: AK110243
  ref <309>: DATABASE ENTRY DATE: 2001-12-06
gagcatcggctgcctcagcttcacccgcttcgcccacctgctctgcatccgcacatccacacgctttcctagcagccgaaccacactcgacggtgatcgcagttgcgggttacgggtcgccttgaccgcactagcagcttaaattcactctgcggcccttccgcaccgtcgcggccaacccgacaggcgatccgattcattcacacgccacatctgtcacgcatctcttcacatcgtaaccttcccacgcaaacgcaatgagcgcttgacagcacagcatggactcgattccggcagaacagtgggtggccgagtacgctcgatggctgcgggtgcacgaggccaagcttggtgatgccgctgcctcggccgcagcagccaagcgcaatgcagccgccgccagatcagcctcggatgcttccgcgtcgactctgtcgtccaccttttggaacgtcgtcagcctcggaacagccaacacctcttcgccgtcgccatctgcgcccacatcggcatccgccaccgccgcagcactcgcagcgcggccgatgctgctgcgtcagaatccccacaacctctactacctcctcatccgattcgaggcgctcggtctgcccgtcggctcgctagacaccaacatccccgtcgccgcccggcccacttcatacttttcctttgttgcagccaatgcatcgcgcaaggatcgcgacgacaccatgtccataagctccatggccagccgcatcagcgtcgtctcgtcctccttcagctcctccctctcctggttcggcggcagcgccgcaagggcggatccatcaagcgacatcaagtacatctactcgtgcttcacaaagatccccagcctccgtctcggtcccatccccgcacgcagactcatccaggactttgaggattgccccggtcaatccgccgtacccctcgacgtgtttaagaatctgcacctcctcgagctcgacgatgtcgacccgcgcacgctgctgggttgggatcgtctcagcatccaactccgcagcctctcgtgcaagaagagcaacatcgaagacctcaccgatctgcttgtcgacctcgtcatcctagacacccggcgaaggcgaggcgaaaaggtggatcccaagcgactgcgcaggaacgacccgccaccagccgagacagaaacagagacagagacggacgcaccaccatcgctgcccaaggacatgccttcgctcgcatggcatttccttcgccacctcaacctctcatccaacaacctcacctttgtccccgtcgagccgcttctcgcgctgtcggcgctcacccacctcgacctctcgtccaacttgctcaatgtcgtgccgccttcgctcgcgcacctgcccgcgttggtctcgctcaacatctcggacaacttgatcgactcggtgctcggcatctacgacgcgctgcccgtcgtgcgcgtgctcaacctcgccaagaatcgcctcgagagcctgtgcggcctcgaacgcctctacgcattgcagcgcgtcgacctgcgcgccaacgccatctttaaggcgggcgaggtgggccgcctcgccccgttgcccgccatcgcagaggtgtgggtcaaggacaacccgctcgtcgaggagctcgtcgactaccgcgtcgactgttttgtcgaattcgcgcgcgaggcgaggaccatcgcgctcgacggcgaagcgcccggattctttgaacgccagaggatcgcagagcgcatcggttcgtcgaccaacggtgcggccacggccgctcgcaccacagcgacgagcgagcacgaggagcatgaagcgcaggtggcgcaggatgcagccaccacgagtcgccatgttacggtggtcaagaacgtgcgccaccgcacagcgtcgcgctccgcccccgatgctgcgaggggcagaggcgaacacctcgatctgccaggccagagccaggccaagaaggcgtccggctcgcgatcgcgttccaactcacgctcacggcgcgatggcgctggacgccgacgcaatcagcgagtggtcgacttggacagctcgccccaaaagccgatgacagagcagaggcgcgagcgcacgctgaccgactcggatcgcatcaaacacgccgcactcgcaggcgatacatcggcagcgatggacagcgccgatcctgctcgcacttcagatgctgctacgaatggcgcagctcccagctccaccgatgccttggcggcacacgcagccatgctgtttgcgcttcctcctggcatggcgccgtccgagccgcacgagccgagcaaagccaagctgcgcacactcacgtcgcggcgcaacccgatcgactcgaacacgctcggccgaaagtcggcggcgcgacccgtagcttcggacctgtttgccacctcggactctgccacgaacaaggccggcgcaactggcgaggtctctgaatctgcaaatgcaagcgcggcgcaagagcatgtggaagattcgccagcggtgctggcacggcagcgcatcgccaggccacgcacaggttcggccgcagcgctggcgcgccgctcgcgcgtgacgacgagcatgtacgacccagacctgagcgtggcggagccggcagtgtctctccatgctgggccgctcaccggattggtggaggagggggcgccaagtgcagtagcacccgcttcggaagcagccaagccggtcgtggctgcacctcccggagccacgggcaaggagcggtcggatgcgctgcgtcggcggatcgaagcgctcaagtcggaagtgggcgacgactggctgcgcctcttggcacgcggtggcggtacggcgggcgagcgcaattcagtgctcatgctctcgagcgccaatgacgagtcgacacacagcacggctgaggccgaggcggaagcggtgaacgtggtgcggcccaagcggaccaagccgagcaagaagaaggtgcgcaacggcgacgagtccacactttcgggtcgcaggtcgacggagcagccgcatgcagaggcatccactgcggccactcgacgacgcgaagcgcgcatcagctagtttaggtggggtgacgaaatacaggcggagtttgaggctaccgag

SEQ ID NO: 12896 - DNA, 3543 bp, Oryza sativa
  ref <308>: DATABASE ACCESSION NUMBER: AK110244
  ref <309>: DATABASE ENTRY DATE: 2001-12-06
accacatacccaggccgcacgcaccacctcgccttgcttacgacgccccttttctcgccgccttcgttcccgcatggctcgatatcgctaaggtggagcagccatgacgatcaccaccgccggcactgccgtcaacctggcgcccacggtcacaaagaccttcttcaagcactactacaagaaggccaaacgctcactcaagggtcgctctggcaaagccggcaatggctcgtccacgcacaatcggcacgacgccctggacgagttcatgttcgacgaggccttccacatcgtcaaggccttcatcgagatcggcaccagcgacaccgtcgaggcgatccaggacttcaccgacgcacctgccccgcccattccctgggccaccacgctgcctgtgatgatcccaatggaaagctgcgacaaggccgccaagctcatcatcgaccacctcgggcccgaggaccttcagaagctggtgggaggcgaaaagtggtggcagctccgctcgacgccaggcgtgcagggcgagtggatcgccatgtccaacgactggaaaaagatgaagtctatggagaagaaggctcagaacgccgctgcacaggccgagagcaacaaggcggacgctgccagtggcgacccgaaagcatccgccaagcagcacaagcgtcgcaggaacaaacgccacgggcgcgcgctttccgagattcgtgccatgcgagcaaagaccgagtctgcgctcaagcgccgttcgcagtcgttcaagcgcccatcgcaagaccgcaaacgcagtcaaagtcggcctcccgtgccgggtgccccagctccgcccgccgatgatgcagcatcagcagcctcgagcgacgccgagaatgcacagcccgccgacgatgcaactgacgcagcatccgaagccgacaccgaccacggcgagacagagtccgaagagctcgaccgcctgcagcgagtcatgctctacttccacggcggcggctactactttggctcgcttgcgacgcatcggtaccagatcgtgcgctatgcgcgcaagtttggcggcaagtgccttgcgtccatctaccgcaaggcgccgcaatacccgtggccgtgcgcgctgcaggacgcggtggcctcctacctctacctcatcgatccgcccaagggggcaaagcaccgccccgtcgaccccaaaaagatcgttgtggccggcgacagcgcaggcggaggcttgagtctggctctgctgacagtgattcgcgacatgggcttgcctgcgcccgccggtgcggtgctcatctcgccctggtgcgatctcacgcactcgttcccgtcgattctgcaaaacacggcgaccgacatcatcccaccatacggcttcattcacaagccctcgacgctctggcctatcaacgctacgaagccggagaacgaggacaagggaaagcaacgagagagctccgatgagccgcagagaaaagtgcccgtcggtgtccaagacgcagattcgcccaagagcgacgctgaggaggacacggagccggctgcgcgaaagagtcacgatgctggcaacttgcgtccatcgcaagcttcagcaaagccggatcagggacagacatcgggcagcagccgaaaggagaatggcggcgttccacatgctccagatctgctctggtcgcagccgatcaagatcaagaccgccgatgcggccaagcaggacatcgagttacgcgagcagatccagctgtacgcgaccaacgaccagctcacgcatccgctgtgctctgcagtcctcagcggctcgctcggcggccttcctccgctgtacatccttgctggcgatgccgaggtgcttcgagacgagattgtctacctcgcgcaccgcgcagcacatccgcagcgctacccgctgcgcgaggacctgctcgaccattcgcagcgcaaccgcgagaacgcggccaagtacgactcgcagcccaccaaagtgcatctgcagatttacgaccagatgtgccacgtgctcaccgcgtttgcgtttacgtcgcagtcgcgctttgcgtaccgtgcggtggcgtcgtttgtcaagcacgtcaccggcgcgcccaccagcatcaagaatcccttccccgaggtgcccgagggcgcgcatggacgggggatggacgacgagtggcacgaagacggcgccgagagtgacgatgatgagatcgacgacaacgtgggcggcgaggtggtctcacctccgctcgcatcgtcgttgaagagctcgcagccatcactaatggtgtctgagcgcgaaggagcgagcgtgggcgagttggcgaccataagccttgatgacggcgtcaagggcgcctcgcatctgcgatcagagccggatcacatctccccagctgaggcggggcaaggagagcttgttagcaaagctgtggagagcggaggacatgccgatgctgtaacggacaagacccgacaccgctccgtgtcgaaggtggtcagcgacgcgctgcacggccatccgagcgggagtcaggcgacgtcgcgcagcggctccggtttgtcacccaccgccacgcgggcccaacgcggcacgggcgatgtggccaacgaatacacggggcaggttccgcttctgcggccgtcgttccagtcattcatgatccgcgagcgcgtcgatgtgcgcggctacctgcgccagctcgaacccgagtccgatcttcctgcgctccagctgcgtcctgacgagatcggatgtatcaaagagggccccgttgcgcgttatctggacgggcagacgcagtgggcgaagcgatacaccaagaccgcacgcaaagtcgaaaagcaccgtgcgcgcaacgagaagctcgccacgacgatgctcgaagaagccgctgcacaggggctgatggaccgcgacgcgctgcgtaagcttcatggtcagctggttcgcaaagccagtagtggcgccaccgagcccggtgcagtgtcggcaccgtcttcgacttcgcgcgggctggggctgagtgccggcgacgttgcgacgggagccgaccggtgccgggaaaaatggagctggctggtcgattttggaccgatggatctggtcgacgaaacgccgccgcctgcagcagtggcaggaaggagggataccaacgatgcgctgttgctgctgcgcaagtcgctccagatccgcgcgcgcgcctacggcgtccagcgcaaatcacgcttctggggagcagaagaccgtcccgtccgtgcccacctgcgcgccaccaccgaggaacaccaacccggatcagccgctagcggagaccactcctccactcaccaccacagaggcctgcgcgtctggaacctgctcatggtcaaaaagccgccgtcggtcgcctcaagcaagaagccaggcaagccctagtccgcgtaggcgatcattgccgcgcagcgaaccgacacgtttcatgaaggaccaggcgcgaaaaggctgggacgtgattgagttgcagatgtgaataaagatagcgaaaggatatacatgtggttgaaggtgtc

SEQ ID NO: 12897 - DNA, 3320 bp, Oryza sativa
  ref <308>: DATABASE ACCESSION NUMBER: AK110245
  ref <309>: DATABASE ENTRY DATE: 2001-12-06
cactactacaagaaggccaaacgttcggtcaaaggtcgttcgagctcgcgcaacgatgcctcggaccctcacaaccgacaaaaggccaccgacgagttcatgtttgatgaggcgttcaacattgtcaaagccttcatcgagattggcaccagcgacacggtggaggccatccaggactttacggatgcacctgctcctccgatcccgtgggcgacgacgctgccggtgatgattccgatggagagctgcgatgaggctgctaagctgatcgtagagcatctcgggccgcaggatctagccaaattggtcggcggagaaaagtggtggcagatgaggcccctgccaggagtgcaaggggagtggattgccatgtcgaacgactggaagaaaatgcggactatggagagacgtacagaacaggatgaggtaggcgacggcaagaggaagaataagactgccacggtctcggccaagaagcaacggcgacgaagggacaagcgacacgaacgagcgctgtcagagatccgagccatgcgacagaagaccgaatcagccctcaagcgacgttcgcaatccttcaagaaatccccgcaggaagcgaagggccaagaaaccgctgcgacgcaaacggaccccgacaacgccgcaacccccgtagacgaaggacacgttccctcgccgaagtttgacgctgccgctgaagcgaccaccgatgacgagactcacaaccacgacgcagagaccgaagagctcgaccgcctccaacgtgtcatgctctacttccacggcggtggatactactttggctcgctcgccacccatcgctaccagattgtccgctacgcccgcaagttcggaggcaaatgcttcgctcccatctaccgcaaggcgccacagtatccttggccttgtgcgctgcaagatgccgtcgcttcttacctctatctgctctacccgccgaagggcgccaagcacaagccggtggatcctaagaagctcgtcattgcgggcgacagtgcgggaggcggcctgacgctggcgcttttgacggtgatcagagacatgggtctgccagcgccagcgggtgcagtgcttatctcaccgtggtgcgacatgacgcactcctttccgtcgatcttgcagaacaccgcaacggacattatcccgccgtacgggttcattcacaagccgtcgacgctgtggccgatcaacgctacgaagccggtgaaggaggagaacgaggaggcggcgaaagatgaggacgagcagcccaggaggagagtgcccgtgggcgtcgacgaagaaggcacgaccaaggacgattcggatgccgagccagcggctcgcaagaacacggacggcggcaacttgcattcgaccacggccgaagccacagccagcgccaagaccggcaacacgccaacaaccaagcgtaacggcgtaccgcgagcacccgacctcctctggtccgaccccatcaccgtcaaccgcgccgacccatccaaagaagccttcgagctgcgcgagcagatccaactctacgcgaccaacgaccaagtcacgcacccgctctgctccgccgtcctcagcggctccctcggcggcctccctccactctacatcctcgctggtgacgccgaagtgctccgcgacgagatcgtctacctcgcccaccgcgccgcccacccttctcgctacccgctgcgcaaggacctgctcgaccactccgcccgcaaccgcgagaacgccgagaagtacgattcgcagccgaccaaggtgcacctccagatctacgaccagatgtgccacgtgctgacggcgtttgcgtttacgtcgcagtcaaggttcgcgtataggggtgtagcgtcgttcgtcaagcatgttacgggcgcaccgacgaatataaagaatccgttcccggaggtggtcgagggggagacggcgccagagaagaatgaggggtgggaggatggggggaaggatgcggatagtgatgatgatgcggggagtgacaatttgggcggggaggtggtctcccctccaatggcttcgagcttgaggagctcgcagaagtcgacgatggatagtagcgggatgggtgggttgacgccttcgacgtcggccacggcggagaacagcctcgggggattgactgccctttcgatccacgatggtaacagcggcagccagtcgaattctgacgcgctgaataccactgagagcaacgctgaccaaccatccagcgctgaaatgcgggacgagccggagccgatgtctgctgtcgagcagtctcacgacagtcccactggcaccacaaacggcacctctgcagtcaacaccaccaaaccacgccaccgctccatgtccaaagtgctcagcgacacgctccacggccaccccaccggcaacggtcaaactggccccggcgcttcgactcgcccacgacgcgacaccaacgacgtcgccaacgagtacgctggccaagtgcccctcctccgcccctcgttccagtcattcatgatccgcgagcgcgtcgacgtacgaggctacctgcgcccgctcgaacctgagtcctccctccccgccctccagctctcccccgaggacatcggccggatcaaagagggaccggtcgaacgctatctcgacggtcaacagcaatgggcgaagcgcttcgccaaaactgcgcgccgagtcgaaaagcagcgtgccaagaacgagtcgacggcgcaaaagatgctcgaggaagccgcagcgcagggattgctcgatgttgaggggctggagcggaagcgcgggggcctgctcaggcgggctcaggcggaggggggtgagaaaccgctcgtcgccggcagcaattcaggccggctgggattgaacagcctcgacgtagccctcggcgcagacaagtgtctggaaaagtggggctggttatgcagcgtaggaccgatggacctggtcgacgagacgcctccccccgccgcgatcgcaggcagacgcgatacggacgatgccctggttctactgcgccggtcgctccagatcagagcacgggcatacgggattcagaggaagagcaggttctggggcgcagaggacaagccggtgcgcgcacacctcagagcagaggaggagactcccgagacagccaccgaccccaccagccccgccgatgccgaggctgagcaccgccaccgcggactgagggtgtggaatctgttgatggtcagaaggccggggaaggcgccgtccgcgtccaggcgcgagaagcacacttcgtagaccacgctcgccccagaatcaaagacacacttacgtcc

SEQ ID NO: 12898 - DNA, 2990 bp, Oryza sativa
  ref <308>: DATABASE ACCESSION NUMBER: AK110246
  ref <309>: DATABASE ENTRY DATE: 2001-12-06
atccctctctccacacgatcccatccccaccggccccactcaccgccatcatcaactgtctgtcatctcgaacaaacacagcagcagtccaatctctacgcagcgagaaccaggtctacgcttcagggaccgcacataatcggtgtacgaggcatctccgccccaccatgacccaagaggcgacggaccctgcgcaggccaaagcgcagccgcaagatgtggcactaccgcccagcaacacagaaagctcggcacctgatggcacaacgcgtccgcctgcgccgcctctcgagagacgcgcctcggcaacgcagcagccgcttcgccacggcagaaagcccatctacccggacagcgacgcagaggcagagggacttgatgccgacgtagatgatgaggagctcgagaccggaatgcttcccggtcatggcgaccacgagcgtagctcgctgctcagctcatccgcccgcaaatccaatgcaatcgcggctgctggtccgctcgatcgcgcctggctcaaggtgtccaagctgtggggcggcgacaaggcgcacgccgcacgcatcgcccgccgtcgcaagcagaggcgcagcgctgccgtctcggcttcgcagcgcaactcgagatccatccacacctcctctgccgcttcgtttgccgcctggaggcacgaacacccttatctcgtcggcaccgtctacgccatcttggcactgctcttcactctgatcgtgctcatcggcgtcgctgtggcgcacctctacctcggcacgctcaagacaccttcgcccgaagcgcagagccgcatcctggacgagtcgctcttgctcaagggtcccgaccgcgtgcagctgctcaacatctcggaccaaggcatcctcgtccgcgtcgatgcgcgtctcggcctcgaccccgaccatgcgctcgacctctggctcggagaacgcggcaagcagggctggtggaagaacaaggagcgaaagctcgtcgagtgggccatgggcaaggtcgccggcgtccaggtcgatgttggcgacgtgcgcctctccgagattggagccgcgtgggatcagtccgtgctgccccctgccgtcctcgcatcatcgcccgtgcaagatcctcaagacatgctcgccttccacctcgacccgctcgttctgcctctgcctccgctcaatcgcaaaatccagcacggcgacaccgaccaagactcgctgcgcccgccgatcctcggcaaccacagcacgcccgcagcacagcacaacatgagcccgctcaacctcaccgtgctgctcaagcccgtcgtgcctgcgccgtacatcatggcgtacgcgcagcacgccatcaacaagggcatcgcgcagctcgacgtcaagatcgccggcctgcgcgtgcgcggcctcgccaagtccgagatccacggcatcatccacggccacaaggcgggcttcttcgacgtgccccgccgcatcgacattgcgcagcaccacatccgcagccccgtgctcgaaaaggtgcccaagctcgacaacgacaccgacattgacgatctgctcaaggtcaacggatacgagttctttgagatcggcaaggacgacgagcccgaaccaagcggcggcggtgtcggctcgatgctcgtgcgtgcgctgggcatcaaggccaaggcgatggccaagaatccgctcggcaagatgctccagggcaacgtgcgctacagcttgccgttcggtatcttcctgcccgtcgatgccagcacacctgccaagcagcccaagaagcccaagcagcccaagggcggcaagctgggtgccgaggacgctgagggggaccagtccgagcccgatgcgtcggtgctgatggcagcggttgcgaccgagccgttccgactgagcggccagaagatcgtcgagctcgagctgctgggacgcgtggtgccgcctcctcaggatgcactcgagacccgtctgccgtccgagcagctcgcactcggcgcaggtgcgcagcctctgaagtctgcctatgcctcggctgacacgcagctcgacggcaaggcagcgggcgattcgccgcagcaactggcgctgagcaatttcctgagccgcttcctgcgcggcgaggccaacacggtgtacgtgcgcggcggatctcccttccacgtgcccgtgcctgcgggctcggcgagcggcaacgagaccgagacgatgcctggcgacggatcggagctgcccgagtggatggagtcggcgctgcggttggtggacgtgcccatctcgttccccggcagcaaggtgacggagctcatcaagaacgtcacgatcaacgacctcaagatcacgccgcatccgtttgagcacgacaagcttttgtgcagcggtacggtgatgggcgagatcagcatgccgggtcagatgagcagcatcgatgtgcagatcacgcatctgtggcctgacatactcgtgtctgacggcaagccgcctagcatgctgcagagtctcgaggcggcggtggcgagcagctggaccatggtgggtggggcgttggagagtctcaagcggcttgcgtttgtcggggtggaggagcacgatgaggagcccaagccggagccggagccggcaccgcctctaccggatcctctgcccgaaagggcgtttggacgcgtgaggccgtacgactttgcacctgccgagacgtatgtcgatcctaccgaccccaagggcgagcgaaagctgctccgtgccaggctcaccgacgtgcccttcacggtgctgcctgggcgtggaggcatcttccgctcctttacatggaagctcgtcacgggccagggtgcgttggtgggcatcgatgggtccagccgtgccaagatctggaactcgggcctcggcgctctccagctgcgcaatctgcccgtcaagggcgtctttatgcttggaaagcgcgactagaaggcgggtcgtttcgcttgctcattggaatccttctcgctttgtctt

SEQ ID NO: 12899 - DNA, 2977 bp, Oryza sativa
  ref <308>: DATABASE ACCESSION NUMBER: AK110247
  ref <309>: DATABASE ENTRY DATE: 2001-12-06
tggcctggatcgataccgcaaggagcaacaacacgacgactgcaaagcaggaccatccaccggcaaaccgccgtagcaagctgtgagcgtttcgcctggtcggacgaatgccaagaactgcgaatgcgaaggaagatggctagctccggttgccaccatgctcccctttctgcagccttcggcatcgctggcccgtgctgcgccacaactcgcgcgccagctgccgtcgaccatcagaaacaggcacggcgcgcattgtctacgacgcaagtcgaccgtagctgggcgtgccacgcgagccggctctgaacaagaagcccttgaagaaagcgacgatccttaccaatctcacagccgagaaggcaggaagacacgcttctcgcactttttcgacaggcgcattcccgtcacgccctcaagacaagaacctcgcttcggtgaaagcaagacttcctacgacatcaccgccgcctctcgacaggccatcaccgccctgcggcgagccgtcagcttcggctcatcgatcgagatcatctatgcgtacgacaaccttgtgcgcgcccaccacagacacgtccaagatgtcaccagctcctcatccaagttcctcgctccttctgaggtcgggttcccgatgcacaaagacgacatacagaatgcaatccagacactcttgctcaacgctcagaagcaagggcccatcccgcctcaaatcgccgaagcgtgtcagcgcatgtttcaagacctcagccggctctttggcttcaagatcgccgcaaacgacctgcatcgccagctctactgcatatccagaagcaccgacgtggaccaagtagcagcgtttcgggagctgcgcgagagctaccccaattggcgggttgcgccattacgatggggaatgatcatctcaccgctcgcacggcgcgggcgctatgatcaggcgatcgatgtctggcaggagatgatggaatcaggcgtgcagcccgatatgcgccttcgcgaactaatggtcaatctctgcctggagagtcaagacactccagcgcgagcacgactggaaggccttgcgcagggtgcggacgacacagcattccacacgtgcatcatcgtcgtggaagggctgtgccacttcgccgctcgggtcctagaggtcgacgaggagcttctgctccgactgcggacgcatgcctctcatctacgaggtctgctcgaatcacgcgcgccggacgaagcgcgcacagccgctcgggacgcgcttctgcgctttgaggcggtggacgccggtctcacgccggcgcccgagacagcttcacgagcacacgagcccgagtcacctgaccagcgggcgatcgaggaattgctgcttggcctccacggtgacgagctgaacagcgtgcagagcagcgacgaggcggtcgagctgctggatcggatcctagcagccaccgatccaggccggaccatccatccagacgaccagtgctaccacctcctcatgcttggtcttctcagcacgagtggaaccgacatcaacgcgtccgccgtggaagacgctgagaacggctcgactcagtctcgcgcgctgccgaccccgaaccaggtgcgagaagcacagctgctctacgaccacgcgcgggcgattggggtgtcgcccaccccgcagctcgtggtgccgctgctgagggcatactgcgaagcattcatcccgtccatctcggcggcgatcaagctcgtgcaagacatgctcgatcaccgtgccgagcgcaagacgacggatgcggcgcccagtcgaagctcggacagagtgggtatggacgtcatcggccccgttctagacgcatgtgtgcgaaccagagatgtcgccgcggcacgcgggctgctatcgcggctgcaatcggcgcgcatcgccatcgacgtcgatgacaaggcgctgctcattcgtccgctcatcagcatggcgtcgtcgtggtccgaagcattcgggatctatcgggctctgttgcgcttgcctatctcgtctacaggcgaaagcaggggcctggacaagaggggctacactgagctgcggcggtcactgttcgagctgcgcttcacggaagaccaggggagaggcgagcgggtgatgctggccgctccacccgaggatctgctcggaacgctgcaggatatgcgtgccgacgggcatccgccgacgtgtgcggtgtatacggcggtactggactactactccaagacgcagcctgcgtcggcggcgggcgtggcggcgacgcacgctatgctcaagtgggacgaagagctcgagccggacctgccgctggtgaatgcgctcatgaacgcgtacaatcgcatcgacgagccgaccatcgtgctcgccatctgggagagcctcttggcgacgcggcaggagttcgacagcgtgacgctgtcggtgttcttcgacacggccgggcgacatggattgctgacgctggcgcgcaaggtggtgagcacggtgcatcgtgcagaagaagaggccaaggagaggggtacgaagcggcgcacgcccatgaccaagggcgcgtgggatgcgtggcttgaatgcctggcgcgctgcgggaggctggaagaggccatcgaggtggcgtttggtgaaatgcgcaccacactgctgcgtcaagccatcgagtcgcacgatctggacgatgatggcaatgcggctggtacggtggccgaagtcatggtgcggtccatgcaggcgcctgtgcgcgatcgcaacgggcacatagtggggccggatgcaaagactttcggcactctgctcaagtttgccgcgcgcaagcgagatcgtcgccaaagacgccagacgggtcgcgagtctccgatctggcacaagctgcgcgcccgcctgcgtgaggaactcagctggctctatccccacgtcaagcggatcggcgaatcaaccaaggcttagcacgcaataaaggcattgtcattgcgc

SEQ ID NO: 12900 - DNA, 2962 bp, Oryza sativa
  ref <308>: DATABASE ACCESSION NUMBER: AK110248
  ref <309>: DATABASE ENTRY DATE: 2001-12-06
gacgctcatcacattctcacgacatgctcagtcgcctgctgctacaggtgtgacggccactgctgctctgccacttgtcttgatcactctcacgacccgcttgactgactacgacacggtgatgacgtgtcgacatccgagcgcttcctcgagtcgggtcgccatccacgctggcggctgacaccataccacggccatgcccacctccaagcgcaagcgcggccactctgacaatgctgctcggccccgagacgacaggtcggtagatgcacatgctggtatcgatctcgacgacgctgaaaagcttccatcccgcctcgattctctatccctcccacgctcgggactgtccttcgtcgccgacgaaaagtggggccgcgtcccttttggcgcatcctcgcgatcgataggccaggtcgtagcgcaccgtcgctcggcccttcagcataacatcgagagggagcaatttcgcatccgccgctctcttgggggccacacctcttgcgtaaacgctctcgccatctcgcgaggtcagggtcgctggcttgccagtggaggcgacgactgcgacatacacgttcgcgacctctttctcaacatcgatagcaatgacgaccctgttacgcccattgtcagcctgcacggtcatcagtccaacatcttttccatctcgtgggcagcgcaaaacaagtacctcttctccaccggcaacgacagccagatcctctattacgacgtcgagcattccactatgcctctgcgttcatgtatcgagaaagggcccgaagcacgcagtcccctcaatcacggctcaatcggtggccacgacgattcggtgcccgagatctcggctcaccccaccaatcccaacctgctgctcagctgcgacgacgccggcaatctcaacctcatcgacatccgccttcctcacgagcgtgtctctgccactcgatccgacgccattgccggcttctcgtccgtgcagtggaatcccaacgaatcggatggcaacacctttgctgccgccacgtgcggtcgcatcaccggcagcacgcgtctttacgacgtgcgccagtgcttttcttccgacccagaccggccactctccagcaaagatgccgtgctcaactaccacacttcgctcatgcagaactcgtgctcacggggcctcatcgccgctgcagccgagaccaacagcatctgcttcgacccctcgggtcgcttcctcgcctcgagcgtctctcgctaccatcccaccatctatgccatcaacgatccggatcctctcgccacgcttgagtcgtccatcgtagaggaccatgtccccctgcacagtttcagatatgctggcgtggctccgggcactcccgccgcacccaagaagctctcctcgtgctgcaccatcaagcacggctcgtttggtctcgaacagcagacggacgatctgcattatgccatcggaagcgacgactttcgagcctacatcttccgcatcccgcctgtcgaggatctcaagctgcgccgcgagttcgtcagccgcaaggattggcttcgcgagacctcgcagctgcacaaacagcgtgcaccggcactcaagcctcagggcctcgaatccgaaaccaaagcgtccccacagagaccaggcagtgagtctgaggccgttgggtccgacgagagcgatagcgactcggacattgccggcgagggcgaggtggaccacgactcggaagtagcctactgcagcggctcgattcttcgcgcggacaggatcgtgcgccccgccaaactagatcgcttctcttacgtgctcggcggcggacagagcatcgtcaacacggcgctcatccatccgacgctgccctacatctttaccgcaggcatcacatccgacatcactgtgcattccgccgcaccgctgcataggcgcaatttgggtcctaaagcgaggtacctcgccacgaagaccaacggcggtggcacgcgtccgcggttcctactgccgccatcaggtctgtcgctcctcggtctggatagcgacgatgagtcggatgccggaatcttgtcgtccggaggagaaggcgagcaacaagacgacgaaggtgaccaggatgatgaccaggatgatgaccaggatgaccatgatgacgaggacgacgaagatgacctggatgacggactggatgacgaccaggatgacgacctggatgacgattggggtgacgacggcgacgagggggatagcagcggcgtcagatccgtcgcgagaagcggcttcgatgaagctgaccgcacagggcgaagcgcgagccatgcggatgggaccgaagccggcgtgcaatccgacgacgcgacggtgcacgattttctagctgcgatgcgcactgatccgatgtacgcttctgccgccccggccgaactcgacttccatcacgaccggcacattagcacgtatgcactatcgcatcttccttcgtctctcgttccgcctgccgatgcagagtctttgtctttttcgtcgtcgtcgcacgcctacgaggacggggggaggaccagcgacgatggtgatggcggtgtgagcgacgacgacgacagtagcggtgcgagcagcgacgatgacgatggtgatggcagtcgccctgtgttccgccgacggcatagccgcaactcgagcgacgatggccagctgtcggcgatgatgcgtgcgatttcgccgggaccgcaatgggtgtggcggcaactgcatgcgtctgatcggcgcgagccctcgcgactgcggctgtttgaccagctgctgcggcgcgacgagatgcgtccactcacggcctcgttcagggtggtgccgacatcgcagccgacagcgcctacgtgtgcgtcgtgtcatcgccccgtccggcctccggacgaagggtaaaaaaaaaaagaatgaaaaaaggtcacgaaaaatgaaccacaaatttggctc

SEQ ID NO: 12901 - DNA, 3009 bp, Oryza sativa
  ref <308>: DATABASE ACCESSION NUMBER: AK110249
  ref <309>: DATABASE ENTRY DATE: 2001-12-06
acacatccaccatcaaggtctgattcaagctgcccaggatgtcggtctcgactcagtcaggaacagaatcgcgaggctcctcgtctggttcgccttcttcgagcgcctcttcgtcggtcacaactcctgaaccttccagtcctacactttcggctgcgaaagcaatctctcaagatgcagcagcgtcacccgatccgttcttgccaaggccttactacgacgacaagctccttccagcaatcccctcgtcggaaacggtgcagccgttggccaccgactccaacacaccggacaactggattgcgcgcgacgagcgtatgatccgcctcactggcaagcatccatgcaacaccgaggcgccgcttgccgatctcttctccaagggattcctcactccgcaaaacctcttttacgtccgctcgcacggcgacacgcccagggtgacgcaagagcaggcagagcagtggaagctcaaggtgcacggcctcgtgcaccgcgagatcgagttcagcatccaagagctcaaagaaaagttcccgacatacactctgccaatcacgcttgtctgcgcaggcaacagacgcaaagagcagaacatggtcgcaaaaggacttggcttcaactggggtgctgcgggtgtctctaccagtctcttcacgggcgtgtacctcgccgacattctcgaatactgcaaaccaaagagcccgcttctgtcgtcgttcccggcctacgatgtcgtcgttcccggacgcgcaaggcacgtggtgtttgaaggcgccgacgtgctgcccaagggcaagtacggcacttctcagcgcctcaactgggctctcgatcgtagcaaaggtatgatgatcgcctggggtctgaacggtgaagacctttctccagaccatggctatccattgcgcctcgtcgtgcctggacagatcggcggcaggatggtcaagtggctcgaccgtatcgaggtgtcggatcgcgagagccagcatcatctgcacttccacgacaacaaggtgcttccaaccgaggtcacggcagaccaggctaggagcgaaatgcactggtggtacgaccccaagtacatcatcaacgacctcaacgtcaacgctgctatctgctcgcccgatcacaatcaggtcatcgactttgtcggttcaagctcatctcagccacagatacttcccatccagggctacgcatacactggtggtggaagacgcatcgctcgagtcgagatctcgctcgacgacggcaacacctggaagtgtgccagcatccactgcccggaggacctctaccgcatgtaccccatccaagatcacccctactttggcactctggatctcagctcgagcgagatgagctttgcctggtgcttctggcggcttgacatcgatgtccaagcggatctgatcgccaaagaggtcaaggtcatctcggtgcgagccatggacgagggtctggcgaccatgccgagggacatgtactggaatgcgacgtcgatgatgaactcctggtggttccgtgtcgccgtccatcgcgagggacccgacggcagcaagattcgcttcgagcatccaacgctggctggaaacgcgccgggcggatggatgcaaaggatgaacgaggccggtgccaatccgcgctatcctgacttcggcggtgcgagcagctccacctcccaaagctctctgcctgccgccgagactcagtctgccgaaaaggaggcgaaagaggacgacagagccgtcatgctcaatccggccaaagctgacgttgtcgtctctgctacggatctcgcagctcatagcgatggagaggggcctgaaccgtggttcgtcgtacatggccacgtctatgatgggacgggattcctgaaagaccatcctggtggcgatcagtccatccgccttgtggcaggtgaagatgctaccgaggactttatggcgatccactcgatggatgccaagaagatgctcagagactaccacgtgggccgtctgcaagaagtcgactcatcggctgctgctacaacgccccatagcgagccagatgtgatcgacacgagcaaaccgttcttggatccgaagaagtggcgtgccacgcgcctggtgagcaagcagatcatctctccagacgcacgcatcttccgtttcgcccttgctggatccgatcaggagctgggtctacccgtggggcagcacgtctttgtgcgtgttaggcgcaaggatcccaagacgggcgagatcgagacggttcagcgagcgtatactccgtacagtggcaacacccagcgcggcttcctggacatcctgatcaaggtgtacttcccttcgcttcctgcgcaagccggaggggagggtggcaatgtatcttttgaaggcggaaagatgacgatgcttctcgagaacatcgaccttgcatcgcaggccgatgcaaacctgtccatcgagctcaagggtcctcttggctcgttcacctatctgggtgaccgacagatcaagtggcggccgactaatgcgatccgtcgcgtgcgcaagctcgccatgatcgcgggcggcagtggcatcacgccgatctggtcgacgctcaaagccatcgctgacgaggttctggcaggaggcccggccgcgtcggatcccatccagatgtggatcgtctacggcaacaggacagagcaagacattctcatccgcgaagagctcgagcgccttcgcacagcactgcagggcaatctctatgtctggcatgttctcagcagctgcgcttccgactccacgtgggccatgggtcgcggccacgtcaatctcgactgcctccgacagcacttgccgccaccgccgcccgtgcccagctcgccagaggagctcgaggacacgctggcactggtgtgcggtccgccgccgatggagaaggctgtctcggcaggcctcaagcagctcggatgggacctggaccgcaccgtcgttttcttctgactgcaatcatttcatgctgatggccaag

SEQ ID NO: 12902 - DNA, 3383 bp, Oryza sativa
  ref <308>: DATABASE ACCESSION NUMBER: AK110250
  ref <309>: DATABASE ENTRY DATE: 2001-12-06
acctgcccggccatccccttccccctcccccctctctcctttcccaagcgatcgccaattcacactcttcaccgacctttcattacgcagcgactggctcgctgtgcttactgttggtctctgcgacgaacgatcggcctcgagtagtctcaccatgccgcctcgtcgctcttcccggcagtcggctgcggccgcaaccgagaatgtgatcgtcatttcttctgacgatgatgatgtcgccggccctggggcagccacgccagccagcgtcagaatgactcgaagtcgcaccgccagctcggtggccacccctaccactgcgcgttcttcgcgcaccagctccacctacgcctctggcagccacacccctgccacctctgtagaagatggtggcgacaaccaagacgacagcaagtttgacctcggtgcagatgcgctgcagcctggccgtcgcacggcggcacccctcactaccagagcctcccgatcggcttccctcaagacgcccctcaaagacgaggtcaaagcggaagcttctccgcccgccactagcgactctcgcaagcgcaagcgcgctgtgactgctgtgaagggcgagtccacgtcaactgcgctcacagacgagactgaagcggaccagcccgcccgccgaaaggggcgaagctccactgcctcgaatgttgccatgaaggccaaagatgccggtggcttcctggacgatgaccccgaaggcctggacgccttcttagagcaggagttcagtcaactttcgtcctctagtcgcaaggtcaagacgcccgccaagggcaagggtcgcgcccaacctcaagccaagaaggaagaggagagcgacgatgctttcgacgagatccatctcacaccacggtcgcgccgcattccccgtcgaagcgcctcgtctggtaagaaggagctcaaaccctacattgacgaatcggacgacgagatcgacggtctcaaggacgaagacaacgtcagcgcgggcggcgacgattacgaggacagcctctcgctcctggaggagatgagcagcgacgacgagcccctgttcagcaggatgcgctccgaacgctcgaaggcaagtggcagtgccgcccaggctggcccaagcaccttcgctacgctcgacgacatcaagttcgactcggacgaaaccgaagacgacgacgactttcacccgcgcggcaacaacttctatgcagaggacacgcagtacgagaccgaaaagcagcgcaaggcacgcattcgcagcgaacgtcaccaggctcgcctcaagaaggtggacaatcgcacgcagtacgacaagaacgcccaagcgctccacaagcaccacccgcagctcaagaacgtgtgggagaatctgcagaagacggtggcagtcatcaagcccgaagaggccgagcagccggctggcctcaacatcaagctgctcccgttccagcgcgagggcctgtcctggatgacgcgccaagagcagggcacttggaagggcggcatgcttgccgacgagatgggcatgggcaagacgatccagatgatcagccttatgctgtcggaccgcaagaagccgtgccttgtcgtggcgccgaccgtggccattatgcagtggcggaacgagatcgagcaatacaccgagcccaagctcaaggtgctcctgtggcacggacccaaccgcacgcagaacctcaaggagctcaaggccgtcgacgtggtgctgacgagttacgcggtgctggagagcagcttccgcaagcaggagtcgggcttccggcgcaagaacgagatcctcaaggaaaagtcggcgctgcatgcggtgcactggcgacgcatcatcctcgacgaggcgcacaacatcaaggagcgctccaccaacaccgccaagggcgccttcgccctgcagggcgacttccggtggtgcctgagtggcacgccgctgcagaaccgtgtcggcgagctctactcgatgatccgcttcctcggcggcgatcctttcgcatactacttttgcaaaaagtgcccttgcaagtcgctgcactggtcgttcagcgacaagcgcaactgcgactcgtgcggccacacgccgatgcaccacacgtgctactggaacaacgagattctcaagccgatccagcgcagcggtgcgcagcacggcgaaggccgggacgcgttccggcgtctgcgcatcctgctggagcgcatgatgctgaggcgaaccaagctggagcgtgcagatgacatgggcctgccaccgcgcacgatcgaggtgcgacgcgacctgttcaacgaagaggaggaggatctgtacacgtcgctgtacacggatacgacgcggaagttcagcacgtatctggaccagggcacggtgctcaacaactactcgaacatcttcacgctgctgacgcgcatgcgacagctggcgaaccatccagatctggttctgcgttccaagacgggaatggcgtcgaagctgctgggcgatgctcagtccgagattcacgtgtgccgtctgtgcacggacgaggcggaggacgcgatcatgtcgcgatgcaagcacatcttctgccgcgagtgcgtgcggcagtatctggacgccgacattgagccgggcgcggtgccggactgtccgtactgccatgcgaccttgtcgatcgacctggagtcggaggcgcttgagccgccggagagcacgatccggatgaacgactcgggtcgccagggcatcctggcgcgtctggacatggacaagtggcgctcgagcaccaagatcgaggcgctggtggaggagctgacgcagctgcggagcgaggacaagacgatcaaatcgctcgtcttctcgcagtttgtcaactttctcgacctgatcgcgttccggctgcagcgggcgggcttccagatctgccgtctggagggcaacatgtcgcccgaggcgcgcaaccggacgatcaagcactttatggagaatccgaacgtgacggtgttcctggtgtcgctcaaggcgggtggcgttgcgctcaacctgaccgaggcgtcgcgagtgtacctgatggatccgtggtggaatccgtcggtggaggtgcaggcgatggaccgcatccaccgtctgggacggcatcgaccaatcattgtgaagcgcatggtgatcgagaacagtatcgagtcgcgcatcatcgagctgcagaacaagaagagcgcgatgatcgaggcggccatcggcaaggacgacggtgcggtgggcaggctgagcgtgtcggacctgcgcttcctgtttacgctctgagcgcgcgggcgaccgaccatcacacacaagggcaattgtggttacgcatggcttttcttaatcgttgtaaatcaaggttttggtcccg

SEQ ID NO: 12903 - DNA, 3493 bp, Oryza sativa
  ref <308>: DATABASE ACCESSION NUMBER: AK110251
  ref <309>: DATABASE ENTRY DATE: 2001-12-06
cagcagtgaaaaacaagttccaaactcttgaaggaattaaaaacattgaggtggaccttaataatcaagttgttagggttcttggatctctcccagtgaacacaatgctggatactctgcaccaaacaggccgagatgctcgtctaattgggcaagggaacccaaatgattttttagtatctgctgctgtagctgagttcaaagggcctgttatatttggtgttgttcgtctggctcaagttaatatggaattggctatagttgaagccacttttagtggtctatcacctggtaaacacggatggtcaataaatgaatttggggatttgacaagaggtgcagaaagtactggcaaagtctataacccatcggattatagatccaataagcctcttggtgacctgggaacactagaagctggagagaagggtgaagcccaattttcagcttcaaaagagaaactgaaagttgttgacttgattggccgctctattgcgttgtatgccactgaggacagatcagatcctggcattgcagctgccgtgattgcaagaagcgctggggttggcgagaactacaagaagctgtgcacctgtgatggtgtcaccatttgggagtcaagctaatttgtgttactagtgaggtttccattctactgtttgctccaatgtgttgtacacgaagtaatgtagaaacaatcaaccaactactgaacaattggaataagcatggatacagtgaggaataaagcttgttttggagtgcagcttttcttcactaagtgaactgtgctgtgctgctgatacgcgacctatatcagacttgctatatctgaagccaggacacagatgtttctgcttcatgatttgtctaatgcaacaacaccaaaggggctcactgtggtggcagccatgttaggacgacagggctcctgacaatgtggacgccgtcgctccaggacagggctccgaactccggtgccttctgggcggccttggttgtcactgtaaccttatagctaagcttctggtttgtgcttacgaagtgcagggtgttcggttcgacgatgacatcggcgcccttgaacttggtgaccttgacatggtacgtcgaagatggaggaccaacgttcgtgacagtgcggcgcaccgtcagcgccttggatggctggtcggcgaagacgactgagatggccggatagttgaggtcgctggcggaactgaaggtgtgcctgcatgtcatgttggagttcttggtgaaggtcctgagctgcatcggcgtcatgtgctgcgtgcagaggaactccaggtagtcggcctggccaatgtcgtagaccaggccaggggtgagagctcgcaccgggtgtatgtgccccgctccgtgctcgaacggcgtcgacgccttgccggtcgccgcgtccttcatcggccggtacgtgttgtcgtgcacgtacgcggtggtcatcagcgcggacttgatctgtgctgggctccagtccgggtggctcgccttgatcagcgcggccacgccggcgacgtgcgggcacgacatggacgtccccgacaggatgttgaacccgacgcgacggctgtcgctggacaagctcgacgggctggcgtcgccgctccatgcggccaagatgttcacgccgggcgcgacgacgtccggcttgaggatctccagagtcaggatgtttggtccccgggacgagaacgcggcgaccaccggcgacggccggatgccgagtttggttccgccgaagctgagcgtcgcggtcggttttggggcgctcttgctgtagctcttggcggcaatgccttccgcctcgccgactgccacggccggcagcaggtggctgtcggcgaccagctcctcgccgtttgccgcggtgttggcaagtatcatgccgatgccgccggcttccttgacaacctgacccttctgcacccgaggactgatgccgcggtcacagatcactatcttcccggagacgtcgtgcggctgcagcgtcccctcgaggcacagagaacgggggtccggcatgctggaattgccgcccaagtagaccaccggatactgctcctgcggcgacagatttcgcaggcctttgtaaagcgagacgccggtgatgttcgcgccgttgccgagcgtcaccgtggccgggaagtcacggtccatggtgctcgcgcccaccgtggttatccacggcgacaggttggtgaggcttatcgggtcaggcccggcgttgccggccgagcaggcgacgaacacgcccatctgcatggccccgaacgacgctatggacaagctgtcgaggtagtaccgggaggcgccacccccgagggagatggagagcacgtcgacgccgtccgacacggcgcgatcgacggccgccaggatgtcggagctgaagcaccctcccgcccagcacaccttgtaggccgcgacgcgggcgcggggcgccatgccacgggcgacgccgccggcgtagccgtacaggttggcgtcctgcacgggcgagcccgcggcggtggcggcggtgtgcgtgccgtgcccgtcctggtcgcgcggggacttgagctcggtcgtctcgttgatgggccccgacgaggcctcgtagccgttgtagaagatgcgcgccccgacgatcttgcggttgcagttcgccgtggtgaagccgcggccggtctggcagaggcctttccacttggccggcacggggccgaggcccttgtcgctgaagctggggctctccggccatatgccggtgtcgagcacgccgacgacgacgtcgtggtcggcgaggctgtcggaccatatcctgttgctgacctccgggccaatgccgaggaagtccgggctcctggtggtgtgcagctgcaacaccgtctccgggatcacggccagcacgccgtccgcctcggccatcagctcggcttcctcctcgtcgagctgagccgcgaagccatggaatgccgtctcgtagttgtagataatcctcgtggaagcatcatcctcttcatcttccagctgcgaagagctcaccgacttcaccgtggaagcgtaccactcatggtaaaaatcgaacgagctcggcatctcagacgccgccatctgcacgatgtaagtcttgggagttggcgcgcaagcagagaggcttgcttggagaagaacagtcaccaggcacagcgccggaaccttccatctcgccttgcaaaaacccatggagaagagaaagggagaataatttgatagatagatgcaaaggagcttttgggagcaaagcttggatttgggggcagatcaagctctgctgcttatgtacactccactctccagcttaacatgcttccagtgagctgcgtggagtgtggactgtggtctctgctcgtggagtggaaactggaaagcgagaagtgtaataaaatgaggtggttgcttctgtcccgcattgaagtgagaattcattttggcgacgcggtgggttttgctt

SEQ ID NO: 12904 - DNA, 2814 bp, Oryza sativa
  ref <308>: DATABASE ACCESSION NUMBER: AK110252
  ref <309>: DATABASE ENTRY DATE: 2001-12-06
agctgcacgcacgcacccaacaagctctttcttggctacctcaacctcggcgcgcccatctgcgcatcgctctccaaaaagcgccgccaagaccatcaccctcggagcgaacatcgtgccctcgtacgcgcacagccagcaatcggcatcctagcaccacccctcgccagcgcacctcccacaaccttatctctatcctatcttcccaccgcgctgcaccccctgcaagcttccacactcgaggctacatttgcacccctccttgggcacatggtccttgaccactcgctcccccactacacatcctcaccaccgccagttgcgcaacgatgagctacagtccccacttggcttacgactcgcgcaacggcgaggctagctccggcctgccagcgtcccaatccatccgcaacacactttcgggcgccatcagctccaccaaagcgtacctccagccctttgcacccggctcgccctacctcggctccaatggcaccaacgcacacaccgagccaggccggctgctctcggacgtggcgccccagctcatgaccacgcgcatcatggccgccgtcgccaactccaacaccgcgctcggactcaccccagacggccagcgacgcgcgcgactgctcctcacgcccggcttctccatctcaagcccggcgcgctcgctcgtgcgcatcggcggctcgctcatccagtccggcatcggccgcgggcccatgaatggcatcacctcgcacgagctctttgtgctcgaggagagcgatcgcatcctcgccaccgcagcccaagacctcgcactcacagacacctcgtcaaactcgagggccgcaatccaagacgcaaagtcgcgctccgaaccgcccgtctcgctgctccgcggcttccaggcaacgatacccagctccaccgaagggcggcagcgacgcagacgcgtgcgcgccatcgcaagcggctatgaggacggacccgagggccccaccaagctcgggctcaaggcgatgggcgacaaggcgcgcgggctcatggtggagggcgtcgagacggagccagtgtctgcgttccaggcgcgcgagcagcgccacgcgcggcgcaaccacgccagccgcatcctgtcgcgcggcaaggacggcgcgcgcgcgtcgatgatccagctcgaggagctcgagcgccagctgcgcgagatcgagcgcgagcaggacgacgtgggcgtcaagcgtgcgctcatcgacgccgaggtgagcgccgtggacgccaagatccaggtgctcgagaagatcaaggcgggcctgcacaccaagctgctcggcctgcgcgaggaggagctcgagctggccgacgagcacgagggcgtgggcgagctgcttgcggtgcagaagcatctgcgtgccatgccgggtgggccggcggcggcagccaatgcggctgcatcgggcgccactacgagtcagggcagcagccgtcgtcgaaagggcccgctgttcatgccgtcggagcacgacgagttgccgtcgggtgtggcgtttatgacgctcgccgaccattcggcgccgatcacgtcgctcgactttaccgagccgtacggcacgctcgtgtcggcgtcgctcgacgagacggtgcgcgtgtgggatctggcgtcgggcgacgaggtcgggcggctgcgcggacactcgggcaccgtcaagtgcctgcaggtggaggacgaggtgtgcatcaccggcggcaccgaccacgccatccgcatctgggacctcaccaaggtggagaacttcgaggcgcggttgagtatgacggcgtccggcgagctgcgtgcgcgcaagcggtctccggatctcaaccgcagcccggagttgggcgatcagagcatggacagcatcaagatccgcgatggcgatacgacggtgggcgaggaggacgaggaggaggtgagggacgggtttgatccgtgcgtaaagagcctcgagggtcacagcaagtcggtgacggcgctgtactttgacgacaactgcctcgtgacgggcgcgtcggataagacgctgcgccagtgggatctcaacacgggccagtgcgtgctcaccatggacatcctctgggccatctccaacccgacctcgtcgcaggcgatttcgcagtccgagtttgggttccccgagtcgccgtcgcgcaaggcatcctcttcagccatccttggctccacacgacccgagttgaactcgcgcgattcgttcagcgtgctcaacaacgtctcgggagcctttgcgtaccctacgccgccgtatgccgatggcagttgggagatgtaccaagactttgttggaggggttcagttctggggctatgcgctggcgagtggatcgggcgatggcggcgtaagaatgtgggacatgcgcaccggtcaagcacacaggacgctgttgggtcatacggcgccggtgacgtgtctgcagttcgatgagcaccacgtcatttcgggcagtctggacaagtcgatccgcatctgggacctcaggatgggcagcatttcggacacgattcgatacgaccatcccgtgacggcgctccagtttgattcgcgcaagatccttgccgcgacgggcgagaacggcgtcaagatctttaaccgcactacgcttcagcacggcgcgctcacgctcaacggccacacctcgcccgtcgagaggctgcgctacatggacacctacgccgtctcgggcggcaaggacagtgtcgtcaaggtgtgggcgctctagatgtccgccacgatgcacgccatcgttttcagacgcaaatgtgaggtggtgcaagttg

SEQ ID NO: 12905 - DNA, 2771 bp, Oryza sativa
  ref <308>: DATABASE ACCESSION NUMBER: AK110253
  ref <309>: DATABASE ENTRY DATE: 2001-12-06
atccattgttcaattgccgccgagttgacacaattaacaccaagcaatggtcattagcgctgacacaatgacatactcctaattagtactgcaattttgggtccttgggttgttagaattcataactaactgagatgcgagatttcaccttagtttacagcagctgcagctattagcttcggtggtgcaggattgatgccagccatggcggacaatcctccattgatcatgctcctcgcgttcttgttctctgctcttcttcttctttctccggctcatggtggcagccgccttcaaagaggtcaatcgctctccgtggaacgcgcctccgacatcctcgtgtcctccaatggcgtcttcgcgttcggcttctacaacctctcctccaccgtcttcaccgtctccatctggttcgccgcctccgccggccggaccgtcgcctggacggccaaccgcgaccggccggtgcacggcgcggggtcgaagctcacgctgcggcgagacggccgcctcgtgctcgccgactacgacggcacgccggtgtggcagaccaactcgagctccggcgccgccgccgccgcggagctgacggactccggcaacctcgtcgtgacaagccatggcggggacgtgttgtggcagagcttcgactacccgaccgacacgctgctgccggggcagccggtgacggcgacggcgaggctgtccacgacggacgtgctccacccgacgagccactacgcgctccggttcgacgaccgctacctcctctcgctggcgtacgacggcccggacatctccaacatctactggccggaccccgacgccagcagctgggccaacggcaggatctcctacaacgccagccgccggggcgtgctcgacgacgccggcaggttcctcgccagcgacaacaccacgttcgtcgcgtccgacacgggcgccgccgccggcggcgtcacgtggcggcggctgacgctggaccacgacggcaacctccggctgtacagcctgcgcgacgccgacggggggtggtcggtttcttggatggccttctcccagccgtgcggcatccatggcctctgcggctggaacggcctctgcgtgtacacgccgcggccggcatgctcgtgccctccaggctacgttcccgccgacgccggcgaccgcggcaagggctgccggccgacgttcaacctcacctgcggcggcggcggtggccggccggagatgggcttcgcgcggctgccgcaaacagacttctggggctccgacctcaacctcttctcctccatctccgtcgacggatgcaaggcggcgcgcctcgagctctgcaactgcgtggcgttcgagtacaaggatgacgtcagcgactgctacctcaagtcggcgctcttcaacggcaagacctaccccggctaccccggcacggtgtacctcaagcttccggcgaacttggtggcggagtcagacacctacaccgccgccccggccgccgccgccgccgttaatctcgcctgcgacgccgcgcgaacagaggaggttctcctctccttctcggccgcctccccggacacgtcgtcgtggcgctactactacgggttcctctcggcgttcttcgccgtggagctctgcttcatcgccttcgggtggtggttcacggcgaggagccggccggcgacgtcggagcaatgggcggcggaggaagggtacagggtggtcaccgaccatttccggcggttcacctacggcgagctcaggaaggcaaccaagaacttcaaggacgtgatcggtcatggccggtacggctccgtgtacaggggcgtcctcgccggcgccggcgacgaccgcgccgtggccgtcaagaagctcaaggccgcgacgccgcagcgtggggacgacgagttcgagaccgaggtgagcgtcatcggccggatcaaccacatgaacctggtgagaatccgcggcgtctgctcggagcgccaccgccggcggcggctgcttgtgtacgagtacgtggacaacgggtcgctcgccacgtggctgtttggcgccaaggagactctcaattggaaccaaaggtacaacattgccgttggtgtggccaaaggtttggcctatctccaccatgagtgcctcgactggatcatccactgcgacgttaagccagagaacatacttctcgacgaggatttcgagcccaagatcagcgatttcgggctcgcgaagatgcaacagaggagggatctcgatgatcccgcctcgtttagcatcagagggaccagagggtacatggctccggaatgggtttcgagtcttccgataaccgaaaaggttgacgtgtacagctacggtgtcgtgcttctggagctggttagaggggccagaatggcggatttggccacggatagcgttggtgatgcggagattgcgatgagacagttggtgtggaagatcagggaagggttgaagattggtgatcggacatgggtaatcagcttggtggatcgtaggttgaatggtagcttcgtttactcacaggtggcgttgatgctggaggtggctacgtcgtgtttggagaaagaaaggaaccaaagaccaagtatgaatgatgtagttaagaagttttacacatcagacaaaaaggttgaattcattggggaaatgtcaagctagcaagcaatctgatggcaatgttgtagttgtaaacctcctgtacaaacttcaactatagtgaaaaggagttcttttttgatactctttgtgctagt

SEQ ID NO: 12906 - DNA, 3004 bp, Oryza sativa
  ref <308>: DATABASE ACCESSION NUMBER: AK110254
  ref <309>: DATABASE ENTRY DATE: 2001-12-06
gatcgacaggacgcggatcaagccaggcgggcacgcttgcgcacccacactcgctccttgaaccatggtgttcatcgtaaagatacccggtcgctcgcgcgcaaacaccccggagcccgcaaccgcaaccgcaaccgcctccaccccgtccgaccagcagccgtccgcaccgccgctcgcggacatcgccatggacactccgcctcgagcagctcctcctatgtccatccctgtgcagccgacgcaagatgtgacggctgcgtcgttagcgtcttcaagcccgcgagtggcagcacagccatcagccgcggcctcggtcgcttcgggggctcctagcgctgcacagctcgacatcctcctcgcacctgccgtgctcaatcacagatacgtgcgcggtgtcgacaagagcctcattgtagagcgtccagagcgtatccgcgccgtcctactcggcatcgcaactgctatcggcaagtccaccaccgacgaccaccccgctataccctcgctaccctccacataccccgccgccgcacccggcccggcagtctcggacgatgacgatctcgtcgcacgcctcggatcgctctcgatgcaggccaaaccggacaacccgcagcagcacccacctcccagatttcgggtcctccattcgacggcgtcggtacccctcaatccgccccacccggcagtggcgtacacccatgcccacgcagacgagctcgtcgccgtcctcgagtccgcctacgacctcgcgaaacagcgacgcagagacgctcacaccgctcaggtcaagcacgaagcacgcgaggacacgccaacgcccgcacagccgcagccagaacaaaccacctccatggccgcaccccagcagacgtcacacgctgcctacctcgagcgtctctgcagccgagctcccaaccacccgccagtgtcacaagtcaagcatcaacactcttcgcccacgaagcatccgcccgaagatagcgaggcgtacacatcgagcgacggtgaaggcgacgaggccatgcatgcgtccgaagtgcccgaacatctgccccagggcgacctctacctcgccggcccctcgcaacccgattccagcgacggcggatcggcgcaagccatccagcacgccatgggtgcctgctgtgaggccgtcgaccgcgtagttgccgccgccaccgcttccaccaccacgactccgctgcgcgagattcggcacgaccaggcactgccgcacacgacctcagacgcgcatccagcaccagtaccagcacccgctgccaagcgcgcatttgtcctttcgcgtccgccgggccaccactgctccggctcgacaccgcagggcttctgctgggtgaacaatgcggtggtcgcgtcggcgcacgcctacctcacgcacggtatcgaccgcgtcgtagtattcgatattgacctgcaccacggcaacggcacgcagagtctggcgtggcgcatcaacgccgatgcgaacaagcgcgacgacgagcgtgcggagcgcattgccagtctgcgcgcagcggctctcgagcgcgcgcggcaggcgctcggcaccggcacggggcgcgcacatgccagccgcgtggccaaagttgcgctgtccgagcaggacgaggtggaaattagaaagcaggcgggtccgagggcgatgcggatattctacagctcgctgcacgacatcgagtcgtttccctgcgaggacggcgatgcgagcatgatcaaggacgcaagcacgtgtgtcgagggcgcacacggacagtggatctggaacgttcatttggaccactaccgcagcgaagccgaattcaagcggctgtacacagacaagtacgcgatcctgttcgacaaagccacccggttcctgcaagctacatcggccacgcctcagtctacactcgtgttgatctcggcaggtttcgacgcgtgcgcatacgagtatccgggcatgcagcgacacggcaagcacgtgccaccttcgttctaccacacgtttgcacgcgatgcggttcggttcgccgacacttacgcgcacggcaagctgatttcggtcctcgagggcggttacagcgaccgtgcgctgtgctcggccgcccttgcgcacgtaaccggtctatctgccgaagggacagcagatcccgaggtagaggcggagttttggaagctcgataatctcgtggcggtggagaaggtggcgaaaaagatggctgcacatgctgcagcagcgggtgggggtggggtgggggtgaatctcacgcccaagaggaggcaggcggaattggtgccttggctggcacgcacctcgcgcgcctttgccgcgttcgaacaggcgtgtggcaagctcaacgtcgttccgctgacggctacgggcagggcgagtacggtgcctagtgcggtgaatagtccgggtgtcgtggcgggtaggactctgcgcgatcgtggcgcactcaagacgcgtggggatgccacgccgcagtcgaaaaagagcccgaacaagtcgcccaccaagcctcgcgtggccgcctcgcatgcagaagttacgccggtcaagatcgaaggcactgcgatggatctggatacttcgacaccaaccaagccccgcgcagcacaggacagtagccctgctgagactaccgcgacggtgggtgggttgacaccgaccaagcctgcgccgatcattactggggctgagggagtggcgcgcgcgggcgcggtggacatctcctcgttcctagccacatcgtcgacgccgcaatcgcccgtgctctcggctgcgcccgtaacgctcgtcgacgccctgtcgcccacacacatccacgacgccaactcgacgcactcgatcatcccgctcgactacctcgaccaggacgctcccggatcgcccgatcccaccctagacaccgtcgactatttccccccacaaattcacccccaaccagactggacatagacacgcagcgtggtaatggcattgcgcgctttttct

SEQ ID NO: 12907 - DNA, 2682 bp, Oryza sativa
  ref <308>: DATABASE ACCESSION NUMBER: AK110255
  ref <309>: DATABASE ENTRY DATE: 2001-12-06
attgctcaccagcgccaaggcccggatagacacacacaactatcacaccacccatccaccttcaagggccttcttcttcctcccacctgtccttcctccacacgacgctcgagtgatctcccctctctctttttccatctcttcaagtccgactcgacaccacgaacaacagcgaatcttcttcgcttctccagaacacacaacgcagaacaacacaaaaagaaagaaagaagaagaagaacagctcgaggtctattcacgttctcccatctcgccctcaccataacaccccagcgcaacctattcacacacacacattcgaggagcgagtgagaacttgaactgaacagagagatagcgagagaggaccaacaacagccgtcatgtcgtccgagaaggtaaccacgatgccccaggccaacccggtcatggccccacctccgcccccgcccctgccgccgaccagcaccatcaagaagaaggcatcgccgccggcctcgtcgtcatcgtcgtcgtccacatcgccctcggtaagcccctcgactagcagcggcgccgtgcccaccaaggccgcggccaacccgcagctgccgccgctcgtgccggtctacaccaagccggcaatcctgggactgccgccgaccgccgtcctgaccaagcaggagatggacttccgcgccaatctgctcaaccccaacaacgacctcttctggaccgcgcgcggcctcattcgcccgccggtgctggccgacgcgctggcccagggccacgccattctcaagtacgagggccacctcacccagaagcagggcggccgccggctcagcgcccagtacggccggagcggtgcgacctcggccgctgctgcggggataccgctgagcttcggcgcggcggtggtcaccccgaccaacgtgaccgccgcagtgcagggcagctggcgctcgccggcgcccgtgctgccgaccaacccgggcttcgtgaccaaagaggacatggacatccgcgccaaccagctcaatcccaacaacgacgtgttctggtcgtcgcgtggtctgattcgcccggcggtgctggccgacgcgctggcccagggccacgctgtcctgcagcaggaggggcacctgacccagacccagacccacaagacccgcggccggctcaactcccagccctctctctattccaacagcgacctcgtcggccggcccgcggacacccgccgctcaatctccggccagggcctgcccggcagcggcagcggcggcatcggtagcggcgccgggcggatcagtggaagccgcgcgggcgacgagcagcagccgatggcgatgcgcaggcgtgcgtcgacgacgggctcgatcatgaaccggccgccggcgctggacggctcggtgacgaaggacgaggtggacctgcgggccaacctgatgaaccccaacaacagcatcttctggacgtcgcgcgggctcactcggccggctgacctgcaggaggcgctggccaagggccacgccgtgctcgaggctgagggccacatcacccacaacacgggcggcgggcgcagcaagtcgtggaaccgccgcggcagccgcactgagctccacggcccgccctcggtctcgccgctggtcgccgccgcccagcgtcagtggtccacgcccttcctggcgcccaacgccggcatcaccgccatgccgcccacctcgctcagcgccaggcccggcggcctcccgggcgccgcctgggtagccggcccgccgtctgtcggcgctgcgtcgacgcgtcaccccgactggcagcccaacgcgccgcagcgacgccgctactccctgccgccgcccggcttcgagctcttcacaccgccctcgcactttgccctcttcaggccgcccacggtcgcgcagcagaagccccttcagcccaagcaggggatgccgttcgccgggaaggagggcgcggccgacagcgagtgggacaagatggatgccgaggcgctcaccaggccgcttgcgccccacagcgcggcgatccccatcatcaagcccaccgcggccgacattgccgcggccaagaagaacgagagcgcgtgggtcaagaaggcgccgagcgccgacagcaagaagagcaccggcgtcttcctccgcgatgacaagtcttcgaccaaggaggagaaggacaaggccggcggcgacgacaagaagaagatcgaggccgagagcaaggcgatgaagcaggaggacaagaaggagtcgacggcatcgtcggactactcgaccaagagcggcgtcgagaccagggatgccgtcatcccgagcgagcccaccacgcccgccaccgccgccacgaccacgtcgacttcgaccagcgataaggtgggcagcctcgcgtggcagctcacgcaggtcaagctgaggactcgccgccccagcgaggcgagagagagcgacatctccaccaagagcgccaccgcctaagggacaaccaccaccacggctcgacatcaacgagtcggtggaggagaaccaggagatcaaggaaagaagaagagcgaactcactcacgcgtcgaaggccgggatagaagatctcagtgcgcagtttacagtagggaagggcgaccgtggagatgagttgagcgcgagagtaagaacgagtgtatatagaacagtttcccacccac

SEQ ID NO: 12908 - DNA, 1081 bp, Oryza sativa
  ref <308>: DATABASE ACCESSION NUMBER: AK110256
  ref <309>: DATABASE ENTRY DATE: 2001-12-06
cacaaagatccgtacgaggcgaaagacggaacagaacgaatagtcttctagagtcgacaacccaaaaagtgcctctacctaactttaccatgttacttgcatatatcacgtccgtccagtcatttactgccttgtgcaatcttgcgagggagaggaagctttggctttgttacatggaagccggcacctagcatcgcgcacgatgtaacgggcatggcatttcggacgttgagccgacagctattagatcagaaagaggccttggacatgaatggcgttgatccatgcgctattcgggctgcagctgtcaggacaggacatcattatgtatggtcggcgatcctcgaggattctcgccatgtggcttacgattctcgttgtgcaacaggcccccaggctgaacgaaaatgcacggccatggatcatggtggttatggcttcgtcagccttgtacagtcacgaacgagaatggggggtcccaagatagtaatgcttttgatgaggcggtgtctgcggcgtatccatatgaaaggatcacggctcgctttcgcagagtaattcggcactttcattctttacagcaaacacaattattgaaacataccacggagacgacttcgacatgtatcccgctactgctctcctcccgctgcttgcatttaccgcaaccgtacttgcagctcctgcgccgctgcatcccgccccccgaagtgtgccgaatattcacgaagtcattcgcaaccctgccccagttgacggaaggtgccttcttggcctcgacttagagcttctcgagagactaggcctctgttgggatcaaaagtttcacggacgtgctgctcccgcggtcgagaaggaggctgtggcagttgtgcccgtcgttggcagaacacttcctgtagagttcgatgcttagctagggctcattactcgatgaatttccagcacacatctcatcgccgaccatgagatcgtgaacactgagctctcatacaggaagagcaggatgcgataagcagagatcgcagcaaagacgaacagtactagacaatgttcgaccattcaatcgattcagcccctc

SEQ ID NO: 12909 - DNA, 1164 bp, Oryza sativa
  ref <308>: DATABASE ACCESSION NUMBER: AK110257
  ref <309>: DATABASE ENTRY DATE: 2001-12-06
attttatgtactttttcacagggattttttttctttttctccactgacatgtgaggccaacttattccacgactgcgagtgctccggcgatggccggcgccacctcgccgtggccgacgccggcgacgatggacatggtcatggtcatcgactcctcgcggtggaacctcgtttgcttggcgatggacgcctccaccgtccgccggaactcctccgcgtcgtccgcgccccagcacacctccgcgtcgcgcgccgtcaccgacgaccgccgcctgcgcccgttgtccgactccgaccgccgcagctccggcgacaccgcccgccggaacgcgccgcgcgagcccatcttctccgacctgctccgcctcggcgcgcgtgccttgttgacgcgcaccgcctgcttgtcctcgaacgccgccgccgccgccggcgctgccggcgccaccgacggggcgcaggggaccacgggcgccggaggcgctgccaccaccggggcctcggtggcgtgaggcggcggcggtgatggctgcgggacgatgaacagagggaagctggcggcgggtggcgctgtcgtcgacgctggcgtggacccggcgccagcgctgtcgctggagacggcggcggcggcggcggtggtggtggtgccgtggttggaagagatggagaggtcgtgcctggagagcgcgaggagcaggagcacgatggcgttgccgaggacgaacacgaaccgggcgttgagcaggagcgacccggcgagccgcaccacggcggcggcggcggccggcacgcgggaagaagaccacgacaagaacaccacgagcgcgaggagctcgcccacccgcagcatccggtagaggaggcgcagccgcaacgctgctccggcggccgccatggtcgcagcacactgtatcgtgcacagctctagctagctagcacacggcgtggccggcggcgacggcgacggcgactcttgccttcttggagacttgggttagtgtgggttttggaagagagtgaagctgagtgtgaggagaggagagctgtctgaactgaactgatgaaatcttctctttggttggggtgaggtggatgtgagcttatatagcctcaatttcggtggctttctctgtggccttttgtgtttaatacatgcatttgtcttct

SEQ ID NO: 12910 - DNA, 869 bp, Oryza sativa
  ref <308>: DATABASE ACCESSION NUMBER: AK110258
  ref <309>: DATABASE ENTRY DATE: 2001-12-06
ttgaagaaattagagtgctcaaagcaagccatcgctctggatacattagcatgggataacatcataggattccggtcctattgtgttggccttcgggatcggagtaatgattaatagggacagtcgggggcattcgtatttcatagtcagaggtgaaattcttggatttatgaaaacatattctcacaagataagccgatcgcatacaaactcacaaactgcacaccgccctatatataattaatcccacatttgcattgcaatttgcaatatggctccagctccacacatggcggcaatggtgatcttcttcactgctctcctcttgttggcatcgtcatcttcttgccttgcacgagctaggatgatgatgatgccaggtgatcatgctgtgaatggcaaggagactagtgcttcttctaaggaagctacttcacctcatgatttgctgcaaggtgtagcgccgccattgccaccgtcgccgccggcgaccgagatcatccgcccggacagcagcggctggatgccgcaggggtcggtacccagcccagggatcggccaccgggcgtagatttctcccttcgttttaaaatatagcaattttaaaatcggatgtatgaaatatatcatatctgttcagatttgtgaaactagctagaacgtatatgtcatttaattttaagttgctatattttaagacagatggagtatatttcgatctagcttaactacatgtagctaagctatattgtgtataattaattaagttgatcaggattcaagaagagatgcaaatgggtatgtatgtattctttcatgtgcttcggagaatgcctgtataaaaagcctctgaactttgatcgggtagt

SEQ ID NO: 12911 - DNA, 1826 bp, Oryza sativa
  ref <308>: DATABASE ACCESSION NUMBER: AK110259
  ref <309>: DATABASE ENTRY DATE: 2001-12-06
cagctataggctatagctagtcgatccaggagcaaagcacagcgacaatcaagctagctaagcatgctaatgatcgatcgagcttctgctagcagctagctggtgcgatcgatcgaacagcttaattgttggttgataagtttattagcttagcaaaagcaggtcgaagatgaaagcagcaagttcgatctttacggcattatccgcggccgtgttcggcttcttcattggtatttcttttcctgtagaaatcacaccaaagcttcagtattgtgcctttctcccttgcgacggtacaaacacgaactccagctccagcagtgacagcaacaacaacatgctcaacttctgggcaccatccgtcagaaacagcactagtgccccgtcgaatgccactatttcagggaacggtacaacgacagcagcagctgcagtggcgaaaaaaccgcaaggagcggagaggctgcctccgggtattgttgtccgggactctggtcttcatctacaccgcctctggggccacccaacatcggacgttgcgagtggcaagcagtaccttgtgacgctgacggtggggtacactgagaaagacaacatcaatgcaactgttcacaagttatcggacaagtttgacatagtgctgttccattacgacggtcggacgactgaatgggaggagttcgagtggtccaagaaggttgttcatgtcagcgccaagaagcagaccaaatggtggtttgcgaagagattcatgcatccgagcatcgtggcgccatacgagtacatattcctgtgggatgaggatctgggagtggacaacttcagtgcggaggagtacatcagcatcgccaggaagcatggcctggggatctcgcagccggggctcgacgccaccaaagggaagagatcacgctacacggccaccgccaggaggcccgccggcgacatgcacacctccggcaggttcgtcgaggtcatggcgcccgtcttctccagagacgcctgggcatgcgtctggcacatgatcccgaatgatttggtccacggctggggtctcgaccacaatttctggagatgcgtcgacgagcctgaagagcatataggcgtcgtggatgcgcagttcgttgtccatcgcggtgtcccaacgctcataagccaaggcaacggagaacaagaagggagcagtgccaaggtgagatcccggcagtttgacgagatgcgcaccttctaccgcagaatcgccgacgccgaaaaggctcaagccgacgccacggcagctgcagcagatcatcatcgctgagttattaattaacaattaacgtcagcctagacctctacatcatatatatcgtctcggatgatcaaattaaccagatttagttacaaagaggcaggttctttggggggcaaaattaactaggctcacgagagcacatatgaactagtttagtatacatggcatggttaatttgaaagttaaaaaaacatttgacagccaaagagataatgtgagcactttaattgagaaatcgaatatgggatcatggggttaaaactgcaccctacagtaccaaatatacatctcaagccaaatagtactaaaaacgacttcaattgatttgcattattgcctcaaaagaaatttgtgttgattcatttcttcctctagctaccttctctttttctcctcttttaatttgactcattgcgtacgtgttgactttatgttgattaagctaggtctcgtttaatttctgtaataaatcagttgaacttctggtgtagtaatatatagtatctacacaatattggtcggttcataatat

SEQ ID NO: 12912 - DNA, 1550 bp, Oryza sativa
  ref <308>: DATABASE ACCESSION NUMBER: AK110260
  ref <309>: DATABASE ENTRY DATE: 2001-12-06
acctcacaacaccagtggtcatcacagaccaaccctccccatctgctgccgcccactcctgcgcgggatgctcccaccaggcatccgcagctctgcaggcccctcgagtccatcatcccattgaagtaacaacacaacacaacacaccacaccacaccgcccaccgcaccttccacgcatagctcccagagctcccgcctgtcgccgccatggttaaaggagagctgctcaccgtcggtgccgctgccacggcaatcggcggtgcctacaagctcggcgaattcatgtacaaggccaaacgggttcgtgatgtcggcccatccaatgccgtttacgtgcgcatcatcgggcgcgtccagtcggacctcgacgaagtgcgtcgcctgctgtccgtccgcgaagttcacgatgccctcgaagccaacccggaaaagtccaagtgggtctatggagccatgcgtgacgtgcgcggtgccctcgagaacatcgcgccccatacggagcgcgtcgctggcgacgtcgaggccggccgccgcattggcgtccgccaccgtctctactggctgctgagcgagaaggagaagcttgagaacagagagaaggaggtccagatcgcccacgcgagcctcagcgaggttctcggctacctgaccaccctcgagcccgtcgaagagaccaagaagcccaagaaggaaaagaaggaggagcatcacgaaacacacaaggacacccatatcgacatcgatatccatcgtgacgcgccccgccacacctccgagcgtgtcgagcgcgaggtcttcatcgagcgcgatgctgctccccgccgtgtcgaggaacgtgaagtctggattgagcgcgaccgccaaggcccacctcgctatgaggagcaccgcgacatccactacgaccagcatgcaccccagcatatccactacgaccagcgcggccccaaccagcacatcgaggccgacatccacatcgagcgtggtggccgcgaccctcgctatgaagcccagtacgacgagcgctacgaacagcacgaccagttccgctcccagtacccagaagaacgccaccacgaacagcgccccttcccggaacccctaggccgccgccctgaagcctatgaagaccgccttcccgagcgcgaatcctggatgcagagctcggctcgccgaccccaacagcccggccactggggctcccatggtgctcacggtgagtacgccgagtacggtgctcctcaacccatcggtgcagcccactatcatctgccactatccaaggagtacaaagaacgcgagatgtggatcgagcaaaaggaggattacaggtttgacgagtatggcaacaaattgccagacaggtatttcaatccccccgtgcccaggccataccgcagccgcatgtagataatcacacctggactggtatttacttggatataatgagctttttgtcttttcgcgagcaagtacccccacaaatagtctttcttgagcgagggcactggctttctgtagctatcaaatcgatttgtttcctgcgtt

SEQ ID NO: 12913 - DNA, 1066 bp, Oryza sativa
  ref <308>: DATABASE ACCESSION NUMBER: AK110261
  ref <309>: DATABASE ENTRY DATE: 2001-12-06
cttgcattttctccatcaataatggcgggacgacgacgacgcccattcgctgctccggtcatcaactatctcctcctagccctgtggctcgccgcgtcgtcgtcgttcgccgtcgccgtcgccgtcgccggccatggccgcggtcgccgcagccatgtgtcgtcgatcgtgacggaggcgatgtacaacaagtcgctgttcatccacaaggacgacgccgcctgcccggcgaggaacttctacacctacgccgccttcctccgcgccgccgaccagtacccgagcttcggcggcgccggcggccgcgacacgcgccggcgggaggtcgccgccttcctcgcgcaggtctcccacgagaccaccggcggctgggccaccgcccccgatgggccctacacctggggcctctgcttcaaggaggagctcaagccggcgagcaactactgcgacgccgccgtcgccgcgcggtggccgtgcttccccggcaagtcgtaccatggccgcggccccatccagctgtcgtggaacttcaactacgggccggccggcgaggcggtggggttcgacgggctccgggagccggaggtggtcgccggcgacgccgtggtggcgttcaagacggcgctgtggttctggatgacgccgcggccgccgtcgaagccgtactcgtgccacgacgtgatgacggggaggtaccggccgtcgagggccgacgcggcggcgaaccggacggcggccgggttcgggctgacgacgaacatcatcaatggcggactcgagtgcaacaaccgcaccggcggcgatccccgggtggaggaccggatcggattcttccggcgatactgcggcgcgctcggcgtcgatgtcggtgacaacctcgactgcgcacaccagttgccctactcataatcgcgatttgttcattgctactattacgacatcctttttttttgttttacttcttgatgatgtttaattagtttacttgattatgtttctttcaataatgcaaatcaaaagttccaataatgaaaaaattggttaataggatcgacaagtttgcttg

SEQ ID NO: 12914 - DNA, 885 bp, Oryza sativa
  ref <308>: DATABASE ACCESSION NUMBER: AK110262
  ref <309>: DATABASE ENTRY DATE: 2001-12-06
ctcttttcaacgacgttaagttggctaacgtcgagcaagatgccgcaggagggcaacttcaagttccatcagtaccaggtggtgggccgccacttgcccactgacaatgatcccacccccactgtctaccgcatgaaggtgtgggctcaggatgccgtgcgtgccaagagcaagttttggtacttcctgaggaggctgcgtcgtgtgaagaaggccaacggccagatcatcgcagtgaacgagatttttgagcgcaagcccacaactgtgaagaactttggcatctgggtgcgctaccagtcacgcacaggctaccacaacatgtacaaggagtaccgtgacaccaccctcaacggtgcagtggaccagatgtacagcgagatggcatcacgccaccgcgtgcgcttcccttgcatccagatcatcaagacggccactgtgcccgcatctgcctgcaagcgctccaacaccctgcagttccacgacagcaagatcaagttcccactcacacaccgtctagcccgcccctcagcaccagagcaccgcagcctgtacaaggcacacaggccaaacgtggccatgatctaagcagccagccaggcagcagcggcggcagcagcagcagcagcgctggcggcttagctggcgccctggcagcaggcagcagcggcagcaggagcggcggctggtggctgtttgatcagggagctactgctgtggcagtgcctgtggtagtgcggccgagcgtgtggggaggaacgtctgggggaggagagattgtgcagcagtggctgtccagcagggcgtggagtgtgctgtttcctgctgttgtagcagtggcctccatagactatgcactgaatgacatgtaaacgctctggctct

SEQ ID NO: 12915 - DNA, 1398 bp, Oryza sativa
  ref <308>: DATABASE ACCESSION NUMBER: AK110263
  ref <309>: DATABASE ENTRY DATE: 2001-12-06
agcttgagatagagatcgaggtcgatccctccagatcaggccttcaaatcatctactcttccatcaatcctcgactgaaaccccaaggtggcgcagcgagcaagaagcactagctagccagaagctaatcaattgaagggatctatcgatcgatcggaagccgagaagaagaagaagaagaagttaaaccctagcctagcctggatatataggccgcaggtagaagctggcgagccggtggtgggacgaggggcggctcagcctgccggtgacagccgccgacccatccctcggccttggcaacaacgacaccaccggcgccggtgacgacgacatggcgtccaaggagccaagcggcgaccacgaccacgagatgaacgggaccagcgccgggggcggcgagcccaaggacggcgcggtggtgaccggccgcaaccggcgcccccgcggacggccgccgggctccaagaacaagcccaagccgcccatcttcgtgacgcgggacagcccgaacgcgctgcgcagccacgtcatggaggtggccggcggcgccgatgtcgccgagtccatcgcgcacttcgcgcggcggcggcagcgcggcgtctgcgtgctcagcggggccggcaccgtgaccgacgtggccctgcgccagccggccgcgccgagcgccgtggtggcgctccgtgggcggttcgagatcctgtccctgacggggacgttcctgccggggccggcgccgccgggctccaccgggctgaccgtgtacctcgccggcgggcaggggcaggtggtgggcggcagcgtggtggggacgctcaccgcggcggggccggtcatggtgatcgcctccaccttcgccaacgccacctacgagaggctgccgctggatcaggaggaggaggaagcagcggcaggcggcatgatggcgccgccgccactcatggccggcgccgccgatccactacttttcggcgggggaatgcacgacgccgggcttgctgcatggcaccatgcccgccctccgccgccgccgccctactagctctctagctagattaattaattaagcttcatgaattaaatccttgcttaattaattggcatatatatatactcacatgatatatatgatcaacaagctatatatagctagccagctcgagctaattaattaacaaaaggtgagccaatataatgcaagatcgatccaagctatataagtacgtttatacaggtaaattttagtggttcaagtgccagggccatatatatttctctttctttagcatttgtgtgtagtatagcagcaatagcttaatcaaacatcaccaagtaattgctgtgttgtgtgtttggtttacttcacatatctatatatgagtgctaattaaacagatt

SEQ ID NO: 12916 - DNA, 2580 bp, Oryza sativa
  ref <308>: DATABASE ACCESSION NUMBER: AK110264
  ref <309>: DATABASE ENTRY DATE: 2001-12-06
aacgagttatcgcctgtcactcatcgccctatcgtcaactcgcggggtgtcgagactcatcagttttggaggtcatagacttctgtacattcgcttttgcaccacactcgctttactacgtttaacatgcgtattactactctaataggcctcgtggccggacttgccagccagactgtgaacgcagcctgcagcgcacccctcaagatcgatgacttctccaagcagtcctctaaccagaacagcttgggcgaatggactagcgatgatggatccatgagctccatctccgccagcgccggtgtcctttctttcaagcccaaggcgggatcttacttctacgagactttcccttgccaggcagctagcaccaatggatacaactccgtcagcttccagatgaagggacccgccggtggctctgccactcttgagatccagaccaagaccagctgctcggctactacgtacacttccaagtacgtttcgatcactggattgactggtaacacccagaccatcaacatccctctttcccagttctccggtgccaatgccaatgccgttactggtttcgtatgggctggattctcttcaaccaccgccacatggcagatgagcaacatcgcctttggttgcggtagcagtgcaggtggcagtacctctgtctccgccaccaagggagctaccaccacctcggcccgcagcaccatgtcgactgtcgcgacccccacagcttccgctgcccccggatcttgctctcctttgttgatcgacgactggatttctcaatctcgtttgactttcttgtactacaacgccatgggctaccctacctccgatgatgcttccatgacttccatcactgttggaaagcctgctaccaaccgtgtggagtttgttcccaaggccgactcatacttctacagccagttcccttgcgtcgacgcgaagaagaacaagtacaccggaatctcccttcgcatcaaggctcccaagggcgccactttggcccttcagctcgactcctcggacagctgcgacgctactaaccccaagtctacctatgcgtcttccactgaccttggctggactttcgatggcactgagaagctgtacaccattcccttcagcaagttcgctggcctcaacaccgagaagcttaccaccatcctcttctctggcttctctggtaccacttccttcggccccatggctttctactgtggcaactccggagaatacgtcgttcctcccacctccgctgaccctggcgccagtgccaccgtccctgctcccagcaacccgtcagctactgctcttgtgattgacaagttcgccaacgccaacactaacgctatgggtaactggcacggtggtgacgagggcatgactctcaagtacgccagcaacaagctcactatcacctctcccgatgccgactacgctttctacacccaggtatccgctggatgttccgatttcaccaagtacaagggatcttacctccacatcgcctacaccggtaccactgccttcaccgttgctttccagcagcacaacagccagtgcaaggctgagattgctccttaccctgagacctgggattctgctgaggccagccgctacgccaagaacggacacatctacatcccgatcaaccacttcaacattgagctctctcgcgtcgttggtttcgcgctcaagggtttccacacgactgagtccgtcactctctccgtcattgagatcgtctcctcggttcccgctggcaccacgatccccaagaaggatgagactggtaaccttgttttcgcctgcaagcgccccaactccttcgctttcgccatcgatgacggtcaacccgaccttgcccaggaggttctcaagatcatccgcgaggaagacgtcaaggtcaccttcttcaccgtcggtgctccccttctcgacgcctccaccaacttgaccaacgtctacaaggagatgatggccgccggtcaccagctcgctctccactccttcactcaccccaagatggagggtcttcccgactacgcatccatcgactgggagtacaacgaggacgtcaaggccatgaagtctcagttcaacggctacacctccacttacttccgtcctcccttcggtactgagggtgcccgtatgcgttcgcgtctcacaaaggctgttggcaacactgccagcattgtcaactggagcgttgatgtagaggactggttgtgggctgagaccgacacccctgagcagcagaaggtcgctttccagcgtgacgttgacaagggtggtaaccttgtggttctccactacctctaccccagcactgtcagctaccttagggagttcatccagattgctaaggccaccggcaagcagcttatgcgtgtcgaccagtgcatgatggaccctaacgctcctcctctatagattaacaatctttagtgaaagttggagtggtgttgaggtgtttataggggaatgatacccggagatgagggcattgttgcatgtagagttgagatgcgtttagcatagtctgttaatcgtaattacatcgttgag

SEQ ID NO: 12917 - DNA, 1423 bp, Oryza sativa
  ref <308>: DATABASE ACCESSION NUMBER: AK110265
  ref <309>: DATABASE ENTRY DATE: 2001-12-06
gattatcgtcgcctgcctacgctcgtagcccagtcccaaattcattcaagactctctgcattcgcttccgcactgtttctcccgttgacctcccgcctgccatccgtcagtcgaatttagcaccaaagtggaatctttaccttgattccgaaaaaaaaaaagaaaagaaagcattgccgacccaccccctgccctgtcactgtcgaccgccatgtcctcctccatcaactcgcacccgcccgcctcggacgcggatgtgactatggccacggcggacgccgacgaggaaatcgaaatgctcaagcgcagcgttgcccagctcgaagccgaaaccgacggcttgtttggcggctccgccccctcggacgtgggtgcctcgtcgttttccacaacgatggtgtcgacaacttccgcaacgaccccagccgtgcactcgcccattgtgattccgcccgaaaaggaagaatcggaccgccggtccgtgcacatttcgcaagttgaatacgctaccacgtctgaccagctcaaggcccactttgacgcatgcggccaaattgtgcgcttgacgatcatgctcgataagcacacggcgcagcccaagggatttgcgtacattgagtttgccaccctggagggcgctcaggcggcacttgccctcaacgactcgacgctcaacgggcgccagattaaggtgacgcctaagcgcaccaatgttccaggactcaaggccggccgcgggcgaggtcgaggcgggaggggcggcgctgctgcgggcatgatgccgcactatccgcccatgatgatgccctacgggtacccttacccgccgccgggtccctacggatatccgcccatgggcccgctgccgcccggcgcttacccagggtatgggtatcccccacccccgccgcaccatcatggcggaaacgggtattacgccggtggcgcataccggcgcggcggtgggtaccagcagggcgggcgtggcggccggtacaacccatatggaggcggtcgcggcggtggtgggtaccagcgtgggcgtggtggcaggggtggcgggtatcagaaccggggtggacatggccatggtcgcgacgccgacagggaggacatgtttgtgcccaacgacaaccagcagctgcctgctcccggacagcatgacggcgggtttgacggtggcgagcaccagcatggccacgagtaccagcatcagcagcagggcgagggcgagtatcccgttgaggagcccacgggtcgttggtaaggccttgtcccattttgagccccatcaaccacgtttttttcaattttcattttgctgaggaatgccctcaacaaggccagtgttgcccctctctttttcttttcttttgtggctcccataatgtacatttatctaaatattcatgtcctttatctg

SEQ ID NO: 12918 - DNA, 2572 bp, Oryza sativa
  ref <308>: DATABASE ACCESSION NUMBER: AK110266
  ref <309>: DATABASE ENTRY DATE: 2001-12-06
aagcgaaaaaccgagtttgtatactcgataaattaaggagtgcggcgctgcgatggcggagagtgaggcggcgtacgtgccgctggaggcggagccgaaggcgccgggtccgtcgggcatatcgcaatcgcaggagttcaagcaaccactgcgcgcgggtgagcactcgctcaacccatccgctggcgcagggctgagtgtgaagatcgcccgcgagcgggaggggccgcagcactcgcggcacgcgtccaccgtcacgtccgcttccgcttcgatgggcagtggccagttcggtgcggcgcgccgcacgccgcgcggcacgttgggcggcacaggacagggccgtgtgcaccgcacgaccactgccatccgcgcgcacgcggacatccccgcgtcaccgctggcaccgcgcggcagtgtggcgcggccgggcgatgtggacgccgcctttgtggccacacgcgtgtgccttcaggccgatgagcagagcgaacggcgcagcagcgacggcggagggccgggtaacggcggcggcggtagtggtagcctggcgctggtgccgtattggagtgagaagttcccgtggcgtgtgctgcccaaagcgttcgccgactatttctggatactcacgcgcctgtccattgcgctggtcgtcgtcatcggcgcttcggtgccgcacatgctttggcctctgaacggtgagggcgttccgatgtggaaaggcgtgctgaacagcgctatcgccgtgtttctgagcgtttacttcggccaaatgtggctgcacgtccataagagccgtatgtacgaccgcaacggactggacccgaagcgcgcgctgccggcgcagagcgtgcggcattggagcgtggagctgacgggtctgccgttgcacttcacaccgaaccagaacgaggcactggtgcagggcgtgacgcgagtgttggaggagcggtacgggcccgtggcgtcggtcacgatcgggtacatctggaccacaccggacggcctgtccggcgccgaatcgcggcagcagaagcgcgcgctcgaagaggcgcgtacgctgcttccgatgacacacgacagcggtgcgcgcccgcgcgagctgcagcgcatcgaaacagaactgttgcgtttagacgccgaatcgcacgccaccggctgcagcgggcacgcgtacgtgacgtttgaggacgaacgcgccgccgtcgacgcgcgcaatgagacggagcccgtcccctgcgaactcgcgggcaatgcggctggccacggcgttgagcgcttcgatctgcacattggcccggccccgcacccgcacgacgtgctttgggacaatctgcagtacacgtggtgtgagcgcgccgtccgatatgtggtggtgctgctgctcagctccgtcgtgctcgtcatcggcctcatcagtttggtgtatttcgtcggcactgcaaaccacagcgcgtccgctggcaccaacgccggcgcaaacgtcctcattatcgtctcttacatcttcatattcgtactcgttcctgtgctctccaagtaccagcgcagtcacagcgattcggcgcgcgtcatatcagtgctcatccgtttggtcgtgttccaagtgctggccgcgacgctcgtgaacctgacggtgtttggtctgttcggcgtggcgaaggatacggtgctgacggggcagctggtggacgcgctcattatgaatctgctgctcgagttcctgctcaccgccgcgctgctgtcgtgttcggtggtggcaaaagcgcgcaaattcgcgcgcgaccatccggatgcgccctttgatgcgctggcgctggccatgcgcgggctccccttcgacctggcactgcgctatcagttcgctctcaaatcgtttactgtggccgtgttcttcagcaccgcgtatccggtcacactgttcccatcactgctgcatatgtgcattcagtacttcggcgatcggtggatgatcctgcgcgctcgtgcgcggccacaactgacggatacgcgcattacggagttcgttgtggtttggctgttgcccatcgtaccggtcatgtacctgtcggtgggtctggtcgtgttccaccgggaggaggccaacacgccggcgctcgtgccaatggccattgtgctcgtcgtcatcagtgtgctgtacgtgctgctgcgcgtgtacttccgctttcgccgccccatcggcgtgtggtgtcagagcaacggcgtcgactgctgcggtgaccgctgtttggcccgcgaacagcccctggcgatgggcactgtaccgccgttctccgccgacgtacagcccttcgaacaaccgcattaaagtgccgcactccacgcactcacgaccgttcacctcctccgctttgccgctctgccgcattccgttcacccgtcgcgcccgcatctccgcgccgttttgctgcgtttccccaccgctcgaccgtttgctttgagtgtgttctgccctctccgctgcgccattgtcactgccgtcccgtcactgtgtttgcgtgctgttgatcacccgacatacatcagcccgaaaccgttctgtgctgtggct

SEQ ID NO: 12919 - DNA, 2534 bp, Oryza sativa
  ref <308>: DATABASE ACCESSION NUMBER: AK110267
  ref <309>: DATABASE ENTRY DATE: 2001-12-06
aagcgaaaaaccgagtttgtatactcgataaattaaggttgttgtgtcgttagagatgcgacggtggtgcgggtggcgttggccactagtgccctcgcgtgcgcacggcttgggccgtgccttagcggcaacagctcgcgctgtgcacgcacgccgcggcgttgccactgcgactgctcgcagtgccgctgtcaaacggcctcacccgcgtacgacaacgcctgcaaccgcacggcgcgctgccatcgcagtgcacaccaccgcgcggtcatcaggacgtcccgcgactggtgctggcggtgtccagcggtaccgcgcgtttctgaatgatattcagaaatggctgacgtccagaccgcgtgcctccgatgagcctctgtccaatgcgatacgccttgctttggacgacctcagccgcaccggcgcggtgcagcctgttcgcgtcaacggcgtgctgcagttcttgcgtgtgatgacgcatcagctggacaacgcgcaggcgctgtatttgttggcgtttggtctgccgccgcgtccccttatcccactcagcgtgcagcagcgcacgggcgtgacagcggagtctgtgccgttggcacatcccgacgcggccacattctacgccctgtgtatgtcatgtgccgaagcgcggcagtggatggcggccactcaatggttcgatctcatgatcgcgtgtctgccgcctccggagacgagcgaccgcgcggatgggcgtttgggtgaacagctggtgacgcagtttgagctgcagcggctgttggagtgcgcagcgcacgccgggcacttggacttggcagagcgcgtgttcagcgcttcctccttgcggctgccgcacatgcgaatcaccaaaatgccgtatgtccccgcgctcgcgccagtcgcgcgcaacacaatgcgcgcgggtttggaggagcggctgtggtgcgcactcgcgctcgcgtacggtgctgcggcgcggcaccagcggccgggcgtgtgggggcgactgcaggacatggtgcagcggctgcacgcagcgctggagcgcgccgcacacgtccgtatgacgggctcagggacgtacgcacagcgcactggccctgacgcggtcgcgtggtcactgcgaccgtccggtgcgctgctgcaggcgctgctggcgatgtaccagcagttcgctgccgcccgcggcgacggcgatgcggacgcgctcgcggccgatcaggcgcgtgtggtggacaccgttcaggagctgtacgcgcgctggaccggccccataccatcgcacagccaacgcaaagatgctctgcgcgtagaagctgcggccgctgctgactccgccgccgcagcggccggtcgcgccggtgcggtggagccggcagggagcgcaactgcggctgctgctgaagcggccgcaaccgagcgccgcgcgccgccgcgcattggatatggcgtgcaaccgaccatcacggcgatgcgcgttctgtacgacaccgtcgccacagcgtcaccgcgtgtgttcgcagacgccagcgccgtaacggtatcggttgaggcgctgttcccagccgtcgtcgcgctcgagcgtgtgcgcgatgaagtggaaagccgctaccccaagctccagcctcagccaaagcacgacgtcttctattaccacgcgctgatgaaggcgtttggtcgcagttgggagcagccgagcgcgttgggtggtggtgccgccgaaccggccgctgtggaggtcgctgtgacggagctgttgggcatcgtccaacacatgtgtgccgctgcagacgcggcggtggcagcgggtactgccaacgctgttgccgcgggctgtgaagcaccggtcacgcttgcaccgaatgcgttcacactgcatcagaccctggacgcgctggcgcgtctgcgaccaaccgctgcgggtgcagccgctgccgaacgcgtttggacgcgtctgacggtgccgcgcgctgatggtcggccgccgtacgttgcggtcgaccgcacgcacttcacgacgctgttggagctgtacgcgcggtgtggtctgttcttcgaagccgctgctgtctttggccgcatcacagcggcgaacttggaagtgccggtgaaagcagcgcttacgttcctctcattcgctgcgaacgaccagacgcaggccgtgctgcggcgcagcggcttaacgccgcagcgcgcggcacggtttcaacgcgacgccgcggcgctgatgcacgccattggaccggagcgcttcagcgatccggcagtgccgttgcagtcgcagcgcactcccgcggcgccgatgcgggcggcacgtgcatacgcgcccgtcacgacgctcagcggcgagcacctgcaaaggctgcagcagttggtcggcgctctagcagatgcgtggcagccgcagcagaagcgcggatgaagcttcatcctgtacctgaccttcacctctgcgcgcaaaaacgatggcgctttgtgtcccgctgtccactgccggcgttggcgttttgtgtttgaaatttgtagcgctttgc

SEQ ID NO: 12920 - DNA, 2519 bp, Oryza sativa
  ref <308>: DATABASE ACCESSION NUMBER: AK110268
  ref <309>: DATABASE ENTRY DATE: 2001-12-06
tcagccacagtatacatgggcaagtaaggtttctgcaccccgtggacagatttatgggtacagaatgtctctttgggcggagcatattggagtggttgaggaaggcttcaactatccagagaccatggaatgcatgagacgagttcgccaaatcggtgaacagaactgggaacgatttgttgataatgaggtgactgagatgagaggccacctaatgaagtaccctgtaagtgttgaccgtaagggcaaggtgaaacccttgccaggatgtacgtcattcccagacatgggtggtaacatctgtggatcattccgagccatccaagaaaacctcacaatatgaatttcgattatctttacctgccgagcatcatgacggtggcctgagggttggtgccgggggagtacttgaaggtggagctgtcgatcaccctgagcccctgcaccccgaacacccggtaatcgtcgtcgacgacggcgccgacatggcagccgccgtggtagtgccagatggtcatgacggtgtccatgcagtactgctccggcgagcgcgagtcgttgacatggcgcggcagcaggttgacggggaagttggcggaatcggtgaagatggactcgacggaggcgttggcgtaggtgaagttggagaaggcccgcgactggatcacccgctcgatcgtctcgatgccatggacgcaccgctccagatcctctgcctcgcggaagtagttgaacgtcaccgacgggttcgccctcgggtcggtggttcgcagctcgacgtggccggaggacaccggcccgaggatcttctccaggatgaagcctccccggaacgccctcctgtccagccgcatcatcgcctccgccgcccgctgcagcgcctccggcgtcctctgcttcggcggcagcgtgccgagctgccccgtctgcggcgacagcatcccgaagctgcgcgcccaccggagcgcgccgtccgacaccggcatgccgaactccgacccgctcaccccctcgatgaagctgccggagcgggtgatgccgacgacctgcaccagggagagctccaccggcaccggcgacgggatgaacaccgagttcatcgggttgtcggcgacgccctgcccgaccatgggttggtccacgatcacctcgatgccgtgcgcctccaggtgcgcctgcggcccgacgccgctcagcatcagcagctgcgggctccccagcgtccccgccgacacgatcacctcgttcttgtcgccgtcgcggaggtacacccggtgctgcacccccagcgggcccgagaacaccaccccgtacgccaccgggtacggcaccccgtctgcacgccatggcaaaagctcgccgtcgtgaggtcaagcttcttcggcgcacagcacattttccattttcatcgtagctgtgtaccttggcttttgaagaggatacgggagacggtggcgtagaggaggacggtgaggccgcgggggcgggcgtggcggaggaagtcggcggcggtgtggcgctggccggagttgtcgaagatggtgccgccgatcttggtgccggtgacgtggtcgaaggtgaagccgttgtcgggcgtgacgccgacctcgagcagcgcgtcgcggagcgccgcctgccacggcggcacgtcggggcggaacaccagcgagcgctccacccaccggtacgacgagttcaccagccgcgcgtcccacccggaggcgcgcacgtactcgttgctcgcccgcgtgtagaacccggcgttgaggcagctcccgccgccgagcacccgcgcccgggcgttcaccacgccgtcctccgagatgaaccgctgcgccggcgacgccggcgacgtgtcggccagcgcgtccgtgaagtgctgctcgctcgacatgttggcgtacggcaggccgccgcgctccagcagcagcacgcgcgagtgctccgacagcgtcgccgccagcgggcaccccgccgtgccgccgccgatgacgatgtagttgtagctcgacaccagcggcgcgtcctgcgcgtgccgcacgaaccgcaggttctccagttgctctgcacaacgccatcgcacgccatgaacacgacgacgacgcaacacgcatcaacgcaaagatacaacgcaacgtttacgcaccttgctcttccgagagcgcggcgaggcagagcgagaggagcacggcggcggcggcggcaagcaccggcgccgacgagctcgcgcggccaagtgctgccattttcgccgggcaaattcgctaactttcacattctcctgggacaaaacgttcggtctgtttatatatccggagttagctcaatggtagatcaagagtagatgtcttgaataatcttgcagattgctttgcactgcaaagaagatcttcgagcagctttgtaaattgtggagccctgagaagaatataacatgcatgcagaagtgatgagctgatgaaacattgatcaatgatctgatgtggttgtgagcaagcaagcaggagggtttacttgcc

SEQ ID NO: 12921 - DNA, 1260 bp, Oryza sativa
  ref <308>: DATABASE ACCESSION NUMBER: AK110269
  ref <309>: DATABASE ENTRY DATE: 2001-12-06
gtctcaaacccaatcaaactccaaccaaactcacctacctacccccaacccatccagagctagagctatgtgcggcggcgcgatcctcgccgacctcataccgtcgccgcgctccggcggccacaccaaaaagaacaagcggcggcggatcagcgacgacgaggacttcgaggccgccttcgaggagttcgacgccggcgacgacgactccgactccgactccgagtccgaggaggtagacgagtacgacgtcgtcgtcgacgacgacgacagcgaggacggcgtggtggttcttccgccgccgccgccgccgccgccggtgattccacatgagcgccatggcgcgaggcggttccgcggcgtgaggaagcggccgtgggggaagtgggcggcggagatccgcgaccccgtgcgcggcgtgcgcgtctggctcggtaccttccccaccgccgagtccgccgcgcgcgcctacgacgccgccgcccgccgcctccgcggcgccaaggccaagcccaacttcccctccgcgccgccgccctcggctgctgctcaccgccgcaagaagcgccgcgcccacgccgccacgcgctcgccgtcgtctccgcccgccaccagcgaggtcacggcggcgtccgcgtccgcgtccagcgatgtccccgcgccggcgttcgcttccttcgtcggcgagcccgggcacggcggcgccaagtcgatgccgacgacgagccacacctcgcagccagccccgccggcgacggtggcgtccgagaacgtcgacgacccggaggtgttcgacccgtacgacgtccacggcggcctcgcctcctacttcgccggcggcgcgtacgagtccctggagagcctgttcgcgcacggcggcgacagcgccgccgtcgaccaagcggcgagcgaccactggccggcggcgctatggagcttcgcagacgacggctcgttctgcttctgatgctgtcaaatcacatcgccattggcggccattgcaagccatggcatggcacctgatgatgctgatccagcgaactggtcactcgttcttgatgcgttttcagtttcttgtacagtgtttttccccagcaacagtgaagtagtattcagttattcactgttcagtcatgagttcatcgcaaaatatgatgtaagtatgtgtcttgagattgttttagcagtggcttttgtttgtataatgtatttctctgtaattaattaatagctgttttcagtgatgaactaaattttctg

SEQ ID NO: 12922 - DNA, 1089 bp, Oryza sativa
  ref <308>: DATABASE ACCESSION NUMBER: AK110270
  ref <309>: DATABASE ENTRY DATE: 2001-12-06
cttttcggtttccaagcccctccagcatcgccatcccggttggaagtacagattcgtgcggaggacagatagattcaggatggtgtccctcaagcttcagaagcgcctcgcggccagcgtgatgaaatgtggccagaagaagatctggctcgacccgaatgaggtcagcgagatctcgatggcgaactctcgccaggctgtccgtaagctcgtcaaggatggctacatcatccgaaagccccccgtgatgcactcgcgcgctcgcgtaaggaagaacctcctggccaagcgcaagggtaggcacatgggtgtcggtaagaggaggggtacccgtaacgcccgtatgcccgagaaggtcatctggatcaggcgcatgcgtgtgctcaggaggcttctccgcaagtaccgtgaggccaagaagatcgacaagcactcgtaccacgagctctacatgaaggtcaagggtaacgtcttcaagaacaagcgtgtgctcatggagtacatctggaaggccaaggctcagaagatcaaggacaaggccgagcaggagcagggtgagctcaggcgtcagaagaaccgtcagatgagggagcgtcgcgccaagcgcctcgacgagaggaggaaggtcctcctcggcgaggacaagaaggccgtcaagaaggaggaggccgccaagaaggtcgccgccgcccccgctgccgcttccgcccccaaggtcagcaagaaccagaagaagaaggaggctgccaaggccgccgccggttctgcccccaaggccgccgcccccgccaaggctgccgcccccaagaaggaggagaccaaggccgccgctcccgtcaaggccgccgctcccgtcaaggccgccgcccccaagaaggaggagaccaaggctgccgcccccaaggccgctgctgccaagcccgccgccaaggctgccgctcccaagaaggaggctgccaagcccgccgccgccaagcccgctgccaagggcggcaagaagggtggcaagtaagcgtgttcgaccccaaacacatgactctgtccgctttcaccgcactgacctcaacaaaaaatcaaatacttcaaacc

SEQ ID NO: 12923 - DNA, 3439 bp, Oryza sativa
  ref <308>: DATABASE ACCESSION NUMBER: AK110271
  ref <309>: DATABASE ENTRY DATE: 2001-12-06
agcttgctagctgctgcagcctctgctcttcctgcagatgcaatcagtgcagtaaactaaattaagcagagcagacactgcactgacatggcacagcactagaagcagcagaggcagagcaagcagaggaagcagagctagtgctctccaagctcagcaaaggtgcttccatttttgttccaatttccaatggaagctacagtgccagtgctgctgctagtgacagtgctgtctttgatcttgccctccggcattggcgccgccgccgccggcgacgagcggtcggcgcttctcgccttgaaggcgggcttcgtcgacacggtgagcgcgctcgccgactggaccgacggcggcaaggcgtcgccgcattgcaagtggaccggcgtcgggtgcaacgccgccggcctcgtcgatcggctcgagctctccggcaagaacctgagcggcaaggtcgccgacgacgtgttccggctgccggcgctcgcggtgctcaacatctccaacaacgccttcgccaccacgctgcccaagtccctgccgtcgctgcccagtttcaaggtgttcgacgtgagccagaactccttcgagggcggcttccccgccggcctcggcggctgcgctgacctcgtcgccgtcaacgcctccggcaacaacttcgccggtcccctccccgaggacctcgccgatgccacgtccctggagaccatcgacatgcgtgggagcttcttcggcggcgccatccccgcggcttaccggagcctcaccaagctcaagttcttgggactctccggcaacaacatcaccggcaagatcccgccggagatcggcgagatggagtccctcgagagcctcatcattgggtacaatgagctcgagggtggcatcccgccggagctcggtaacctcgccaatctccagtacctcgacctcgccgtcggcaacctcgacgggcccatcccgccggagctagggaagcttccggcgctcacctccctctacctctacaagaacaacctcgagggcaagataccaccggagctcggcaacatctcgacgctggtcttcctcgacctctccgacaacgcgttcaccggcgcgatacccgacgaggtggcgcagctgagccacctccggctgctcaacctcatgtgcaaccacctcgacggcgtcgtgccggcggccatcggagacatgccgaagctggaggtgctcgagctgtggaacaactcgttgacggggtcgctcccggcgtcgctcggccggagctcgccgctgcagtgtgtggacgtgtcgtcgaacggattcaccggcggcatcccggccgggatctgcgacggcaaggcgctcatcaagctgatcatgttcaacaacggcttcaccggcggcatcccggccgggctcgcgtcgtgcgcgtcgctggtgcgggtgcgcgtgcacggcaaccggctcaacggcacgatccccgtcgggttcgggaagctgccgctgctgcagcggctcgagctcgccggcaacgacctatccggcgagatccccggcgacctcgcgtcgtcggcgtcgctgtcgttcatcgacgtgtcgcgcaaccacctccagtactccatcccctcgagcctcttcaccatcccgaccttgcagagcttcctcgcgtcggacaacatgatctccggcgagctccccgaccagttccaggactgcccggcgctcgccgcgctggacctgtccaacaaccggctcgccggcgcgatcccgtccagcctggcctcgtgccagaggctggtcaagctcaacctgcggcggaacaagctcgccggcgagatacctcgctcgctcgccaacatgccggcgctcgccattcttgatctatcgagcaacgttctcaccggcggcataccggagaatttcgggcgctcgccggcgctcgagacgctcaacctggcgtacaacaacctaaccgggcccgtgccgggcaacggcgtgctgcgctcgatcaaccccgacgagctggccggcaatgccgggctgtgcggcggcgtgctcccgccgtgctccggcagccgttccaccgccgccgggccgcgctctcgcggcagcgcccagctcaggcacatcgcggtggggtggctggtcggcatggtcgccgtcgtggccgcgttcgcggcgctgttcggcgggcactacgcgtaccggcggtggtacgtggacggcgcgggttgctgcgacgacgagaacctcggcggcgagtcgggggcgtggccgtggcgactgacggcgttccagcggctggggttcacgtgcgccgaggtgctcgcgtgcgtgaaggaggcgaacgtggtgggcatgggcgccaccggcgtcgtctacaaggccgagctcccccgcgcgcgcgccgtgatcgccgtgaagaagctatggcgaccagccgccgccgccgaggccgccgccgccgcgccggagctgacggcggaggtgctgaaggaggtgggcctcctcggccggctccggcaccggaacatcgtgcgcctcctcggctacatgcacaacgaggccgacgccatgatgctgtacgagttcatgcccaatggcagcctatgggaggcgctgcacgggccgccggagcggcgcacgctggtggactgggtgtcgcgctacgacgtggccgccggcgtggcgcaggggctcgcctacctccaccacgactgccaccctccggtgatccaccgcgacatcaagtccaacaacatcctcctcgacgccaacatggaggcgcgcatcgccgacttcgggctggcgcgtgcgctggggcgcgccggcgagtcggtgtcggtggtggccgggtcgtacgggtacatcgcgccggagtacgggtacacgatgaaggtggaccagaagagcgacacgtacagctacggcgtggtgctgatggagctcatcaccgggaggagggcggtggaggcggcgttcggcgaggggcaggacatcgtcggctgggtgcgcaacaagatccggagcaacacggtggaggaccacctcgacggccagctcgtcggcgccggctgcccgcacgtcagggaggagatgctgctggtgctccgcatcgccgtgctctgcaccgccaggttgccgcgcgacaggccgtccatgcgcgacgtcatcaccatgctcggcgaggccaagccgcgccgcaagagcggcagctccaccggcagcgccagcgccaaagcccccactccggcgccgccggcggtggcggcggtggtggacaaggacaagccggtgttcaccacgacgccggactccgactacgcttagctgtgtccattttctttcttcctttttttttcttcggtgcatgttaatgatttgttcatgtatgtagattattctaaaaaaattgtaagaattttgagcttgtaacaaaccaacaaccattttctgt

SEQ ID NO: 12924 - DNA, 1210 bp, Oryza sativa
  ref <308>: DATABASE ACCESSION NUMBER: AK110272
  ref <309>: DATABASE ENTRY DATE: 2001-12-06
gatggtagtatctaggactaccatggttgcaacgggtaacggggaatcagggttcgattccggagagggagcctgagaaacggctaccacatctaaggaaggcagcaggcgcgtaaattacccactcccagctcggggaggtagtgacgaaaaataacaatacaggactcatattagaggccctgtaattggaatgagtacactttaaatcccttaacaaggacctattggagggcaagtctggtgccagcagccgcggtaactccagctccaatagcgtatattaaagttgtaatcactgccttggctccatcgaccattaagattaagatcattgccccaccagaaagaaagtactccgtctggatcggtggctccatcttggcttccttgtccactttccaacagatgtggatctcgaagcaggaatacgatgaatctggccccggtattgtgcaccgcaagtgcttctaagtcttttcgcccgcaaaagatttcgacaagctcgcctagccaagaccacaacctcaataagtttatttatacgctattaatattattattatttatatatttcaataacatcaagaataataacaagaacaacaacatcagtaacaactacaacaccaacaacattcgaccaccatctaaaccaacaacatcaacaacaacaagaagaaaaagaacaacaacagcacacatccacttaatcttttttagttttattctacatggggaatgtgtatatcccaaaccaataccaataccaaaacaacaacaacaataagaagaacaacaacaaagcaccaacatcagttacaaatctttatgaaatttaacattttttagttttaaccacaaaaatgttttaagtttttttttgataatgaaaatcccataatggttggttcatccggcgggcgggcgaggggaatccatgcccagcccgccctaccattggccacggctgacaccgctgccaagtggtgccagtgtcggtggctgttggttggcgactgcatactgcatgtgttcgacccgaacctgtccgctgatccaacccatccgagggatgagttgtaaagtgtttcattttaattaagaagattttacatgtttttatttttttcataaaatattttgaatacttaagaagatcatctttggaggaataacaaaaaaaatctaaataaataaaataaaaaag

SEQ ID NO: 12925 - DNA, 3926 bp, Oryza sativa
  ref <308>: DATABASE ACCESSION NUMBER: AK110273
  ref <309>: DATABASE ENTRY DATE: 2001-12-06
cattttggctggggaggccttggcccaaattggcgagcttgctgcctggcagctgcccaaccaagactcagccccttgtggaagcctcgggattgagcagtgtttggcttgtttatcctaacatgggagtgttccggttgctggcaagcagccgttcatgatcagtcccctgcccacaccaagacagactgctgccgagcacacctcgcatcacagcacttacggtgccttcagtccagagtcagccgctgttgacgggcctgcagacaaatgtggcagcacatcacgtgcttgcccagcccacatggctccagcagacatcacacagcgggggggcacagcagcacatgccatcaccaccaccaatagtgccgtggtagtggcggcgcagcagcaggtgcaccacccttcctcacagccagctagtgccagcaatggcctgccaggcttgcagccgcaggcagagttggcaagcaagccacaacgccagcaaccgccgcaaccagcagcagtggccgcagtggcagctgctgcaccgcagcctgcggccctgaacacgccagagcagcagctgcagcagcccacagactcagaggacgactcctggactcctggccagcagcaaagcagcggtgacgcacatgctgacaacgagtatgaggaagaggagacctgggaccctcatggcccgccacctcagtactgcacaaactgcacagctcgcctgtgcagcagcgagtgcagtgattgcggtcacagcagcgagcaggatgaagctctgtttgacagcagcagcagcggcagcgggcagcctgttacagcaacgccgacagccgcgcggccgctgattatctgggatgatgaaatgctgctgcacgaggagggcaaggcggtgccacaccctgagcggccagacaggctgcgtgccatcatggcacgcctggtgggcaacggccttacaggtggctgcactcgtgttgctgcccgcttggccaccaagcaggagctgctgcgggtgcacgcagcagaccacctgcagcgcctgcacctcttctgctcaggcacagtgccagccaccatcatcccagcagacacatacatcaaccagcacaccctgcactgtgcagcgctggcagccggcagcgcggcagaggcagcggtgcgggtggtgtggggtgaggcggcggctggggctgccgtcatccgccctcctggacaccatgcggagagcaacaccgccatgggcttctgcttcttcaacaacgcggcagtagcagcacgtgcagcgcaggcggccggagcggagcgggtgctgatccttgactgggatgttcaccacggcaacggcacgcagcacatctttgaggcggaccccagcgtgctgtacatgagcctgcaccgctacgacaggggcaacttctaccccggcactggtggtgcagatgaggtggggcatggccgcggcgctggttacacagtcaacgtgccatgggatgcaggcaacatcggcaatggcgactacatggcagcaatggagcaggttattctgcccatcgcccgtgagtttgcgcccaacctcatcatcatctcggcaggcttcgacgcagcagatggtgaccccattggtggctgctgcctcaccccagagtgcttcggcaacatgacagctgagctgctgcccattgcgccgacggtgctgctgctggagggcggctacaacctgctgtccacagcgctgtcaacggaggcctgcttgagagtgctgctgggtgaggagccgcagacgctgctgccgcggccgtcgccgtttggctggctggcaatccaagctgccaagaaggcgcacagccgctactggtcttgcctggctggcgcattcccgcagctgcatgccggcgtctcgctacagcagcagctgcggctgatcggcagtgacagcgggcagcagcacggctggcaagaccagcaggaggatggggacgagtatgaggagcctgagtacgaggacgatgaggcagaagaggaggagcaggaggaagcccacatgcagcagcagcggcagcaggaagcagaggggctggagagcggctatgggttcagcagtggccacggcttcggtcagcggcacagttgggatgggcagagcagcttccggctgagccgtgtgggcggccagggcataagcagggcgtcaacggcacctgcagcagcagcagcagcggctgggggtcaggaggtgaccggcaggagctggcagaggcagcagcagcgacggcggcgtccgctcagcaggaagcaggaaatgctgcgtgccattcaccggcaagcaatgaagtgcttctggcggcggcggctaaggcgtgccgcagcccagcagcagcggctgcagtaacagcaggtttgaggcgcatgtctggccgggtggatcagctggttgccgaggcatgtggcagtgcaggcccactctttgctctggtgcagcgcccaatgcacagctgcatccatggtatggtgtggcagctggataacggttggcagcagggcgtgccacctgccagtgcgcgcctctgtgtgaatggatcactctttgtcctttgcgccagcagcagtaatgcagcaatgcgcatatgtgtagtgctgtgcagtcctttgggtgtcgctcgggtgcttagctttgttcttgcgcgtggctggttttcaattgcgacaaaactgtgaggatgacaggcccatcgtggctacgtcacactgctggaacaggcatgcgtggcggtgtgtgcagtcggcgccggattggaagggatgcctgcctatggcaaagtgctgtgctcctgcatggctgcggcatgcggagttattgttggttggctgtgggattgttggcatatgcacagcactgcttaatgatgacctgacacatccagcagtagtggcgtgctggcctctgcgaagttgtgaggcttggggtcatccacaattaaatactacatgtgctctgtgcagatactgtgtattgaaggtcgtataatgtggctgctgcttgtcgtataatgtggctgctgcttggacagcgcttttcctgtgcgcagttactagggaattggctgctgcttcagtgggttgcctggaagtgccgggtggggtgtgtgcgcagtcgtgcataggtgggggattgttttggttgtgtcctgacgtctgttcctgtttctgtgtacactttactgactgcgcattgatggcgccgagcaagaaacacacatgtgcacatacgtgctcgtacgccggcgctggcggcatccgtggtgctggctgctttgggctccacttcccctaggggtgtgcatctgtagtacgcacacccctggtgcaaccatcagacgacgtggcattccttgcatcggttttggtggcagccatgacacctgagtttcctgagagactggggtctgtttgtggcacagcaggcttgttcagtgcacggaaggtgcagccaagcagaataagtactcgtctgtcgacagacgtctgttcatggcatgggcacatccgtcaggcatgtgatacagatgccattgggcggtctctgtgttgcctgcatctcgatggtggcatcttctttgcctgcatcctggtgctgttagtcaaaactcaatgcttgtgcgcaattcctctattcatgttgcatttcagtctacttttgcttgtttggcttctgcgcaatagcttacatgccaagcagcacgcatcaactttgtgtacctaacgacctctgcacaatgcacggcgccgcagtgcagcctgctgcaatggctgtgtggtctgagttgtgggtagcagatgggatgtgcgcgtgcgcattgcatgcttcagcgctccccattcgcatgtgacacgcttgtcgacttgtaaaacaatgaccatcaccc

SEQ ID NO: 12926 - DNA, 1021 bp, Oryza sativa
  ref <308>: DATABASE ACCESSION NUMBER: AK110274
  ref <309>: DATABASE ENTRY DATE: 2001-12-06
attaccacatcactcttgcaaaccgctaggcagccgcataccttccacagcaatagcaaccttcatcagtcgctgcatagccaccgtcgccttacgcagcgcccacgcacgccaacgccgccccagcttcgccgaggaactgctatccgagcaagccaagcgtgcctgacttcaaccataagctctcgccattcagcttgcgccgtcaacatcaccactccaccaagactctccttgagactctgccccatcacatcgccttacgcttcgcctcaccctctagaatcgttcttagtctcacgctgcaagcatgacgctcgccgaggagttcaagtcgcgcaactttagtatctatggtcaatggactggagtgctctgcatattcctatgcttcgcgcttggggttgccaatatcttccatgcaaatacattgctttcagcattgtttgtttagtctgctccttcatcatcatcttcattgagataccgctactccttcgcatctgcccgacgtcttccaaattcgatggctttatccggaaattcagctccaactacatgcgcgccgctatatacttggcaatgagcgttgtacagtgggtcagcatctgggccatgacgaccagcttgattgctgccgccgtcttcctgctgattgctgctattttctacgccctggccggcttcaagggccaagtattccaaggcagcaagacactaggcggacagggtgttgcgcagatgatcatataagagacgcgggtggatatcatgagctggaggcgaggcgaggcagagggtggcagcgtagagtgcaatgagcaggcaacgacaagaggatgaggcgacgacgccaaaagcaccgacgcagtgcatgcaagtttgagggatgaggacttgattctttatatcaattcacagctaggcgttatggggttggattttgcaatgcgcgcccatggaacacggacatgtaacgatggttatgtagctttacagaatgcgatatggcttgctgagc

SEQ ID NO: 12927 - DNA, 1099 bp, Oryza sativa
  ref <308>: DATABASE ACCESSION NUMBER: AK110275
  ref <309>: DATABASE ENTRY DATE: 2001-12-06
gtgtactgcaagaatgtgaagccaggcaaggcgcgtgtgatcacctgcctcatggaggccatggcgcagcccaactttggcgaggagtgccgcgcggagctgcgcaagcgcgagtcagccgtcaagaacgactacaggtacgacgtgggtgtgctgacaggctgcaagtccgacattgatgactactgccgtgaggagcgcatgatgctgcgcggcaacgccacggtgctcaagtgcctggtggagaactttgataagacaactgacgcttgccagaatgagatgagtcgggctgtgcgctttgctctgtgggactaccagaacggccagtcgctgaccaaggagtgcgacgctgacgtggatgccttctgccccaagggtgccaaggctcgccttggcggcatgttcaccattggagctgtgggccgctgcctgagcaaggccctggtgcaggccaaggcactcacacccaaatgcaggcagctggtgctggtggcagcgcccaaggacagccgcatgtacctcaagtacccagagagcaccaacgcgctcgtgcagaagattgcagacctgcagcgctcggcgggcttggagagtgtgctggtggacccgtacaggcgggacggcggcagcgtgactgtcaccggctgggtggcgctggcgtgcatcctgagcctgatcctggtcagcgtggggggcatggtcatgctggtgcgccgcatgactgggggacaagccacacacgcagtatgtgaagagcggtgacgcctgatcgccgggctgctgcagcactttacgtgtggggagtgcttagtgtaagcgccaagtaacagaatcgcagggggtggtgtgtgatggtgcattaaaaccaattgtggtgcagctttaacgtgggtgatgcagcacctgtgggatgggacaggagttggtgtgattggacagggaccaccagacaaatctgcatgcatccatctgctgatgtcagcggcttacggtgttgtgctggcatgcatgaagattagcagccaagtattgcaatgtgggcttcacacccccgcaaagcacaccattgcattgttcagtgtaacacattttgcac

SEQ ID NO: 12928 - DNA, 2790 bp, Oryza sativa
  ref <308>: DATABASE ACCESSION NUMBER: AK110276
  ref <309>: DATABASE ENTRY DATE: 2001-12-06
acgcacaacactgacaggcacctgggccattgagggctggaagatctggagccggagcaccgccagcccgcgccgagcacgcactgcagcccgagtgggcagcattgagctggatacatacacagtcacatgacctccgcaggacaccatattcacttccaccatggacgccgatgcggatagggtggccgactacctcgacgacaagctgcagacggccgccgacctcgagacgggcaaccttgacgccctgctcgcccgcatcaccgagcagcagacgctgctgaagcaccaggtcacggccgcccagcaggacctccacgacgcaaaggagcacgcccacgcacaccacgcccgcgtccagcagcaggcgcacgaattcacccgggagcaggccgacatcgaccgccgcctgcttgtcatcaccgccagcgacacctccgacgaggctgttccgcgcttcgaggcagtcctcgaccagctgcaccgcctgcatgtcgccagcaactatgtcaagctgctgcgcgacgtggacgtcctcagccagcacgcccacacgcagctccacacgtcgagcgaagcggcactgcacccgtaccagcggctgcgcacgctgcacacccgcctactccgcctgcaggacgatgccgaaggcgctgctccccagctgctccaccacgttgacaccatcacccgctcgctgcgcgcaaacatcctcgatgccttttcgtccgacctcaaccgggtcctcaagaagatccactggcccacgcccaaggcaagcataccggcaccgctgcgtgacgagtgggaggctgcagtcgtcaagctgctggatctgcagatgcccgaattggagggcatgaactatgccagcggacccggtgacaaggtcaagcttccaccagtccttttccctttcgacgtgctcgtgcaaccgttggagatgcgcttccgctaccacttcgagggtgacaagcccacgaaccgcaatgataggcccgagtacttcctctcccatattaccacgcttttgaacgactacagcggattcgtgaccgaccatgtgcaacccatactcctcgcgcacttccgtggaacagatctggcgcttaaccctgtctacatcgacgccatgtcggcattcgttacggccctgctgccgatgctgagaaccaagattcgatcgctgttacctcagattgccggccaaccccagctgctcagccatctgatgcatgaaatgatgagcttcgacagcactatccgggctgtctggggctacgatgggggctacggcgtcgacggctggaagggtttgtcgtgggaattcctcgtacaaggcgattggttcggccgctggttgcaagtcgaaaaggactttgcattggcgcgataccaaagcatcgttgaggctgcagattttggtgatctagactacgagagtgttgatcccaaagctaccaagcccaccaagggagcgatccgcgtcaacgacttgcttgatacaataacagatcgatacaggcccctgacttccttcagccagaagctgacctttttgatcgacatccagattgccattttcgacaaatatcacgagaaactgcagagcaatctggaagcatatctcaccatgaccacagcgttgggtcgtgcaatgggcggcgtcaccaaggaggagcaggagaggctgcttggcgtcgaaggacttgagcgcctgtgcaaaacgtacgggagcgcagactacctcgaacgggcaatgcgagactggagcgacgacgtgttcttcttggacatttgggaggggctacaagatcgtgctcgccaagagcacagcattggtgggatgactgtagccgacgtcgccgaacgcacgtcaaaatccgttggaggagacgatgacggcggcgccctctttgacgaaacggcttcgtggtatgcacgccttcgggagcgtagcgagaagctcattatcgacacgttgaacagcagtgtccgccaggcgctgcggccataccatcatatcaatccctgggcgacgctgagcggaacctcagcctcggcgcccgccaatctctcaccaactgcagagatcgacccatttctctctcacctcagtactacattgggcttcctgtcccgtgcgctcgcctcggcgcccctacgccgcattaccagagcggtactcgccaccgtttccagcacgctttgggacagcgtgcttacccgatgccgtttttcgactgcgggcgcggcccagttgcacgccgatctggcagccatctgtcaggtcgtcgacaagcaagtggggcctggcgtagcgggagcgggcctccgaagatgtcttgagggcgtgcagctcgttgggctgcctgtcaaaggtggcaaagatcaggctgctgcgagcggagacgagggcagcgcttccgctggcggaggtggtggtggtggtggcgacgaggactgggacgatgcctggggcgcggcagcagatgatccagcgcctcttccgcagcaagaaacagaccatggcggcacaacgtctgcaggcgcgagtctcggcctgtgggaggttgagaagaggctgtttgcggataaccagtccgcgagagacgtgttggatgagctgggcctcgaaacattggcggagaacgaagcaagggccttgcttgggcggagagttgagttggcgggatagagtgcgctgcgctggccgagacatggtgtttcggaccagttgagcggaatgcgcatgatacccatggtcaattacacattggaatcgcg

SEQ ID NO: 12929 - DNA, 1194 bp, Oryza sativa
  ref <308>: DATABASE ACCESSION NUMBER: AK110277
  ref <309>: DATABASE ENTRY DATE: 2001-12-06
tggccggcgccaatggccttgagcttcctgaacactcctccctccaaactcgcgcccaaaccgtcgttcccgccaccatctcggcagttcgcgccaccgcagcggcagcgatctcttctccatctctcgctgctcctccgcgagcagcagccgccgcgacccgtccgcgcctcgtcgtccacgcaggcgggcgcggccccctcgccgccgtcgtcgagggaggaggccgtgtcccaggcgaggtcctgcctcgccgccgcgctgcgcaagccgctcggcaagcagaggaagcagcagcggcagccgcggttccgcgccgagataccagtcgtcgacgactcgccgggctccctcgcgcgcctcgcctccgacgtgttctcgtcgggcctcggcttgtcgaggaagggcggcggcggcggcgcgccggcgaggctgctgctcgtgtggccgtcctccgaggagatgggtgtggctctacgggagccccatgattggggggaatccacggcgcacgcgcagctcgacgcggtggcgcccgacgcgctgagcagctgcgacgccgccgtgttcctggcgcccgggcggtcgcaggtggagaagatgaaggccgccgccgacgcgctggacaccaagccggtggtcatgttcaacccggcgtggagcttcgacgaggaggaggaggggttcgccggcggcgcgaggggattcgtgggctccttcagcgtggtgtactccttcacggggctggaggtgaggggccttctgagcaagaagaagggtgtgctgctccggtgcgtcgacggcggcaggttcggcggcgagagctgggtgctcatggtggaggacgacgccgccgcgccggcgtcggagcagttctaggtggtgtcgcggctgaagcggcggccgacgatcggcgaggtggagaccatgctgtacaacgtcatggccgcaaactcgccggtgaccaagtcggcaagattcctccgggggctcgtgtccaatgtcaccggaggaaggaaggagaagaagcaatgatctttctcgaggccattgttgcagtgaattcatcagtactagatttttttttcttttctgaatgaattcgacagtagcagatgttttcatgtaattttacgatttcgagaattcgttcagactgcatatgagcgaattcgccagtagaagtttgcagtg

SEQ ID NO: 12930 - DNA, 2170 bp, Oryza sativa
  ref <308>: DATABASE ACCESSION NUMBER: AK110278
  ref <309>: DATABASE ENTRY DATE: 2001-12-06
aagcgaaaaaccgagtttgtatactcgataaattaagcagagccgcctcgccatgtcggctgcggatctggacctgaaggcggcgctggatgcggccaaaggcgggtaccgcggtctgctgacgaagcgcgacgcgccggagacggcagagcagaaggcggcgcgcgtggcggtgaagcaacagaagaattcgtatctgtccaaatacctgtctgcagacgacaaggccgatgccgcggcagctgcggcagccggtgttggtgccggcgcaaagggcggtgacggaaaggagaagaagaagcggaagaaacccgccgccggtgctggcgctggcgctggcgctggcgccgccggcgctgcgggcagtgggaaacggcccggtgcaggtggcattgtggacgtcgaccacgactggcgcaaaacggcgatgccggtggtgccggacagcgaagacgggccggtggtggtcagaggcgccgacgcgaagccgcgcagcagtggcagcggtgggcgcggcgggcgcgacgacgacgatgaggacggcactgacgcgctcgagaaagtgcgtatcgccatcaacgacggcagtggatggtcggcgggcggcagcactggcaacggcactggcactggcactggcagtggtagtggcaagccgcagcggctgccgtcaccggatcagtcgccgccgcgtcgcaagcgcgtggattcaccgccggcagagcggcggccagcggcagcagcggcggcgtcggggtcggctggagcgctgccggacctgtcaccgccgctacgcaagcgcgagcccacaccggacctctcaccgccgcgcagaggtggtgcagcggcggctgcggcagtggcagcggacctgtcacctccgcgcaaacccaaagcggctgcagcagcggcagcggatctctcaccgccgcgacgcaagcgcgagccgtcgccagacctgtcgccgccgcggcacaacggccgtggcgctgcggctgccacagcgtcttcctcctcacatgtcaccactgcagtcggtggctcatcctcctcctccgctgcaccggcaccagcggcgtcgcatcgctcgtcgcgtcgcagcggctcgcgctcgcgctcccgttccggtgggcgacgcggcagccgttcgcgttcgcccaaacggcgacgcgtcgagtcgccggatcagtcgccgccgcgtcgcagcggtggtggtgacagcggcagcgcaatggcgggcgatgcgtcggcgccggtgaagacgggtctgcggcgcggcgcagacttcgcgaaagaggcgcaagcgaatgagcagaagaagcgcgacgcgctggcagcgatgagcgcggaaatgagtggcgtcggcgctgcgacggtggtgcgcgacaaacgcggccgtaagctgacgccggaggagctggcggctcggcaggcggcacgcaacgcacaggaggaccaatcgaagggcatggagtggggccgcgggttggtgcagggcgctgcggcacgcgccaaagcacaggacgacgcgtatgaagcggccaaaccgtttgcgcgctacaaagacgacgccgatttggacgcgctgcagcgcgacacacagcgcaggggcgatccgttggcgcatctgtcgcgcaacaaagccgaagccgcgcgcaaggcggaaatcacacgctccgctgcagcggcggaggagtcggtcgcgtcactgcacgcccaccaccagagcgtgtcggacgccaaagcgcgcgaccgtgacctgagcccggactcgcgtgcgcaagcggctgatgacgcgcacgcagcactgcgcgccaaacaggccgctgccaaagccggtgcgacgcgcgtcgtgcagcggcggccgcggccgcgctacaccggtgctgcgtggcacaaccggttcggcatagcgcccggctaccggtgggacggcgtcgtgcgcggtaacggttgggaggacaaaatcgcgatgcactccaaccgctcaagactcatgaaagagacggcgtacaaatggagttcggaggacatgtaaacgctcaaacgctcgtaacactcaaaccctcggatccgatacgctcgtgccgcacgtccaattgccttcctctctcagagtctctgtgtcttctttgccctttcgtcatgcgttgcacgaaaccgtcgttcc

SEQ ID NO: 12931 - DNA, 2960 bp, Oryza sativa
  ref <308>: DATABASE ACCESSION NUMBER: AK110279
  ref <309>: DATABASE ENTRY DATE: 2001-12-06
aacaaacgctaaaaaagtaacagtttctgtactttattgaagagtttccgtaaaggcatccatgtcacacttagcctttggtgagaagaaaacgctcgatgatgtgtggccagtgaacaaccgccggttcttcatccgtactgacttcgagcgaatgatcgagcacggcacgcagcaaccaccgcacgtgctgctcactacgattctccgcgtgctgcagggcggcggtaaggccatcattggctgctccttcggcgtcaataagaacgcggtggacatgaagctgacacccactcagcggcagcaggcactccgcgcctttcctcgtcacttgtctactgagccgctcgcgcagctcctccgcaaaatattgccggagacgtgcaccgtcgacttcgcccctgactgccttgctgccatggatcaggttaagaagctgcagcgtggctgcgtgcttgtcctggaaaatttgcgtttttacaaggcggagctctccgagcgagcggaggaacgcgcggagatggccgccgtccttgagcgctacaccgacgtattcgtgaacgatgtcttcgccacattgcacctccgcgccgccgcgaccgttgaactgccgaagctccttcgccacggcgtctgcggctcattgatggcacaagaggtcacctacttcagccaagtcctgacgaatccgcaacgtcccttgaccctggtgatcggatcggttcatatcgaggagaagatgcggctgctcgaggccctcattcgcaaggtcgacaaggtccccatcagctgcgccgtcgccatccctttccttcaggtgaaaggcatcagcgttggcaagctgtctccgaacatttgcgacacggcaggacacatcatctgggaagatccgtccacttcgccacaggacttcgcgaggaaaattatgcgccttgccgagcgctacaacgtcaagattgttctccccgaggactttgtgtgcaatcgcaccatcgagccgacacggttccccaccgtgacgccgaccaaccgcgtccctgcggacctttacatcgtggacatcggcccgaagactatccagcgcttcacggcggagattagcgactcgcacacggtcttctggacgggccgcatggggtgcgccgataaggcggactacacgaatggcaccaccgccatcgcgatcgccgtcggccactctaactgcgtcacggtggtcggtggcaagaacacggtgcaggccgtccgcacggctggggtggaggacagcatcaaccacatgacgacagggcccaactcaatgctccgcgtgctcgagggaaccccgctcgccgcgctgaacgcgctctccgacgcgcatccgcccgtcgcgagcgacatcaacgtcactgcgcctcagctgctccgatgctgcccgctcttccgagacctcaccccgcagcaaatgcgggctatcgttgcgaaggcggtgccacgttgccacgccatgggcgacgtactcgcgcacgagggcgacaagatttcgtccatgttcgtagtcgcccgcggtttcctgcactccgcgcccaagtcccaacagggcaaatccatcgcatcgcgtatcatcggcgtcggtgaaagcacgggcgagttcagcttcctgaacggcaagacgtcgacttccgtcgtgcaggctgggtcggatgacaccctcactttccagatcacggcctcgtcacttgaggaggccttctccgagagcgcagagctgactctacaggtgcttaaatgcgccgtcgagcctgtgcgcgtgcagcacctgaggtccgtgcaggagcgatggtcggagtggtacctgctcaacgccacgctgcgtagcacccgcaagcctaacccctggggtaacttgggcggcttggcggaggtggtcgcgtccgcggcgccagcactcctgctgcatcacgtgttggaccgacagtacacgcccttcaaactcgaggccggcacatgcttctttgcgcgcttcgcgagtgggacctttatgatggtcgcccacaacgtgttccgggagatctgcttccagaacatcgcaagcgccttcgacgaatggacgcccgtcctcgcgaccgtggcagccaccgtcctcgcgacgccgctgcgcctcgcggcgactggtctgccgttcccagccatgacacgatcggatctgatcggcacggcactgacaagcgcggccctttcagcggcacccgccgccgcccacgcgcccttcctgttccgcaagtccgcggcggaggctaacgcgtggcggcaccgtcgcgtgttggaccctttgtccgaactcttcatcgccgtcgcctgccgtgtggcggtctccatcgctgcgttgcccctcgtggcgcaccgcttcaagagtgatgttaccgtgcgcagctccgtcgcttacgtactgcggcaggtgctcgcgttgctcatcgagacggcggtcctgaaggtgtggcgcgcaatcgcgcagcggcgagcggaggcgcggtcggctaagcccatcgcaccgccggagacacccctggcgctgatgcaccagagccgggtcacaggcgacaaaggcatttggtaagcgccctgctctggaaggggagagaaaggtgcgaacacagagacacatgcgatgtgatgcgcgacagttcgtgaaagggcccagtggcaaccacgcacacgtaaattctccttcattccctaccgctgatgagcagacgatgaaagagaaggcgcgagggagggggactggcatttagagagtcagtctctcccgttgcaacacttttcattaaacctgctcccccctcagcacccgtggccactcagacgcgcaacacacgcggcacaatacacagagagagagagagagacattttccccattccgttcccttcccggcgttactgtgcgacgaagaagtcgcctatccccacccactctcg

SEQ ID NO: 12932 - DNA, 1922 bp, Oryza sativa
  ref <308>: DATABASE ACCESSION NUMBER: AK110280
  ref <309>: DATABASE ENTRY DATE: 2001-12-06
tgcaaaatatgcagggaatgtaaagaagcatgagatggtccaactgatgccacctattgatgcagccgagatcccttgggtcagccttggcagcacccaagaaagacggagatataacatccaaaatgtctttaagaccaaccgactaatggcacttgctgaaatgatcatctgcaacactttcagggagatagaatccgaagcattggaactcctctcaaatgcactgcctgtcggcccacttttagcacctgcttcggggccaacaggccatttcttgcctgaagacatgacttgcctcacctggctcgacacacaggcccccggctccgttatctatgtggcctttgggagctccaccatctttgacatagctcagttccatgagcttgctaacgggcttgccgtctctgaccaaccatttctgtgggttgtccgacctaactttaccaatggaatccaagaagattggttcaatgaatataaagaccgtatcaagggcaaggggttggttattagctgggctccccagcaacgagtactatcacacccttcaatcgcttgcttcatgtcgcactgtgggtggaactcaacaatggaaggtgtactgcacggtgtcccgttcttatgctggccttatttttccgaccaattctgcaaccagagctacatatgcaatgtgtggaagacaggcattaagcttttccgagacaagcaaggggttgtcacacaggaggagatcaagaacaaggcggcgcagctcctagaagacaaggagatcaaagaaagagcggtgacactgaagaccacggcccgtgcaagcatccaagagggagggtcctcgcaccagaactttctcgagcttgtcaatttgctgagagaacaatgatctttcaggatgcagaaaaaatcactgcagtcttggtgcagtcaaaataggattaatcggtcagtaaaataaaccgaatgcacaccataataaagattccgttgtttgatgtatactgttgtttatgagcctatcgttcaacatagaaagtagtattggattatgagctgtttagtaccatcatcagaatgggctagcgaccactggaagcataaaattgactctattaagcggggttcccaatccctccgaagtggcaggagaaaatcacaaggggcaaatgcgagtttggtaataaaacagggcactacgcattccgtcgacaaagggtttgccgatgcactagaggtgttcgacggaatgcccaacggcggactccggcgacggaacgcagcacacaccacacagaaactgtccccgatggccgccctaccgtaagaaaaaaacgagcgcgaagcgggagctcaccaagatatccttgccgttctcgcgaccgcgcggcggctccacccgcggcgcgaccgatatgcccccccgcccgcgcgcggcacggggtttgagcgaggcggctggctcgcctcctcctcctcctcctcctcgaagcctcgggctccccggccggcgtccacccaggcagcgcccccaactccccgggactccgccgccccccgccgcggggcagcatcagcgaagagttcagcaacgcagcggcaaggcaaatctggaactgaacttctgtgcttgtacggccggtcgctcgcctcctgtagtcctgtgctggtagctggattcgtttccgtttgggaaagttgggccgggtagatttaagttgggctttcaaatttcatttgtgttcttcggatagtaaacggaataaattcacccgaggttcgttaactttacagcgagattttttgaggtcccttaaccataaaaaccataaatgtgtacccctaaacttccacaaaccgtgcactcaagatgctatgttagcatatatggatggtttcactgatgtggcatcctagtcagc

SEQ ID NO: 12933 - DNA, 1363 bp, Oryza sativa
  ref <308>: DATABASE ACCESSION NUMBER: AK110281
  ref <309>: DATABASE ENTRY DATE: 2001-12-06
acacgcaccccacgacaacaccaagacactcaattgcctgcacccgcacccttcgccgctgcacagcaccgcccagaaggcgcgtgtcgacctgtgccatgctcgcccgcggctctctcgcccgctgggctgcggccaaaacaagcgcgcgcgacctcccccagcttgctcgcttcctctcccacacgctccgcgcccgtcgtgcctccgacctgcccgttgcccgcgccatctcgcgcgcctatgtttccgcctcaatgcccatcgcagctatgccaccgccgccgccgccgccaccaagcccactgccaccgtgaagaaggcggtcaaggcccaggctcagtccagcgcccgccccaaacgagcggctgcctccaagactgcctccaggacagcaaagaagcccgcgaagaagcccgcgaagaaggcctcggcgaagaagaagacgaagcccaaggccaagaagaaacccgctcccaagaagaaggtcgtcaagaagaaggtgctcacgccagaggagaagctcaaggcgcagatcagggagctccgaaaggttgctcttaaagcccccaccacgtcacaccccctgactgcatacaatgcctacatcgccgagagtctgaaggacaagctagcaggcggcgacatccggggggcaatgagaagcgtagctgcgcggttcacggagctgacgccttcggaacgtgaacactacaatcacttagccaatgagcggactgcagcaagacaagctgagtacagcgcgtggatcaacgcgcacacgccgctacagatccaaagagctaacagtgcgcgccgcctactgcgacgcaagttgccgaaaaggagaaacaaccagaatcccgccaatactgagccgcttaaggatgatcgccttccttccaagccagcgaacccatttgctctcttcaccaaggagcgctgggcctcgggagacatgaagagcattgctgcaccaaatgctgccaaattgatcaccgaggagtggaagaacctaagtgccggcgagaagaagaaataccaagatgccgcagctgccatcctcgcccagtatcgttccgacatggctgcagcctctccgcctgcgtaagttgcagcatacgcctaattttttttttgacggctggcccaaggattcgaacgatactttccaggctgtggtcaaactacagcatctgggttgttcatgggcttcttgaagggtcttcctgtacgcctgggtttcatcgtgaggcatgtttctggctggcttgagaatacaggtgctgttctaggattttggtcgtgtacgctacattcccacataatgtagttcagcgcaatatgagatttcatatacgat

SEQ ID NO: 12934 - DNA, 4346 bp, Oryza sativa
  ref <308>: DATABASE ACCESSION NUMBER: AK110282
  ref <309>: DATABASE ENTRY DATE: 2001-12-06
aagcgaaaaaccgagtttgtatactcgataaattaagactcggcggcgcaccaaaaagctgcgcacacgagcgcgcccgtccattccatgcgctcgccttcgcactcgctgcatcggcgcagcgatggcggtcggtgcaggacaggtgtgagcggcgcaacccgttgggccgcactgacgtcggcgctggtggtgatggcgtcgctcgtggcagtgaccgcggcagcggcaaatgccgatccgccatacccatcgccgcacgtgctgctgccgccgtcgcatgcggcggcggtggtgagcggcgatggcggcagtgcgagcgcgagcagtgcggccgcggacgcgcgtctgttgcgttcggtggcgcgcaacccgcgtgcggccaacccgttcccgtcgtcgctgctgccaccgcgcacgcgcatgcccacagcgcagaagttggaggccgaacgcgccgaagcgcggcagcagatgcgcttcgaagacgcgcgcgaccgcttcgtcgtcactgcgtgggcgccgcccaccggtccgctccccaaacgcaacgctgacagcagcaccgacggacgcggctttgggttgggtttgggtttgggtttgggcttgggctcgggctcggacgatgacgacgccactaccggcggtgacgagcagcaaccgctgcagccgctgcagcgccgcgcgggccgtacggtggagcacaacatcccgagtgcgggtgaggcggtggactgttcgttgggagcgcgcacgatggccgggtgcgtggcgtggcccatgcgctctgcgttgggtgccaccacgcgcttcgcgtccgctgccgcttcgggttacggcgaacaccggcgcgtgcggcgccgtcgtgccgggcggggcgctgccccatcggcgccggcgctcacggagcactacgatgtggtggtggcacgcgtgccctttccgctgcccgccaacgccgtgttcggttcggcggcagaacacaacgctgctgtggcggctgcagccgataccatcgttctcgaggcgtggactcagcccaacccgcgcgatgcgtccggtgcgtatccgctgcagcgcttgcgcgcgtaccgtctcgtacctcccaacccgccgcccgctaccacggccgctgccactgccggttcgtccaccacaacacccgcaccggcgtcggcacccgccgcatcggccaatgcaccggccaatgcaccgaccgcgtctgcgtctgcgtctgcgtctgcgtctgcgtctgcgtctgcgtctgcgtctgcgtctgcatctgcgtcggccaccgaagctgctaacaccaacggactgctcaaacccccgtctgctctgacggcgaccaaaccgaacggcgcagcggcaaccgcagccgatgctggagccggtgccgctgctgctgctgccgccgctgcggctgctggttcgggcgatgacggcggcgcgggtgtggagttcctttgggacaccaccgtgcaggcgcgtcagtggctgcatccgcacgcgtatttggtgcgcgctctcccgtacgcaccgcccgccaacagcagtgtgtccggacacgacggcgtgacacacgacggtgtgacggtggacccgcggcacgtgtggctcgcgtatgcgtcatcacacgcctttgcaccgccgccctcggccgacgcactgcaggccgacgctgcgtcacacgcgtatccgaccgcacagcccgcgccgctgcggctgttgcgtgtggacgtgctgaccggcttcgtgcaggagatgaaggacctgccggtgccgcaggagctgctgcagcccgaccacccgatgcacggcaccggccacggctccggccacggcactggcgctggcgctggcgctggcggtggcggttggttcgtagcgggctctatcacgcggcagtcactggtagcgaacgcgtcggatccgaacaacttgtggtggctctatgagacgctgcagcctctgcgcactgccgaacccgcagccgaacacgacgcgtcgggcagtgccgcgggcaaagtcggtccgctgtttggtgcgccgctcccaatcgtcacccacgcgtcatcgctcgtgtcgcaccacctcgtgaccggcatcagccgcgccgtcagcgcatgggacggcgctgaacgcatcaccaacttcgccgcgctgtggcatgtgggtgcagcgtccgtccccgcagccgcgtgctctgcggcggcgacggccacagccacgcgcacgaccaccggtgcgacgacgacgacgacgacgacgacgacgcacacgctgcagacggcgttcagcaccggcgcggcgcacagcgtggtggtgggcgaagtcgtggccgaacgtgcgctatcgctggccgaactcagacgcctgcgcgcacgcgaccgcgaggcggcgaaacgggcagcgctgaagcccgctgccactgccactgccacaagcggcaaagcacctgcacccggcgacaacgatgacgacagcgacgacgacgacgatgacggcgacggcgacggcgacgatgcggacgcgtctcttccggagaaccggtttgaactgcatcgcatgcacctgcagtacccggtcggtgccgcgccgtcgctggcggctctgcatgatgtggaggtagaggtgggcccgcgcacgcagagcatgcgcgtgtcaccgctgccgccgcgactgcccaccaccaccaccaccactggcaccggcagcggcaccgcctcatcgtcgccgtcgtcaacgccgctggccccagcgccacaacaccgcgtgggcctgcgcttcgaccgcgatttgatcgaaatcgacgaccgtgtgcgtgcgatggaccacgtcacactcgtcggcgcgcgcggaagcaactgtggcgctgcggcaccgccggcggcagcggcatcggcttcggcatcggcttcggcatcggcttcggcatcggcttcggcatcggcttcggcatcggcttcggcatcggcttcggcatcggctgcggcatccgctgacagcactgcgtccatcgcagctgcgggtgtaccggtgctgagcagcagcggcggtgagtttcgcgaatctgatcacacgcatcagcacgtgccggtggggcatttgggcggagttggcgcattggcattcagcccgtcgggccgccacgcagcggtggtgtcgcgtctgctcatccccgagtggatggtggtggacggtcacggccacggccatgagcccgtcacgccgcagcacatgcgtcacgacaggtacctgcgtctgcatcagcaccgccgagcagccacacatgcggccacggcgtcggctgctgcggtggaacgtcatctgtcggccaccgctgccgctgccggtccgtccgccgccgccgctgccgctgccgctgctcacgccgctgctgccagcccgacagctgccgtcgccgcagcgggtggatcggctgtgacgagcagcgacggcgacggcgacgtggcggatggcagtgcggcgtcagcggcgtcgttcgcggtagtgcacagcgtcgtgctggtggtgagcattgcggacacgcgcgcttatcaggagcgcacgtttttcgatgtcgctctgccatttgatgaccgccgcatacaccgcgcgtgcaaccgcgcgtccactctcatgcgcttgcactggaccgagcaacggctgctgctgctcgaactcaactgcggctcagacccgggacacgcgtggctcattgccatcactttgcccgagcattgggtgccggtgccggcgcacctgcgcacaggccataacgcggctgtcgaagcgcttgagctcaagccgcagccactgcccaacaccgagccgctcggagtgtggccgatgatgctgttcatcgcctgcgcgctgctgctgttttacatcctctgcgcatcgcgtgcccactccgcgctcgcagaatcgcactcacatcacgccatcaacgccgcggactaatgcgcggactcatatgcggactcatatgcgcactcgcgcgctgccgcatgtacactctcttgcgcgcacacactcatcccacttgtgctttcggactgtcgcgctgccgccgtaacccttaagccgccgcatccgttgcgcgctcatacccgcctctgcccgtccgcctactcctatcgtctgctgctgcgtgtcgtcttgttccggcgttttttctgccgcccgttcgcttccgtcacgcattcgcattcgcagccgctcgctgccgctcgctgcagcgctctctgccccgtttgcagcgcctctttgtgtccccatcgcctggtcgcgcgccttccactactgcgactgctactgctttgcaccgattcgttctg

SEQ ID NO: 12935 - DNA, 1973 bp, Oryza sativa
  ref <308>: DATABASE ACCESSION NUMBER: AK110283
  ref <309>: DATABASE ENTRY DATE: 2001-12-06
aaaaagaaaagaaatggctgctcaccccaggttcgaagggtggctgtattgcagcagccccaagaaattgttttcgggtggctggaagaagaaatgggtggtgctggaagactttgagtgcaagtgtttcaacaacaaggtgccctccacgcgggacgccaatggcaagcccatcaaaagcgaccccaacttcacgcttcagtctatcaagagcatcgtcggcggtgccatcggcaaagccaagaccaaccgcgacaatggcatctatgttgttgtttccgctgctggcgacaaagcacccacaatttacaactttgcgactgaaaatgcagctgagaataagacttgagtggagaacttcttgacagctcaaaagcatgcattggatcactacaagacaaagtacttccgcttgcggatgattgcaggccgacagctgaaagcgcttgactcgggcggcaccagtgatccctatgtgctggccgacgtgggcggcacgcagtacaagacgcagcaggtgctgaagactctgacgccagaatggaacgaaacggccatctggattctggccagccagcagattccagccacggtgtcggtctttgactggaaccgcattggcgccgacgtggccattggctccatcgtgctgaacctgagccagatgcccagcgacgccgtggaaaaggtggcgtggcacacgctggtcagccccgaccactcgcccggcgctggcgagatccagctgggcatcacgctgggcggcttccagagctcggtggccgaggtggatcccgtcatggacttctacctcaagtacgtcaagcgcggcgctgacggcaagatgatcgtgcagaacctgcccgaagcctgggccatgctgttcgccaaagccggtgtcaacgaggagcagctcaaggaccccaacatcatctccaacctggtcaaagtgcggcacgacgcgctcaagaaccccagccagctggacgccgctccctcgggcaagccgccgcgccagaaggtcatctgcgtctgcacggccgcctacgacttcacgccgcaagtggagggcgatctcggcttcaaagccggcgaaaccatccgcgtcttcgagcaaggcgaaaacggctggtggagaggcaagatcggcgaccgcgagggtaccttccctggcaactacgtcgaaaacatcaagaccaccaggaaaggcaagaagaacatcccggcccgtcccgacaagccagccccggccccgccaggcttcgagcccccaccacccacagagcctgctcccgagccgccaacgcccggcggcgacatgcccaaaccgccagaaaccccggctcctctgcctccctctggctccacctcctcacccacgggctccacctcttctccttcgggcggcattcctcaccacgtgcctcccaataagcccatcccagcgccgccctcttctcctttacctcccatccccaccacacctgcgccgacccccacgcccaccgccacgcccactgccacgcccaccacgacagtgcctcctgcgcccaccgtggtcccgccagcgcccaccgtcgtgccccccgcaccctcggtggtgccgcccgctcccaccatggtgccgccagcgcccacagccaaagtgcctcctcctcctcccccaccaccaccagccccctcgggaggcgccgaaagcagctctggccgcagcggcatgctcaactccatcactgctttcgaccgcagcaaactcaagaaggccgactccaccaccaacgcaggcggccgcgatctcgctgatctcgacgacagccagctcaactctctcgtcggcctgctgtccaacgccatccaaggccgccgtgttgccatcaaagaagaaggttcagacgatgatgatgatgatgatgaatgggaataaatgtttttttaatatcagaaaggttacctacctttccatcaataaaatc

SEQ ID NO: 12936 - DNA, 1682 bp, Oryza sativa
  ref <308>: DATABASE ACCESSION NUMBER: AK110284
  ref <309>: DATABASE ENTRY DATE: 2001-12-06
atagtttctagccggctgcacttgtgcagtccgtaatccacccttttagttgctgcttgatctttcgaatcaaaatcggcctaaggagggcctacgcgccaccctctaggttggatagcatctccagctaagggtgtttttagtagcactctagtagcctagagagaggagcatagctgtagctaagctaaggaggcaggcagcacccatcatggacggtgcttttccttcagagcgcggccagccctttgacaatggaggcaggggccgtgggccagggggtggccgtggcttccgtggcacagcagagaatgccaagacaaaactctgcacgcgctggatgtctggggactgccgatttggagaccgctgcaacttcgctcacggcgagcaggagttgaggtccctgccacctagggacgactttggtcgcggccgtggtggctatggtggcccacctccagccaggggtggctacggtggtggtggccgtggcatgggtggtggttatggtggtcggggcaggggctatgacgactactatggtggaggcggctatggtggccaggcgggctacggtgcaccccaggcgtacggcgcgccccaggacccgtacggtggtggctatggtgccccacctcgcggcccagcggaggacccttacgcacgtcaggggcagccagtgagtgagcccaacggctgggtggcctacagaacaccggacactggcgagacctactaccacaaccacaacaccaacgtgacacagtgggagaggccagcagagtggctgggcccaatgcaagcaggtgaactcctgtttgcgagtgctggactgccagttggttcagcagtgagggtttgagggtgcagcatgcagctcaggtgcactgcagggggtgtcgcttgcaaacgccgcctgctgcctgtcagcagcgtgcagcagcggcagctgcgacgcccagcatgtgagccagccttgcttggttggctccctcagctgctgctgcggtggcgtgatgctatgttgccaccaaatgggtactgtgcgggtatgcaagggcaggtgttctgcctgcttgagaaaggtcacgagccgctaggttgatatggggcttgctgagctgtgggctgggttgggacccatagtacatcatccatctcctgcgggacagagcaaacgcacccgctgctcgtgtttgttgtatgggcagcacttgccatgtgcagggcagatgcgagctctgctggcttcggtggaaggcacatgattgtgttggcatgttgaatgagcactgttcggaggggctgcaagtatccaggttttgctgcatctgaccaaagcctctcagcagatagctgacaagatattgtttgacttccttcatgtgatggtaatttgtgcaccttcaatgtcagagtgcgctgtgtgcacgtgcattggcaaggcccatggattctcttcccccgttggtcggaacatttggtgctcgcctcaagcactatcccgggacaatatttatgcagcggcatcttttggtcgttggctgttgtgttgaagctcaagctggctgcacggcagtaggtcacaagtgcatgggtgcacagtgccaaccaatcgctgctggttggccgaagaccattgatgtggcatctacacaaccgatgtaacatgctgtggc

SEQ ID NO: 12937 - DNA, 2833 bp, Oryza sativa
  ref <308>: DATABASE ACCESSION NUMBER: AK110285
  ref <309>: DATABASE ENTRY DATE: 2001-12-06
acgtgctactcggataaccgtagtaattctagagctaatacgtgcaacaaaccccgacttccgggaggggcgcatttattagataaaaggctgacgcgggctccgcccgctgatccgatgattcatgataactcgacggatcgcacggccctcgtgccggcgacgcatcattcaaatttctgccctatcaactttcgatggtaggataggggcctaccatggtggtgacgggtgacggagaattagggttcgattccggagagggagcctgagaaacggctaccacatccaaggaaggcagcaggcgcgcaaattacccaatcctgacacggggaggtagtgacaataaataacaataccgggcgctttaaatgcaactgcgccatcggaaaagccgcgtgatgcgcgccacacgtatggctctgaatgcagtcagatcgcgatctcgtgtttcactcgccaccaccgtcgaaccgttcggcgaagcgcgatgcagcgcgacgtgcgccactgtgtcgtcagttcagatggcggacagcagaacgcgctgcccactgctgaccgcgctgcgctgtgggtcagcaaacacaaaacaaaagaccgccgttctctggaacccgctgcagtcatcgtgtgccgggcaggcgggtggcagtgacagtgatcaacggcggcggcggtggcggtggtggcgggcatcggcagcacagcggcgggggggccacgtgcgcgcgcgcctgcgccagtggcccaatgttgttgttgtgttgttgtcttcgcgtgtggtgctggcgtgtgtgcgcacgtctctgaccgtccggctgtgtctctcgtgtgtgccgcgtttgcagcgttgtggtgcgttgcgttgcgttgcgttgcgttgcgttgcgttgcgtgcgtgcggatacaaaagggcgcgcggcgctcaccaacccccggaacctgtgtttaggggctcaaccaaccgatcagttcgtcaaccgcccaaacacacggctgtacgacacacaaccgaaaccggaaagcgggaacgaaaaccgaaacaaacgaacgatgagcgtgacggtgggcagcaaaggcaaaatctcaccgcgtgtgccggccggcgccgtcatgggcgctgccgccattgcggccgcacaacagcaacagcaacagcagcaacagcagcagcaacagcaggcgggtggtggcggtgccgcagcggcaagtccgcacacgccgcacacgcccggttcggcatcgccggtgcgcggcagtccgcaaatgcgtccgtcttcaggcggtggtggtggcatcgtacccgcactgcagctcggcggcacaccgcacgcacagggtcacccgtcgccgaccaccaaagccgtgcacaccaccacgcccggtcgtgtcagtgccgtgacgggcaaaccggtgtacattgagcgccgcgacagcaagcagtcaccgtcaccgccctgcggcgggctgttggcgccgcccacgcgcctcttcgaacggcgcaacagcaccgacggcagtgtgttgcacgagtccaaagcgtcgcgcacgctgtgggacacggtggaagcgttcttcaaactcatcgatttggacggtaacggacgtgtggacgtgcacgaggcccatcacagtttgaccatttgtatggcgtcgattcgggcgacgggcaatacgcgtttggaggaggccgtcaagaagcaggtcgagtggctgtttcagtcggctgacgacaataaggacaaagtgattacgttggacgaattcctgtcgtgttaccgcaaactcctgcgcgccggatacgaacccgaggtgctgcaattggatctgaacagcgccatccaatcgctgtcccgttcgcgtcgcatgtcactggccaccgaaaatgcgttttttgcaaaagtcagcaaactcttccacctgttggatgccaatcgtgacggtgtcgtgtccattgccgaagcgcgcgactcgttgcggctgtgttttacggccgtcaacgaacacaccaacacccctcacagcagcacccacagcggcagcggtagcaacagcaaaccgggcactccgacgggcgcaggtgccgccgcaggcgctgctgccgccgccgcagcagtagcagcagcagcagccggtgccggagccggtcacagcagcacagcagcagcagcagcagcagcagcagcagcagcagcagcagcagcagcagcagcagcagcagcagcagcagcagcagcagcagcagcagcagcaacagcagcagcagcatcgtcggccgctgccggatcgtcatcgtcggcagcagcatcctcctcctcctcctccgcatcatcgtcatcgtcgtcgtcgtcgtcgtcgtcatcatcatcgtcggcgtcgtcaccgcacaccccgtcatcacccggcggcgccgccaccacacccgtcagtccgcacacgcgcgacgacatcgtcgacaaacaagtcgcatggctgttttccatggccgatctcaatcacgacaaagtgctgcaagagcacgagtttgtgggtgcgtacaaaaagttgttggcagccaaatatgaaaaagaagtgttggagttggacctcgatcgggccattgcggcgttggagcccatacgcaaagcggcggctgcggctgctgcgggtgccggtgccggtgccggtgccggtgccgcaggtggtgcatcgccggcccatcatgcatcgccgtccaaaccgccgccgcacggcaatgcgccgtcgggtgcaccgaccgccgcggcgggtggtggtgccgccgcggcttcggccaagtcaccggccaaataacaaaaaatgccgcgagagg

SEQ ID NO: 12938 - DNA, 2349 bp, Oryza sativa
  ref <308>: DATABASE ACCESSION NUMBER: AK110286
  ref <309>: DATABASE ENTRY DATE: 2001-12-06
ccgcagcgctagctcgcccgcagaccaacaacaccccactatcccgactgtctacccttcaccaccgccacctcacacccgcttctctcgtcaaatcgaaggtctgctgagcgacaaaccggagctgaaaggctgggccgacaaggttaccgcactccggaccaaataccaaaacgcactgcacacgaaaccgcacgtattgattgtgggagcgggacccatgggcctcaacactgcgatgttgctcgtgatcgagggcaactaccgcgtcaccatcgtggagaagacgaacggactggactcgcgctggaacggcatcctcgctgatggcgcgctgtacgagatgttcgctcgcgagctcgacctcaacctcgacgccaacccatcgcagaccacctggatcgggacgttggcggagtaccagctggtgatgggcgcgacgctgacccatatcggagtggagattctctataacaccatgtatctccaaacctgtgtcgaccctcgcggcgaaggccacaaccaggtgcacattgcacaaacgcccaccgacgagacgctcagaaggaagatttactccgaggctgagctgtgcgctgctgctgctggaggcctctcaccgcctccgctgcctgcgggactgcaacaccacgcggtggtgcaggacgtgaagatcctcatcggcgccgacggcactcacagtgcagtacgatccacagtgctgaacaacgcgcgcatgccgcccgagcgtgtccccagcacgggtcgcgctcgttccagttcagcgcatgctccctctcgtctcgtcgctccagtttctcctatcgcccatcatgcagctggcgatcacgctgtggctgctgctgctgcttcccccggttctcctcgattcgtcgctgttcatgatccaccggtggctcgactggagcgacaacactcggctcctgtgctactaggtggacaccatcatcccgcaccgcctgctcccccacccgctgcagcagtagccgaaccgttccctgaggtgcggtccgtcacgctgcctttgctccatcacaagcccgcggtcccactcacgctgcagaacccgctccccgacagccccatcgagcccctcatgacgcatgtgattctctctttctccacgggtctgccccatccgctcaactcccccgacactcagcctccgtctcctgtacctggcgaggcagagctgtctgaggccgacatcaaagacattgaagaggcgctgaatatcgatccgcgagtgacgcgcaaacccggaggtgctggcggctttcgcgcgacttcgatgctcaagacgcaagacctttcgtatgaggaggtcactgagctggtgtcttccacgatgccgcacctctctcgctatgtggactctcacggcgtggtgcgcacccgtctctacgtcgagttcctgctgcgtcaccgtgcttcggccgcgtttcgagaggtgtatggtcaagtcatgaagaacccgtccatctttatgagcgtgaagggcaagaagatcgtgccggatgacaaggaacagcatgagatctcggacaagaagacgattagcaacgtgcaggccgcactcgcagagaagctcttccccttcatgttctttgtcgtgaagcagatgggccagcactcacccttcgccgccaaagtcgaacagctgtttggtgcgggagagaagcccgagcacagcccgcgagtgcatgcggaccagaagttccttcaccgtatcgagaaggtcaagatctacaaccagcaactgcgagctgcctctcaagtggccactgctcgtcctggcttcattgcggtgttggtgggtgatgctacgcgggacgcttactacgcatacggcaactcgatcaacagcgccttcaacgccttcaaacaacactacctccagctgttcaacttccgagcttatcccaacattgctcgcacctatcacgaagccgtagtaaccaagttcgtgaacttcatcggcagtgacatctacctccgcaacttctgtggttgcgcgttccgtacattctctgtgtctgaactgcgctatgggcaggtgatgtgcctctctgcgcctgggagcaacagaaaccccttcaaaaccctggctcctccagcgaaggccagcaacaagaagagcaagaaagcaaagaaggaggccgacgcggctacgtgtgatctcctggagctgcagaccacaaagacgacggacgaggtggcgaagtgcacctttggggatcctcacgcgttcaaaatggtgctcaccgcctctcagatctgtgatgctgtttaaatgtggttcgtaaatacacttatcacctttttgtc

SEQ ID NO: 12939 - DNA, 2718 bp, Oryza sativa
  ref <308>: DATABASE ACCESSION NUMBER: AK110287
  ref <309>: DATABASE ENTRY DATE: 2001-12-06
aactaacgctaaaaaagtaacagtttctgcactttattgagttcttgtcgattttcgaaagaggggggcttcaagtaagtgagaaccatgcgcccaactcagcagcaccacggccacgacaacaccgccgtcctcgatgtcgcagtgaccttcctggacacctactaccgccagctcttcacggatgcctccaagctcatcccatactacacctccaactgcgccttccagcacgaaggcaccaaggccatccgcggggacgtccaggccgcgctgtcgacggcttccaattgggtcggccgccgcgtccacgttgctgatgtggttcccttcaccggcgtcacggaggctaatgtcgtcagcttcacggcgttcgggacgatgacggacgcgtcgggctcgtggcagttccgccatgatttcgaactgcgccttatccccggctacggagtgaactcgtacgcgattcagtcagacttgcttcacaaccaggatcgtcctcacgtgaccgtgtccgtgaacgtgcccgtgccggttcctcagcagcagcagccggctccggcgcagcagcagcagcacgcgaccagcagccaggcgcctccttccgccttggcgagtgccatgtcgacgaagagcaagggccccgcgccgaagccgtcccaccccgcggcgcaccaccctgcgcctgcgccccaggccactcaacagcacgcccccgtcaccaccaccgccgttgttgcgcccaagacgacgacggcggatgaccacctcgcgcctccgccggtcgcggccccgaaactgagcgacgcgtggtccgctgaaacgccgcccatgttcgcgcagaaggcggcagcagttccgccaccgatggactttgacgatgcgcccgctgtggctcccacgacgcagccaacggccgcggccaatacgacctcccccgtccccaaccgcgcggctaagaacgctccgtcgaaggcgccgcccaaggcccgcgtgcagccccccgcgtaccgcccaccgaccgaacctgcgccggcgcccaccgctgcccccactcctgcgcagcccaccgcgacgcaacagccaacgcctgctgtggtggtgaaggctgagcccacccccgtcgcggtggcgccggtccctgtcgtggtgtctgtcaagaccaacccgccgccggccgttgcgactacgaccgctcccgcgaccaaggccgctgcaccggccgctgaggctgccgcaccggccaaggccgcccctgctgtggttgccgaggctgcgaagaaggaagcgacccctgccgtggtcgaggccgctaccaagcccgccgtcgccgccaccgcgaaggcagtccctgccgaagcgccggcgaagactgctgcggcaccgaaggcgtcgactgccggcaccagtggcgagtccaagcctgccgccacgaccgcgacgacagctggcaagaccaccgccaaacccgcggaagccgcgaagccctccgccccggctgcgacgacgacgaccgaaggtggcgccgcgcggaccttcgctgatctcttccgtgccaagaaccagagcaccgctgccgcgcccgctgcgaccactgaatcgtcgcagcaggcttccgccactgccacgccccctccggagcccacaagcgctgcggcgtccaccgacagccccaagtcgcctccgtcgacgccggctgtcgcccccgttgcggccgcgcccgtcgagacacccgctgctgtcgccaccgccaccgccaccgccgcgcccgcggcccctgcggctaagcaacagtcgcctgaggcaaagcccgtgagccctccgacggaggcaccggctgccgcggaagacgcgaaggctcctctcgcggagcagcaagcggcgacgaccactgaggctgccgccgccccagccgccgtcgcagacgcgaagcccaagaacgcgtggtcccgcggtgcccccaccatctccgccacggacgcgcccaagcactcgggccccgtccaggtcgtgacggtgccggtcagctccagcaagccggcggcgacaggcgacaaggcagccaaggaaggtgctgctgcggccaagacggacgcggccgccgccaccgacgacaagaaggcgcctgcccccggtgcgaagcgcacggcggcgcccggcgcggcgggccctcgcggtgcggacaagcctggtggcctcgccaactcggtgaatcactaccacgtcttcattaagggtcttcccgagtcctgcacggaggctgagatcatcgagctcttctccaaggtcgcccctctgaagaagggcatcaagatcgacaccaaggcgatctccgagaagccgcgtgacgggtcggaggctaaggccgtggatcgcatccgcaccttcgctttcgcgtgcattgagcacaaggactcggcggaccttgctgccaagctcgatgccctgaaggcgtcgcgcctgacgcacgcccgtagcggggcgcgtatcttctgcgacgaggtccacgagaagcccgtcttctcgcaggacacgcagccagcggcggccgcacagccggctgcgggcggtgccggtaacggcaacaagggcgcggcgactgcgcagtctaatgccggcgcgaagaaggcggccgactccaccgccgcaaagaagtaagttattcgcgatcggtcgccccacccctgtgatgagtgtgtgtttgtgtgccctctctct

SEQ ID NO: 12940 - DNA, 3508 bp, Oryza sativa
  ref <308>: DATABASE ACCESSION NUMBER: AK110288
  ref <309>: DATABASE ENTRY DATE: 2001-12-06
ttctcgacctgcagtcccaaatccggggtatgctgtgccggaaggtccagggtgatttgctcgacgagctcaactcgcacgaggacgcagtaactagcctgcagtccaacatcagggctatgctggtgcgcaacaacctcgacacgctcctggcagagctcgagggagaggagggcatggttgtggctctgcagtcggccatgaggggctttctggtgcgacaaactttcgcggagaagaagcggcatttccaggagaacatgtccaaggtcatcaagatccagagctttgtccgtgccaagatgcagggcgaggcatacaagagcctgacgactggcaagagtccgccggtcagcgccgtcaagaactttgtgcacctgctcaacgacagcgacttcgacttcaacgaggaggtcgagtttgagcggatgcgcaagacggtggtgcagcaggtgcggcagaacgagatgctggagcagtacatcgaccagctggacatcaagatcgcgctcctcgtcaagaacaagatcacgctggacgaggtggtgcgtcaccagagcaactatggtggccatgccagcagtctgctggccaacagctccatggcatcgaccaaccagttcgacctgaaggcgctcaacaagaactcgcgcaagaagctcgagtcgtaccagcagctgtttttcaacctgcagacgcagccccagtacctatcgcggctgttccgccgcatccgcgagcaggccatgcccgagaaggaatgcaagcgcatcgagcacctcatgatgggcctcttcggctacgcgcagaagaggagggaggagtactaccttctgaagctcatcgccaggtcgatcagggaggaggtcgagtgcagccgcacgctgaacgacttcctgcgcggaaactttttctggtccaagctgctcggcagctacgcgcgctcgccccgcgaccgcaagtacctacgcgatctcctcggtcccctgatccgcgacaacatcgttgaggacccggccctggacctcgagagcgaccccgcccagatctaccgatctgccatcaacaacgaggagttgcgcaccggccgtcccagccagcgcccgctcgacgtaccgcgtgaagtggctatcaaggaccccgagaccagggagctgttcatcgaccaccttcgcgacctgcgcgagatctgcgatcagttcctgcttgcgctcgaggacctgctgccccgcctcccttatgggctcaggtacatctgccgacaaatgtttgaggcgctctgccagcagttcaagcgcgagccccagcacatcctgctgcagatggtgggcaactggttctggcgcttctacctgcagccggccctagtggcgcccgagaacgtgggcgtggtcgagaccaagctcagcccgctgcagaagcgtaatctgggggaggtggccaaggtgctgagccaggttgcctccgggcgcgcgttcggcggggagaacatctacctccagccgctcaacgcgttcctgggcgactcgatcgctcggcttacgcacatcctgggcgagctcatcgccgtaccggatgccgaacgcacgtttgacattgacgagttcaacgatctgtacgccaagaaccggccgacactctacatcaagctcggcgacatcttcgccatccaccacctggtctcgtcggagctggcgaacatttgcccgaaccgtgacgacgtgctgcgcgaaatcatgcaggagctcggtagtgccaagaacaacgagagcgagatgacggccaccggctcgtccgacatccagatgttcctgacccccaagctgcacgacgtcgaggacccggacgccgagatcaaggcgctcttcatggagacgaagcggtgtattctgtacatcatccgggtgcagacgggctcgactctactcgagattctcgttaagcccgtgacgcaggaggacgaacacaagtggctgacggtgctccacgacgactttgccgacggcggcggcacgaggggcgcctactcggacgtcaatatggtggacgtgacgcgtatgacgtacctcgatctgaagcgcaccgcgctcgagaacgtgatgcggctggagcatgccggccgcatctccaagcacaaccactaccaagacatcctcaacgccatcgcgcttgatatccgcacaaagagcagacgccgggtgcagcgccagcgcgagctcgagggcgtgcggctgacgcttaacaacctgcacgagaaggcaaagtatctggaacagcagcgcaagagctacgatgattacatcgagcaggccatggcgacgctccagaacaggaagggcaaaaaacgattcctcctgccctttaccaagcagtataaccaccagcgcgagctggagcgcagcggacgggtgcccaagttcggctcatacaagtacagcgcgcgggcgctgatggacaagggcgtgctcgtcacctggtccggcgctacggagcgcgacctcgagaagatcaacctcaccatctcgtgcgacgaagtcggcatcttcaacatcgagggctccaggggccatatccagatccccggcgccagtgccctggtgcccatcgaggacctcctgcaggcccagttcgagtcgcaccagttcatgaacctctttgagggcaatctgcgcctcaacgtcaacatcctcctgcacctgctctacaagaagttctacaggacacagtaaaataccctttcggctgtgtttctggacttggtgcggctagagatctcgcctcttaacccgccattctttctctctttttcattacgtatttttctttgggaatcttctttttgtggtatgcctatttgctgccacgtctgctggtgtagtcatttgtccatcggtgtggtgttattaggatgaagcccctctttttgatattcttctcttttttccacgatatgatgttggtggcttgcggaagggaacaggggaagggagcattgggtcgggtccaagatcacgaagcaacttacacacacaaatcatcgtcacataaaacggggaaggagctgatggtccaagttttcacctctttacgcttaagcctttttattcttcttttctcttatttttttcggctcacttggcctacttcccgtcctcgaccatcctcctgcatttcttcacttctctttctcgtctctccaagtccaaggtgttgcatctctcaggatccgggacctttttctgcgtgtatcttttctccatcacaaaacccctcactgtctgaacaatgatgaaggattagacctggcaaacatatctaccccaaaacataggttagatagatctaaagaggagggaaaatgtctctgatacggacgagtcgtctactactccctcccttactctcgcactgggtacccatccttctatggcaaacaactttgacaaagtgagagaacaggaaagttagagtgtggatcatccgtgtcaagaaaattcatgtggtaacg

SEQ ID NO: 12941 - DNA, 2747 bp, Oryza sativa
  ref <308>: DATABASE ACCESSION NUMBER: AK110289
  ref <309>: DATABASE ENTRY DATE: 2001-12-06
aaaaaaaacaggaacaactctaaacacagcagggacaaaccgtgccgttgttacaccgggcgactgcccaccggttttcacccatgtaataagtttcacccatgtaataagttttgccttttatggattttctgaggcagatccattgagagtggtacaaagctacgcgcacgggtgtgcttccaacctgtgttggctgacttgagcaatccagcagcactgatggcttctcagcacttgtggttgttcttcaaccctcaagagatcccaccggcctttaccacccctgatgcagatgttgacaaggctgcaagggagaggatcttgcttcttgcaaagtatgttatgcagaatggcacctcgttcattgacatggtcaggaccaagcaggccggcaacccagagtacgactttctgcacccaggaggaaaaaacaacgccttcttccgctgggccttgtatgcaacaggctgtggcatatcagtagaccagccgccaccagagggctttataccccccacaccccagcctgcgccacagcagcaggcccctgtacaacagcactacatgccccaagtgcagcagcagtttgcgtatgcgcagcagcagccgttagcgatgcagcagtaccagcagtacccgccgcaagcacattaccagcagccggtgatgcagcagcaggcacagcagcagcagccgctgcggccgacgccgccgtccatacctccagaagtagctggtggctttagtcaagtgctggatgcccttacaggcagcaaggactccatcaaggccagccagggttggttcatggcctgtgctccctatgctgctggcatggcttacatgatggcatcaagggcctccacaacgccagagtttgacaagctgctgcaccttatctacttagcaaacgacatcctgttcaaggccttcacgcagcagcagcagcaagcccaggcagcgcagcaggaggacgggcaacagcagcagcagacagaagcagccaagatgtgggcgtcaattgctgctgcgtttgctcctgcactgggtgtcatgctggcagcagcacaggcggctgcagcaagcagcggcaatgatgctgggcgggacaagctcagcaaaatgctggcattctggcaggacaaaggactgtacgatgttcatgcaatggcacggttccagcatgaaatggcagcagcaaacgccacagcgtcactgctgcacaactatccaccaccagcagcagcggcgccgccgccagaacagcagcagcagcagcagcagcagccagcgccggcttcagggggctggggctcaatcccaacagcagcagcagcagcagcttatgcaccacagcagccgccatcttctggctggggccctcctccagcagcagcagcagcaccagcaccagcaccagcagcgccaagcgggtggggtccgcccccagtacagcagcctgctgtaccgccaggctggcctgcagcgcctgtaccgcctgtaccgcctgttggcatgccgtgggcgggcgcgtaccctggacaccctggctacccaggcagtacagtaccgcctggcatgcaaaccccggcttacccaggtgctgtagcgggtgcggtaccaggtgctgtacctggggggtaccctcctgccggtgtggtgcctgcagcagcaccaccagcagtgccacctccaggtgtgccgctaggtgtcccgccagcagccccccaatctgctgtgcctgctgctcccggcacgccagagcctgagccggtgagctccttccacttccctcccggcttgattccccagctggtgcgggacaagagcaagtacagtgagccgtacgccccgatggacccactggagatagaccgggcagggctgccgccacctccagagaaggacgcctacctcaagacgcgcgttgacaagttcttgctggaggtgcgtgactacaagcccggcacttcccgtgctgacctggaggaggcacgagcagcagcacgcgcacagcagggcctggagccagacagtgacgaggagctggcgctaggcagcactggcagccgcatggctcggcgcaaggcgctgggcctgggctctggtgcagaggggcggcggcgccatcgctatgtggcgggcggcatggcggacgatggcagctacgttgggcctggcggagcccgtggggagcgcttgggtctgggagcacacagtcaaggccaggatgcagctgcggcgctgggtgatgtgtacagcagctatcgcaaattgcgcagcacttcgtatcatgagatgactgttcggggtgtagggcagtccaatgtggccaagggtggccactgacgggtgtgtctgctctgctgaaggcactcggatgaaaagctgcatcaaccgccagctagtagctgctggtctgaccactagctctttggtctgaccactgcattggaggcctagctttttgtctggaactgggacatgttgtgtttttctggtgtgcagtgcgcatcctgggattctaaagctggcgtctgttgaaaacacaaaggctgttgcgcctgcacgcacaccaggtggcaccactctggcggtacagctgtagtggagcacagcacagggccccacgtggctgtacagcagtaaatttgcgtagtagttttgcaacttgaacttatttttgttgttgttttgttcatactttctgcactcatatcgttgcgatgtaaccccttacacct

SEQ ID NO: 12942 - DNA, 2399 bp, Oryza sativa
  ref <308>: DATABASE ACCESSION NUMBER: AK110290
  ref <309>: DATABASE ENTRY DATE: 2001-12-06
aagcgaaaaaccgagtttgtatactcgataaattaaggcgaatacacagatatgtgtgagagcagcaacgcgatttgctgttccccgaagggcatgcgcgcgtgggccacgacgctgctgctgctcgcgatcggttgccttacggtggccattttcgtgccgcgagtcattgataaggccgtggacgacggcatcaacgacttcgtcgttatcgacgcgcaggcgcaggcggacaacaacaagtactaccgtacgtacactgaccccgacgaccccgactcgacggccgtgtactacagcgtgtatatgttcaatctgaagaacgcggagcaagtgctgacgggcatcaaaccggactacgaggagaagggcccgtacgtgtaccgcaaaaaggtgtacaaacgcaataccgtgttcggcgccgacgtgtatggtcgcgccaccgtatcgtaccagacgcagacgcagttcatctacgatcaggctcgttccacgcagaccggcggtgagggcgatcccattacgaacgtgaatctgccgtttcagctgacgaaaggcctcggcgccgccacgcacggctcactgtacggctacgcttacaacgcgcgtttcggcccgctcgcggaccgctaccgttacttcacgacgcagaacgtgtcggcgtggctgtgggggtggccggaccaggtgctggccaccattcacggcttctacccgtgctgtaccgtatcgtcgttccccgggctgttggggccgaacgagaacgtgctcaacccttcgcagccgcaagacacgctcttcgtcggctccaaaccggaggtgtcgctcattcgtcagtacatcaagtaccagggcatggactcgatgcagacgttcacgtttacgccgcccaccactgtcacgtacccgccgacgtggaagtcgggtttggccaaccgcgtgttcggcactgatggcactcagtttgcgcgcggtctggaggagggcgctatcatcaacgcgtacgtgtcgcagctgacgcgcacggtgacgctcggtaatgtgaacaacgaaaaggtgaagtttaagaacatcgatatgctgcacttcacgctgcccgacatatacctgggcaacgccacggagtaccctttcaacggcgacttctacatgctgggctatcgcggtatggcaaacctcacggccaccggccgcggcgacttctacgtatccaaaccgcactttatggacgccgcaccggaactgctcgactccatcactggcattccggccggcacgaaggacgcgcacgacacgtacctcaatgtcgagccgatttcgggcgcgacgatgcaggccgccaagcgcctgcaactgtcggtgcgtattacgtcggagatcgcgattgtggccaactcgacggtggcgccgatcggttacgccccgcagcagtggggcggcgcgctgcccaaccccggcggcatgggtcagtacatgcccatttactgggccgaggagtacggtgaggtgtcggactcgtccgctgacgccttcgtcgcgggtgtgtacggcggtcagaaagccgctatgggcatctacatcgcgggtgaggttgctgcctgcgcgctggtggtggctgcagtcattatgtattgggtcgccgccgccaaggaccaggccggtactggcagcacgcgcctctaatgcgctgctcaatgcggtgtgtcacggcgatcgcgtgcgtcgcagcgcgtcggctctgcggtgtcgcacacaccgccgtgtcccgtgaccgacgccggcggcgttaggcgtttatgccgccgcgcgtcgtgcgctcctgattgtcactgcacctccagccactcccactgcactgcactgcactgcaccccaccgccaccgccaccgccacccgtcgcgtagccgcttcgttcggttgcgcccattccgcgcccagcgcttggtccacaaattcgcccctctcaccgcactgcacactggctctgcactcttctgctgcacttcctgcgtgccgttgcgctgttgcacttgtgttgtggatactgctgttgtggcagttccctcaggcgcgtgttcctttctgcccccatgcgactgccgcgcatccattcactcgtcccatttatcgcgtgaatcgactccctgacccgccactcctttcgctgtcacttctttccggtgatttcccttgcgcctgctgctggttcggcccgccgtctccttctctccgcccgtactgctgctgacccgactcagcggcatgctctcgcttgcgtgttccgcgtccgtcgtctcctgcattttgtcgccgtgtaattgccacgcgtgctttcgtttgtttatcgcccgaaccgatacagccgctcgttaacctcaacgaaaacgacttctggacc

SEQ ID NO: 12943 - DNA, 2695 bp, Oryza sativa
  ref <308>: DATABASE ACCESSION NUMBER: AK110291
  ref <309>: DATABASE ENTRY DATE: 2001-12-06
acacgacactgtcgacacgccatgcgccagccacagctccgcgccgccacctcgcgcccgctctcatggcgctccaactgcacggctgctgcggcgtccgcctcccagccgagcgagccgctctccgcccacttcaccaacggccggcccctctcgcgcgccccggccgtggtgagggacctctcctcggtgctccgcgcgatcctcgccgcctccccgtcctcccacagccgcgcgtacccgctcctcaagtccgccgccttcgacgcccgcctcgcgccggacgcgctcgtcgacgccgtcctctccgccgtgggcggcccggggtcacggcaggccaccgcgctcctcagccgcctcctcgcctccctgtgccgcgccggccgcgctggcgcggccgccgccgcctacgccagcatggaggcgcgcggggtcaccccggacgccaagtcccgcaccgacctcctcgccgtcacggcgcggagcgcgtcggccgcggacgccctcgcgctgctcgccgagatgcgggggaaggggcgccccttggacgcgtggatgttcgacgtggtgatgcgcgcttgcttcaaggaagggatgtacgacgacgcggtcaggctgttcgacgaaatgcctgcctctgagatcgagcccgaccagcgcgtgtgctctgtcgctatcgcgtccctatgcaagctgcgtgacgccaaccgtgctctgctggtgctgaggaagatgcaggatgcggggttcgtgccgtgggacttcacgttcaactccgtggtggatgtgctcgtgaagggagggaggatggaggaggcgctgcacataaaggatgagttgcttgctacggggaagaaaatgagtgtggttctcgcaacaacgttgatgcacggctgttgcttgcaacgggaggttaggaaagcgctggatatattcgaggagacactaagggacggtctggtaccaaccgatgtaacatatacggtgctgatcagaggttgtactgaagaggggatgccagagaaggcctatgagctgtaccgccagatgagagatcatggattgttgccgagcacaaatgagttcaatatggttatcaaaggccttttgaatgataaattgtggaaggatgctgtaagcttgttcaaggagatggctgattctgggataccagatgccttcacatacaatatactaattcactggctctgtcagcgtcgcaaaattcgcgaagcgcttaacttgtgggaaaagatgaatgaaacaggagtgaaaccatatatcgtgacataccacagcttgttgttgtgttattgtgtgaatgggtgcatggatgaagcagtcaagctgtacactgagatgcctggaaaagggttcacacctaatgttgtcacttacacaacgctgatgaaagggcacataaataaggctgcttttgacaaggcttatgccctccttgctgaaatgaaacagaatggagtctcttgcaatgattatacatacaacactctcataaatggcctttgtgtggttggccgagtttgtgaagttggtgaaatgctgaagagatttgaaactgaaggttttgttccaactgcaatgacatacaatagtatcatcaatggatttataaaagctggcatgatgggctcagcatttgctgtgtatcagcagatgtgtgcaaaaggcatacctcccaacatagtaacatataccagtttcattgatggatactgtaagactagttgctgtgacctggcactgaagatgctaaatgatgtcaggtgcaaaggccttcgacctgatatcgctgcatataattccttaatatttgggttttgccaagaggggaatatgtctcatgcactgcaagttcttgtccttatgctgaaagatggtcttttaccaaatatttcagtctacaacagtttcattacagggtacaagaatttgaaaatgatggaagaagctttgagattgtacgagaaaatgattaaagaaggaattgatcttgatacagcaacctacactaccttaattgatgggttctcaaaagatggcaatgtaacctttgcattgaaactatactcagagatggtggctaagggtaatattcctgatcatattactttcacagcattaacacatggtctttgccgcaacggagatatcgatgatgctagaaaattattggatgaaatgaataggttagatatacgccctaatgttttgatgtacaacatgttgataaacggatacctccgtaatggaaagctgcaagaagcgttccggttgcatgatgaaatgcttgaaaggaaaattatgccagatgatacaacatatgacatactagttggcatgaaatctttgggaagtgacagtcccattgacgcggagaatcctaatttaagttccacaggataaggatcaagagctggcttgagaagattaaactttccattgtatggccagtgtcagattatgagttttgctatatataaagtgaaatcttagctatggcaaatagaagcaaaggtaagcattgagattcagttactaacaagaattcaccttttattattatgtaatctctattttaccattggcactttgtgattacttctgtactatacattaatttgtgtccaatcaatgtacatgattttccctttttggtattattgttgaacttcgc

SEQ ID NO: 12944 - DNA, 1588 bp, Oryza sativa
  ref <308>: DATABASE ACCESSION NUMBER: AK110292
  ref <309>: DATABASE ENTRY DATE: 2001-12-06
atcacacacacaccatctcaattctcaacctttagtagtacaagatcgatctaaacagcctgcataggtcgacctagccttactgcaggctgctcgatcgtcgtagctaattattgtgatcgagagaattaacgaatacttagagttattagagaccagttaagagtggtaggcatggtgggcatgaagaagaatagtgtgggcttaggtcgtcttagcctgatgatatccatggttcaggtgttgggggccgtcggcggcggcggcgtccatccgagcaagatgcggctggtgccggcggtgtacgtgttgggcgactcgacgctggacgtcggcaacaacaaccacctgccggggaaagacgtccctagggccaacaagccctactacggcatcgacttccctggctccaagcccaccggacgcttcagcaacggcttcaacgccgccgactacgttgcaaagaatctgggtttcgacaagagccctccggcctatctggtactcaaagcacgcaactatctcgtcccggccgctctagtgatgggtgtcaactatgcttctgccggagctgggattctcgactccactaacaccggacgcagcattccactgtcgaagcaggtggtgtacttgaactcgacgagggcggagatggtggcgaaggcggggtccggcgcggtgagcgacctgctggccaagtccttcttcctcttcggcgtcggcagcaacgacatgttcgccttcgccgccgcgcagcagaagctcaaccgctccgcgacacccagcgaggtggaggccttctacacaagcctcatctccaactactcggcggctatcacggagctgtacgggatgggcgcgaggaagtttgggatcatcaacgttgggccggtggggtgcgtgccgagcgtgcgcgtggcgaacgcgacgggcggctgcaacgacggcatgaaccagctcgccgccggcttcgacgcggcgctccgcggccacatgtccggcctcgccgcgcggctgccggggctcgcctactccatcgccgactcgtacgcgctcacgcagctgaccttcgccgacccgggcgccgccggctacgcgaacgccgacagcgcgtgctacggcggcgggaggctgggcgcggaggggccctgccagcgcggcgcggcgctgtgcggcgaccgcgaccggttcgtgttctgggacagcgtgcacccgtcgcagcaggccaacaagctcggcgccaaggcctacttccacggccctccccagttcacctcccccatcaacttcaaccagctcgccaattacaacagctgatgctcatttatttatatatattgcttctcatcgatgatatatatacgtggtcactgatgttctttctttctttcatgtttttttcctagttttagtcttggaatttcagttaaattgattcatcattcatgtatatactgctgtacaatatatacatgttgctctattcagctcggtttgattatgagtactgcaaatggaagtgtaataatcgatccatcgtggctagaggccagaaaaataatgataaaattgatgtgcttcactt

SEQ ID NO: 12945 - DNA, 3272 bp, Oryza sativa
  ref <308>: DATABASE ACCESSION NUMBER: AK110293
  ref <309>: DATABASE ENTRY DATE: 2001-12-06
ggctgcgccgaggcggagagggcggccttgctgtccttcctcgccgaggcctcgccgccggcgggggatgccatcgtcgccgactggcgaggatcgccggactgctgcaggtgggatggcgtggggtgcggcggcgcaggcgacggcgatggcgcggtcacgcgtctgtcgctgccgggacgcggattcaacgggacgatctcgccgtcgattggcaacctcaccgggctcacgcacctcaacctgtccggcaacagcctcgccggccagttcccagaggtgctcttctccctgcccaatgtcaccgtcgtcgacgtcagctacaactgcctctccggcgagctacctagcgtggcgacgggcgccgctgcccgcggcggcctctcgctggaggtgctcgacgtgtcgagcaacctcttggcggggcagttcccgtccgcgatctgggagcacacgccgcgcctcgtgtcgctgaatgccagcaacaacagcttccatggctcgatcccctccttgtgcgtgagctgcccggctctcgccgttcttgacctctccgtcaacgtgctcagcggggtcatctcccccgggttcggcaactgctcgcagctgcgcgttctcagcgccggccgcaacaacctcaccggcgaactccccggcgagctcttcgacgtgaagccgctccagcacctgcagctcccggcgaaccagatagaaggccggcttgatcaggatagcctcgccaagctgacgaatctggtcacgcttgatctgagctataatttgttcaccggtgaattgccggagtcgatcagcaagatgccgaagctggaggagctccggctcgccaataacaacctcaccggaacgctcccgtcagcgttgagcaactggaccagcctccggttcatcgacctccggtcgaacagcttcgtcgggaacctcacggacgttgacttctccggcctccccaacctcaccgtcttcgacgtggcgtccaacaacttcaccggcacgatgcgaccgagcatctactcctgcacggcgatgaaggcgctgcgcgtcagccgcaacgtcatgggcgggcaggtctcgccggagatcggcaacctgaaacagctcgaattcttctcgttgacaatcaactccttcgtcaacatcagcggcatgttctggaacctcaagggctgcacgagcctcaccgcgctgctcgtgtcctacaacttctacggcgaggcgctgccggacgccggctgggtcggcgaccacgtcaggagcgtccgcgagattgtgatgcagaactgcgcgctgaccggcgtgatcccgtcatggctgtcgaagctgcaggacctcaacatcttgaatctctccggcaaccggctcaccggcccgatcccgagctggctcggcgccatgccgaagctgtactacgtcgacctctccgggaaccagctgtccggggtgataccgccgtcgctgatggagatgcggctactgacgtcggagcaggccatggcggaattcaatccaggacatctcatcctgatgttctctctgaatccggacaacggagcggcgaaccggcagggccgcggttactaccagctgtcaggcgtcgccgcgacgctcaatttcggcgagaacggcatcaccggcacgatctcgccggaggtcggcaagctgaagacgctgcaggtgttcgacgtcagttacaacaacctctccggcggcatcccgccggagctgaccggcctcgacagattgcaggtgctcgacttgcgctggaaccgcctgacagggacgatcccttctgcgctcagcaagctaaacttcctcgccgtcttcaacgtcgcacacaacgacctcgaggggccgatccccacgggcggccagttcgacgcgttcccgccgaagaatttcatggggaacccgaagctttgcggccgggcgatctctgtgccttgtggcaacatgatcggcgcgacgagagacgatgatccggacaagcacgtcgggaagagggtcctcatcgccatcgttcttggtgtctgcattggcctcgttgctctggtcgtcttcttgggatgcgttgtgatcaccgtcagaaaagtgatgtccaatggagctgtccgtgacggcggcaaaggcgtggaggtgtccctgttcgactccatgtcggagttgtacggcgattgctccaaagacacgatcctgttcatgtcggaggccgccggtgaggcggcgaagagattgacgttcgtggacatcttgaaggcgaccaacaacttcagccaggagagaatcatcgggtcgggcggctatggcctggtgttcctggccgagttggaggatggcgcccggctcgccgtgaagaagctcaacggcgacatgtgcctggtggagcgggagttccaggcggaggtggaggcgctgtccgcgacgcgccacgagaacctcgtcccgctcctgggcttctgcatccgcgggcgcctgcggctactgctctacccgtacatggcgaacggcagcctccacgactggctgcacgagcggcgtgccggtggcgcgggcgcggcgccgcagctgctggactggcgcgccaggctcaacgtcgcgcgcggcgccagccgcggcgtgctctacatccacgagcagtgcaagccccagatcgtgcgccgcgacatcaagtcgagcaacatcctcctcgacgaggccggcgaggcctgcgtcgccgacttcggtctggcgcgcctcatcctccccgaccggacacacgtcacgacggagctggtcggcacgccggggtacatcccgccggagtacggccaggcgtgggtggcgacgcgtcgcggcgacgtgtacagcttcggcgtcgtgctgctggagctgctcacgggaagacgccccgtcgaggcggcctcgccgccgcacgggcagcagcgggagctcgtccggtgggtgctgcagatgcggttgcaggggagacaggccgaggtgctcgacacgcggctgagcggaggcaacgaggcgcagatgctgtacgtgctcgacctcgcatgcctctgcgtcgactcgacgccgttcagccgaccggcgatacaagaagtggttagctggctcgacaacgtcgacaccatcggcagatcatgacatttgagcctcatttgctaacatcgatactgtgtgcgaactgagcgttctgtgatgcgaaattgggagtaatctcatgtaaattcggtcattggcagtaaccggagatggaaactaggcactgg

SEQ ID NO: 12946 - DNA, 2930 bp, Oryza sativa
  ref <308>: DATABASE ACCESSION NUMBER: AK110294
  ref <309>: DATABASE ENTRY DATE: 2001-12-06
aaactaacgctaaaaaagtaacagtttctgtactttattgattcgtcgccacaacttcacatcagtcatgctgcgtcgcgtcgcgttgtgggcatgcaggcagtccccgcctttcaaccagaagcttccctcccttctcgcccagcgccgttgatgctcaggcagccaagtcccgcccacgccgcaccgctgcgatcgatgtgaaaaggccgtgaaacgccttttcgacaagcttgcagaaagcaacccagcctgcctctgtccgaagcctgggtcgcccgtcaccttagacgccgttctcaaagagatggacgcgcttccgcatgacctcgacactgtggaatccgtccgtgattcgttcacctgcgccttggctctgctaggtgttttcccgaaacccgtcgacaacaaggcgttgcgcgccatccctgatgccgagctgcttggaaacagcaccccgcttaacatctccacctaccaagcgcaatcgtccgaaaacgcgaagtgtcttttttggaaatcgaacaggccttcagaccctcaagtgctgttccttaacgacgaatcgctgcgcatccacgcgtaccgcacgtcgacggtggggcagctggcaatggtcgacctcgcggtggctcgtcaaatcgcccaggtggacccgtcggaggttgtggtgctgcacggcgaatctggcagcggcaaaacgctcaacgcgatgctcagcgccggggcccacccggcgagcagcaaggccgcactgtgcgtttgcgtcggtcctaatgacgttggactcgacggcaaagccacagcttcgcaaggccaaattgggaccgcttatctcaatattgaggaccagacagcgatcaatgaacagatcaaacacaacttccaagtaaagctggaagcgacttggaacgcattgaagaagatggacggtcggttggctgagaaggcgacggaagggcacgtaactgttctcttcgacgaattcggctccctcagcgaggctgtcagggcgatctgcgcgatgcaggatgtattggtgaacgcaacccgcgcggcactgcacctcgacactaccgtgacggtgcagatcatcgtcgcggggacgggagcgcacgatggtacgcatgtcatcggatccgacccctcaaggtatgaattgaagacggtgacacccgcggtttggaagacgctgcggccgagaaatgacgacaagcgtgccttcgccattgaggtgtgcgacgccgttgagaaggggaattcacgtgccgcgagcgctgcgtggcgaatggtgagcacgaacgcgcgcgcgtgcgccatatttttgatagaagtggagggcttgggaagcggagaaggaaaaagtgtttcgcccaaactgctgcgtgacctcgttgagcggactgccgtcaaattcaagtctctcaacggcctcaatggcgcctcggaggccgattaccgtgagtattactttcatgcagtggccttgagtctctatgcagccacggaggaccccttcaaagatgacaatgcatacattctgtcgtgcttcagagagtgcggtatgctgacggatcgcgcggtcatgcaaaagccggcaaatcgacaaacgcacacggtgatttctgtccacaaggatcaatcgctgtgcctgccgaacgattgccatggacagcgtttttacctctccgaggcacagatcgtcatcgcgcagacgctgctgggacttggcgaccgtgacttcagtggtgaaggcttggaggcccttgttgctgactacttggtccacgccgcgatgctcgcgcccaagttgaagggcaaacaactgatcaagccttacgaaatttcgacaggcggcgctcagcaaaacgcagtgcagcttctcaccccccaaggctcgcctcccataccgccgagtacaaaaggttggattcacccgctgcagctgctcgaggaggttactaagtccgctggcgaaacaacaatggtcgcccgagcacgcctcaagcacaagatcgaaccaacgaagacaggcggtcgcataggaggtgataagatcttcgacgatgcactcaggaaggacgttgacgccgttctgatcaacgcggataaatcttcctacaccgacctcatcttcaagcaaggggtgggccatcgggtgaacaagaaggtgacgatgtggctcatccagaccaagcgctacgactcgaagaaactgacggctgagaccacgatggcagagctctacaaaatgggcgacctgaaaggctggccttggcacgtgactctggcactgaagaagaaagtccgacaagacgacaaggctccggaactcaccgttatgaagtctctgaacagcgcgttgaagcgccactcattgcggactctcaagccgaccaaaattccgtttgatgaccccgagttctggagccatttggcgctacggctcgccaagaagacccctcgtcgcaccgatcacgcggatgaagccctgaagaccattgccggtggcgattacgacgtcaaacgcgtggtctttgtgtggggcactgctccggaagaggtggcgcacaagacgtcggcaggcacgcgcctggtgcacgcgtgggaccccgaccaacgcgtgttgacgaggtcacctgcgctggggagtttgtatccattcactgtccgggatgctgacttcgccgagttgaggttgtcgatagaccgaaaagatcatcgaatcggaccctttgccacgaaagggctttgcttccgtcggaagctgtgacacggcaacatgcttcaaaatgtgacgtcacccagacaaaccgctgcgccaacatttaacactgacctgaatggagggccattggacacacacacacacacacacacacacacacacacacacacacacacacacacacacacacacacacacacgc

SEQ ID NO: 12947 - DNA, 2802 bp, Oryza sativa
  ref <308>: DATABASE ACCESSION NUMBER: AK110295
  ref <309>: DATABASE ENTRY DATE: 2001-12-06
attcaaatgagaactttgaaggccgaagaggagaaaggttccatgtgaacggcacttgcacatgggtaagccgatcctaagggacggggtaaccccggcagagagcgcgaccacgcgcgtgccccgaaagggaatcgggttaagatttcccgagccgggacgtggcggttgacggcgacgttaggaagtccggagacgccggcgggggcctcgggaagagttatcttttctgcttaacggcccgccaaccctggaaacggttcagccggaggtagggtccagcggccggaagagcaccgcacgtcgcgcggtgtccggtgcgcccccggcggcccttgaaaatccggaggaccgagtaccgtccacgcccggtcgtactcataaccgcatcaggtctccaaggtgaacagcctctggccaatggaacaatgtaggcaagggaagtcggcaaaacggatccgtaacttcgggaaaaggattggctctgagggctgggctcgggggtcccggccccgaacccgtcggctgccggcggactgctcgagctgctcgcgcggcgagagcgggccgccgcgtgccggccgggggacggaccgggaacggccccctcgggggccttccccgggcgtcgaacagccgactcagaactggtacggacaaggggaatccgactgtttaattaaaacaaagcattgcgatggtcctcgcggatgctgacgcaatgtgatttctgcccagtgctctgaatgtcaaagtgaagaaattcaaccaagcgcgggtaaacggcgggagtaactatgactctcttaaggtagccaaatgcctcgtcatctaattaatgacgcgcatgaatggattaacgagattcccactgtccctgtctactatccagcgaaaccacagccaagggaacgggcttggcggaatcagcggggaaagaagaccctgttgagcttgactctagtccgactttgtgaaatgacttgagaggtgtaggataagtgggagccctcgggcgcaagtgaaataccactacttttaacgttattttacttattccgtgagtcggaagcggggcctggcccctccttttggctctaaggcccgagtccctcgggccgatccgggcggaagacattgtcaggtggggagtttggctggggcggcacatctgttaaaagataacgcaggtgtcctaagatgagctcaacgagaacagaaatctcgtgtggaacaaaagggtaaaagctcgtttgattctgatttccagtacgaatacgaaccgtgaaagcgtggcctatcgatcctttagaccttcggagtttgaagctagaggtgtcagaaaagttaccacagggataactggcttgtggcagccaagcgttcatagcgacgttgctttttgatccttcgatgtcggctcttcctatcattgtgaagcagaattcaccaagtgttggattgttcacccaccaatagggaacgtgagctgggattagaccgtcgtgagacaggtctgggcccaagcctacttctggcaagtcacgaacaggcccccttattctagcccagaaatatatctgcctccagcgcccgctcgggaattttaagtcttccatcttcactcccttcgaggctctccacactcattcctcaaagaagccagccactgcccaggccagtctgctggatctcacgacccgatacctatttaatcatcctcgccatacgcctttgagcctgcactgcctataaccacttctcgacgaccttgttttcctactgtacttttatttgtcgacaacacttgaaacttgctttacttgctacgcttgcaagttacctgctctgttttccaatctccaacttttacgatcactaccaccaccatcacaatgatactcagagaactcgagtccaacaacatgggccgtggcgcctacgatacaacgggaactcctaaacccccaccaccgccaccaaaatagtcgcatgcgccgtcgcctcccaacgacaacccgggcttccacgccgtgtacgcattggttatgactggagtctttgcaaccagcagtcatcattcatctgacccgcgtctacgacagccgtgtcccgttgggagaagagggatgacatgttgccgcgtcccctacaccctgatgtggtcactcccggctccgccgaaccgtatcctcagcttcgtctactactacttcctactcgccattctcctttccttcgggattaccgaccttgtaatcatcagcgaccacttttcgattctccgcgaccctaataccccctttttgccggcttcttctttcctgcgttatcaagcgactatcgaaaaggcctgcatcccccttgcgttccaccattgagcgacacagcatctccttacggcaaaagttttacggcgttattatagaccaggatcttgggcccaggcatagataccaccaacggactttttttattttcgccttttctttttctgggtaatagcatgcatgggtagagtttcaccgtctgccttcgctggcaatcaacaggcgtggatcacattttgtactatatatatacatcggcgggactggcgttgctactacttccagactcgacgattttgcattcatcttcggacggccatctactatgggatcagatgggtcgctcaacccgtgcggctatggatggatattagacagcgtttgcctaggccttttcaggtggaggaagtgtcgcgagacacagaggaatcacggatactatgtagaatacaataattgattgaaatggacc

SEQ ID NO: 12948 - DNA, 3118 bp, Oryza sativa
  ref <308>: DATABASE ACCESSION NUMBER: AK110296
  ref <309>: DATABASE ENTRY DATE: 2001-12-06
aaacgctcaaccacccaactacacccaccgctcttcaagcccccggttccccagcggaccgtacataacagaaaaagaaacaaaaaaatacagaaaatcctcaaaagccccgacgaccgccaacccgcccctcgtcacctactgtcgcttgctcctcgacagtaacgcgacttctccctcaccagttccgcatacacaaaagccgcgcgctcgcctgtgtgtctccagcgaactttgacgtcgccttgcactaccccgcacacactcttccgcaactcgccagaagcgcaagataaccacaatgtctgctgaagctgccaacgccgcgttgcccgtccaggacggtgctgatgccagcaacacccagatcaacaccaacgtcgctgctgccggcgctgaggcccccacccccaccaccgctcaggcagcacaccagaactcggcgtcgctctatgtcggagagctcgacccctctgtcaccgaggccatgctctttgagctgttctcctccatcggccaggtcgcctcgatccgtgtctgccgtgacgccgtcacccgtcgctcgctcggctacgcatatgttaactacaacagctctgaggacggcgagaaggccctcgaggagctcaactacaccgtcatcaagggcaagccatgccgcatcatgtggtcgcagcgcgaccccgctctgcgcaagactggccagggcaacgtcttcatcaagaacctcgaccacgccattgacaacaaggcgctccacgacaccttcgccgcttttggtaacatcttgagctgcaaggtcgcgcaggacgagctcggcaactccaagggctacggattcgtccactatgagaccgccgaggccgccaacaacgccatcaagcacgtcaacggcatgttgctgaacgagaagaaggtcttcgtcggccaccacatccccaagaaggagcgcatgagcaagttcgaggagatgaaggccaacttcaccaacatctacgtcaagaacatcgacctcgaggtcaccgacgaggagttccgcgacctcttcgagaagcacggcgacatcacctccgcctctattgctcgcgatgaccagggcaagagccgtggtttcggtttcgtcaactacatccgccacgaggctgctgctgttgccgtcgacactctgaacgacaccgacttcaagggccagaagctctacgtcggccgcgcccagaagaagcacgagcgtgaggaggagctgcgcaagcagtacgaggctgcccgcctggagaagcagtccaagtaccagggtgtcaatctgtacatcaagaacctcaacgacgatgtcgatgacgagaagctccgcgatatgttcactcccttcggcaccatcacctccgccaaggtcatgcgcgatgccatgcccgctgagcgcgccgagtctcctgccgctgaggagaagaaggaggaggaggaggaaaagaaggaggagaagaaggacgatgaggaggccaaggatggctcttctggcgagcagaacggcgaggacaccaaggccggtgacaaggtcaccatcaagggcgagaagaagatcctcggtaagagcaagggctttggtttcgtctgcttcagcaaccccgacgaggctaccaaggctgttaccgagatgaatcagaagatgatcgagggcaagcctctctacgtcgctctcgcccagcgcaaggacgcccgcaagaaccagcttgaggctactatccaggcccgcaaccagctccgcatgcagcagcaacagcagcagcagttcggcgccattcctcagatgttcatggcccctggacagcagcccatgatgtaccctcctggtgctcgtggccagatgcccttccctgccggcatgccaggtcctcagggtggacgtggtgctggcttccccggtggcatgcccggccagcagggcggccgcggtggtcccaatgctcagcagatgcccatgtacatgcctcccggtatggctcctggcgcattccctcctggcccttacatgaaccagcagtacatgcagctcgcacaagctgctcaacaggccatgggcggcggacgtggtggtcgtggtggccccatgggtgccatgcccggcatgcctcaaggacagatggctggtggccctggtatgcgcggcggtcaaggtggcttccctcagggtggccgtggcggtcccggcggccgtggtcagcctcctgtgcccggcttcccccagggtggtcgtcccggcgctggtggcccaggtgttgacatgagcgtcctcaacgccgctgcccctggccagcagaagcagatgcttggtgaggctctctaccccaagatccacgagatgcagcccgagctggccggcaagatcaccggcatgcttctggagatggacaacagcgagctcatcaacctcacctcggacgaggccgctctccgtgccaaggtcgacgaggccatgagcgtatacgacgaatacgtcaagaacaaagagggtgagggtgaaaaggaggcccccaaggaggagtccaaagacgagaaggcttaatcttgtcacagttgccaccgagtaggactcgatccgtgtcactctcgaaaggcagcctctcgtgacggttcggtaacctcacagcttacgatggcgaatggcgtacggttcacggtttctttcttacgctaggcggacggctttacgaattcccccaaaagttctcatgattcctcaaaggctgggtccaccttcctctttcctcggcgtccgatcccttcactggatcctcgttcgtcggcccaaattcgatcttcagagttgggtttctccttcatgctttccttcacttgtttattgtatcatagacggccagtctgcagagagatgtgggcgggttcgcaatagcccttgcagagatacctcaagcaggttgcccatggcctggcttacgttcagttaattatggcagacgtatggtggatgtcggacatgatttatgtctgagagatgtggtcgtacgtggatctggtcaaactggatagctcacggacgtagtggaggaagcataagatcttatggacgtagtagtacatactcccaatagatcttcatacattc

SEQ ID NO: 12949 - DNA, 2725 bp, Oryza sativa
  ref <308>: DATABASE ACCESSION NUMBER: AK110297
  ref <309>: DATABASE ENTRY DATE: 2001-12-06
tttaacaagttcgacctgttggtgacggccgacaacccgctggaccagccgtcagacatcgagttctacctcaacatcggtcccgagcgctatctgcgctgttctcgcggccacggctgccccatcaagattctggacgtgttccgcgccccgcacccgccgccgcgccacggctatgagatcgtggacctgctgccgcatgtaggccctcccgcgccgccgccagcggacgcggaaggcgtggaccatcaggcggcacaggacgccctgcacgagtgggccatcacgggctcgttccggatggaaaacaccgaccacttgcaattctcgctgtttgagggtgactactggcgcacggtgtggatcttctcgggcacgctgtcgcggtccaacggcaaggtgaacggcttcttgttcgagaacgaggagcgccgccttttccgcgggcgctggaccaacacgctgtggaagcactcgcagccgctgtccatggagttcgacgccagctggtcggcctttgaaggagtggccagcacgggcgacacctcgcagagcatttccggtctcaagagcagcggcacagagtcgccaccacgcagcagcaccacctcactgccagcgccaccttcgcccattctggatgccattcccaagccgggcgagccgctggagtttttctacgtggacctcattgtggtgcctgtgggcgaggaggtgccgcccaactacgaaatcatgaccatcaagcccgtgtacatgtgggatccggagctgaaggacggcgggcacatctactttctcaaggctcctgctgaagaatgtgacaaccgccccatcatcacggacgccaccatcatctacacggagctggagccactgccagaaggatacaaggcggtgaccaagtcgccgcatggctccgatgcgacgctgaaatgtggggccggcgacggacgaaggctgtcgctatgcttcaagacggagaccagcagcagcaaagtggcgcgaggcatctacatttcgttcaactggggcgacaccattcccaactgctaccggcggctgatgcgaaccaacgacttccacttggaggccaacttgtcgaccaacgagctggacattctgggcaagcgctacgagtacgtgtacctgctggtgtggaccggcggccgctacgaacacccgatcgtgggcgagtgggagaccacgctaggcgtgctgacgctgcaagtggacggcaagagccgcggccggcgcgtcaaagcgacccatggatcgtcaggcaacaacctgatttcgggcgagtacttgcagagcacgcgcgagatccacgccacctatcgcgaggccaacaacgccaacacggcctgctgcggcttcagcttcgccgacgaccagtggcggcggctgttgggccactacgtgtacgccgacgtgcgcggcagctggctgggatggaaggacatcttcatgcagatcggcatgcagaaggactatctgtgccagtggcgcaacggcgaagaagtcttctcggtggcgggcgaaaacaaccacatcgagtcgctgttctcgcaggccttctgtccggagctgatggcgggctccaaccgcgtgtcctgctccaagtgtaacgatctgcgcgacacggagcgctacacctgcatctcgcggccgccgccccacctgatcctgaccctcaagcgctttgcctacgactaccgctcgggccgcactgacaagctgctgcacaaggtggagttcggtcccacactgtcgctgccggcctgcccgcccgaactggtcagctccgtcttcgaaacgcctgaggaccaccagttgcagctgcagaacaagtacgggctctacgctgtcgtcgtccacgccggcaccaagctggatggcggccactactacacctacgcccgcgaccccaactcgctgcacctcagcgaggaagacgaccccgacaacgcgccctggtgccgctacgacgaccagagcgtcaccgtcaccgactggaagtcgtggaaagagcagttgtggagctccatcgacaactccgagtacctgctgttctaccgccgcttcgatctgccgctgccgcagcccctggtgcccgaaagcaaggtggctcccttgtcggccatcgacagcgtcgtccaacacaacatcgaccatctggctgccaccaaccgcaagaactcctctctgcagctgctgcaggaaatcgaaatcgacacccgcttgaagcgcaactacatcggccctttccccgtgcccgcgcaccagctgctgcagcaagaagacctgctcaacggcctcaccttcagccccttgaccatccccaaaccctccactccgctccccgaacaatacgctggcctgctgcccaccgaatgccctcattgccaccgcctcttccctgccagtgatctgtcttctcatttcatcgagccagattcttgtgttttcgcttccaaatggatcattgaacaacctgcctctcctgacacttcttcttcttcttcttcttcttcttcttcttctgcaattgaaggaggtgaagaacctgcttctgcttcttctgtgggaaactctcctcaaatctccaatttggacatgaaccagtatgattacagcccattccctgatgattcaacagattactctcttcttgttgatgattctccttaaatcaatcatcaataaatcaccatttcattgc

SEQ ID NO: 12950 - DNA, 2800 bp, Oryza sativa
  ref <308>: DATABASE ACCESSION NUMBER: AK110298
  ref <309>: DATABASE ENTRY DATE: 2001-12-06
gatttgcacacatgcgcatgtcgttgtgaccgcagctttttcggcctgaacgaggcctcagtaggacgtcttgtcgaaatggaccgcgtagtgactttggtgaatcgcctgcagcagatatgtactcagctcggtgacactgcgggtaacagcgttctggttgataagctttcttccattgtggtggttggcggtcagagctcgggaaagagttcagtgcttgaagcagtggttggcagggacttcctgccccgcggtactggcattgtgaccaggaggcccctggtgctgaatttggtgcatgttgatgacccaaaggcccaggagtatggagagttcatgcacaggcaggggcagaagttctttgactttgacaagatcaggcaggagattgaggatgagacagaacgcttgctgcgcagccagcctgggcagaagacagtgtcaccagtgcccatctacctgacagtgtactcgccgctggtgcccaacctcacactggtggatatgccaggtttgaccaaggtccccattgacggtcagcccctaagcattgtgcaggatctggaggagatgtgcaggcagtacatcaagggtgacaacgccatcatcctggccgtcacgcctgccaatgcagatctggcgaccagcgacgcgctgcgcattgcgcgcgaggtggaccccactggtgaccgcaccattggtgtgctcaccaaggtggacattatggacaggggcacagactgcagggagatcctgctgggcaagagcttgcgcctgaagcgcggctgggtggctgtggtgaaccgtggccaggccgacatcaacaagcgggtcaccatgtctgaggcgcgcgccaatgagctgggcttcttcaagggcaccgacgcctacagggatcttgacaacactggcaccgattacctgtccaagaagctgagcacacacctgatcaacgagatcactcgcaagctgccagagatccagagctacattgacaaaaccgtccatgactaccagagccagctcaaggctctgggccatgatgtgactggcaacaggggcaagatgctgcacctcattctcacactctgccagaaggtggagaaggcattcaacaagattgtagatggaggagagggaggtggtgagcgtgtgctggaggtgttcgatgtgaagctcaaggaggccatccacaagctgccgtttgacaagatcctcacactcaagaatgtgcgcaacaccatcaacgaggcggacggctatcagccacacatcattgcaccagaggcaggatacaggcgcctcatagaggatggcctcaccctgctgcgggacccatccgccaaggctgttgagcagacgcaccagatcctcaagtccatagtgacgcaggccattagtgaagtgcctgagctgcagcgctttgtcaacctgaagagtgagatcctggctcactccgcagtcacactggacaagctcaaggagtcgagcgaggccaccgtgcgcactctggtggacatggagggcagctaccttagcacaaacttcttcagggagattgtggcggcagagtctttcagctatgacccaagcaggccaaagccacagtttgtcacactcacgggtgagatcctgcttgagaagcgctatgatggcatgtctgcggctgacgcccacctgcagcgcatcagcgaccacgtcagcgcgtacctgcagattgtgcgcagccagctgctggccacagtgcccaaggcggtggtgcactgcacagtggtgccggccaaggagacgctgctgtctgacctgcaggaagaggtggcaggcaaagaggaggagcagctacggcggttgctgaatgagaatgaggaggtggctcggcagcgtgacagcctgcgcaaacgcctggagctcatggagcgcgcggcacgggagatcatgcagttcagggtgtgagccggcggcagaacagcaaagcagcggggcagcagggcattcgttggctgctgaggggttagcagcagtgggtggtgtggtagaggtcgttgggcgtgtgcgctgggcgggtgcgttccagggtgggcggttggagggactgtacacaatgcaatggtgcatgcagggcagcatgcatgggttaggcttttagtagggctgtcaccatgtgcaacaacgctgtattggggttgtgttttccatgtgcttgcatgagaccaggactgatgtttccatcctgttggtcaaccttgaacgggaaccagtcatcaagtgatgaccattgacattcccacttgcctactggtcgcgggcgttggcaagatgcgtgccaagcttgtcatgtcgcaagcaatcagtatgtgttgtgttttgcttgcaagaggtacccgtggcaggtacagctgcagtgacactctagttgcagctgcaagaagccatccagcacctgctggctgcagctaccggatgctgaggggacctgcagatcattgcacaggtgtgctttgcagggcctggcgtggccgagggcgcatggccctgacgcacttctatgttggggtgctgcttacagcatagtgcacagcacctacaatgtaccagtgagtgtgaattaaaagctgctcgctttttggggtgatgtctttggtcagtcgcagccttttctgtgtgccctttgccctgtgttgagaactctttaatgagttatggaggatgtcggcacctggctgccgctttgaaaacagcagcaacttggtcagcagctgatcagctacacatcaatgtgtaacagtgttacttgatg

SEQ ID NO: 12951 - DNA, 2830 bp, Oryza sativa
  ref <308>: DATABASE ACCESSION NUMBER: AK110299
  ref <309>: DATABASE ENTRY DATE: 2001-12-06
gttggcgagccgctcttctgcccgtagtacgcctttcaccctctccccatttgcccttctgcacagcccagctcgttctttgcgtcatcccgcggttgccagggcacctgcggcgtcccctcgtccctgcgagctcctcctccgacccccgtgcccgtcctgaactccaacactagcgacgatctcccacggcacgcgtccctcgcccatgtcgatctgagcccgacccttcacatcgctgcgatactgagcgtgcgcaccccccgacgctctgcattggcgcttttggctgcgaaccccccctcgaggaccgcccccgacccggaccctctcctccgcgcagacacctccgcccgacgtgcagttgcgccggtcgcagccatgaaaggctttaggcaaaggctctcgagagcgaaggacggcaacaagtcatctaagaagaaagactcggcctccggcaccgcgtcgccctcagcaggcgcctccagctcgccctccaattccaaccagccgacgcccacgtcgtcgcagacgcagcttgccgacgcgcgcagcaagatccagcccaccgccgacagcatccaaacccctcccggctcgctgcagcccggccagcctggcgcctcagggcccatggcaggcgcaccacaattcggcggacagcagggcatggcgggcgccagtggtgctggcagtggcggcgctccggggccagggacgccttctaggctggggcagcctcttgcgccaagcgtggtcatcagcccgagtgctccacacatcccccctccgggcgcggctgagacgatgcccggcgacctcgcgcccccaaaagccggccagaagtctctgatctttgaccggctccaggccacaccgaaggacgccatcgagggcatcaggacaccgaagaggcagcattcgtcgcgattcgacatttcggaccagcgccagcgcgaactcgagaagctgccggggttccacgaggtcccgccgaacaagagggaggagctcttcatgcagaagatcgaccaatgcaacatcatcttcgacttcaacgacgctagcggcgatatgaagtcaaaagaaatcaagcgcctcgccctccacgagctgcttgactacgtcgccaacaaccgccaagtcatcaccgagaagatgtacccccgcgttgtcgaaatgttcgccaagaatctgttccgtccaatccctccgcccatgaacccacaaggcgaagcatttgaccccgaagaggacgagcccgttctcgaggttgcgtggccctatatccaagtcgtgtacgaattctttctgcgtttcatagaaagtcaggacttcaacacgaacattgcaaaggcatacatagaccacagcttcgtgctgaacctcctggagctgttcgactcggaagacccccgagagcgcgacttcctcaagaccaccctccatcgcatctacgggaagttcttgaaccttcgctcgtacattcgccgctcgatcaacaacgtcttcttccagttcatatacgagacggaaagattcaacggcattgccgaactgctcgagatcctcggctccatcatcaacggctttgcgctgccattgaaggaggaacacaagctgttcctcaccagagtacttattccgttgcacaaagtcaagagtctcagcatgtaccatccacaattggcatactgtattgttcaatttttggagaaggacgctgctctcacggaagaggtagtggtgctcggccttctgcgatactggccgaaggtgaacagcacgaaggaggtcatgtttctcaacgaagtggaggacatcttcgaagtcatggaccccgccgagttcgcaaaggtccaggagcccctcttcaaccagctggcgaagtctgttgctagcccgcacttccaggtcgccgagcgtgcgctctacttctggaacaacgagtatttctgcaacctcgtcagtgacaatgtcgaagtcatcctgcccatcatgtttgctcccctgtacgagaactctaagggacactggagcaggacaattcatggtatggtttacaacgcgatgaagttgttcatggaagtcaacccacagctgttcgacgattgctcgcatgactacgcagagtcgcagaacaacgccagtcaaataaagcaaagtcgacaagaccgatgggacaagctcgcgaagcttgcagaggaccgccaaaacggaaaggtgcccaagccagccccgtcgacgtcaacggcagcctcaccaatgcgcgtagatgactcagatccgctaagtcaagggcgactggagaatctccgactacaggacgatgcttcgagagacaggcggccgaaggattacgagcgccaaagtagccagacttcgcgcaggcaccattcgcaacagggggaatcatcatcggcgcggcgctcgtctggtcgtccgcgtagcaacagtggccatggtcacaggccgtcttctgctggcaacaacgtcgtttctccacggactggagcacctatggggagggtgcgggcgaactctggctccacgatctcgcgcgtcacaccgaacctcacttcatgagcttgacacttggcgacatacacacttcctttctcttcctttccctttctatcacatcttgttggacgcttttggcgagttcgcgcagtgcgacattgtattgcaggtggctgtggatggatttggtttcctcaaaaagcggagcgattccatacaggttttctggttgtggtggttatcagagggtagttacagcgggctttctttgaccccttatagacacggaatgtaaaaatgctccctc

SEQ ID NO: 12952 - DNA, 2740 bp, Oryza sativa
  ref <308>: DATABASE ACCESSION NUMBER: AK110300
  ref <309>: DATABASE ENTRY DATE: 2001-12-06
aagcgaaaaaccgagtttgtatactcgataaattaagtgtgtcgtgtgcacaggcgaaatggcgggatcgacgacgtctgcgacactgatgccggagccgaacatcgtgccgggcgttgggccggtgatcgggttggaggaggggtgggcgaagatctaccgcgacggcgtgcagcgcgtgttccatatggtcgccggccgcgatgcggcggccgggcgtgcgttcaacaatagggagtacatggcgctgtacacgaccatctacacgatgtgcatccaaaaggcgccgcactgctggacggcgcaactgtacgatcggcacgaactggcgctcgtggagtatctggacggcacggtgctgcctgctatcgagcagaagaaaggcgagtttctactcaaagagttggtgcagcgctgggccaaccataagctcatcaaacagtggatgtgcgactttttccgttatctgaaccgtttctacgtaaaacggcacaacaaaaagccgttggaagaggtgtcgattttgcgctttaagacgaacgtttacaagaaggtgaagggcaaagcgtgtacggcggtgttggagctcatacgaagggatcgcgacggcgagcagggcgtggaccgggatctgctgcgcgatgccatcgccattttcgtggatatgggtatgggcaatggcaagacgtatcagtacgactttgaggcggcgttcatcgatcacagcgccaactactacagccgtcagtcggcgctgtggctcagcggcgactcgtgcccggagtacctgcgcaaagccgaagcgcgtattttgcaggagaaacggcgtgtggcagagtacctgcacagcggcacggacgagccgctgatggagacgctgtatcagacgctgctcatacggcatcagagcgaactactggacaaagagaacaccggcctccgtgtcatgctcaagacacacgccgagcaggacctggcgcgcctcttcatcctgtacagccccgtgccgtcgtcgctgccgcccatcgcccgtaccctcaacgccttcatactggacgtggccgctgcactgctggacaaatgcacggcgtcacgcacgaccgccactgagtacatacccgaactcattcgcgtgcacgagcggtactatgatttggtgtccggtgcgtgtttttgcggacacgccaccttccaccgtgcgctcaaagacgcctttgaacttatcgtcaacaaaaaggtgctcgcagcgcccgccgcacccgccgcacccgccgcacccgctcctgcagcggcaccggccgcggcaggcgctggagcagcagcggcaggtgccggtgcagatgcgaaggcggcgggcagcagcagcagcagcgcacccgcagcgcccattcacacggctgaactgcttgcgaactacacagacgttctgctgaacaaaaccggcacgcgtttggacgagaaaaagctcgagtcgacgctcaacaacgtcgtgcgtatcttctcgtatctgacggacaaagacctgttcagcgagttttaccgcacgctcttatccaagcgcttgctgttgggccgcagtgcgtcgacggacgcggaaaagagcctcatcggcaagctcaagctcaagtgcggcgcgcagttcacgtccaaactggagggtatgctcaatgacatgcgcaacgcatcggaccacaaccagtccttcaaagactttttgcgcgataagaagcgcgacagcgagctgaacggcatcgacttcagcgtgcaggtgctgacgaccggcttttggccgaacggcgtgtcaaagacagaggacgtgaagctgcccgccgccatgcagtcgtgtatggacgtgttccgcgctttctacgatacgcacacgaacaaccgcgtcttgacgtggctccacaacttgggcgtcgtcacactcacaggcttcttcaccaaacgcaagtccgatttggtggtgtccggcgtgcaggcggccattctgctgcaattcaacgaacacaatgacctgtccatcgaagagctcgccaaagtgacgggcttaacaccggaaaatctcaaggcgcagctgcgagtgttggtgtcgggcaaatacaaagtgctgctgaaacggccggcggaggggtacaaaccggaccaccgcgtgagcgtgaatttggcgttcagcgacgcacaactgcgcgtgcgcatacccccggcgatggttgtgggcggtgcggtgtcagagaaagagcgtgaaaaggacgtggagagcgtcgaagaggaccggcggcacgccgtggaggcgtgtattgtgcgtatcatgaaagcgcgcaaaacactcgaacaccagcagctgatgctggaagtgagtcagcagctcatgcagttcttcaaacccgacccaaaggccatcaaaaagcgcatcgaagacctgatcgcgcgcgagtacctggagcgcgacgcagagaagaacacgcagtaccactacatcgcctaacgcgtgcgcgcgcgcgcccgctcgtcgcatcggcttgccattgggacactccatttcgctcgctctgcccatccgctctgcccatccgctgtgcgctgctgcctgctgttgtgctgcccgcagctgacagtgacgcgcgcgagaacgctcgccggcgctgcggccggttcttttgatcggctcttcgctttcgtcgcgtttcgtcctctctttgggtcgttcgctcgacacatattgcaccacccatttgtc

SEQ ID NO: 12953 - DNA, 3282 bp, Oryza sativa
  ref <308>: DATABASE ACCESSION NUMBER: AK110301
  ref <309>: DATABASE ENTRY DATE: 2001-12-06
aacttctttatcaacgtccgctcgccctcgagagcgccccttcatcccctcgctttgcgcctttgcaccacgcccctcgcacctgccccccctcatccccctcacaccttccaagtcccactgcctggccccgaccgcagcacgtcatggcctaccaaggaggacccggggcaaacagctacggcgaccctcacgcacctcacccatacgaggcccgccacgaagaggaggaagttggacgctcgctcctccactcaaaccctaccggcacacaacaggggcccttcgacgaccatcacggcgtctacggccacgaccagcgcccgcagtcgacctacagcctgaccgagacttacgcctcagatgcccctcagacacagtatgccccacagtcgcactctggctcagacgtctactcggccactggcggctacgacccttccaccgagtatggcgcaccgcacagggccacttcgccttacgcgcggagtgagaccagctccacagaggcctggaaacagcgccagcagcccggcggcggcatgggcctcaagcgtggtctgacgcgtaaggtcaagtcggtccaaggctccgtcctttcggccgactaccccgtgccaagtgccatccagaatgccatccaggcaaagtaccgcaatgacctcgagagcggcagtgaggagttcacccacatgcgatacacggccgccacatgcgaccccaacgacttcacattgaagaacggctacaatctgcggccagccatgtacaatcgccacactgagttgctcatcgccatcacctactacaacgaagacaaggtgcttaccgcccgtactctgcatggtgtcatgcagaacatccgtgatattgtcaacctgaagaagtctgagttctggaacaggggtggtcccgcctggcagaagatcgttgtctgcttggttttcgacggtatcgacccttgcgacaagggcaccctcgatctgcctgcgaccgttggtatctaccaggacggtgtcatgaagaaggacattgacggcaaggagaccactgcccacattttcgaatacaccactcaattgtccgtgacacccaaccagcagcttatccgcccgcacgatgacagtgccagcaccctgccacccgttcagatgatgttctgtctgaagcagaagaacacaaagaagatcaattctcatcgttggctcttcactgccttcggccgtatccttaaccccgaagtttgcattctgctcgatgccggcactaagcccggtccaaagtccctgcttgcgctgtgggaggctttctacaacgacaaagatctaggtggtgcttgcggtgagatccacgctatgctcggaaagggttggaagaacttgctgaatccgctaatcgcaactcaaaacttcgagtacaagatttccaatattctcgataagcctcttgagtcatcttttggctatgtttccgtcttgcccggtgccttctccgcttaccgttaccgcgccattatgggcaggccgcttgagcaatacttccacggtgaccacacacttgccaagattcttggaaagaagggtattgaaggcatgaacattttcaaaaagaacatgttcttggccgaagatcgtattctttgcttcgaacttgtggcgaaagctggctcgaagtggcatttgacatatgtcaagtcctccaagggtgagactgacgtgcccgaaggtgctgctgagtttattggtcagcgtcgtcgttggttgaacggttcctttgctgccggtatctactcgctgatgcactttggccgcatgtacaagtccggtcacaacctcattcgcatgttcttcttccacatccagctgctttacaacatcttccagaccattctctcttggttcgcccttgcttctttctggctcactacatcaatcatcatgactctggtcggtaaccccgaacccaaggccaatccaccgaagaaggcctggccgttcggtgacaagttcactcctaccttcaacacggttgtccagtacatctacctcgccttcctgggtctccagttcattctcgctctcggtaaccgtcccaagggttcgcgatggtcttacatgacgtccttcattgtgtttgctctgattcaattctacatcatcgttctgtccatctaccttgtcgtcgttgccttttcgggcaaaggcaccaagggcatcaacaccgattccgccaagtccttcttcacctctttcacgagcaacgacggtatcggtatcatcattctcgctatggctgcaaccttcggtctgtaccatgtcgcttcgttcctgtacatggatccatggcacatgttcacctccttccctcagtacctcctcattgcgtcgtcgtacatcaacattctcaacgtctacgccttctctaactggcacgacgtttcttggggtaccaagggttccgacaaggcggatgccctgccgtcggccaagaccgaaaaggcttctgacggtaaacacacggtcattgaagagcccgatctcccgcaagccgatattgacagccagttcgaggcgaccgtcaagcgcgcgcttgcaccctacgttcctcccgtcgaatcgaacgagaagactctggaggattcgtacaaatctttccgtacccacttgacaactgcttggattggtatgaacgcgttgcttgccgtggctgttcagcaggacgacatgaccaaatttggcttcacgtcatcttcgaacgaacgtactgccgccttcttcaagttccttctcgtctccacagccattcttgctcttatccgcttcatgggttgcctgtggttcttgggtcgcagtggtatcttcttctgcgtccgcaagagataaaggcactatcgccaagcttatgaaccccaccccgttccttacaacggccttgttataccaccatgtgtgatttttccgattcccctaatgtttttgttcgcgcttccgggtgctggcgttttggcatatccattggactccagccggctgggttggctcatcttatcggtaaagaaaaaacttgtcacgtcagttatgcttgactggatcgcaaggtcggttggcatccccattgtactatttggcttctgcaggcgccaatacttttgttattgggggagatgaaagccggcaagaagaacggaagctttatgattgtgatacacgagtcatctccgtgtttttttttggaccattggagtgcgatttagaatgagcaattcgaacacttttcactttg

SEQ ID NO: 12954 - DNA, 2370 bp, Oryza sativa
  ref <308>: DATABASE ACCESSION NUMBER: AK110302
  ref <309>: DATABASE ENTRY DATE: 2001-12-06
caaaatgcaaaagggaaggcactacgcagccgtcagcctcgaggaggccgaaagcctgcgcggtgttatccacagccgcgagggccagcagttcgtgccgggcgctgtgccggcgggtgcacagcccgccgcgtgcgcgccgcgtgtgggttcaatgctgctggaccgcagcaccaactacacggccgcgtaccggtaccagcagcacacggccgaacaggtgtaccgtttcttcaattccgatacgttctacgaagagcacgagttggcgtggctgttgcgcggcattcaggacaacccgacgtccgagcgattggaatggtttgtggagacgcgcgcctgtcgccgccgccaacagaaccacgagcagctcgcgcacacgccgctgcagcgcgtgtttgtgatgcccgacgagttcgcactcctgtcgttccgcgcgctgttggcatccatccgtatgcgcatcactgtcgtggggatgaacgtgttggatgcgttctgcgcgttcgacggcgaccgcgacggcgtacttaactgcggcgagctgtggggcggcttggactggctcggcctcacgcacttgcagccggacgacatctatcagatcgtcaataacgtcgacaccaccggcaaaggcgttatcaatttcgagcaattcagtgccgcgttcaaagaggaagcgcctggtgtgctgcagaacaacagcgccgcgtccaacgacgatgtcggcggagagggcagcgacgcgctggaggggagtgtgcccaaacagtctgagcagttcaagcgcgtggtgattctgccgaaagccatcaaagagctgtatcagccgaagagcgagaacctggtgcttgacatccccgcacacgtgctgacgaacatgaaagtgaagctcaataccatatcgtcgttcaaactcgtgtggtccacgaaaagcacgaaagcgcgtgccgacgtcagcatttggaagcccgacgtcggctccaacttcctgcacgccaacaagctcaagctgtgcctcggctattacgccacgcccggtctcaaggacaagttcgtgccggaggtgaagatcctggagctgacggacaccaccaaaggccgtatcttcaagtcggcggtgctggacgccgcgcatttggccaaactcgtgccgttccccgtgaagtaccgtcaggcctggcaccaccgcgagggcggcgatggctcgagccacggcatctacgtgtggcgtgccgtgccgccgacacaggacttcgtggcgctcggaatgatcgccaccaccactccggacgaaccaccgctcgactcaatgcgctgtattccgcgcaaatgggtcaaacccacctccgtaccggccacaaagctgtggaacgacagcggtctggcgggtcgcaaagggtcgctctggtccatcaacgccatggggctgatgagcagcgctgacggccacgaaaagccggagaccaaagagggctcttactatgacatgtggagcgaccgcttcttcgcgacgcagggcgtggaggtgcgcgcgtcacagttggacgtcaaaggcgccggtgctgcagcaggagctgaccgcaaagcgccgtccactccgacgaacgcgtcggccggcgcctccgctgcggccgccagcggtgtggtcgccacgccctcgccttttgccaactccaatttggcgtcggcactggtcaaagctgcgtccggtgagtcacgcccgaccccgccgcggccgtccatcgacctcaagggccaccgtcctccgccgccgccgccacctgcagccggcccgcgcccttccgtcgccggcgcgatggccagcccttcggtcactggcaccactgcggcgcgtatgaccgtctccaccgggcgtttgggggccgccgctaaaccgccgccgcctgtcgccgcgtcaccggtcgccaaaccgccgccaccagccacgccgccgccgggcgcagtaccgaagaagccgcccactccggccaacccgttcggtcgttaacacgcgaacacgaaaccaaccgaaaagcaccggcacaccggcgttcgccatcattttatgcacttccgttgttacacgcactcggtaccaccgtgcagctcctgtcactcgcgtgtccgctgttcacctttcaatccgctccgcgcccgctcgcactgcccgcactgctcgtcactgcatgtattcgtatcaaattcgtgtccgcgtcctcccgcgcgcgtgtgattccgcgtgtctgcctgccgctttgcacttcacttgcgtctcgctttcgcgtgctctaattagccgctgcgccaccgcaacggtcaaccagcacacccccttttgatctgccgccgctgtgtcaagtctgtttg

SEQ ID NO: 12955 - DNA, 3303 bp, Oryza sativa
  ref <308>: DATABASE ACCESSION NUMBER: AK110303
  ref <309>: DATABASE ENTRY DATE: 2001-12-06
aactaacgctaaaaaagtaacagtttctgtactttattggaaagccgacttcaacccaggccatggctcgggctcgcgcgcgttccatgatcgaagctgaaggcccagcgtcatcatccaccatgtcggcgccggctgccgccacgaccaccgctgcggaaaatgaaatctctcgttgcttggtgtactgccgcatgcggccgtccttcacgcgcgactacgaagacggcggccacgagttgctgtcactgcaggacaaaaaggtcgtcgtgaaggatgagcgcacgtatgaattcgatggcaccttcaagggtgatagccgccaggaggacgtattccgcatcgtggcattgccctgcattcaacacgctttcaaaggtttctgttcggccctcatgtgctacgggcagacaggcaccagaaagtcctttaccatgtgctgcaccaaacccggccaggagggcattgtcccacaggcagcgaccaccattttctccatgattcggcgggacgccgccaggaagtacaccgtcaccgccgaattcatccagatctaccgcgatcaactgggtgacctcatgacggagggcggtaaggatcgcgtcgacattcacttcgatgcagtcaccggcgtaactctcccgggttgctccacgcatgagctgagctcgccagaagagttcatggccttttaccacgaaggtgacaagcgtcgcgtggtgaccgcgactgcgatgaacccagagtcaagtcgcggccataccgccctcgttgtacgcatcaattcgatccccgtcgacgacgaatgcggtaaccgcatctccggcaaggtcaccttcatcgatttggctggttacgaacgcttcagcaagacgggcatctcgaactcgaacgcggtgatgaaggatgaggccaagaccatcaatgcgtcgcttctgtcgctgggccacgtggtgacttcgctatccaacggcgacaagcacattccttggcgcaattccaagctcacgcggttgctgcaggactccatcggcggccgcagccgcacgacggtcattttgacggtcggaccgagcagcgagcacctccacgagaccacgaacacgcttcagttcggcatgcgcgccatggctgtcaaggtgcaggccaaggtcagcaccaccgtcgatttcgagaagttggcggcgcgtcttcaggccatgctcgatgagaagaacgcgcggatcagtgatctcgagattcaggcggcggcgaacgacgcggagcggcaggagttgttggaccgccaccgtcgtgataccgaggtgctgcaagcagctcacaacgcagagcttgagaacgccaaggcgcgcggcgtgtcagcggagcagctgcttgaaatctcgaagcagctcaacctcgaggcgaactctctcaaggagcagcaggaggaggaaatttcctaccgtgaggaccaacaccagaaggacatgatggaggtgttcgccgaagagcagaagaaggcccagcgtgacttgacgcgagagcgcatggcgcgtgagctcgccgtcgtggagctggagaagcgcctggaggaggctcgtggaggcggcaacgcggacctggagcacgccctgcgcgagctcgcggaccgtgatacacgcctcatggagcgtgccacgaagctggcagccatgaccgcgcgatgtgaacagcttgcgctggcgcttcaggcgcttggcggtgaaccgacgttcagcgaatccgacgatgatgaacctactaatctcttcgtcgacgtatctcaggtggaggacatgaagcggcgcttcagcacggaacgtgacgctttggtgaaccaggtcgctgacctacgcggcgcgcttgaccacacggttgcgacgctcgccgcgcgcacccaggaagtcgaaagcctcaaggaagcagccgtggcacgcgaggccagcttctctgatctcggtgcgcccagcccggtgccagccaaggccccgccgccagccggtatcaccgaagcggaggttgacgccatcaaggcgtctctgcaaagcgacatcgacttctggtagcaccgcgcggtggctctgcagcaggaagtggacgaggagaagaaaaagacagcagctgcggtcgccgccaaggtcgcgcagccgaagcccgaccccacagggcaggccaagatcatcaaggagctcaccatgaagctcgagcgcctcacctccgaaatggaaagcctcaagctgaacgctgcggaggccggcgtcgacaccgatcccaacaagggcatgctgtccatcctgcactgcaaagacgaccagctggagagcgcgctgcagaccatcgtggagaaggagaggaaaatccttgacctgcagaggcacttgcatcacagcaacaaacagcgcagcgctgttcccaagcatgaaatggacccgtcgacattgtctgacagctttgcaggccccgtgaccaatcagtccttctcagcgaccatcggcgggtcggcgagcgaggtggttggcccgagtaccggtgctaacgaagtcaacctccaagagtactcagctctcctcaaggcgctccggctccaaaacacggagctgcagacgaagctcctcgccggcggcgaaggcgtggacgctcaagttcaagagctgcttcgtgcgcgtgatgaacagctggccgaacgtgacgccgagctcttgagacgcggtgcgctgatcgagtcgctgcagtcggcgctggtcaggcttgaacatcagctcgaggagagcggcatgactcccgcgtgcaaggtcgacgccgaaacgcgcgccctggtcgacgacaagctcaacagccaattcgagcagttgcagaagcgtcagaaggagctcgaggaggacaatgcacgtaaggcggccgaaaagcagcgcgccgccgcgttgctgcaaacgatgaacgaggaccggctaaaggacgcagcccgtttcgcccaacaggaggcagagcttcagcgcatccgcctcgagcaggcggccaaggaccaacgcgacgcccagctggaatccgaggtccagcgcctcaaacaggtccgtgcccaggaagaacaagacgcccaagcgctccgtgatcagctgcaggagaacactcggcaaatgatggaggcgcaagccaggctcgcgctggagcgcgaggaagggcagtcgtctggcttctttgggcggctcaagaagcgcttcgcctgaaacaaaggaccgccaatacctcgatgcctgtctattgacccccccgtcgccccttcacttcactctcctacatcaaccg

SEQ ID NO: 12956 - DNA, 2585 bp, Oryza sativa
  ref <308>: DATABASE ACCESSION NUMBER: AK110304
  ref <309>: DATABASE ENTRY DATE: 2001-12-06
ataagccagcctccgcgtcgctctcacgcgggtggctcggggcgaaaccctagccgcccgcgccgccaccttccccacccgctctagccgccctcgccgccgccggagcccgccgccggaaaccgcgcggccggccaggaaggcggcggcggggaaaaccagccggcgacgatcctccccctcggcgtgggaggtggagtggcgagcgtcaggcggaagacggcgtccgaagaggtccacagggcgaatccggccacgccggaggcggattcggccccctcggcggctgatctggcctccccgtggccggatcgggagctggcgactccggtggcggcggaactcgcggggcggtgcgtcgactggcagaggaggctgacgtcatcgccaagcacgtctctgaccggcggagctcgcagcgacggagatggtagcagctggctggcggcgggaggcgcgggagaaggcagcaagtggccggcacggctggcggcggcggagggcggcatggcgcgcgcgaggaggcacgtgcggtgagaggggacacgcccggcggcaacgtaggctggcgaggaggcgcagacggcggctgtggaggctggcgcggccggcacggagggaggtgaggccagcggaaggaacgggccgttggcggaggcttggaggctgtgaggccagcgtgggcgcggtggcttcgctgagaggccggcgcggacgacggcatggaggccgtcgtggcgagtcctccagaggcggcgaccggcgaggtgcacggcgagcacggcacggtgcggcggcgagcctaccgcattgggaggtcgggtggtcagaggcggtggcgatgcgaccaagtggcccctcaagggcagcttggttgaggcggcgacggcggtaacgccatgaggtgggagttgaaggctgcggcgatcttttctccaggcgtcagtcctcttgcggtggcggcttgccgctgcaagatgaccacgttggacgggccagtgtgggggagagaggattcatccttctctctcaccctttccctttccaacccgcccgcgtggatggagccggagcgagccgaagtttgagatcctttctgatggccgaccggcggcgaggcgtcggcgcggtggccacgcgttgaagaggattagctggtggtggctgttgattctgacgagcactcgttgacgcgggggaggaggaaagcaatgggtgaaagcctagccttcgggccggcaacggcgacgcctgcggggcgttgttgcgctttcctcctttggtcctttaggtgaaaaccacatcctgttctaggacgggcgacggcggtgctctttggcgtcgcttcctccttggaggcgtcgtttagaagttcaactacactcgtcagtcgccaccgatatgaatttcttgtgctttttccccttcacaaagaagccggattcgagcaagggggcggaggcatcgccatcgatggaagagggggaggcctgcgacgactgcgagtgcgagatcgcgcggttgccggaggagctcctctccgccgcgatctccctcaccgcgccgcgggacgccttccgcgccgccgccgtctcccgggccttccgcgccgccgccgactccgacgccgtctgggctagcttcctgccgcgtgatctccccgatctcgccgacggcgagctctcccccgcgccgccttccaagaaggacctcttcctccgcctctccgccggccactaccacctcctgccagacaggctcaagggcatgtgattggacagggagaccggggccaagtgctatgtgctctcggctagagcgctggtcattatctggacctgtacaccaagatactggcgctggatccctctcaccgactccagattcacagaagctgctgagctcttgagtgtatgctggttggaaatccttggcaatatagacagcaggatgctctccccgaactcaacttatgctgcagttttggtgttcaagatagctgaggagttctaccagctggatactatagatgcaacagtcaacctcggaggctcgaaatcaagtcgcgaggttgctctcactcgatcccgtcgtcgtcctgaagaagagatcagtgcagtactgttccctcggacaagagctgacggctggatggaggtggagctaggcgagttcttcaacgaggaaggtgaagatggaaacgtgaacatcagaatctttggtaaaggacccaattggaagaaaggtcttattgtgctgggcattgagattagaattaggaaatctggcagatgatcgagcttctaggatcaaagatgcgtcttgggagtactgaaatgtataagatttccgatgcctgaagctttggtgttttagtggcatttgcttttgctgctgctagtgatgggcaaaactagagggtgtttcctcttcttgtgggtaatctgacggacctttttctcaattgctggggacaaactgaacttctgtagccgacatcttggttcagtgctggacgattgtctacatctggtttggaagatgcaactagagacagctatatattgccattttaaatgttgagt

SEQ ID NO: 12957 - DNA, 2740 bp, Oryza sativa
  ref <308>: DATABASE ACCESSION NUMBER: AK110305
  ref <309>: DATABASE ENTRY DATE: 2001-12-06
caaaatccccgccgccgtacgcatgacgcgccggcccgcgcgcgacaccggcagcggttggacggtggtggtggaggcgctcaattcgtatgacgacgagaagaagtggcgctggaagttggcgtgtgacccgacagacagcgtgttggacctcaagttttggatcgccgaacgcgccggagtggcggcggaggtcgtgcagctctacgccaaacgcacggacgcgcccgctccggccaacggcgctgccgctccggcgccgcacctgcacctgaacctgcattcggacaatgacaccctcgtgaagttgggcttcaaaccccagggcacggtgctgcgtgtgcagtacgtgttcccgtccaccacccccggccacggcgccgtgcaccgcagtgagccgcgtttggtggagttcgacgatgcgcacaaccgcaatctgtgctccaactttcggttggccgcgcaaaagcaccaagaccgcaacttcttgggcacgcgcgtgttcacgaagaacgcgcagggcaaagaggagcgcggcaacgcgtacacgtggcagacgtacgggcaggtggcggcgcgtgtggcggcgttcggcaatggactgcgcagcgcattggggctgcagcgcggcgatacggtcggtattatgagcctcaatcgggccgaatggatcatcacggacttggcgtgcagccaacaggggctcatatccgtgccgctgtacgacacgttgggccccgacgccacgcactacatcgtcaaccacgcgagtgtgcgtgccgtggtcgtgtgccgcgaaaagttgggcgaaatccagagcgtacgcgacaaatgcccgacgctgcagttcgtcattgtcatgaacgagtacccgggtgatgtggaatacgtggccaaagccgaccgcaacactgcgccgttcagtcacacgttcacggaactggaaaaagccggccgcgatgcaccgcaactgcccatcgtcgaaccccgacccgacgacctgctcaccatctgctacacgtccggcaccaccggcaatccgaagggtgtgatgctgacgcacggcaacatcctgtgtgcggcgctggccatcgccaatcgccttcccaaggagcaggagcaggtggagacgctcatgtcttacctgcccgccgctcacatttacgagcgcgtggtggagtcgtcgatggtggcgcgcggccacgccattgacttctatagcggtgacaccaccaaactcgtcgaagacgtcgccgtcctgaagccgaccatcttccccggtgtgccgcgcgtgtggcagcgcgtgtacgaccgcgtcaactcgcaggtgcacgagtccaacccgatcagccgctatctgttcaccaaaggctatgcggccaaacaggacgcactgcggcgcggtttggatgacacttacaacaacaacaaaagcagccccaacgtgtgggaccgcgtcgttttcagcaaaatcgcgcaaaagtttggtggcaacctcaaggtcatggcgtccggtgcggcaccgctcagccccaaaatcgcggagttcatgcatctcgcgtttcagtcgggctttgcggagggctacggtctcaccgaaacgtgcggtgggtgtacggctacgcacgtgaaggacgtgaacttcgggtgtgttggcgcgccgattgcgtgcagtgaggtgaagctggtggacgtgccggatatggactatctggtgacggaccagccgtatccgcgcggcgagatatggatccgcgggcccaacgtgtttaagggctactacaagcaggaggacgtgacggcagaggtgttggacagtgacggttggttccgtacgggcgacgttggcctgtggctgcccaccggtgatctgaagattatcgaccgcaaaaagaacatcttcaagacacagcagggagaatacatccgtccggagtacatcgagggagtgtacaaaaactgcaagtacgtggccaatgtgtttgtgcatggcagcgggctcgaaaactacctcgtcgccgtggtggtgcccaatttcgagaacgtcaccgcgtggtgcaacaccaacggcctgcaggccgtggccaaagccgggcccgaggccatggccgcgcacgacaaagtgcgcgccgtcattctgcgcgccatggcacagcaggccgaagcagaaaagctgcgcggctttgaggtggtcaaagacatcactctcacgcacgtcgactttacggtggacaacggcctgctcacgccctcgttcaagctcaagcgtcatcaggcaaccaaacacttcgacgctgccattcagaacatgtacgcacgcaccaacgcagcgctcgcagccggcgacaaacccgccgctgcggctgctgctgccgcgccggctgccggtggcgctgcgaagcccattaaagccaaactctaagcgctgcgaagcgatgccgctgcgcagcgctgcgaagcgacccacaaacgcgcgttcatttccactgtggcaatgcgcgccgcttccgtcgctcatcccgacgctgagctctcgatttcttccgctgaacttttatttgtatgaagcactgcgtctcctctgccgctgataatgcggatcgcgcactctgcgtctgtcgtttgcccctctgctctgagtgtgctgtcatttgtgtcacccgccaccaccgcatcacggtcactctcactgtcacgcctgccactcgcgtgcatgaactgctcaattgaaggcgtttcg

SEQ ID NO: 12958 - DNA, 2760 bp, Oryza sativa
  ref <308>: DATABASE ACCESSION NUMBER: AK110306
  ref <309>: DATABASE ENTRY DATE: 2001-12-06
aagcgaaaaaccgagtttgtatactcgataaattaagccgaccggcagcgatggcgtcggcgtcgccgggcaccgcgggcgctcgggccgctgcagcgacacggcctgcgttcaatcagttcgcgcgcccgcccacagcggggcagaaacggccaccaccgcagcgcgacgcgcataccgcagtcgccggcaccgtcgcagcggccgaggcggcgcgcgcgtatctgaaacggtcgcgcgtggagttggcggaggagtcggacgcagagctcgcgcgccaccgccgcacgctgctgcagcgcgaatacgccgaacgcacgcggcgcgcggtggtgtgggagttcaaacgccaatgcgacgcgttgtgcgctgcggacggcaaacccgtcgcctctgctgctgcggccgctgctgccgctcccggttctgccgacacttcggatgaccgcgctgcagtggcagatgctgctgcagatgctgctgtggacgatgagccgccgtcgcgagtgctcactgaccagcagaccgccacggcgctgcgcgtgttcgccgccgaatatccggtggacgcaccggccgcagcagcagcggtggcggcagaggacggcggcggccgcgcgcctcagcgcacgcgctcagtccccgaatcgctacgcgccgccgatccggcggcggccgcggcgttggaagcggccagagcgggcggcggcggtggcggcagtggcgcgcgcaagtatttggtggcgcgatacacggacttttggtggtagtacctggggctggagaagctgaagcgcaatcactacgaactgattcggcaccacagcgcgtgcaatctctatttcgatatcgagttcaagacacagcccaaccccacggtcgacggtaacgccgcagtggagctgttggtgtcacacaccatcgcctttctgcaccgctggtacggcgtcaccgttacgcgtcggcatttcgtggatttggagtgcacaaccgccgcgaagtactcgcgtcacctcatcgtccgcctctgcgacggcactgtcgcagcgcccgcacacgcacccgtccgtgcgtcggagtccgcatcggctctgggcgctgctgcacagccggccggtgcgacaggccctcaggcgttcgggcgctatgcgttcgccaataacttgcacgccggcgcgttcgtgcgggagctctgcgcccacatcgagcgcgtgcggcacacaacacaccctgagctgaacgcgctgtacgtcaacgccagcgcaagcgccagcgcctgcgcccgtggcggtgccgacaccgggccggacgcggcgaaggtgctgtttgtggacaccggcgtgtacacgcgcaaccgctgcttccgcctctttctgtcgtgtaaagcgggcaaagcggagccgctgtacccggcgtcggccaaatccgcgtccggtgcgtccggacgcgctgtcgacgcgaaggcgctcgcatcgccggccgctcccgcaccggtggtcgccgttgcgggtgcagtggctcccacatccgcagttccgtttcagcggtacccgtaccggccggcgcaacagaaggagtactttctcgcgagtttggtgggcaacacactgccaccggcactggtgtggcgcgccgatgacatcgccaaagccaaagccgccgcagagctgagcgctgacgaaacggacacgccacaccgcagggctgaggccgcactcgacgccgagttcgccgcactgccgccgttgcagtacctcacgtgcaacccggcaccggcaccggcgtcagagccagccgcgcagcccgtacccgcaccaccagctgctgcggccgccgccgcatcacccgcaccgctacagttcgttgcaccgactgctgcgtccgcaccggtagcacccgcgcggcccgccgtggtgtatcgcattgtgaattcgttggctgaagcgggcgcaccggcagcgtacgactttactcgcgcgccagcagcgccgcgcgtgacgcgtgccgcaccacacgccagcgcgttcgtgagttggagcggcgccaccggcggcagttggcaccagcgccacggcgcatcgccgttcccgcgtttggaggccgctgtcacgcgcgcggcgacgatcaccgacgatctgagcaccggcggcagcggcggcggcagcagtggtggtgctgctgcggcgggtggtgtggcggtgatcaaaacgtatcgctacgctctcgcagcggacgggcgcgtggccacggtctgttacaacatcagcggcaaccgctggtgtggccgcatcgggcgcacgcacaagtccaacggcaaatacgccgtttgcgtgctgctgcccgccgcagagccggccgctccggctccggccggaggtgcagccgctgcggccgcaaacgacgcgtttgtgccgtatttccacttcaaatgccacgacccggactgccgcggctggcgctccgacgactttctcatcgaaccgcaggccgtggcgcagcccattccgaagcccaaattcgagccgacacccaaaccggtcgctgccgccgccgctgcggcagcagcagctgcagcagccgctgctgtggccggtgctgatgacgacgatcgcgcgttcgaagcggctctctcggagatgccgctcccatgatccaccgaatgcctttccctctgtctttacgcctttcaattgcgctctttatatctatcgccgttctgatttgccgctttgactttcgatggactgacgtacgctttgc

SEQ ID NO: 12959 - DNA, 3307 bp, Oryza sativa
  ref <308>: DATABASE ACCESSION NUMBER: AK110307
  ref <309>: DATABASE ENTRY DATE: 2001-12-06
ccggccattctcgaccttctttcgtcggccaagacacggccagtagttttattatcagctagcgtagcttggtgccatttgagttgagagtagcactttgtctgagattatggaaggacctgtgagcgcgtcgatgggtgtcatggtccctttgctgtccaagctcatcgagagcatggaacagccgaggttcaaggacctgaagaacgacttgaagtccctcagggccgagctcgcatccatggaagctgtaatgctcaagttcgccacgcaggacgacactgacctgcaggtgaaggagtggatgaggcaggtgcgggaagtgggctacgacaccgatgactggatcgacagccaccctctggtggctgcggagacgaaggggtcacgcatcttcagccggaacaaccggcggaggaagctcgctgagctgataaaggagctcaaggaccgcgtcgaggatgccagccaaaggcggaccaggtacatgctccagagcgcccctgtcgtggacgacgtcaccgacgacctccgccccagcaacgtcaccgtcgaccctcagcttctgtacggtgttagccgtaggctggttggactggatgagcctatggaggagctcgcccgcgaactgaggcctggcggcggcgcgcagcagcacttcaaggtggtgtccatcgtcggaggcggtggccttggcatgaccacgctcgccaaggaggtgtaccgaaagatccacggcgaatttgtctcttgtgcattcgtcactgtcggccagaacccgcatattccgacggttctgctcaacatgctccgccagctcaaccccctgcagccgcaaggggatgacactgagcaacagatggatgaacccacagtagtcggcaagatcagggagttcctcgacaaaaagaggtactttatcaccattgacgatatatggagtatatctgcttggaaggacatcaaatacgctctacccgagaatactcctggaagtagaatagtggccacgacacgtatcagcgatgtagcgaaatcgtgttccgtccgccccacggatttcacctatccgatgaagcatcttagcaagactgactccaagcaactgtttctcggcagactgcagtctcctaagaaaatttactcttctgagactgacctggaagaaggggttttccatgatgtttggaacatatgcggcggcatgccattagcgatgatcgtcattgccggtatgctgaacaggaaatcgccaggctgccctgaggacaataaaagcatcaagaaagcactggagaaacacccgacgttgcaagggatgaggaggatactacgcatctgttactctgatctctctttacccgtgagaacttgcttgctgtatctgagcatcttccggccggaggatgaaacggtggagaagaaccggctgatatggaggtggatagccgaaaggttcatcccagtcctaaagcaggagcaggtcacgttatgggagacggccgagagctacttcaacgagctcgtcaaccgacagctgatccagccggtggaggcgggggacgtcgtgaaggtgaaggtgcacgacgtggtcctcgagttcatcgcgtctgtcgctgccgaggagaacttcgtcacctcggacatggtgctgcgttgcaagccacgtgacatcgtccggcgggcctccctcaactgcatcgacgacgacgagagcaccggaggcctgtctcaggtccgttcgctgacggtgttcggcgtcctcgccgagcccatgaaatcgagcatcgtctacttgcagctgctgcgagtgctcgacttcaaagacgccaaggggctgaaagatgaagatgtacaaggtctcgagaggctcttcttcctcaagtaccttgggctcggcggcaagttcgtcacaaagctcccagagaagtggaaggagctccagaacttggaagccctggatgtgagggagaccgccgtcaaggagcttccagaggcgatcgcccggcggtgtagcaagctggcgtgcctgctcgcccgtcgcctcgccgtcggggaggggatgcacagcttgctgcacctgcaggagctgtctatggtgagcgtcaccgatgcggcctcgctggaccgcatgactaatctggtggtgggcctgaccaagctgaggaagcttggcgtgagtttgtttttcgacgccacgggcgaccagcaccagcacgccgtggccgccgctgctcccgacgacgccaagctcgccgcctccctcgagcggatcgagaaatgcggcgtcgagtcgctcctcctggacgtcgtcggcgagggcaagacgcgcgcggcgctggatcagctcgtggagaagtgggcactgccgcgtcgcctgcagaaattcaccatgaggagcgagcactactacttccccaaggcgccgcccaagatggcccctcacgaatccctctcccacctcgagatctccatagccgagctaaggaagagcgacgtcggcgtgctctgcaccatgccttccctcttctacctcaagttgagcacaagatcgtctccgctggaggcggatcagacggtggtcatcaccaacgtgggattccagtgcctccaggtgttctggttcaagtgccaggacggcggcctggggttcgacttcggagacggagccatggcccagcttctgaagcttgatctccacttcaagcaggcgaagaagcccaagcttaccggcatcagcaacctctcttcgctccggcaattccacgccaccgtctgctgcggtaaagatgattcagaatttaaggctacagaagaaaacatcaagcaaatcgtatcaaatcactccaagaatcccacctgggaggtcaccatggagatggagatcgacaagcctactgcagccatctcaatttgatggatgctaccaaaactcaaggtaccaacatcaacacgacagtcgctactcgctactccaatcaatttgatgactgcttccttaattcagcctgctttttccttcaccgcccttaatttctttggcaattcaaacatgttgtcgatctacaccatgacacggcgtagacgcaaaattacttcttcaacatgcatttcgtggaggaagccatcttcaggacggccgcctaccacaaatccacaatctatcaagcttttgtctgttttattctatcatacgtcaaggaataattagtggcatctaagacacttttgtctcttgcacgaggtttattaggtggcatcttgtaatctttcgtgatttcaggcttttattaatttccttatatgc

SEQ ID NO: 12960 - DNA, 4138 bp, Oryza sativa
  ref <308>: DATABASE ACCESSION NUMBER: AK110308
  ref <309>: DATABASE ENTRY DATE: 2001-12-06
aagcgaaaatccgagtttgtatactcgaataaattaagctcgcgacgcaatgtcggaaggcgcgagcgtgaaagtggcggtgcgcgtgcgcccgttcaaccagcgtgagatcgacaagaagtcgaagctgtgcatagcgatgccgtcgcgcgagacgacaatcatcaatcagcccgaaacggacgcgcccaaaacgttcacattcgacttctcgtactggtcacatgacggcttcaaaaaagacgaaaagggcgtaagtgtgccggacggcgacaccaaatacgcgtcacaggagattgtgtttcaggatttgggcaaactcgtgttggacaatgcctttgacggcttcaactgttcgttgtttgcgtacggccaaacgggcgcgggcaagtcgtattcgatggttgggtatggcgctgaccgcggcatcataccgatggtgtgcgacaaaatgttcgaacgcacaggcgaactctccaaaacggagcccaacaccacctttcaggtcactgtcactatgttggagatctacaacgagcaggtgcgcgatctgctgaacccgaaggcgtcggcgcagaaagacggcctgaaagtgcgtgagaagaagggcatcggagtgtatgtggagggtttggtgccgcgtccggtggcgaactacgcggagattgaggcgcgtatggaggagggcacaaagaaccgcacgattggctcaacgaaaatgaacgccacgtcgtcgcgcgcgcacaccgtttttggtatcctcttcacgcgcaaagccaaagatcccggatcgggtcaggaggcagagacgacgtccaaaatcaatttggtcgatttggccggttcagagcgtgccgactcgacgggtgccaccggcgatcgcctcaaagagggttgtgccatcaaccagtcgctgtcggcgttgggtaacgtcatctccactttggccgataacgccggtaacccgaagaaccagaagttcgtgccgtaccgtaactccgtgctcacgcgtctgcttcaggacgcgttgggcggaaacagcaaaaccattatgatcgccgcgctgtcgcctgcggacgtcaattacgacgagacgctgtcgacgctgcgctacgccgatcgcgcgaaaaagatcaaaaactctgttgtgaagaacgaaaacccgaccgaccgcatcatccgtctgctcaaagaggagaacgatcgcctcaaaaagctgttggaaggcaaaggcgtggacctgaacgctgcgatggcggccactccgggcggcggtgcgggcggcgccgatgtcgatgcgatgaaaaagaagtgggaagaagagaagaaggagaacgaccgtatcatcgcggaaatgaagaagtcgtgggaggagaaggtcaaagaggcgcaggcgacggccaaatccgccggaccagactcggggacgagtgcggttttggcgaaaacagccgcggcgtcgcgtctgccgcacatcgttctgctgaacgaagaccctcagctgtcgggcaatttggtttatatgttcaaaatcggcactacaaagatcggcaaacgccatagcgacggcgccgccgaaaagcaggacatcgaactgacgggcctgaacgtactgaaacagcacgccgtcgtggagaacgacgccagcgctaaggtgagcattgagccgctcaacaaatcgcgtacgtttgtgaacggcgaactggtgaaagccaaacgcgagctgaagcagggcgatcggcttgtgttgggcaacaatcagcacgtgttcaagttcgtgaaccccgccacaccgggctttaaggaggacgacggcaacgtgggagaggacgagtacaatcagatcatgaaagagttcagcgataaacagggccttaataagtcgtcgatgagtgcggaagtgcaaaaactcgaagaggaagagaaaaagacacgcaaagagctggaggacaagctcaaggccatggaggatatgctcaagagagagcgcgaaaacgcacgcaaagacatggagagtgtgcgttctgtgatcctgaaaaagggcgcactttcggacgccgacaaagcgtctctgcaaaagttggaggccgaattcaacgataaagtcggcaaaagcgacgcgcaactcaaagagcgcaaagagatggaggcgcaaatgttgcaggagcagttgaagcgcaaacgcgaaaaccaaaaagtcgagagtcagctgtcagcattgataccgctcgtgaatgaggtgaatcagatggccgaagagatgcaaaagcccgtgcgcttcgaggcgaagctgatcatcaaaccgacggccaccatcaacttcagcactttggacgaaattcaacacctcaaaaagatcgacgttgtggtgcgcgtgcactcactggccaacggcaatgtgtggacgtgggtcatggagaagttcgaaaaccggctgtttatgatgcgtgacatgtatcaggcgtttcaggatttcgggccgcaggacgtcgggcagaaagacccgttttgggacccgccggaggccatcgaaatcggcaaagcgtacgtgtacctgaaggcgctgtcgcaattggtggagatcgaaaacgaatttgccattatcgatcacgccggagaggagcgcgggtggttgcgcgttgagatcaatcccgaggggctgaacggtgaggagaaggagtatttgggcaccagcgacgagctgttggagaagagtgtggtgttcaacgtaaaggtaccgtacgcgcgcggtctaccggcgaagtacggcaacggcgtacacgtggtgttcaaattcaacggcgaaacgtgcgaaacagagcagtgcgacagcaaaaccgctgacccaaaatggaagtttgcggccaaaataaaactcgaaaaagtcgaaccaaaacacatcaaataccttctcaccgaagcgtgtgtcttcgaaatccgcggttttacggacaattcacgcccgccgaccgctgccggtgccgtcggtggtgcggcgatggcgggcgccggtgctggtggtggtggtgcggcggcgggtgcgttggccccggcactgtgcccgatatgtgaagagcgtccaacggccatcaaatgcacggactgtgaggagaagaagcagttttactgcggcacgtgctggcccgtgcaccacaagtcggcggccaaaaaaacgcacaaaaagctcgatgtcacgccgggtactgcgggggcggccggtgcggcggcagcggcgacggcaggcaaagacgagaaggcacgtcccggcggtgcggccggtggtggtggcagcagcctcatgcggccagcgacgaccaatgccgctctgctctgtgactggtgcagtgaacagcggccgaccgtgacgtgcgtcgagtgcaacagcgcgttctgcgacacgtgcaacggcgtcaaacacaagtccaagacgctgcaggcccataaccggcagccgttcgccagccccatgggcccgcccagccctggccctgcggcggcggcgcccataccctctccggtcgcatcggcaccggcagcggcagcagcagcagcagcggcaccggcgggcggtggcggcggtggtgcgggtttgtgtcagaactgtgaggagcacgcggccaccatcgcgtgtgagggttgtgagggcaagaagttctgtgacacgtgttgggcggcgaaccacaagtcggccgccaaaaaggcgcatccgaagaagcagctctaaacgccacaccgcaccgccacaccgcccatcacagcactaccaccactccaccgcctcctctcaacggtgtcggtcggccttacagctgtgcattgtgtgttgtgttcatcaccaccgctgtgacgcccgaccgcgccgctcgccaccggccgctgcgccctctacgtctgcgcagcggctcaccaaattgcaatcacatttcctcgttcttccgcggcgccctgcggctcacccatgcgctggtgcgggcgcgggcgcatgctgcgccgcgacgcgccgcccgactgtcacgcctgcgtggggctgctgttgccggcttcaaaccttcgtatcgcaattctctctctcagcagttcgatagcgtctgttcgtcacccgcacgctgcggctctctcgaaaactctctcttcatcc

SEQ ID NO: 12961 - DNA, 2476 bp, Oryza sativa
  ref <308>: DATABASE ACCESSION NUMBER: AK110309
  ref <309>: DATABASE ENTRY DATE: 2001-12-06
ttgtgttgtcagtctactggcactttctgcttgcatgcctttggctcggtgacaagacatcggtgaacatctggaaaatggacctgcagaaagctgctgccgatcgtgacccactgaatgaccctttgcagtttggcatgcaaaatgagccgctggattcacaccatgacgacttgccagatgcatatggcagcatcagtcatgacgaaactcagcatatcgcagctggcactgctaccacgccgtcagcaccagagcacaaccccttggcacctgtctcacacgacagcgccaaccccctgtggcagcactacccagagcctccagcaccaatagcaacagcaatcgctgagaggccactaacagtggctgctgggaatcaggccagcagcagcagcggggctggctcccggtatcctgaagtgcctaccgccactgatctcaatgtgccactcagtccaaccagcaccttcagcggcagcggtacaccctcagcagcagcagtgggtgcggcagcagcagctctggctcttgcagcagccgcacacggcggtgctgtaagccctcctccagtgggcaaccctgagctgcgcattgtggttcagaacccgctgaagcacatggggcctagcggcctggtgccaggccttgaggaggcctacatcagctacgaggtgaccactgtgaccagcctgccccacttcagcagcaccaggctggctgtacggcggcgcttcagagactttgtcagcctgtcaaacctgctgccaaagctgctgcatggcagcttcctgccagcgcggccggagaagaacctggtagagtcgcggcgcatgacgtcagagttcattgaggagcgccgcgccgcactggagcggtacctcaacaggctggcagcacacccggcagcagcacgcagcgaggcgctgcgtgtgtttttggaggctgagggcagcctgcgcagcaacccccagtggcttgccctgaagcccaaggtgctgacgcccattcaggcaaccaacaggctgctgcgcaccattgtgggggcacgcaagaccgcgcccacacccggtgaggtggtgcagccggctgctgccaaccgggacatctacaggctgctgcatgaaaacctgcagcagctgcggggcagcttcaagcactcgccactcaatgcagaggaggttgcacttcgtgatgacactgtggtggtggaggatgaggcggcagctctgcatgtggcactgcaccgcgcggaggcctggacacgcgctgctgagcgccgctccgccctgctgggtgaggcggctgtcgcactggaggcactggccagctttgagggcagctacacatactgccagcgcgcaaacacagcagcaatggaggcagcggcacaggcaatgcaggcctgtggggcgtcatcctctgcggcagctgccgccagcagcaagctgcttcagccactgcgtgacaaccacgccgccacacccaacgtgatggcagcgctgcacggcagggagcgccagctgctgaccgtaatgacgctgcgccaggacctggaggacaagcgggctaggctgtcggccgtgcagctcacgccagcgagccaggcgaagaaggttgactccctgcgcaccgttgtcgggcagctggaggtgtcgtctgctgctgccgaggcggagtacaacaggcagctggcccgcaacagggacgagctggcagcactacggcaatccaggggccaagagctcacagcgatgctgggcgcccttgtctcactggagctgaagcaccagcagcagcaggcggctgtgtggcaacagctcctgcagcagctgcctgtgccgggcatgacaactgcctacatggcacagcatggcttccacataggctcgctgtcatgaagcctattagtatgccgcagcaaagaacactgcccgctctgctgtcctgtctggttaggtgttgtactgctggtgatgtgcatggtgagttatggcaccggtgcaacttggtttggcggtgaaccatttggtgaagcctgtatgccaacgcacattgtttgcttgcagtttatttctaatgcagcgctgctggttgatatgtgcttggcatttggcattgcccattgcacagttgagtggccgtgcctgggtggctgatgtcaccaccaattgtaccaccaggtcaaactcctgaggcggccagcctcccagaggccccattatgcagaagctccaaccaatctgtcagtgaagatgtggattaaagtgggctgatcgttaccagaacagaaggtgttgctcttagatgcacatctgccatgcataagttgggtctttctttggtttccggttaggatggtgttagtggtgccgtggaggtgcccgtgaatggtgtcgatgtcaaagtggagctcattgacaccctaaaagttgctttgctgtaaagcagcattgtgtgtaaaagctgggtgcag

SEQ ID NO: 12962 - DNA, 2771 bp, Oryza sativa
  ref <308>: DATABASE ACCESSION NUMBER: AK110310
  ref <309>: DATABASE ENTRY DATE: 2001-12-06
aacttcatagtgtcctagcaacggcgtcaccggccatggcttccggccatctcgtcgccgtcgccgtcgtcatcggctcgctctgcgtcgcggcagtcggtcaggggaacaatatcgcgctcccgttcgcgccgtcgtgctcgaccgccggcaactacaccggcgacagccagtacaagaagaacctcgaccagctattcaccaccctctccgccggcgccatcgccggcgactggttcaacaccagctcggtcgggacgggcgccgaccaggtgttcggcctcatcatgtgctacgccgaccgcaactcgacgcagtgccaggaatgcctcgccggcgctccggccgggatcgtgcaggtgtgcccgggaagccgaacggcggacgccaactacgacgcctgcctcctccgctactccgacaagtccttcttctccgagctcacctacggcgccgaccccaccatcgcctggaacgtctacttcacccccttcgtcgacaacatgaccaccatgaacgacacgcggcggcggctgatgagccagctcgccgagagggccggcgacaccaagctcaggctggacaacggcagcttgccgtacgccgactcgaagctcggcacgtcggcgttgtacgggctggcgcagtgcacgagggacctggcggcgagcgagtgccggaggtgcctcagcggctacgtcgacgacctcagcaacaccttccccaacaacagcggcggcgccattaaggggtacagctgctacctcaggtaccatctttggccgatcgacatcacgctgccgccgccgccgttgccaccgccgtcgcggcctccgtcgtcgtctccggcaccgccttcacctcctccctcggtgtcgggaggactcgtggccggatcgaccgtcggcgccgtctcgttcttggtggttcttggtgtctcaatctggctcctcttgcgccggcggcggaagcgcgccggcgaggcgagggagctggagatggacgagggcgacttcttcgacgatgaggccgatgactttgagaaggggactggtcccaaacggttccactacggcgagctcgccatcgccaccgacgacttctccgacgagcacaagctcggtgaaggcgggttcgggtcagtgtacagaggattcttgaaagagttgaaccttgacgtcgccattaagagagtgtccaagagctcgaagcaggggaggaaggagtacgcgtcggaggtgcggatcatcagccgcctccgccaccgcaacctggtgcagctcatcggctggtgccacggcggcggcgagctcctcctcgtctacgagctcatgcccaacgccagcctcgacacccacctctacagcgccaacgccggcgtgctcccatggccactcaggcacgagatcgtgctcggcatcggctcggcgctgctgtacctgcacgaggagtgggagcagtgtgtggtgcaccgcgacatcaagccgagcaacatcatgctcgacgccgccttcaacgccaagctcggcgacttcggcctcgccaggctcgtcgaccatggccggggctcacacaccacggtgctcgccggcaccatggggtacatggacccggagtgcatgatcaccggcagggcgaacgccgagtccgacgtgtacagcttcggggtcgtcctacttgagatcgcctgcggccggcgaccgataatggcggaccaccaatccgaggtagacgaagaccggatccacattgctcagtgggtctgggatttatacggcaatgggaggattcttgacgccactgaccggcggctcaacggcgagttcgacggcggggagatggaggctgtcatggtcgtcgggctctggtgcgcgcaccctgaccggagcctgcggccaacgatcaggcaggccgtcggcgtgctgaggggcgaggcgccgccgccgagcctcccggcgaggatgccggtggcgacgttcctgccgccggttgatgctttcaaccacacatcatcttcagttgcgacaggaagcagcagcgccagcacagacactactcggtcgtccaggacgaccgagacatcttccttgctgaaatgacacttgagcaatgacgttttttatcagattaattaactgcaaaaatgaattgattttgacaggagcatcatacctgtttttgactagagtatgcagctgattttggactggtaatatgatgaacattagttacataacacaagaacacaatggcacaaacataaaagggatacagctattgacactttcagcataataattagtgttctcatttattattgccccaagccatcatataaaagggacttcagaaaggtagatcaacagctcataataattcacagtgtatgtctattttcaaaaccatttacaacgaaaaggccggtctaatggcgtcccttccccccaacctacgcccagccgacctctccaatctcctttgctttcttccttccattggaccattcacggtacaggggaagtataatcaagagttctccaatagattgtaactggtactaattaagcagcagtggcaactggagtgtcaggatgggctccccattcagtccatgatccatcatatacaggaacgtcggttttgccaaggcggtggaggccctaagaagaaagcataggttatgcgacgtaatgtaacaattgcaaagtaaatcttgtgaacttccaagtcacaggtagtcttaccagagctaatatacatgctgtcacacc

SEQ ID NO: 12963 - DNA, 3798 bp, Oryza sativa
  ref <308>: DATABASE ACCESSION NUMBER: AK110311
  ref <309>: DATABASE ENTRY DATE: 2001-12-06
taacgaaattagaacgtcgctatctcgaaaagatgctacaccctttgcatccccatcctttggtgagagacttttccgagcatcgctggcattgtgacggaaacgctcagccaggtgggtgtcgccgagtgcaaaagcttgatatgcaaaagcccgtatttgggacagaaacccctcgatttcgttgcgctgctggttgcgattacgatctttgtgacaagtgcttctatgctattccgcgcattggcgaagatgcacagccctttgacgagcgtctgttccagtccaagatcgactccgctgtccaagccgtggagcttattctcgagaagacacgtaacccgcgtgatccgatgactgtgcgccacgtgtacgacgacaagttcctgttcgtggaggcgctgaccgacgctgcgctctcctcgctgctgttctcgctcgaacagctgggcgtgaccccggacgcctgggcaaagatgcgccagtgggtgtacaaggagcagcgcgccgccaacctgcgatttaagtccactgaaaagtgtgtgtttgtgaagaaggtggagcgcaaagtggaggacccgtcgagcatccaggcgcgcaagaacgatgacagcctgctgggtcagatcttccaaacgaagctcatccacaccattgtcgactactactgggcgctgactgtcgagtacgagctggtcgtgttccctggcaacagtcccgaggaaggcattcctcttcaaaagcgcaccggaggcgcacaattgatcaacaacactgaattcccactgccgcgcccctcagtctcggtgaaggacccgatcgacgtcaatctcacgtggctcgtgagcgaacacgtgcgtgcctccgagtctggccacgcctcgccgctgcctttccagttcaaaatcgaccgtcgcgtcaaagagggccgctgtcgcacgccgcgacgcaatggccgcgtggaggagtgtctggaatatctggcgcgccagtaccagtgggcgacgcgcgtgcgaaactactttgccgacgacctgctcgccattcccaacgcagagaagaccgactattcgctgatgaacgccgagcgcgttttcaacccggtggtaccgctattcgaatcgcacgtcaagcgcgtgcgtgagagagcccgagaagaggcgacacgcgcgctgctgccatctgacaccaccaccacaagctcatcgacaacagtctcaacgaacgccaacaccgatgcgatcgccagcgtggaggcgagcgagtctggagagattgcttcgaaactgcccgccgtcgtgctggctgcgtcggacatcgcctcattcctgagcgaggagcgacgcacgttcacagaagtgattgtggacatgggcaagatctacatcagcgccgagagtctggagaagggacgggatggccgcgcagtcattgtgcaggcgcgcgagctggtcactgccgcggagggcaagctcgtgctcgcactgtcacacgtgttgcacgtggtgcagcgctactacgacgccgtcaactttgtggaagacatgctgcgaagacaactgatcgccgccattggccgcgaagtgaaccacgtggacttcgacaacttcatgcacttccatctgttccgcatcctccgcacgccgtaccagccgcgacccttctcctacggcttcaacgtgcccgagcactgtgccgatggcgtcctgcaactggacaagattggggcacgcggcagtaacccgatctataccttcgtcaacaaaatgccaatgcaaaaaccgcttgaattcttcatcaacgccgcgacgaagatcacttgccgtggcaatcagcacgtgcatggcttcctgaagcactctttttccaacagcgaccagaacgaccaattcaagctttccctgcgcgcgaaacaattcagttgctttgtggtgctgattggcaaactgatttcctcgactctcttcgatccgcagtacgcgttcctcgtgaaggacaaggatgagctgtcgattccgctcgaactggctcagatcccctctgcgaaggagttcaaagacgccatcgagtcgctctcgcctgagcagcagcgattctgcagggcctaccgggaaatgcagctgtcgtccacgctgtttggcatctgcctggtgcacgtgaagccgcaactggagaagatcctgaacctgccgccagacggcctggccaaggaggtcaatctgacgcgcaacttgctcgatttgtttatcacctaccaaatcccgagtgacatgctctcattcgatgcgaagacttcgaagcagaacaagcagcgagccgagcgcggagaccagaagttgcttgctgatagcgcgcaagccaagactgcgactactaccgatgcttcctcaacgactgattcggcacagcagcagcagcagccaggcgaggcggcgccactggtggagttcacgccggacatgaagctggcggatgtgatggcgcatgccgagggattgttggacatgatccagggcctgaaaaccgaggagttggcgcagaagagacgcgaagccgagacgcgattagcgcagcagacgtctcacatcacccgatgcgatggcctagacatgcttgatccgttttcgcccttcggtggcggttatggcggtggcggcccaatgctgagcggagggctgttctccgcagcctcgaccgggggaccagggaattacgcgttcggcagcgcgatggctgtaccgatggcctcgcctttcctcgcgccctcgtcttcgtcgacgtcgacgaactccgcctcgctgggtggggccacgcgtggactctctgctggcaagcgaaaggcagtgattcaaagcgccccgccatctgacgctcgtggatctggcgccgtggctgaacagaccagagcctccccgcaacctgccgaccagactggcaagaatgccgcgaaggacgcgaacatcaacaacagcaacaacagcaacagcaacgcggctgatcaatcgctcgccagtaccggtgaggactcgtcgccgcagtacgacttcacgcagattccgaaccagctcgatgcgcaattcctcagcatgatgcagccgccccctcccactgacgataacgccaacttgccacgccgccctgacaacgatcacagcgcggtgcgcagcgccatcatcacgtgcggtccgctgtgggcgtacaccgagtacgagaatctcttcgccggcccgaaaatgcgtgcgctggacaacactgagcaggagcgcgagcgcacacgtgcgtacgatctgttgcaggcgttgtcgaaatctggcgcgctggcgtttgatgacgtggatttgcacgtggtgattgcgatgactcactgcttcgacgagactgtgatgcgcacagtcattcagcagaatgtgaatccgatcgagtctgtggagcactcggcattgctggtggcttcgaccattcaccaagtgcctgacttgactgagctgctgacgccggccgtgttggagaaccgaggttgagacgaagaatcgaaaggaatcgagcgagagacgattcggatgggacgcttcgaaagagagaagttctcgatttagtatagtatatagaaacgacttgatatgcttgtgcagtgacgatcgattatttacagtgttgtggatatgtaaatgtatatgtatttgaggtgttgctattagtgtttctgtctgatgtatcgtgactttcctacaacagagactcctcattaattactatctgaagttgaagtttatgatatataaacggattttcgaattc

SEQ ID NO: 12964 - DNA, 2728 bp, Oryza sativa
  ref <308>: DATABASE ACCESSION NUMBER: AK110312
  ref <309>: DATABASE ENTRY DATE: 2001-12-06
aacgaacgctaaaaaagtaacagtttctgtactttattgtgaagagtccttgctcgaagaacaagacaggagggcggcttaaaatggcaacggcgctatcaagccaagtggtgatgggaccgctcagcttcgacgtgccacccgactacctcggcctgcagtacgacctcgacaccgacaagctcgaccaaacccttgtcaagctctcacagaccatcgcaaaaaacgctaaggtcactaacagcgccaaggatgaaatcgcggcgctgcgggctcacatcgacaacagcgttgccaaggttcaacgcgcacttcaagtcgtggacgactcgggccgcgccgtgaaagagcaggtgcttcgcgtctacgatgaagtaaaggcgctgcagggcacctctgtccgccgccaggagtacgatgtcgacaaggacctcacgtggaaggagctgaacaacctgtccgccttcgtcgctgagtacaaggagacgcaagggcacatgagccgcgtgcaggactgggtgaaggcttacgtccccgagtggtacgcgcacgtcagcgcggccatggccaagacgttgcacgacacgctgatgaaggcgaaggatgagacacgcgaagccattgtgcaggacgtcgcggagatgcagcgccgcgcgatggagtccgccaagaacgcccacgccattttagagtcccgtttcgacggcatcgacgccaagctgcgcgcccacgaggcccggtttgaagacgtcgacgtcaagcacgctcggcaagtcgccatcacgagcgcggtctctacaggctacgatgaactcaaggacaagctacgcgaatggatgctggacttcgctgagggtcagatggtgcaggacgcccagctggaggctgcgctcgccgtgctcggcttcaacgtcgctcaggtgcacgacctcgtggagatccagtacgcgcctgagacgacgccactaccagcggccagcgttcaaggaggaggctcgtcccgacagtccccgacgacgacgggtggagatagactgctgcccccgcgcccaacgccaagtggaggctcccacgcccgcaagggctcagtcatgtcgaccgacgacgcggaccccgcccaacggcgcccaagcaacgccatgaacacgtcactgccacagctgtacgcatcaagcgagaacctgcctccgccacagcgcggcagtggctcggcgcgcaccacaatcgtccgagtccgcgacccagaggcgaccgccgcgttcgtcgccacgctgccggccttccggctcgctcagtcccagacggctgccgacgccaagcaactcgtcgccgacgttgccgccaaagctgcggcgcaagtgcagtcagttgcgaaggaagtccagatccagcttgcagacaaggtgggcgtctcgcgtcttaaggagctcatcgagaagaacaaggacgacaagctctactggaccgtggacagtctggttagggaggtcaaagaggtccgcgagaccaaggtcgacgcagcgcgcttcgactcggctatgtccgccaaggctgacaagtccaccgtcgacgacaaggcggacaaacacttcgtcaacaccgccatcagccacactgccagtaaggcggatatggtttccggcgaacttgacgccgtgaagagccagctgaaggatgctctgcagttcatccagcagatgaaagccaacggcggtgccggtggcggttcgatgatgcagcccggaggcgcgatgcagagcagccaaatgcagcagcagcagcagccgtatgatggcgcgtcgtccatgatgggtggcacggcagggtcgatggggcgctcgcacggccgaggagcacaggggccgcacagcagcagcgtgacgtcgccgaatgctgcaacaggcgctgcggtcggcgggctctacgacgcgacgcaaggtccccacgcgacggcggcaggatgggacggcctcagccctcgctcgcgtcaaatcgtccagggcgaggccaccccacgcggtgcaatgccttacggccgcggtggtggcggcggtggtggcatgtacccgtcagacggtccccgcggtggtggcgacacgctgtcgctgcccgcactcggctcgtatcacccaagcgctggaggcggcggcggtgatgacgacgacgctgaatacgggtacgactcgtcgtcgtcgccgcggcaaggagggcgggggcagcacggtggaggtgggggccgcccaccccgcaggggccgcggtggaggccgtggtcggcgcggcggtcggcacggtgccgccgtggacagcggcgacgaaaacggcagcggcgcgacggggcttcccacgccacctgacgtcaactcgcttggcctcggggatgtacttcaccgtctcacgcacgaggagttcctgtacggccaacgccccgacccgcacctggtgccgccacgtggacgccaaggctccgcgccttcgggttcgagctcatcacgcggactgtcttcaggaggcggggcgagagccgcgacaggggacgcggcacagtacgccgttccgccgcccgagtagcgcgcgcgagcagtacccctcgagagctgtagagagacttggttcggagaggacaaagaaaaagcgcaaccctcttttttacatcagtgtacccatgagcaattgggagttccaactggctctttcggggctgtgcgcgtgcaatagcacacattgcc

SEQ ID NO: 12965 - DNA, 3150 bp, Oryza sativa
  ref <308>: DATABASE ACCESSION NUMBER: AK110313
  ref <309>: DATABASE ENTRY DATE: 2001-12-06
caattcagccaccatccacggtcatgaccggatgtgtagatgcagctcatgatgcgggcgggggcacacatgccgatgcgagcctgtctatcagcagcttccagtgctccatatgttttgagcttttgctggatccagtagtaggtagctgcggccacgacttctgtcttcactgcatatctgcatggaaggacgaacgccagcgggcgaataagagcattcagtgcccgatatgccgagcagagctgtgcagcccctacccgtaccagccattcggtgtctgcatccggatcagggagaccattgagaagttgttccccgagcagcttgcagcacgtcgccgggatgtggagcaagctcgccttgcagcagcagcacacgcagcagcgctcaatgccagctcgcctttcagcagctatgtaaccgcagatgccgagctgcaggcatcattcagcacgtatgcagatgcatacaggcagctttcccagaatctgctgtcgctcatcgctcgccagcaggaggcggcaatgggccagcagtaccaacagcagcaccagcagctgcaagctcttcaacagatgcacagcgcatcgttgcgtgcaaacctgcagggcagcctgcagcagctgttgcggccgtctgcgcatcccacaagcagcacaaccagcagcagcagcacagcgaccacactgccgcacccgcacctgcagcagcaggccagcaatcccgcaccgggtgcagctgctggcggcgctgacgacatgcagattgatgtagccccgccagcagcagatggcagcagcgaccccagcgttgacgcgtcgctgcctcagcgccacgtgcacatgcagcaacagtcctctcctggcctggacccccaggcagcgggcgtggcggccctggtcctacagctgtcacacatacagcagcagcagcaacaggggctggtttccctgccggacagccaggctgccttgctgtatcagcagcagcaggaggttatgatgcattggtatgccagcttgctggctcaccagcagcagcagcaaacagcagcagtgggtgctgtgccaggtcatggggctcccccaggcaatgcgagcatgcccggcacacccacagcagcattgccgcgtgcggtgctcggcagctggatggtgcctgctgcccttaccagtgaagcggacctgatgcggttgtatgccagcctgcagagcaggatacagacatgtgagcggctgctgtgcatgtctgggcatgcagacatggtggcagcgcggcaggcagcagatgcgcagcatgcaggggcagcactggcggcagcagcagcagcagcaggtacgccgcctgcaggccctgctgggcaggcagcagtgccgcagtacctgctgtacctgcagcaactgcaggcgcaacagcaggcggcagctgctgcagcagtgttctcgtctggcggccacgcatggcagcagcagcaggcagtggatggcagcgctggtgctaatgcagcaccaggtggcagtgcataccctgcgagcagtgctggcttgccaggcgtgccaggctcgccgcgttacagcagctcccagcagctgctgcaggagcgcatcatgatgcagcgccacatgcagcagcagcaagcagctcaacagcagctgtggtggcagcgacagcagcaccagcagcagcagcaggcgccgtctcagcctgacctgcaacagtagcagcaggagatgcaagattggccgcacttgtgcattttgcgcagtcagtagcagctagctattgtagcatgttgtggttcatggcatttgcgaatctgtatgaatctgtgagttgacgtgctggtgactgccctatctcatgtctaccagtacgcgacatgctggactctcaacttgaaggaattaatgcgtgtaccttttcaccttgttgtgaaacaagcaaggggttccgtgtgaatttgttatcagccaggtggtggttcttgtatgcatgcacagccgacattgtgcgatgtgtgcttccatcattgctagttgttatgcttggcttgttaagcatggaacagcagctagcataattatttagcaatatgggtgccgcgtgtgcttttgatggttctggacattatggacatcaggagcgttccagacactgcatcttgtacagccatcagtgagattagcagctgtggacccacatttactgctggggggtggtcggctgagcctgctttgcatcacatgcgtgaatggcaagtagtggcgtttgctctgctacttgaggtggcgatgttgctgcgggcaggctgtgctgggggcacacatcatgtgtggtttctggttccatgtgctgcagtcaacgctcttgcacgctggactgctgcatggtcgatgtcgaaatacacctgccacaaggtgctgctcatacactgtgttcagttgtgctccctgtacatgtgatccccatggggcacgctgcccttggggggagacccaacacatcctgcacaactggtggtgtgggctctcagggtgtctcatgtcctgtgcagcatgcgttggttgccttacctcatgcccctgaaatcaactggatggacatgagaaaggaatacagtgtgaaggtgctgtggtaacgttggaagctgtacgtaccacatgcaatagggtcctcttccagcatgtggtgtgcgtgctgactcagtaccttggaattgctcatggtcttgcagcagtacagcacatgctagcctgatgcaagcacgcagtgggtcctgctggcacaggaccgcacagcactttggcggtgctcagcactttggcggcttgcttcactgttaaccgcccactcaataagccccaaggcagcttgcctgatcagtgcactgtgcactgcatgtgcctgggcttttttattgtacagcaactgtgtaggaggaacgtggcaattgtattatatatgtgctgccgtcagcatgcacattgcgcaacaggtcctgttttcctggagctggcgcgcgggcaagctttattgttttgcaccgttgcacgcacttgtgtgtgtttttgaagtccttatcactggctagtactttttcatgcctggttgctaccaacacagcgctgtgtaaacaactggacagtt

SEQ ID NO: 12966 - DNA, 2476 bp, Oryza sativa
  ref <308>: DATABASE ACCESSION NUMBER: AK110314
  ref <309>: DATABASE ENTRY DATE: 2001-12-06
ttcacaagacgtggtgtgcccgattcccatccccacccctcacccagcactcctcctgttcaaaacaacaacagtccctcccaatcccaatcatcccgcccgtccgacaacactaaggcagtgttcaactttacctagagaatgcgctgctacacatcgtttgttcctgcggtcgtcagcacgccgctgaacggcgtggttcacgctgcccgaaatgcggtggccacagtaacgtcacctcgacggctcttctcgactagtgtgaagctactcagcacttacactcgccgcaccccttccgccgatgccgccacgccgtccatcggagatgcggcgacgagcgttacgcacgcgactcgaggcgttgcacagtacgccacggcagctgcgcctgtcgatgtggaagttgcagcagcgccaccccgtcctcgcgcgtctcaaccaacctcggctccactcacgtcctccccacagtacttgattgacgtcacgccctccgctgacggcgcggagcttacctttgtcgtcgcgcccacctcggagcaatccttgtgctttgacggtcatgacacctctgcccccatccacttccgcgtcccagcgggtcggatgctggaccacgacagccgccagttccaagacctgaccttccaacgtgtcgatcctctgccccataatggagaccgacgcgtcacgtctatcgaggtccgtgacgacgatagtgtcgtcgtggcgcgtttggcgcctcgtgcagccgcaacgcccgacagcggctggagcgagggcgaagtcgaatgtcacgtgcccttctcagcagtgctgtcgagcgcgatcgcagccgcagcggcccagtgcgctgacaagcgcaccagcgtcgtcgcgctctaccctggactgtgccgcgcactgcagtcgcagcagtgcatggtgtcgattaactcgaaggcttacaatccaatccacgtcgacaccgtgcgccgcatggtcgccgggtctcccatcctgaacggaggcaacggacgcccgcagtgggctgtgccgcctgcagtggtgacgtcagcgagcgccctcgcggacccacaatactggctgcgcccacgcggggcggacgtcttgcgcgccgccacgacacgcgggtacgccatagaaacggccttcatgtccaacgcggataaggtggcgatggcgtccaagcgagtgactatcctgcgctccgtcgcgcgccatggctttgccgtggttgagcaggaccagggcgttgtgcgcggagtgctgcaggcggatctcgatgagttgacgcagcgcggaacggtggacatgcccatcggctcggcctaccgtgcggagccgcatcccactcttgaccctacggagcgccttcgccgacgcatcaccggtgtcgcgtcgttgattcacagcacgttcggcgtggtgcgcaacacacactacggcggcacgtcgacatggggtgacagcagcatcatcgaagcaggcgaagagaagcgccgcaccaacgggcaccaccacagcgagacgccgacccatctggacactgcgtacgtgcagaccggcatcgggctccatacggacaacacctacttcgctgaagctccgaaaatgcaagtcttcagttgcttgcatcgctgcccggtgctgtcgcgcggtggcgagaactacgtcgcggatggattcgccgtcgcggagcagcttcgtcgcgagtcgcctgagctctacgagctgctgacccaagtccccgttatggctgtgtattgcaaacagggccgaggcttcagcggctgccgtcccgtcctcaccgttgatggcacgtccgaggtcacgcaggtgtcgtacaacccctatgaccgagcgcccatggtcgggggcctcctctcgtcgcagacgctggacaagttctacaccgcctacgcgcgcttcggcacgctggcgcaggagaactccatctgcttccagctgcacgttggtgacgtcctcttcttcgacaactaccgcatgcttcacgcgcgcaaggcttacgccggtccccgcatcatgggcggtgcctacgttggtgctgacgacaccgcgtcggcgatggtagacgctgcgctgcgcgggttgtgaaggaaaggtgcagcgattcagcgtcgttgccttttccatttctctcgttcagcatcattccacgcatcaaacgttcacacaggcgtgtcctctccatctcagcgcgtgcatacctcaagcccaacgagcctccgttctggtgcctgcgctccaaaccgacacctacagcgcaccctatgacgtggccactaccgtttcttctgtccttctgcgcctcaatcctgaactgaaaagttgcacctgcagggccattcagtttcgtcagcgaagacccagagagcccatcatcatatcccgatcctttttaaactccgtacagcatcctgccccccttttcggactatttaaatgccgt

SEQ ID NO: 12967 - DNA, 2991 bp, Oryza sativa
  ref <308>: DATABASE ACCESSION NUMBER: AK110315
  ref <309>: DATABASE ENTRY DATE: 2001-12-06
gtcgtctcctctctctctctctctctctctctcgcctccgcttcgaaacccccgacgcgaaggaagcgagacgaaaccctcgcgcgagccgcctccgccaccgccgcctccttccgaccagccgccgccgccgccgccgcgtcgccgaatccgggcgggggctaggcgcgggctccccgctccccgccgatcgaatccttcgagggagcaatggccggcgtggtgtggatgaggacgtgaggtgggagcgatggtggggatggaagggaagggggatgcatcggtgacaccagtgaggactagtgaccggctgcgtaagcggcccaagtacttcggtcgcaattatatgtactacaatccagccatacgcaagaagatgaagtctaagaagagagcggctgcatcacagattgccaagaagctgcttcgcaagtcagctgccagggcaccgcctgctgattctattgcagcaaatctacgtcgttcaacacgaaagcgaagaatgtctgtaaatctggaggactatgacaccgatagttctagtatggaagacgatgatcttatgaggcccagatatcgatcttcaaagaataaagtggatgacgaagtgtcagctaggccaaagcgcaagaagctgtccaactctagctccattcctcgccgtgagggtttacggcctagaagatctatccgaggacaaagacttcatccataccaagaatctgaggatgaccaggaaagctctgaagaacagcctgcacaagataggagggaaaatggtaatgatatcgaagaggatggcaatgaggaggaagttgatggaggtgatgaagctgaagcggatggagatgatgaagatggtgaggaagaacaagaagggaggaggagatatgatctcagggatcgttcagaagttcgtagaccctccccacggaaggaagggaagcacagaacacaatcaccccgtagagtactagtacatggaattggtccaaagaacagcaaatatttgaaaaagggtggttcacgtatgcataagcgccctcgattctcattgccagatgattcagatgattctcttcttgtggatgagccagatgaaggtccatccatgccatggatgcgtggtgggagaggaggtatgccgtggtttttaggtggattggatatgcattgtccaggagcatggggtctgaatgttggagcatccggttggggtcatcagggtgacaacacagtgagtacttcttcacttatgccagggatccaaactgctggaccaagttccaagggaggagctgatattcagcctctccaggttgacgggagtgtgagttttaatgatataggggggctgtccgattacattgatgcattgaaggaaatggttttcttccctttgctttatccagatttttttgcaaactatcacattactcctcctaggggtgttcttctctgtggccctcctggtacagggaagacattgattgctcgtgccttagcgtgtgctgcctctaaagctggtcagaaggttagcttttatatgagaaaaggagctgatgttcttagtaagtgggttggagaggctgaaaggcagctcaagctactgtttgaggaagctcagaagaatcagccatcaatcatattttttgacgaaatagatggtttggcacctgtgaggtctagcaagcaagagcagattcacaattcaattgtttctacattgcttgctttgatggatggtctggattcacgtggacaagttgttttgattggagcaacaaaccgaattgatgccattgatggagcattgcgtaggcctggccgatttgatcgtgagttcttttttcctctacctggttatgaggcaagggctgaaatactggacattcatacacggaaatggaaggaccctccaccaaaggaattaaagacggagcctgctgcaagctgtgtggggtattgtggagctgatttgaaagccttatgtacagaagctgctattcgagcatttagggagaagtatcctcaggtctacacgagtgacgataagtttgtcattgatgttgattcagtcagggttgagaagtaccacttcttggaagctatgtctacaataactccagctgcacatagggggtcgattgtgcattcaaggccgctgtcaccagttatcgctccttgtctaaaaaggcatcatgaaaaaataatggaaagaattgctgatattttccctttcctatcatcagtagatgttagcaagttctctgccctttcctatggatcatccatccctcttgtttatagacctcgacttttgatgtgcggtggtgtgagtgttggactggatcatgttgggccagctgttttgcacgaacttgagaaattttctgttcactccttggggttgccgtctcttctgtctgatccaagtgcaaagacacctgaagaagctcttgtgcacatttttggggaagctaggagaacaaccccgtcaatactgtacttgcctcagtttcatctttggtgggatacggcacatgaacagcttagggctgtgctattgactttgttgaatgagctgccatccaaccttccagttttgttgctaggaacctcgtcagtggcctttggtgaccttgaagaagagtgtgcttccatattttcttctcgtaatgtatatgaagtggatcaaccaagtgatgatgatagaatgagatacctgcatgcactgtttgagtcattgctctcatttcaaatggaagagtctaggagtaagtctaaagaccagaagtcttctgttgatcttcccaaagcaccaaaggaagtggatggtcccaaactttcagagctaaaagcgaaggcagaagccgaacaacatgctgttcgacggatgagaatgtgtcttcgagatatttgtaaccggtctgcaattcactcctttgttgagttccatatatgttcaaattttgtttctctgttctcacc

SEQ ID NO: 12968 - DNA, 3552 bp, Oryza sativa
  ref <308>: DATABASE ACCESSION NUMBER: AK110316
  ref <309>: DATABASE ENTRY DATE: 2001-12-06
aactaacgctaaaaaagtaacagtttctgtactttattggcctgatccagttcgcatcgcgatggaacaagataacaagactcacaagaagaagctctccggcgcgaaggcgcagaagaaggagatccacgacaaggagcgtcgtggcctcgacgttgagcccaaccgcggcaagaacaacaaggccttcgcgggacagcacgcgtcctcgcacaagacccttggagcgaagcgcagcgccgacaagctcgccgccaacatgcacatgcccgttgcggacaagaccttctccggcatcgtccccgacgcgcccctgctggtcgccgtggcaggccctcccggatgcggcaagacgactttcatcaagagcatgaccaagttctacgccagtcgcacgctgcagcagcttcgcggccctgtcactgtcgccgccggccgctcccgccgaatcactttcattgagtgccccaacacggtctcggccatgtgcgacgtcgccaagatcgccgacctcgtcatcctcatggtcgacggcgccttcggttttgaaatggagaccttcgagttcctctcgatcgctcaggtgcacggtatgccgcgtgtcattggcgtcgtgacgcaccttgacctcctcaagaccaacaagcagctgaagaagacgaagcgcctgttacgccaccgcttctggcacgaagtgtcggacgggtcgaagatcatctgcatggcgccgttaatcaacaacgcgtaccgcagcgctgacgtccttaagctgcaccgcatcttgatgacggtcgagcccaagatccagaactggcgcaacgcccacggctgcatgctgatcgaccgccacgaggacatcaccgatcaagaggagatcgccgcgaaccccaactgcgatcgtacgatcgccatgttcggctacgtgcgcggccacccgatcaaggcgaaccagatgctgcacatccccggcatgggtgacttcgagatggcgcacatcacgacgcaggacgatccatgcccgccggttaatcaccaggacaaggcgcagggcaacaagctccgccacctcagcacgaagcacaagaagatctacgcgccgtacagcgatgtcggcggcgtggtgtacgacgacgacgcggtgtacgtgtaccaggaccccgacaagcagaacacgtcgcgcagcggtgaaggtctcgagatgctccgcagtctgcagcgcgtctccgccatcgacgatcagctgcgccgtcctgttgacttcatcaacgacgacatggacatcgacgtgggcgacatcgcgtctggaagtgacgagtcggcggacgacgaagatgaagatgacgacaactcgctcaacgcgtttggtgataacgacgccgtggctccgtcgcatggcgcccaaggagccgctgacgacgccgccgaaatgcgcccgcgtttgccgcacggtgaggacacggtgcgcgtcaaccagcgcaccacgcgcttcaactggcacgaccctgtgtaccagcagaagctcaagtccctcttcgtgactggttggaagggtgcggccggcgccgaaggaggtgaagaaggtggcgaggaaggtgcggaaggctccgacgaagagggcgaggacggcagcgactacggctcgaagggctacgagagcgtcgacgatgccgagggcaacgaggacgacgctgacgctgatgacggtgaacaccagcagccctcctccgccgcccgcggtggcttggcggcatcgtcggctcttcgccgcgccggccaaaaggcgacgcgcgaagccgccgacatgcatcccgacgccgatcgtttcgactccgccccttcgtcgggtgtgacgcaccgtgacaacaaggttcaagagctcctcgacttcttcatcgccaaggatcttcgcaccgacagcgcggcttcggatttcatgcaggaaatcaccgcaagtgccactgctaatcccaagcgcggaaagcgcggcgacgacagcgacgacgacgaagctgccgcgggccagcagaagggcgctggtggcgcccccgaggcacccgaggacatggacgactacatcaagaagaagatggcgaagaagaaggctttcgacggagagtacgacgccgagggtggcaagaacaataccacgcagttctatcagcacctccttgaagagcaggcgacgaagaaacgcgccctcgacgacacgctgcaactggcaggtgaagacctcgagaagaagattgccctcctgggctatttctctggcctgtacgtgcgcttcgtgctcaagggtgtcccggtcgaattcctgcgcaccttcgatccgtccgtgcccatgttcgccggcgcgctcaaccccggcgaggagctgcggcaggtggtgcacgcccgtatcaagcgccaccgctggtaccccaagatccttaaggcgcaggaccccatctgcatctcgattggttggcgccgcatccagacgcagcccatctacgcgacggaggaccccaacggtcgccaccgctacctcaagtacactcccaaacacatgcactcgctggcggccttctacggccccgcagtgccgccgaacacgggcttcatcgcgattccaatcaagccgctacgccacgcgactttccgcccctgcgcctccggcttcacggtcggtgttgacgctgggtccagcatcgtgaaaaagctcaagcttacgggcgtccccgagaaagtggagaagacaacgtgcttcctgaagggtatgttcaactcggacatcgaggccgccaagttcgtcggcgccaaggtgaaggccgtctcaggcctgcgcggtatcatcaagaaggtcctcaagggcaaacgtggcgtcgtgcgctgcagcttcgaggacaaggtgcttatgtcagacatcatcttcctacgcgcctggaaggcggtggagccaccgcgctactgcgaagacgtcaagaatctactcagcgccaactgggtcggcatgcgctccatggccgagctgcgccgcgacttgaacgtcccgctgcagctgaagcctgactccgagtaccgcgaggtcgcaaagcgtcgcgacatcgacaccaccggcccggtgcacgtcacgctatcgcgtaacatgcgcttgagcctccccttcgaacacaaggaggagtacgtgcctctggtcgaagaagccaacgtcctcgcgcgtgtcaaggcagtcaccgcggtcgtccctgaacagcacgacctgcagaagaaggcgctgctcgcctccctcaccaagaaggaggccgacatggacgcccaccagaagaagctccgccacgacagccgcaaaaagtctctcaagaagtataaggaggaccaggagattatggcgaccaagatcaaggaagcgaagaaggagatgtccaagcgcaaggagttcaaggcgcagcgcaagtcacgcggtgccgtgggcaagaaggaatccgcttaaatctgaaaagaagaagacgacgactcgcgtaagaccaacgacaaagaagcgtttaaccaacacagtcatgagtcccgatcttc

SEQ ID NO: 12969 - DNA, 2440 bp, Oryza sativa
  ref <308>: DATABASE ACCESSION NUMBER: AK110317
  ref <309>: DATABASE ENTRY DATE: 2001-12-06
ggagcacgcctgtcgggacccgaaagatggtgaactatgcctgagcggggcgaagccagaggaaactctggtggaggctcgaagcgatactgacgtgcaaatcgttcgtctgacttgggtataggggcgaaagactaatcgaaccatctagtagctggttccctccgaagtttccctcaggatagctggagcccattacgagttctatcgggtaaagccaatgattagaggcatcgggggcgcaacgccctcgacctattctcaaactttaaataggtaggacggcgcggctgctccggtgagccgcgccacggaatcgggagctccaagtgggccatttttggtaagcagaactggcgatgcgggatgaaccggaagcctggttacggtgccgaactgcgcgctaacctagaacccacaaagggtgttggtcgattaagacagcaggacggtggtcatggaagtcgaaatccgctaaggagtgtgtaacaactcacctgccgaatcaactagccccgaaaatggatggcgctgaagcgcgcgacccacaccaggccatctgggcgagcgccatgccccgatgagtaggagggcgcggcggccgccgcaaaacccggggcgcgagcccgggcggagcggccgtcggtgcagatcttggtggtagtagcaaatattcaaatgagaactttgaaggccgaagaggagaaaggttccatgtgaacggcacttgcacatgggtaagccgatcctaagggacggggtaaccccggcagagagcgcgaccacgcgcgtgccccgaaagggaatcgggttaagatttcccgagccgggacgtggcggttgacggcgacgttaggaagtccggagacgccggcgggggcctcgggaagagttatcttttctgcttaacggcccgccaaccctggaaacggttcagccggaggtagggtccagcggccggaagagcaccgcacgtcgcgcggtgtccggtgcgcccccggcggcccttgaaaatccggaggaccgagtaccgtccacgcccggtcgtactcataaccgcatcaggtctccaaggtgaacagcctctggccaatggaacaatgtaggcaagggaagtcggcaaaacggatccgtaacttcgggaaaaggattggctctgagggctgggctcgggggtcccggccccgaacccgtcggctgccggcggactgctcgagctgctcgcgcggcgagagcgggccgccgcgtgccggccgggggacggaccgggaacggccccctcgggggccttccccgggcgtcgaacagccgactcagaactggtacggacaaggggaatccgactgtttaattaaaacaaagcattgcgatggtcctcgcggatgctgacgcaatgtgatttctgcccagtgctctgaatgtcaaagtgaagaaattcaaccaagcgcgggtaaacggcgggagtaactatgactctcttaaggtagccaaatgcctcgtcatctaattagtgacgcgcatgaacgaaagggctagactgctgctgaatcaagcacttagggaagtgccaaacaagtcaagagcagtcgtgctcattgaatgcgcaagacttgaagagtacgtaggtcaaattgaaaaggcgagactcttcttgaagagagcacaacaagaagccaagcatgagtggaaggtgttcttggaggccatccttctggaaatgagagcaggagacatgagaagagctatagaagaagctgaaacagctctagacattcgcagaggtaccggcagactttgggcagtgctcattcaactcaaacacattgacggtgaagaagagcaattgaaggtgttcaaggaagctcttgaagaagttccaaagtccggcgaagtatggtgcgaaggagctagaattcgtctgaacccgctctcctagaaattcaatctcaccaaggcaagacagtacttggaatttgccatcaagttcactcctcagtacggtgattccctcattgagttcctgagactggagctgctccaaactggaccaaaaatggaagacgaagagaacaagcatattgagaatctctgtgtcaatgcagatccaaattacggcccattatggattcactgcaaggaacacccgctcgacagtatcagacaagtgttgaagcgagcaagagacttgattatgaaggagttggtccaattcaagaacatctaccaacgtgcgatcattgcaaagtccggactccaaatcccatcaactgacgaagaagcaggtgttgaacgcaaggatttcatcactggcctgtacactctcaaccagaagttgctttctgagctgaagccctctgatgaagaagaagaggacacaatcagaaagaagttcatctttgggtcagagctttcgatttgaacaataaatccacgttgctag

SEQ ID NO: 12970 - DNA, 3022 bp, Oryza sativa
  ref <308>: DATABASE ACCESSION NUMBER: AK110318
  ref <309>: DATABASE ENTRY DATE: 2001-12-06
atcctttgatcaagcattttcttgccacgtgccgcgcaacgtacggcgatcatggcacccgctcagcgaagcgtgctggctttgcttggcctcacggctggcatcaacgcattgcctgcaggactgcaagaccgacagattctagcaccgcctcagcaaagcgtgtcatttgagaacagtgaccctcaacccaccactgagccttccaagggtgttgagctgccacctgtgatcccaccaaagccaaccgaccaaatctctttgggaaccccatcctactgggtctcttgggagacagacgctcctgcagctacaccaactccagaaaagcccacatatcctgctccaggcaagcccaccgatcagatctcattgggcacacccagctactgggtttcatgggagactgacgcgccggcaccaccaaccacaacagacagacctacacagcccgcacctggcaagcctacagaccaaatttcactgggcactccgagctactgggtgtcgtgggagactgatgctccagcaccaacaccaacgcccgatgagcctactaagcctgctcccggcaaaccaaccgatcagatctcgctaggaacgcctagttactgggtgtcatgggagacagatgcaccagcacctactcctactccagatgaacccgaggttccagtgccagggaaacctactgatcagatctcattgggaacgccgtcgtactgggtgtcatgggacggagagggccctaaaacaccgatatcatcgccaaatggcttttcgtataagtccacggtcacagccagcaaacctgcgactaccaagaagccaggtcctgaatacccccattggcagccatggcccccaaagccgaccaagaagccttcctcgattaaagcgtcctcgatcgccgtctcgacgccaaaagccagtccgtcacccaagccgactccgacacccacccccatcgaggaaccaccccagccacccaaccagatcagtgtaccagtgccatcctttatcatcagctggggggataagcgagatgtgaatgctccaccgcctcgcacttcaaaggcacctcctaagccgaagccgacgaagcccacttcaagctctaagaagccaagttctagctcgaaaaaagtcacgccgactccaacgcccaagccttcacccaagccaactccgactccttctccgcctccagtccccatgccatcgcccatcagcgagccggaataccctgaaccgactgaagagcccacgccagacccagaagagccatgggagcccgaggacccagagccagagccaccaaggcagtccgacgaggttggtatcggaaagccatctggatttttgagctgggacaagcgcgcccccgcgccgactcctccaccatttccatggcccacgcagccaaaccaaattggtcttgagcctgtccatgccactgtgatctgggacaagcgtcaggaagatgttgagcccgaggagcctgaggagccagttccagtacccactcagccaaacacaatcggtcttgaatcgccagtcgccactgtgatctgggacaagcgtcaagaagatgagctccctgaagaccccgatttccctgaagagcctgaagagccagctcctgttcccactcagccaaacacaatcggcatcgagcctcccacagctactgtcatctggggaaaacgacaagaggagactgagccgattgaggaaccagaaatcccggatgatgagtttcccgaggatccagtcccggtgccaactcagccaaacaccatcggccttgagccaccagtcgccactgtcatctggagcaagcgccaggaggagaccgagccaattgaggagcctgaaattccagacgacgagttccctgaggagcccttccctgaggagcctgaggagctggtccctatccctacgcagccaaacaccatcggtctcgagccaccggtcgccactgtgatctggagcaagcgtcaagaggacaccgaagagcctgaagtgcccgaagacccagacttcccagatgatgacttccctcccgtcccgattcctactcagcccaacactatcggtctcgagccacccgctgcgaccgtcatctggggcaagcgtcaagacgccagtctaccagtcgaagaagaccctgaacccaccgcgaccggtcctttcgaaatccctcctatcccaatccccacacagcctaacagcaacgaggttggccaacccaccgcgaccgtcatctggggtcgacgcaacgctgcacctgctccagcgcccaccgccatagccaagttcgaggaccgcgaggccgcagcacagttcacatgcggctcaaccacgaccgtctcttcgatcaagccctgccccaaggtccgctgcgaacctggatgccactacacgcccgagtacttcgagccagctggctcagaccccatcaacaccgttaccgacatccccaagtgcccagtcaccaagacggcgacgaacgtgtgcccaatctgcgcgtgtcccactgctcctcctaaacccaccaagccccctgtcatccccacgcctgcgtgctctccaacaacaacgacactcgtcgtgacggtcaagccctcaccaccctgcgcggcaccaacgtgtcctccacgggccacgccgtgtgatttgaaccgccccgttccacgcatggagaaggtagtcaggagcattgtgacgcttacgccgattgtgccgacgccgccgcccaagccgacaccgacgaagtgtgggacaacgacgaagacggtgagcgtggctgtggggtgtccgacatatacatgtgtgcctgggtgtgatgctgcgagggttgtgaggtagaggaggggtgaggtttggatagctcgcttgatgcttggagcaatggttgaagtttagtagatgggtgatagaggatgggagtgtgatgtggatatggatgtagtataccttcgctttttgtatgtgcaattcgaacatgattgttgag

SEQ ID NO: 12971 - DNA, 3269 bp, Oryza sativa
  ref <308>: DATABASE ACCESSION NUMBER: AK110319
  ref <309>: DATABASE ENTRY DATE: 2001-12-06
agctcccagctcgcccaagcattccaatcgtagttcgaccaccgcgcccttcgaaacaagacatgctcttcgatgatgaccaccagatggatgatggtccagtatccgatgatggacaggaatgtctcgagcgtgtcctcgaagaaggccgccgcgcaacgaccgactgtaatcgcagcaatgaagccaactgtgacgaaagctatgcgggggacgcggagggcccagggaccaaagttttgagcgtggagggcgaaagagtagttgtttgggatattattctaatcatcgtcagcatcgtggttctgcagaaaatggcgaagaatataaaaacaaactcacagggatcgaactcaatccagcgagcaccaagagaaactttccaaacccaccagtaggaagcaaagccatcttcaacggcccgccaacgcccgcatcctggaatgccgctctccagcttggattcacttccgtcccactatacagtgccgcccccagcgtctgcacaagcacagtaggaacgcagatcccgatatatgtcgcgacgaagattttccaacgtggcgtatccacgggcatcttaacattgtaatccgccgcgcaattaatccaactcaccgcgaacgaaaagataacagcgatgaacgaaaacgccgccgcagctccatccgccccttttggtgacttgaccgcgtcgccgctgaaatgtttcgctcccgtgccggccgccacgcaccacacgacgaagggcgggatccagagatatgcatcgaggcgatggatccacgtaattcccagcacgcaaataatccacacagtcgtgcagatgatgactacgcccgcccactgcggcagcttcccgtctgacaatgcatacaggactgaggcgccggagatgctgttcacggcgttccagccggtggtggagaccatggaaaagatgacgacgaggagattaccccagtagccaaaggagtagcgcgaaaaagaagtcatgcgtagccccgtcagtccgaaagtggcagtccaggcgggcaggagacaggaagccaggttgacaacgaggatgatggcgaagcagtcccagaatgaaaggcccattttgccgccgattgtgccgacgttgagggttgcgacggccatgttggcgctcagcctggggattgttaggttcatgatgagaggtttagggagggaagcttcaacggaccagaatgtacatgcgttccatactttggaagtattcttcgccctctcctcatccgtcacgcgctcgatgcctcctgtctcgacggcgaggcgcttcgcccagtacttgatgccagtaagagccgttgtctcctccacagcacctcgacggatatcatggcccgagtggacttcgaaagaatcgcccgacttcatctcggaatcggtcgtgtatgcagctttggtcgccattgtatgaccgctttgatgatccacttctccatggttcacgagccgttatatgttccttcctgtccatacttggcgatgaaggtttgcggggtgttcagctggagatgtcgtgcttgagcttatcaccgcggcatgctggtcgtgaagatagtggagatggtctggagccgcgggatgccgcgggtcacgacatgagcgacctatcaacaccaaaagcttcgtcggcttaccgcggggacgatgggtggtcgagatggagtggtggaagttgtgaggtgtataagagatcgttattgcgccaggaaaaggcgtcatcgaagtcgtctattattgcggtgatccccgagagtaagagctggcattgtcgcagaatagaagactttcccaatcgaacgattcaggcttcaggacgtcctagtactttttgatatggagcagagtacgcttgctcggcgtggccttggccttcgaggcgtcgacccaaacaaggtgtcgccaggttatacgctttacgcacacctcacttcccccgggactgtcaatttgatcgacaaccatggaacagtcgttcatcaatggaaactcccctaccggccaggacgccatgcccaactgctcaagaacggcaacctcgcctacaacggcgtccacccagatgccccacgcctctttcccctctggcaaaagtaccgtggcggcgtcatgatggaagtcgatccctcgggcaccgtcgtccgcgaacatcgtgatccccttgctcaccacgaccaacaccacctggacaacggctcgctcctctacacgactgtcgaagggctggatcccgaacagagcgcctgcgtcctcggcgggatccccaacagcgaagcccccgacggcaaagtgtacgccgactgcatcaagcacgtctctcccaccggcgaacagctatggcactggcgcgccatcgaccatctcgatcccaaaattttctctctccaaccgcactacccccgcgaacactggccgctcatcaactccgtgtaccccctcgccgacggcaacatcctcgcctcgctgcgcagcgtgtccgccgtcatcatcatctcgcgagaaacaggccaagtgctctggcacctcgactccaccgtcgtcgcgcaacaacattgcgcgagcgagttgcacgatggaagtatcttgatcttcgacaacggcacgttccgccaccacgagagcgcaacgtactcgcgcgtcatccaagtatcccgcgagtccaaagagattgtgtgggagtacaaagatgcgcatcccatgacgttctttacgccctttatgggcggggcgcagcggttgaagggtgggaacacgcttatcaccgaggcggcgtttgggaggatattcgaggtggatgagcgcggcgagatggtgtgggagtatgtggtgcctgagtttgcggattataaagggctggatgcgagggagatcgagggctattttgggtatccggcgaatgcggtgtttcgggcgtataagtacagtccggaggaagtgccttggttacatccgaattagcttggggggaggggggaattttggagtgtgcttttgttcttgattggagtgaggcagagctgatggattggaggggtgggcggatggctggtgttctgcaggatgcgagttgttgatgcggcttctagtaagctcttttgctttaacttcagatgttgttattgtattcaacatttctggtacctgcagagtgcagctgtactcgcgtctgtatgatgactttcacccgtctcgcacgtaaagagttagattcaatcaataaaatgatttggaggcag

SEQ ID NO: 12972 - DNA, 2605 bp, Oryza sativa
  ref <308>: DATABASE ACCESSION NUMBER: AK110320
  ref <309>: DATABASE ENTRY DATE: 2001-12-06
aacgaacgctaaaaaagtaacagtttctgtactttattgctttgagcctcccatgtcgtggcagcagcagcagcagcccagcggcttcaacgccaacgccccctcgtggcagagcggccagcaggcccagccgcaatacggcagctaccagcccggttacggctaccagcctgccgccaactggaatcagcccggccagccgcagcagccccaacaggggtacccgacgtaccagccgggttacggctatcagcccggctatggcggctaccagcagcaccaacagtacggcggctatcagcagcagggtggctaccagcagtaccagcagcaaaacgcgtaccagcagcagcaacagcagcccagcgcatcgccttcagtgagcgtttcggttcccgccgccgccaccgcccctgcccccgctccccagaaggagcccgagctgtcgcaggcggacaaggtgaagctgggtctggccaaggccgaggtggtgcttccgcctaagcgcgagggtggccgcaagcgtctgaccctcggtgcggaagagcccaagaaggaggaagccaagccggccgcacccgccgcgacggaggaagcgaagaaggaggctagccccgtgtcgtcccccactaccgaggctcccgctggtgaggcccctgccgccgccgccgccgccgccgtcgccgtcgcagccgacaagccgactgagaaggccgctgccaagaagaagtcgaccaagacttacgtccgcgacccccgcccccactacaacgtcgtcttctgcggtcacgtcgatgccggcaagtccaccatcaacggtgatctcctcattgcccacggcgcggtcgacgagcgcgaaatgcagaagctcaagcgcgaggccgagatgaaccaccgtgaaggctgggagaaggcgtacgtcttcgatctcagcgaggaggaacgcgccaagggtaagacccacgaaactggtgccggttacttcgaaaccgcgaaccgtcgtgtgacggtgctcgatgctcccggccacaaggctttcgtgccgtcgatgattggcggtgccacgcaggctgacctctccgtcatggtgatctcggcgcgcagaggcgagttcgaggccggcttcgaaaacggcggtcagacgcgcgagcacacgacgctgctgcgcacctgcggcgtgaagtacatgatctgcatcatcaacaagatggacgactgcgaatggtcccaggagcgctacgacgagatcgtcggcaagctcagccccttcttcaagcagaacggcttcgtcgagaagaagaacttgaccttcatgcccggcgcgggtctgctcggccttggcatcgccaagcccattcctagcggcgcgtgcccgtggtacaagggtccttgcatgctcgacttcatcaaccagctcactctccctgaaacccgctccgacaaggacgtgctctgcatccctgtcgttggctgcgtgaaggacgacggcaaggtccacgcgtgcggcaagatcgagtccggctccgttgctgtcggcgacgagatcaccgtgctgccctccaagcgcaccttcaccgtggacgccatcctggtcgagaacaccgagatcgagaaggcctacgtcggcgacaacgtgcacatccgtgtcaagggccttgacgagtcggacttccaccccggcttcgtcatgacccagccgggtgaggttggcgacgagaagatgcgcacatgcgagttcttccaggcggtcatcatgattcttgaggtcgagaacatcatctctaacggtatcaaggtgatgctgcacgcgcacgctgcgcaggaggaagtggtcttcgacaagatgctggcccagtgcgaccccaagacgctcaagccgatcaagaaggaccccgcgttcgccaaggctggtgagtgcgtcattgcacgcctcgagctttctcaggccttgacgctcgcgccccaggccgagttcgacaagatgggccgcttcatgctccgcgacaagggccgcaccattgccatcggccgtgtgctgaagctgtatgattcgacccacgacaacatcatccgccgtgacgagtaaaattcgcccagtgctgtagtgctgtgtgacacacgagatcaagcagacatgcgcgaccccccgcggcatcggtattgaaatcgtcgtaaccctcgttcttcttcgtcgtcttggaaccgtgatcaattgtgagacgggcggccgccccgacgaggccggcactgtttgcatcccgaatcggcgctcggagacccccactcccacccaaacacccgtgagctttggaccacgaaaaccactggtccactgccgcggcccgtggcggcgtgcgcctctccagttcccatcaccgtgcttgcgcccgctcccctcctctctctttaatacccccgcagttaaccattttcacaccacctcctaaggcaaaagcccgcgcaattcacaaaacaaaaaacaatacgcatcacaaaaaaaaaggtttccaagagacgcagacgaggtggaccgacccatcacaacactactgagagccgtgtgtgcgaggagcgctgtgttgctattaaaaatcacaatggaatc

SEQ ID NO: 12973 - DNA, 1677 bp, Oryza sativa
  ref <308>: DATABASE ACCESSION NUMBER: AK110321
  ref <309>: DATABASE ENTRY DATE: 2001-12-06
acccttgagccgtaacagtgacctgtttctgattcaattcaacaacgagcccgtttcctgctcacacaaccaccttttaaacgcctcatcacctccatcctcgcaactcgaagcgaattgagctcacagtggagaagggagagcacgagagggagcagaagcgcgcgaggagaggccacgaccaccaccagagcgtcaaaatggcatgcatcaacatgtacaacccggacggcggcgcggcgttcgggggcggccagccgccggcgctgggcccgcgcatctccttctccagcgactttgtcgtcgagccaccgccgccggtgcagaaccgggcgatgaacctgcggtgccaggaggaggatatcaacttcgagttctcggtgggtagccaccccatgatggccgccgaccagctcttctccaagggcaggatccttcccctcaaggacggcggcttctcctccggccggcctcccaccacgctccgcgacgagcttcgctgcgacgacagggcgtcggccaagggatccagccggtggaaggagatgctcggcctgcggaagcctctctgcgtcggcggcgtcaatggcaccgccaagaagagcaccaccgtcgacaccgagatggtcaccgacgtggccgattccaagcaggagcaatgagatgacatatatgggactcagccaaaacacacatggaactctcgtctctgtctcatattgtgaccatcctcttgcattgtacttgtctcaaaggctagtttttgtagatgattgtgctcggttgcttgtgtgctagatggccagtgtgtgctgaagagcaaacaattgtgttttttttttcttgcataagtgctgtctctctagctagctgtccactagatccatatcagtctttgcttcctctttcttctttttttttttgtttcttttttcccctccaccctgtacaaaatgcagcgcttgtgtagatcgaaaattttatggtgcaatcattagtctgccagatggccagatctgtgaagagaggatagcctatagtgatggagcctttctggcctgtggggatcaacagtgctctcctttgtcttgttccctgctctgctgtatgatttcataaagagggacaagatccacagaagagagtgtgtatgatagagaacgagaggaagaacagaggaaggatccacctgaatcatgatcctttttgtttctagcaaatcgatacttcactcccccgacatgtccgctgcagtgctgcactagatgcacggctctatgcaaagcgttttcaaggttctcaacatacatcaaatcatcttggttttaaattaaactgaaagtagggcattgatgcaagcaatggtgctcaacttttccatctttacaagccaataggactgttaactattgttgagtcactttagttagcggatttcgtggtcactttgtccctaatacaggtcgtcatctcggtaaggcgtctagcaatagtggatgtactatatagtactcacaagctccacaagttctattgaaactgctgaaacacagagcagagttgtttgaggctaggaagaaaacgatgcaaaattcaatccgtatcctttagtgaatgctgagcattgcttcaaagcatcaggataaagcaacaaaaacatgcacaactcctctgaag

SEQ ID NO: 12974 - DNA, 3484 bp, Oryza sativa
  ref <308>: DATABASE ACCESSION NUMBER: AK110322
  ref <309>: DATABASE ENTRY DATE: 2001-12-06
aactaacgctaaaaaagtaacagtttctgtactttattgaagggaattgtcgagtgatgccgcccaagaagcccggcgttgctgcgccttctgcagcgtctgggccatcgtcaagtcagttcgacagcgccgttgaacagtgccgcaaacagcttctcgcgaccatcgatcccaaagacgtgtgcgtgctcacgaacgctacaggcggcgagcgttatgaaggtgaggtgtctacagcaactggaaagcgccacggaaaaggcatgctgcgctgggcaaacggcaacgtcttcgtgggtcagtgggcggacggtgccatgtacggctagggtcgcttcttctacgccgcggagggtgatcgctacgaaggcggcttccgagacgacaagaagcacggcagcggcagctacaccttcgcgaacgggaactcttacacgggtgaattcgccacggacaagcgccatggccgcggaaagtattcgtgggtctgcggcgacgcctatgaaggcgagtggttcgaggggcgcatgcacggcaccggtacgactctttatgccaacggcaataagtacgtcggtcacttcgtcgaggaccgccgcgagggtcggggcaaactcacctgcaccgacggcttagcgtacgacggggagtggctgcagaacaatcgccacggcgtcgggcgactcgacttcccgtccggcggccactatgtcggcgactggcaaggcgataagaagcacggccgcggcaaggacaccttcgcgaacggcaacagctacgagggcgcctacgtcaacaacgccaaacacggccacggtgtcatgatctacagcaacggcgacgcgtatgaaggctcctgggcccacgacaagatggacggcaagggcgtctacaagttcgcaaatggcttcgtctacaacggcgattggaaggccgactcgcgtcacggctttggtgaatacatcttccccaacggtcacgtgtacaaaggtaactgggccaacgaccgacgacacggcgccggcgtgctcacgctcagcgcgacgcaaggcgacgccaacgccggagaaacgtatgaaggcacgtgggccgacggcaaaatgcagggccgcttccgggtgctcgactcgaacggcgcgctcatctacgaaggagagtggcacgacggcgcgccgcgtggtgccgggacgtacatccggccctgcgagagcatccctggcgccttcttgaccctggacggtacgtgggaatctcaggcaggtcagaagcgtggcatgggcacgatcgatgccattccgcaacctctcgtgctcctcgccgagcaggcgacggccgcgcgtgctcgcgctgcgggtgaactgaatctaccgcgaagcggtgcctacaacgctgcgtcggtcaagatcccggtgcctcccgttcccgacgtcccgctgctgcagcttcggctcaaccgtaccgccgcagcgctcgctaccgagcgccccgaattcgctgaagccatcagcttcatgcacgaccaagcgaccgtcgcttgccaacgtgcaacggacgatcttcgcactgaatgtgacacactgcgcgccaagctgaaggaccgcgatgctctcgtcaagaagcacggcgccgactacgccgcagctcttcgagtcgccgtcgatcgcgcggctgacgccgccgctcagatggacttgacattgcacgccgccatcgccgaagctgacgccgccgccaaatcgcgggcggaagccgatgcggagctgagcaaactcgtcgccgaactggaagaggtgaagaagcgccacgcggccgccaaggctcgcgcgtctgccgttgaggcgtcgagaaaagaagcgagcgcggccctcgccaagatgcaacagctgcagtccaaagtggacgacgccgaacgcgaggccctcgcgctcgagtcggaactaagtggatttaccgaaatgaccatcaagcctgctgagcggcacgtgaccgaactggagcagcagaacgccgagctgcgcagcaagatcgcagcggcagaagcagccactgtcgcgcttcaatcagacctgaagaacatcagcgcccagcacaaggcccacctcaaagcgaccgcccttcaacgagcggacatggtcgctaacattgacgacgtcaacaaggctacagcgaaggcactaaaggacgttcaggacgcgcaggctgaccttgaagctctcaccaagaagcaacgggaggccgcttcggcgcggcacgctgccctcgacgctatgcgacaccgcatcgaggaattacacgccgaggccgaaaccattcgcacggacaccctcgacgtcgattcggagcgcgcgacgattcagaccgaagtgtcgcgcaaggagatggccatcgacgcgagcaagaaggcgatcgacaagctcacgctgcagctctcgctattcgctgaggagcaggctcgactcgaggccgcgcaggaagatgccgagcgccgcatcgcccatgccggagagcgcgctgcagcgcaggcggccgaagcagccgcacgcgacaagtggagccgcctgcgtgcggagctcgaccgggagcttctcaccgctgaaacggccctccgcgatgcagaggccagcctcgaagccgagcgtcaacgcacgacgcagctcgaacaagcgatggcgcaggccgaccaagccgctgctgccgctgccgccgctgctgctgcctccgcggcgaacagtgccaagtcgagtcacgttggcgcagcgggccgtctgagaaagctgaagagcgcgacggaggctgactttcaagaggcgaggtcggcagcggagcccactgcatcgagcagtgctgccgctgaaatcgcagcgctccaagaagaggttgccaacctgcagcgcaaggaggccaagaagcaggagaagattgccaagatgcacgccgaggcgagagaagcagcggcgtcgtggatgcccctcgaactgggccgcgaagacacgtcagtgctagcggctgcgagcaaagaggcagtgctccatcaggtgatcaagctccgaagccagtacgaaaagtccgtcaaagcccgtgacgaggcccgcgcagagctcgaacgactgcgcggcaacgccgacagtgacgagaacggaggcagcttcgacgacagcgaagatgtgatcgagacgatgtacattcgcgatatcatttcctccattaaggcggaagagaaggactggcgcctcaattacttggtcgagcagctcgagagccgcaaggctcaaatcgccgagctctccaagcaggcgcagtacgccaagcagctggaggcgcaagtggcgtcagtcaacagcgccatctcgggcatgaagcagcagcaacagcaccagccccgcagcgctggcatgaagccgccgtcgtcgacggagctagccaaagtccggccgcagtacctgtagaagagcgcagagagcgaccccaaaagggcccgttgttc

SEQ ID NO: 12975 - DNA, 2399 bp, Oryza sativa
  ref <308>: DATABASE ACCESSION NUMBER: AK110323
  ref <309>: DATABASE ENTRY DATE: 2001-12-06
aagcgaaaaaccgagtttgtatactcgataaattaagatggcatcggccaaacgcattgcgtcggctgtgctgttcggtctggcgcttgcgtcgggcacgagcggtgtgatggcgttcccgaagtgcctgatttgcacgctgctgactggcatcatcgaacaggtcgcactggacacgcagcagcccgtcggcactgccatcgataacctctgcactgacgtcaccaaagacctgccgtttctggacggagtgtgtgagatcgccggcggcatcgcgttcgcctccaccgtgcagcagtgcgtgaacgatggcacgagcccggacgactgctgcaagaagctcgcgtggtgtggcgccacgtcgacgtgtgtgctgttcaagcagtggccaccgaaagttcccatggtgcagcgccatctcggcccgcagctgctggagttggccaaaggcgcggacttcaatgcactgcccaaacagcagagcctcgagctcgtgcgcgcattcagtggcgtggcgtcgtatctgggtctgtcgcaggacaagctcatgcgttcgaacgccaacgccaacaaccacctgtccggcgctcacggtaagcaccagcccgtcacgccggcccgtggcgtgcagcaccagcacacgggcaagcgcggtgttgaggacgtgaaggacacgcccatccctgtggccgatcacctgccgctgttcgatgacgataaggaccgtttcagcccgtacggcgcgctgcgcggctaccactggcgcggtatggactgcaacgacaaagacgccaccatctacccgggccgtcagctcacgtcgcatccggcctctgtcgaccacaactgcaacggcatttacggcagcaacgcgcagggcgaggcgtgggaggatgtgctgtgcaaagacacggggcagcgcggcatcatctctttgggcgatagcgtgacggcgcacttccgcattccggactatatgctgcgccctgcgtacatcaacgcatcgacttacgacaatctcattccgttggtagaggacgaggccgattggcccatgtgctcgtggggcaccggttttgccaacgcctcgtcttgcccgtggtcgaagctgggcgttgactcgctggcgctgcgtctgcgcgccaacaacctgtgtaaccaccgcgacttccagaacgccggtgtgaacggcgcgcgtacgggctcgatggcccctccgggcggcattgtgacgaccatccacaaccgcaccggcacggaccagccggcagtggtcatctacgcgctggtgggtaacgacgtgtgcaacggccatccggacttctcgcgcatgacaacgcccgccgactttgaggccaacgtcgtggccgctctcgagtacctggacgcggcgctggcgcccgattcgtacgtcattttcgtcggtctcgcggacgggcgcattctgttcgacactctgcagaacgagacgcaccccatcggcgtgccgtatccggatttctacgattacctgaactgctacgagacgagcccgtgctggggatggatgaacacgaacacgaccgtgcgcgacctgacgtggactgatcacgccaatctgctgaacaacgtctatccgaagatcatttcggagcgttcgtacaacaactttgagatgttttatgtgccgcccgactttcagcgcattatcgacgcgtggcttgcgatgggcgggcacgcgcgcgacctcatcgaaccggtcgacggcttccacccgtcgcaaaccggtaacgtgctgttggcgcagcaggtttgggccgatctgaaggcgaacttttcgcaggccattgggccggagaacccgaacaacgcgcagattgaggcgctgttcggcgaccagggagggtacgggcccgtgtaatggcgccgtgtcatcgtgccgtgtcatcgtgtcatcgtgccgtgcgtcgtgccgggcgtcgtgtcatggcgtcgtgcacctgacgcggtgacgcggtggcgcacgggcgcagtggcccgggttggagttggaagtgcatgtgagagcgagtaaccaagtgatagggtgcagcgtgatacgccgcgcggaaacgggcaaaagtgcacgccgcgcggaaacgggcaaaagtgccacccaaacacccgaagcgctgctaccgaaagtgtggcccaatgcatgcgcgcacacgcgcgtgtgcatcagaagccgtgacgtgccgctgcaagccgctaccgctgtcggaacacgctgattcgcagcgccggaaacggcgcgggcgtatcggcctccgcagcccgcgctgctgcgcggccgcaccggtcgttcacttcggcggtagcgatttggtgtttttcgtgaaatttgtttgccgttttgttccgaacaaatccctttccgc

SEQ ID NO: 12976 - DNA, 2303 bp, Oryza sativa
  ref <308>: DATABASE ACCESSION NUMBER: AK110324
  ref <309>: DATABASE ENTRY DATE: 2001-12-06
aagcgaaaaaccgagtttgtatactcgataaattaagagcgaagctgaggccggcgcgtgctgtgccccgcccggggtcgggctcagccgccgcgctcaaggcgctacggctcgtgctctttgccgctgccatggccgcagcgcgtgcagccgtggacgaaccgtcgctgcggtggacgtcaccaaccggtaaccgttacgacctgaacgggttggcggacccggcgctgagccctgcggtgagcacatggacgcagccaacgcgatggcccaatttggacgggctcatgaacgtcgtcgcgtacgacgtcggtcgcggcgccatgcgctttcggttggggccactgggattggccggcgccggtgacgacgcacgctgtgatgcgatgttgtgcgtttacccgcgcactaaccccaaactccgtgctttgcctctgtcggccaacgccacgaccgcgtatgtggaggacccggccgtcgtcgcgctgccggcgggcggtgcgcgcccatggtcgatggcgccgcgtccgctggtgctgtggaacgcgtcgacaccgccggcgttcacggagtccgatgatccggagttgcgctctgtgacgctcagtttcgcgcgaaacgcatccgctgctgccggtacgtgttggaccgacgagtgggccgacaccggcggcgcgcacgcgctcgatctactcgtcgtttgcgctgacgatgcgttcgcttacgcgtacacacgcgaaatgccgccgccgtttcccacacccgacgacctctggtggcagtggtatgtggacggccgacgcgaatggcgcaagcgctgtgacgcgttcaacgcaaccggagagctgtacggcgccgatgtgagctttggtctgatgaagtcctccggcgaagctgattgtaccacttcgctgttggccgttgtggtgtcgcctttgggctgtccgaaccggaccgttgcgtcggtggccgctgcccacaccgcacgcacgggccagcccgttgcgccacccgccgtcgacggctgtgcgcggtaccacgcgtgtgggcatggtagcacgtgccgcgtcgacacgacggcaccgcgccacagcggcgcgtacaactgcacgtgcagtccgctgctgccgttcggtgggcggaactgcacgacgctgtggcattgcgcgcgcgactttgccggtgtcgcgacgcagcgctgttccgcgtccggtgcgtgcgatgcggtgacgggcgagtgccggtgcgcgccgggccgcacgcgcttcgactgcagcgtcacagcggcagcgctgacggacgcacaggtggaggtgacacaccacacgtcgctcagccctacgcgtttgcagctgcagctgtgcgaatggatgggtgtcgcgcgtgatgcgtgcagcagcgatgtgctgcgggtggctgtccggcccggcccgcggtacacgacggtgtcggtttggggcctcacagcggctgcaatcgcggcgtgtccgtttgcactgctcactctcgaaacgctcgccgccacggccgacgccgaacacatgacggcagccggtgtggccgccatccgccttggcgtggcgcagccgtggatatgggtggacctaacggtgcagtcacagtgcagcgcatcgtccggtgctccgggcggcgcggagtgcgcccaaacggattggtttcagagtcgcggtactgcgaacgcgaacacaaatgacatacccgccgatctggcggtcatgtgggcactgctggtcgcggcggtgctgctaaccaccggctttgtggtgctgcgctggcgctgggccatgagcggtgcgctgttggagcgctggcggcagtcgcgcacgttcagcgccgccaacgccgaagcgcatgcccggcatcacgcgcagttgcaacagccgcaacagcaaccgcaagccgccatagccatcgtacaagcgtcagggcctgagcaaccggtgccgcccgcagcgccagcaccagcgccagtgctcgtgtccgtaccgccaccggccgttgtgccctgtgagccgccgccgatgtgggcgttcacccgttttgtaccgcccgccgccgcagcgtacctgcagtcggcgccgcgcgctgtggttgtggtgaacgaagacgaacgcggcgaatggtacgaataagctcactcgccgcagagactcctttagtttcgtgtttgcgtctcagtgctgtatttttcaatatcatctgtctgtcatgttctgtctgtttgtagttcacgcgcgagcgcacagtttcgatccgccgctcaactcagccatatttgcagc

SEQ ID NO: 12977 - DNA, 2452 bp, Oryza sativa
  ref <308>: DATABASE ACCESSION NUMBER: AK110325
  ref <309>: DATABASE ENTRY DATE: 2001-12-06
actcccagcagagcaaacaccactccatgtccatggcactgcatcaaacccttctcctcctcctcttcgtctccatcgccatccaccgcgccgtcgcccagaccaccacctccaccgctgtccgcggcgacggcaaccggttcgtgacctactccttccccagcttcgccaacgcgctgctccacctgcaggccaacctcacggtgctcaacaacgccagcatcagccagggcgccctccagatcacccccgatagcagcaacagcgccgacggctacctcgtcaaccagaccggccgcgtcttcttctccacccccttcaccctctggtcgccggcggctggtggtgggggcaatggcaatggcaatggcacctatgtcgcgtcgttcaacatggtgttcagggtgaacatattccggacgaacaccagcgaccccggcgagggcgtcgcgttcgtcgtggcgtccgggctcgacccgccgcctcccggcagctacagcggcttcctcggcctcacgaacgcgtccaccgacggcgacgacgcgaaccggttcgtggccttggagctcgacacggtgaagcaggggtacgaccccgacgacaaccatgtcggcctcgacgtcaacggcgtccggtcggtgaaggccgtgccgctggcgccgttcggcatcaagctcggcgccgccaacgccagcaacttcttcgtctgggtcgactacgatggcacgtctcgccacgtgtggatgtacatggccaggtccgacgacggcgtgcccagccccaagccgccgtcgccggtgctcgacgcgccgctcgacctctccgcgttcgtcgccgagaaggcctacttcggcttctccgcgtcgacgggcacgcggttccagctcaactgcctgcacatgtggaacatgacggtggagctgctcgacgacggcagccgctcctccggcggcggccagacgcggcggaagctggggctgggcgtcggcgtgccgtgcggcgtcgccgcgctcgccaccggcgctgtggtggcgttcctgtacatcaagaagaggaggcgcagagtcggcgacgatccggagtcgctgtcgtcgacggcggcgttcaagttcaacaagagcagcatcaacctgaggagcctcgccgggacgcccaaggagttcgagtacacggagctgaggaaggggacggaggacttcgccgcgaagaacaagctcggccagggtggctacggcgtggtgtacaaggccgtcgtcgccggcgacagcgacggcgagagcgtggaggtggccgtcaagcagttctcggcggccaacaccaagggccagggggacttcctcgccgagctcagcatcatcaaccgcctccgccaccgcaacctcgtccgccttcgcgggtggtgccatcagaacggcgtgctgctgctggtgtacgactacatgccgaacggcagcctggacaagcacctcttcggcggcgcggcggtggcgccggtgctgagctgggagcagaggtacaacatcgtcgccggcgtggcggcggcgctgaactacctccaccacgagtacgaccagcgggtaatccaccgcgacatcaagccgtcgaacatcatgctcgactccgccttcggcgcccgcctcggcgacttcggcctcgcccgcgccctcgactccgacaagacctcctacaccgagatggtgggcgtgccggggacgatgggctacatcgcgccggagtgcttccacaccggccgcgccacgcgggagtccgacgtgttcggcctcggcgccgtgctcctcgaggtcgcctgcggccgccgcgtctcgttcggcgccggcggcgacggcggcgccatcggcgggtgcagccagctgctggagtgggtgtggaggctccacggggccggccgcatcctcgacgccgtggacccgaagctcgccggcggcgcgttcgacgcggacgacgccgaccggctcctcctcctggggctcgcgtgcagccacccggaccccggggcgcggcccaccgcgaaggccgtcgtgcaggtgctcgcgcgcgccgtgcccgcgccggccgtgccgccgtccaagccggcgttcatgtggcccgcgctgtcgggggcggactgtgacgacagcgacggcggcggcgccggcgagatgtcgtcgaggcactcggccaggacgaccagcacggaacagaccagctcgacgtactacgcgtcgtcgtcgtcctactcgtcccacggttgcacacgcacgcaggtgacgagcagcggtgacgccattgctgacgagacgaggtacatgtccattggttgatcttggatatccgggttccggacgggttcggtacggcggcgccattgttggacatgtgcatgtgcatattctattgtacagtgtgttagtgtcaagaataaatggttgaacttgaaattgataaaaaaaag

SEQ ID NO: 12978 - DNA, 3243 bp, Oryza sativa
  ref <308>: DATABASE ACCESSION NUMBER: AK110326
  ref <309>: DATABASE ENTRY DATE: 2001-12-06
aagcgaaaaaccgagtttgtatactcgataaattaagagaggacgggtgatcgtcgccctccggctcaccgcttccaccatatccccactatcagcagcgcgaaagctgtgcgaaggctttgaccgtcaaagtgtcgcgccgcagacatatcccaaactcaaacccaacccaatccgcagacaccaaagctgcacctgcccctgcgccgcacccaccgaccgacgtcaaagccaacagcacgagcgcgaagcagatgctgacgaacagcgcgaccgccgcgccgcacgcgcgcccgcacccgacggtgcgtacgagcattagtgtgagccgaacgggagacgccaccggaccgggcgctgtgtcggtcgccatcagctctccgtcgaatgaggccggtgccgcgcgcgccagcttcacgcgcactcaaagcgagtcacagcagccgctgtcgccggcgccggaggacgccgtcagccccacacacgccgcggcgctggaggctgccgccaaagcggccgaagcgaacggccactccggcggtgcggcgaacggcaacggccacgccgcggcggtgtcggcgctgggtggtgtggaccggcgcgtgagtacgggcagtggtgacgccgtggagacgcgcgcggccggcgatccggaactgaaggacttccacgttgtgacgcgcaaagagaagagcgcggcgcaagcggctatcgaagccgatcagaaggcgcaaaaacaggccgaagacgatgacgagaactcacaaaacgcagccgctgatgccgttgacgctgatgccaacgcaaagggcacaaacgccaaaccgccgcgcagtcgcgggccgccgtttatcggccgcaaagaggagccctctgagccgctgtcgtgcggtgggcagtgtgtggcggtgctgacgagcgcgtgcaaatggctggccctcgccattgccgtgcccatcggcgccgcagtgctgctggtgatgttgggtctgcgcaatatgcacgtgctgtcggcactggagctggtgctgagtgtggccttctttctgcgcaccgaatacggcttctccgatccggcgcttttccgcacgcaacagcaagggctggcgttcgacacaacactcgtcgatctgctgctcatcgcaggtctgcgcctctgcgtcacgtggagcgcccatctcctgctcacagcggactacccgtcgcgcgcgcgccgcatcgccgccgccgctgtggctgtggccatcaccgttctgttgcacttcaaagcgaacgtgttttggccggccgatggcgtggcgctcagccccgactacacgtggaaagactacagcggcactggcccgcgcgcgatgttcgcactggcgctggcgttcagttggatccactgcgccgcggagtggtgggtaccgacgagcttcaaagcgttggccgaaagcgagttcgcgctgctcgcgagtgtgatgaagtccgaacacaacgctcagagcaagaaagccgctgctgacggcgctgctgctgcggccaacggcaacggcaacggctacgccgcgacgaacggccacggcagtgcgcacgcacaggtggcggccaattacggcagcgccggcgccagtccgcgcccacccgtgggctcacacgcggcgaacccccgcaaaggcgcataccggtgtgtgtcgcgcattgtggccggtacttcgttcctcgaagtgacggccagtgccagcggcacgtttgaggtcgtcggactgcacggtcacacggccacgtcccaccccgtgggcggcaccaaaccaaaacccaaagccgctgcggccggtgcggctgcggccggcgatgtgaaggacgagttcagcgccgttgtgaccaacagcgcagccggtgtcggcgccggcgccggtgcggcggacgcggagcatagtaagcccgcgatggtgctgctgcacggcttctttgggggcaaatccatgtacgcgcagtcgttccccgctctgtcgcagtacttccgtttgtactgtctcgatctgtacggaatcggtatgtcgcgccgctcaaagttcagcgcaaaatccacggccgaagcagagcgctatttcactgacgcgttggagcaatggcgcgtggccatgggcccggctctggcgcagccgttcatcatcgccggtcacagcttcggcgggtatatggccgctgcgtacgcgctcgcgcacccgcgacacgtgtcgcgtgtggtgctgatcagccccgtcggcctgccggtgccgccgccgcgcgaccagatcctgcagcgcagcatccgccgtgtcggccccattgcgcccatcataggccgtctctgggagacgggcctcgcgccgcagtgcatcctgcgactgttcggcccgttcgcgcacctgctggtgcggcgcatcgtggactggcgcttcggcacgatggaggggtggggcgacgtcatggacttagcgaattactgctttcatctgaacgccgcgccggacgccggtaacaacgcgttcgcgtggattctcatgcccggcgtgttcgcgcgcgcgcccatggagccgcgtctgaccgctctcacgtgccccgcagtgctgctgtacggcttccacgactggatggacgccaagtcgggccggcgcgtgaccgacgctctgcgcgccaaaggccaagtcgccatacactgtacggtggccgaagccgggcaccagatctttctggagaataacgacggcttcgtggcggcgctcattggcggctgccaactgctgccgttccgtcagcccaacggcgaggacgggctgctgcatgcgcacggcctgccgccgggctcgcatttggacgccgtcgcgaacgccgccgccaccggcgctgccaactgccgcgacaaatccgcgtaatcgcgagagaagtgcttactcacgccggcgccttttgcttcgctcccgctcccgtgcgccgtacggcctcacggccgacccgcgtgggcgccaacgcgcttcgtccacctctctccgccgacctgcctcttcgccaccgcctgctctcatgtcatcggcttgccgtcatcgtctcattccgcttccgattatttccattcctttcgtttggcgtcgcttcagctcgtttcggaggcggcagctgaatcgcttggggttgctcgccgccgccgaccactcactttaccctcagcctctcgcgacggaatgcccgccaccgcgcggccagctctcgcgttcgacc

SEQ ID NO: 12979 - DNA, 2577 bp, Oryza sativa
  ref <308>: DATABASE ACCESSION NUMBER: AK110327
  ref <309>: DATABASE ENTRY DATE: 2001-12-06
ctcaataaagacacgtacactggcgagtataagtacggcaagcgccatggcaaaggcacgtacacgtgggccaaaacaggcgccaaatatgagggcgattacgttgcgaatctgcgcaatggtgtgggtacgatgacctacccgaacggcgcgacttacagcggcgaatggctgcgcaaccagcggcacgggcagggcacgtaccggtacccgaacggcgacctgtactgcggcaaatgggatcacgacgtcaagtcgggaccgggcacgtacctggtcgccgccaataagacgcagatcaccggcgattgggtaagcggcaagtgcctgaacggcacgtgggagttctatgacggcaaaccgttctttggcgtgtttacgggcaacaaagtgcagtcgtacgcggtgctgaaagaggaggtcgagcgcttccacgcagcgcactccaaagagctcgtgcagtcgcgtgccaatgtactgcagcgcgtgttcgatgcgatggacgacaaccacaacggatggctgagtgtgggcgaactgcacgccttctgcaaactcgtcgacccgacggttcacgtcgaccgcctcttcggcctaatcgacaccaacaacgaccgccgcatcgaccgccgcgaattcctcgcctttggcgtgaaattcgctaacgccacggccggtgctgcgatgggcggtaacacggaccagttcgcactcgccatgcgcctggcactcgcaggcaaagcctggctgaagaagtcggcggcgaaacaggagctgaagtgggcgcagcagcagcagcggctgaacgccggtcccgccaaaccagttgcagctgcagcggcggaggacaagacggcgggtggtgcgccggctgtgccgcagatctcgtattgcgccaactcagcgctcgcagcggacagcgatccgaagacgatcgcgcgcgtcgacgccatctgccgcgctgtggcgtcggaggcgtcggacttccaaacgttcgacaaaaccgctgtgaaggcctttctcatggccatgaacgatgacattaaagacatcgacgccttcgctgatgcttcgatgaagaaatggggcggcacgccgtttgggttcgccgaaacgctgctgcagtcgcagttggaccaaaaggaggagaccgccgcaggcaagccgtcgctcgtcgacaccgccgaactggccatttcgcgtgtgcacgcggccaacggcgtgctgacggcgcaggtgcagagccgcatcgattcggccgtgcggtttgtgagttttgaatcgaatccgaacgcgttcgagctgcagcgggtaagggcgtgggtgaatgagattgaagacgacatcgcgggcgacgccgatgtggcgcaactcattaccaagatctttggcgccgacccggccgccttcaaagccacactcacggcggaagtgctcaaacagaagtcgctgtcgcacttggagcaggtcgagagcatcatcgcgcagctgcggaagaagctctcgctgcccggcgtcagcggcactctcatcgatcagagcgtgctgcagcgcatcgacaacatcgtcggtctcgtcgctgcggacccgccgcagccgtccgtttcgctggcggtgctgctggcgccggcacccgctgcggcggcttcctctgcggcgtcggcgggtgcgggtgcgggcgcaggcgcgggtgcgggtaaggatgtgaaggatgtgaaggacgacggaaaggcgcaaaagtcggatgacgaactgccgcctccgatggaacggcgcgcgttcaacccgacagccgcaacggcttggatatgcgaattcgatgaagacattggcgctgcgccggacacggcctttgcggagttccaaagcgcttggggtaaagacccgaaggagttcggcgccaatctgttgcgccgcctcgagacgtcgcggtcgctggaggcgctggaggcagcggagcgcgcggcggcggtggtgcgcgggcgtctgaagatcccaaccgaagaggagaaggcgcgtgcccgcgaaaagcagcgcctgctcgagcgcgaggagacggacgatgacgacagcactttcccggatatgatcggcgcggagtgggctgacagcttcacgctttgggtggccgcacgcgtcggctccatcgcagggctcgcgcgcctgctcgcggcggccggtgcgaacgccggtttggtggtgaacgccaaagacagcaacggcctgactccgctgtactacgcgctactctgcggccacatccgcgcgtcgaagctgctgctcgaaaagggcgcgctgtgggactacaaatgctatttggcggcgcagaagctcagtctcaagaacctgctcaagacgcagtacacgcgtcagcgcgtcatcgaaggcagcaaagccaaacccaaaaaccaagacgaagacgagtaaaggcacaacgcgtccccgccttcgcccgccgctgcgaactctctgctgctgccgctgctgctgtggccgctgtctgtctgctgcgactgctgctgtatcgtgccgctgcgcttttgcgtgtgttccgttcgcatacactctctgctgttt

SEQ ID NO: 12980 - DNA, 2118 bp, Oryza sativa
  ref <308>: DATABASE ACCESSION NUMBER: AK110328
  ref <309>: DATABASE ENTRY DATE: 2001-12-06
atgtcgatgactagctgagcactgagccagtgagctctgccactcgtagtagtcgatcgccggcgatcgatcttgcctcgccggagaaggagagaagacgtcacgccggcggcggcacatgaagcggcacaacacggcggaggtgccggtgccggtgagctacggcggcaaggtggagaagacgatgggtggggctaagcaggggcgcggcggcggcggcggctgctgctcccgcctctggttcatggtcgttctctccgccaccgtgacgctgctggtgcgccactgctacgactccggcgtgatcggccacggcgccgtcgccggcggcgtggtgcgcatcgagccggtgcaccgtggtttgtaccacactcggaaggcgagcccggtggatcgcggcggcggcggcggcggcacgtcgttctctggccattcgccgtcgccgcccgacgccggcggcagcgcgaagccggagtctccgcacgacagcggcgtcaaggcgccgtcggagctgaccaccgtcgagcacaccaagcagccgtccgagccagcttctaccggcacggagtcggatgatggaggcaagccatcgtcggcgtcgtcatcctcgctgccggcggcggcgcacccgttcgcgcgcgcgctcgcggcggcgggcgacaagggcgaccggtgcggcgggcggtacgtgtacgtgcaggagctgccaccgcggttcaacaccgacatggtaaagaactgcgcgacgctgttcccgtggacggacatgtgcgcgttcacggcgaacggcggcttcggcccgcagatgagcggcggcgacggcggcgtgttccaggagaccgggtggtacaactccgaccagtacacggtggacatcatcttccacgaccggatcaggcggtacgagtgcctcaccgacgacccctccctcgccgccgccgtgtacgtgccgttcttcgccggcctcgaggtggcgcgccacctctgggggttcaacgtcaccacccgggacgccatggcgctggaggtggtggacatcatcacgtcgcggtccgagtggcgcgccatgggaggccgcgaccacttcttcaccgccggccgcaccacgtgggacttccggaggctgaacgacggcgacgccggctggggcagcaagctgttcagccttccggcgatcaagaacatgacggcgctcgtggtggaggcgagcccgtggcacctcaacgacgccgccatcccgttcccgactgcgttccacccggcgagcgacgaggccgtgttcgtctggcaggacaaggtccgccgcctcgagcgcccatggctcttctccttcgccggcgcggcgcgcccgggcagcgccaagtccatccgttccgagctcatcgcgcagtgcagggcgtcgagcgtgtgctccctgatggagtgcgccgacgggccgagcaacaagtgcggctcgccggcgagctacatgaggctgttccagagctccaccttctgcctccagccgcagggcgactcgtacacgcgcaagtcggcgttcgacgccatgctcgccggctgcatcccggtgttcttccaccccggcacggcgtacgtccagtacacctggcacctgcccaggaaccacgccgactactccgtctacatctccgaggacgacgtgcgccgcaacgccagcatcgaggagcggctgcggcggatcgcgccggccgccgtggagcggatgagggagacggtcatctcgctcatcccgacggtggtgtacgcgcagccgtcgtcgaggctggacacgatgaaggacgcgttcgacgtggcggtggacgccatcgtcgacaaggtgacgaggctgcggcgcgacatcgtcgacggccgcggcgaggaggagaagctggagatgtacagctggaagtatccattgctgcgagaagggcagaaggtcgaggacccccatgagtgggatccattgttcgcgttcggttaggtcatcgtttctattactttctactgtcacactgttacacaatacaaggttaattacgtgtttgaaagaagtttgggaatacttgtaatgcaatggaacgaataatttccagttttaccaaaagatgaacaagttcg

SEQ ID NO: 12981 - DNA, 2885 bp, Oryza sativa
  ref <308>: DATABASE ACCESSION NUMBER: AK110329
  ref <309>: DATABASE ENTRY DATE: 2001-12-06
ttcttcctgatgagcaatcggacggtctccgttcgctgcgcaaacgcaaaacttcacatggcgacgaagcatctgctccggtaccgtccaggcaaacgcgcaaaaagcggagaccatccgaagccacccactcagatgcggcaccatccatgcctgcaacctcaccccgaccaccatccaggagcgtgcgaagtgctcgtagcgccataggtgacggtcatgagagtggggtcgaagcagagcatactggatctgaccgggaaaccacgcgtttgcgaccggcgcgagcgcgacgtgggcagccaaagagaactgacaaacgaccactcgcgtggatcgaagaagcgcagggtctcagcctgattatggcttttcaccttaacaacgaaaaggttcagaagattgtcacatccaaacccaagaagaaggcactgcctactattgagcaggaacgtcaggagaggcggcgtgaaagagaccgagagcgtcgtgagaggaaccgccgtgctgcacaggcggctcgggaatctccagacgtcccacactacccagctatacaccttcagtaccccacaccctttgccggcttcatggataaagagacagacgaatccaagagcaagccctatggcggcgtgctttctgaggctgacgcggatacttccaagacgtatccaacgcaagccgaccgcaagcgcttcgacgacgcccggatcaaggctgaggaagaatggaaggccaagcaggctgccctctatccgcctgagccagtacgttcacacaagcaagcagccactgcgagcaagatcaagtgtatcaattttggcggatgggagattgatacatggcacgccgctccctatcccgaagagtacagcaagaacagggtgctttatatttgcgagttctgtcttaagtacatgaactcggactatgtcgcatggcggcacaagctcaaacgccctgcgaagcaccctcctggcgacgagatttaccgtgacggcaaatactccttctttgaggtcgatggtagaaagaaccccgtgtactgccagaatctctgcctgctggccaaactcttccttggctcaaaaacactatactacgatgttgagccattcctattctatgtcatgacggagaacgaccagtttggctgccattttgtcggctacttctccaaggaaaaacgaccaagctcactcaacaacgtctcttgtatccttgtgctgcccatacacatgcgcaaaggttacggacagtatctgatggagttctcgtacctgctgacacgcgtcgagcgcaagaccggcagtcctgagaaaccactgagtgacatgggtcttgtaagttatcggaagtactggcggctcgtgttatgcgaggagctgttgaaccagaaatcaccaataagcatatcagctatatccgaccgtacgggtatgactgcagacgatatcatatctacgctggaaggtttacgcgctctcgtgcgcgatccagttaccaaaaagtatgcactacggctcgacctggaatacttcaaatcctacattgacaagtgcaacgctgcgggtaaccccaagatcaaacccgaatgtcttgtctggaccccatatgttatgggccgacttggtcagtacgaggatggtccagctctgcagacagtgcagcagcgcgacgaggctgatgagaagccggccccagaggagggtgtgcaagtagagaccgcaaaagccaatggcaagagtgaagagtctgagccatttccacctgcccccgcccacgcacttgctaccgaggactccatcaacggcggctctcctgctccaggaacaccactcgccaacggctctaccatcgccctcgcaggctcacacatggaagaacccgctatcccacccacgcgctacgaaatctttccccctatccccggccaaccgacacacaaacgtcgtccaggccgcccctttggatcccgtcgacgaaccagcacccccaaccgcgtccgcaacaccaccaacatgaccatccacactgctcccgtctcgaaaatccaactgtcccccagccgcggcgcaaaagcccaaatgtcgccttctgcaaacggcagcggcgccctcacacccggcaccatttccctccgccggacgcgcagccgcctcggcgaaagcgtcaccaacggcgacgacgtcgagcacgattctcccgccgctggcggcgccgttcgctcccttgtgacgaatggaaggaggagtacacgcagctcggcgagttcgtcgcgcgcgagtctcgatctcaagggcaagggaagggcggtgccgattcatgaagaggaagaagaagaggaagaagaggaggaggaacacgagcatgagcacgagcatgagcaggaagaagaggaggaggaggatgtggacggagagtatgatgaggatgatgggttgatggatgtggatgccgagggagaggatgacgatgatgtgattatggggggtgcgtgatcattctttcgcagtctctctagattcgtctgggtacgtggtttgtgggactcatggtggcatttctacatccttctccgaccatctctttttttctttcttctctctacttgtcattctgctcttcggaggagatggagtgaagtgagggatgtttacaccatgcggtctcggtcactcttctttctctcttctcacacgctttcaaagactcttttcctgccttcgagcatgggtttgattctggatggtggtttgttcccagtcgagcattaccaccttgtcttcttctggtgttttttttatcctggtgttttttttcctcatcacaggcattctgtgcgcttgtttctgaatgataccttgtcttatctttttttt

SEQ ID NO: 12982 - DNA, 2845 bp, Oryza sativa
  ref <308>: DATABASE ACCESSION NUMBER: AK110330
  ref <309>: DATABASE ENTRY DATE: 2001-12-06
aacgtccgcaaattattccacacggccagcgccttgttgcgactccaaggctaacgactcggacccttccatcgtagctgggatagtcacagctgcgacagcgccgggcgcatcgcatcgcaccctatcgctcggatacccgcgctggacccgcggcgggcctctgcgtcgccgtgacagtagccgctgagcgctggggacgtaggagtactatggcctgttgttgaagggccgcgcatcgacgacaaacaatgcaagtcgacttcggcgacggccatgcgcactacgagttcaggcagcccatagatccctcgctcgaacagacatcagcggctccgcgccatggccacatgtctgccagcaaccaccaccatcaccagcagcagcagcacctcctccagccggacaatgcctcgctcgccggcttctacagcgacatggcgcgctcctcgcacactcccccgcccacgtcctcgccgcgcttctccgccatctcgcccaccagccagcccaagcagctcgccgccagctatgggccggacgaccgcacgccgccgccctgcgacgtgtccgacgcgaccattgacgacgcgtatgcgagcttcatcctgtactgcaaccccaacttcgccacctcgaccgacaccaccgagctggtcaagctgttccgcacgccgcccaagagcgatggcaacgccttcagcagctgggcgctgttcgagctgatccgcaagttcgacgccaaagagatcaagacgtggacgcagctcgccctcgacctgggcgttgcgccgcccgacacggacaagggccagagcacgcagaaggtgcagcagtactcggtgcgcctcaagcgccggatgcgcgccatgcacatcgacgccttcttcgagtatctcctgggcaagcagcacccctactacctgcagatcccaccaccgcatgaccccttcccgccggagggccgtgatggggtcccgcttgaggaggacctggcgattcgcgcgctcgaccccaagttcaagccgaagcgtggccggcgcaaagccgacgagggcgacgatgatatggacatggacgacagcacgcccgcgcgcaagcggccgcagctcgacacctcgatcccctttggcaatgcgctgcagccgcagtctgcgtaccccaccagcgcgcatccggaccacatgggcggcttcctgacgccccaggacccctggacagcggcatccaccataaccccgtcctcggccatgaccgcagcttctgcgcccagccggctgggtcagaagaacctgacgccatactcagcgtcgccaatgtccggccagcagcttcgttggcggctcaatacgcaggacaaccctcagacgccgcatcccatgtcggccgtcaccccgcagtcagcacaccccttctttgacgagcctcagtctgcggtcacaccgtccagtgcaaaaccgcgctcgaggcgacgccatggcccagcggtatcctcggcatggtccagcaacaatagctcgtcgagcggtaagccgcgagggcggccgccgagcaataggtcgactcgggacgggcctttcgtgacatttccagcgaatccgagcaagcgagaaagctcaaccatggacatgtcgcgcaactctggcaacctgacgccaattgtcgagcgtgcccactcggatccgcctgccatagagcacacctttcgattccctcccacacccgcttctgccatttccccatctacattggaagggtctctgcacggtgtgccccagaagcagcgactcagcttgcaagtgccgcagatcgtggggaacccagtacgcctcgttacaccgactgtgcttgtgaatggcgaggaagaccagatatctagcacagcttatgctccgccaactcagatagcccaagtgcacgaatcgcaggcggatacttttgatcatcgccctgctccaacgcaccacacctaccatggtgccctcactccttccgagactccagcgcagcaacgacctctgccaccagcgcgctcacagacacagcccacccagagtacttcttcgttgccaacagtacctctcgaaagtctgaatcgcgcactggcggcggagcttatacgagcgcccttgactggacgacgaaaacgattacgcggtactgaagcgaagcacctggcatcgtccatactgcagcctctgtacgcgaagcccacggttggatctgcagcgcctgcaaagttgatgagtgacgaagttctcggtatcgccgttagtagctgcctcggcttgacaggcaccgttggcattggagctggtggcccaactgggggtgtgagacgtgtcgaatgcattcgcttccgcgtcggcggtgacgggtacgagagtccaatcgatgaggatgacgaagacgcggacaacatgcacgagggcggcactatcaaagagacgtttgacgtgtcatttgccgtgtcattcggcggtctgactggcgagtggatggccaaaggtctggccgcaacagcagacgatgccgaagacgacgagaatgctgtctccggcagaagtgcctcggaaatggacgcgcacgacggcatccaaaccacaccggcggcatggaaaacaaaatttctcgaggcgcagaggaagctgtgggagagccaagaagaggtgaagagcttgaaggacaagatcctggaggctgtcctgtgattgtggacgtgtacatgtgtatatggtttttgtatggtctctggttgttggatttgctatataccccgatgtcgcggcatctcttgcatattctcgtagattagtcgtagctcgtctacacgaagcctttactg

SEQ ID NO: 12983 - DNA, 2591 bp, Oryza sativa
  ref <308>: DATABASE ACCESSION NUMBER: AK110331
  ref <309>: DATABASE ENTRY DATE: 2001-12-06
aagcgaaaaaccgagtttgtatactcgataaattaagcactccgcttcacacctcctcccacgatggcagcacctgcggcatcggctgcgccggcggcgacgcctgcgctggaccgtcagggcagcgcgaaaaagggcggcaccggcttccccgtggccacgcccgagagcattgcggcggccatcaaactggccgaagagtgggccgctgacgacgagaagaacacgcaaatgttcacgctcaaaccaaatgcggcgaaaaaggtgattgtcgtgacgactgcggacgacagtgtgttcagcatctcattggacccgccgcacccgatcacggccgagtctgcggtgctcgagacgctggaggacagcacctccaccttctgctatggcgacggcaaaaagttcacggccgagtcgaagcagaagaacccgcccaccgtcgcggacgtgctctcacacgccgccaaattcctgacctcctccggcggatgggacgatgacggcgacgccggtgacggcggcgatgcgggcggcgatgtggacgactgggacgatgcgccttcgtcttcggccaaactcacgcgccaaaagtccgccggaccggccgctgcggctgccagcgctgccggcgcgcgtagcaccagcgacgtgaagggtctgactccggccaaagcggcggacaaaaaggacgctggcaaaggcggcgccaaagacgcgaaggccggcggtgacgataagaagaaagacgccggcgcggcgacgggtccggacgggcagatcgtgatcacacgctcgcggtcgtacaaaattttgcccaaacacgagctcatgccggtgcagcgggagatgatcgaaggcgtggcgtcgaagctgtctgtgaccatcagcgctgccgggcagctgctgcgcgcgcataagtgggacgacgaagcgctcctgaaggcgtggagcgccgaccacgcggctgtggcgaagaaggccaatgtgacggccatactgcggcaggtgatgagcgcacccgccgatcccgagaagctgtgcagttgcggtgtgtgctttgacgatgtgaaggagggcctgacgttcgccatgaagtgcggtcaccggttctgcatcccgtgttggaaggactacctcaagtcatcggtcgattcaggcgccagtgccggcggcaactgcctgtctagcacgtgcccgggctttaagtgcaaagagctgttgggcgaacagatctacgaaatgctgtgcgatgaggcgagttttaagaaataccgtgacgtgcagctgctgtcgtttgtggacgacaatgagagcatcacgtggtgcccgggcaaagggtgcggcaacgtcattgccttcagcaaacgcaaaaagacggtgtactgcacatgtggtcagcgtttctgcttcaaatgcaaagccgaagcgcacgcaccgacgacgtgcaaagaggcagcggactggttggcgcgcgacaaaggctctcagaatttggacagcaaatttctgttggaagagacaaagccgtgcccacactgcggcgtgcgcgtgaaaaaggacggcggctgtatgtacatgagctgtacgcagtgcaagaaggcgtggtgttggcagtgcggtaagtcggatcatcacgtgtgggagtgcaaccgtccgccgtatgaagtgggcaaaccgggcgataaagacgatgtgaaccggtatttgttctatttcgagcgctacttcaaccacgggcagtcgctcaagatcgcggacaaacagcgacaggcgactatggacaaaatgaagtctctggtcaaagaggggctgcacttccagcgcgtcgagttcctgctccgcgccacggagctggtgttggagtgccgccgcgttctcaagtggacgtacgtcaaagcgtacaatttcaagtccaaagccgaccgtacgctctttgagtaccggcagtcggagttggagaaatacaccgaaaagctcaatcagctcacggagggctcgctggaggagctgctgaagaaccgcctcggcgtgttggactggacccgtgcgctgcagaaatatctggacactatggagttcgaaggctaaacgccgcgccgcacggccgcaccgccgccgaaccgcgactaacgcctccgaatcgctgtgtatcccctctgtctgctgccgccgcgacagagccacgtcgacgcggcccgccgtcccgtgcgtcgagtggctttgtctcgtgtgtgtctcccccgcgccggtcaggcgcccgcaaccgcacggcttcgcgcgttaacgccacgcaatgaacacttccgttcgcgccgctgcccgtccgccggccgccctgccgccgccaccacccgttgtctctgtcatcgttttggccccgttgtcgttgtcattgatctgtcgctttcgtcttcgcatcgctctccattccgtgtctcgtcgtcgtcgtgttgccaccgcccaccgcccgcgccgccacacgttctgctgtccggttcgttgcgcgcacgggcctgcgcatggcattgtctcaaagcagcgcctatgccgtgtgaagctttccctcttttccgcgaaaaactcacctcaat

SEQ ID NO: 12984 - DNA, 1737 bp, Oryza sativa
  ref <308>: DATABASE ACCESSION NUMBER: AK110332
  ref <309>: DATABASE ENTRY DATE: 2001-12-06
atcaatttgcttgttcgatcataagctcgatctcgtgcacatcgtcgacgacggcgaccaccggcggatcaatcgccggcggcatggacgacgacgacgactgccggcggcgagatgtcaccttgggcgacgaattcatggtgctgcagccggagaacggcggcgcgcgcagcctcgccgacctgctgctctcctgcaaggtcggcgagaacaaggccgtgcgctgcggccgccccggcgccgaggtggcgccgccgtggcaccggtggatcatcgccgtctccctcctcgcgcagatgctgctccggttgtccaagggggtcatggccaaggtcggccgcgccgtcgagtactggatgaacctcgtcagcgagaatgacaacgtcctcggcctcatcagaaatgctctgcatgggaaggtgaaaacgccggacagaaattctcccaactacagatcgttcattggacttcttgacacaaggatcgatctggacgagaagatcaagccaggtgatagcaattaccacgcagctctctgcatcatggcagcgaaattggcctacgagaacgaactcgtcataaaggacgccgtggaaaagaattggaagatgaccttcttagagttcttcaactgttggaacgatttccagaatgattacacgacccaggcgttcatgttcgccgacaagccggaggacgccgagctcgtcgtggtggcgttccgcggcacgcagccgttcgacatggagcagtggagcaccgacgtcgacatctcgtggtacgagatcccgggtgtgggcaaggtccatggcggcttcatgaaggcgctcgggctgcagaacaacgccgccgccggcaagaaacccagctggccggcggagatcgcgccgccgtcggcggccaagaactccgagaagacgaagagcttcgcctactacgccatccgcgcccgcctgcgcgcgttcctcgccgccaacccgcgcgccaggctcgtcgtgacggggcacagcctcggcggcgcgcttgccgcgctgttcccggtggtcctggcgctgcacggcggcgaggccgacgccgcggcgctcggcaggctggacggcgtgtacacctacgggcagccccgcgtcggcgacgcggcgctcggcgagtgggtcgcggcggcgagctcactggagggcaagcacctccggttcgtgtactgcaacgacgtcgtgccccgggtgccctacgacgacgccgcgttcctgttcaggcacttcggccgctgcgtctacttcgacgccgcatacagggcgagggccatggcggaggagccgaacaagaactacttctcgccggcgttcgcgttggccaagcacgcgaacgcggcgtgggagctggcgcgagggctcgccatcgggcgcgtggcagggggggagtacgcggaagggtgggcgatgcgggcggcgagggtggtggggctggtgttccccggcttgccgccgcacgcgccgcaggactacgtgaacgccaccaggctcgccggcgcctcgcttcgcaagctgctagactagacagttagcccactctcttgctctgcgactgatgaactgatcaccaattcaccagtggaaatgaatcgagcacgggaacggaactgaattattttccggttcctgtgatagaaagatgaaactttgaaaattcatgcaaaaatttgtgtagtatattcgaaatctatgaagcaataggtttgtc

SEQ ID NO: 12985 - DNA, 2932 bp, Oryza sativa
  ref <308>: DATABASE ACCESSION NUMBER: AK110333
  ref <309>: DATABASE ENTRY DATE: 2001-12-06
aaagcgaaaaaccgagtttgtatactcgataaattaagtttcaaggggtcgttccctctcaaacaggagcgcaaacgaaaaaccaaaaagaaacttaaaccaaatgtcgaaacagaaccaacagccgcctcaggtggccggcgctgcgccggccgccgccgcgaagcccgccgccacgggttcgccgcagcagaagcccgcctctgctgacgccaaatccaagcccatgaccgtcgatgagaagggcgaccgcctctctttggccggcaattcgtcggtgcagaagatgttggccaaactcggcaacaacaagccgagccccgaagtggtcagtttcagcgatttcgttatcaaaattaacaaacgcgaaaaggagcagacccgtgtgatgctcattacggacaaagccatttacaatttgatgcccaataactacggcaagtgcaagcgccgtatcggcatcgaagcgctggtggccataaccgcttcgcagatcagcgatgagttcgtcattcacattcccgacgaatacgactaccgctttaagtcgtcaaaaaaagacaaaatctgcgaaactctcggtattctcttcaaaaacttccaaaccgcaaagcagaagaagcccaccaaactgccggtcacgtacatccaacagtccgacctcaaggacttggccgtcaccaaagcgatggcgcggatgcagacgcgtgaggacgtgctgaagcgcaagcaggcactggcggcggtggcgcatgagtccgataaggaggagacgcaggcgcagaaggacgagaaggcggataaagtgacgcaactgatggagaacactgagaaagttcgtttggacgacttcgagttgctgaaggtgttgggccgcggcagcttcggaaaggtgatgcaggtaaagaagaagacgacgggcaaaatcttcgctatgaagatcctgaaaaagcgcgccatcatcgcgcgcaatcaggtcgaacacaccaaagccgaacgcaagatcttgcaggcgctgcagcatcccttcctcatgaccctccgctacgcgtttcagtcgaaggagaagctgtatttcgtactcgactactaccagggcggtgagctgtttttccatctgaagaacaaacgccggttcggcgaggacgtggcgcgcatttacgtgggcgaaatcgccgcggcgctgggtcacctgcactcgctcggggtcatctaccgcgatctcaagccggagaacatccttttggatgacaacggccatgtgtgtctgaccgacttcggtctctccaaagacgtcgacccttcggataaggcacacacgttctgcggcacgcccgagtacctggcacctgagatcgtgacgggcgcgggccacgacaaggccgtggactggtggtcgctcggtattttgctgtacgaattgactgtgggcattcccccgttctactcacagaacgtgaacgaaatgtacaacaaaatacagcacggcgtgttgcgcttccccccgttcctgtcggagggctgcaaatcgcttatcgtcgcgctgctcaaccgcgatccggcgaagcgcctcggcagcggcaaagacctggacgacgtcaagtctcatgcgttcttcaaagacctgaattgggacaaaatgatgcgcaaagagatcgaagtgccttacaagcccaaggtcaagagcggtgacgatacgcagaacttcgatgagacgttcacgaaagagcctgtcgtggactcgcacgtgccgacgtcaaagctgacggagacggtcacgaacgaacctgatgcgttcaaagacttcacattccaacagaacgagagcaagctcctgcagggctaagagggtgacggcgacccgacgatacggacggcgcgctatgacgtgtgtgagcccgaagccgttgtgctgcgcgaccaccggggtttctctcgtactgcccggtcctgtgccgccacgcaattgctgccgcgccattcacatctctgtcccaagtctggtcacccgtgcggtaaccaccccgcacggtgctgcttcgcgatgtgccaaaaacatcgcaaacgccgccatttaccacctctttctctcgacgccaacgaccgtcgacctctgcagtcagccgctaatgctcttatgtccgccgtgttcccccgccacacgccgtccgctttaactgccttcgcagttgtgtgtccggtgcggtgttgcgcggtgggcaactgttggcaagtgattgtgtcttttgaatgctttcgtatgccgctccaccaccacttccccttttggttagccctactcttatcgatgccacggctctcctccttccccctgcactcaccgcctgaccgctgccgatctgtcgctccgccttccactgccactgtcgtccgccgcccaaaccgccactccccgcagcgatgcggtgcgtctgacggcgcgcgcgcgcgcgcgtccgaactgctccgtctctccgcacaccctcacacgcgccaaaggctgcgcacacccacgtttcgcccgaaaccgaccgaatatgtttgcattcgctctgtcacgctctgccgcatctgccattccgtccgccgacccgtgtggccccagccccgccgccgcgtacgccgccaccgcccgacatggaactgaatgctgcagtgagtgcattcgcgttcggttgcgtgggtgtgtggtgtgccgcgctgtctgttcggtgcgccgggctccccccgccccgccgtcgtctgtcgtaccgtctgtttgctgccgtgaatgtggtcgatctgtggcccgtgcgtgcgcgtgtgtggtgtccggtgtcgtgcgcgttcgtccgccggtcgcgcggcggcagcaattgctgtctgctgcgcggctgaaccgtgtaccttagcgactctgcgtgtctcgcaaaaccgaaacagaaaaccgatg

SEQ ID NO: 12986 - DNA, 3535 bp, Oryza sativa
  ref <308>: DATABASE ACCESSION NUMBER: AK110334
  ref <309>: DATABASE ENTRY DATE: 2001-12-06
gtttgctcaagctgaatagtttcgcattctcgtatttaaccagcggtagcagcatagaccatccagtgtcactgcacgtgacaccatacttgcactcatactagcatgcactcgtaggcgcagttggtggattcagagtaacctgctgtctgcatcactgttcctgaacatggcaaccaccaccacggtgaagccccttcttccagtcaagcaacccgtgccatctgatatcgagattgcccagtcaatcaagccaaggcacatttcacaaatagctgagctgggcttgggactgctgccggaggaatacgagctgtatggacccaccaaggctaaggtgaagctcagtgtgagggacaggctgaaagatgcacccaacggcaaatatgttgttgttggcggcatttcccccacacccctgggtgagggcaagagcaccactacagtagggctgtgccaagcactgggagcttacctgaagaaaaaggtgctgaccaacatcaggcagcccagccagggcaccacttttggcatcaaaggaggagcagcaggcggcgggtatagccaggtgattcccatggaggagctgaacctgcacctgactggagacattcacgccatcagtgcatctaacaacctgctggcagttgccatcgatgcacgcatgttccacgaagcagctcagaaggacgaggcacttttcaggcggttgtgccccacagacaagcagggcaagcgccactttgctcctgtcatgcttggcaggctgcagcggctgggcattgacaagaccaacccagatgaccccacaccagaggaggtgagccgctttgtgcgtctagacattgaccctgagcaggtgatgtggaggcgtgtggtggacatcaatgacaggttcctgcgtggcatcacggttgggcaggggccagaggagcggggccaggagcgcaagaccggctttgacatatccgtggccagtgaaatcatggccgtgctggcactggccactgacctggcagacatgcggtcacgccttggccgcatggtggtggctcaggccaggcaggggcagccggtgactgctgatgacctgggagtgggtggcgcactgactgtgatgttgaaggacgcaattgagccaacaatcatgcagacgctggaggccactcctgtgttggttcatgcgggtccctttgccaacatcgcacacggcaacagcagcgtgattgcagaccagattggccttaagctggtggggccagatggatatgtcatcacagaggctggctttggtgctgacatcgggcttgaaaagttcatgaacatcaagtgccgcgcctcgggcctggcaccagatgcagcagtcatcgtggccaccgtccgggcccttaagatgcacggcggcggcccaccagtggtggcaggcacacccctggcgcacgcctacctggcgcctgatgtggatctggtcaaagcgggctgcagcaacttggtgcggcacatacagaacacacgcaagtacggggtgccagtggtggtggcaattaacgcgttcgccagtgacagccaagaggagctggaggctgtgcgtgcagcagccctggatgctggtgcgtttgacgctgtggtgaccacgcaccatgccttgggaggagcaggcgctgtggaattggcgcaggccgtcatcaaggcctgcagccagccagcagagttccagttcctgtatgatgtggacctaccaatcaagggcaagattgaggccatcgcctgtggcacgtatggtgcagccagtgtgagctacagcccggaagccgaggccgccattgagaagttcaccgcaatgggctttgacaagctgccaatctgcatggccaagacgcagtacagcttcagccatgatgccacactcaagggtgctccaagcgggtttacgctgcccatccgggatgtgcgtgcctcagcgggtgctggcttcttgtaccctctggtgggcaacatgatgaccatgccaggcctgcctacacggccctgcttctacgacatcgacattgacctagccacaggccgcattgtgggcctgtcgtaattttgtctgctagcatgggtgcacgtttagcaagtgcagttgttacagcagttgtataggtcaggtgcagtaggcaggaactcggtcaggcttttggtggctagaacgtagttgtgcacagctgtacagcaggaaagccattgcgtatgtggtgttgctgggaacacaagaggctgggtggtctgctctgtgcaaatagactgccacacaggcctgagtccaggcagaaccgcagggcttagatagagtactggatccaacacacagttgcagcagtgcatgtaggcttcttgatgattgaaagcacgtgctgcatatccccctgctggctcatctgtggtgagcatgcacaatattgccggcgctgctgcagcaatccgtgctaccattggttcacgtgaacagctccgcacatggctggcagctgagagtgtggcctgcagcaaggttgcacacctgttcaagaatgtggtatgcaggccaggcgtgacttcaggagtgggtggcggagctcattgaaggcatgcacaaagctgacggtgaatgcggtacagagctaaggagtggcaggacacaattagaactcttatggttcttgtgcctctgctggctgcatgggtcttctgtccccattatgagttgttcatctctccactactgtgagaattgcctgcacgtgttttggtggcgtggcaacttctgcttcttccttgtcatccacctgtgtggaaacggttttgttgttggtcatgctagatggtgatcattggggcagccacttgaccgactggagcacacgcactgcaattcactgcaaaatggcgtaacttgcgaaccatggtggcaacactggtgtgttgtgtcatccgtgttggccaccaactgcctgggaagcacatgtgcactgcaaacaccgcagaacactgtgttgtggtgtctggcgtgccagtactctgtgtattctggctgccaggtcactagtgcagatgttggtttctgcaacagaccgatggggtgacgtggtgtgctcggagttatatcatgtcggtgacaatgtgtgctccattgtcacaacagcaccacttaagtcatcaccagcagtcctgtgtggatgtgagggcgtccttgttgaggacgttgctacaatgcccgcaccaaggacgcctacgcaccaccaccggtattaacatgatgtcgtgtgtgaagtacgtgctgtttgacacgaagtgggtagggtttgtgttcaactgtgtagcattgctggtcactgcaatgtgcactgcatgtacctgtgtatacacatatcctcacatgcactctgcgggtgcctgtcacgcttggtagtacttggacaatgctacagtggcctgccaggcagtgccaggggcaaccagtggttgcagcagtgttgcatgaggagagagggtatgcaggcaatatgcttgagtg

SEQ ID NO: 12987 - DNA, 3738 bp, Oryza sativa
  ref <308>: DATABASE ACCESSION NUMBER: AK110335
  ref <309>: DATABASE ENTRY DATE: 2001-12-06
aatgtgctgagagttgttgcaagaaaacggtgttgcttcattgacacatgcctgtgacacaagcacggctaatgcgtggacagcactgggagcctgcacacattatcagcaagtaggctgagctatacaggaggacatgtcgaagcagcagcccgcaacgcaggcacaggctgtgccggtgactgagaaccgttctgaggagtatgcagaggtggcttgcactgctgccctcaagctcagcagtctgtggaaaaagaagcagaacgtgcaactgctggcacagccagttccatcagcaatatgtgccggaaagcatgcagagattatgacacagagcatcaatcttgccagggccatggacgaagctctgggtgtcatcatcaaacagccagcaacagcagatgccgtactgatggcagtgctgcagcgcttcaggccagccgtggtactggcaacgctcatgctttgggtgagcaacagcagcacagacgcagctgggctggcaagccaactgtccttcctttcagaagacgtctgccacttcagtgaggagctgccagatatgattgcgctggacaccactacgctccctgccctcctgtttttgggttgcagcagcacactgcagatgctgttgatcacggctagcgacatctaccaagtaaatccgcagcatctccgagtattgctggatcaactgaatggccttggcagcatgcctggcaatggcaaaggctttgccagcagactggttgacatcacacggcagattgtgcagccagcggaggcgtctggcagactgcacccttttccgcttttatcgctgctgcgactgcagagtaggctgcatagcttgcacgtaatgcacacagcccccgccaacagagcaccggacgccagccgagcagcaataccacttctgcaactggtgcagcgctgcttggcagtgccgcctgcaccagacagcggtgctggcagcagcagcggcgctggcagcagcagcggggctggtagcagcagtactgcagtggctgacgccacagcggacagcggcagcagcagcagctttctacgcaatcgaaccatgtgtgaggtcttggtggatcttcagacgcacctggtggtggttgtcagcacagtgccggcactaatgcccaacaccacagcaagtcaatatgccgctcacgtggcggcctacaccgggaaagaggtggccgaggtccgtctgcagcagctggcagccttttgctgcctgcagcaccaacaccacgctgcggcactcgcaccggcgggggcatcggcagtgacagcagctcagcagcagtggcagcggcagcagcagcgcgcagtgcagctgcgtgggcagccattgcgcattgatcgcctggcactttgccctgcggcggctgtgaagctgctaccagcctggggggagcagtatgtgaggacagtggcggcaattgagatgcttgagccgctgcaggtggtgtatgggactgagtgccaggtcattgcaatggacacgacatgcttgcgtgtggaaactttggtttcggggctgtctcaagcagcatcagcaggcattttggcagcctgcggcactgcagctgtgtcggctggtgcagtgcagctgtcaattgagctgctgctgctgttggcagcggagcttcagcggtggaaggaccagcaagacagcagacaacaggcgcagccgcagcagcagcagcagcagcagcagcgaagggcgcgttcaatccctcacatggcctcaggctcagctgaagtagctgagcggctggcctgcattctgtgcaaaattagggactgctttcatacacagatggcacgtgtctccctgctgccagacagtcagtggcacagcttgtcagggcagctgctacaagagtccgggctgcagctgctgcaggggttgatctacctggtgcagctgccagctgctgagtacatgcagcagcaagcagagcaccagcctgccaagccggtagctgtagcaatgtgtctatgtaggttgctgctggctggagcttgcaaggagacacaaatgatatcagagaacatcatagcaagccccctgacatcagggagcataatgggagtcaatatgatggtgtctccctgcccgctgctcactcagctcgctgctcagcacccggtggcctactttggcctagtggacagcagcgtgcgctgcggcctggatccagcagacatactgctggcagctgcactaatgcgatatggctgctgccagcctgtgttcagggcacgccagctgttggagcagccagcagcagttgctgccctcagctcagcactggctggcctgatcaagctggcagcacagtataccaaggcagcagatgccatgccggcagtagcaacaacgagcggcagttcagcagcaacagcacctgcggcagtagctccagagcgctttgcagctgtggtacccaacatcatcaagggtgtcttgacgccgtgttgtggcctgctccttgctgttgtgccggtaggcttccagccaggggtcctcaggactcacataagcagccacagcagcaacaacagcagcagcagcagcagcagcaagtcgagcagccgtggcgtgggtgctcaagctgcagcaagtggtctggtcctgactgtgctgattgccaggtcgctgctggtactggcagaagcagttgatgctgcagctgcagcagctggactcagccaagagcggtatcttgccagggcagtcacagggaagcctgtgttcacaaaccctggcccagggggcattgctacaaagctggacattgcttaccgcccagctggggataaagtagcagactactggagtaacttccagtacgagctgtgctgcattgtgcaatttgttgcatgcttgctggcacactaccagctggcaacaccaatcgcagcagcaaatgcagcaggacagaagacggcttcagcagcggcaggagcagctttgccagcaaaggctggacagaacacaggtagcctgggcagacagcactcagaacagcatcagcatggggagttgcatgagtgcaaggcagagctggtgggcccagcagacgtgacatggggtaaaatgctggagctgtgcctttcacgcaaacttaggacagcagcagcggcctttatgcgcaagtggcctttcacactgcagcaggcagctttggaggcaaacaggaaagggcgggagtcctgccaggcgccagcagcagcggagcctgcagcagcagcaacagcagcagcggagaccacatcagcagttgcagcaccagaagagacagcagcaactgctagaagtggtgctgcttccccacctctcagcctggacgagctgtaccgtgacagcctgcagctgtgccgtgtgctgttcagtgctgcaccgctgccgctgctgtgcaacagccctgcctgcagcaacctgtcagggctgtgtgaggcggcagtggcaggcaaggtgtgtggggcgtgtggcagccggtggtgcagcgaggagtgcttcagggctgcatggcggcagcacaagaaggcctgcaggcgcatggcagaactggggctggctgtgaagtagtggccaacaggggcagcatgctaggagggggtacgacatagatatgtgtctttactagagagcagcacaacaagacagatggcattccggatcgtatgacaggatgcaagccttgctctgag

SEQ ID NO: 12988 - DNA, 2492 bp, Oryza sativa
  ref <308>: DATABASE ACCESSION NUMBER: AK110336
  ref <309>: DATABASE ENTRY DATE: 2001-12-06
accttcagcagctgacacgtccagttgctagtgtcaaaatgaacgccacaatgcagaagcaggctcgcgtgcagggttgccctgctcgcacggcaaagttggccgcactcaggccccagccagtgcgtgcccctcgccgcgctgtggcgccccaggcagcagcagttgaagcccctgcaaaggtgtctcaggagaccattgacaaatgcgtcaatgccatccgtttcctggccattgatgccgtgaacaaggccaagtccggtcaccctggtctgcccatgggagcagcacccatgtcctatgtgctgttcaacgagacaatgaagttcaaccccaagaaccccgcttgggccaaccgtgatcgtttcgttctttcagcaggacacggctccatgctgcagtatgccctgatgcacctcgtgggctacgagagcgtgcagctcgatgacatcaagcagttccgtcagtgggattcaaagacacccggtcacccagagaacttcctgacaactggtgtggaggtgaccaccggtcctctgggccagggtatctgcaatgcagttggtctggctgtggctgaggcccacctggcagctcgcttcaacaagccggatgccaaggtcattgaccactacacctactgcatcatgggtgatggctgcatgatggagggcatctccaacgaggcctgctcgctggctggtcactggggactgggcaagctgattgccctgtatgacgacaacaacatttccattgatggccacaccgagatctccttcactgaggatgtggctgcccgctttgaggctctgggctggcatgtgcagcacgtcaaggacggcaacaccgactttgacgcactgcgcaaggccattgccaacgccaaggctgtgactgacaagcccagcctgctcaaggtctccaccctgatcggctacggctcacccaacaaggctgacacacacgacgtgcacggcgcaccactgggcccagaggagactgccgccacccgtgacaacctgaagtggccatatgctgaatttgaggtgccacaggaggtgtacgacgtgatgcgcggtgcagtgagccgtggcgctgctgctgaggaggagtggaacgctgccatggctgcctacaagtccaagtaccccaaggaggctgaggagctggagggcctgctcagtggcaagctgccagctggctgggagaaggctctgccaagctacacccctgaggacaagggcctggccacacgccagtacagccagatcatgctgaacgcgctggccccagtgctgcctggcctgattggtggctctgccgacctggcaccatccaacctgaccctgatgaaaatgttcggagacttccagaaggacagcaacgcagagcgcaacctgaggttcggtgtgcgtgagcacggtatgggtgccatttgcaacggtattggcctgcacaactctggcctgatcccttactgcgccaccttctacatcttcacagactatatgcgtgcagccatgcgcatgagcgcactgagcgagatgggtgtcatctatgtgatgacgcacgactccattggcctgggtgaggatggccccacccaccagcccattgagcaccttgccagcttccgcgccatgccaaacatgctcatgatccgcccatgcggtggtaatgagactgctggtgcatacaaggtggctgtgtccaaccgcaagcgcccatcaaccatcgctctgtcccgccagggcatggctaacctgccaggctgcagcgttgagggtgtggagaagggtgcctacgtcatccacggcggtgatgccaagcctgatgtgatcttcattggcactggctcagagctgccactggctgtggaggcagccaagaagctggaggctgagggcaagaaggtgcgcgttgtgtccatgccctgctgggagctgttcgccgagcagtcagcagagtacaaggagagtgtgctgcccaaggacgtcactgctcgcgtggccgtggaggcaggcagcagcttcggctgggagcgttacaccaccagcaatggcaagtttgtgggcatcgacgatttcggcgccagcgcacctgctggcattctgtacgagaagtttggcatcactctcgacaatgtggtggcagctgccaagagcctgctgtaattgtgttgatggccgtcattgttgcgcatgccctgtagatgttttgcgcatgcccttgtagatggctcacacaccagccgtgtgtgtatgctgcgattttgaggcgcgtggtgtgtaccaccgccggtgcagctgtgcaggtgtgagcaagcacctgtcagtgaagtgcatatttcaagatcgggttgctgttgtgtgacatagagcattgttctgtgaagtagtcctgcgcctgtaaagagaagaacaaacctacatgcaacattgtccagcagggattgctcagctgcatgactgtaaaggatccgactggtt

SEQ ID NO: 12989 - DNA, 3118 bp, Oryza sativa
  ref <308>: DATABASE ACCESSION NUMBER: AK110337
  ref <309>: DATABASE ENTRY DATE: 2001-12-06
accgacgcgcccaacattgaagtccgtctttactgtgccttcgccgcgacacgacgcctaccgccgcgcctacgagctggatccgagagagcggagggacatcctcctccctagatgtacgacgccgagccctgcattcaagccgcgtcctgctttcatgccggccgagcaaggatggacgaaggtaaagcctcggcgctggtggagagagaaggggcattcaagccagagccaacggcccgattcaaggcgacaagacggcgccggacatgcgcctggaagaaggggcgctctctccctggaagaattcagagcaagaaccaggggacgctgcttcgtctgcctggccagcgaccaccgggcatcagcgcgccgcgaccccccgcgttgtttcacctgtaatcgtactggacacagggcgcgccattgcacttcccctcgcctcgcccaccgcccgccgcacccacccaccagatcagctcgcttgccaagggcagcttccccctcgtcgcaccactccaccagagctgctcgtgcctcaccaagaacaagcagatctcgcactccttgcccccaccgccgacatgccttgagtgaccgccacgacaatcctccaccacgcagagagcgccagcaagcgctggcccttcgcgctgccacgccgcgctttccgctgctgcataatcgctgagaagctgctcacctaccaccaccgccacctccctccggtgtgatggcgcaactgggcgacccggagacacgccccctcgaggatgtcgttttcatcccgacatcgcacgccatcgacggggagttgcgcgagtgggagagcacagcggcggtcacctaggcgatgtgtgccccgccatctgtcaccgccaaagacgtcgagcgcaccatcgccgacaagttcggccttcgcacaggggagctcgccgtgttgctccactatccagaggccttcctcctcaagttcaagcaccgccaccattgcgaggaagctgttaagcaggcttcgccaagggtcggggaattgaagtccacttcattcaatggcgcagcttgaagaacgccgccggctccgccctcatgtaccgggtcaagctatgcctcgacggcgtcccgatgcatctttgggcgcctgacatcaccgagcgcatcatcagccggacttgtaccctggagttggtggagattgatctggtccaccccgtcgaagccggcgacatgagagtgaacttgctctgggcatggactccgaatccgagccgcatccacaagcgcgtgtggcgcgccaaacccgcgaccctctcctcgaatcgatcacgattttggagatgccgccggagcactggcaacagggggtcaagcatctagtcctcttccacatcgaggagatccacgattacaccgcggtggctgtcgacctccgcaatcctaagtcctgcaggccggtgacacgcactctgccttcatggcacttgggcgttctggacggtgagcgccccccgccgcgcctctttgaatatttccctcaccatctgccgccgccgctgacctataccttccgccacggccgcgcggaaggcgtggaggacaatgacgctgctctccaacaggaggctcgcgaccaaggaagcagaacagtccgggacgccattgatcgtgatggtgaacgactccatggcgaggaacaccgcgacaggcgccacgacagccgcgataatcgtggcggccaagacaggcgcagaggccgtaacaggagatacaacaacgatcacccagacgatgatctccaccatggcgggcagcgcgacaacgactacgacgacgatcgcgataacaggggacgtgatgtcacatgcgggcgaggtggcatccgcggcctggacgttaacttccggtgcgaacgcacgcgctcaccgcgcgcccgtgaccgtggcgacacaaggcggcgcgacgggcggcgtcatcaggctggctgcggtgacaaggaagacagggacaatgactgcggaaacggcgactccccccaagcggccctcgctccgaccgttgcggcatcgtcctcggcacggaatgctcacctgacatcgcccccgttcgacaaggggcctctgctcccgccgcgtcgtccgcacgatggagcggggtatgaagcccggtccgctgcgtccatcccggcggcgcgggttttcgcccgcatcaacgaggccgttgcggcagcctcggcggaaggggcactgcggcagatgctagttacggccggtgtggcggtggcgcttgacaagctcgccgcgccggtggcgctcgacaaacccgccgcaaatgctgcggtgccatcaccgatggtgacagccatggcgtcgctggcgacgatcagttcgactacaaggaagctattgccgatcgcgtccacagaaaagacgctgctgtccctgaacgctgagtgcgctgcggcgccaactcttcaagacgcgcttgcgacgaatggctcgtccccggccaaggacaccgagacagcaccggcgcctgacatcgccgaattcgactccatttaggtgccgatcccccctgatgatgcactggaggtcgttccaattccagtgactgctgacatgctgggtgaaggacggcagaggagtccaaggctggcccgacagccgatggctggcctaccgatgtcgctgcgggcgcagctcaatctctgccggcgcctgggtacggttccaacggaaggagtcctcaccgacaaggcactcgccgacttcaaagcgatgttcaacaagacgcaatcgacgccctagtgcagctggtcggctttgacaaggaagacgcgaaggcggcggacatggctctggcgaattacctaggcccctctgacattggctgccaggaggagattgctgcggcgtgagcaagctgtgctctgcgcaccggcaaacggagtcctctgtctccatgtatcgatttcctttgcttccttcgtatccgcgtgagactcggacgcgcgctaccgttaagaggggcggcatcgccagacattgctactccgctattcgcagcaacttcgcgaatcagcctctccctactcggtgccgcaactccgcacccaaac

SEQ ID NO: 12990 - DNA, 2885 bp, Oryza sativa
  ref <308>: DATABASE ACCESSION NUMBER: AK110338
  ref <309>: DATABASE ENTRY DATE: 2001-12-06
gggtataggggcgaaagactaatcgaaccatctagtagctggttccctccgaagtttccctcaggatagctggagcccattacgagttctatcgggtaaagccaatgattagaggcatcgggggcgcaacgccctcgacctattctcaaactttaaataggtaggacggcgcggctgctccggtgagccgcgccacggaatcgggagctccaagtgggccatttttggtaagcagaactggcgatgcgggatgaaccggaagcctggttacggtgccgaactgcgcgctaacctagaacccacaaagggtgttggtcgattaagacagcaggacggtggtcatggaagtcgaaatccgctaaggagtgtgtaacaactcacctgccgaatcaactagccccgaaaatggatggcgctgaagcgcgcgacccacaccaggccatctgggcgagcgccatgccccgatgagtaggagagcgcggcggccgccgcaaaacccggggcgcgagcccgggcggagcggccgtcggtgcagatcttggtggtagtagcaaatattcaaatgagaactttgaaggccgaagaggagaaaggttccatgtgaacggcacttgcacatgggtaagccgatcctaagggacggggtaaccccggcagagagcgcgaccacgcgcgtgccccgaaagggaatcgggttaagatttcccgagccgggacgtggcggttgacggcgacgttaggaagtccggagacgccggcgggggcctcgggaagagttatcttttctgcttaacggcccgccaaccctggaaacggttcagccggaggtagggtccagcggccggaagagcaccgcacgtcgcgcggtgtccggtgcgcccccggcggcccttgaaaatccggaggaccgagtaccgtccacgcccggtcgtactcataaccgcatcaggtctccaaggtgaacagcctctggccaatggaacaatgtaggcaagggaagtcggcaaaacggatccgtaacttcgggaaaaggattggctctgagggctgggctcgggggtcccggccccgaacccgtcggctgccggcggactgctcgagctgctcgcgcggcgagagcgggccgccgcgtgccggccgggggacggaccgggaacggccccctcgggggccttccccgggcgtcgaacagccgactcagaactggtacgggcaaggggaatccgactgtttaattaaaacaaagcattgcgatggtcctcgcggatgctgacgcaatgtgatttctgcccagtgctctgaatgtcaaagtgaagaaattcaaccaagcgcgggtaaacggcgggagtaactatgactctcttaaggtagccaaatgcctcgtcatctaattagtgacgcgcatgaatggattaacgagattcccactgtccctgtctactatccagcgaaaccacagccaagggaacgggcttggcggaatcagcggggaaagaagaccctgttgagcttgactctagtccgactttgtgaaatgacttgagaggtgtaggataagtgggagccctcgggcgcaagtgaaataccactacttttaacgttattttacttattccgtgagtcggaagcggggcttggcccctccttttggctctaaggcccgagtccctcgggccgatccgggcggaagacattgtcaggtggggagtttggctggggcggcacatctgttaaaacagctgacgaagaagacgatgaagaatccgatttctggatggctctcgctcctcttgcaattaaccttgtcaagaacaagctcatgaagaagagagacgactttgacgaagaagcagacttcattaaccttaagaaggtttggggtgttgcaaagaacattggcaagtcttacctctcctccaagtacggcatcaacctcgacgaagaagaagaggcagactctgaattcctctccaagctcaagaactggtggaacaccaagggtaaggacctcgcaatcaagggactccaaatctactctgcagtcaagaacggcggtgctcaacaaggtgacgaagaagaagaagaagaatccgaattcatcaagattaactggaagaagattggtgaagttgcaaagaatgttggcaaatcttacctctcctccaagtacggaattaacctcgatgacgaagaagaatccgttgaagaagaatctgatgcagaattcttgaacaagctcaaggactggtggaagagcaagggtgaatctcttttccaaaagggactccaaatctactctgctatcaaggcatccaagaaggcaccagctccaactccagcaccagaagtcgctccagaagcaccagttgttgaagcaccagcagaagaaaccgcagaagtcgaatctgactctgaatccgcacaatccatcaacagtgcaggtttgaacctcatcaagcaagcagaaggatggagagcttgcgtctacaaggatgcagtcggtctcccaaccatcggatacggacatttgatcaaggcaggcgagaagttcaactgcatctcccaatctgaaggtgaaaaccttttgagaagagacgttgcttctttcgaatcctgcgttgcaagaaacgtcaaggttccaattaactccaaccaattctctgctttggtctctttctctttcaaccttggatgcggtaacctccaatcctccaccttgttgaagaaggtcaatgcaagagcatccgctgatgaagtctgcactgaattcaagaagtggaccaaggctggcggcaaggttctcccaggactcgtcaccagaagagacaacgaatgcagacttttcagatcataaaataaatctgctgcgcctgtattaatactgt

SEQ ID NO: 12991 - DNA, 3169 bp, Oryza sativa
  ref <308>: DATABASE ACCESSION NUMBER: AK110339
  ref <309>: DATABASE ENTRY DATE: 2001-12-06
aagcgataaaccgagtttgtatactcgataaattaaggcgaccgatgaaagcagcggtgaaggtcctgcttttgttatgcgtcgttctggccagctgtggcgtgtcggtgtgggccgatgcctcagcgaccgaggtcgcggctgcgacggagcaggcggctgaggtgcagaccgccgacgcgtcggatgcggcggcggaggcggacgctgagatggagatcgatgcggaggcggacgcggcgatggaggccgacgccgatgccgagtcggagctgaacgccgccgctgaggctgagtctgccatcgaatcgcgggccgatctggacgccgcgcacgagaacgccgtcgtaacgctcgagtcgtacgcggagaaggcgcacgctttgcgcgacgaaatcattgagtctgagcactctctgatggagcagatggcgtccattgactcgtgcccgccttctgagctgtcgggtctgatggcgcgcgcgaagaagcagatcacgcacctgttccagatcaaggcgctgtacctcgccatcaagacgcaggagaagcagctgcgcgctttggtggacgccggcacgggcaagcgcgtgcctaacatcgcgccgaagacgccggctccggccaaactcgcaaaaccggctgctgccaagccggttgcgtcgggcgcggtcaacgtcaacggcctcgcaacgctcaacgcggagatggtcgatgcgctcaaacgtctcgagactgtgacggcgcgtctggcggtggtggagcggcgtcagaagaagtcgcacaaagccacgctcctgatcgccggtcagatggagaaggacgagaagcgtctgaacaaacacagccgcgtgctgcgtcgcgtgcggtcgggcgtgaaaaagatcaaacgttcgctcaaggcgctagcggcttcgtgcaaacgcggccgcatcgcggagaagcgcatcgctcgccgctcgcgctcgcgcgcgtcgcgtcgcggtcgcggtcgcaaggccggtcgcaaggccggtcgcaagacgggtcgtaagggccgcggcttcgacgtcaacgcgtgttacgccaagtgcgcgcgccgcagcgtcaagcgccagagcaagtgcgtgcgcgtgtgcgcccgtaaggctgccaccatcgcgaaacgtgcggtggcgaaggcgaagggcaagaaagtcgcgcgccgcagccgcggccgtaagggcggcaaacgcgcccgccgcgcgtcgcgcagccccgcgctcaggcgctgtctgaaccgctgccgcgcggccaaccgcaatccgaagttgccggccgccaagcgctgcgccatcaagtgcatccgccgtcacatgcaccgcggcaagcgcgcgcgtaagggccgtaagggcgggcgtcgcgtgcgccgcgcgcggaaggcgaagaagttcagtctcaagaagtgtctggtgaagtgtcagggcgctaagtcgaagcgcagctctcgccgccgcggcgtgaagtgctccacgcgctgctatgcgaaggcgcgcgccgttcgcgctcgcaacggccgccgccgccgcaccaatcgcgcgctcaaaaagtgtttcaaaacctgtcgtaagggcaagaaatggaacaaaaaatgcgtgcgcgcgtgtcgcgcaaaacacggcaaacgcgcgcgtaagggcaagggcaagggcaagggcaagcgcgcggcacagctcaagagctgctttaagacgtgtcgcggtaaaaagcgcgtggtgctgcgccgtctcaagaacggcaagaccaagcgcgtggtggtggccggtaagtggaatatgccgtgtgtgcgctcgtgccgcaagcgcttcggccggaaggtgaagcgcgcgcgtaagcccaagaacttggcgctgcagaagtgctacaacacgtgcaagaaaccggccaaagcgtcgaagcgcgggggcaaacgcgctgccaagcgcggcggcaagaaagcgcgtcgcgtgcagtggggcatgaagtgcgtgaagcggtgccgcaagcgcttcggcaaaaagaagcgcgcgcctgtgactgcggcgtataaggcgtgtctggcgcgctgccgcccgggcaagggctttgccaaatgcaagaaggcgtgtgccaaacacaaccgcctgcagaagctgccgaagatcaagtcgccgtccagcaaagccgtcgctgcggccatcaaaggcgtgaaaaagcccaaggccgtgcgtaagcagcgcccggagacgtgggaagacgtcgtgcgtcagtcgcgccggctcctgaagaagaccgtgaaactgcgcaatttggtgcacaaacaggtggcaaagcacttcgatacggaggacgtggagggccgtaagtacaatggctggtggtcgttccacgatgtgttgaagtccatcaaaccggggaagcacttcaccggtcgtgcaaaagagatcgacgcagatgtgcgtcagatcctggcgccggcgctggcccgcgcggaggacgggccgtacggcgatgtggtggcggctctgaagggcgctgatgccgccaatccgtcgaaatacacgcgcgagttgggcagccccgcgctggacctgtccgttgacccgaaattcagcggttacgttgagaagccgctgcccggcgctcgcatccgtcacgtgccctacaacccggtcaaaccgtacgacccggcgcagcacacgtggcacaagacgccgccgctgtcgcgtctgccggaactggtggatgaggattataacgacaatttgagccccatttacgcgcgtcagttcaaagtgacgccccgtaagacgccggagcccaaacagccgtttgagctcaagaccaagagctacgactacccgcagatcccgtattcgtatcccgtcactatggtgtcgcatgacccgcgctataagaacccgcacgtgcgcgccgccacacccggcttccacccggactggcccgagttccgcttccagcagacggccacgtccgctgacgccgccgccgacgccgcccctgcgccggccgcggaggctgcgcaggagcagcccatgacggagggcaccgcctaaatgacgctggtcgtgttgtctgtcacccatccgcaccgccacgcgtgagcgtgatcgatgcggggtttgtgttggtgtgtgagtcctcttcagcggatagcacactccttttcgac

SEQ ID NO: 12992 - DNA, 3417 bp, Oryza sativa
  ref <308>: DATABASE ACCESSION NUMBER: AK110340
  ref <309>: DATABASE ENTRY DATE: 2001-12-06
aactaacgctaaaaaagtaacagtttctgtactttattggaagagatcaaaacgaggtcatgatggacgacttcgcggcacccgaattgccggcgaagcgcaatcgccccgaagtacctaaaacaggcaacgatgacttccaagagccctttgcgccgacgccgacgcagcgaaagcgttgggactctgggcccgccggcgcgacgccgaagcagctggatggcatgacacctacgccacagcgtgttcgctcgcgctgggatgcgggcgccacgccgacccctgtggcctcgcgctggggcgacaatcccaccccgagcatgggcgccagcgaccgctggtccgaccgcacccccaacgccgtgacgcccggctccatgggcacccccgttaaccaggagtggaacacagagacgcccatggcctctgatggtgcgacaccggggtacgacaagaagtggagccaagggccgaccttcttccccacgcagaacgcagccaccggcgaaacccttagccgctcggagatcatgatgcagcgccgcaatcagtacttgacggacgaggaactagacgcgatgctgccgccggggtacgaaatcgtccctgttcccgcgcagttcgagcgcgagtaccagctcaagaagactaccgcagaggccaaggcagcgtgggagaagcaacagcaacagcacgccaagcgcgtcgatgcacctgagaacgttggcgaaaatttgccctcgttgcgacctgaagacgcagccatctttgcgcccttgctgcagtaccgtcacatcgccaacgatgctgatttgcccgctgacgtggccaaaaccattatggtgctgcgctgcctactccgtgtgaagaacggcgacgccaagcaacgcaaggttggcaatcgaatcatcagtgagaaggcgaagtactttggcgccgagttgctcttccaacacattttcgccctctggatgtccgaaaccctcgatgaagccgagaagcacgccatcgtcaaggtgatcgatcgtgccttgttcaagctcggcgaccttgtgtctgcacacgtgcctaagatccttacgctgattcaaccgttgcttacggaccccgaccctttcacccgagaggaggctcgtgaagtcatggcgaacctcgcgcgtgctgcagggctcaagcaaatcgtgttagctctcaagaaggatttggacgattcgtcggacgacattcgtcagctcacggcacgcaccatggcagtggtggcggaggcgctcggcatcgagccgctgctccccttccttaacgtggtctgcggctcgcaacgctcctccactgcccgcctcacgggccttaagatcgtcaccgagatcgcgaccaccatgggcaacggggtgcgcaaggaccttcgcggtctcgtcgacgccgtcgcgagatgcctcggcgactcacaggtccgcgtcaagatccaggccgccaccgccatcgctgccctcgctgaggcgagctacccgcacggcatcgaagagttcaatcccgcgctgatcaaggccatcctgaccgagtgccgaagcaaccgcggtaaggtgcttggctccttcctcaaggccatgggctgcctcatcggcctgatgccccccgaccacgcctacgagcacgcacgcgggctgtcggacgtgctggtgcgcggcttcagcgcggtcgacgaggagcttcgccgcgtcatcatccgcgtcgtgcaacagattgtggtttgcgatggcgtgaccgtcgagttcatcaacgagtccatctctgggcagttcttcgaggccttctggtcggtgcgtatggccatcgaccggcgcacggcgcggcagcttgtggaagccaccgtgtccatcgctaagcgtgtcggcacggcagccgtcgtcttctacctcgccgagcggctaaaggagcgggacgcagagcaattccaaaaggtgactctcgaagccgtccaacgcgtcttggagcgcgtcggatcgagcgatctccgcggcgacttggtcaacgctcttgttgagcgtgtgctcgagtgtcttcactcggacgattccggccaaggcttctcggctctccacgccatggttgcggtcgtgaagagcctcggtgtccgcatgggcccgtacgcggctcagctcgtcggtctcgtgacggcccgtctcaccagccctgtcaaccttgtgcgcaagcaagccgctgagctcatcgccaaaacagcgcccacagttgccgcctgcaaccagcagcaccaactgccagccgtgtctgagctcatctctgagcgacttggctccgagatcgacgccgatgtgctcgccgcgtcgctcaaggctctcaagtgcatcttcgagtcgctgcctgaccccagccagttccgacccgcgcccgcgacgcttctgcagcagctggttcccatcgtcaagaacccgaatgacgacgtgcaggaaaacacaatcgagctcatcggctcgatggccaaagcgatcaaccagttcccacacctatccgacgccaacttgcgtcttcgcttctacaacctcgcgatggatggcctcttctacctgctcaaggcgaagcgaaagcgcacacgcgtcgtcacggctgaaacctttggtgaaatcgccacagccattacgcccatccccatcgtgcgacagctcctcaacaacctgaagaaggacgaccgcacggagcgcatctgcacagaggttgccctcgctgtcatcgcaaagcgctgccatcccttcgtcgtcgttcccttcttgatcaacgagttccgactctcgcagggcaccgagctcgcagagaagacgcagcacgccgtcctgaagacgttgcgcttcctgttcgagtacctcggtagcgatgccgtgccgtacatggcgtcgatcgtgccgctgttggactggagcttgacggacaagagcctgcaataccgccgcatggcgtgcgaggtggtgcgccacatggcgctggcgtctgttggaaagggccagcaggacatcttgcttcacctactcaacagcatccaccccaacctcatcgacaccaccatcggctccgagcaggagcgcctcaccacggcgaccgtggaggccttagaagcgtgctgccttgccgtcgggccgtcctacatcattcgcatgattgaacaggggttgtgccacccttcccgcaaggtgcgcgatgccttctggcgcgcgtacaacgcggtctacctgacggcaggagaagcgttggtgcccgcgtacgcgcccattccgaaccttggcggcgcgacgtacgcccgcacttacctcgaggtcatcgtatgaaagggcaaggaggcgattcacacgcctcaagagagagagagagagagagagagagagaccgttcgggtcgccgcgaaacatt

SEQ ID NO: 12993 - DNA, 3376 bp, Oryza sativa
  ref <308>: DATABASE ACCESSION NUMBER: AK110341
  ref <309>: DATABASE ENTRY DATE: 2001-12-06
acattttccagggcacgcaaaacgcactttacagcctagcaatgcattgatcagaccgtctcagcagattatctcgtgtctattgactgcatggccgaagatcccaggttctgctaataaggaagtttattggatacctgtgagggcattggaggtcgctgtagctgcagacagtgcaagcagcctccctgcactgctgcacacaaggattaaccacaccctggtcagtcctgagcagcagcatccatgcgtgggctggtcttgcaagggcgacagcagtcgctgcagggtaggctcaggagcagcagcaagttctgcgtcagcaggccggtggccccacggccatgcaaggcctgtcggcgcgcagcacgcagcggcagcagcagctgcagcagagcagtggcagtgcaagtggttgcgtcgctcgattacatcgccactgccagcgatgagggggttctcaaattgcctgctcgcacagagctggaccctgaagagataaagagtgtgtttggctatcccaggaacctgctggatagctactatctgggccgagtcatcggtgctggcagctttggtgtggtgcgggagggcatcgaagtatcaactggcaggcggtttgcagtcaaaaccgttagcaaggtgccgaagcgcggctcccctacaccaaggtacttgttgaagttgcgtgccgaggtggaggtgatgcagcagctgggtgtgtcgctgaacgccgtgcacctgcacgacgtgtttgaggacgatgtcaacgtgcacatggtcatggagctgtgtgagggcggggcgctgctggaacgtgtggagagcggcgtgtacagcgagctgtacatcagcaagctggtgcgcagcatcctgcgcttcatcgcgcagtgccacgccaagggcatcatctaccgtgacgtcaatccggacaacttcctgttcctcaccgctgaggaggactccccactgaaggccacagactttgggctgtccatcaggcactactctcacgagccgaagctcaccagcagatcaggcacgcctgcctacatggcccctgagctggtgatgcagtgctacgatgagaaagccgacctatggagcgtgggcatgctcgcctaccagctgctgacgggtcggttcccgttctgggaggacgtgcgcaatgagacgctgagcgacgtgtggaaggccattttgtcaagtgagattgattggaacgcccctgagctgcagccgctgtcttctgcagctagggacctgctggagcggctgctgcagcgcaacccagtcatgcggccgagcgctgctgaggcgctggagcacccctggctggctcaggagggagcagcaaacgacatgccgctcaagggcagtgttgtgcagcgcctgcagcgcttcgccacctacacccacctgaagcaggtggtgctgcggatgatcacagaggacatgcggcagcgcggcaaggcgccaagcttcaactcggcactgcaggaactgtttgcggcatatgacaaggacaagtctggcaccattagctttgaggagctggctgaagggctgagggggcagggttacgtggtcaatgagtcagaggtacgccagctcatggagaagatggatatggaccacgacggcaacgtaggcggggacgagttcctcgccaccctcatagactggggccaggtgatgcaggagcaggagtggcagagctacgtcgaccaggccttcaaccgcatggacctggatggggacggcttcatcgacctggacgagctgctgagcgagctgcctgccgcctacttccacgagcccagcagcgaggacgagcggatctctgaggcgaagcgcatgctgcgcgaggcggacgaaaacggggacggccgcatcagcaagcaggagttctacaacctgctgcgtgacaatgtggcgcccgacagcctgagcatgtacgatgacaggctgtcgcacaatgtggcagccatgtctgtatgaacggcaaacgcatgaagtcatctatctgggcactgactgggaggggtgtgtggtgcatggcgtccaaggtgctggggattgtcagggaggctggacatctgcagcctcccaggctgcagtggacagccatgactgggtctgccctgctggtggctgaactgcgtgtccgagttggcagacagcgctggtggtgcattgtgtgcccgcttcgagctgctgttggcagccgctcaatccatatttgtgcagctgtgcatatttgtgcacctgtgcacagaagagtgggtttgcccagtgaccggctgcggccaggctgcagtgtgcagcacctggctctggcagcatgtgtgtgcatgcacgcgtgtgtgtgctgtgttgacgctgcaggttggccgccggtggagggtgtagtaagagcggctgactggtggaatatcttcagcgttgtgtgcttgggctgcatagctggtatgggctgctcgctccatgctggacagctgttggctgagtgcatggcgtgtgatcatggggtgtgcaagaggggccatgcgccttgtgggtggcagcacgtgtggttgggaactgaccacgggggacgggtccaggaatctgatgggcgctcaacttgctcggatttgatgctgtgttgtttgcctgtcacttgtgcttagttctgatgcaccaagcatatgcaaaccgaggcagcagcgggttagggcctgtgattggtggcgaaacggcttgcgtgtggtgggtacaagatggttccagtccttaattgctcatatatgtattcatggttcttacatgcagtgagtgtctttgcaactttgtatacaggcatcacatgcgtaaagcccgcaggcagcttgcctggtcagcagcattgcacagtgcatgggcatcatgcatagtatgctgctgtcacacgcatgcatatgtggctgagcaagaccccgcctgcgctaacaggtggctagtcctgcagagctgctatggaagtgtgatattacagtgctgtcacatatcagcaatgccactgtgctagcagtgccattgtactagcagtgccattgtagcagcacagtagcagtgttgccgtttgagcaagctgtccttgtatgcgttcaagcagcagcggtacggtcatcagttacgctttgtacttgcatgtagtccaccggcagatcaactgacggttctgcaaaatattttgcgtcaaagcagccgggtatttgatcagtaggtcgtgctgggcgtcagcagcagggtgctagctgctgccgctgaccctgctgctactgccagtgctttgtcatgccgtgctcattggggtattgtgcacgaacttgttgtatgtaacatgctccacttg

SEQ ID NO: 12994 - DNA, 2616 bp, Oryza sativa
  ref <308>: DATABASE ACCESSION NUMBER: AK110342
  ref <309>: DATABASE ENTRY DATE: 2001-12-06
aagcgaaaaaccgagtttgtatactcgataaattaagccctccaagcaaccatgaccgccgtcgccaaagaagccggtgagcgcctggccatcgtgatcggtgtggtggtgaagaactacatctctttcaccatctccgatggtctgaagcccaagatcgacagcgtcctgaataagctcattgaggactcgaaggaggccgccgctccggccgacgaaaaggacaagaaagacgagaaggaagtgatcgactcgttcgtgttcacgtctccgggcgtggaggagccggcgcagttcaaagtcgtcatcgacgattacccgcacaaatggccgtcgtatcagaacgcctacgtcgcgtacgacactcactgcattcgcattgataaggtgaagtcgggtctgctgacgctcgcgaagaactacgtgatccgcttccgtcagtgggacaacctcatcgacaagctcaaggccgcgaataaggactacaaactgccgcaactgccggaggagcacctgctcggcacgtactgctgctgcctcaaccgttcgtggaacccgaaccaccgcaacgagatggacgcgtggctcaagggcgtgcagaaggaggtcggctccggctccaaggcgttggccaaccactttttcatgggcgatgagtggcgcaatcagcaggtgaccaaagccattttcgacaaagcgtacgccgcgtcggcgcgtgagctgggcgtgaacgcgtggggtgacctgccgccgttcgatgagggcgaggctgtcaccatgctctgtcagaacgtgctcgtgaaggagttcctgccgaaggcgctgcaggcagtgccggccaatgcgccgtgccgctggcgtctcgagtggacggcggccggtacgctgtacgcgctgacgggcgcggcgatgaacagcgcgtgggtgccggcgcaggccggcatcgatgaggtgaagaaaggcattatgaagatcattgacgacggcgggcaggatctggtggacaagctgtcgcctctgctgacgaaaatcttcgaaatcgtgcagtccaaaatgcccaaaggcgacgacgacaaagccgaagaggagaaagacgcgcagggcaaagtgggttcggtggtgaaagactggcaattccaaaagactgagatcggcggtaagttccacgcagagttggcggacaaagacgccggtcgccaggccgtcaccaatctcaagaacggttgggagaaggcgctgaccgacgcgttgggcgcgcagatggacgccgcggtgcagggctcgtgctcgcccaagttcgcgcgttccggtattgtgcagctcattgtgaaggagttcgccaaatacattaccggcacttttaaggagttcacgactgtgacgccgctcatcaacgcgtcgcgcaatttggatcagaagcgctgggacttggaggacgaactggtgaaaaacaaagacgataaagcagcgtttgagaagaccattaacgaagcgtcagccgcgatgtggacgcaactgcctgacgccggcctcagtctcttcaaagacctgctcgacatcaagcgcaagctcttctcttattacaatgcgctgccgcacgacgcgcagctggcgctggcggaggtgtctacgcacatgttccagattcagatgcgcgccctcaaccacctgcgcgctgacttcacgaacaagctcaaggccaagttcgcggatccggccaacgccgcttcggaggacgccgtgcgcgccgccgtgcgtggtctgtggcgtgacatcatcttcgacctcatcagcgtcatcgtgacggagggctggaccaagacggccgaaggcctcattgacgtcgctgtggccaacacactcgcgtacttcttcgagaaagcgtggccgatcgtggtggagccgctcaaggcgctggccggcctcatgcccggtccgctgcagaagctcgatgtcgtggcactcgccgagacggtggtggagaagatcatcaccaaaggcgtgctgtacgccttcacgaagatcttcttcaaactcgaatctgccatcttcaagcagtaagcagcaaactgcaaacagcaccaacgcaccacccgaacacccgaacaccacctctcgcgctcggagcagccgtgcagtgttgtctgtctgttcataccacaccacgccctgcgttctgcggcggcaatcgccgggaccccaactccgcacacactccgccgcgcgtttttcgaacgacttacgtcgtcgcagccccccgcgcgctgcgccgctgtgccgcgttgccgtcccgtcccgtcgcgtgcgcgtgcgtcgtcgtcgcctgtgcgcgggcgctggcgctgtgtccgaaattctatttccactcctcccacactgctacgcccataaaagccgcacgccaccgcgcactgcaccccccaccgtccacccgcgcacctgtcactgtttgcaccgtcgcacaactcttgtttgtgttcgcgccgttccgctccgtctcccgctcgctcgcgtgtctcgcggcaatagtacgcgtgtacgcgtgtcgccgttctgtcgattccgctgatgaaaccaatcattgcgtgtctgctgaaactcttgaacctcccgcgc

SEQ ID NO: 12995 - DNA, 3052 bp, Oryza sativa
  ref <308>: DATABASE ACCESSION NUMBER: AK110343
  ref <309>: DATABASE ENTRY DATE: 2001-12-06
aagctccattccccgcgtcaactcgtggtaaatccatcctcacaaccctctacattggccatatccaagcaacacttgcaccctctcgaccgacgaccagtccagcacccctccattttgcctgctggcccgggcgcctgtgtgtgacgagcgtggatgaaaccaatccaacgcctcagcaggcctggcacccagcatcaaccagaggctattcgttgccgataacgattggcgtcgccgaaagctcatccattcgaccctctccacacccattcggcgcatcccagtccaaagtcctcccttgtgaccactcgccatccatctacctgctgccatagcctgcgcccacctgcattccttgccttgcgtctttccctcgctcctgtcctatcctgcgtccgagcgcttgttcctggggactgctgcgtctattttgtcacgtctccattgaccttgacccacgacctggtgtaccgactcaggaattgcctgctactgcatctgcactggctcgagcagtgcaatcaccacggcgagcgctctagcgtagtctcggcgctgggatcgattgctgcgcagctgttacagccgtcgttcatttttgcccgcggtactacccaccaccattcatccaacaccaccacgacatagatttcttgcgcgccacccaacaccactcctcgctgcgcaccctgctctgcaacagagcaccccgaccttgcaaacgccctctcctgccgctcaattcctgcggtcccgcacacgcgcgctcatgtgcccacctccgctctgctctacctgtttgcgcgttttaagatactcgcataatgctccccgctcgctttcctcacgacgccgccgccgcgccatctgcgagaccaaggacccggccgccttcgaggactggatcggttgaaagtgcttggagcgaaaagagcgacgcttcgtgctttgcaagtggtggcatactgagtagttgtcactctccgagcagagcaccatggcagccagcagaggaacggcccgtgtccgagctgttggaagatttacacatcgcgctggttcggcttgaacgccacggctttgagacaaagagcgcgggcagcaccgctatttcgtttctatcctcttcaggcgaggctccagaaggcctgccatcttcatcttctccctcctcagatctctggaccacatcgtcgcggagttatggcattccaccgcctacctatgacgaatctattgcagatcttcctccagactacacatcaacagatgcactagctacggcgagaagtcccgactacacaccattttcatccctcaatgcctccatttgctcggacgcccccaactgcctgaaaatcagccgctgcacatcgcccgcatctacgttgttttgggacgagaaatcgctatatgccgatatcgatttcggattcagcgattctggaattagatctcatgcaaagaagaagaagaacaataatgcaaagaaagctgctgctgcctcgagcccgtcggacgataaaccggcagaagaagcagccggtagtggcgacaacgccggtggtgatccgcctggtgatggtggaggagcaagcggaggcgatggcggggatggtggtgatggtggcggtgggggagatgactggggagacgcgtggggttccgggaagaagaaaacgaagaagcagaaagaagaggaagaacgcttaaagaaagaggaagaggagcgtctaaagaaagaggaagaagagcgcttgcaaaaagaagaagaggagcggttagcaaaggaagctgaggaggaagctgagcgcaagaagaaggaggaggaggatgcggctgcggcagcagccaaaacagccgatctcagctgggcggattcgactgccaacaacgacgactgggcatcgactacaatcaccagcagtaagaagaagaagaaaaagggaaagaacgcggccgagcccgcccctcctgatccacccgccgccgacccgcccactacgtttgacgacatcaacctggatgacggcgcgcccaagattgacatgaatttcggcgattcaggtgcaacgaaaacgggcttcggcttgccgagtataggcaattggagttctggctggggaacggggtccaaaacatcgtggggttttgatgagggcggcaaggattcaaatagcaacgacaatccctggggatcttctgacaagaagaagaaggactcttcgggtttcgattttgactttgacgcattcaagggcggcgatgctgcacccccggctgaagagaagccagctgaagatgatgcttggggtttcggtggcattgggaccaagaagtcgaagaagaagaagaacgccttgctcgatgattctgttccggacgagcctgcgcccgccgagaagaaggaagactctacctgggactttaccttcggcgatgcaaaggacaagaagaagaaaaagaaaggcgcattagaagagcttgcagaaccagagccggcgaaagagccagaaccagaaccggccgcagaatcgccagcgaaagaagaggatccttgggcaggtggctgggcttctactattacaactggaaagaagaagaagggaaagaaaggcaaggaggagccaattcccgaaccagaaccagaaccagcaaaggagcccgagcccgaaccagagcccgaaccagaaccggaacctgtgaaggaaccagagcccgagcccgagccagccaaagatccattcgagggcttgagcaagtcccaaagaaagaaattggagaagaagatgaaggaggaggcgaagcttaaagaggccgaagatgcgaagcggaaggaggaagaagaggaggaagcgaaacggaaggaggaagaggaggcagaagcgaaacggttagaggaggaagaggctgagaagaagcgtttagaagaagaggaggcggagaaattacgattggaggaagaagaggcggagaggaaaaggttggaagacgaagaagcgaagaagaaggctgacgagcttgactggggcgccacggtcacgacgtc

SEQ ID NO: 12996 - DNA, 3926 bp, Oryza sativa
  ref <308>: DATABASE ACCESSION NUMBER: AK110344
  ref <309>: DATABASE ENTRY DATE: 2001-12-06
aaccacatccacctgtagatctgtgtgttgatcaagcgacaccatgcagctgcttcagcagaggtcgcaggccgcaaggggtcatctgcaagtttgcaatgttgctgtgccttcgagaccccctgccttcaaggcaccgaagcgttcaaaggttgagataatcaaggagaagtcagactacctgcggcaccctctcatggaggagctagtgaacgacaagagctttattacagaggacgccgtgcagctcatgaagttccacggcagctacatgcaggatcaccgtgaaaagcgttcctttggcgagggcaagttttaccagttcatgatgcgcactcgccagcccagcggcctggtgacaaaccagctgtacctggtcatggatgagcttgccgacaagtacggcaatggcaccctgaggctgaccaccaggcaggcctaccagttgcatggtgtgctgaagcacgacctcaagaccgtgttctccacggtgatcaagaacatgggctccactctggcagcatgcggcgacggcaaccgcaacgtgatgggccctgcagcaccatacaagaacaagccagagtacatgctggcgcagcagtatgccaacgacattgcagacctgctggcgccacagagcggcgcctactatgacgtgtggctggatggggagaagttcgtgtcagtgtacaaggagaaccccaaggtcactgctgaccgtgccttcaacggctttggcaccaacttcaacaactcgccagaggccatctatggtgcgcagttcctgccccgcaagttcaaggtcgccgtgaccgtgcccggggacaacagcgtggacatcctcaccaacgacattggcatggtggtgatgtgtgacgccaatggggagctgcagggcttcaacctgctggttggcggcggcataggccgcacacacaggaacgaggacacgttcccccgcctggctgacgcactgggctacgttgacaaggatgatatcttccacgccatcaaggccattgtggcaacacagcgggactatggccggcgagacgaccgcaagcaggctcgcatgaagtacctggttgacgagtggggcattgacaagttccgctccgtggtggagcagtacctgggcaagaagtttgaggccttcaggccgctgcccgcctggaagtttgaggactacctgggctggcacgagcagggcgacggcaagctgttctacggcgtgtatgtgcagaatggccgcctcaagggtgacgccaagaaggcgctgcgcaacgtgattgagcgctacgagctgccagtgacgctgagcgccaaccagaacatcatcctgcgcgatgtggagccagcgtggaaggacgacatccaggctaccctggaggctgctggcctggttgacgctgtggacctgactggcattgagcgcctgtcaatggcctgccctgccctgccgctgtgtggcctggccatcaccgaggctgagcgtggcttgccagacgtgaacaagcgcgtcctgagcctgctcaagagggttgggctgggtgatgaggccatcacgatgcgcatgacaggctgccccaacggctgtgcgcgcccatacatggcggagattggctttgtgggtgacggacccaacagctaccagctgtggctgggtggcagccccaaccagacccgcctggccaaggtgtaccaggagcgagtgaagctgcgggacctggaggctgtgctggagccgctgctcgttgcattcagggcgcgccgcagcccgggcggggcgtttggcgactttgtggcgcgcgtgggctttgtgtcgctgcggggctatgctgacggctacgtgccggcagacaagctggacaagctgccaactgtgtcaatcgacgaggataccttcaaggcgctggaggctgttgctgctgctgagggcaagagcattgcacacgtggccagcgagaaactgcagaagctcggcggccattaatggatgcagcgtagcttttcaacttttcagctggtgacaggactttgctcaggtgtgtgtgtgctccaaaggactggcgtgctgttggattggcggcaggcacatgatgcatggcaacgctgctgtggtattgacgtatggcacctttgcatcagcaacagatgtgcacggtggctgtctgcatggctccagcagtaatgagttgctgctccagcaggaggggaggcgactttgtgcagtcagggttggctgcgtctgtgcagcagcagctgctgtgaaggggtggcggctctcgtgaagatgactctgttgctcgcgggcctgcagtgcaccctgaaagacacgtcggcacatgcagtgtgtaatgcactggtaagctgacctggccaactgcaagaagctgcctatgtttacactatggctgtcatttgaccggctttaactgggccctgcaccttgtgttgtggcatatgttgtcaatgtccacagtgttgaaggatggcatgtgggggtggctataaggaccatgttgcagcgcaggttgtcagcttgaattgctaggcagttggcaggttcctgcccatgtggtaatgctggtggtgcagcaaatgctgcagctgcgtagccagtgaaacctggcgcagcagttgcaatagcctggcacaggctaggtgtgtggtggcacactgcttgagttgcgtcaccgattgtgacgtctgcgcaccaatgcggtacgggattgcgactgtttccttttgcttgcgcggacgcacaaaaggcaggaaattgtgcagcccacagttgccgcaagtaggagcaggctagacgttcaggtcagcagcatttagcggttttggagcgattccttaaccacaacctgcaggcaagcaactgttgcattgctggcatgtatggtgtgtttctgcaatccttgcctaagttgctgccagggcggcaaactgggggtgcaaccaccaagtttgtaggaacagacaagggttggatattgcccatacctcatgcttggtgtgcggtcagctgccctaactgtgtgcttgtgtaacaaattgttgcaccacctacaccaggtgtgcctgcactgtgcagcagttcagttgaaacgagcagctgcatgtgcagcagtgtattgcatactagtcatcacttgagtgcatgccgggtgcagcacatgcatgcatatgccacgtgacactgcatcacagactagttggcagtccacacatgacgcgctggcatgtgtaagcgtgtctgaacggctgctgtgttgtctcacacgcaacagctgccgctcaggtgcacagctgctgctcagaaagactgcttcacacgtgtcagctgttatgaatggacagacaactgtgcagctcctttagtgagttggatacatgtgtgtgcattcttgtggagttttggagatggatttatggttgctatgctgcacagggtttagggttgtgcctcctatgctgatgctgtttgttggttttttgcgctacttgtgcgcatgcatgaaagaaagcaatgtgctgaattgcgcatgcttctacttgtgcgcgtgcggcaaagaaaggagtgtgctcaattgctggtgtgatgcatcacaaaaggcatatgcccgtttgcacacaggcgactcgtcagctggttgttgacatcatggccatgcactgcctgatttgtttttttgcatttttggacgacattgttgcgtcagcagcacagattgtttgggtgatagcttgccatatgtctctgcctgctttgctgcacaggtgctttcagcaattgcagctgctgacagtggcttggtctgttgggcagttttgtggcctcatcatccgtttgcatctcttgcaggatatttagccatctggtcacaaacggtgtactgctattgaaagctgctgtgttg

SEQ ID NO: 12997 - DNA, 2873 bp, Oryza sativa
  ref <308>: DATABASE ACCESSION NUMBER: AK110345
  ref <309>: DATABASE ENTRY DATE: 2001-12-06
tcgttcctctcattccccttccttcctccctcttccgcctccgcctcctcctcctccgcccttacccccgcgcgcgtgcacgcgacggcgcggcgatctgatgctgccgccgctgctgctgcaggcgccgcggtgatggcggcggcgccgtccgccggcggcgttggggagggctcttcctcctccgccgccgccgccgctgctgctgctgccgcgacgatcgggccccacgtggtcgacgaaggagcgctctgttttggtcattctcacaatgctgatatgttttataatgtggatacgttgtcggtgaggcaatgtggcagatgaatctaggagaagctatggaagctgggccatacccagagcgtattggagaaccagattgtagttattacatgaggactggcttgtgcaggtttgggatgacctgtaaatttaatcacccagcagatcgtaagatggctgttgctgctgcaaggatgaagggggaatatcctcaaagaattggtcaacctgaatgtcaatattatttgaagactggaacatgcaaatttggagcaacatgcaagtttcaccacccccgagaaaaagctgcaattgcaacccgagtacagctgaatgctttaggctacccattgcggccgaatgagaaggaatgcgcttattatttaagaaccggacagtgcaaatttgggagcacatgtaagtttcatcatccacagccatctaatacgatggttgctgtacgtggctctgtttattcacctggacagtcagttacttctcctagtcagcatacttacccaggggctgtaacaaactggcccttgtcaagatctgcttcgtttattgcaagtccaaggtggccaggccattctagctatgcacaagtgattgttcctccagggctcgttcaagttccagggtggaatccttatgcagcacaaattggttcttcatcctcagacgatcaacagaggacagctggaggtgcacaatactatactggctcacgtcacagtgaaacacctaacatgggtggccagggaatgttttcatcataccaagctggttctgttcctcttgggctatatacagtacagaggggagcatatttccagagcgacctgaccaaccagaatgccagttctatatgaagactggggactgtaagtttggtgctgtatgcaagttccatcatcccaaggagagaattatccctactccaaactgtgcgttgagctcattaggtcttccactgcgtccgggagagcccatatgcacattctattctcgctatggcatctgcaagtttggtccgaattgcaaatttgatcatccaatgggaactgtgatgtatggtctcgcaacatcaccaactggtgatgtgtctgcccgacgtatgctggcacctgtaccagcacattcagaagtatcgcctgacaatgtctcagggaggtctcggaggatcacccattcagattcccagcaaataccctctggtgaaagaggcaccgagagagaggcgtcctaagccatcctcggtgcaaatgtttcatgctgcttcctgttcttgactctctgagtaaattacccgcaacaaaacttgaggagccgaagctgtacaggtctcgcccttttgcctcacatttgagctttacataccggagcttgcttcaagacttccaacatgtatcgcattcaggcaggaaaaagttcttgcttgttagggatgctcttttgccccgtgtaaacgggacaaccgaccttatttaaacatctatatatggaacaaactcacctctggacattcgatttcgagtgatgtgccttgatccctttgttgtagttatacaggtgccttgcaatggacaaagcttttgccaaacgggggatatgtgcaaatcgctctcctctctgtttctttcttttttttgccttccctctaatttagcagtttcataaggggcaacccccgcttctggaattgtgcatgttgaggatgcggaaataataggcaattgtataatcatctacatatttataccctgtcacttgttcccataagagagcagaaaattcaccttgatggtgccggctttagtttgtcatttcatcttgcaaaattttgttctgctactgaaccttttatcaattgtgcatcatttttttgccattatatgtgcacgggaaggatggttactaaagaacaagtaacaagaggtagggttagactggttgagacaggtccggttcctaattctgttacagcaatctatcatttgcacagctatcaaggttgccaaacacctctatccggtgttacgcctcctaaatcctgatgaacggagcagctgcgtcaacacctatgtcctgataaacggagcagctgcatcaggattctggagtgtcaggtaggtgaaggtataatgtggagcaaaaggagttccagatgactcctaatcctataatcatccgatacgagtaggttcgccacatgcggatgaaatgtagtggatggtttctaaactacaaatgtagtggatggtttcttataaataggattatcagatcatcagcccttcaaaactatgggcctggttggcacagctctagctcccgctccacccctcctggagctggagctcagccaaacagttttagctccaccaaaaatgggagtggagttgggtagagctctctcacagaatgtactggagttgtagagctgggtttaggcagctccacaactccacttcagactcaactcctaaagttatatttaggagttagagttgtactaaacaggccttacaaatagaacactacttatatgtccacattataagtttgcctaagagggtatcattttc

SEQ ID NO: 12998 - DNA, 2465 bp, Oryza sativa
  ref <308>: DATABASE ACCESSION NUMBER: AK110346
  ref <309>: DATABASE ENTRY DATE: 2001-12-06
aactaacgctaaaaaagtaacagtttctgtactttattgtggccctcggctttccgatccacagcgcttttgtcgcaaccttcttccaagaaatcacttctcagtttttgtctccgcctcacgaaggtgtttcgcatttcctctctctctctctctcctctccttgctgatcctcactctccgcaacacacaacacacacacgccccctctctcccatacacccgccccgcaattcctattccttccccagtaccgcactcgcatcagatgtctttcactcaatttgctggtttcgaactgaaccaagaaaaagccgtggatggtgaagtcgaagaaattgagttctgcatcttccagccggaggagggcagcgtcaccacctcaatgcctcctatggctcagtccgcgtctcgctcgtacgtaagcaccactgcatcccagtcgaactccaccagctacgtcgcgcagcacaacgctggaggccgccgcctgcctccgaaggcgaacgccccgccgcgcatgccaccaccgcctgcgatccgcggtgcgccgatgcctgacttcgtcacgccagagttgttgcgggacttgtctcgcatgaccctacccgtctctctgaagcgcaaaaccatcgctgtcgtcgcctcgtcataaaaggtcgtttggcggctgttcacgatgtgatggattggctcggtactcctgtttaacacacacccgcacacacctcccccctgcgtgattcttcgatattttcctcgtgaggaagacaagaattccatgcatttgctgcaactgtgtcacgctctcaacttcctgcaccgttgacttgacgtgtcttgacgattgaatttccgtttgctgcgttcttccttttcgcgaaacgtcatcttggcctgtttcgttccacagcttcgatttttcatcgactttgcccttgcaacggcaatcctcacttctgctgtttctgcatctctttctttctgtgcacggggaaaaacagcgcccacaatactgattttcttttttctcttttcttttccgtacacgacgactcatctctgttcaacttgcaacgctagttgtgtgcgagtgacgcaggggcgcttgggcaacaaaaaaaaactcaaatcccgagggttccctcgagaaaagcaaacctccaaaaaaaaaagcttggcgactgggtttaagtacaacatgtgcgaaccttccgtttctttcggcaaccacttccactgcagtgtccgcaacaaaaaaaaaacttcggcagccacattgaaatcgcacgcgttgcgcggaagaaagaaccgttccgcagccattcaagcggcctaaagaaacggctctcaattccgtcgcagtgcgagttcgaagtgcacgaacgtggactgtcaacgtgtccgtgtttgggaacccacgcatcgcaactttcgacggtcatcgcgaagtctgcacagtggtttcatgttccgaggttttcatgacggtccccatccctcttctgtttgttttttttttttttgattcctttctcttcgccaccttcctaccatcatcatcttcctgctccttccaccaacaaaacaacacacttcccacaattcccagcatctctcacttttgtttccgctgattcggaactcatttggtgccttcgacgcttttttcacgcgcgacgccatagagtttgtttttcttcgtgttgacttgttcgcacctactactcccatgcagttcgccacggcatccgttcgcgagatggcgacattctagatccagcgcgtcgcctccgcctcgacatcgacgtgtgtgtaatcctttagacggccatctccaatcaacgaaacggtcactcgcacatacccatactgatgccgtggctatgaacatcagttcttttccgcgcgtgcccaagaaacacgtgcgcttcccctttgccccttcggtcctccaaggaccaacttttttgcgtggatcgaaccagcgtcgccgtcgatgtcttcctttccttgaagatatttgccgtccgctgatttttcggctccaaccatcatcatcattcctctctccctcttcctgaattgagttgattcatctctgcttccgtgcgagtgtcgatcaaccatttctttcgcgcgcttccttttttcattctctccctgccctacacccccaccctgttccttcctgttgttttgtttgctttacgctcctgctttgattctgcgtgccccccttcctgcaactacccccacgccagtgtaaaaccaagaccggcctgttatcaggggtcgttggggttctcggacccgacttttccggcatcggaggtaagactctgcgtttgagaagaaaaaaaagagcaaacacaattgatcagaagaagaaaaaaaagtgtgtgtgtgtgacgtgttttcctccttcggtaaattttggattaaaagcgcgtgtgatctgtgcg

SEQ ID NO: 12999 - DNA, 2993 bp, Oryza sativa
  ref <308>: DATABASE ACCESSION NUMBER: AK110347
  ref <309>: DATABASE ENTRY DATE: 2001-12-06
agtaagcgaaagcccacgcgcgatgacccacgccgcccacgcgctatgcaaccgctacgccgccatcctctcctccgccgccggcgacggcggccggaccggggttcgcgtggccggcgctgtgcactgcctcattctcaagacgtttctccaggctcccccaaccttcctcctcaaccacctcctcaccgcctacgccaagtccggccgcctcgcccgagcccgccgcgtgttcgacgaaatgcccgaccccaacctcttcacccgcaacgccctcctctcggcgctcgcccactcaaggctcgtcccggacatggagcgcctcttcgcctcgatgcccgagcgggacgccgtctcctacaacgcgctcatcaccggcttctccagcaccggctctcctgcccggtcggtccagctgtaccgcgcgctgctccgggaggagagcgtcaggccaacccggattactctgtcggcgatgatcatggtcgcttcggctctctccgaccgcgcgcttggccactcggtgcattgccaggtactgcggcttgggttcggggcatatgctttcgttgggagcccgttggtcgatatgtatgccaagatgggcctcattagggatgccaggcgggtgtttcaagaaatggaggccaagactgtggtcatgtacaataccttgatcacagggctgctccgctgcaagatgatcgaggatgcaaagggtttgtttcagctgatggtggacagggattccattacttggactacgatggttacaggactgactcagaacggtttgcagttggaggctcttgatgttttcaggagaatgagggcagagggtgttggcattgatcagtacactttcggaagcattcttacagcctgcggtgcccttgctgccttggaagaagggaagcagatacatgcctacataactcggacttggtatgaagataatgtctttgtcgggagtgcgcttgttgacatgtactccaagtgcaggagcatcagattggcagaggctgttttcaggaggatgacatgcagaaacatcatatcgtggactgcgatgattgttggatatggacagaatgcttgcagtgaggaggctgtccgggcattctcagagatgcaaatggatggcattaagcctgatgatttcactctaggcagtgttataagttcttgtgctaatttagcaagtctggaagagggtgcacagttccactgcctagcacttgtctcagggttgatgcggtacattacagtgtccaatgcactagttaccttgtatgggaagtgtggcagcattgaggatgcacaccgcttatttgatgagatgtccttccacgatcaagtctcctggactgctcttgtgacagggtatgctcaatttgggaaggcaaaagaaactatagatttgtttgagaagatgttggcaaatggcttgaagcctgatggggtaacatttatcggtgtcctttctgcttgtagccgtgcaggacttgtagagaaagggtgcgactactttgattccatgcagaaggaccacggtattgttcctatagatgatcactacacttgtatgattgacttgtacagtagatcagggaggttcaaagaggctgaggaattcataaagcagatgccacacagtcctgatgcctttggatgggcaacattgctgagctcgtgtaggctgcgtgggaacatggagattggcaagtgggcagctgagaatctcttggaaactgacccacaaaaccctgccagctatgtgttgttgtgtagcatgcatgctgctaaaggtcaatggactgaagtcgctcatcttagacgtggaatgagggacaggcaggtgaagaaggaaccaggctgcagttggatcaagtacaagaacaaagttcacatattttcagccgatgaccaatcccaccccttctccagtagaatatacgaaaagctagagtggctcaactcaaagatggctgaagaaggatacaagcctgatgtcagctcggtgctgcatgatgtggcagatgctgataaggttcacatgattagccatcacagcgagaagctagcaattgcctttggcttaatctttgttccacaagaaatgccaattcggattgtcaagaatctacgggtatgtgtggattgtcacaatgctaccaagttcatttctaagataactggccgtgatattcttgtgagggatgctgtcagatttcacaagtttagtgatggcacgtgctcgtgcggagacttctggtagtcatcctgtcaatccagctgacagcccacattcttctagtacgaaatacgaaccagagttttcagcctacttgaagaaaggaaaagggttaatcaaggtcaaatttagatcaaattctttggctttcctgaaatgggagaagggatcgctgcgagctcctccggtcagagccattggctttgagccatccagttcaatccaagtatatagatcataatatctccaaggaagaatttttttcttgcttggatccgttagtgcagtcagtagatgaagtagggagggaagctactgctgcatttcctagctcactctgtagttcataaagcagaaaatgtcactggtaaaagggaagtatcacctcctgagaagaaagggtaatcttgtgtatctcacccttcaaagaaggctttcgagggaggagttcaaggaggtcgctatccatactcaaagacattggctaggctgcaaggactaaaacctgcaaattatgatcgatacaccacactcgcagcagcagcctaggtagtcgaattctagaaaaactcaaccgcatatgtacatggatgcaaaatagttggtacacacaattgcggttagtgcatatatttcttcttttttagttttaaattattgttaggtactcaggtgctacatttatgtcaatgtcttattaatttcttatccataagcttaatcacaccacccatgagat

SEQ ID NO: 13000 - DNA, 929 bp, Oryza sativa
  ref <308>: DATABASE ACCESSION NUMBER: AK110348
  ref <309>: DATABASE ENTRY DATE: 2001-12-06
acatccaccgcattgccaccctcgcctcgccgtcgccgtccacctcgccgtggcgcgcgccgccaatgccgccgccgccgcccgtcgcagcagcagcagcagcagcgaggcacgcgcttctgctcgcgtccgtcgccgtcgccgtcgcgctgctgctggtgtcgccgtgccacggcgtgagcgagcaggggcaggcgctgctccgatggaaggcgtcgctgcggccgtcgggcggcgcgctggactcgtggcgggcgtcggacgcgacgccgtgccggtggctcggcgtgtcgtgcgacgcgcgcacgggcgacgtcgtgggggtcaccgtcacgtcggtcgacctgcagggcccgctcccggcggcgagcctgctgccgctggcgagatcgctgaggacgctggtgctctcgggcaccaacctcaccggcgagatcccaccggagctcggcgaatacggcgagctcgccacgcttgacgtcagcaagaaccagctcaccggcgcgatcccgcccgagctctgccggctgtccaagctcgagtcgctgtccctcaactccaactcgctccgcggcgccatccccgacgacatcggcaacctcaccgcgctcgcctacctgacgctctacgacaacgagctgagcggcgcgatcccggcgagcatcggcaacctgaagcggctgcaggtgctccgcgccggcgggaaccaggggctgaagggcccgctcccgccggagatcggcggctgcgccaacctcaccatgctcggcctcgccgagaccggcatgtccggcagcttgccggacacgatcgggcagctcagccgcatccagaccatcgccatctacaccaccctcctctcaggccgcatcccggcctccatcattaatatcttggtaatctatgatcaaatgattgtgttccgggac

SEQ ID NO: 13001 - DNA, 2694 bp, Oryza sativa
  ref <308>: DATABASE ACCESSION NUMBER: AK110349
  ref <309>: DATABASE ENTRY DATE: 2001-12-06
aagcgaaaaaccgagtttgtatactcgataaattaaggcggctgctcctgaatgccggcgaaaaagaagaagcccgcagcacaggccgacggcacggtggctcctgtggctgcttccgcggctcctccggctgctccggccgctgcggtggcccccaaacccgccgcaggcggagctgctcctgcggctgcggctgcggttgcagcggccgccgcccctggcgctggtggtgcgactccggctccggctccggctccggctccggctccggctccggctccggctccggctccgtcgacggcggcgcccgctgcgaccggtgcggcggccggcgcgggtgcgggtgcaattgcggcgaaaaaaaaagaaaaagaaaaagaaacccaccgctgcggacggcggcgctgcggcagacaaagcagcggacggcaaaggcgccggtgcgggtgcaggcggtgcggcgccgtcgctgcctgcggccccgctgccggcgggcggcaatccgtatgatacgatgaaagtggtgccgcgcgggcccgcaccgccgctgaacgcgacgtcaaaggactctctgacgcgcaaagtgaacgaccatcagacgcacttcacgcagttttacatctcactggtggaaggcgacagcaccggccgtcgcgccatctcatcgcgcgccatcaaagccggcgctgaagtgctcaaagagaggccgttcccgtggatcgtgcatttgtcgcacgacaaagtcgtttgccatcactgcgccgtgtttctggacagttcgtcgaatgcaccgcgcacgtgcgaccggtgcaaacgcgcgcactactgcagtgcggcgtgtcagggcgcggcggccaaagtgcacggcgtggagtgtgccgcactgacgcagttggagcgcatcagtgacgcggcgatggtcaatgtcgatctcgtgcgcgtggcgctgcgaatcctcgtgacgcgcaaacacccgccccccatcgtgcagatgaccaaacccaaacccaacgctgcggacgccaaagcggcggacggcacagcggccgacgtgaagaccgctccggccgccgcaccggccgccgcaccgaccgccgcagcggccgcgaaaggcgcgaacgattcgaaggattcgaaggattcgaagaattcggcggacgccaaagcgacggcagcagcggcggcggtgggcactgatgcagagacgggcattttccaaagcacatgggaggatgtggaggcgatggtgtcgcatgcggacgcgctgaacgcgtcggaggtggcgaacaccaccaaagccgcgcacgccatcatcggcctccttccaccggagtatgccatgcccgcggccgagttggtggcgtgtatggggcgggttaacagcaactgccacagcctcaacctcgcggaggacccgaacattcagtttggcttgggcctgttcccgctgtgcgctctgttcaaccacagctgcttcccgaatgtgctgtacaccaatgagggcaacaacctcgtgtttcgcgccatccgcgatatcgtgcccggtgaggagttgctcgtgaactatgtcgggctgtatcagtcgcgctggtcgcggcgcgaggagctgctcatctctaagcgcttcatatgtcagtgcaaccgctgtatgctgcagccacacactgacgaagagctcaaagcgtttaaggccgaccaatacgtcggcgcgatttggtgcaaaaaccgcaaacccaccaaaccgggcgccaaaccgtgtgacggtcactaccgcgagtacgtggtggccgatccgccgggactggcaacactgcagtccggagcggacggcaaagtgacgctgccggtgccgctgcgctcatgcagtgcgtgcgggcacaaggccgaccccaaatactgcgacgacatcgagcagcgcgcgcgcaaggcgttggcggaggccgagggagtgtatcagacgcgcgacgcgcgcgctgtgcagagccgcagcaaactggagggtgtgattgcggagttcaaagacgtgctgcacccaagtcacgagctgtttttcaacatatcgttgccgctcatcaattgctgcggccatctgcgcgattaccgcaccaaactcatgtactgcaagctcgtggtcgacaacgccgaggcctgttggcccgctatgttcagtccgaaggtgaactacttgcaggggctggcggacacgtacttccaactcatcgagtcgcgtccgacgggtatcgcgccgggcgccaaaggcgcgggcggtggcggcgcggccattcccaagaagaagctgttggagtaccgcgcgctgcgcatcgaagcgctggagaagtgcgtggccatttacaccacctgtttcgggcccaaccaccgcctcacgcacttggcgcagcagcagctcgcgcgcggcaaagcccatcgcatctaacgcctcgtcacaccgtcactgcgcggcactgcactgcactgcactgcactgcactgcactgcactgcactgcactgcactgcactgcactgcactgcactgcacggcactgcactgcactgcactgcactgcgccgcactgcactgcgcgcgcacagacatacactctctgtatcgcctctcacgcctgacattcttagttcggcgtcggctgcggtagtgcccgcattgtactgccgcatcgtccttgcgtcgccccgc

SEQ ID NO: 13002 - DNA, 1830 bp, Oryza sativa
  ref <308>: DATABASE ACCESSION NUMBER: AK110350
  ref <309>: DATABASE ENTRY DATE: 2001-12-06
aagcgaaaaaccgagtttgtatactcgataaattaagtcctcgcgcgcgtgtgatggcgaactacacgggcccgagtgcgctgtcggatcagctgcacgcactgccgcatttggcgtgggacatgcgacacgtcgtggtggcgccgcagcccatcgccgattcgccgacgcgttacatcgagtcactgaccgtcgccgcggctctgccaacgattttcacactcatttacgtgctgttcgacctgacatggctgtgctgccgcgcgtgccgctgcatgcgctgctgccggcgcaaatacaatatggccgagagccgtttccgctgcctcctcatcgccggcgtcgtgttcgccgtcgccgcggggctgacggtcgttatggccttctcatacgctcaccagttccagaccaaactcacggctgtgatcaacagtttggaggacgccgacgcgtaccgcggggacctgtcggccgcggcgcacggcgcgttggacgacgtcacgttcgagtcggcggcgctcaccgcagtcgtcgcaaacatctcatcgtccggtgcagttgtgccgccgaacctcatggtcgagctgcagcaggccacgggggctgtgagcgcggcggagggcacaatcgcgtcggtggtgcagcgcgtggacacgcacttcacactcagcacagtgacgaacaaactctataactacaacgacctgcagctgaacgtgagttcactggtgttttcgctgctcattttcacgatgagcatgctcgtgctcatgttgctgctgagcgacagccccaattggctgcgcaacacgctcgagggactgacgctgctgtcgttcttcgtatccaccaccagcgggtggctgcatttgggcgtcgccatcggcgtcgccgacgtgtgtcagcagccctatgactacacgatggcattcagcgccaaaggcttctctgccgatgacctgagcgtggtggggtactacctgtactgcagccccggcagcgtgaatccgctcatcggcaacgtcgaaacgggttatgtgcaactcaacgcgacgacgcagccgctggcggatttgatttcgtatctgaacagcacgcagcagcccgccgcgacggcgctgctgccggccgcgcaggcgctgcagcagaacgtgtcggcgactctggagatgatcaacgccacgagcagtgtactcgactgctcgcggctgcacggcgatgtggtggacgcactcactaccctctgcgacccggcgctcaccaccttccactccatcatgctcgtgcaactgatcagcgcgtttttcctgttgttcgcgcgctgcactctgccgacgcgccaaacggatgtgtccaaaacgacgcaaatgatgtacgaggagttcgccgaaccgcaggacgtgattgtgacgtcatcggatggcacgagcccgaactcatcgcgctttgcgcggtacgcgtccagtgccaaccacagcgtgcgcacgcaacagcccaacgaccgctatgcgctggcgccgtcccatgactcgccgccgacgctgctggcgcgggccaacgcacgcgccgcggcgcagggcgcagtgtcgacgccacagcccgtcgccgcagagccgccgctgctgcagcccatcggatcggcggagggtatgaacgactcattgcttggccgttaacgcttcggttccgctaattcctacgcaattgcatcgctaattgcccaccgaactctctttctactcagtgtactcaaatcgtccgttctcttttcttgtcgtttgccacgcgcaagcggaccgcctctgttgcacttccgaagagcgtgtgttc

SEQ ID NO: 13003 - DNA, 2581 bp, Oryza sativa
  ref <308>: DATABASE ACCESSION NUMBER: AK110351
  ref <309>: DATABASE ENTRY DATE: 2001-12-06
aagcgaaaaaccgagtttgtatactcgataaattaagagcgcgtatcacttatgtccggacctgagaccaaccagaacctgcccctcgccgttcgcgagggtttcggcaaaacggcgccgaaagtggcggctcatttgggcgccatcgccaaagcgacgggcgtgaacgattggaagttggagtgcgattatgaggcggtgttcaaagttttggacgcagtgaaaaaggccgatcagttcgcgcatctgacgtgtgcgtcgtacctgcagacgctcgagcaaacgctcacgaaatggctggccgatgcgttcaacaaagagacgttcgtacgcgcagtgacggccaaagccattctcctggaagtggttgcggcgcacgtgccctccagctcgcgcctgacgttcctgaggctcggcgctggggggcgcctcatcgtccagactgaggccaagtcgtggggcgtgaatgtgggcaatgatatcggctttcaggcgcttgacacgctgttcgacacgttcgttgatggcgacccgctgcccgcaccggacgccaaagccgcgccggccgctacggacgacaaagccgccactgtcgatccgatcagcaacaaagcgattatgctaacggtacgccggcagttccgtgacaacgaaaagaagaaagacaccgctttggaggccatcggcaaagccatgggcctgggtccgaacacagacgccaaagccagcgccggcgccggggctgcggctgcggctgcggctgcggggaagttcggtttggacgtggactactacggggcgtaccggcatctggccgcgaacaaccgtcacctcaagttcgggtacgaactgtggggctgttacctgcccgaaacggccaaagcgctggaggcgtttttcaaagacccgtactgtttggcggacttcaaaaagtactgttccgcgaacgcgatggtgtggcgcctgcgtctgcccgaagggccggccaaagagcatcgcttcagctttgagagcggcaaatttgtgatcgaaaccgacgtcaagtgttggcagaaaaacacgtccgacatcaacagcggcaacattgaggacgccattaacgtcatgtgcgatcgcgagcccaaagtcgtttccgatccgaacgactccaagacgtgggttgaccccaaaacctgcccctacttcgccctcacgacgcgtcgcaacttccgtgacgccgagaagaagcgcgacgagttcctgtccggtgcgtcgaaggcgttggggtacgatgagaaggccgcgggcggcggtcttgtgccgcagtgcaactacgctgccgcttacgatcagatgcgcgccgctaataagcaccgtacgttcgggcacgagctgtggtacggatactgcagttcgttcaaaattaatatgaccgatttctggggcaaagacgagttcaatcgcaatgacttccgcaaatacgtgtccaccaaaaccatactcttccgcatgcaggagttgccgccggagtactggaagcgcgccgacgccaaatgcaatcgcctgagcgtggagagcggcaaactcgtcatcgaaacggacgtcaaatccttcgcttcgaacgtgagcaaagacgttggcgccggcggtgtggaggacgccatcaacgcgctcgcttcttcgatcgaagaaaaggcgctgaatccgaaggacccgatcgaccccatcacttgcccggcgctgcctctgacggcgcgcaagttctggcgcgacaacgcgaaggcgttgggcgacaacacggctgcgtgcaaggcgagcaccggtatcgactggaagtttgacatccccgtgtggcgcgcgtacaaactcgtcgattacgagcgttcgtacaacaaattgggctataacttgggcaaactttacaccggttatgtcgttacgatgttcgcggactttatcaaaaccgacgccgccaaacgcaaagaggctctgaaggccaagatcggcgccaacggtgtgatcacgttcgacatcagcgaggaccaggcgctgtacgcggcccaaaccacgcacaccgttcacgtcgagccggggaaactcacgattcgtttccatttcaagaacttcgcgcagaatacgtcgactatcagcgcgcaggctctggtgaagtgtctgtaacgaccgccgtcccgccatcgcgcggttcgtctttttatctttaatttcgtctttcccgcgttccggttgtggtgcgtacggtgcgccacgaagcgaaccgctcgccttccgctctctccgtcttacaccggattcgttgggtgacttctgagtgctttgagtgtttgtttgtccggcttctgactgtttaacttctttcgtgccgcttatcccgccacccgtccgctcactcgtttccaccacccgtccacccgccacacatccggcacgccctctaactggtcgcgctctagatctgcgctgtggccttccaagtttgatccgagctctgcgggtctggtgggcggttaagcgcgcgccgcacccgagctcgttgcaagtacctgtggtgtgcgttcgatctcttgaatacattgaaaagttc

SEQ ID NO: 13004 - DNA, 3262 bp, Oryza sativa
  ref <308>: DATABASE ACCESSION NUMBER: AK110352
  ref <309>: DATABASE ENTRY DATE: 2001-12-06
acctttgattgcacgtagaatgttttgtgtttgcatgcctacagttcgaacacgcgctcaatctcccagtcatgctcctgtccaaacaagcaggcctgagggcctgcaagcacaatacaacgatcgttgcctcacgctgccacgtaacgccaattcacgcggcgctgcagagaccaatgcacacttcctgcctagcctcaggcaggccgagtgtggttgctggccagaggctcgcaggcagcaagctacttaggccaggcacgcattcacgtcgttcagcagttcagtcccgagctttttttgacaagatcttcaagcaggacccgtcagataagacacgtaagcagtaccaggaccgcgttgatgcaatcaatgcattggagcgccagatgcagaacttgagtgacgaccggctgagggccaagacagcagaattcaagaagcgagtgcagcgaggggagagcctggagtccctgctgccagaggcatttgctgttgtgcgtgaagcatctcggcgtgtgcttgggctgcgcccatttgacgtgcagctgataggtggcatgatcctgcatgaggggcagattgcagagatgaggacaggtgagggcaagacgctggtggctgtgctgcccagctacctgaatgcgctcacgggcaagggtgtgcacgtggtgacagtcaacgactacctggcccgccgtgacagcgagtgggtgggccaggtgccacgcttcctgggcatgcaggttggcctggtgcaggctgatatgacccctgagacgaggcgggcagcgtatacatctgacatcacgtacgtcaccaacagcgagctgggctttgactacctcagggacaacctggcaggggcccctgcagagctggtgcttcgcaccaactaccccttcaactactgcgtgattgatgaggtggactccatcctgattgacgaggcccgcacaccactcatcatcagcggcaccagcgacaagcccagcgacaagtactacaaggcagcaaagatcgctgacgcgctgaccaaggacctgcactacaccgtggatgagaagcagcgcaacgtgctgctcactgaggacggctatgaggcagtggaggacgtgctgcaggtgcctgacctgtacgatccccgcacgcagtgggccagctacatcatcaacgccatcaaggccaaggagctgttcatcaaggacgtcaactacatagtgaagaaggacgaggttatcattgttgatgagttcactgggcgcaccatgcctggccgccgctggtctgacggcctgcaccaggccgtggaggcaaaggagggcctggacatcaacgcagagtcagtcacgctggccagcgtcagctaccaggctttcttcaggaacttccccaagcttgctggcatgactggtactgccgccacagaggtcagtgagtttgacggtatctacaagctgcctgtggcggtggtccccacgaacaggcccatctccagggcggacaaccctgacgtggtgttcaggcttgagcagtacaagtggcgtgctgcggtgaccgagatcaagcgcatccacaaagagggccgcccagtgctggtgggaacgactagtgtggagaagagtgagctgctgagtgagatgctggcgcaggagggaatcaaacatcaggtgctgaatgccaagccagagaacgttgagcgtgagagtgaaattgttgcgcagtcaggccgccgcagtgcggtgaccatctccaccaacatggctggccgtggcacagacatcctgctgggaggcaacccagactacatggcacggctcaagctcagggagttgctcatgccggaggtggtgtcacaggctgatgcagcagacgcgtatgccaagacccgcaccggccgtgcaaatgtggccagctttgctgctgaccccgccatcttcccctgccagctgtcccctgagacgctggcagctggcaaggcagcagccaaggcggcagcagcaatgtggggtgagaggagcctggcactgctggatgctgaggacaggctgagtgtggcgtgtgagaagggggcaacagacgacgaggtgctgctaaggctgcgtgcagtgtaccaggcgatgctgtcggagtacaaggcggtgacggaccgtgagaaggccgatgtggtggcactgggtggcctgcacgtggtgggcaccgagcgccacgagagcaggcgcattgacaaccagctgaggggccgcagcggcaggcagggagacccaggcagcacccgcttcttcctcagcctggaggactcgctgttcagggtgtttggtggtgaccgcatcaagaacctaatggtggcgttccgtgtggaggacctgcccatggagagccagatgctcaccgatgcactcgacacggcgcagaagagggtggagccgtacttctacgacatccgcaagaacctgtttgactacgatcaggttgtcaacacgcagcgtgaccgtgtgtatgcggagcgccgcagagccctgctgagcgacaacctgacaccactcatgatcgagtacgcagaaaagacctgcgatgacatactggaggccaatgttgaccgcaacgctgacccctctgagtggcggctggatgccctggcagcaaggattgcgcagtactgccccctgctgcagggactcacaggccaagagctgtctcagcagtctggtggcaactttgaggggctgcgtgcctacctcaggcaactggcagtggcagcataccagcagaaggcagcagcagttgatgacatagagcccggcctgatgcaggaggcacagaagttctttgtgctcacccagacagacaacttgtggaaggagcacttgcaggccatcaagttcctgcagcaggcagtagggctgcgcggctatgcctccaaggaccccctcacagagttcaagctgaaggggtacaacctcttcctggagacaatggcacagatccggcgcgacgtgatatacaacgtgtatgtgtttcagccgcagcgaatcaggccagatgcagcacagcagcagcaggagcagcagcaacaggcagcagcaggcaccggcagcaagcagtcgcggcgaaaggccaaggcgtctgctacatagccgcatcagagtggtccaggcagatagtttgtgatgtttacaatcgtgctggtgtgtatgtttgaagtgtacagccatgttgctgggtcgttttgggctgcaaacactagtgactcactgacttg

SEQ ID NO: 13005 - DNA, 3907 bp, Oryza sativa
  ref <308>: DATABASE ACCESSION NUMBER: AK110353
  ref <309>: DATABASE ENTRY DATE: 2001-12-06
gtgcttgctttgttggctttcttcttttacttttcaaatattaaacatggcggaagaagtgcctactgatctgcctgtggccgccgagcagggcgagcctatcgcagacgcagagcctgctgtgaaggaggaggagccagcgactgaggcagtggctgagccagcagctgaggatgctgctgcagaacctgaggaggcggaggcagggcagaagcgaggcagggacgaggctgaggccgatgcagacgagccagaggccaagagggcagctccagcagaggtggatgctgctgctgaggcagaggccacaggcgagcccgcagctgaaccagcagcagccgattacattgcagagccgtttgagaatggctcagccaacccagtgctcggcaaccctgagccagaagaagtggcagcagcagtggcgcacaacccaggccattttggcgcatcatcgcaccacaacaacccaggccccccacctgtgagggatgggtttcctgtcattcaaaacgaagacggcagcatcagcgaggtacttgctgtgtctaaacaccaggtgggcaagctcatcggcaagggtggcaccaccatccagcagctgcaggccactacagcaaccaacattcaaatagaccaggagggcacagagtgcccagacgccaagaaggtgactgtgcgcggctcagcggaaaatgtggagaaggcaaagcgggacatcaagcagatgctggaggaggctgttgctcccaggagggcgaggttgaggagaaggtgccctgcccagcaggcattgtcggccgcatcatcggccggggcggtgaaaccatccgctcactgcagcagggcagcaacgcacacatcctggtggaccagaatttcccagagggcgctgacagggtggtggtgatcaagggccgcccagatagtgtgcagcgtgcagtggccatggtgactgagctgatcaagggcgaaccaggctctgcttcacagatcatcagcaagcacggcatgggtgcgactgtgacggtgcagtgccccaagcccattgtgggccgcatcattggcaagggtggtgagaccatcaagggcctgcagcgcaagtaccacgtgtccatccagattgaccagggtggtgaccccatgtctgtgaccatcaccggacagaagcaggcagcagaggcatgcaaggctgaggtgcaggcgcttatttccgacacatcgggcccaggtggacctccatttggtccgcgcccaggctacggcccccgcccaggctatgggcctccgtttggtgcaccagcaccctaccaggtgccacctcctgcctttggcggctacggtgcgccatatggtaccccctacggtgcgcctcctccctacgcagcacccggcggctatgggggctacccaccagcgggcggctacggcggctacgccgcccctgctgctgctggcggctacggcggcggtggctacagcgctggcggctacggcgctccagctgcggctggcggctacggccagcagcaggcaggctatggggcatccggatccgcaggcggctacggcgcagcaaccagcccaggtgctggcgccagcagctatgcacagcagcagccgtcctacggcggcgcagcagcaggcggctacggtggcgcagcagacagcagcgctgctggcggctacggggctgctgcaggggcatcatctgctacgggaggcgctgctgctggcggcgctgctgcaggttcagtctggcaggctatgcaggacgaccagggccgcacctattactacaacacccagactggcgtgagccagtgggagaagccagcagagatgccctgaaaggcaggctctgctgcttttgttgctaggggcggcgctgctgcttccacaggtggtactgctttgcgggctgcaggaggggcgttgtacgggtgctggtaatgctatgggggcccggcaagggaggtggggttgagagtgctgtgcgggaatagttgctggcagggcgggcgtgggagttggctggggctccgaaagttgccgactgcagtgcaactgctgtagcatgtgggggtgttgagggctgagcctgctgtgtttggtgtgtgttggtgttcatttgctgctgggctgtacaagtgatcgcttgtgttagcagcaacgcctgcgcctgtttgtgctgtgctcgcttgttgcttgtgtcaaatcatgctgccgtgcgtgcatgtttgcaaaagcactgccaaaccaacaccttgccacagctctgcagcaccatgagcggcatcggcaagtggagcgatgcgctcaccacaagcggtagggctagcaagtaattgcacgctttgttgaaggcaatgcacctgtacggaatgcctgcctgtgatgcacgctgccgaatagccagcaccagctgcgacgtgtgcatgccatgcctttgccgttgtgcatgtgttgtgtggcagcacgtgtttgctgttgtctgtgcgtgctatgcttgctgcttctaccaatcacgcctgctgcttgttgcctggcagtgcaatggatgacctgccattgcgttcaatgtattgtgtgtgctcaactgcatgtcatgggcaatcacagcagcagagaacagcatgtgttgcatggctatgttgcccttttgtgctcaactgcatgccaccagcatttacagcagcagaacagcaatgtgttcatggctatgttgcccttgagctgttgatactgccagcttgcttggtcagctgctttgtacattttgtgcacatgcttgttggtttggtagacgtttttatgttgctccgcagcaaaccggcagcaaaccggcagcacgtgaacacagcacagcagggaacacacaggcgagcaacactacgcgtgtgagaggtgcacaggcaagcggcagcagcagtagctcagtgattgcactgtgacttgccacagactgctgaggcttgcactgcacttcaatggggatttagtgatgcatgtatttacttgcgtgcagtgttatatggcacacaggcgcgacaggctgtaacgttgcctgtcttgattggtgtgcactatcctgaactggccttgctttgtaactgcgcctgagagcttttcacgcgaaccctgacactgtacacttggtccgttgctgctgtgctggtttcggaaattggagagggtaatactgctggcacagctgtacgtgctgaagctgttgtgccgtgttgcttggtacttaccaccagggtccatgcgctgctgccctgctgcaagcgcagcacacgggcagttgctggcccgctgacaacacaggccaagcagcagatgatggagttggcagtgacggacatgcagaggtacgcggtgttgaggacatggaggtggttcagatactgcagcaccgtggatagtgtacacattgacaagtgttgagctctttgtgcaacttcttgtgtggccaaccgatcaaggcgtacatgatgttgcaccaggagcttctgtgtaaaaggtacacacatgcggatgtgcacgctgtagttgcatggtgtagttgcttccttccttatggcccctatccagcagctgcagcctgcttgcatgcagtgcgtgcaggactgaaacccaccattattgcatgctcgacagactgcagctgatgcgtcacctccccacagcatcagcattatttgcatgtcaatggagggattgcctcaaggggtgtacatgcagtaaatccagtggcaggattgctgccgtgaatgcctgtgtgcattcgccgcggcctttgcacatgtgctagttggaccgtctgagctttgctgcccgcgattcctttctggagttccttctggagacaaatgccggcaagggctatgtagcaccttgcttc

SEQ ID NO: 13006 - DNA, 2515 bp, Oryza sativa
  ref <308>: DATABASE ACCESSION NUMBER: AK110354
  ref <309>: DATABASE ENTRY DATE: 2001-12-06
taaataggtaggacggcgcggctgctccggtgagccgcgccacggaatcgggagctccaagtgggccatttttggtaagcagaactggcgatgtgggatgaaccggaagcctggttacggtgccgaactgcgcgctaacctagaacccacaaagggtgttggtcgattaagacagcaggacggtggtcatggaagtcgaaatccgctaaggagtgtgtaacaactcacctgccgaatcaactagccccgaaaatggatggcgctgaagcgcgcgacccacaccaggccatctgggcgagcgccatgccccgatgagtaggagggcgcggcggccgccgcaaaacccggggcgcgagcccgggcggagcggccgtcggtgcagatcttggtggtagtagcaaatattcaaatgagaactttgaaggccgaagaggagaaaggttccatgtgaacggcacttgcacatgggtaagccgttcctaagggacggggtaaccccggcagagagcgcgaccacgcgcgtgccccgaaagggaatcgggttaagatttcccgagccgggacgtggcggttgacggcgacgttaggaagtccggagacgccggcgggggcctcgggaagagttatcttttctgcttaacggcccgccaaccctggaaacggttcagccggaggtagggtccagcggccggaagagcaccgcacgtcgcgcggtgtccggtgcgcccccggcggcccttgaaaatccggaggaccgagtaccgtccacgcccggtcgtactcataaccgcatcaggtctccaaggtgaacagcctctggccaatggaacattgattggctcttacgctggaactgtttcctgggctgcgtctgcgttgagtggagcagcatcagcgttcgggtggtcaaaaccactcgtgacatcgtcggtgtcccgtgtgtcatctaatccagcacagtgttttcccaactctaatgctatcgatcccgctattcctatgagtctcgactcatcggccaagttgagggcaattgatgacttttcacctgatggtgctgatgaaatgagtttggcttttattaagagtcagtatagttatttggatttcttcctctttgataaaacaaatgcacctggggagcagatttacacccgtgaactgaaccctattgattttcaacagtttgtatcttctactgaaatttataaaacacctgtatcatttcttgctgaagtttttcgtttttatcgaggtggacttgactttatgttcaaggctgcaaagactgggttccatcgtggtcaaatcgccatttcctttgttcctggtcccgctgcttcaacagtcactttgactgagacttcttttgcttactgtgagatatatgacctggcaactggtaatgtcataaaggtgcagaccccgtatatggtccctttggagtacttgcgtgcaggtacttcgatgggtcgcatgtatgttcatgtggtcacacctttgcaggctcccgagaccgtcggggcgcaggtttatttttctgtgtatgtgagaggttccccggacttggagtttgctgggccgattgaacctaggtatattccatgttttacccagggtcctgatggaccgagtgttgacagaactcaatcagaagctattgatgctcctgttggatctgctcctacccaagcctttgggcttactgcgagtcagaatgccatgtcagagatcgttttgtcactctcctctttgcttaagaggcatgtgcattttggtgctcccgttaatgaggcctctgccatgtcttctttttacccttgggttttggacgcggagtatactgttccctcgacacaattgttcagaacgaagtatcagagttatttgctttcaccatttgcattttttcgaggttccgttcgtttttctacaaaagttgacaatttgacacccactgagccgactgttgctgaatcgacacgagacatggttgcgtatactagttacggtgttggtactaccgtttggacagcggttccggtacaacctgcacctactagtggatctcgtggatacttggcttacactcacaattcccgtgaaaacggagtactgtcagtccaagtaccgtatcagaatgtcactcgagttgccccaattcggtattgcaaagatccgacagagattctcgagtatgatgctccattgcctagattaacaatttcgaaccctacagggacgggtggtttcactcgcgcctacggggacgattttcaggcaatgtttttcgtgggtattccacgtctggccgaaaggtcggattgaccttcgggtttcattttcatgttataaaagaacgtgattgcatgtgtgtatacacctagcggatgagacccgcttggttgtgcacacgtttgtatgcagtccttgattcgttcgagcacaattacaaaggcgtgctttaacaagagttgcttatctctttgagttagtgacacttgcctttaatttc

SEQ ID NO: 13007 - DNA, 3574 bp, Oryza sativa
  ref <308>: DATABASE ACCESSION NUMBER: AK110355
  ref <309>: DATABASE ENTRY DATE: 2001-12-06
aagcgaaaaaccgagtttgtatactcgataaattaagtcgtattttcaggtctccggaccgctttcagtgttccatgagtgctgcagccacggggacgggtacgggtgcgggtacgggcgacgatgccgctgcgcgcgcggagaagcagcggcagttgttggcactggccaaagcgcaagtggcgcgttacatcgaacagctcacgaagggctgcgggcgcacaggcgtgtgtgtgaaccgggagtgcgcgacgggtgcgagtaaggccctgaacccggcggacgccaccaaacgcgcgttggagctgctgcgcctcaaacccgacgagcaaaaggcgctcctctgcccgccgcgaccgcaaccgaacttcagtcccgccacaccggccacgcccgcgccgaccgcggccgacacgaagtcgcatccgcctgcgttgtctctgtccggcacgagcacgccgccacgtgcggccacgccacctgcaggtgccgccgcaccggcgtccgcgaactctgcggtcaaaccggtaccggtcgctgcggcgcccgccgcgaccgccgcgcccgccacaccagcaccagcggctgtgacggccgcaggtgcgggcacgaaaacgcccgcacccgccacacccgccacacccgccgctcctgccacgcccgcgacgcccggcactgcgggcggtgcgggcggcggtgcggtggtgacggcatcgggtcatgtgacgtcgactacaccgggcattcagtaccctgagctgatggcgctcatggacttgggcgctgccacaggcgattggaagatggtcgttcgtacggtcgacagcaccttcggagacgcggctgtactgacgcacagctttctgttggttgatggaaagcgatcggccgtgcccgaaccggagcccacactcaccgccgcgcagatcgctgcggcgtccaaagccgccgctgctgcggctaccaacaaactctccgccgtatctgccgcatctgccgcatctgccgccgccgccgccgctcccgccgcggccggcagcggtgcgggtagtgcttctgccgctgtaggcgctgcggccgccgctgcggctgctggtgccggtgctggtgccgccgctccggctaaacacggtccagcccctgtgtctgccactgctgtggcggctgctgttgttgctcccgcgccgtcgcccgcgcccgctccgtctccggcactcggcacatccggtgcggaggcgaaggacgtgaagtcgaacggcggatcgggcgccggtgcggccgctgcggcgggcacgggcgcgggtgcgggtacgggtacgggtacggcgccgagtgcgagcgcgagcgcgagcagcggcagcggcagcggcagtggtagcggtgcggctgcgtcagtgccgacaccgtcatttgcggcgtattacaacgcgaacacgccgctgacgggcgacgaactgtacccattggattggcgtgcgttagacgctgtgttggcgcgtctgctgagtgtcgacgccacgcgccaggctctggccagcggtgtggcgcgactgtgcagcacactggaccgcagcacgagcgcgctcaaaccgcttctgccgttggacctgcgaaagttcgctgtgctgttggaagtgccgctttggaacgacgcggagtaccacgacacgctggcggtgctgtgccgcgcattcaccaaactgcacggtaacacacgaaaagtgttcgtgaaatggctgacggcgtaccacgatacggcgcgtttggaacggcacgtgcgagatttgcaacagttcctgaccgtcagatggatgacagcgccgggcgggcgagtggtggccacagaggtgatgggcgcagtgagtgtgatggagctgctgtatgcggccaatgaggcgcacgcgcgcctgtgggccggtcagccggacaaagcgctggtgccagataccgacttctacaatgagatggtcaatgcggatctgaatccgcgcgaagactatcggcgctggcgccagcgcgcgcccttctccttctgcgcccaccctttcgtgctcgaacctgtgaacaaagcgcgtatcctgacgctcgacgctgcgtcgcaacagaacgcgtcgtttcgcgatgcgatgatgcagaacctgatggagcgcctgcacaacccgccccaacgcggcgctggcgctgccgacgaccgcgggcccaacccatatctggtgctgcgtgtgcggcgtgacatgctcgtgcacgacacgttgggtcagctgcagggcaagtccagtggtgacctgaaaaagccgctcaaaatccagttcatcggggaacacggcgttgacgaaggcggtgtgcagaaggagtggttccaactcattgtggcggccattttcgacgcgaaattcggaatgttttcgtacaaacaaaagagccgatacttctggttccgctctgcgtccaccgaaatctctgagttcgaactcatcggcaatctgttgggtttggcgatatacaattccgtgattttggacgtgcgtttccctttggtggtgtacaaaaagctgttgggcattcagccaacactggaggacctgtgcgccatacggcccgcactcgggcgcggcctcaagcagctgctgacgttcgacggcgatgtggagagcgtgtactgccgctcgttcgccgtcactgtgaccgacaagctgttgggcacagcgcgcaacgtggagctgaaggcgaacggcgcgtatatcgccgttacgaacggcaaccgaaaggagttcgtggatttgtacgtcgactttctgctgaccaaaagcatcgccaaacagtggcgtgcctttgacgaaggcttcaaaaccgtggccggtggtgacactctgaagctgttccgtcccgaagagctcgagctgttgatcgccggagagagcaaactggactttgcggcgctgcaggaagcggcagtgtacgaagacggatataacaagaactcacgcgtcatccgtgacctgtggtctgtcgtgcatgagctgtcagaagacgacaagaaacggttcctgttcttctgcaccggctctgatcgcgtgcccatcaaaggcctcggcaatttggagttcgtcgtctctcgcagcgccgactcagaccgtctgccgtccgcgcacacgtgcttcaaccacctgctgctgccggactactcgtcgcgggagaaactcaaaaaatacctgctcatggcactggcaaacaacaagggattcggtctcatgtaatgcgcgaacgtgctaatgcgccaatgcatgcgctcgtgccatcgcatcaccgtcaccaccgcatcaccgcgtcaccgcgtcacctcaccagtgccactagcgctgccccatgaccacgggccaccgtccgcgtcgcaacgggccggcgccgcagcggccgttgcaattggccgttgcaatggccgttgcaatggccgttgcaatggccgttgcaattggccatcgccattggccgttgcattcccctctttccgtgtggtgtgttctgtcgcctgccctttgtgcagacgttctgacaataaaactgccttctgctt

SEQ ID NO: 13008 - DNA, 2091 bp, Oryza sativa
  ref <308>: DATABASE ACCESSION NUMBER: AK110356
  ref <309>: DATABASE ENTRY DATE: 2001-12-06
aagcgaaaaaccgagtttgtatactcgataaattaagatgtctgctccggctggaggggaagacggcggcgacaagccgctgtctaagaacgcgcaaaaggcggcggccaaaatggctaagaagaaggccgaacaggaggagagggccaaagcgcgcgctgcgactgccgccgccgctccggccaaacccgccaaagccgctgccgccgccacgacggccgctgcgaaggaggaggacccggaggacgacaacaaatacatggaagcgcgtgtgcgtgccattgcggatttgcaggccaaaggcgtgaacccgtacccgcacaagttccacgccgacatgtctctcccgcacttcgcaaagaccttttccaactgcaaagacggcgagcgctttgaggacaaagtcgtgcgcgtggcgggccgcattgactcgcagcgcattcagggccaaaacctcgtcttttatgacctcgtctcgcaggaccagaagatccaggtcatggccgaccgcaagatggcgaaggacgacttcacgattcacgacacgctgcggcgcggcgacatcatcggtgtcgtcggcattcccggcaagtcgaagcgcggcgaactgacgattttcccgtcagaggtgaagctgctgtcgccgtgtctgcgtctgctgccgcccaaggcgtcgggtctgaaagaccctgagatccgctaccggcagcggtatttggatatgattatgaacccgaacgtcaagcagatcttccacatccgctcacgcatcgtcaattacatccgccgtttcctcgatgagcgcggcttcctcgaggtcgaaacgcctatgatgaacatcatccccggcggtgccatcgccaagccgttcgagacgttccacaacgacctcaaactgccgatgttcatgcgcattgcgcctgagctgtacctcaagcaattggtgatcggcgggttcgatcgcgtgtacgagatcgggcgtcagttccgcaatgagggcattgacctgacgcacaaccccgagttcacgacctgcgagttctattgggcgtatcaggactacaaggacctgatgaacatcacggaggagatggtgtcgggtatgattaagtccatcaccggtccgtacaaaatcaaataccacccgaacggcctggaccagccggaggtggaggtcgacttcacgccgccgttcaagcgcatcagtatggtggcaggtgtggaggccggcatccgtgcgaaacacaacgatccgacgttcaagataccggcactgtccgaccccaagacgcaggcgtttctggactctgtgtgcacgcgcttgggcgtggagtgcccggcgccgcgcacgactgcgcgtctgctggacaagctcgtgggcgcgtatattgaggacgacatcgttcacctgacgttcatcactgaccacccgcagttgatgtcgccgttggccaagtaccaccgcgatctgccggacatgacggagcgctttgagctgtttgttttgggcaaagagatgtgcaacgcctacactgagctcaacaaccccaaggtgcagcgcgacctgttcgccgatcaggcaaagtcgcgcgacgctggcgacgatgaagcgcccaaagtcgatgagggcttttgcgtggcgttggagtacggtttgccgccgaccgcgggttggggtatgggtatcgaccgtatgacgatgctgctgtctggcgctctgaacatcaaagaggtgctgctgttccccgccatgaaaccgcgtgacgacaacgcgcatctcaaggagcagaaggacggtggcgaacctgccgccgcggcggccggtgcgggcgctggtgccacggcggcggcggcggcggccaaagcgccggcggcggcgacggagaagcccgcggcgggcgctgcgccggcgggtaagcccaagaaaggcggcaagtaatggcgccgctgtgctgcgccacgcgagcgcgccggtgcgtgtaatatctgcgcggccgagtgtgtgtgtgtgtgatgcactgtagcctttatgccacctcgccgccgccgttgctgctgctgttgctgctgcgccggaaatgcagccgttcc

SEQ ID NO: 13009 - DNA, 2642 bp, Oryza sativa
  ref <308>: DATABASE ACCESSION NUMBER: AK110357
  ref <309>: DATABASE ENTRY DATE: 2001-12-06
aactaacgctaaaaaagtaacagtttctgtactttattggggtcatcccgaccttcgccgacacaccgcaaaccctccgccccacgccgcggaaagctttttgcgcccctccaattcctttttgtagacaccaccgaaacacctcttcaccccactcgctcacgctacgatgacgaccgccctcaacatggacctggagcgcacgccgcagctgcgcctcggcgctgccatcggcttcggtggcaaggtcaccagcggcctccacatccaccccgacggcaagcacattgtgtacgcgctcggctcgtgcatcgttattcgcgaaatcggcaacccccgcgccacgcagttcctgatgggccacaacgacaaggtctcctgcatcgccgtcagccgcagcggcaagtacgtcgccagcggtcagatcacacacatgggtttccaggccgacatctgcgtcttcgaattcgacacccagaagctcgtccaccgcatgatcctccacaaggtcaaggtgcaggcgctggccttctccgccgatgagcagttccttgcctccgtcggtggccaggacgacaacacgcttgtcgtctgggacctcgcctcgggcagacccctctgcggtggcccggcctcgaacgagctctcgacgtgcatctccttcttcaataactcgtcggacaagctcgtcacgggtggccacggtgtcctccgcgtctgggacgttgacttccagaaccgcaagatcaaccccactgacgtcaacgtcggccagacccgtcgtgagttccaaaacatcgtcatcgaggccctcgacaggtacgcctacgtcggcacgagctccggtgatgtcgtctgcatccagctgcaaggccccaagaacctcaagatgacgggcccgcagaagaagttccctggcggcatcctctgctccaacctcgacgaaaacggcgacgtgctcgtcggcaccggcggtggcgaggttgtcctgctgtcgaagatcgacctggccgttctcaagtcagtcgccgtgcagggtgccgtcacgtccatcagcacgatgggcgagcacttcttcatcggcaccgcaaagagcaacgtgtactacctgaacgcccacaccttcaaggaggagctccgtcagacttgccactatgacagcatcaacgacgtcgtgttcccgtacaactactctgaggtcttcgcgacttgctccgccaacgacatccgcgtttggaactccagcacgtccgctgagctgctgcgcatccaggtgggcaccctcgagtgcaactgcctctccttcgccaaggacggcaagtcgatcctcagcggctggagcgatggcaaggtccgcgccttcggcccccagactggcaagcttatctacgtgatccacgacgcccacaagattggcggcatgaagcgcgtcagcggcgctcacactggtgtcacctccctgtgcgtggacaactccaaccagcgcatcgttacaggcggtgccgacggcgaggttcgcgtgtggaaggtcagcgccttcgctcaaaagatggaagccgcgatgaaggagcacaaggcgaccatcaacgccgtggccatcctgtccgacgactccgaggtcatctcggcccccgacgacggcagctgcatcctttgggacctccagcgcttcgtccgccgcaacatcatgtactcgcaaacctacttcaaggcggcgtgctacttcaccgacgagtcgcagctcctcaccacggggtctgacaagaagatcacgtactgggacgccatcgactgcagcgcgatccgcgagctcgagggctccaagtccggcgaaatcaacagcgtcgacatttccaacgacggtgagctcttcgcgacgggcggcggcgacaagctcgtcaaggtgtggaactacgaccagggctccgtcgtcgcggtcggcgtgggtcacagcagcaccatcagcaaggtgaagttctcgcccgatggtaagcgcatcgtgtccgtcggcgaggagggcgcagtgatgctgtggtccttcgagtaaagctgctgacgacgagtagcgtgtgttgtctctctccccattccgcggcccctgtacacccggcactgcaaccaccctccaatagaagtggccaagtgtgagcgtgggcgcgcgtcgagagagaatcgatttgtgtgaataacgagatgcgagaaccattttggagccctttcccattcggaccctgcgtgctgtgacgcaaatgtgtacatgtgtcgtctcgcgagacccctttcgcgagtcgggaaaaaactctcatcgaaaacagaaacaacaacagacaaaaagcagaaaactccccaaaaacccaacgagacggcgcgtctacgttacgacccctaccgcgtccgaacctgccgtcaacaccgccatcaaccaagtgggaactcacaatgttccaagaagatacctagaggccaccgcgtcgacgaatcaccggcagtcccctcctcgtgccccctgagtagagaagaagcgaggtggtgtccgctggtgtcgcgtcagactcgatgcgctgttggcaggctgccggtcaggtttttgtgcgcggggcggattcggcctcaccccaccccacgtctttacgacagaaacg

SEQ ID NO: 13010 - DNA, 2953 bp, Oryza sativa
  ref <308>: DATABASE ACCESSION NUMBER: AK110358
  ref <309>: DATABASE ENTRY DATE: 2001-12-06
gtcaatcaacacaattacacctgctgtaaacgtggtgcatcgatctccgcgtgtgtgacacattgcaagctgcttgtctactgcgcaggccaggggttacctttcaaaggcccgtgttgtgaccaaaaacactgcgttagcgcttgaatgttcctttcctcccagcgctgcagcagggtcttgctgctgcggtgcttcagggcgtgttctgctgtgcccgagggatctagctacgcgagtttaggaccagcagcagctgctgtgcagttggaccaatggggcattcagcagcagcagggccgctgctactccggttcgttttgggatgttccacaccctgcgcctcgtcacgagctcttcagtgagctgcacaccgtgaagggcatgctgtccaatcgcggcgagtttacacccctcttcaacgcacatggcgtgcacctcgtgcctcaccagctggcccagaacagcgcccagcagcagcaggctgcaccagcaggtggtgctgtcactccagcctttgaggagggccatgttgaggtgccagtgcttgcagacagtgtcaaacgcaagcgtcgtatgaagatcaagaagcacaagttcaagaagcgcatgaagaagatgcgccaccagatgaagtgagcttctcgcatcttctgggcagggtcaggtggttcaccttttgagcttgttggtagtgattgtctcccaaggtgattgtccacggacaagcagtgttggggatgttggccacagcacaagcacctgacccagctgcaccaagcaacgcgctgcagcagcatggcagatcagccaggccaggacagcattcctgttgaagtatcgggctgacagcactggagggcacagcggcagtgtttgcgggtgctgcagagcgtcggtgagtgagcacggtgctgttgcctcaaacgcctacggcgtgtgacagggcaaggcctgctgcaagcattgccctcctgcacacatgctatcatactctttttgcgagtggttctttgtatgtgcatagcgttgcacaggtttgtgtttcattgcatgaagttcatgcaggatcagcaggcaacagcttttggggcagcatctgatgttgggtcgcctgcagcgcacagcgctcccggtgtgtggcacgtgctgcgcactgggcaatgctatgcgttgagctattggtttggtgtgcacaactgacagcgcatgcccacggagtgtacattataagagcgatcatgcagcgcagcttttgttgcgtcctggccagccgttttgtttgtgtgtgaggccttgacgcggcgctgctgctgccctccgccgtcccttgtactgccgccgacggcggtggagagccgccacctgtaatagtatcgcattcatacaagcaaggaaggcaatacaacagagattgtgtactgcattgtcagccaaacgggtgacatggagtgcgacagctgtgttcgtgttccgtcgcagcaaatccacacactgctatttgcaggttaaagcgtatatagggagcattggcttgcccttggcttagtatgtagaccggcatggcttggcaggctgtgttttcttgctgttcctcaatgcactgttgagtcctgagaaggctgtggtggtgtgctggtagctggtggtgtggtgcacactggtttgctcaggtggtggctggtcatacacagcagcacgttgtggtggttgctgatagtcttactcagcagcacattgtattggttgttactggttcgtcatggtgggtttggttaccagtgcaggtgccggccggccttgtccaagctggttcatatggatgtttctggtggtgtgtgcagcaggccaaactgtggcacagggttatgttaggtagtttcactgctttttgcgccaattgtttggccctacagagtgtggcagagcactgccggttttccagtcctatgatatgtgtcggggggtgttgtacatgtgatgcctgcccaccaccgtgatggtgctgctgtggggtggtggcggaatggcgctgtgttgacagcgcctggtgcttgcgtggttggctggtgagggcagggcaagacaggcacatgtgcgcatgtgctttccttgcgcgcgtgcttgtaattttggcagaccgtcagtggcattcttcttccttgtagcagctgcgcgtttggagggatggaggggagggttacgccacacactggggctctgtcagcagtgagccagccaaagcccctggccggggtgctgtgttgacctgcagtggagccggtcgttcttgctgccctgtaacaggcgtgtgtaggtgtgcacggctggcagcagtgtgcatttgcgttgtattgtatactgtacacattgtgcaatgtgcttttgtcccaagggctgtggcaggcatatgatgctatggtggtgctgctggctggcagcatgcatcgactggattgtgtactgctgtgccaactttgccttgtgccttgtgaaagaggaggaggcacatgcaattgcaatgcactgctcgtctggtgcaggattcacagtgtggtgcgttgacagcgtgctgtcaaggatgtggccaggcacgtgcagtactgctgcaagcatggcatgcatgtgctcagttcttgcttgcgccggcagtgcccgattagtgactgcttcggcatgtactgcccagaccattgtgacacatatgtataatgcatgaagtgtgtgccacgcgttgagcgagtgttggctgtcgacaaaaccacacgtaggtgaggtggtgataatcatcttatgataagcacagcctgataagctgcgcagactcctttagcgaggagcgcttgccagagccggctgttaaggggctcccactccatgtgccctgattgtcagcagcgcattacggctgtaccgtgacatttgcctcacacagtgtaacattatgtgaggt

SEQ ID NO: 13011 - DNA, 3296 bp, Oryza sativa
  ref <308>: DATABASE ACCESSION NUMBER: AK110359
  ref <309>: DATABASE ENTRY DATE: 2001-12-06
gttttttggcttgtttacagccgtccagaaggggccgtttcaatacttcatgtcacattgccgctgcactgattcttgacggccggggtcttgtgtgtagctttgtgtcaaatcaaaagatatctgtggggataattaagtgctaaaggagcagcatgggtcgcggagggcgtggagggcacaaaaagcgcttgatgcgcaaggattaccagggcgacggcaaacgtgacaacgcatggaatgagaagaaaacccaccgtgcagaccagtttctggaatcaggggacatgcacaatgaggcttttgaagagtactacaaaatgcaggacattgtccccgagggcgagtgggaggcattcttggagatattgaagaaaccgctgccaattacgtttcgcatcaacggcagcgggcgctttgccaaccagctgcgtgagaagctggagagtgacttcttctcacacttcagccaggggccggtcatgctggatggtgagcaggtggacccaccccggccactgccctggtaccccaacaagctcggctggcacatgaacttcagccgcaaccagctgcgcaagctgtcctggctggcagacatccacgaattcatgaaggtggcaaacgaggcgggcagcatcacacgccaggaggcagtgtcaatggtgccaccactgttcatggacgtcaagccacaccacagggtgctggacatgtgtgctgctcctggctccaagaccttccagctgctggagatgctgcacaacatggaaggggcctcagcagcagatggcagcagcagcagcagcggcaccactcccacaggctttgttgtggccaacgatgctgacgcgcagcgctgcaacctgctcacccaccagacgaagcgcatgtgcagcccgtgcctgatggtcaccaaccacaacggccaagagttcccacgtatcacaggcctgagtgctgctcccggcagcgctgcggcggcagcggcggcagccgaagcagctgtgaacggcagtggcggcgtcagcggcgcaagccaggccggtgaagtgctgctgtttgaccgcgtgctgtgtgacgtgccgtgcagcggggacggtacgatgaggaaggcgcctgacatttggcgacgctggagcgtgaacaacggcaacgggctgcacaacatgcagctgcgcattgcactccaggctgtgaggctgctcaaggttggtggccggctggtgtactccacatgcacccccaaccccattgaagatgaggccgtggttgctgagctgctgctgcgctgcaagggcgccctggagctgctggacgtgtctgaccagctgccagagctgaagcgctgccctggcaggcgcagctggatggtgcggggcaagcaccaatggtacaagacgtgggaggaggctgagaaggttgggttcaagcttgaccccaccatgttctgctcacctgagaaggagcagctgccgcttcagcgctgcatgcgcatcctgcctcaccatcaggacactggcggcttttttgtggcggtgctgcagaaggttgcagagaccccagacctgccagacccgtcagtagcacacaggttcacccgaatcatcagcagcggccgggatggcaggctgatcaagattgagggggcagacccacaccagggtgcagaagatgcagcagcatatgcactagaggctgctgagcgagctgtagcagcgcttgaggcaggtgatgcggcagcagctgcagccgccaatgctgctgctgctgccacagcccgtggtgggttggcaatggatgccgcgtcagaggtttacaagaacaagcgcaagtatgactcacaggaggcccgcaagcagcagcagctggaacggcagcagcaaagacagcagcagcagcaacagcagcagcaggaggtagcggctgaagatacagcagcagatgtggcagcagaggaaacagaggcagcagtggtggatgaagacgcagcagcggcagcagcagcagcagaggatgatatggacggggtagaagcagcaggtgatgatgcagcagtggaagctatggacgctgatgccacagaggctgctgcagcagcagagtcagcagcggagcatgaggcagatggggaagcagcagctacagctggtgacgctgctgctggtgctggtgctggagatgagaaggctgctggctggaagcccagttgggtgcggggtggtggtggcaggggcaggtcaggtgctattgggcgcttccggggcatagaccccatcatccctgtggaggacccaaacacaatcaagatgcttgttgacttttatggtgttgaacccagtttcccactggccacccaccttatcacacgcagcttggaggcggcattccccaagaggctgtactatgtgtcagatgctctgttgtcagtgctgcttgctgatgtgaaggagtcgctcaagatcactgccactggcctgaagatttttgagcgtcacgagctgcgcggcaaggagattggcaagtgccagtaccgcattgcacaggagggtctgcccttcctgctgccccacctcaccaagcaggtgctgcggctgcctgtcaacgactttgtgcgcctcctcactgagcgtaacctgccgctgctcattcctgaagaggccaacggcaggacagagcaagacgcagcagcggcagccgcggcagcaaagaccccatcaaaccaggtgccgctgtcgacgccagcggtgctgaaacagctagagcatatggaatctggcggggcggttgcgctgctggaagaggcagcggctcaagagctaggcctggctacggatgaggccagcagtggcgccctgactgtcaatgcaccgctggcaatcagtgtctggcgcacgcgtgtcagtttgtctgtgctggtggcgaagaacgagtgcgagcagctggtggagaaggtcaagggggcgcagcagcggcaggcaaagcagaagcagcagcaaggggccacggccaacgcagcaggagcagtggcagagaagcagccggagccggctgcggtatagcagtctttgctttgtcgcagcatttgcgcagtgcacacaggccaaattgggccactatcgcagtgtatccactggatcagctggcagctgatagctgcagcagctggcggcaccagcagcggtgctgcatggatgcggatgcattaaatgcataacagtgcactgaccgttcatctgcaccaaaagcactgctgagggagttgtgccaggctggttgagtaacgggaacatgcc

SEQ ID NO: 13012 - DNA, 3283 bp, Oryza sativa
  ref <308>: DATABASE ACCESSION NUMBER: AK110360
  ref <309>: DATABASE ENTRY DATE: 2001-12-06
aattaagtgtggcgagtactaggaccacagatagactataggagtgtatgtaagaccacagcgatgttgcgcttagtgctcaaacatgcctcggcacaagtggtcagaaacaaggccagatccactctgttgctgagatctgtcacttctaccgccaaaaaagacactagtcaccctatggaagagtcatattcaccgggccgagtagaaaagggttggtacgattggtggcaatccaaagaatatttccgacccaaatcagacaagacaggaacgccatccgataagtatttttccatggtcgtgccgccacccaatgtcactggctcactgcacataggtcacgcactgaccgtgtccatggaggacgcattggttcgctggcagaagatgcgtcacgtgatgcaagatgtcacgtggataccaggcctcgatcacgcggggatagccacgcaagtagtcgtcgagaaacagctcaaaaagtcgcagaatgtgtcaagacacgacctgggccgcgaacgattcatcgaagaggtgtggcgatggaaggaacagtacgggggccgcatcgtggaacaactgaagcgaacaggtgccgcgctggactggtcgcgcgaggtgtttacattgagtcctgagctgtcacgtgctgtcaccgaggcctttgtgcgcatgcacgacgagggactcatctaccgcgacacgatgctcgtcaactggtgctgtgcactgcagactgtcatctccgacattgaggtggactacgaagatctaccagggcgcacaatgatcgagatccctggtcgacagaagaaggtcgaattcggagtcctgtacaagatgcgctatccaatcagacgacgcgatgatccgagtacggtgcaacacctcgaagtgtgcacgacacgacccgagactatattgggtgacaccgcactcgccattcaccccgatgatgcgcggtacagtgccttccaccagggctgggaggctgtcaatccgttgacaggtgccaccatggccatcgtgtgcgacagcgccgttgaccgcgagttcggcacgggtgtggtgaaggtgacccccgcacacgatcacgtggattatcagatgagtcagcgacacaatctccgcgtcatctccgtgctcaacaccaccggtcacgtgatcggcaccaacaccccctacgacggactcgatcgctacgaggcacgtgcgcgcatcgtgaaagaattgcaatcacgtgacttgttgatcagcacgagctcgcacgcgatgagattggcacggtgctcgcgatcacgtgatgtcttggagcctctcttgcagccccagtggtatgtccgcaccgcacccctcgcacgcattgccacgcacttgtcgcgcaccaaccagctgcgctttgtgcccgaagaattcgccgatgactggcaccgctggctggacaacatccgagactggtgcatcagtcgacagctctggtggggtcatcgcgtgccagcctggcagatcatcgacggcacttaccagggccctgcacgctgggtggtggcacgtgacatggatgaagcacgtgatcgtgcggtgaagcagtacggagtgtcacgtgactgcgtgctcgaacaagatcccgatgtgctggacacgtggttcagttcgggtctgtatccgctttcagtgaatggctggccaaataaggaaacattgccgttctatcccctgcgcgtgatggagactggccacgacattctcttcttttgggtggcacgcatggtcatgctgtgcgcctatctcggacctaagaaaaggaatgcagctgtcaacgtgtcactcgatgacctcgacgcgtaccagtcaccctttgacacggtctggctgcacgcggtggtccgtgacgcacagggccgcaagatgagcaagtcactcggcaatgtgatcgatccgttgcacgtgattgaaggcagagccctcgatctcgtgctcgcagatctcaaccagggcaatctcgatccgcgcgaggtcaagcgtgccaccgaactgttcaaaaaagattttccgcaaggtatacccgagtgcggcactgacgccctgcgatttggtctcgccgcgtacagcaaacagacgcgcaacatcaacatggacatcaacagactggtggcatatcgccacttctgcaacaagatctggaatgccacgcgctacattatgacacatgtcaatcagggtgttgaggccgttgacgcgcatcaactcgtcacactcgcgcgctcagatctcgaccagctatttttagaagcaccgacgcagttcccaattcacaatggcaatctgtcgctgtcactgatcgatctctgggtcctgtccaaattaggtgcgatggtccgcgaggtcaaccagggcttcgaggcactggacctgtcacgcgtcaccgcggccattcacggcttcttcatgtacgacctctgcgatgtctacttggaattttccaaattagtactcaacacgcacgcgggcgagggtgccaccgacctgtcaagtgacatgtcaaagcgaggggcgcgtcacgtgctggtcacgtgcttgaatgtcgtgctgcgtgtcatgcacccactcatgccgttcatcaccgaagaattgtggcaaagactgaccaatgacacggactccattgtgacacgtgtctatccccgcgtcgaagatcccgtcatcgcgggctggactcgcatgcctaaaatagaactggccgtatctcacttggtcgagattgtgagtgccgcacgatcactgcgcaagagttattcactgaaaagcgatcagctgacgcgtctgatcgtgcgcactgacgatgcagccctggtcagtgtcgtgcagcagtactcgcatgctttgcagaaattctgcaaactcagtcacgtgatcatcgaagagcccaccgccacgcgcgacgaaccagaagcgagcagcacgcgtctgatcagtgaacggtgtcacgtgatcatgcccgcggacgagggactggtcgatctcgcgcaggagattgcaaagctcgacaagacgcaccgtcaactcgtgcaacgtcgcgagagcttggagcgacagatgacagatgtcaactatgctgtcaaagtgagtgccgaggtgagggctaaaaatagcaacaaactcgcgaccctccacgcggacattgcgcacgtggagctcagcttgcgtcaactgaaatccaagctgaaataagccatgaccatatttgtacatagtgcactgtaaacgatctagtgttgatgag

SEQ ID NO: 13013 - DNA, 2572 bp, Oryza sativa
  ref <308>: DATABASE ACCESSION NUMBER: AK110361
  ref <309>: DATABASE ENTRY DATE: 2001-12-06
aagcgaaaaaccgagtttgtatactcgataaattaagcgcggcgtatgtcggcgcgccgcattggtgtcgcgctcacgggctgcgctctgctcctgacactcgccgctgtcgtcaccgcctcaacgacagcacccgcagccgcagcggtcgctgaagtgccggtggggctgatcgagtcgcaggcgctggtgcacgccgcgccgaagcgcacggcccgtgccgctgtgcgtccggcaaagcgcacggccaaacgggtgggcaaacagcatgccgcccgcgtggcggcgcgcaaaaccgcagcgaaagcgccggcgaagtcgaaaccggcaaaagcggtgaaacggaacgcgaaacagccgcattcgaagcgcaccggccgcggcggcgccaaagggccgcacccgaagcgcagcgccgcggcgaaacccaacgcaaaacgcagcgccaaagccaacacgaaaggccgtgggaaaggccgcgcgaagggccgcggtaaatccaacgcaaaagccaatgcaaagggcaacgccaagtctggcgccaaagcgcacgccaaagcccgcggcggcggcaaacgcaatgccaaagcgcgcggaaagagccgcggcaaaggcaaaggcaaagggaaaggcagagcgaaagccaacgccaaagccaatccgcgcgccacagccggagcggcgctgaaatctgcgaatccgaacgcttcggctgcgaaaccgcagaacacagccgcgcgcgggttggatctgacgggcgatcagggcactgttccgatgccaccgcgcaccggcgccggtgccgccgcggggcagcagtgttgtgagccgggcagtgccggggcgcaccgcttccggcagctccggcgtatgggcgtcaccgaagcggctgccaacgcgcatctgttgcggcgcagtgccgtgtacaactgtgtccattgcggcagcaaaaagcacgagagcgacgcacacccgcaatgggacgacgcccacggcttcccggatgtgggccgcgatcagcggaagttctcgccggagcagcgccaagcggtggaggagtgggcgcgcgacaacaatcggaagccgaacgtcgacaaccgcaaccccatcgtgttcggtcagcatccacacagcgacctcaacccgacgcccggacccgatgcgggcgacaaaggcgtggcgtttgcgggtgcgcggaccattgagggcgccaacccggcgcactggcgacaggacaagttcgggaatgtcatgcgatggaacaagaaagacggctcgccgcagcccaaaatcggcgacaaatccaccgatttcaacctcgagcaccaaaaggagtattcttcttatgcgaaagacgcgcacgccgcgaacaaggccgagaagactgcgagggatgcggcgtaccacactgcgaaagccgcatatgacgatccgaagaacaaggcgctgcgctacggccatccgaataaggccccgcatccgagccagacggccctgccgccggtgcacccggcggagcagcactatgcgaacacggcgaagcagatgcagagcatcggcgggccgcacagcgctaatccggagggcaatatcgttgcgatgaacaaagaccaaaacacgttccgcaatgactggaagaagcagccgcacaacaaactgctcgccgaaaaggaccaatacccgcacgatctgccgtcggacgacgtgagttacgtgcagccgcagggcgtggcggtgaaaggcgcgggcgtgcgagccggcccgaacgcacagccggacaaacactacctgaatccggccacaggcaccctttcgaagagcatccaacgcaaagacgccggcgacgcgcggctgcaatacctgaagcccggaatggcagccggctcgcacctgcaccccgacggctcgggccggggcatcgtggaccaaaactcgcctggtgtgatcaacggccattacacgttagacgccgaaaccacggcggccaatcagcggtacatcgacgccaacaaatcgcgctggggcgcggggccgcccaagtagccccatcgtagccccatcagtagccccatccagctctggtctcgggcgccttatcacgcgcctttgaggaccggtcgcgcgcaacacatcagcacgttattgcaccgccactcgccccgcaccgcccgcacaccgtcccacgcgttcgcatgttcgcccttctgcccgtcgggtctgctgatcgcagcgcggcgcacgcgcggattgcgcgccggtctcgcagcgcccgttttgcccgtttttgtggtccactgacttgttcagccgcacagctgcaccgcccgttatgctccgtcccccgccgttacctctcgcctccacagcgccacgttctcccgcttactcccgccaccgttagcgcggtccgtcgtcgtcgcgatttgcagttcgcagtccgttgtacgcagcatttgtgtcacaaaattcaacaccacacttcgcactttggcttcactgcttcacctcctctcccgcccgacaccaccgcgtctgcatgcgtttgtgcgcgttcgcaaaactgatctctctt

SEQ ID NO: 13014 - DNA, 3110 bp, Oryza sativa
  ref <308>: DATABASE ACCESSION NUMBER: AK110362
  ref <309>: DATABASE ENTRY DATE: 2001-12-06
acggctctttattcctctcctctcctcatcatctgcgctctactatggcacctccatcacattgtgttgtggctgggttcttgattgaaaccctccctacaaagccatcgttcatccttctcccatcttttgaggtcggcttcgcattccacacctccttgtcgagcatacctcactctgtaaaccaaggcttcaattgattaattgaagtcctatcatatcacatcatgtctgcacaggacctgcgatatgacggccagaccgtcgtcgtgacgggtgctggtggtggtcttggccgcgagtacgctgttttcttcggcagccgtggcgccaatgtcgtggtcaacggcctcggaggaagcttcaagggcgaaggcaagggctcatcggcagcagacaaggtcgtcgaagagatccgctccgcaggcggcaaagcggtcgccaactacgattccgtcgaaaatggagagaacatcatcgagacggcaatcgatgcctttggacgcatcgacatcctcattaacaatgctggtatccttcgcgatgttagcttcaagaatatgaagcaggccgactgggacttgatatacagagtccacgtctacggcgcctacaagtgcgcaagagccgcatggccatacttcaggaaacagaagtacggtcgccttattagcaccgcttctgctgctggtctttttggctccttcggccagaccaactattcagctgccaaactcgctcttgttggctttaccgaaactctcgccaaggagggctacaagtacaatatcctctgcaatgtgattgcccccattgccgctagccgaatgaccgagaccgttatgcccccagatgtcctcgacaagctgaagccagagtggattgtccctctcgttgcagtccttacacacaagtcgaacactgagactggagccattttcgaggctggaggtggtcacattgccaagctgcgatggcagcgtgctaagggatgtctgctaaagactgacgagaccttcacacctggagcagttgctgccaagtggaaggacgtcatcaactactccgaggcagagtatcccactggccctgtcaatgctttggagctcctcgaggcttccaaccagcttcctcccaaccccaaggccaaggagcctgacttcaagggcaaggtcgctctcgtcactggtggaggcgctggtcttggtcgcatctactgcttggaattggccaagcgcggtgcaaaggttgttgtcaacgatcttgttaaccctgacaccgtcgtgcaggaaatccagaagcttggcggtgaagctgctggcaacaaggccgacgtgcaggacggcgaggctgtgatcaagaccgccattgagaagttcggccgtatcgacatcttgatcaacaacgctggaatcctccgtgacaaggcattcaccaacatgaccgacgagcaatgggacatcatccacaaggtccacttgcacggcacgtacgcctgcaccaaggctgcctggcccttcacgctcaagcagaggtatggtcgcatcatcaacaccacctcgaccagcggtatctacggcaactttggtcaggccaactacgcctcggccaagactgccattcttggtttctccaagtcgcttgctctcgagggcaagaagaacaacatcttcgtcaacactgttgctcccaacgctggaactcagcttactcgcaccatcatgccagaggagatcgtccaggctctcaagcctgatttcaatgctcctcttgtgcttctcctagtttcagacatggcacctgagccaacaggaggactctacgagatgggctccggctggtacgcccagacacgatggcagcgaactggcggtcacggcttccccgtggacgtcaagctcaccccagaagctgttctcgcccaatggaagaacatcaccaacttcgatgatggccgtgccgactaccccttcgacaatgccagcggtcttcagaagatcatggctaacatggagaacaccagcaagaagagcaagaggcctaagaaggacgccaagtctaacgaggaggtgctcaaggcccagaaggaggcgttggcggccaagtcggagggtacgcccttcgaatacactgagcgcgatgtcatcctttacaatctcggaattggcgccaaacgcaccgatcttcccttcgtttacgaaggccacgagaacttccaagtcattccaacctttggtgtaatccctcccttcaacgcagaccctccattctccttctccgacatcgtccccaacttcgacccccgcatgctcctccacggcgagcaatacctcgagatccgaaaattccccatccctacggaagccaagctcattgccgtgcccaagctcgtcgaggtcgtcgacaagggcgccgctggcctcgttgtctacggcagcgtgaccaaagacgccaagagcggcgaagaaatcttctacaacgagagcacagtcttcatccgcggctcaggcaactttggcggaccctccaagggcactgatcgcggcgccgccacaaaagcccacaagcccccgcagcgcgccccagacgccgttgtcgaagagcgcacgaccgaggaacaggccgcgctgtaccgcctctccggcgacctgaacccgctgcacatcgacccggccttcagcaaggtcggcggcttccccacgcccatcctgcacggcctgtgcagcttcggcatctcgggcaagcacgtcctgcagacgtacggccccttcaagaacatcaaggtccgctttgccggcgtcgtgctcccgggccagacccttgtcactgagatgtggaagactggtaacacggtcgcgttccagactaaggttaaggagacgggcaagttggcgattagcggagcgggagcagagttgttgggtggcggaagtaagttgtaggctatatgttgttagctcggcgggattgtatatgtgttgtcgagattggaaacggaaaagaggggagaagatggcactacggtgttgagtttgtatgtatgtattcttagttatggttagctttctttcttcatgaatgatatcgaataaagaatatctgtcactctc

SEQ ID NO: 13015 - DNA, 3528 bp, Oryza sativa
  ref <308>: DATABASE ACCESSION NUMBER: AK110363
  ref <309>: DATABASE ENTRY DATE: 2001-12-06
aagcgaaaaaccgagtttgtatactcgataaattaagaaaaagttgagcgcgccgtaccgcccgccgcagcgccgacgcgcacagactagggccggtgccactggtggtggctgtggggtggtcgtgggcggcggtctgcgcgtcggcactgtccggcacgtcttggccggtgcaggcgcggccgtcgaattggccgcagacaccgcctcagcaactgtcacaaccaacgagtcgaaacgcgccggcgccgctgtcgacgacggcgatggaacgctggagcgggtggtgcgcatcgcatgcgcgtgtctgtccaaattcacgcccgaaaagagccgcactgtggcggtgcagctcgtggagcgtgcgtttgggcacacacgcgcgaccgtgacgcgcgctaaattgcgtgcgattgccgcgctggtgctggacaaagccgtgactgaaccggcgtttgtggtgtgttatgcggactggactcacgcgctgtgtgagcagctgcgggcattgacgcccgccgataccgacgcggccgcagctgcagccgctgcggccggtggtgtgtcggtggctgacggtgacgcggatgcgcacgcgcgcgtgtgtaccacacccgacgccgcgtactgccaggcgctagccgacgccgtgcgtcagcggtttgacgacacgtttggtggcgctgctgtcgtgcagcatcctgctgcacccgcgctggcgtcagcggacggcgctgccgtaccgccacagtggcccgatctggtggtggtgcacgaattggagtcactgctcacccgcgagcgcgacgccgacgacgcgtttgtgcggccgcgcgaacgcgacgacgaacggcggcggtctgtggccgaccgggagtgccgtcgcgccgccgcactgtgtcacttcattgccgcgctcttggacgttcgcggcatcggcagcggcgacggctcctgtggtggtggtgagcagcatgaggctgctgcgggcggcgtcatcgcatggccgtggatgacgcatgtcattggcgtactgtgcggtccgcaggcaccaccgcgggcgcacacgtcagcgtgtggcgcagcgtatggtcggcctgggcggcgaccgaacaacggcgcacgctaccggccgctctggagcgtttgggcgctgccgtcgatgcggcggtcggtcacctgcgcgtgtggtgtggcgaaccatccgccgatgcggttgccaaaggcagtgcgcgacgggccgctatgcgccaacgcctgacaccggacgtttgtgaggctgtcgacgcgctatgcgcgttggctgcacagcgctgggcggtaccatcagctgcctcagcgggcacgggcccgcaccggcaatcggccgcagtgcgcagactcgtcgcggcgcacgcacaggctcgcgcacacgcggtgcgctgtctcgcgtctgcggttgcggctgcggggcacagcgcgccggtacgagcagttgttgcggcggcagcggcagcagccggtccggctgcatgtgctctcagcgcagtggctgctgcggccgcacccgcaaccgacgccgtgatcgctgccacgtcgccggcgtcaccaccgctgcgcccacagcgcgtcatgtcagccgcggcgccgcctgcgcgtcggcagccgcaacacagcgacagcggcggtaacgaaggcgttggtcactttaaggcgacgcgtcggctcaatgcaagcgcccgcgtgtttgtgccgcgcactgccgtcactttaggcgctgcgactgcttcaccgccgccgctcctccctgccggcgccgtggccgcggcaggagccgtggcagccgctgctgtcggcccgccgccgtccgcagtggcgctgcctgcgcgggagcagcggcagcaaccgcaacaccaacacccgcaatatcgcggcgacaccgatgcggacgcggaggagacgaaggaaacggcggcgcgtgcacagtggcgacggcacgtgtccgcacttatcggcaaactcacggcggagacatgcgagcgcttggccctgcggtttgttgcggactcaccgggcagtttcggggcggacgtaccggaacgcgtgcagcgcgtgcgcatggccgatgccgtggcccttatcgtgtactatgcgcagagcgagtacatgtacacgccgatgtacgcagcatttatggcgcacgtgcgcgatgcgtttgcccaagccgatgtagcactggcggcggcggactccgctgctgctactgctgttcccacagcccctcccggtggtgccgctccggacggcaacagacaccacaagcccgcacggctgcccgcagtactgccgtgggatcgtgcacgggcgtggtttgcgaccgtgagcgagtgtgtgacgggcgaagtgaacgacttttttggtgccgacgcctttctgtgcactccaacgctggccgacctgcagccgcacaccaccaacagcagcagcagcagcagcagcagcagcaacaacaacaacaacaacaacaacaacaacaacaacaacaacaacaacaacaacaacaacaacaacaacaacaacaacagcagaagtgcgtatggcattccgctcgacagcgatcacgctgcggcggctgtcgtcgccgacgcagccggtgccagtgccggtgacggtatcggtttgccgatcgcctgcggtcattacgtgataccactcggcgggtggtgtgcagcggcgaacacagcggcgcgcgaacacgcctccggtgacgcctgtggtgcgtgggagctggtgccggagatggaggccgtcaaagtgctcgaagacctgctttcgtccgacggtgagcatcccgcgcctctgcacgctgcgtcgatggtcgctgctgagcgcgaacggcgccaacagctcatgacacgcgtacggcggcgcatacacgggtgtgtggcgttggtgtgcgaactgcacgcacggcacatggcgcggcgccgtgtgctgctgaccgtactgtggggtttgcgtggtgtggcgttggggaccggtaccggcgtagcggcaccgccgttttggtatggccatgcgccggtgctgccgcccacgtgggcgctggagatgctgtgccgtgcgctgagcggccgtctcggagccgcactgatgccgccatcacagccgccaccacagtcgccaccggcatcaccggcatcggcagcgccgtcgccagcactggcaccggcggtcagccgcgccggagagcgcgcgttagcgcttgcgctcagcgaactccacgcactgagcgtgcgcaaggatttgctgccgagtgcgcgcgcacgcttcctggtactcgacacactcgacgatgccgcacatcactgggagccaaattggcgcgcgcgggaacggcgcacgcgctaccaacagcagccgcagcagcacccgcagcagcaggcgtcaggggttggtgccgcagcgccgttgacatcgtagcagttcagtgttgtctgtgttttcagtctcatttgccgtcggcagtctgagatgtgccattggtct

SEQ ID NO: 13016 - DNA, 3099 bp, Oryza sativa
  ref <308>: DATABASE ACCESSION NUMBER: AK110364
  ref <309>: DATABASE ENTRY DATE: 2001-12-06
tttgaaaatgggaaaatatcatgacgacgaaatatggaacggatgcagcggaaacgatcatcggcagcaacgaatccgacttcctgattggcatgggcggcgccgacaagctcgtcggcctgttcggcagcgacacgatgtcgggcggcgatgacaaggatcagctggatggaggcttccagtccgatacgctcttgggcgacgagggcgatgaccggttgaacggcggctccggcgacgacacattcctcggcggcgcaggcgcggacacgatgcagggcggcctcggcgacgacgccttcaccgacaatatgatcggtgactataccggcgacgtcatcgacggcggcttgggcaatgacacggtgcgttttttcctctccgagcgggccaccggcgtggctttcacggcagcagatccgactgaaacggtcacgctgtttggcgccaaactccacaatatcgagcagtattacatcgacggctccaacaccggcgcggataacatgaccggcggtcgctggaacgatttctttcagggcaatggcggggctgaccggctggacggccaaggcggcgcggactatctgtcgggcggcgccggcgccgacgtgctgatcggcggccaaggcggcgactacatcaatggcggcgacgacaaggatcggctattcggcggctacggagacgacaatctctccggcggaaatggcgacgacacgatcgaaggcgcaaacggccgtgacgcgctctatggcgaagacggcaacgacaagctcgtcgccggcgcgggcaacgactatctgtccggtggcgcaggatcggacacgctggatggcggcgcgggcgatgactacatcatcaccggcgacggcaatgataaggtattggccggctcgggcaatgaccagatcctggccaccgtcaactcgggcaagaagtcaatcgacggcggttcgggcgtcgacaggctggaactgcgctatgtcaacggcgccttcaccgccaaagccgaaaacctggtgaacacgctgtcggacggaacgaccatccagcatgtcgaagcctatgatgtgcacggctccaacgcctccaatcagttcaccaccctcggcggcgatgacaatctctatggctatggcggcgacgacacgctgcgggcgggcgcgggcaacgactcgattttcgccggcgacggtcgcgacaaactctatggcgaggctggcaacgacatcatgttcgctcagggtgaaaaggacgtgctcgacggcgggaccggcatcgatacagcctatctttatgtcgacaactacagccagagcatgagtttcagcgtctccaagggcaagggcgtgctgtccaacggcacgacggccgccaataccgaagtcttcaacgttttcaccggttccggttccgacacgctaaaggcgggcgacgcgctgcaggtgtggttcaagtctggcgccggcaacgacaaactctatggcggcaagggcggcgatctgctcgatgccggcatcggacgcgactatgtcaacggcggcgcgggcgacgacaggatcatggatatgggcggcgacaacaccctgatcggcggcgacggcaatgacgaagtggacatcaccgtcatggaaaaatccagcgacgggttgagcaaagtcagtctcggcgcgggcaatgacagtgtcgagttcaacgcgggcctgggggacatatacggctccctggaagccgatggcggcagcggtgtcgattatgcggaagtggatcgcagcgagacgaccaaaaacctgagcttcgtgctcagcgccaatgcccacctcgtcaatggcggcgccgtcctcaagaatttcgagcaagttcatatctcgggcggctcgggcgccgatgacttcaccggcggcaagctcggcgatacgttcgagggcaatggcggggccgacaagctgaacgggctcggcggcaatgactggctctatggcggcgccggccgcgacaatcccaagggcggcgacggcgacgaccatctctatgccggcaacaactacatggagaccgatcgcgacacgctcgacgccggagccggcaatgacgacgtctatatcaattccggcgaccaggccgccggcggctcgggcacggaccgtctgcatctggatgtgtcggcgctcaatgtcggcgtcagcttcaccctgacctcagggaccgtcaagataaatgctgcgacgacggtttccggcatggaagccctggacttcaccggaacttccgcaggcgacgccgtcactgccgcttccggctcggatacgctgcgcggctatgccggcaatgatatgctcaagggcatggacggcgcggatttcctttatgacggcgccggcaacgacaagctctatggcggcgacggcaatgaccagctgacccgtgacgagttcaccggcaaggatctgttcgacggaggagccggcgtcgacacgctgactttcaacttctacggcgactcctcggtcaaattggatctcgcggacaacagcgtcaatgacgggctggcggaaggcctcaccgcattgaacttcgaacgggtgatgggcacggacaaggatgacgatatccgcggcgctggcgccagcgaatatttgaatggcggcaatggggatgacgtcctcttcggtcgcgccggcaacgacacgctagtcggcggtctggacggcgacttgttgggcggcggctcgggtaaagatgtcttcgtcttcgcctccaccatggatggcggcgacgagatcaccgacttcacccgcggccaggatcggctgtcgatcgacgcgatccacttcgacctgacgggcaagaagagcgtcaacatcgtggtttccaacgatgtggagttctctacgaccgcaccgaccttcctgttcgaaagcgacgctcaccgcctgtggttcgatgccgacggcaaggcgggcgaccaggaagccgtgcttctggccacgatcgacaatgtgaagtcgctgtcgcagagcgatttcatgctggtctgatcagatacgatatcgtcgaaaagagcagcggccggtttatcggccgctgcaatgtcgt

SEQ ID NO: 13017 - DNA, 3201 bp, Oryza sativa
  ref <308>: DATABASE ACCESSION NUMBER: AK110365
  ref <309>: DATABASE ENTRY DATE: 2001-12-06
acagcacacggtgctacgctctgattagacaacgttgaagtgcgtcccgttttggcacgtcttgcaagacactgttatacacctttttttgggctgaaaccgattgttgctgagtccttcacatattttcgtgtgtgtctctgcaaacattaaggccttgggcattggcaccgtaggcgtctagcaccgggcgcccacacacagcacccaatgctgcttctcagcaagatggcatccttcaagaccagcgatgagatgcgtaggcagaaggagctggaggaggccagaaaggctggtctggctcctgctgagctggatgaggagggcaaggagatcaaccctcacatcccccagtacatgagtactgctccatggtacctcaacagcgacaagcccacgctgaagcatcagcgtaactggaagcagcagctggaggacagcggccagtggtatgaccgtggagccaaggtgttccaggtcacaaagtaccgcaagggagcatgcgagaactgtggcagtatgtcgcacaaggtggccgactgcctggagcgcccccgcgccaagggtgctcggtggaccaacaagcacatcgcagcagacgacaaggttcagcagatacacctcaccagctacgacagcaagcgagacaggtacaacggctacagcacagacgagtacgctgcggtggtggagaagtacgagcaggtggaggcgctgtggcaggagctcaaggccaaggagcaggtcgaggagctctacaagcagggcaaggcggcagaggcagcggcagcagcagcagcggcggcggcagcaggggatggagcggacgcggctggcgcggcggatgacgcaaagattgctgatgatgaggatgcagcctttggtgaggtcaagaagcgtgtgcgcaccactgccggtggctccaccggctcggtgcgcaacctgcgcatccgtgaggacaccgccaagtacctgctcaacctggacaccaacagctcccactacgaccccaagagcaggtccatgagggaggaccccaaccccaacaggcccgcgaacgagaagacgttcttcggcgacaactttgtgcgcacgagtggggagtaccagacctggcaggcgctcaacctgcacagcatgcaggcgtttgacaagggcacggaggtgcacgtgcaggcgctgcccagcctggcggaggtcatgtaccagcagttcaagagcaagaaggagaagctgcagaccaagagcaaggaggaggtgcttgccaagtacggcaacacagctgagaagccccctgatgaggcgctgctgctgggccagaccgaggcctatgtggagtacgaccgcaccggccgcgtgatcaagggccaggaggtcaagaagcgcagccgctacgaggaggacgtgctcatcaacaaccacaccgccgtgtggggcagctggtggggcgacggcgcctggggctacgcctgctgcaagtccaccgcgaagaacagctactgcaccggcaaggccggcgagcgcgcggcagcggagtccgccgcgcagatggtgaagaacctggaagccaaggcggcgcgggctgctgaggaggctgaggcgcgtgccaagtccacgctcagcaacaagcacctggagaagggccaggcgcactggggcgacgacgcgccggcaggggacgaggagctcgacccggacaaggtgaaagccgcgctgcagaagcttgagaaagcggagcgcgaggcagagcaggcagggcaggacgagcgcaagcggaagttcaacagcttagcggacggcgggggtgacgaggcgatgacggcggaggagatggaggcgtaccggctcaaaaagcagcggatggaggacccggcagcagcgttcagggacgggggctccgggacagacggctacagcctgctgtgaggcagtgcggctggcatgctgctgctgctgctgctggcgccagccgtctgctgtgcctcacggagcactcagcttttgagagttggtgcaagggtggtgcgtggttgcagacactctggctggccgcttcggcacactagcagtggcaggacttgcagccacacttggcggccgcgtgttgcagcttcatagcaggttacggctgcctgcaccatcagcagcactgcttccgtgctgcttaggcatgggactgccgtcacagtgaccgtagcttcatcaggctgccgggtttctactggccaactgcctgttgcttattgattgtgacttgattgtaacctgtcaaatgggttgctggggtgcctgcacgggcggcacctgtttgtggtggtgtgcacatgaactcaacactgtgtgatggagtcggtattgtttcatgcacttggtgggtggggcttttcttggtgtacctgtagcatatgcttgtgcgtgtgtgtgcaagcggttctggctgcagcctcagaataccaatgtgctggcatagcatgccatgccataccctccacgcatgttttgcagctgctactccctcggggagttgcagtggatacggttgtaaaatgcgccagctgtgtgtaagggtgcagttgcaagattgctggtgctggcatgccaagtgctggtcacttctctggcatcaaccatcagattcagggtcagccggttggcagattagcatgtgctgccttgccatcgcacatatgtagtggttaagaatgccagctgctgtgcttggccaattatgagtggtgtagcgtggtggagtggggtgtacataggctttcatgtaccattgaagctgctattctgaccctgcagtggcacctgcctagttttgcactggactcagcacgggtgctgtgctggtttaccaggtgcagccccctgtttaagccttgcagagtacgatgggcatgagtgcagtttaactccccatagtgtcctgtagatgcagcctgtgtccgtgatagcggtctgctgcctcctcaccagtggccttcacctgtgaagtagtgagcagcattaccgctgctctttgctacagcatgctgcatgactgctgcttccctgaagacacctggcagcagcgtccctgagctgagtgctatggcttttttgttgttacaagctcagacatgtatgacatctccctgccgggcattccctgttcaagttgttacaagctcagacatgtaagacatttccctgtcgaag

SEQ ID NO: 13018 - DNA, 3832 bp, Oryza sativa
  ref <308>: DATABASE ACCESSION NUMBER: AK110366
  ref <309>: DATABASE ENTRY DATE: 2001-12-06
aacgaacgctaaaaaagtaacagtttctgtactttattgggagtttgtgtgagatgacagacaccaacaagaaacaagagcaacaggagaaacaggagaaacaggagaaacaggtgctacgaggaccgtgcttttttccgcacgtgggaagccgcggtgaaccgggctgccgttattactacgactccctcctcggcaggggcgcctacggcctcacatatcgcattttggacagcatcacagaggccccggtggcggtgaagattattccgctaatgcctaccaacggcgacagtcccacggctgctgcaaccgcgatgaacccccctgctggacttcccgcggttcggttgtcgagtcgtgtccgcgtcgaggccgaacttgaacacatgaagtcagtttccgaacacttcgcttttccgcgcttgcttggctgggagttcgccgatttcgaagggcgctcttacgcgctactttttatggagtgctgcagtggcgaccttcacaaggccatcggcaggcgtgcagtgcaactgccagatgcgccgcatcgtatgtcgctcctcccattcaatctcgtcgatctcgagctcatttttgtgcaactcatgatcgcactcaaccatctacatcgcaacggcgccatccaccgcgacatcaagagtgcaaatattctgatgacagagaaaggtgcaatggccttctacaaactttccgatttcggcctcgcgacgctcaagagacagccgcgcacgaacgtcggcacgtttgagtacatggctccagagcaatacgacaacgatcaatacagcaacaaggtcgacatttgggcggcaggtgtcgttatgtacgaactgatcgcgctgcagcgtccgttccagccagacgctcgcacgtttgacaagtttgcgtcgaaggtgcgaaagcgcgaccttcgcgaactcagtccaaagaattttggctgggtcgcgaagtacagtaccgaacttttagcgttggttcatcaaatgctcacggtcgatccggagcagcggccgagcgcggcaagcctgctgcgcacccattacgggcgcagtgcggtggataatttcctccggtggaccttcgccgtcgaccctgacttcatgcagcgagtcgcgctctcgctgcagaaggacgatgtgccgctaccagagtggcttctcgagcagctcaacgccaccgctgcggccgctgccgccgctgctgatgcagagttggacacgctggacgacacctctcttcagatctcgctgctgctctcggtgacaacagcactagctcggcgttcactcgcgcacagccgttggtaaagttgacagcgtaccgcaaccagaactcacaggcggcgaactgggcccgataggcgtggtagagcgagagaccgacgcagacgatggtgaccctctcatcttcgaccgcagcgcgcagcaggctgctgccgactccgaagatgatgatgacgacgacggtgctcaaggcggcgacaaaaaggaagacgcggaggacgcacgtccgtggacgtctctcgaaaacgatgcgccgccctcgatggtgatggcgtctcccgctgcgaaggaggacgacgaggatgacgctgaaccgacgcctgcgcgtcactcagagtccatcgctgccgacctgcccacccagtcggtagctgcagcggaaccgacgatacctgtgcagccgcccagtcacgacgccaacgcatcgccgaacggcaccacatcgtcgagggcgccgtcaccgctgagccctgcccgtaatcgcagggttagcttcgccgggcagcccgacggagccgcgatgcccacgctgcgccgcgccgtgcttgcagcgccgcacgcgtccatgctttcatcgctagagtcgctcacacggcaagtgcacctcgacgcggtcgaagagcaagaaagagtggcgcttctcgccgccgcgcagtcggaccgggagcgtatcaccgctgcgcttcgaccgccgtctcctcctccgcagatttacaacggctcggtgccctaccgcgaggacctatgccgccgcgtaccgagcgagggcagcagcagcgcggacgacggctggtccgagggtgtgggtggcgcggagaccgtgcgtgtgccagaaccggatgacagcctcaccggcgacgtcgcggcatcgacgtcagcgagcccgggtgggtctttccatcaagctcggccccacggggcgcccactggcaagcaccatcaccacgccgcgaccgtcggccgcagcagcgccgcccgtgaccgcgcgctgaagcagcaggcgaggagccgcatggagaggcgagtgatcgaggtggacgagggcagtgaacgcgccgcgctggagcatcgctacttgacgcagagcctacccgccgcgcatcagcacacgatgctacactccatcgaaccctttcaccggcagcttcacgttaacgcgtgtcgagaccacgtcgcggacgctgcgatacagctcgaagctgcgacccgtgttcaattccttcgagatgagttcttggcgccgcacggactcgaccggccatttggaactgacttcgatgcagcgctgcgcgtcgtgtggcagcgagtcttcgtcggtaaaatctacggcgcggaaatcaccgcgcgcgagcgttttctgaggcttgcgattgaggccaccgagcacgaagccgcggtcctgcttcgcgaccgtcgtctcgaacttgagcggctcgcactggacgacaccctccgccgcgcggatgagctttgcgatgccgtgacggaggccccgctgccaacgctgaagaccatgctgccgccgccgtcttcgacaccacagagcgatggtgatatcggcgtggactacgatgaagacgacgcagcctctgcactccatttcaaggacgatttgacgccgcgcgctccaccgcgacgaacgactcaaagcgccgcaaagcgtgatgcgatcgcggtgacggcaaagcttcgggaaattcgtggggcctaccgagcgagtcccaacacaccgtccagtcgcgcgagctccgcatcgcgttctcgtcctctcaccgcgcgacgcagcagcgataccgcgacggtcacggcgctgcgcgatcttctcgcaaaaaccgcgacgttgccccgcccgaacacggttggcttcgacacgcccgcgtcgaccgttggctctcgagtggtgctcacgtacgagcggccaccgctggtccccgcgccccctcaaacgcacgatgaacacggccgctctctcgcgttgcagcgaagccgcgaactcaacgacgccgcggcgaaggagcagaagggtcgtgcgtacgcggaggtcgcgtctctcactgggaagccttccgtgaagcccgcgccgccccctccacgcgatgctgttcgctcttacgcgcgtgtgttgcagcgtcaggagatccaggggacggcgacggcgcaaggctccgtcgccgcggccgtcgacgaagtgcttcaatggatgcgccccatcgcctcgtccactctggggctgccaaccaacgtggcgcccgcaccggcaccgcgcgcgcggcgcaaagccaaaaaagtgaagcggcgaaaggatgcacacgccactgtcaacgtggaggaagcagaaggggaactcttcctgggcagcgatgatgacggtgatgacgccaacaacaaccaagggagcgacgcctcgcccccctcacgtgaccgcgatgacgcctctacgacgtcgccaataggcgttgccgagctcgcgtcgacaaacgcgtgaccgtaccgaaccgtctgtgtagcaaaatcaccaatcttct

SEQ ID NO: 13019 - DNA, 3432 bp, Oryza sativa
  ref <308>: DATABASE ACCESSION NUMBER: AK110367
  ref <309>: DATABASE ENTRY DATE: 2001-12-06
aagcgaaaaaccgagtttgtatactcgataaattaagcaattcgagctcaaacgcggtcttaaaacaccgaaaagcaaacaaaaaatcaaaaaacatcgaaaatgtctgacgataagaagaagcagaaacgcaaaatggccaaagccatcgccgaaaaggacaaaggcaacgcggcgttcgcgaagggcgagtacctgcaggcagtgcaggcgttttcggaggcgatcaaaatcgatcccgaaaatcacgtgtactacagcaatcgcgctgccgcgtatgcgaagttggagaagtacgatgagtctgaggcggacgcgcgccgctgtatcgcgctcaaacccgactttgtgaagggctacgcgcggtacggcgccgctctgttcgccaaaggcgacgcaaagagcgccatcgaagcgtacagcaacggtctgaaacacgacaaagacgataagctgtgcaaagaggggctgttccagtgccagacccatatggagtccatcgataagcagaaggcggaggaggcgaagtgggccgttgaggcggagcgtcagaaaaaggtcattgcagaccgtgaaatggcggcgtttcaggcgcagaaggcggcagctgcggcggccgctgcggacggtaaaaccgctgccgcgccggcgggctctgccgctccggccggcgccactgccggtgccgcgggtgccgctgcgacggagggagacgacgcaaagcacgcggcacagctgacgggtcagggctatgggcagagcgcgctgcgctccgacgcggagtataaggagtttctgaagtggaagcagtccaaagagtacgccaaatacgccgctgacgccaccggtgccggtgccggtgctgacgcgaaggatgcgaaggccggtgacggcaaagcgggcgacgcgaaggcgggtgacgcgaaggcggcggctgcgacggagtatgtgatcggcatcgatttgggcaccacatactcgtgcgttggcgtttggaaggacgataaagtcgaaatcatcgccgacgcgcacggcagccgcactacgccgtcgtacatcggtctgctgcccaacggcgagcgcattatcggcgaaccggcgaagtcacgtcaggccgcatttcccaaaaacgtgctgtacgacatcaaacgcatgattgggcagcgcttcacggacgcgggtgtgaccaaagacgtgcgccatttcccgttccgcgtggtggaggggccggactcgaagccgcaggtggaggttgaatttgagaacaaaacgacgaagcgcttcgaccccgaagccctgagcgcgatggttctgagtgagatgaagagcatcgccgagacgtacctcggcacgagcgtgcgcaaagccgtcattacagtgcccgcgtacttcagcgacgctcagcgcaacgccaccaaagcggccggcgccatcgccgggctcgaagtgctgcgtattatcaacgaaccgaccgccgcggcgctgtcgtacggcttggatctgcacagtttgggcaagaaaaagcgcgtgaacacactcatcttcgatttgggtggcggcacgttcgacgtatcgctcatcaccattgagggcggcatcttcgaggtgaaggctatcggtggtgacacgcatttgggcggcgaagacttcgatcagaacgtcgtgcaacacctcattgcggaggtcaaaaccgcgggttgcaccaaagacgtcaccgccgatctgaaggccatgaagcggctgcgcgctgcctctgagaaggccaaacgcgagctgtccaacagccagacggcggacatcaaaatcgagaatttggtgcaggactttgactttacgtaccgtctgacgcgtcagaagttcaatgaactgaacaacaacctcttcctgcgctgcatcgacaccgtcaaacacgtcatgaaagacgcgcgtatgaaggtggaggacatccatgaggtggtgctggtgggcgggtcgacgcgcatcccaaagtgcaggagctgctttcgaagtacttcaacggcaaagagctgtgtaagagcgtcaacccggacgaggccgtggcgtacggcgccaccgttcaggccgccattctgtccggtgtgcgtacgaaggcgacgaaggacgtgcttctgatggacgtcacgccgctgtcgctcggtatcgaaaccgttggccgtgtcatgtccgtcatcattccgcgcaacagctccatcccgacggtcaagacgcagacgtacaccacagaggagaacttccaaaccgccgtggacgtgtgcgtgtacgagggcgagcgcctgaaaacggacggcaacaatttgttgggcaaattcacgatctaaggcattgagcgcgccaaacgcggagagccgcagatcgacgtgtcgttctccatcgactccgacggcattctgacggtgagcgcgaaggaccagaagacgggcgcagtcgctcaaatcgaaatcaaaaaccgttcgcaaatgaacaaagagcagttggacaagctcgtggctgaggctgagcgctacaaaaaggaggacgaagagcgtctgaagcggacggaggcacgcaacgagctcgagcgtgtcattaacgagacgatggatctggtcgcggagctgcagaacgcggatgacccgacggccgaactcgtggctgaggccaaaggcgacggcgcggcggctggcgctggagcggggaagaagaaggcgggtaaaggcaaaggcggagcggtttcgaagaaaaaagccgaagagaacaagaagttggccgcagtgctggaggcggcggcgacgaagacgcaggagtggttggagcagaatcaggacgcgaagcccggagagctggcccttaagcgccgcgaactcgagcgccgcatccagggacgtgccaccaaatagacgcgccacaccacatggaggcgccaccgcatggacgcgccaccaactcagcccctcaccgaccgtctgacgcgccgactgacctgtgccgccgccgcgaacggccacgcggggtagtgcctgactgaacggcacccgccggcccgcgacgctctgcaatccgtcaaatcaccaaaaacttacgaaaaacacaacacaaaatcgatctcgctcacaacacaaatggccaaatcacagcccatcctctgccgcccgtcagtcggccccgcaaccgccacacccaaagcccgcgatcggagcggccgcctccgctgccgccgcagcgccgacacccatcgccgcgccctctgcgtcgcaccaaaagctgtgtgccgccgaacgttttgcgccaaaatattccgccgctgtctgtgccgctgcctctgtctatggctttgcgctgccgaactcactgccgccgcagcccgtagcgccgccgtccgccgttccgctttggctttgggttgtacgcggaaccgaacagtcattcgttcac

SEQ ID NO: 13020 - DNA, 3064 bp, Oryza sativa
  ref <308>: DATABASE ACCESSION NUMBER: AK110368
  ref <309>: DATABASE ENTRY DATE: 2001-12-06
gagtttttggctactcaccaacccgcacggcgcccgctgcccgtatccgctctttcgcgattgctcccctaacccgacgcttcagagatctgcgacctctccaacatacaaccctcgacgcactacggcgccccggcatcccatcgccagcgcagcactcgctcgctccccgccgcccatagcaattgcgcaagcccgcattttgccttgccctcagcgtttcactgcgcgcatgacgacgcagcgtcatcgccatcgcccaaccaaccccaacccgcttccatgagaacacccttgctgagtgcaccatccgttttgcctccatggcgaaccacccataccgccccggcggcctcgaattccgctcgcagtccttcgaccctccgcgcagcaacaacaactccagcatgaacaacgacgtctccaacatggccagcgcgagcatgtccagcctgtcgctcgccgaccttcccagcccgcgcgctggcgaggtaccccccgcgctctctccgctcgacgctcttgccctccagggacgactgctggccaagcgcttcgaacaggccgacaaggctggacgtcgcctgagtcgactggcgcccctcacgatacagaacgagttcggcaaccgccccggctacttctccaacctgtcctctggcgtcaattctcccgaagaaggcggccacattgcgccccagcagcccgaaccttcgccgcgacagcaggtacctgacaagcacaagtccttctaccctcaattcggcggcgacgacccctaccatggacagaatctgcttgcgcgcagccccatgggtaccattgaggaaagcagtccactcagcggacccaacccacctcaagggtactttgatattcctcgcgcgcagtcgcccgactcagtggaacctcgcattggaggtctacgtgaagctaccccaatcacacccagtgcgcctgcaccgagctcgcaattgtttctgagcccgcaacggcagatgtcaaccgactcccagcccagatcacagcctcgaagcaatctcctccccccacggtcctcgagctcactccatggtcaacgctcgccgcgcatgtctcctagcatacgctctgttcctggggacggcgggtctgatgttgaagacatgtcgctcagcggttcctacgactctctacagcagaaccgcaatctgtcgcccagctcgagcctgtcacgcactcactctccctttacacccatcactggctcaactatccctcggtcaccatcagtgtcgtccgacatgtctgctagcggccccctgcctcgtccctcgtacaatttttcgcgtccaatcagtagacaaagcactaggccgtctatcgacacccgaccatccatggacgtaccttcacggcagatgtccgatgacagcgcctacatgaggccttcttttgacagtcagcctattcgccaggactctactgacatgcctaccacctcttacgctaacgagactgtgcatacgcctgtcagtatggctagtgaggatttccgtcgctcaggcgacttttctaccaaccctgcgccaacctatacctacaccaagttcaaccttcctcgaggcaggccagtggatcgaagatcaatcggcatcgaagacttcttcaagagccagattacctgggatcagccaacaaaccaggaccgccctccttcacccatttcaccaccgagatcttttgattcatcacgaaaccagcagggtaccacatccgcacgcgatgcatccttcgaccgtggagctccatcccttacgtctagcaacagcacgattcgaggccgacgaggcggctctttcgatgtcactgcgcaagagcactgcgatatcggccttgatcttcacgaggctggtgaattgctcaaatcaacctaccatctccgtctggctgcgcgctcgggtcttcctgaggccatgttctggtatggtctggcctgtcgacacggttggggcatgcgtgagaacaaggctgaggctctacaatggcttcgccgtgccgtggactccggtcagctggaggtcgcggaagacgaagatccttcaaagcaaggacagcctgccgatcagttcaagaagaagcagcgtagagcacagtatgccgttgccatctatgagcttggaaagtgttacatgaatggctggggtgcttctcaagacaaaccactggcacttcgctgctatgagatcgctggcaactggggcgatgccgatgctctagtcgaagctggctattgctacgccgaggccgtaggttgcaagaaggatatgaagaaggctgcgcgcttctaccgcgcggcagaagcgaagggtgtgagcatggtgggcaacagctggatctacaaggacaagtacatggaagatggagccaccgcacccgactcaagatccgtccgctcaggacggtccgcgaagaaggacttttccgagaagaaagcccgagacaagagtcgaactcgtaccatctttggtcgcaaaaagagtaacaccgcttcctcgacataaccgaaactcctgcacatgtgtctacgattcgtccctttgtacattggcgatggcgtccctggttttgcgacgggctcctcgattttgcatatacctcttcgattcccgcgttacctcttctcgacaatgtttttatgttcggcggtcacaattatcgatacctgcctggcgcatggcttggcattgccatattcccgtcatctcgacacacatttctttttgcttttggtcgaaagctatctttcctatgtttatgattcttacatctcctggtctgagcatctgttcttgtaacgcaagcatcaacgataagctgcgtcttgcacataatctggttcgatacctatgtatcgattgggctacgacgtgcccctgtaatgagtgcggtatattaatttctgttatccgtctagatctgacggcttgtgtatagggacaggttggggaaaagaggggtagacttcgtgatgggcattagttgtaaattagtcctattcgaatcaagaccgaatatgtaacac

SEQ ID NO: 13021 - DNA, 3080 bp, Oryza sativa
  ref <308>: DATABASE ACCESSION NUMBER: AK110369
  ref <309>: DATABASE ENTRY DATE: 2001-12-06
aatttttgctttgcgtttcgtctgaaaattgggatcgcaatcttacctcatcgactcctttccctttcttccttgtgcatttgggaccaaacactgaacctcgagtcaattttgttgtcaacatgtcgggtgagaaagttccactccctgtcccagagaaggataagccagagacagacgctgagcgagaagctcgccttgccaaagagcgtgcaacaggcaaagatgagctcagagacctccaacagaaagtagagaaagctcccacagaaaccacgtctgctgatgttcaacacgatgacttgtcggaagacgatttgaagctgaaggagaacctggcgatgcttgtgactcgcattaccgagcccaacaacccacctgagttgcgcaaatcagcgattgatgctctgagcaccgaaattcgctcttccaccagctctatgactgcgattcctaagcctctcaagttcctgcgcattcactacgacacactgaagaagttcttcgagacgcccgatgccaaacccgttcagccatatctagcggatgtcctctctgttctttctatggtccatcaacaagagagtgcgcgagacagcttgaagtatcgcttcctgggttcgcaaggcgacattggtttctggggtcacgaatacgttagacatcttgctgctgagattgcagtggaattggaggagcgcgagaaggcaaaacaagacaccgccgagatcttcaagctcgtaggtgaaatcacccccttcttcatgaagcacaacgctgagaccgacgcttgtgatcttctccttgaggtggaccgtgttcctgacttgaccaagttcgtcaccgaggacaaccatgctcgcgtctgtgcataccttgtagcttgcagcgagtacacctctgacgccgaggacaagctcaagctgctcaccactgccttcgagtccttgcttcaggttaagctgtaccccgatgctcttcgcattgccttcaagctctctgaccctgagttggtctctaaagttttcaacgaatgcgaggacgagctggtgaagaaacagctcgctttcattgctgcgtctcatcgctacagcgtcagcgccctgagcgaccagtcacaggatattcaggacatcgtcggaaacgttcatttggtcaaacatttcaaagttctggctcaagatctcgatgtgcaagaagccaagacccctgaggacatctacaagagccacttggctgagggtggtggccccatgcgtcgtatgcgtcaaaaccaaccccagaaggtggacagtgccaagcaaaaccttgcctcctccttcgtcaacgcctttgtgaacgtgggtttcggtaacgatgcccttttgctcaccaaagattccgagtggctctacaagaacaaggagcacggtcagctgagtgccgcggcatctctgggtcttttgatgctatgggatcaagaaaacggtgtcaacgccattgacaagtacagccacagctcgcaagtccacatcaaggccggtgctctgctggctcagggtatcatcagcaacggtgtcacctcggagatggatgcgtctctggctctgctgtccgaccacctcaacagcgaccaacacctcatgcgtgtgagcgctgtctttggtctcggtctggcctacactggtacctgccgcgaggatgttctcgagcagcttgtgcccatcgttgtcgatcctaaccaaccttttgaggttgttgcctttgccgctgtgtcgctcggtctcgtgtttgctggcagcgccaacgaagctatttcttcaactttagttgagaccttcatggagcgcagcgacactgatcttcgcgactctttggctcgtctgatggccatcggtctcggtcttcttttcctcggcaagacggaccaaacggaggctgttttggttgctatcagcgccattgagcatcccatcaaggatttcctcgccctcactgtggaaacctgcagccactttggcagcggtgatgttctggaggtgcaaaagctgctctcgattgctggagagcacattgaggagcccgagaaggaggagaagaaggaagaagccaaggatggcgcggcagctgccgccaaccctgctgccaatcccctcctcgcctcgctgggtcttggaggcgccgctgctggagctgcggcgggtgccgccaaggacaaggacaaagaggagaaggatgagaatgtcaactttgctcaacttcaccaggctgtcgctgttctgggtattgccatggtgaccaccagcgaagagctcggtgctcaaatggctcttcgatctctcgatcacgtcctgcagtacggtgacgtgaatgtgcgaagagcgattcctcttgctttggccctcctttccatctcgaatcctcgtctcagcgtggtggacacgctaagcaaactcagccacgatgtggaccaagaaatctctcagaatgccgttctgtgtctcggtcttgtcggtgctggtaccaacaactcgcgcattgcctccctcctccgtcaacttgccacgtactactccaagagcccaaccatctcttcctggtccgtatcgcccaaggtctgctgcatctgggcaagggtctcatcacgttaagcccctaccacagcgacaaccttttgtttattccttcggccgccgctggtctgctggttgttctcttcagcggactcgacttcaagaactctatcctctccaagcgacacttcctcctgtactctcttgtgtcggcagtgcgtcctcgcatgctcctcaccgttgatgaggacttgaagcctgtgcccgtcaaggtcaaatatggtaccagcgtggataccgttggacaagccggaaagcccaaaactatcactggtttccaaacccacaacacccctattttactttcgcatggagagcgagcggaaattgccacagatgaatggattccgttgacgtccgtcatggaggatatcgtgatcgttcgaaagaaccccaacgcaactaaggagaatgagtagatgtcatcaaattccgctcagacgtcgtaataaatcatggcactgaagt

SEQ ID NO: 13022 - DNA, 3020 bp, Oryza sativa
  ref <308>: DATABASE ACCESSION NUMBER: AK110370
  ref <309>: DATABASE ENTRY DATE: 2001-12-06
gttgtgttgcagcgagccttgcgttgtgtagaatcagccgcacccatacaccggcgcagcgcctgcaagtgcccaagtgattgtgtgcgaagcttccaggctccctttgacgcttccaacccacacattctattcaccaaagtaccatggcagccacaatgatgaaggcaaaccagcagctggctcgcgccagcgtgcagggccgtgctgctcgcgtctcgtccaggcgcgtggtgcaggtccgcgctgcagctgctgcttctgaagacctgggcttcaagaccatgcggtctggagtgaaagaggcagcagctgagagtctgctgactccccgcttctacacaactgactttgatgagatggagcagctgttcagccagcaggtcaaccccagcttggacatggaggagctggaggccatgtgcacagagttcaagaacgactacaaccagcgccactttgtgcgcaatgacacgttcaagaaggccgctgagggcatcactggagagacccgcaagatcttcattgagttccttgagcgctcatgcactgccgagttctcaggcttcctgctgtacaaggagctgggacgccgcctgaagtcctgcaaccctgttgtcgccgagatcttcactctgatgagccgtgatgaggcccgccacgctggcttcctgaacaaggccatgtccgacttcaacctggctctggaccttggctttctcacaaagaacaggaagtacacattcttcaagcccaagttcatcatctatgccacctacctgagcgagaagatcggctactggcgctatatcagcatctaccgccacctgcagcgcaacccagacaaccagctgtacccactgttcgagtactttgaaaactggtgccaggacgagagcaggcacggtgacttcttcacagcaatcctcaaggtgcgccctgagtttgtcaacgactgggtgtccaagctgtgggcccgcttcttctgcctgtctgtgtacatcaccatgtacctgaacgaccaccagcgcagcgccttctacgagagcctcggcctcaacaccacacagtttaaccagcacgtgatcattgagaccaacaagaccacagagcgcatcttccctgctgtgcctgatgttgagcatccagacttcttcaagaagatggacaggctggtggagctcaacacaagggtgattgagctcggcaacagtgacatgcccgcccccatcaaggcccttgcacgtgctccatacgtcgagcgcatgatcgccgggatcttccagattttcatcatgtcaccaaaggacaccggcagttacgacctcgcagctgacaaggcagagctcgtgtactaagcagccacagctggtccactggatggctgcagcctagcaggggatctggctgctgttttgtttcaggcacacctgccgattcctgcaaggctgcggctagctggcgtttttagctgtaggcgtatgtgcacccagctgctgcagtgggagcagcaatgcttgcgtttggcactgtgtgtgtcgtgtgtgtggttaagaagagggtcagcaggaggtgacaattatatatttgcatgctttagcacgcagcacggcagccttatgtaggctctctctgcggctgcctgctgctccttgagagtccggcaacggttgcctttcagcagggtagtgacacagcagtgtgttttggatgccatactcgcatgcatatggctaaaagcatgagcaacagacaaggtgtgcaacattgcgcaatagcagcacccattgtagcatctctggagtgctttggctattttacgtgtcactgcagtagtactgctcgcacgtctgtttgtgtattgttgcccgcatggtgcatcccgtcactgttctggtcacggcgggttgggtgtggtacatccctttggcgggcctctttctgtctctgtctgctggccgcttggcttgcagggtggctgacaggtgcagtgctcgactgacgagtgtgcgcatgcaagcagtgcatccaggcagcgcatgcccttgagattgcggtgtgtgcttggctcctacttgggcagctgtgctgtttgtgctgagcttctttgcagcaggtgttgtcaggtgcttgccagacagcacggctgggttacattggagattctgtctggtccccagtgctccagggagtgtcctgctcgctgttattctggtcacatgcatagcgagcgctgttatgagtgtcgggctccgtgagaagcgtgtgcggttgcgcactaatgtggtgcaggtcagcagctgatcagcagctgatgcagcctgctgaaaagcaccagcaggcatgtgcatttgcaatgcagctgcacacacacagtgtcgactgccatcgcggctggtgcagcatctggttgcgtagcctgcagctggtggtcaacgtgctgcattctcatgggtggttgtctgttgatgcatcaatcagcattagcagtgcctgccagtggctataagcagcatttctgctgggtcaactggtggcaaaaactgctggccaattgggtcaaggtatcgcgtcgttttggtttggtcattaagtttagtcggactgacagcgctgtgggcgtggctgtagttggctgctgagagctggcagcaagccagctgtgcttgttctcttgagagtggcaaaggtgcagggctgagtgtttgaagagggtgcattcgcttccaagttcaatgaaaggagcttgataggatttgctggcataagcaagcagaggcgcctgctgaacctgttggctctggtgtgtcttggctgtgcagcggcgagcaacccggcctgctgaggcccagcctgtctacggtggtgggtgcttccagcggccaggtgccatggtgtgtgaagtgtagggtgtttgcttcagcaacaccagtgtgtctgtacgctttcaacacgtgtgagcgtgcacctccggagagtttacccttacaaattgtgaaaaggtgtaacaagcgatccag

SEQ ID NO: 13023 - DNA, 3299 bp, Oryza sativa
  ref <308>: DATABASE ACCESSION NUMBER: AK110371
  ref <309>: DATABASE ENTRY DATE: 2001-12-06
attgcaacagcatcgcaggcgtgtgcgagaggttctacaagcttagcagagagtgtgtctgcaatggctgaaagcaatcctatgaatcgcagcttttctgttgatgatctggtgggcggcatattcaggcttggccaggcgggggcagcttttggcagaaccgattctgaagcagcatttcaggagttcctcaagcgcatccccagcgcgaccaacctagcagccaaccagcagtatgagcccagccagctgcaacagcaggcccagcagctgctggccagcggcagtgcaggggcaaacaacgtgccagcaagcctgcctgaagcaggacaagccggagaaggcggcatgcccagagtgccctcgttggacgtattgcggcagctggtgatgcagaatccaggcttctcagcgccacccgtcagcgtgaaggcagaggggtctgcaggcatgctggcacccccgtctgcagctacaccgcctgctctatcggccccactgccggcgctgtcaatggcgcctgcggtagacccagcctcgctgtcagcggcagtggaccctagcacgttgtcagtgctgggcggagtgccgggcctagcagcagcagcagcagcagccaacccagcacttatggtgaacccagcagctgccgccgcagccgcactgcagctgcagcaattacaagcgccactgcgcatgggcacagtgtctgggcatgacaagtcggactatgataagtcagagacaaggcggcagcgcaggatgctgtccaaccgcgagagcgcacgccgctcccgcaaacgcaagcaggagcacatgcaccttctggagctgcagatagaggatcttgcggagcagaagcgtgagaaggaggccattgcagacatggctgagcgcaagtgccgcaccctggaggatgagaaccagcgcctcagggaggagaatgacaggctgagggacgagctgcgcttcctacgctctgagctgactgagcgcaaggagcgcaatggctactacaggcgtgaacacagttcagacggtgagcaggaggcggagaacggcaaggcgtaccatgcaggcagcaagcggcagcggccatcagaagcagcagctgcagacagcaagggcgctgaggtgctgtacaaccagcagaacggcaagcagcatggcgttggtgagggccaccccacagaccccgctgtggagggtgcacagcagccggtgggcgaggacgatctgcagtaacgtcgcgccagctagcactgctgctgcagctgctgagggctgctggcatgcgtggcttgcacgggtgtgttggatattgcgggcagtgtcagcaaaattgattgtcgcatctgcaacagcagcagctgatgcttgcatatggccatccgttggtgcgggtagtgggcgccctgccactgaagctgctgtgcaacatgcagcacgcaataaaagcgacatgtaggcaccataggccgagcagcctgctgagcagcagctgctgcgcttgcgttgtgagtggtgttgtggtttttcccctgcccaacagctcacttgcctgccttttattgttatttgtgaggacagttattgttttgtatgtgcatatgtggtagtgggcataaggggtgcagcctcagcagcatgtgtttacttagcgcgttgaccatatatctgtgagtgtgatgctgcttggctgtgtgcaaagtggggcgtgctggcaatgccttcgagtgttcctgccctgggcatctgctgttttttcttctttgttgtgactgtgattaacaagctgctagccaaccgcccagcagagtaattggcaattttgtgctccagctttttggggagttgtggggtggaacgcgtgtggcgggttccaagctggacagtgtttatgaccctggtgtgttgggacagtgaccagaacagctagggtggtggtaggcgggacgcagatcatgctgtgcatgcacagcataggaagctgctgatgctccatggatgcttcctggccccaacaacagagattgcgggggcgtggctgctatggttgtgcatgtgtcttttgtgacgttggcgcatcaattgtccgttgctggacgctgcttttgcagctgtgacactctcagcaacagcacagcaacacagcgagcgactcatgcacctactgctacatttactgcaagatgacacgaatggcagcggcacattggtgatcagtggcaggtcgcgtgatggctactgtagatgcagcactctgtgcggtttaccgaccgctgcgtgcgcgctgctgtgtttgatgcacactgaccaactggtcacgtccatggacttgactgatgctcactgcactacatgtgcgggagctcctcaacccacttgctaggttcttttgcgctgatgctacttgtggggtcagcgcggtggcaaagcgttgtcagtgtactgccatgctggcagcacagtttgtaagctggcaggactagcgcccttggcgcacgtgcgtgtgtgcggatgtgtgatgtgtgtgcacgtgcatgcgtgtgttattcctcagctgccttgcgtgcgtagtgggcttttgcacgtgggcgcctgcttgtagcagcatcaacagcagtgcatgctgtggcgcagcaggtgccagtcaccaaacgattgtcttgggggttacactgtgagcacatctcatctataactgtgtgtgcatgatgttaagcaagcaacatactgttagccatggcttggagtcctccgacttttcatacatgttggaggcttctttcccgctgctcaacgctgctgcaatgcagcttctcagtgcggccatgccatggttggtgtgcgactcgcgtgtcactatcgaccgtctgcattgcactgcaccggcggtgagccttcacactgggtgtgtttgtgaggcacgtatgtggtagaggcatacagggtgggtgcatcaacctaccactgcaggattcagagcaggctgacagagattttcccattgtgctgctgggctgcgtgtctagagcacaactctgttggccgtctaacgtacttctgtgtcttatacatactgtgcttcttttgcgtgcgatgcttgtgtcaaccttattggttgtggagcatgtgacagcagcagggatgttgctggctgaatgccggagggtgcaggggttttgagcgttgggcaaccgcttgcagctgtatgggcgattgggcccttgacacggcgactgatgctgacctgttgatgtaacatgggggtgagtaacatgctgatgtaaaaaaac

SEQ ID NO: 13024 - DNA, 2320 bp, Oryza sativa
  ref <308>: DATABASE ACCESSION NUMBER: AK110372
  ref <309>: DATABASE ENTRY DATE: 2001-12-06
gagagcggagagcgcgggaacggaggagagagagagagagagagagagaagcaccgggaggaagaaggaagcggatcatctcgaggtccatggacggcaacaagcggcggcggacgcggaggcggctatccctggccaccgccaccgccggcgacggcgacggcgacggcatggctgcggcgccgcctccggcgaagcggcagcgttgtcatgcggtggaggagctcccgtcgccgaggagggggctcctgcggcagagcgtgctcgtcgtcgtcttcctcaggcgcgccatgctcctcgcctgggggggcaggaaggcggacgacgacgacggcggcggcggcgcggcggtcggcgtctcccggattggtggcgtggtgagagatgaactccgtcgctgtcttggaccaattgcgaggagcttctcgctgcagtttagcaaactggaaaggaaactggaaagcagactggaaagaattgaccagcggattgagaatctcaaccataaagtggaccaaataacaccgttacgacgtagccactgcaatcaccagcacccaatgcaggggacaaataatgaaggggccaatgctgaaggagtggagacaaatgaagacgatgacaaaaacacatgtgttcggcttcgatttctgaatgaaatgaaacctcctatttaccatgatgatgagttaaaagctgagaacagcgaagatattcggattggcatatttgatggtgaacagatgataaaatcaggccctctttcgaaggtgaaacttgagatattggcccttgagggaaattttccgtataatagcatggagagttggactactaaggagttcaacgaacacagagcttgtggccgggatgaaagaggcgatgtgttggcaggtgaacgcactgtccagctgatcaatggagaggcctctcttggtgccatcaaattcagagaagggtcatgcaaggcccgcaagggtaagttcatccttgcagcaagagtttgtgacagtgcaagaactggtgttcatgttcaagaggctgtcatgacgcctgtggttgtgcaggatcgcagaaataaatcaaatgaaaagagtcatcctccaaagctggacgacaaggttcatcgcttggaggaaattgcaattaatggaatatactgcaagaggcttgtggagaagggcataaaaactgtgaaagacttcttaaaggctctaaacaaggatcctgataacttggccaatattctccacatgaagaaaggatccaaagcctgggagaaaatggtgacacatgccagggactgcagcctcgaaggcaagcccgagctgaaatcgtatcccgttgctcagacaaacgtggtgctcatcttcgattgcgtgaattctcttgttggggcatggtttggtggcagttacattgcatctgacagcctcagttcagctcagcaggtcatagtggacaagttgaaaggggaagcatatcaactattagatcagcttccttttgattatataatggaaggcgggtttccaatactgaatcctatgaatgcgaatgccgattatcgagctcaaggtactgaagcagttgggggcttggatcatgctcagattgatccatcatttgcaaatgcaaactatcaagatcaaagtactgcacaagctggtcaggagcaattctcctctgctgctgtagctggttggtgccaggattcaattgcgcaacctagctcttctcaccagacaaatcatgtagtctaccctggtggagctcaagtgaattacagtcaccaaactaactgcgttgcgccttgtgattacccatgccaaggagcatccatggtaccaggatttgatcaggtggaacttcaggggaggcccttcttgggcagagatgacttggaagcatcaacttctgctcacaacaatctgccatttccaccacagcagcagtttacattcagtggtgatccaggatcatcagctcaggtgaacatgcagagccaggggcactcaaagccatcaacttctactactcaaggcaatcttccaacacaacagcaatggtcccaatctcaataccatggaaacaactggggataaagcagaaatgtagaatatgtcatttcatttagttcaccgatttttttaggaatcaattgttgaattgtcacctgtattgtaatttgtaatcctctcactttttggtctctgagcagcttagactattgctctgtacttcacccattgatgtgaaactctggctgaaagagtggcgctaatctaaatgttagattcccaagattttcctaaaagtt

SEQ ID NO: 13025 - DNA, 3587 bp, Oryza sativa
  ref <308>: DATABASE ACCESSION NUMBER: AK110373
  ref <309>: DATABASE ENTRY DATE: 2001-12-06
acttctgcagcacactttcacgcggtctttgcagatcgctcctgtcgtccctgtcagctgcagcaatcgctcgtcagtggcgttctatgtgccatgatagcagctgaatccttgttgcacgtcatacggacagtaaataagtatgttgcagcgctgcccggccctccatgctcgttacgcccgcaaacgtcagctgcatccgagcaataagcccagctggatcagtaagcgaacattagtggttgcatccttcattaagaatggtaaagcaagcggcacagggcctacagatgtgagattgtggtggcaccagcagtctacccaggttgtgcagtgcatagacaagcagtttggcctggccctttacagatacttcagggactggaggaaggatgcgttcagcgacctgcaagccatactgctgctggcgctggcagccaatgtcatgctggcggcagtcaaagtgctggtgctgggtgagagtggcattcacgcctgggaggacttctatgagagtgcagttgtcacgtttggcgaggcatggcccgcagagacagcaccagtgatgcagcaggtgtcctccattggactgtacttgtcaggcctgatcggctttgcagttctgctggcgcttgtggagcagtcagtgctgcaggtgtacgaaacacgagttgaactgggctctccggtgcttgagactggccacatactggtgctctgctggtgcaagagccctgcagacgtgagcaagctggagaccatcctgcggcagctgtgtgctgcatacaagtgcagtggcggcaggacgattgtcatactgtgccagcgcaggaagacagaaatggaggacctgttgcgcaacgccataccacagcagcagcgtggcgggtctcgctttgtgttcaggcaggggaacccgctgacagcggcagatctgaagctggtggcagcaggtgatgcatccgctgtgttggtcctggccgactctgctgccacagctgatgcatcggacagccaggtgctgcgtgtgttggtgctgctggacgagtcagaggtggcagcgcgccaggagggcaggcctcggcccagccctggacacgtggtggcggaggtgctgacaaatgatgccatgccgctgctcaagtttgtgcccagtaaggcggtgctgccgctgccttcccatcggctgaacgccacccgcctggctgtgctggtgacgcgacctgttgtcagccacctcacagacacactgtgggactttgagaacagcagtgcagtgttcatgcaccacttcccgcaattggcggggcaaacagtggcagatgttgcgctgcggtttgagaatggcattgtgatcggcctgcttgaggcatcaactggctttgtgctgatcaacccgcctccagcgtacaagctcaacgcggacgagcgcatcatcctgctgcggcccacccagatgaatgagtgtgatgtgcagccgctgccgctgcctgttcctgcccctgttggcagctacagtgcagaggcagccgtagcggcctggcgacagtcacagcagtccctcaacatgcccatggtcatcagctgcggctgctcagatgtgcccgaaacctcggaccaggctgttgggcagcagcagccaccaacacccttggacaacattgccagtaattcgtgtgatgacccagtcggtgcaatgcaggagcagctgctgcagcaccagcagctgcagcagcagcaatgggatccattgcagggtcagcagcaagctgctgccggtgcgtcacagaatgctgcagaagctagtaagaatggctcgcagctgttgctgggagcagaaagcagaccagctgctgctggtggtgctgccactaacgggactgctgctgtcaatgggcacagagctgctgctgctgctaccactgggggccagaacggcagtgtgccggctgatggtgggtgctcggtagcctcttgggacttggagagtggtggctccatgccatcttatgaggtgatggacctcctcaagggcacaaggcctggcttcagcacctgccgcatgttcagcctggcagagtcgagtgtgcagctgagcaggttcacgccactcaacctgctggtgctgggctggggcgactcagagttcatgggccagctgctgctggcactgggcacaggttccagtgcgctgcctgctggcagccgggtggtgtttgccaacgcccacagtgttgaggcgacactgcagctagcccttgcagcagcaggcccgccggagctgctggctggcctgactgtggagcacgtgcagctggaccccctctcacgcagccagctagggaagctcaacttggagacggcaaacgcagcaattgtgctgtgtgatgcctgctggcgtcaccagaacacacaaaattcctggtcaatagcaagtaacggtgcagcagctgccacagccgctcatgccacagtgtacagctctgcccacaaatccttggctgcctccagcagcggtgggggcagtttagatacagcagcaggagcaggagcaggcagtggtggcttgtctcatctgtctgagggttttgggctaagtggtggtggtggtggtggtggcagtgtgtttgctgtgggtgctggtggcagcggcatggatgcagatgtgttgcagctggatgcgctgctgctcagggttcagctgaacctccgcagcatgctggagaacattgggcgggagcaggaggtgaacatcataacagagaaggttgggacagagcaggacacacgctttgaagacaaagcccgccttccattgggtgtgcccgtgaacctgtcgtcctacactgcctgcatggccagccagttggcggtctgcccgctgatggtgctgcccggccgagggggtgctcgcacactgggagcacagattgacccgctcatcgttgatgctgacctgtacacagacgttggagacagggtgtcgttctggcagttgatgcgtcgtgctcagctgctgggccatgtgctgctgggctactacgtgctgccagtggctgctgcggatccaattgaagcagtgctgtgcccctctggcccctcacgctatgagaagcgcatttggaacacaggggacaacagactgaagttcattgtgctgcaggatgccgagtctgccagcagccagcagcagcaacagcagcagatgcgtgaggaagcagtggcggcatctattgcaagccctgctgcggccagggcagcagcggcagcgaaagcagcagctgaagaattagcaacatattatccagtagatggtggatggcagtggtggatgcggtgagcatacaaataccctgtcaattcaagcaacggcaggtttcttgccctgcacagcatgcaacatgtcagctgcttcttgaaatggttgtgttgcagtacccctgttatttgtgggaataggaggccagcagcctgctgagcattacggctctcttgtgctgtctctggtgggtttggacttcaaaaactcccttgaggtgctgggagcagggccttggcattgatgcttgcttcaacttggatacttg

SEQ ID NO: 13026 - DNA, 2914 bp, Oryza sativa
  ref <308>: DATABASE ACCESSION NUMBER: AK110374
  ref <309>: DATABASE ENTRY DATE: 2001-12-06
acaatcccaaggccaggaggaggcgccaccgctccaaaccaagtcctcacctctctctctctctcttctcctcttctctacgatgccgccgcgctggcgcgccacggcgacgaggcttctcgtgctcctcgcgtgcgcgtgcgcggtgttcgtcccgcggtgccattgcgtcggcgaccagggcgaggcgctgctgcgatggaaggcgtcgctgctgaacgggacgggcggcggcggcggcgggctggactcgtggagggcgtcggacgcgagcccgtgccggtggctcggcgtgtcgtgcgacgcgcgcggcgacgtcgtggcggtgaccatcaagacggtcgaccttggcggggcgctgccggcggcgagcgtgctgccgctggcgaggtcgctgaagacgctggtgctctccggcaccaacctcaccggcgcgatcccgaaggagctcggcgacctcgccgagctgagcacgcttgacctcaccaagaaccagctcaccggcgctatcccggccgagctgtgccggctgaggaagctccagtcgctggcgctcaacagcaactcgctgcgcggcgccatccccgacgccattggcaacctcaccggcttgacgtcgctcacgctctacgacaacgagctgggcggcgccatcccggcgagcatcggcaacctcaagaagctccaggtgctccgcgccggcgggaaccaggcgctcaagggcccgctgccgccggagatcggcggttgcaccgacctcacaatgctcggactcgccgagaccggcatctccggcagcctcccggcgacgatcggcaacctcaggaagatccagaccatcgccatctacaccgccatgctcaccggctccatcccggagagcatcggcaactgcaccgagctcaccagcctctacctctaccagaacaccctctccggcgggatcccgccgcagctcggccagctcaagaagcttcagacggtgctcctatggcagaaccagctcgtcggcacgatcccgccggagatcggcaactgcaaggagctcgtgctcatcgacctgtccctgaacgagctcaccggcccgatcccgagaagcttcggcggcttgccgaacctgcagcagctgcagctcagcaccaacaagctcaccggcgtcatcccgccggagctctccaactgcacgtcgctgaccgacatcgaggtggacaacaaccagctcaccggcgcgatcggcgtcgacttcccgaggctgcgcaacctgacgctgttctacgcgtggcagaaccggctcaccggcggaattccggcgagcctcgcgcagtgcgagggcttgcagtcgctggacctctcgtacaacaacctcaccggcgccatcccgagggagctctttgcgctgcagaatctcaccaagcttctcctgctcagcaacgacctcgccggtttcatcccgccggagatcggcaactgcacgaacctctaccggctccggctgaacggcaaccggctttccggcacgatcccggcggagatcggcaacctgaagaacctcaacttcctcgacctcggcggcaaccgcctcaccggcccgttgccggcggcgatgtcggggtgcgacaacctcgagttcatggacctgcactccaatgctctcaccggcacgttgcccggcgacctcccgcgaagtctccagttcgtcgacgtctccgacaaccggctcaccggagttcttggcgccggcattgggtcattgccggagctgacgaagctgaacctcgggaggaaccggatctccggtggcataccgccggagctcggctcttgcgagaagctccagctgctcgacctcggcgacaacgcgctctccggtggcatcccgccggagctcaggaagctccctttcttggagatttcgcttaacctcagctgcaaccgcctctccggcgagatcccgtcgcagttcgccgggctcgacaagctcggctgcctcgacgtctcgtacaaccagctctccggtagcctcgagccattggcaaggctggagaacctcgtcacgctcaacatctcctacaacgccttctccggcgagcttcccgacacggccttcttccagaagctacccatcaacgacatcgccggcaaccacctgctcgtcgtcggctccggcggcgacgaggccacccggcgggcggccatctcgtcgctgaagctagccatgacggtcctcgccgtggtcagcgcgcttctcctcctgtcggcgacgtacgtgctcgcccgctcgcgccgcagcgacagcagcggcgccatccacggcgccggcgaggcgtgggaggtgacgctgtaccagaagctggacttctccgtggacgaggtggtccggtcgctgacgtcggcgaacgtgatcggcacggggagctccggggtggtgtaccgcgtggggctccccagcggcgactccgtcgccgtgaagaagatgtggtcctccgacgaggccggcgcgttccggaacgagatcgcggcgctgggctcgatccgccaccggaacatcgtccggctgctcgggtggggcgcgaaccggagcaccaagctgctgttctacacctacctccccaacggcagcctcagcgggttcctccaccgcggcggcgtcaaaggcgccgccgagtgggcgccgcgctacgacatcgcgctcggcgtcgcccacgccgtcgcctacctccaccacgactgcctcccggccatcctgcacggcgacatcaaggccatgaacgtcctgctcggcccgcgcaacgagccctacctcgccgacttcggcctcgcccgcgtcctctccggcgccgtcgactccggctccgccaaggttgactcgtccaagcctcgcatcgccggctcctacggctatatcgcaccaggt

SEQ ID NO: 13027 - DNA, 3312 bp, Oryza sativa
  ref <308>: DATABASE ACCESSION NUMBER: AK110375
  ref <309>: DATABASE ENTRY DATE: 2001-12-06
cttgacttgcgaactccaagcattccccctacaccttccgccctcacgatacgcccgtcgcatgtcgagactcgcccaatgatgcctgctgggccgcccaccctgtcccgcgccactgcccctcctcgtgcactcgaccacccacgcacacgaccgcgggtccctgcctgacgccgccaacatgttcgaaaagtcgctctacgacctcattcggggcctgcgcaaccacaagggctccgagaaggagtacatcgccgagagcataaaagaatgccgcaaagagatccgctccaacgacatggacctcaaggccacggccctcatgaagctcacgtacctcgagatgttcggccacgacatgtcctgggcgagcttcaacgtcctcgaggtcatgtccagctccaagttcaagcagaagcgcacgggttatcttgctgccgtgcagagcttccgcagggacaccgaggtcctggtgctcgccgagaaccagctgaagaaagacatcatgatgccgaccccgccgtacattgccctgccgctgggggccataccgcacgtggtgaacccaagcatggccaattctgtgctctcggacctgataccccgcctgacgcactcggatgccatgatccggaagaagacggtcgtcacactctacagactggcgctcgtatacccagagacgttacgtccagcatggccaaagatcaaggagcgcttgctcgatgataacgaggatcccagcgtgacggctgcgatcgtgaacgtcgtatgcgagttgggatggagaaggccgcaagacttcctgcctctcgcaccgcggttgttcgatctgctcgtcgaaggtgggaacaactggatggctatcaagctgatcaaactctttgcgactttgacaccccttgagccccgattgatcaagaaactgctaccgccgctcaccaagatcatccgcgagacatctgccatgtcactactctacgagtgcatcaacggcataatacaaggtggcattctggaggcagtagaaggcacttccgaaggcgaggacgttgcgaagctgtgtgttggcaagctgcgaggcatgatggtcatagagggcgactccaacttgaagtacgttgcgttgctcgccttcgaaaagatcgtgtgctcgcatccaaatctggtcgcccagcagcaagatgtcatactggagtgcatcgacgatccagatatctcgattcgaatgcgcgccctcgatctggtcgtaggcatggtgaaccccgataaccttacagccatcgttggtcgcctcatgcgacaactacggaacgcacccatagccgcgcccacagacgattccagccatgaccgcgtgagaatgacagagatcattccatacgccgatgacgactccgacgctgaagagaatctaccgcggcatgagcaggcatcggatcaaccaccacccttaccagatgactatcgtatcagcgtaataaggagaatccatgaggtgtgctctcgtgatacgtacggcaacatctccgactttgactggtacatcgacgtacttgtgcagcttgtccgagtatcaccgtcgacgagaaacacttcatctacagaagaaaagggcgacgccgagagacttgacgacataggtggaggcatcggacgtgagctgcagaatgtcgcgattcgcgtcaagagcgtccgctcggaagccgtggatgcagcacaagcacttgtgcttgtcgatcgaagagagcagatgttcccagcgtctggcaatggcggacagggcgtacttgggtacgctggatggctggtcggcgaatatgcgaactacctttcaagaccagaaccggtcatgacttctctgctccactcgagttcccttcaactaccgtcacgaactctggctgtctaccttcaagcggtaccgaaagttttctcaagcatggcagggaatgagcagatatcctggacaccggagcgtaagactttgatgtcgcttctcatggcccggatcatacacttcttggaacccttgtctacacaccccagccttgaggtacaagaacgggcagtcgagtatctggaactgatgcggctggctgcggaggccgcctctggtactgcccctggctcagacgatggagatttcacagaccctccactgctattgacgcaagctatacccgcgttgttctcaggcgccgagctcaatcctgttgcaccaggcgcacaacgaaaggttcctgttccgggcgatcttgatctcgacacgcctataaatccgaacttacaacacctgttagcccaagccgaggccgaaggcatcgagaccgacgaagacgatgtctatgcagcctacagtgagccgatcgcttcttatacagaagcaccgatcattattgcacctgcggctgatcgtcttgacgcgccacataaggaaccatcaagctatcaaaacgcagtggaagaagaatatctcgatcctgatatcatcgcgcgaagaaaggccgagagaagagaacgacacaaggacgatcccttctacatcgaccccgacggcgacaaaggcagcggcgcagtcacacctctcagccgcatcgtgcgagatggcaatcgagagaacaacgatttggacatcgactcgataccgatcatggacctaaatctcgaacgcgcatcttcgtcagaccacatcccgcgcgcgcgaagtccccgcaagccgactcgcaaagtcgagatcatgggcgacgagactctcggagccggtggcgacgacccagcagaaagtattgcggcgtcacaagtgtcatcacggaccaagaaatcactcctcgatattgatagctctggcctgggatctctgagtcttgtagatgacgacggcacgtcgagccgcaagctcacagcgctggacatggagcggaagcagcaagaagacgcggagatgaagagggcgctgcaggaagtcgagcgactcaggctggagatgcagcgggcgagtgagagactgcacgtcaaggaggaagtcgcggtcaagaagaaaaagaagaaggtccgcaaagttgatgtcgaaggcgacgatccaaatgctaccccgcctgttgagcctgaagctggcgaagacagcacagtggcgcctgtcaagaagaagaaaaagaagaaggtcaaggctgagggcgaggcggacggcggcgaggaggcggaggatggcaaggtgaagaagaagaaaaagaagaggaggatggtagtgatggatgatggggaaggcgagcagtagtgttgaatgtgaagcgaattcgcattggtgtattg

SEQ ID NO: 13028 - DNA, 3356 bp, Oryza sativa
  ref <308>: DATABASE ACCESSION NUMBER: AK110376
  ref <309>: DATABASE ENTRY DATE: 2001-12-06
acgcaatccaacaacatccctttgccccgcccaggagactgacgtagactctcaagcacatcacccgacatccgctcccgctacagggccaaatgcatggccacctgcctcgctgataggcgcctcgcgcgacgaacctgcactctaccaatcgaagacgcccgtagccgcgctcgagtgatctcgctgcagcttgcctttcacgccccagcttacaatcgagtcacactgaggaacctctcctcttacagggcctggaaatgttgagctcatcagactcgcaccgccgacgcaagaaggacacagaccgtagccgtagcagcccaaaaaacaaggataaggaccgtgaccgtgaccgcgacagagaacgtcataagagcaccaagactcgcaagccgcgctcttctgcctcccgccaggacgactcggaggacagccagcttcgcgagagcacgtcgcgagagcgcatccgcacatcgtccacaccacaagcccccaagtcgcacaagatggcggtggtacctgagatggaacggaggggatctttgggctccgcaaatgcctcgcgcacaagtctaccctacccaacgctctcgaagacgtacgcaaaagagaacatatactccagagaagatgcagatcggaggaaagctgcaatgacaccgcaggctacagatgtcgatacatcacttgagcctgacaaggaccaggattcacgtactacaaatcacccgccagacagagccgcccctccaccaccacgagcgccgccgagtccaccgctcacagcgaccacagctgctgatttacggagagccgcaagcgcaaatagcatgcgaaggacgagggcagagacaatagcacaggagatggaaggagcacggcgaagtgtagacagtggaacgcgcatgacatctcaggcaggtcctcgggctgcatcacgttctagcataagggacgacatcgatggaacggacctgacttcgacgactggctcgcagcccagcaccattcgcgcaaaatctccaggccccccttccaaaatgaagacgtcaagcgcatcgaatactcggccatcgagccgaacatcaacgccagcaaagtccagggccacctccgaggcaacattggactccgaagctacatctgtgcgtcctgatcgaaggactcacttgcgggagccgtccccatcgcgttctgacacatcaccggcatctgcggtggactcgtccccacgaacgcccactcaacattcagtactaccgtccattctgtcgtctgtgaacgatgacgcgtcttcgattgagattattacggatcccatgtcacgaacacagtcggctgatccagcattctccaaatctgccgtaaatccacctcctccaccacctccacctgtcatgctggaagtgcctcgtgtcgactatcttctgcagaacggcggtttagcaaaggcaattcctcgcagcttattagctgcaatagatggcgtcccggcatccacatattcccagtatactactcctcgcctgtcgggcgcacaagctcacgatgttcgatctttcttcaagccgctgcagaacgtgctgaacagttacaacacagttatggataccagtggatcactggctgtggcgactggctaccggtcagtggctcggcgcctgcttgatcgactggaaaacgtttttgctcgcaatatctcctccgagcattgcaagtgcatgatgtgcttcgagcaacctttggtcgaggatagcagtggtgtcaattggggagagatattagagctcgtgtctggccgttgtgagttgccaccatggccaccttatgagggtgaagctgcccctggacttggtatttcgtcgacattggaagcaccctgccagcggatcgatgtggacgtgcctgaacaatatcgggaacactacgaaaagcaatcaaagaaaaccaaagttgcagttcagtcgtggctttctgaccagcaggagaatgtcccagaggatgctgacgatgagacgctgacttttattatgcttacacgcttggagcagccacagcgacctcttttctacgcactgctctggggactcgacaagcttccaaatcctcggacccagaaaccagaaagcggtaccccaccgtaccttgccaaagcaagtgttgcgctccagcggctctatcgtcttcacacagctcctcgcgatcagcttgtggtaatgtatctgatcaatcacccagaaatgcacaatatgctcgcaacccttgcagctgtgagcaaacacgagtgggaaatactagtgtctggtcgattcgacgggtttctctggtctggtgccgatgacctacctgatatgggctcgtctccgtcacggacagcctccaggaatcaatcagggcggataccctccgccgatggccctcaacgcttcgccagtcccatcagcccctctcgctttggtcctttcagtccagggccatattcgcgtccagcatcagctcgccctggctcaacacgtcccccaggtggtgcacccgtgcaaatagacgaagagaccgagattgctgtgctggccgaaatcgagcgtgaaatctttttaggtatggaggcaatggaggatgcattcgagcatctacataaccaagccgagcaagtacggcgacgtctccgtgaacgcggtgccgctctgtccatggtggctcagcaacgacgaggctctgctgcaagtggcgtcgaagtgcgaattgacacaccagcaagtgtccgcgacatggatgagggcttcgaggacctgcgcagcgagattggaccagacgactctgccagcaacgttagccacaacaggcgcaggaaagcacatcgggccagagaaaggaagacgccagcaccggtcgaggaagaaagcgaagaggacatagctcttgcagagcggatacgcaggcggttctgatagcactgcatgtgcacaactattactcaagaaaaggatgcatcgtgagatacaacagggagtcaaaaaaaaagaaaggaattgtgattcgtatcacaggcaaaggcagggtaaggcatggaaagggcaattatgacataacgacacattgatatattttggcacgttctcgcgttgcattgatggaatcaaggaacatgattttgcatacttacaacggctgcagagaatggacggacatggacggataccccataacttgaacaaggaaacgtgtgtggaatcattgtatcgttgcttaattctcgttcttcttcgggttgctttattatacatcttagcacgtcaattaggtgtaggtgaaggtactgagatcaagcggctgctttcgcagatgcggcatcc

SEQ ID NO: 13029 - DNA, 2609 bp, Oryza sativa
  ref <308>: DATABASE ACCESSION NUMBER: AK110377
  ref <309>: DATABASE ENTRY DATE: 2001-12-06
atgtgattcctcccgaccgagcccggccttgtcccttctcctcctcattcattttcctcttcttcttcttcccacctcccctcctcaactctcccccttctcctgcacctctgatcgtgacgagccattactactactagctcgattgctcgaatccctcctcccccactcctccgccatttacccgcctagcctcgcgcgcactcgcggtgtatatatctatccggcagctcgatttgtggccttgccggtgaggtttgtgagctgtgggcggcgtagcatgcggcggtgagagatagagagcgagagagagaggatgcagcaggcgtcgtcgcatcagcatcactatcagcacagcgccaagcctcccgtgtcgcggagctcgtcgtggatccggaggtccccgccgccgtcgccgccgcacaagaagctgtggggaggcggcggcggcggcggcggtgggaggagcaggtatgtgtgccgcatcgtgccgctgctcgtgctcaccgtgtacagcatcttcaccgtcgtccgcatccccagctcctccctcgtcgtctccaccgccgattcagagcgcgtggagcggcgggaggatgtggaggcgttcaagacgcacctgccgtccaaccagaacaacctggaggctcgcgaggagactcgctctccggcgtcgctcccctgctcggcgctcatcaacggtgaggcgggcggcgggcaggcggcggcggagagcgcgctgtgctgcgaccggagccactaccggagcgacgtgtgctacctccgcggcgacgtgcgcacggacccgtccacctcgtcggtgctcctgtacaacgccccccgcggcagcgcgccggagaaggtgcggccgtacacccgcaagttcgagggcagcatcatgagcaccatcgacgaggtcaccatcgtgccggtggtcgacgccggcagcggcagcaacggcaccaccgccggcgacaccggcaaggacagcctgcggcggcggtgcgacgtgcggcacccgccgggcgtgccggcggtggtgttctcgacgggcgggtacaccgggaacgtgtaccatgagttcagcgacgggctgatcccgctgttcatcacggcgcagcggttcgccggcgaggtggtgttcgtcgtcctcgagtaccactactggtggctgggccgctacggcgccgtcctcgagcgcctcaccaactacaaggtggtcgacttccgctacgaccgccgcgtccactgcttctccgagatgatcgtcggcctccgcatccacggcgagctcgtcgtcgaccccaagctcatgcccaacggcaagggcatccaggacttccaggcgctgctccaccaggggtacagccggacgccgtcggcgaccgccgcggcggcggcggcgcagccgccggtgccactcgcgctcgcggcgccaccgtcgcggccgtgcctccggccggacgaccacgcgaaggtcgccaagccgaagctggtcatcttcatccggaagcagaaccgcgtcctcctcaacctgccccacatcgtcaccgcctgccgccgcgccgggttcgcgccgcacgtcatgaacctgcgccgccagacccctctgcccgccatccacgccgcgctctcctccgccgacgccatggtcgccgtgcacggcgccgcggtgacgcacttcctcttcatgcggcccgggtcggtgctcctccagatcgtgcccgtggggctcgactgggccgccgacgcgttctacggcaagccggcgcagcagctcggcctcgggtacctcgagtacaaggtggcgcccgaggagagctcgctcgccgccgagtacggcgtcaacagcaccgtcgtgcgcgacccctccgtgatcagcagccgcgggtggtgggagatgaagaaggtgtacatggaccggcagaacgtcactgtgaacatcaaaaggttcggcgagctgctccggtcggcgaggctgcacctcaagaacgccaccgcctgcggcaaggccgcctcggcggcgacgacgaccgcggcgagtgcaactagttggagttaaaaatgatcactccaaagcctgaaggagaagtactccagtacagtgcagcgcacacattgtgatgcagaaagtgtcaaaagtgaccagggaaaagtaaaggcgcgagagggaggcccacttggagacaggacgtttattttgtccatttccgtgttttaccgtcgcggataccgaggcgcgagcagcacgtggcggccgcggcttgtctttggctcggacagcgtggctgctgcgtgctccgtgcagctgacaggtgtaggagtagtagaggagagggtgtgcgagttgagtggggacgtgaacggcaagatggcgcggtttaccacggaatctgacgataaatcactgtcttttccgctgcgtccgaaatccgcagtgtcggtcgtgtagcctgtagggtagggaagacaggcaggagacagccactgaaaatgcagaaactgtgcaagaaaactcgaggaaaattggggttgaatttcccttggaataattctaaacgaatgatgtttgttggcaatagagatattgcattggaaattccttgagg

SEQ ID NO: 13030 - DNA, 2695 bp, Oryza sativa
  ref <308>: DATABASE ACCESSION NUMBER: AK110378
  ref <309>: DATABASE ENTRY DATE: 2001-12-06
ttttggtaagcagaactggcgatgcgggatgaaccggaagcctggttacggtgccgaactgcgcgctaacctagaacccacaaagggtgttggtcgattaagacagcaggacggtggtcatggaagtcgaaatccgctaaggagtgtgtaacaactcacctgccgaatcaactagccccgaaaatggatggcgctgaagcgcgcgacccacaccaggccatctgggcgagcgccatgccccgatgagtaggagggcgcggcggccgccgcaaaacccggggcgcgagcccgggcggagcggccgtcggtgcagatcttggtggtagtagcaaatattcaaatgagaactttgaaggccgaagaggagaaaggttccatgtgaacggcacttgcacatgggtaagccgatcctaagggacggggtaaccccggcagagagcgcgaccacgcgcgtgccccgaaagggaatcgcttaagatttcccgagccgggacgtggcggttgacggcgacgttaggaagtccggagacgccggcgggggcctcgggaagagttatcttttctgcttaacggcccgccaaccctggaaacggttcagccggaggtagggtccagcggccggaagagcaccgcacgtcgcgcggtgtccggtgcgcccccggcggcccttgaaaatccggaggaccgagtaccgtccacgcccggtcgtactcataaccgcatcaggtctccaaggtgaacagcctctggccaatggaacaatgtaggcaagggaagtcggcaaaacggatccgtaacttcgggaaaaggattggctctgagggctgggctcgggggtcccggccccgaacccgtcggctgccggcggactgctcgagctgctcgcgcggcgagagcgggccgccgcgtgccggccgggggacggaccgggaacggccccctcgggggccttccccgggcgtcgaacagccgactcagaactggtacggacaaggggaatccgactgtttaattaaaacaaagcattgcgatggtcctcgcggatgctgacgcaatgtgatttctgcccagtgctctgaatgtcaaagtgaagaaattcaaccaagcgcgggtaaacggcgggagtaactatgactctcttaaggtagccaaatgcctcgtcatctaattagtgacgcgcatgaatggattaacgagattcccactgtccctgtctactatccagcgaaaccacagccaagggaacgggcttggcggaatcagcggggaaagaagaccctgttgagcttgactctagtccgactttgtgaaatgacttgagaggtgtaggataagtgggagccctcgggcgcaagtgaaataccactacttttaacgtcgaggaagacgaagatgaagatacaccagatgttgccattgagtcacccatggagccggtcaacgaggagcgccgactgagcaataagagcggtgacaggaaacagagcgtagtgagcgtcacaacctccatttcaatgcgtacggagagcatttctccccgaccggaaccgagtgaagacactttcaacctggacactgctgccgagctgattcgtcttggggaaatcccgtttgtgcgctcgttgttacttctcgctgaaatgagctcagaaggccatttaatgacgcctgaatagcagcaaaaaacggtccaaattgcacggaaccatcgagacttcgtcatggggttcattgcacagcggtcattgaactccgaaccggatgacaacttcctgacaatgacccctggctgtcaactacctcctcctggtcaccaagaagggcagaaactgggcgatggactcggtcaacagtacaatactccgaggaaactgatcttggagcaaggctgtgacgtcataatcgtaggcaggggaatcgtccgtgccgacgatcgcagggcagaggccgagcggtatcgcaaggcagggtgggcagcctacgaagagagaataggcaagggcgcctaggttgtctgctctcctgcatctgtatatcgctcccggccctgtattcttctcagctcatgaagtgcttcagcgtcttatgaccccaaaaataaaaccttgaagacctccatggctgttcattgcgcgaagtccattttcgcgtgagatgtcatgcttccctttggaactgggagatggcttcgcgagctcgacgaggaaataggaagggtgtatgcagagggagagtgatgcagcgtaccttgggcaagctaaatacgttgtcaaggcgtcccacatctcacctttatctcgatgcttgtctatccgacctcaagttcgaggttctcttgtttcattattctactttcgcatcatcatcatacgtgaagaagacacaggcggcgctctcgtccttgggtggagcagtttttgggcgcaaagatggatacacatgcgacgacttggatatacaacatcatgtaataaaatacgggtgcaaaagaaaagagaaaacggcattatggattacgtccggttttgtagatccttcacgtacctccatctgtacgtgtgcatctctggcgcgggctttggcattggtatgttcaacgtatttgttaactcgaatatttaggatagtcagcactcgggcatggatacgggagtaggaactggtttacaacaaaaatggagtgttttacatgctg

SEQ ID NO: 13031 - DNA, 2683 bp, Oryza sativa
  ref <308>: DATABASE ACCESSION NUMBER: AK110379
  ref <309>: DATABASE ENTRY DATE: 2001-12-06
gctcaatcttcactcgtttccactaaccaaactggaattgatagtggacgcgacttcttcaacctaaacctgctggaactgcgatgcaaagtgtcaccaactcaaaccattgtggtggagcctcacgaagacacagcacctgagttactggctcacattccagggaagagcgctcaaaatcctcgcggtcaatctcaagaagccatggaggtcgaatcgcgtcccgcagcgcctcagcatcccggtggccaccatcgcggatggctggatcgtcagtctttggaaagtggtcgcgcctcgttgccttcattgcgctctcctcctgcgacggagcctttgcagcagtcaccagcacagaaagcactgccaccaccgccaccttcatcaagcactgtttccaagtcgacacagcaatcacaagccttgtctcatccgccgccaaaggagattcgaaacggtttgcccactgattccagcgcttcacctgtgcttactgcacacattcgatctcccagggaaccgcaacatcacaatgggctgcggtatcctcggtcatcgaacgaggttggacttgatgccgtagaacgcctgcagacacaaatctcacagaatagcggtgtcctggaggcacatactcgcgatatacggcgcggcgaggagtctttcaagaagctcgacgaagcacttcggcaagagtttcaaggtcacatcattcgtcaaagctcggagattcgtcgagtagacgaagcggtagctacaatacaccatgagctacaacggacgcgccaggtgatggagggtctgagcatggagttacatgctgtccgagcagacagacagtctcgagcatcgacggtgccgcctcaagcgcctgtggcaggggctcaggattctgctgtggaactcatcgcgcaacaggtcgcgattatatcgcagaaagccagtgagattgatatgctcaagatcacagtggaaataatgaagaacaagatacagcgcttggaaggaggcggtacagaaggagctcctgcggcgctccagcaatcacatcaaccgcaagcagaaacgcacagtcatacagcccagggactctctgcacaccaagcatcactccctagcgcccaggcaccgcgaacgcaatcgttgactacacaggcttctcacagcaccacgacgacgcagcctgctacgtccccagaaactccacatacacagcacgaatcccgtcctgaaacgagtactggctgggcgtccattaatgccggatcgaagcgtccacatccgtcagacgaggaaagttcacgtgtgggaagagccccagatctctctggatcgcccaagcgtcccagaacagcgacatttgagaacccagaaaccgggccactgggacatagttccaaagtgtttgcccagccgacaaatcccgaggctgttctcagttcgcagcttccatcttcagcgtatcggccgtatggtgcgccggatgtgcactttgacgacggctggcacgccgaagcccagcgcgtccctgaacatcgacctcgcggtcgaggtcgtggcggcggccctggaagtcgtggaggaagaggccgaaagagcatgcccttgccctctcatccccatgcatggacatccgagtgggaacgagacgactggcagggcgtcttggactcccaggccaccccggatagctcgtacatgcaccacacgcgcggacgaggcatcgctcgccgcggcagcggagggagcgggatgcgcaccgcctacgcaacgcctcacgatcgggccctggcgctgggaatggcaggcgccgcagcaggtatggacatgagtccgccgggcgatccctacgcgcacaccaagaagacgcgcacgaagcccatacgcaacgcagacggcgttctcatccgcaaagacgggcggcccgacatgcgctcgcagtcttcagccgccaacctgcgcaaagtgcacgcgcgcaaggacgacgcggcgcactcgccttccgcagcgcacacgccgacgaaactgcagtctccgtctgtggagcagcacgacgagaccgggagcccggacgagggccacgcggagcacgacacggagtcgccgtcgatagggggcaagaagcacagtgccatcatgagcaagatgttccccagcggcgtcgaggagtcgaggcgacggcatgactttacacggcaggtctttgacgacgagcaagagcacactgtccatctgcggacgcaaggtcaagggcaggggcaaacttcgtctgagcgcgcggcacccacagaggatagctacagcacagccaggagagcaagtcgagctactgatgcggaggagcgtgtagagcgagagcgagagccaggtcaagcccatgcggagcccccgcgtcctgaggcacaggctgtgactgccaaaggagaggagcgagacgttaaacccgtggtggagtgatgttgaatccgcctgaattaggagatctggaagatctaataaagcccctcttctaggcttaattgaggattatgccggcgagctgggctgggcaggggatgaagtgacccatgctacattggagtaatgcatgcgcaattgagcatgatatgacttgtcttgcggaaatgatcgattgacaagtaacgaagactagtgtaattgacttgacctctaatcttctctc

SEQ ID NO: 13032 - DNA, 2644 bp, Oryza sativa
  ref <308>: DATABASE ACCESSION NUMBER: AK110380
  ref <309>: DATABASE ENTRY DATE: 2001-12-06
tggcctaaactaacgctaaaaaagtaacagtttctgtactttattggcgttacgtggggagggatgcaacttagagcggtagtcaaggccctatcggctcctcagcactcaaacgcggcgagccggtccctggacggtgcattgctgcagcatcttcaagttgtggcgcggagcacggtgggtaaccgtgatgtcgctcgcgagctcacgcaggcgatcaattttgctgcggattggcgcgtcgcggtcagtatggtgcgtcatgtaccatccgaagtagtgccgagcgctacgctgtcgcattggttggcggcggcagtgaagtgcacggcgcggcgtgcggactgggtcgcgagcctgcgcgtcgtggccagcgcccgagtcagcacggacccggccttcacatcagcggccgcgtcgctgccggtgcagacagcgctgtcggtggccttgttgcgaaattgggaggagtgccttcgccacgctgcgccgctcgtcgccagcaagtcacctgccacgttagatctcttgtgcgacgcggtcagagcctcaggggaggcaggcgcgtgggagcggtgcgtttctctgatagcctcttggccaccttcctgccgaaagccgccaaagaagacgcttcactacgcgatggagagcctcacctctcgcgaagggcccaccgatcgatggcacactgcggcggcgctcttcggcgtcattcagcggctgtacaaggttcctttcttgaacacgtggtgcgcttactcctacttgctgcggcgaggcggtcgctggcaggcagccatttcggtggcgcagcgagcgccgtggcacgaagtgtcagacgccgaccagccccggaacacaggcggcatgtcagccccgcaggggttcaccaccacgcacttctggaaccttgcgcttggcgcgctgcaccaagcggggcacacctcggtcgcgcggcggcaggcagcggtcgtacttcgcgagtgggtcagtgaccatgcggctccgaacgatcccagggtgccagtcgaagccgtcgttaagctcgctgcgcttgggattaacgctgctgctgaggacgtcactcgcttcggcgcggtggatgttgatgtcagcgtgcagcaggcgtgggccatgttctgcgacgctgctgtggccctcgccgcgacgcatgtcggcgctgcccaagtgttccgagagggttcgccggattggatacctcagtcagcagacgcctgcctcagccgaccccgcctcagcccgccgcgggcgagcctcctaagctccgccacgacgctgtcggcggcaatgctgcggctcttggtgcgacttcccgccacgcatcggattcagtctaccgctccttcggcgagcagcaacagcgaagcgacgctgccgtggatctccgcgctgcagatcatgtgcgcaacggcagcagcgaaacgcaagagctttggacgggatccctccatagcggtggaggccttcgtcgccacagcaactcctgcttccatggtcactgacgaggtgctcgccctcgtcactgccgtcgtatccaaggcagctagacagctgagccaggatccaaccccgaccgccgcgccgaagcgacagctccgagagctgctgagggaagccgaggcgcggggccctctcagcgccaacgctatcgacgccatcgtgacgggatcatgcggcacggcgacgcagaacggtggagcgggggttggcgcactcgctgcgacgacggccgctgcaaccgcgtaccactccgcgccacccagcgccacatcgccgctgtggacaccggagcacgcgaaggagcatcgactggcgctgtctgctgcggccgcggcgcacggcgtcggtactctcggcatcaagaagaagattgaagccgccgctgctgccattcgttgcgagtcggagcccgatgctcggggtaaactcgctgaccactacgtcacgtcagcgcaggtcgcgtcggcgtcaggcctgacggatgtcgtgtccttcgcgcttcgcagcgccatgtgcgagaaggcgcttgctaccgacggcggtgacgccgagaggtggcatgacgcgatgatggagtcggcatgcaaatcacacaactggcgccgtgccttgttcctactcgcgcggcagtccacgcggcccctatcgccggctctggccacgcagctgtgttcagtgctgatgccacaggcgccgcacttaggggtgacgtggcgcgccgcgactgtcatcgtcaacctcgttccgtcggataccgccaacggtcggcaggacgaggcagacacagcggtggccatggcactgcagctgctcgtccgcgttggccggtgggtagatgcggtggagacgatgcaacgcaagcttcctcagatgacgaaccctgctgcgctgcagcccactgtgaaggacgtcgcaagaacacttctgcacagtagtctcagcgccgccacgccagcaaccgcggctgaccaggaagcgagcaaagccgttgcgaaccgcatctggtgttgggccgaggagagtggcgtcgtggggtgggcagatgcgttggacctcttccctaggtaactcgttggacacacacacacaccgacacagcagcatttgccgtctggtggtt

SEQ ID NO: 13033 - DNA, 3185 bp, Oryza sativa
  ref <308>: DATABASE ACCESSION NUMBER: AK110381
  ref <309>: DATABASE ENTRY DATE: 2001-12-06
aagcgaaaaaccgagtttgtatactcgataaattaagatgaagggacaggtgttgtctctcgtcgtcttggtggcggccgtggctctgagtgtggagggcgcgcgccgcacggaccggtcggcgtcggcgttgttttcggcggacgacgacgcagcgcttctggcggacggtgccggcagcagcccgagcctgctcgcgacggatgcgcgggcgtcggcgtcggcgttggcgtcggcatcactggccgggcgcaaggcgtcggcggtcgaagctgcgtcggcgttgggcggactggacgtgacgagtttgggcgctctgcgcgaagccatcagcgatgatctgagcagcgactcggacctgtcgggcacgctggaccggctgctgacgggcagcaccgtcgatgtggacgagcaggacgcagcggcgggtgaggcgtacggcgatgaggtgcacagcgctgagcagcacagtgtggcgtcagcggtggcggcgtccgatgtggccgccgcggagcagcagcagcacggcggcgcgcaggcgcatgcggatgaggaggtggaggccgccgaggggtcggccatcgaaaatacgatcaccgaaatcacggccgacgccgtcgacgccgcgtcgcccgctgctaccgcgcacgcgcagcaggagacgtcggccatcatcccggcgcagcagtcggcaccgacgatcgtcaccgctccggagctgcagcagccgcagcagccgcagccgcagccgcgcttccgtcaggtgacggagtccgatgcaaacggcccgatcgtgccgctgaccggtcacaacacgcacccgcctgtgcccgtgaaaggcccgctgccggggctgacgacggacggtgaggcatcgggttcggccgcggaacagacgcacaagcgtcagcacagccgtgacagcgataaggaggagagcgacgcagaggacggtgaggagtcggaactggcggctaaggacaagccgcgtttcttggcagagcgtgcactgaaccgcgctatcgccgagttcagagcgcaacagatggccgacccgtcgctcacgccgcagcagaaggcgctggcgtcgcagggcggctctgatccgagtctcaaagctgccaccgtgtcgggcgcatcgacggccgaccgcatccgcagcgccgtgtacgtggtgctggccattgcgggtgtgattgcggtggtggaggcggccacttacctgaccgactacgcgctgaagaaccagaacgtgcaaatcgaccgcatcctttcgaagacgtacaaagccatgatgctgttgggtttggtgtcgttcctggccgtgtgcttcgcccgtctcagttggatgtcgacggtgttgggtgactacagcccgaacttcctgtacgatttgctcatcgtaatgggcgtcatgggcctgctgtacctcctcacgatgtgcggtctcgtcggttacgtgctgtattcggcggcgcagtaccgcaccatcgagctcaagcacccgaccgagggcgacctcacgcgtctcgagaatgcgctcaccaaacagcgcgatgagtacaatgcgcgcggctgctgcacgcgcacgttcgcgtcgtgctttgcgcagtacaacctgcgccaaaccgagttcgaagtgcagtaccttcagatcaagcagcagttcgtgcggcagcaccaccgccgcttcctggcgccgtacacggcgtcggcgctggcctccaccgtgccgccgaccccgatcgaggcgcaggtgcaggcggccacggccgtggcgtcgagcccggccatcgccttccaaaagttcgagttctacatgtacctgcgtaaggccatgcagcagggcatggaggaggtcgccgccgtgcactggcaggtgtggtgtgttgtcttcgccgtcgttctcatcaacgcccttcgcatgctggcgttcaagtccgttgaggcggcgtcgttcgtgtacatcagcgtcatcctgctgtgggcagtgttggtgtacagcggctttttggcgtacagcattgcgggcgctacggaggagctcgcggagcgctacactctgtatctgccggagcgcgacgcggcggcagccaatggcccgcgtgatttagaggcgcagtccgacgacccggacgacgagcagttgcgtgagtcgtacatggtgcagggcggtgggtgctgcggccgcgcgtgccagtgctgcccgggctgtcgcgctgtggagtgctgcagcgcgccgagcaagcagcagatgctgttttggtgtcagacgccgagttcggtgacgaaaggcgtgcaggtggcagtgctgctcacgtgtctcatcattcccgcgtacatcgtcgatatggccgatctcgtgaccaccaccaacgtggccgcacgctacgccgtcaacatcctcctcttcctgccgcccgtgctgctgctcatcttcctcatccccatggtgctgccgcgcttcctgctggccacgtcggtggcatcgatgtcgcgtctcacggccctgcgtgccactgtggtcaaactcaactctacggcctaccgcgcgcacaagctcgagctcgacaaagcccgtgccgccgccaaaggcaagagcctgaacggcgcgtcggccggtggcggtgtggtggcgtcactcaacaccgacttcgatgacacgcgcagtgccatgtccgaagaggacgatgacgacagcgatttggagaacgatcacaagtcgcaggccggcgacgccgacgccgaccgcccgtcgcgtgcggcatacccggacgtgagcaatccgaacgccgcgtcgctgggtggtgcgccgctgctgcccagcgcatccggtgccgcgcgttccgacgcgccgcgcaagcccgtgcgcgaccatctcgacctctaaacccacgccggcctgcgtctgaggcggtcaggcggtgacgcggtgtgtgtggggggcggtcgacgtaaacagcgcgcgcgctccagacagcggcgcactgttcgacgccgctgacgggaggcggagggacatctcgtggcgtgtcgtcgcgctgtggcgtgtggaaggaggagcccgcgcgactggcggtgccggccgtgaccggaccgcgcagcagcgcgtgcgtgtcgcttcggtggtttgtgtattcctgtcgtatcgctgcactctttgcggtgaacaaaccattcttatc

SEQ ID NO: 13034 - DNA, 3039 bp, Oryza sativa
  ref <308>: DATABASE ACCESSION NUMBER: AK110382
  ref <309>: DATABASE ENTRY DATE: 2001-12-06
aaaattgcgttggaacgactgagtgacatgtctaaggttacgacgccagcgacagcagctgctgcagcagccgcggcgccggctggcgcagccgctggtggcgctgctgcagccgtgcccggcccgccggggctgaaacggcagccgtctattgacgaccaaaacaaagcggcgacgaaaatcggcgcgttcatgcgcggcgcgttggtgcgtgccaccaacaaagacaacaccctgttccaggcctggagtcagctcgactggcgcgatgagtccgatctgatggagtcgcacgagaactacgtcaaactcgtcgaacagcacaaactcaccaaaactggcagcagcgaccaaaaagcaccgggtgttgttgcggccgataccgccaaacccaccggcgccgctgcggcaccggccaaaggcgcaccgccggccgccatcgcaccggcggcaacgggcagcagcagcaacgcggctgcagcggtcagcagcagcagcggccacagcgcaatccccgggccgcccacgctggcacgcaagccgtcgcacggtcaagggcgaacatatgccgacaccaaagccaccggcggcgccggtgcggatgccaaagccaaagcggccgctgcaggcggtaagaaagagccggaatcggcgccggcgcccaccgccgccaaacagcaggcgcctgccgccgcggtggctgcaacggcaccagcggttgcggcaccgacgaaaacagcggatgcgaaagcgcccgccgttgcggctgcagcggctgcaccggccaacccgccgccggccgctgcccctgccaagccggcatcacgtccgtccacaccgccacaggctggtgctggcgccgcggcaccggcagcagcacaggccgaggacgagttcggtccgggtccgttcccgaaggtgctgacactggattacgtgacggcgatgatggattggttcaaagcgaatgagattttggagctcagcgctgtcgaggaactgcccaaacgtgcgctgcccattatgcgcgccgaacccaatgtgcgccgcattacgatcgccacaaaagtgacggtcgtcggcgatatccacggtcaattggacgatttgttcgaaatcttttcgttgaatggactgccgtcggaccggaatgtgtacattttcaacggcgatttcgtcgaccgcggccacaattcgcttgagtgtgtgttgacgctattggcgttcaaagtgctgtatccggacaactttttcatgaaccgcggcaaccacgaggcgcgcgacatcaactcgcgcgacggcttcgaaaaggagtgccgtcgcaagtacaatggcgctgtgttcgacacgttttcggccatttttgcggcactgccgatggcgcacatcattgacgggcgcgtgttcgtagtgcacggcggtctgttcaataagagcgtgacactcgatgagttggacaaacacgatcgctttcacgaaataccgcccgccatgtcgctgttggagcagatgctgtggaacgacccggacccggcaccgggcattgcaccgagttcgcgcggcggcaatgcgctgtactttggtcccgatgtggtcgacacgttcctgcaacagaacaagttggaacgcatcattcgcagtcacgagtgtgtgccgcaaggctttgagagtatgtttgacggcaaactgtacaccgtgttcagtgcgtcgaactacaccggttcggtacataacgatggcgcttacattgtgttccaaaaggactgtgtgccgcacccggtgacgtactatgcgggtccaaaggaagggctgacgaactaccgcatgcggcacgcgctggagcacgacgtcatcaaccgcctgctgcaccgcatcagcgacgaacggctggcgctgatcgatcacttccggagtgtggaggctaccaaaggtctgatctcgcggcagcagtgggccgacgggcttaagaaggtgctgcggctcgacatcccgttcctcgagtttcaggacattttgggtttgcccaaacgcgacgtggcggggggcaattccggtatcgattatatggcgtttttggcccgcttcaagcccgtcaacagcatgttccaacaggccgctggcagtgcggcggcggtgaaagacgtcaaagcgcaggagcatttggagaagatcctggcgctgctctcgaagaaccgctacgaactcgagtcgctgttccgccactttgaccaaaacggcgacggtgagatatcgacatctgagttccgtgagggcctgatatcgctgttcaatatgctgaagacgccgtgggacgagcacacgctgcaggtgctcatcaaacatatggacaaagacggcaacggcacgctctcgtatgaggagtttttcggcagttttgaggtgctcgacccggcactggcggcacggcaacgcgagttgcgtgccaaaaccaacgcacagcgcgcgttcaagcgccagaaatcgtcggattcgggcggtcgggctgcgtcgccgcgcaatgcgggtgttgcggcagcggcagcggcagcaccggcggctgcagcggctggcggtaagaagaaataggactgcgggtctgccccgccccgcactgtggggcgggcggttctcgaggtcgtgtgtagatgaatggtgataaaacaacaaacgaacaggcaaaacagcaaaacagcaaaccgcaaaacaaccgcgtgcgccctcaacacccgtcatcgctgcgcggcacacgtgcgtgcgtccgtaccatataaccgcggtcgcagcacgtggtggtgtgtgcgtgtgcttgcgtttgcgtcctcagccgcccgcctctgctcagttcagtgtttttgtagtgtttctccgaacgctgtatcgccgccgcggctgctgctgctatccattcgttccgtgcgctccgctctcgctctcgtgccgccggcgccgtgcccctctgcttgcgtctgcattcccgcactcggcctgctctgctgctgcgtctgtgtgttgccgccaccagccgaacaacttgactgt

SEQ ID NO: 13035 - DNA, 2227 bp, Oryza sativa
  ref <308>: DATABASE ACCESSION NUMBER: AK110383
  ref <309>: DATABASE ENTRY DATE: 2001-12-06
aagagcaggagcatcagcttattaccaatctttttcattcccctctcttggaacgtgctggtctcctcgcttctacactctcttgatcagctctcaccactatgtacacttgatcgtcatttgccacaagttaaaattgatacagagcaacacaaagagctaaactaggggcagtaacgcggtagttgtactcgatcatatcgatccatggctgcggtggcgaatggcggtgctgcgccggagtggcgggtgacggtgccggagggcgcgacggtgacggtggagcgcgaggccggccgctgccggcgggccgccgtggtgtgggcgtggcagctggtttcctgcgtcgccgcgctcgggagcagggcgtccggcctcgccgggcgtgtctggaagatcggcgcggacgacccccggagggcggtgcacggcgtcaaggtcggcctcgcgctcgccctcgtctccgtgttctactacaccaggcccctctacgacggcgtcggcggcgccgccatgtgggccgtcatgaccgtcgtcgtcgtcttcgagttcaccgttggtggctgtgtgtacaaggggttcaaccgggccacggcgacggtgagcgccggggcggtcgcgctcggcgtgcactggatcgcgagcaagtccggcgacaagctcgagccggtcgtccgcagcggctcggttttccttcttgccgcggcggcgacgttctcgcggttcataccgacggtgaaggcgcggttcgactacggggtgaccatcttcatcctgacgtacagcctggtggccgtgtcggggtaccgcgtggacgcgctggtggcgatggcgcagcagcgggtctccaccatcgccatcggcatcttcatctgcctcgccgtctgcttgctcatctgccccgtgtgggccgggcaggagctgcaccgcctcaccgcccgcaacatggacaagctcgccggcgccgtcgaggcctgcgtcgagggctacttcgtcgcgggagaggaggaggcggcggggccggagtacaagcggcggccggcggctgctgcggcggcggaggggtacaagtgcgtgctcaactccaaggcgtccgaggacgcgcaggcgaacctggcgcggtgggagcccgcgcacggcaggttcggcttccgccacccgtacgcacagtacaaggccgtcggcgccgccatgcgccactgcgcgtactgcgtcgaggccctgagcggctgcatccgctccgcggaggcccagtcgcccgagggcgtcaatcgccacctcgccgacgcgtccacgagggtggcgacgcggtgcgcggcggtgctcagggaggcctcgagctccgtcgccgcgatgacgacgccgtcccggggcctcgacttcgccgtggcggacatgaacaccgccgttcaggagctccagagcgaggtgcgggagctcccgtccaagctggccgccgccgccggggagccggccgcggcgcagcagctgatggacgccgtgcagctgcccacggtgacctcgctgctgatcgaggtgtcggcgaggatcgagggcgtcgtggacgccgtcgacacgctcgccaccctcgcggcgttcagatcagctgacgacgacgacgacgacgacgacgaaaagccaacaacagaagcagatgccaagctgcaaaccgtgagcgatcacgtcacggtcgaaccggaagcggctgcggctgcggctcggacaacaaagaacattgaacaagtttaaaccggttcacgtcaaaatccaacgaacgagtcgatcgaaccgggcagattaagccggttctcgatgggtttcgtcactcccgcaccatatgccacttccaagcggcaaccggtccgagtggccgagtcagagtggggaataaaaaagcaatcgccgtaaaaccttgatcactgttggctcagaggaaaagttgacacatgcagatagcatcaaggagaaatggggaataaaaaagctcacttatcataaagttgtcaatacggcattgtggctttcatgccatgaatgtaggcacgtatagcgtcaaatccatgttagtgcgttgttatttttaattataccagataaccagaatgttatttgatctgatcccatataggagcaggaaagaaagttcagggcctgtcatatatggtcgtcatgcacgcaccattttctttctctaaccacagtacaaaggctaccagattttcttggt

SEQ ID NO: 13036 - DNA, 3702 bp, Oryza sativa
  ref <308>: DATABASE ACCESSION NUMBER: AK110384
  ref <309>: DATABASE ENTRY DATE: 2001-12-06
aacgaacgctaaaaaagtaacagtttctgtactttattggccgcggtccacggccacaaagaagagaacggaaatgagcgcggtggacgatacgctgccctggcgctggctcctcgacgcgggttcgcaaaacctggcgtcacgccaagccccgccgcagcccacccaaacatcgcagccgtcgccgcggtctccgaatcttacatcgtctgaagggacgcgtgatgcggcgactgccacttccacggacgagtcgtccgtgccgcccctcttcagcgtgaacacccgcggtatctccagcaggccgcagaacgatttgtcggttccagcgcaccaagtgcttcgacgcggcttgaggctcgccgctgcgcaacgcaaacgcagtggggtcgctgcggtggtgtcgagccaaatccgaggctccgggcggcgggccgacggcccacgtgagtggctgcagcgggggggcctcgccgccagcgacggcgggccaaccacaagctccactgcgaactcgggggcggggccgtcaacggccatcgcgcgcgtgcaaagttggcttccaaaggtcctttcgccgttcctgaacccaaccattgaagctgagttttggcgcttcgccatgtggcgcgtgcggtgggaacagccgctcgccaccaccagcattggaacgctgttcctcgcgcgactcatggtcgcgcggagctttgcgttgacgttgatcttgagtatttccggcgccgttctagtcgtcagtggcctctgcttgctagccgtcgtgattcgcacgcggaaccgacagccccagcaaatggtcggcgttgtcagcgtgattcgacgagcggccgccttctcgcagttcgttgcgttagcgggctgcgtcgcgcagcacgcgcttgtcgcgtcgaactgcactccagagcccaacacggccacgaacgagtgcatccgtcagtttcccggcgactacgcgtttattctcatcactacgagcctcagcgtacagagtcctgggctagtgatcatgctcctcctcgtcgcgcattgcggagcaatcgcgtccttctcagcgctcggcaactacgatcaactgtccgtgttcttgttcgcgctgtttggatttgctgtcatctcgcacttctccgtttggtcggtgcttcaaatggatcgccatcgcgcgcagttcgagctccaagtccgaagcctcgtcggcctctgggatgccatggagcagacgaaggcgctcgtcgacatcgcgactatcgccgtgccctttcatgtggccggccgcatgcgacacgccgtgaccgccgcgacctcggacaacaaggcgctgcagaggttggtgtacgcgtcgcagaacagcgtcctcgtcacggccgttgcgatgaagcagcttgctgggcagccgatggggcacgtgctcgccatgtcacggtccgtgagcgcgatctgcacccaactcgacgccatctgccgcagccttcgactcgacgtggcaggcgtcatcggcgactgctacgtgctgacgtcggggcttcacacggatgtgtgcgatgaagccgcggtggcgctgctccttcggcaactgccatcagtcatgaatcaggcgaaggaggcttccggcgttcccgtgggctggcgcagcgcggcggtgctgcttgctgcggccgtggcgcggggtcccgcaacggcgcggctcgtcggcgacacgggcgttcgctactctgtgactggagcggcggtggtcaccgccgtgcgcatcgcgacgttgcttcgaagcggcgaggtctctgcgccgccggaggtcctgtgccacgcactgcctgtcggggacatggacgccacgctacgtcgggcgggtgcgctggaaagcagcgccaacgtcgttgtccccatcgcttcgatcgaggatccacaccgtcgccgcggccgtgacaacccgttcgaaggtgacgcctcggcgtccggcacgaccaatttcacaagcgacgcttttgaggacagtgacacggccaccacgcacaccgaggaggccgatgcgacgcggcaggaatctggcacgacgcccacgccgaacacagcggactcctcatcggacccggaggccgcggcaacggcggagcctttgccagactcgcgtttcgacgctcgcactcgcaacgccacgcggcggcgtcggttgccgaagggcagcggctcgggcgatcgggatggtccacacgcgctcgcgtggcacggcctttttagggacgctgaggtggaaaccgccttccaaacgtactgcgccgcgcagtgccggccgctgttcctgtggcttggcgctgaggtggcgttgatcggcatgatgtgcgtcgccattgttgttttggagcagctgctggactcctcgctcagcagtcgcacaacaacgtgggccttggccctgtcgattgctgcggtgactctcagcgtggccatatcggcggcggtcatattgacggcgcgatcagtcacgcgaacggttctcaccccaagaatggcgcccccgctgtgcattgtgttggccgctggattttggcccctcgcgcacgcgctccggtactcgttcttcaccaaccgacccgcggtgttgatgatggtgctgtgccccgccatgttcccgacgctgcgccacctggcgtggccgctttcgggcctcgtaacgctcgtcgccatcagcccaatgatgggcacggactacgttttccagaaggtcggcgtcgtcaacacagtcttcgtcgtcgtcttcaccgtcgtgttttgcgtgtggctctgtcggctcacgtgcctggacgctcgccgtcgtttcgctgaatcgtcgaagacacgtgcggcagcgcaaaacgcggcgaacactgcggtggtgctgcacgacttggcgacgagtctcttcccgaacgtcgccgtgcaacgcgtcttcgaagcactgctgtctcgccgaacgcaaatcctcgacgccgacccgggcgaccactacagcgaactgatcgtgtgccgcgtcaccttccccgctcacttcgagtcgtacgcgtcggaactgttcgccgcgactgcggcggggatcgcgcgcctgcctcaattcgcgcaggtccaggcggtagggagctccatggtgatcgtcggtggtttcgaccagcgcagtgaagccaatcggcaactactggccatgcagctggtgcgtttgctgcaggagcttcaggtgcgcgcggaatcggctggggcggtgttcacggcggccatcgcggtggaggaggcgcaggacgtgttggcaggcaaccggcacagcctgcggtattgcgtcgtcgggcgggcgccggcagtggcggcggcactggtcgaggcgtgtgaagtgccgcccttcgaccacacacgctgtgtgattgtcgccacgccgaacctactgctgagctcggccacgccaagcgcggaccttgccgcgctcgcagggtttcgactcgtgaagctgcgcgacacggtagttggcctgcgcgacgtgcttgtgatggtaccgccaccgtcctcagcgccgctgacgctgccgctgccagtcgccgtctgacgacggccaattgtgtctgtgggtgggtgcgctgtgaccaaaccgaaatcgaggttttgtgttagcgcgggcggtggaagagtgctccagctcccggttacaatgtgatatcgtttgctttc

SEQ ID NO: 13037 - DNA, 3240 bp, Oryza sativa
  ref <308>: DATABASE ACCESSION NUMBER: AK110385
  ref <309>: DATABASE ENTRY DATE: 2001-12-06
tggccgggtaatacctattgctgcaattgcattatactgacatagccgccggtaagctgtgttcgactctgcagatcttgcaagaggacttgaacagcttgcgggcaacatctgggttggccttctgggtgtcggtgtaatcaatgccaataatgctgagccaacgaggttgaatcatacactcaaccgtatccactgtggacccaacagccttgacgctgtagacgatccagcatatgttgtctcagagtgcattgctgggcaggccttgcctaagaaacaagccagcagcagcacagacaaagcccagcgtactacacagacggccgctgcaatgcagattgcatgcaggtagcagcggcagcagcagcagcagcagcagcaggccagcagcagaacctcagcagcatgatgcaggacccagcagcagctgcaacagcagcagcaaccaagcagcagccaacagcagccaacgtagcaagcagcagcagctgcttgggggcgctgtgctgggctcagcagcagctgcattcccaagcataggcggcggcagctggggaccgggcagcggcagcggcggcagcagcggcggtggctggggctggggctggggcagcagcagcagcggcggtggcagcagcggcgggccgctgtacgacattgcagcagcagacgacaaggacaagtccggcaggaagaagaagaagagcaaaaagagcaaaaagcaggaagaagaggagcggcagcgagaagaggatgatgatggcatggacatcacagagtcagaggaggagccagtgggtccagaggcagaaacacgcgcgcaggtgctgatcacatcggaaacagaggcagaggagaacagggagggcctggaccccaccaagcggcacggcacgcaccgctgtgtggaggttgtgattgagggctggcctgaggtgggggcgctgcctcgtgttggggagctgaaggacctgctgaacgtccaggagggcttctactttgactaccaggacgtcgtggaggacaggcgcaaactggagctgcaatacgacgagtacattgcgtccgtcgacatccgcacagagtatgttgatgacaagaccaaccaccagcgtgtggtgtacaagttccgcccgtttgtgtttgagggcatcgacactattgagatcaagggcagcagcctgatgccgcagcgtgtggttgacgacattgtgaagacctgcctgcccgccaacccctacagggtggacataggcctcatggacaaggtcagggagaagattgagaaatggtaccaggaccgtgggctgccgttctgctacgtgggctactttgacggcatggaggagggcacgctgcgtgccaatgtgattgaggccaaggtcaacaacgtggcggtgcgctacgagcgaccccgcaatggggagagcgacaatgaggtgtacagccagggggaggtggtgccggcagagaaaatcatcacagcagcaggcttcaagaagggcgagcactaccacattgatgacggccaggatgccatcaacaacatctacgcgtgcggcctgatcgaggagatcaacatcgagcctgagcaggacatgagtgaccccagcaagatcaacatcaaggtggtggtggaggaggtgcagccaaagagcatggagttggaccttgactgggccttccagctgaaggacggtgtgcctcagatcagccgccagtcgctcatccctggtggcagcgtggagctcacccacgagaacctgtttggcgacagccagtcactgtcactgtcactcagcagcagcgactggcgcaaccccgcggccgacctgggcttccagatgagctacacagagccgttctatgcaccaaacacgacacgcaacgtgcaggtgttcaacactcgcaagatgtctcccgtgttcacccctggcgctgagagtgacgtgccacctgtgtctgtggacaggtttggcgccaaggcctggaccagccacacaggtggccaggacaacaaggtggagcacaacctgctgctgcagcagatctccacggttgatgagaacggccagatggtggtgaagggcaccaaggtggctcgcggctactacgcagacaacggcccacccacgacgctgtctggctctggcagggacgccagcctgagctaccagggcttctgtgcagtcgacaatgtgcagtttgtcaacggcaaccagctcggcacaagggccttgctgcaggtggaccagggcctgaacctgcaggtgccgctgcctggtggccgcaagctgggcttcaacggcggcctgtacaaccgcatggtcggctccatcacacacttcatgcagctgccaggcctcaagacactcacggatgaggacgtgtggctcaagcgcaaggcgccaaacacgctcgtgctgcacacacgcgccgggaactgcatcggagacatggcctcatacgactacttcacagtaggaggcccctacagcgttaggggatacagccctggagagctgggtgcttgcaggaggttccttgaggcagctgctgaggtgcggctccccatgaagaactggactgacaagctgccaggaacgctgtatgcatttgcggagatgggcagcgatctgggcagcagcagtagcttggcgggcagtccgacggagttttacaggaaggctggcggcggcgccagctatggtgtgggtgtgaaagcgctgggtgcatgcaggtttgagtatgcacgggactgcaacgctggcactggggcggtctttgtacagtggggcgagcgcttctgagttggcatggcggttgggattgcggaggcagcatacggctggtgcgccttgcggcgtaggagtgtgcgggtggtctggtggcatggcggtgggatgcagccttcaggagatgggttgtctgtgtgtctgcaggtagttgaatcaggtagtgagctgagtgcagcaaggcccaatggatgacaggcagaatatcatgaacttggtctacaaatgggccttgtttcatcttagccattcagcacccagcagggcttgggtgtgttccctttgaatttaagattatagcagcctctgtgtgtgagcgagtgcagtagctccgtgcactgtggcggctcgttgtgtcaaacattgcggtttttccatcttttctgtcagttcgtcagcttgatgagccgcactcctggacatgtaacaccctttcgtattc

SEQ ID NO: 13038 - DNA, 2725 bp, Oryza sativa
  ref <308>: DATABASE ACCESSION NUMBER: AK110386
  ref <309>: DATABASE ENTRY DATE: 2001-12-06
atttttcgcgctcgcctgtgggcagtaccggtggcggaccggaaccggccacaccgcagagcgccggcggcggccatcaccggtcgctgacgctggaccagaagtgggtcggcggcatcagcggtggtaacagtccgcaggtcggccccgcagcgggtggcggtggtgccaacacactgacactgggctctgtgacgggcgtcgcgcccgctggcagcccgcatctgtcacacagctctttggcggcgcgccattcgggtaccggcccgctcgcgctgcagcacccaccggtgcacccgccgcattcgcactcgcagtcgcaccaccacgcggtgcagctgcagccgaagcacgacagtccgccgcagcaccacggcacgggacacagtgccggtggtccgctgccgctcaatgccgccagcattgcggcgggcaaagcggcacaggcagccgccacagccgcaacggccggtggcacgacagtggcggtggcgctgccgggcacgggcctttcgctgtcgtacgccaacagcggcgttgcgggcgtgacgggtggcggtggcggcggtggcggcggtggcgggacgctgacagcgccgctgtccggttcagcgcccggcgccaatgccgccgcgggagcactgctgctgtcgcgcaaaccggccggtggtgcaggcggcgcagcgggtggtgccggtggcagtggtgtgggtacgccgcacaacacagagcacatgttcgtcgtcggcggcatccgcgatgcggcgtcgactttggacggcatcgactcgtacgatccgtccactgcacagtggcgccattggccgcatatgacgtccaagcgctgggcaccggtctgtaccgtgtgcggcggcaaagtgtacgccgtcggtggcggtgtggtgtcgaagcagtcgtacgacactgcggagtgctttgagccgctgacgggtgagtggacacgcgtcagctcaatgtcacagaaacgcagtgccggtggtgcggccacagtggggggtaaggtgtacgcgatgggcgggttcgatggggcgtcgcaattggcgtcgacggagtgctatgacccggccctcaacgcgtggcgtcgtgtggcaccgatgacgtgccgccggcgcggactcgcagcggtggcgttcaaagacgaagtgtatgtgttcggcggttacgacggcgtacagcgcttcaacagcgccgaggcgtacagccccgccaccgattcgtggcgcaaactgccggcgctcatgaacgtacgccgtgacggctgctgtgcggcggtggtgggcactgccatctacgtgttgggcggttacaacgggaagcgacggctggccacagcggaggcgtacgacacggcgacgggtgtgtggcgcgtactcgcgccgatgatggcggagcgtgacgggtgcgcggcggcgtgtgtcaatgggaaactctgcgttttcggcggttacgacggcaaagcgtggctcaacaccgcggagtggtacgatgctgcggccgggcagtggcgttggctgcccgccggaccgctcaaacgctcgtattgcgctgccgtcacgctcacggtcacgcctcagatcgcggctgtcgcctttgccgcgcactcaaatgccgtcaccgcaaacgctgccggcgccggtgctggccctgcgggcgcgtcggtgtcgactccgcacgccgttgtggcaccgggcagtacgcatggccctgcgtcgtcgcacgtcacggccggtggtggcggagctacggcgatggcaggtagcggcagtggcttccagcagtcgccgcagccgtcgccgcagcagtcaccgtcgatgtcgccgcaccacagcggcggcggttacggcggcggcggcgcgcataccctgccataccccgcggtgggcagtggcccgcaccacgcgcacgcgcacgcccatgcgcatgcgcacacgcacggccactcgggctcgttcgatggcacgggactggtgacgctgacgggtctgcccaccggcgctgcggtcatgagcgcactcgcactgccggcgtcagcggcggcgcatgcgggcggtgcagtgccggcgtccacgacaccgcacggcagcagcggcgcgcattcacaccactttgcgcacccgttggcggcgctgacgctcagcggtcaccacatcgccgcgaccggtcacattggcgctggcggcggcggcggcatgggcagcggtgtgtcgccgttctcaccgccggccacacccaacgccaaaggcctgtccggtgtggtgggtgcacagacgccgcaccacccgctgtcgtcacacgccacgaccgtacacgtcagcggcggcgctggagctggcgctggcgttgtgcacgcttctgccccgtcgtcaaatcgcggcattcgccgcggctgaagtgcgtccctttagggcgcgtctgtttctctctgtctgtctcacgagcgcgtgcacgaactgctcgcccgcgcgtgcgtttcatctcctccgctgcgctcacaacccaaccccaaaccccgcatcgcctcccccaccgccactgcgttgatccgcgacatacacagcggagaagcattgccactgcgtttctgtgttgtcgcgtgtttgtcgctgcgcggagcaccgcatcagcactgtcgcacccccccgccgctgctgttcgtttatctgttcgtttcctgcaaaacagcgcgtgaaaacgcagcgcatgt

SEQ ID NO: 13039 - DNA, 2915 bp, Oryza sativa
  ref <308>: DATABASE ACCESSION NUMBER: AK110387
  ref <309>: DATABASE ENTRY DATE: 2001-12-06
actaacgctaaaaaagtaacagtttctgtactttattgaaagaaaaaaagcaacatgagctacgccgatctgcaggcaagcatcgagtccggtgatttcaaccaggcaagcgctgtggccgcccgcattgtcgccgagaggtcctctgctgccgctgctgttgaacacgaaaatctggtggaagccctttgcgttcaagcgtcgctcgctgcgctttccggcgccacgaacgttgcgcttggtgaaatgacctccaagctgcgcggtgccgttgaaacgcccttcgagacggcccttgcatactacgtagaaggcgtcgtcgccctgacggcgcagaaagcgactcagctggcccgccgccgtttcgacctcgcccgcgaaagtgacgacactttcatcttcgcgcgtcttggattgggcgcgtgcgacttcatggaggagaagtacgaccattgcttcaaccactacaagaacgtgctccgccagctcggcgatgacgccccgaacatcatccgcgtcgtcctggccatcagtgccttccgcctcaagcagttcgatcacgcccgcctctgcgttcaacgcgccatcgctgtcgatgacgcggacccactcgcccttctggtgcttttcggcatccagattcacttccgtgaagtgacggccgccgcgcgtaccatctcccagctgatgcgaaaccagccgacgattgtcgtcactcagaagtacaccgatttgctcttctttaacgcgctgaagtcgagccggatcgcagctcagcggaatacgatcctggcactcatcctcaagacccaaggtctggcgaccgcgtcgaacaacaagtccctcattgcctacgcgatgatgcagcgcggccgcttgctgcacgcagagggccgtttgagcgatgcgttggcggagtacgacgccgcacttgccattaacgcacagcttactgccgctgtggtccaccgcgtgcagttgcttcatgacctccaaggggagggtgtggcccgtgaggagcttcgcttggcattggaacgccacccgaacgatcctgaagtgctcttgatgacgaccgtcacgaaggcgacgttggggcagcatgccgatgccatccggcaagccacgtacctcactcagaccgtcgcgaaggagctccccgctgcctggtctgtcggcgcctgggccaaccgacttgacaacgcccgctactgcgagctcgccaccttcgcgcagaatctgctgcagaaggccaacctgcccactgacagggcgctcgacgcgaacgctgcggtgctggccgggaaaatctacgccttcgttcgcgtcgcgacggaggcgattggcactgacctcagcaccgcggcccctgagagccttgtcgtgaccgacaccacctacccctacatcttcaactacgcgtatctgctcgagtccaccgacgcgaagaaggcccacggcatctaccgccagcccgtgaagcgtgggccccacgaagcggccgcctttgtgcgtctcgtgtacatgtccatgagcatgaaccgacccttcgaagcggcgcgctgggccaagctgctgtccctgacccacccgaacgaccgctccggaatcgtcctcctcgcttgggtgctcaaggagcaaggacacgcccgagaagccctcgaaattgtgcacgaagagaccaagtcgaagcgtgatgtccagctcgctcttgtgaccggcgctctgttcatgcacgatagccagggcagcaccgcgaagactgagaaggtgacccgcgccatgaacggtttccagttcgcgcttcgccacgacgcggacaacgtcctggcagcgcacggcgccgcctgctgcgtcgcgctgcaggggtacctcggtagcgctgcgcagatccttgaacgcgtggcggaagccgactgcaactccgataccgtgaccaaaggcatccgcgagcatcgattcaacctcttcgtggagtcgcacgctttccgctcggccatcggtctcctcggcagccttccggtagagaagctcacgcgctggcagtgctgcgccctcgccacttgctacgcgcgcatctcgcaacacgacagggcgatccaaatcctgaacgctgccctggcgctgcaccacaacgacgcctccgtctgctactaccttgtgctatgcctccttgcctccgtcttcgaagccctcgagaaggaggacacactttccgagcagcgaggtaccgagtgtcttgacaacatcaagcgtgccctgtcgttggtcaagtacgcgcaacgcgtcaagtcggatcaacagcgccacacgctcgaacaaattgtggcgtttgtgaactcgaacaacctggacgcgtctgtgaaaaagcgcatgcgcgaccgcaccaaggaacgcgagcacacggaagcgatgcgcgcccgctggcgtcagacgcaccagagcatgatcgaggatgagatcatcaagcagcgtgctgcggaagaggcggccgcccacgctcgcgccgaacgtgagcagcgtgaagcccttctgtatgcacgcacccaagacttcatccagcgcagctacactggcaccgtcgtggagcagaatccagtgcaggaagctcccgccgaggagatggcggagctgaacgctgatgagctcgccgcgtacatggcagacattgctgacggtttggacgaagcccccttggatgatggtatccgcgcgagagacgacgtcgctgccgacgaactgcagcaaccgcctcggccgcaaccaacggcggaaggtgccggcgatgcgatcccggccaccctcttcgcgggtgaacagcagtaaaaaagacaaacaatctgcccccccccccaaagaaaaaaagcggtcatgcagggtaatcaagccgtaccacacgttttttcgtgagaatg

SEQ ID NO: 13040 - DNA, 3047 bp, Oryza sativa
  ref <308>: DATABASE ACCESSION NUMBER: AK110388
  ref <309>: DATABASE ENTRY DATE: 2001-12-06
aacaaacgctaaaaaagtaacagtttctgtactttattgggtggtaattccgaagtaccctcacatgctagttcccttgcgccgccttgtcctgcagcccttcgcaggtacaggcgacgtgaatgcgaacgccatcgcaaccgcccttgcaggcacccgcgttgagctaatgcaggcgtgcgacgtgatgggcgagcgcttccgcgtggtggacgcgacacccgcctctgtcggcactgttgtccttggatccacagtggtcgtgttgcttccggcggaagaaggcggcgccgacgtgactgacgacgacgaatccgtgattgcccagcccaccctcctcgaggtgagcgatgaagttttttggccttcgtctgccgtcgtgcagtccacaagctctaaggctggtgcaagtggaatcgtctgcgtcgcgactgatgcgctggtagcactgacgaacttactcggtgaggcgtctgacgccacgctccgcggcgtcctcggtgtcattgcccactcgaaccgtgcaatgctgagtgacgcgtcgccgttgggcggtgtgaccttgaacgtgcatcacgccgcgctccttggctgccaacacggctcgcagctccatgtgacgaacaagctgcaaacgcacgtcgtggtggcgacagatgcagaccagtgccgggccctcaacgcgctcgccaaggcgctgcgctctgcggctctactcgtgctggacgccaccacgtttgcagggctgcgcgaccggacccccgcgccgccttcttcagcgccggaggcgagccttgtcgttcgccttcctatcgacgcctgcacggtgcggtcgatcgatggccccgttgcgcggcgtgccgtcttcgccaacctttccggcctcgacccgcgcgtgagcgcgacagcggacgtcctcctcgcgcgagagctgcgccgccggaagcgtcgcgttgcggtccgtgacgtcatcgccgtgacgctgaacggtcaaggcgctgggtcgcaggaccccgctcgcatcgagccgctgctggcggatgagtgtgcggcggccgagcaccactgtgcccacgcgctccctgtgtacttccgggtcgaggaactcgagggcggtaatgtcgttgaccccgccacgaccgaagtttcactggccgggcccagcagcgtcgtgcctcacgtcggccgcgtgccgccgatcgtctcggcttcacccttgaaccttgcgctctcatcaacgccggcgttcgcgaaggtcactcagctgctcgccaagaccaccacagccgtgcctaccgggaaggcttggtgcaacgtcatggtggtcgccggtacccccgctaacgtgcccgcgacgctcgcgaggctggcggcggaggtgctcggaatgcaggtgtttgaagtcgaccccatgctgcttgacacacccaccgctctgtcgctcctggcccgcgtgtgctatcaaggcgtcgtggtactggcccgtcacatggataaggccgacgcaggcagcgagttcgcgcgctggtgcatcggcgccgcgactcaagcctcgtgggcgcgtgacgacttggagtccaaattgcctgctgaacttgcgcccttgtccaagctgcgtcgtgcgacggtcgtcctggtcttcgagggcaacgacccgccggcgcccgccttcaccgcgatcgcttgtgcgccaccgattgtgtgtggcaccccagacgacgcggcacgtgaagtcatcattcggtccgttctcgccgcgacgacgaccgtcgacgaccgcgctcgctcggttggatgccccaggctctctatcggtgtcgatgcggccgcgctcgcgtcctggtcgacggggctgagcgtggcggacctcgcggtgtggatcacgatcgctgccacaacgcatgccgcacagtactcctgcggcgaggccaccgccgtcatcgacgcccccgacttcgagaaggcgctcaaggccttccaggcgcaacacggtcacaacctgacgagcacgaagctgcagcccgtgaagtgggacgacgtcggcgggctcgaagaggcgaagaaggagatcctcgagaccatcgagctgcccctgaagcaccccgagctcttcagcggcggtgcgaagcagcgtgccggcgtgctcatgtacggtcctccgggctgcggaaagaccttgctggccaaggccatcgccactgaaatgggtctcaactttatcagcgtgaagggcccggagctcatcaacatgtacgtgggagagagcgagaagaacattcgcctcctcttccaacgtgcaagagacaacagcccttgcatctgcttcttcgatgagctcgacgccctcgcccccaagcgcggtgcgaagggcgacagcggcggtgtgatggaccgcatcgtcgcacagctcctcgccgaggttgacggtgtcggcggcactaaatccgacggctccgcttcggcgcaggtgtttatcatcggtgcgacgaatcgacccgacctgcttgatccgtcgctgctgcgcccaggacgcttcgaccgtctttgctacctgggtcctcctcagaataagaaggagcaggtcgccgccgtcaaggcactcacacgcaagttcaagctggcgcccgacgtggacctggccgccgtggtggagcccctcgagccggtgtacagcggggccgactatttcgccctgtgctccgacgccatgatgttggccgttaacgaggctgtggagcggctcaaggcccaggccttcgccaaggacggcaccgtgaaagaagcgcccgcagcagccacggttccagcgaagcaagaaccactcttgatcgaaatgcgtcactttgaagcggctcgcgcagcgctgaagccctccgtgtcccctgcggacctgaagcggtacgaaggcatgaaacaccagttcaccgctaagtcttgaagattcagaccgtgcggacaggccagaggtgcgctcgcgtcgcgtgtgtgcgtgctgtgatgataggatccattggagagagaggaggaaaaagaatatttcgccggtg

SEQ ID NO: 13041 - DNA, 3744 bp, Oryza sativa
  ref <308>: DATABASE ACCESSION NUMBER: AK110389
  ref <309>: DATABASE ENTRY DATE: 2001-12-06
tttgcaggagctgctggacgtatgccagggtcaacaacagttgaaccccatccacatcagtgcagcactcagcacctgtgtgaggctggcacgcagggcacactctgctgacagtaatttgtgggcagcatgcctcctgaacagtgaacgcactcagcacaccgtgcaacggcagcagcagcagcaacagacgacatcagcatcaacagagcgccagctaacagagctggtggtctgtcgggtgctgctgtgctggacgcagcagcagcacctatgcagcagcagggaggtcgccaacatactgtggtgcttggcaaagctccggcacacaccaccaccaggcaccgtacagcagctgctggcgcgatttgtggacgtcatccatggcagcagctgccaggcgatctccatggtgctgtacgccctcgcagtgcttggccaccagccagatgctgcactgcttgacccgttgctgcacagcttggtcaaggctggcagagcagcactagcaacaggctgtagcttggacaactccaagcagcatggtataccagtgctgctgcagcagcagcagcagcagcatcattgcatgcaggcacctctgcagcagcagcagcagcacatgccacctgccagtgcccaggcttttgccaacagtgcatgggcactggcccgactgcagcagcctgcactggcacacatatggctgctgccgctgctcgcgctgttgcacagcagcatgcaaccagcagcagcctgcagcgctcagctgcagcagcagacagcatattaccagcctgtcgtgcagccaaagcaattgcaggcagttgcaaacgcgctgtgggcaagcgccaccatgctgtgcagccgccaggcgcatgatcgggacatatatgcagcagcaggcagccccgatgaacacggtggggctgttcagcccaagccgccgccccggctgctgcctggtgtgcggctcatggctactcggctgctggagcagtgcagcagctgcctgtgcagcggccagccccgtgagctggccatgctggtgtgggcttgcgggaggctgcaggtgcggcccagcagccagtggcagtcacgcttgtggcaggcgtcaggcagtacgtttgacgggtacacaggggatgagtgcgtggcgatgctgctgggtgtggcgcagctgcgtctgtcgcctccagccgagtgggtggcagggctgtttgttgccacgcagccacagctgcgcagcatgacgggtcagcagctggcgccgctgctgtgggcgtgcggcgtgctgcgcattcggcctccagtggggtggctggctgcagctgtgcgtggctttactgagcagctgcagcgcagcagcgtgccgcctgagccagcgtttgtgagcatggtggtgtgggggatatccaagctgggctataagccggcagcattggatgcatctggcattgagaaggctgcccgcacacacatactggcgtacaggccacaccaggtcgccaagctgctgctaggcagtgccagggtgggctggcagctgcagcctgacctgctcaccgtgctgctggaggcctttggcagtcacttggagcaggccagccccacagatgtctccatggcactctgcgctctggctacaacagtacagccagttgggaggcatgctgcaactatacagcagcagcagccatggcgcctgcggacaccagaccagctgcaaatgcagcagcagcggtggcggcggcaatccttgctagctgtgcagtctactgtgcagtccatgtttgcagtatgtgaagacagcacccttgtgcggcagctgcagtatgtaggcagcggacagctgtggcaccaggctggtcagtcacagtcatcagcaggactgccaggtgctgtcaccacgtctcctgctgctgctgttgcttgcttggggcctgtgtcatcccaggttcagtggcccgtgcagcaagagcagcagcagacatggcaacagcagcaccagcagctgcagcgacaccaccagcagcaccacgtgagcaccgatgccgcacatagctacgcttcccattgttccttcagcagccacacagcagcacgttcagagcatgtgcagctgctgttcactcgagctgagcagctgctgtgggcaatgacggcaagcgagctgtgccagtgcctatggtcggctgctcggctgggtgctgacctgtcaccacagtgggcgtatgccataaaccacacactgccggcacagatgcagctgctggggcctggcgacttgtgcatcctgctgtggtccctgtctcgcctgcagcacatggtgcgtgtgaagggcgtcctgcgggtgcagctgctgctacgcagccagcagctgctgctggccagccagttctcagcacgtgacctgtcagcatttgtatggaactaccaacaagtgttcagccactggcggcagccgccgccgcggccgtgggtggttgcatactgccgtgctgcttaccgcacgctgcccagctttactgctcggcagctgggcgtgatgctgcgggcgtgtgtgctgctgggtgtggtgcttgagcagccactgctggagcaagcggggctcatgttggacctgtggtcggccaagatgagcaaaggggagctggccacatgcacagcatctctgctgcagctgcagcggcgccggctggatgcattgcgaaccagcatgggtgagaggcaagcctcacagcaacataggctggcatggttgccgggaaagcagtatcgggagtactggcagcatgggcaggggcttatggcaacaacggcgccaggctggtgcaggggtgatgagcagggggttggaaccaagctggcaaccctgcaggtgcaaactgtgccacagtgctttgcgggcagtgtgatatgacaagctcttggcagtggcttatgaccggccaacaccttcgcatgcagaaataacagtgatgacctggcactgactgaggcagtttttggttgggttacctacacacagtgtgtctgggttgtgtgttgtggacatgttttgttggcattagtgttgtagtttgtagcatgcatgtcgcttgtggtggggttgtcagcgttgtggcagccgctgcatggcatgatccggctgcaagagccttgtaagaggcccctgtacaacaatttgctgcttgtctggcatgcacgctgacggctgctggaccctggcatgtgagctacgttgcggtgctgccagcagccaggctttatagcaaagcagacatgcattgtggaccagtgctgtttatagatgcagtattagctgattaaacagctgaagtgcatatggttggttgtgcctgtcacattggtcggttgctttcggctgagtggatgtgtgtcagggagattggactgcctgggcattcacgacagtatcacgtttgtagggtgtgcccatatggggtgtacagctcttttagtgattgtgctcccatgctgcctgtgctgcgtgatgagtgtaagagccatgttggccaaacgatcgacttgcggcgagtgccagtggcacagtggggcctgaagaggctatgtgttctgcagggtgtgtttcagctgaggcatccatttacaatggttcgacgctgcttcaagcttagttgttgtctggtggaggctgtagatctatcaagcctccttttggcaattttgggaggtcgattttgtaacacagggtgtgag

SEQ ID NO: 13042 - DNA, 2963 bp, Oryza sativa
  ref <308>: DATABASE ACCESSION NUMBER: AK110390
  ref <309>: DATABASE ENTRY DATE: 2001-12-06
aactaacgctaaaaaagtaacagtttctgtactttattgtttttcgagtcttgagcgatggtcgccaagaacagcaacaagcaggacgcggcagaaaccgcgactgcgactgctgctcctccggccgcgacgtcggcggcggctgccggttccaccgcgcccaagttccttggcgcgttcgagatcccgcagctcgtgctgtccatgctggtgtggctcgcgcagagcgccggcctggtgtacgccatctacaacgcctaccgcatccgcctttatgcgttgcacgagtacggcttcgtcatccacgaattcgacccgtggttcaacttccgcgcgacgcagtacctgtccaagcacggctggtacgagtttttccactggtatgattacatgtcgtggtaccccctcggacgccccgtcggcacgaccatctaccccggcctccagatcacgtccgtcgcgatccaccgcttcctgaaggcgatcgactacaagatgagcctgacgaagatctgctgctacgtgccctgctggggcggcgccgcgtgcaccttctttatgtacctcatcactgcggaggcgaccggctcgcgcacggccggcgtcctcgcggcgctcatcatggcgatcatccccgcgcacatgatgcgctccgtcggcggcggctacgacaacgagtccatcgcgatgacggcgctgacgatgaccttctacttttggatgcgctcgctgcgcacgcacaactcgtggtggatcggcatcatcgccggcttcgcgtacggctacatggtggccgcgtggggtggctacgtctttgtgctcaacatgctcgccgtgcacgcggcggccatcagcatcatcgaccagttccgcaaccgctattcgagccgcgtgtggaagtcgtactcccttatgtacgtgatcggcaccaccatcgccattcagatccccgtcgttggcatgacgcctttcaagtctctcgagcagctcttcgccctcgtcgtcttcgtcttcctgcaggtgcttcacttcagcgagcgtctccgcaagcaggctgacgctgaggtgctctctgtcgagaccatccgcatccgcgtgaagtgcttcctcgtcgccatcgctgtcatgttcggcatcatgtgcctgctgtggcccaccggcttcttcggcccgctctcgtcgcgtgtccgcggtctcttcgtgcagcacacccgcaccggcaacccgcttgtggactccgtcgccgagcaccagcctgctaacgcggacgcgtactggcattacatgcactactgctgctacggctggcagattggcgtcttcctgctgcctttcatgacgaagcgcgtttatgctggcaccttcctcttcgcgtacgccctggtgacgtactacttctcgctccgcatggcccgcctcatcatcctcgcgtcgcccgtcgctgctggcctcaccggcttctgcctcggcgcgctgctgcactgggcctgccgccagttcttctggtcggacttcgacgcgaacaaggaggccttggccgcagagggcaaggacgtgaagggcaagaaggtcgccaccgcgaacgcgtacaccgtcgaggccatgaagaccaacgctctcctcgcgtacgacggtgcccgcaccttgcgtgtcgccatcgccgtcgccatcctggcgatcgcggcctacggcaagcagtggcgtgacttcaatgaccactccgagaacatggcccgcagcttcgccaacccgcagctcatgttcaagagccgtctcagcaacggccgcgaggtgatgatcgatgaccaccgcgaggcctacttctggctccgcgacaagacgccgaaggacgcgcgcgtgatggcgtggtgggattacggctatcagatcacgggcatcggcgagcgcacgagcatcgctgacggcaatacgtggaaccacgagcacatcgcgacccttgggtactgcctcaccagccccgtcaagcgcgcccacgagctcatccgccacctggctgactacgttctcgtgtggtccggcggtggtggcgacgacctcgccaagtccccgcacatggcgcgcatcggcaactccgtctaccgcgacatttgccccaaggatcccctgtgctctaagtttggcttctacggccagaaccacgagaacccgacccccatgatgcgcgcgtcgctgctgtacaacctgcacgcccacaacattcgccccggcgtgcgcgttgaccccaagctcttcaaggaagcgtattccagcaagtatggcttggtgcgcatcttccaggtgatgaacgtgtcgcaggagagcaaggaatggaatgcggacccgaagaaccgcatctgcgacgccccgggctcgtggtactgcacgggccagtacccgccggcggaggtcatccagaagctcatcgcccagcgccgcgaattcggtcagctggaggacttcaacaagaagaacaaagatgacgagtaccaccgcgcgtacatggctcgcatgggcggtcactaatcgagcgaacgagctggaaggaagaggcggcttttgtgatggtggtgtgatgagtccgcgagagattaggttttcttcctctttttcttcgccggcgccgttcgtctccctcctcctctgcctccccctctttccctcgcctcggtgcacgcgagaagttgttgtcctgctacacccacgccaaaaaaaaagaacaacacgagagaggaaaatcccacgctccggtctaaacccaaaaaagaaccccaacacaacaaaacaaaactatgaaaacatcaaaacaacgctacaaaaaggcaagcaatcgcgtgcgaggtgatggtgccgtgtgccgttgcgacggggggaagagagagagagagagatgcctcccgtcggccccaacactcgacaaacgcggttgcttgatttgggctgctgtgcgacttttctcgacggac

SEQ ID NO: 13043 - DNA, 3521 bp, Oryza sativa
  ref <308>: DATABASE ACCESSION NUMBER: AK110391
  ref <309>: DATABASE ENTRY DATE: 2001-12-06
agctactcttactgctcggcctcttgcgccacctgccttccgccctccattcttcttctcccaccactcgctcctcatccacttgtcgcccgctcaacctcacaatcgcccgccatggccgacgagcaaccgcctcccccgccgccgccgcaagacatggatcccgagaagatccgcgcaaagcgccttgcgaagctcggcggaccctctacccctgctgggagctcgcaaaatgcctctgccgctccctcgacgccagcctccaacagctcgtctccgaagcccgcagaagctcaggcaccacctccgaagccacagccttcgccatcacaacccgcgaatcccttctcgcaactgggcatgcagtcaggagaggcgccgaagccccgcataaacatcaagaaagctgcgccgccggctggtagtgcacccaaaccgcaagatgtcagcatcgaagcatgggaggaccgcacactcagcagcgccttccggataagtctggatcctgctcgcacgcaagatacgcatggaaacaggctgtattttgcctctgccgcaaagtccgatctggaggatgagggcaagccgctgcggttctccaccgacatgctcgattcggtcatcctcgagtctgcctcgagccacacccaaggttcggctttagagtacctactgggttgctggaagcgcgttgcaaaactattcaagagcctcaccaacaaggctgacccgaagcacgagattgtaaaagaggcgcggagactatgcttcagctactgcatcttcgcagccaccatgcccgacatgtttggcgaggaggcgcctgtgaccaacacccttactgatcacattttactcggcccagacgacgagcgcggtatctgctacgacttcctcaccgaagccagccaccggttaggcgaggacgacacagtcaaggaggcccttgtcggcgccatggaggatgtgagccggagactggcaaagatatccatgaacggcgactaccggccgttcatgcttgttctgcgggtgttcattcgattcccgccgctggttgccgcactcgccgaggcagagagcttcttgccagctgacattgaggctcagcagatcgagacgaacacctttctcggccccttcttccggttatcaccgatgcagggcgaggtcgcgctcaattacttcgctggctccgctgcgcaagacaagggcctgatcacgaacgcgcaacgagctcttcgtatgaccctgcagactcatcaggacgagttgctcgatatcacaaacgccttcatcaagaacaaggagtcgcgagagaagattctcaactggtttgctctgaccgtgaacaagaatcacaagaggcgagcacttcaggtcgaccccaaggttgtctcaagcgatggcttcatggtcaatgtcaccgtcattttggatcgcttgtgcgaacccttcatgggtgcgtcattctcaaagattgaccgcatcgggatcgactatctgcggcggtctccccgcgttgacatcaaggatgaaaccaagatcaacgcggacgaccaagcgtcagagcagttctacagccagcctgcaagcggcacgaacaacttcatcagcgaagtgttcttcctcacagtcgccgcgcaccactatggtaccgaagctgccaactcaaagctttcaaatctccaaaaggatgtcaagtggctgcagaaagaattggtcaggatcgaaaccgagcgtcacaaatatgctgcaaatccaatgcagctggccgtcttcgacaaccatgtgaagaaggtcaaagctcagattgaacgtgggcagtgtaccatactcgcgatccagggtgtcttgctcgacgagaccactcaagctcgctctatgcaactgatgcgatacgtcatagtgtggctccttaggatagcatctcctggtaccggcttcccgaagcaggagctgcaattaccactgcccgcagagcaatctacggcattcaagtgtctgcctgaatacttcttcgaagatatcgttggcaacttcaagtttatcacgaggtacatgccgcacatcatcacctccacacagtgcgaagagctggtcaaggtgtgcattactttcttgcggagctctgagtatatcaagaatccgtacctcaagtctgggcttgtaacaatcctcttccacggtgtgtgggaggtgcctgggcgtcccaagggtgtgctaggtgatacactgttcgcccacgcattcgctacgaagcatcttctccatgcattgatgaagttttacatcgagtgcgagagcacaggagcgcacacccagttctacgacaagttcaacattcgttacgagattttccaagttatcaagtgtatatggccaaacgccatgtaccgtgacaatctcgcaacagaagcaagggttaatcttgacttcttcgtgcagttcgtgaacttacttctgaacgatgttacgttcgtactggacgagtctttcaccgctttcaaggagatccacgatgtctccaagcttcttgaagatccgccagccgatttggatcaggctatacggcaagagaacgaggagaagctctccgcagctcaaggcaaggcgaagagctacatgcagctcaccaacgagaccgtggctatgctgaagctcttcacggaagcactcgcagactccttcaccaagaaagaggttgtcgtgcggttggcacacatgctggatcacaacctggctgcgcttgttggtcccaagaaggccagtctcaaggttgagaacccagaagagtacggctggaaccctcgccagatgttggctgaggtgacggacgtttacctcaaccttcagagcaagcagtccttcatcgacgctgttgccaccgacggacgttcatatctccccgagtactggagcgaagcccacaagattctagccaagctcgcgctgaagagccccgagcagcttcgtgagtgggagcagatggccgcggcgatcgaggccgcaaaagcacaggccgatatggaagagactgatcttggagatattcctgatgagtacctggaccctctcctggcaagtctcatggaggaccctgttatccttcctatcagcaagacagtcatcgatcgaagcactatccgaagtcatctgctcagtgactcgcacgatccattcaatcgtacgcctttgaagattgaggatgttattccaaatgacgcgctgagggaggaaattcagaactggaaggcaaatatcctggcgcagaagatggcagaacgcaaggctgccactgctggtgagcccatggacacgtcgtagttgaagagtcttgcttcatgtctgggtttgcattgctggcgtttgggtccctggatgcagatcttcgaagatcctgctgaggccaatttgagatagattggtgaagcccgagacatgagatttgaacctacttgcattgggctcagagacaaatacaatacgattttgcaggctgaagatcaggctgtgtaatg

SEQ ID NO: 13044 - DNA, 3132 bp, Oryza sativa
  ref <308>: DATABASE ACCESSION NUMBER: AK110392
  ref <309>: DATABASE ENTRY DATE: 2001-12-06
aagcgaaaaaccgagtttgtatactcgataaattaagatgtcaaaagccaaagccgctgcggccggtgctgccgctcccgccgccgccgttgcagtcgacgcgaaggccgcagccggtggtgccggggcgaatgcgggtgcgggcgtggaggtgccgaacacgttcctgtgcccaatccgtagcactgtgatgctcgatccggtgacggacaatgaaggcaacagttatgagcgcgaagccatttcggagtggctcacgcgcagcgctgtctctccgctcaccaatcagccgctcagtgcggccgatctgcggcccaaccgcgcactccgcgaactcatcgattcgtggcacacggagcgcggtctgcccgtgcccggcgcagcggaggccaaagccaaaaccgacgctgcggcggccaaacccgcagccgcagccgcagcggatgagaagaagaacgcccccgcagcggtcgacaaaccgctgctcaccgccgaggtgttccgcgcgggtgtggcggcggctgaaacggacgccaaagacgtggacgccgccgcgggtggcggtccacaggtgctggtgacagtgcgcgcgcccgtggacctgaccaatggcgacgccaaagcggcagccggttcgggcgatcgcgtgcccacggacgtgtgcgtcgtcatcgacgtgtcgggttcgatgggtttggaggccaaaatcaaagtcgccgctgacgcggacggcggcgccggtggtggcgtggcgggtcagaagccggcggtggaggaggcgggcggcttcacgacgctggacctcgtgaagcacgcagtgcgtacgatcatccactctctgggcgatgcggaccgcctggcggtggtcacgtacagcgcgcaggcacaggtggtggtggagctgacggcgatgaacggcgcggggaagaagaaggccgaagcgctggtggagaagctcgagcctgacggccagacgaacctgtgggacggcatttacaccggacttgaggtcatccggaagggcgcacagcagcaggccaaagccgcgcccgcaccctcaccgcgggctgccaaaaaccgaaaagttgctgccgccggtgccgccgccggtgctgccgccggtgccgccgcagcgccgcgctttacgtcgaacgccgcagtgcttgtgctgaccgacggtcagccgaacgtggagccgccgcgcggccatctcccgagtttggccaaatacgccgccgacaacaagggcctgcccgcggtgctgcatacgttcggcttcggctacaatttggactctcagctgctgtatgacttgtcggtggcgggcaaaggcttctattcgttcattccggacggagggtttgtgggtacgattttcgttaatgccattgccaacgccctcaccactgtggcgcgcaacgtgacagtgaccatccccaacgccgacgccaatgccggcgccgaagaggccaaagccgtcgatttgggctccgtcgtgatgggtcaggaccggtgcgccttcgtgtcggtcccggcgctggcggccaacaacgctgcggacatcaaatcgctgccgctgcggctgcagtacgactccaatgcgtcggcctttggtgcacgcgcgctgcaggccactgacgcgccgctgcaggtgacgtccaaaggcgctgccggtgctgccgcggcggtggctgctgcgcccggcggcccggccgcggccggcgcaggagccggcgctgctgtggtgccggaaacgacgagtgtgtcggtggcggcgcagcggtgtcgcttgggtctggtgcgtgcgattttggatgccgtcaaattggcggatgccaaagacgaggccaaagccaaagccgcgatcgcgcgcgcgtcagcggacatcaaagccgcgctcgcgacggcacccaaagcggcgtcggagtacgacagtccgcacgcgtacctgacggcgctgcagacggacgcggacgggcaaatcgcactggccgtatcgcgcacggactggtaccggcagtggggcaaacactatctgctgtcagtggcgcgcgcgcacacactgcagagctgcaacaacttcaaagacgcaggcgtgcagctgtacggcggcgaaaagttcagagccctgcgcgacgccatcgacacgctcttctgccgccttccgccgccgaagccgtccattcagcccgcagagagcttcgccgccgcattccgcgcggccggtgccggagctgcggcgggcggcgttgcggtcggtcatgcgcgtggcggtcgcggcggcggtgcgggtgcggccgcggcgccgcgcaaagcgcgtgtggcgaatatggcggcttacaacaaccgcagcaacccgtgcttcagcgctgactcgctcgtggccatggccgacggcacgcgcaagcccgtgtgcgcgctcaacgccggtgacgtcgtgtgcgccagcgctcgcgacgccgcagtgacgcgcgtcgtgcagtgcgtcgtggagtcgcgtttcgatgccgctgcgcccgtgcacctcgtgacgctcagcaaagggctgcgcgtgacgctgtaccatccggtgcggatgaccgacgccctcagcggcgcgtggtcgttcccgcacgcgctggcgccagtgcaggagcacagcggcgcagaggtgccggcggtgtacagcattctgctgaccgaagccgacgcggcgcacagcggcaaaggcgagcgctatgactgcgtgctgatcggcggtgtggagtgcgtgtcgctgggccacggctacggctcgggcgatgcgggcgcgggtgtggcaccgcatccgtacttcggtgaccgcgcgcgtgtgctgcgtgacctgcaggcgatgaagggcttcgacgccggccgtgtggtgctgaacgccgccaccgctgctcgccgcaactcgcagtcgggtctgatcgaagcgttggtgcagctgtgagtgccgccaacggctcaacacgttgaggcgctgtgaagttgtgatctgctctgcaaattggccgccgcagctgtctgctgtctgctgagtgctgcgcactgtctgtgtctcgcttccgccaccgccaggggttgcgttttggtagttcgctctgtctctttccgtcaaacgctcttgtgctg

SEQ ID NO: 13045 - DNA, 3277 bp, Oryza sativa
  ref <308>: DATABASE ACCESSION NUMBER: AK110393
  ref <309>: DATABASE ENTRY DATE: 2001-12-06
tcgcaatcaagtacgtgcagctgcggctgaaggctgagtcagcaaagaagccggaaggcgaagaggcggcagcggcggctgaagaccaggaggcggcggcagcagcggcagttgaggaggcactccaggctgtcagggcggcggctgagaagctgtcaggcctatcaggaccagcagcagcagagggccaggctggcgagggcgagggtgctacagctgctacagctgagtctgtgaggcaggctgtgctgaaggaggtggaggagaaagtggcggcagttgaggagaggaccaagcagcagcatgatgcagcactgcagaacgcccgctccagggagcgtatggcgctgttgctagccaaggccaagaagcttatggaggcagcacccgcaacaccagcagacagcgaggacgcggcagcacagaagcctccctgcagcctgctgagaagctggcggtgactgaggagtgcctgaagcagctgggggccaggcctctcgcagcagcactgacggacctgaacaggcttgtgaatgctcagggagacaaggctcaggctgagcgcctgtcctcaggcctggtcctgaagcctgacagcctgacctccctgacacgcttgggcgagctgctgtcagagatcgacctggcggactcagtgatgagcctggagctgggccctaacgtcactaacacgttaaataacatgacggcctacatggagcgcgtgagggcgcgccaggctgaggacgaggcccgcagagcatccggagcggacgaggaggttgaaggtgttgtcagcacgccgaagaagctgggggtgtctcccaacctgctcaaggaacaggaggcagttgagaagtgcacggcgctggtggaggagctgcgcaaggacgggctggtggtgctggggctgtctgctgtgcagtacaggcagctgggcatgctgcgggaggctgtgagcagcctgtcggtgtctctggacggcctcaaatacgacaggtgtgtgtcagcactgaaggacgtgcaggcgcagctggggccgattggtgctgccatacagaccaagctggccgcaacggaagaggaggagacacgcaaactgatgggggagcagaaggcgctggcagtggacctgtacaacaagctgcaggccttcctgtcgtttgaggaggacatcaggggcccactcaaaaagtgcctcagggagctaggcagcctggcaggtggcatcggtgctccccgcaccaccatcggctgcagtgcagcagccctcaagctggagatggcagctgaggaggcacagaagctgcaggacctgctggctgacatggctggctcacggggcgaatcatcagccgcagcagcacctgacagcgtggctgcaacacagaaggtggtggaggcgctgcagggtactgttgaggcgcttcaggcgtccctgggccagctggctgcccatgtggcactgagggtgcgcgccctaaaccctgaggtggcagcagcagcagcagcagcggggctggagggtgctgaccttgacctgaacacactggaggccatggagccagagcttgaccacccgctgcacatcctgggtgccacgcctgaagagcagcaggcagactgggaggcagcaggcttcgagcaggtggcaaggggtcgagtggcaacactcctgatcgccacagcaacggcagacggcgcccacacacacccagcagacacagcaaagccaccagcagcagcagcagcagcagcagcggcagcaggtggtgctgccagtagcgagtctggctctgtgcctcgtgctgctgtgggtgtgccggggctgccgagcggcaagagtgtgctgcagctgaccgctgagcgcatcctgaggctgcagcagttggcagcagaggcgacattcggcaggcatgcaccagtttcccgccacgtgcagtggtacatcatgacctctcccgccacacacgacaagctgcaggccatcctcagggaccaccactactacggcctaaaccccagccaggtcacactcttctgctgcaaaaccgcaccgccagcctttgccggagagcccctcaaagcactcgcaatgggcccctcaagcctcacacgcggagcgccgggctccggggaggtttttgcggcgctgaaacgcagcggcgcactggaccacatgaagcggactggagtccgacacgtcgaggtcaacgcggtcgacgacaacgtgcttgcgcgaccggcggacccgctgttcgtcggattcgcgatcgacaagggcctcgacgccgcggcaaaggtcgtcgagccgtcgtccgtcgctgctgcgtacgctgctgcaatgtccggcagcagcagcagcagcagcggcggcggcggcgacgacgcagcagcagcagtctcagctcagatggctgagcagctcgacgagtcgctgagcttcctggcgcccggcatcggatcctactacttcagcttctccgcgctgagtcgtgtggcagggttttacgagcagaaccctctgggcatgtaccggctggtgccagctggcaagctgcccagcaaggcgcccccacccgccatgacggtgaacctgccacccaatgctactcaggcgcagcgcatgcaggcccagcaggcgctggctgccgcccagcaggctgctgccgctgctccccccaagcccgtggagggctacgtgcccacacgcttcatcagcgacgtctttgcagccaccagcagcccagcaacgccaacagcagcaggtgcttcaggcgctggcccactgtctggttgcagcctggcctacctaggtgtggaccgcgaggaggagttcagctgcgtgctgggtggtggcccccacctggtggtgcctgagccagaggcagcagcaggagacctgctggcgctcacaacatgctgggttgagaatcaaggggcagtagtcgagtgtgaggagggggtggaggtgtctcccctggtcagctacgctggggagggtttggacgtggtagcagcagggggcacagtgtttgctgagccctatgacctgacactgcagggggccacaggccagggcagggcgaggcacaatgcgggcccgtgggctgtgcctgtgctagcggcgtatgcagtgggagcaggactggcagtggcaaagcagctggcacagaagtaggtcccgcatataggctatgcagtttattacatcagaaggcctgtggtttattgattgttttgtgtacagcaagcttcttatgtaaaggttgatgtg

SEQ ID NO: 13046 - DNA, 3199 bp, Oryza sativa
  ref <308>: DATABASE ACCESSION NUMBER: AK110394
  ref <309>: DATABASE ENTRY DATE: 2001-12-06
aactaacgctaaaaaagtatcagtttctgtactttattgaatcgaagctaaaatcatggcattgcccaccgttgcactcgttgtgcttctcgcggtcagtgtcgtggactttgcgcagtgcacatgccccgtggcgacgttgcccgatactcgtacctggggcggcgatgccctcgtcttcctccgccgccgtggaatggaccgcgtgcacgacgccgtgcggcgcatctcgaatcccgacgactctgatttcggcagccgcctcgcgtggcgcgacgccgcggctctcaccgcgccgtctcagcgtgcgcagaccgccgtcctccgctggctgcgggaacgttgcggggccgaggtgacgcagcagcagcccatggcggacgagagcgtcttcatggtgcagggcgcgtccgtcgagtgcctgtgttccccctcccggccgcatgacgtttctcatgtttcgtttccacagcgacgccagcggcgcacaaagaagaacacgaaccagcgtggcgacggggtggccaaccacgcgactttccaacaagctgttgtaacgccggcagtgctgcaggcgacgatgggcctgccgcgtccgccggcgacaggcaaggcgaagcaccacccgcgcaacgtgcaggccttcttccagtcgggcgagcacacgtcgctgaccgacctcaccaccttcgcgaagctgtacttcccgcccaacatgacgtcgcagttcacggtggagaagttcatcaacaccaaccctccgttcatgggatacggcgacggcgagtccaacctcgacgtgcagtacttggtgggcacgtcgctgggtgtgcgcacgtgggtgtactcatacccggacgaccgtttctgccatgacctcgcacgctggggcaccgacacgctggagagcgtgaaggcgaacccgtcggagtacccactcgtcatatccgtgtcgtacggcgccgcggatgtgccgtcgtactgcgcgcccgccctgctggcgcgcctgaacgaggacatggcaatcatggcggctctcgggatcacagtgttgatcgccacgcaggatgacggaatggcgccctcaggcttgagcaatttcaaccttgggtactacgccatctcgaccccgtcggggagcccattcgccgctgcggtcggcgcggtgacgttcgtcgcgccgaacacgacggacacgaagctgcgctgcacggcctacggtggtggcggtgtgtcgcagctcttctccgacacgcctgcattgggcgcggtgacggcgtactttagctgggtgcagtccgccttcgcctcggtcacgacaaagtacgccttcagcactcgccccggcgctcgcgcggtgccggacctgtcgacgcttggcagcggctttcaagtggtgtacgaaggcagcacgtcgccggcgagtggcacgtccgcatcgacgcctgtgattgctggcatggtgtcgctgctgaacgacgtgatgctcgacgcctcgaacgggaccaagtcgcttggcttgctgcggcccttcatcagcaaggccgtcgcggcgggttgcttcacggacatcacgttggacgacggcgacgagatgatcggcctgtggcctgcagccaagggctgggacgcgtgcagcgggtacggcatgccgaacttcgtgtgccttcggaaggtgctacaggcgtctctggatgtggcgatgagctcgacgcagcagccctcccacgcaccgacaagcacggcgacggttgcgcctgcgcccgttgaggaggactactgcaagcgcatccgcaacgagatcagctcttggacgaacacgctgcacgcaccgacgccaggatttgaaccgctttttgtcgacaacagcacggccctcgtggtgatgattggcgaaggcggtgttatgaaggtgagctcggcggacgggacggtgcagtgggcgacggtggaggcgttgccggcgccggaagtgcaccattgccccgtcttcacctgcggcggcatggtgatcgctccaagcgtcaacgtcacaacgggattgaactcgtcgtcgggtgtcgcgatgtggacgcttagccgcggcactggagtgaaccaaacccactactgcgccgcgtgcactgcggacggccgtcgtgtcgttggcgtgatcgcgagcattggcgagttcacggaggtcgacgcggtgagtggcgtggtggttcgtcgcgtgagccttgggtcgttctcgacgcaggcacccgccttctatccctataacagttttttgccggaccgcgggtatccactccttccgtcggcgacgcgcatctcgccaatcgtcaagcaggacgcgtccgtttttgttgtgcttaccaacagcaacggctcatccgtgacgcgcatcgggtcaacgggcacacttgacgtgctaccgttgccgtctgccgccgcgggaagccaaatcgacgtgcaaacgctcgacgcgcgttcagagctgctttttgtgcgagcattcaactcgtacgacttgttcgctttcgcagtcaacaccagcggcgcaaagggcatcacattgcagacgcaattcaacaacatcacgtcagggccactcggcctggacggcgtagtggtgttggacggcacgtgggtcgtttacgacgcgggtaccggaaacggcggtctgtatgacctcagtggagacgtgaagtgggcagtcaccgtgttacacaacttgaatggaaatttgttcttccaccaccggagcttcctccgcggcacggtcatcatcggcacggcgttgaactacagtgccacgaaggtcttcgcgcttgaccgaacaacgggcaagctgatttggacacggaacattgtcgccacagtgcatctgcccaacttcgctattcgcgctctcggagacgaccgttttgtttcgctcactggccttgggccgatcgtgatgtctgcgacggacggcgctgttctcggggcgtgccagtccatgttggacttccaggcgtctgcaatggcgtgcgcagccgccgatgacggatgcgacagcggcgcagtcgttacaacgcaaaccatgacaacgcgcgtgaacttccccaccgcgccccgcaaataatgctgcagtgccgtgaaaccaggacgacagtctaacccccagtccccccaaaagcaaaccagcaaaccagtgtcgcgtcgctgcctcttt

SEQ ID NO: 13047 - DNA, 2844 bp, Oryza sativa
  ref <308>: DATABASE ACCESSION NUMBER: AK110395
  ref <309>: DATABASE ENTRY DATE: 2001-12-06
aagcgaaaaaccgagtttgtatactcgataaattaagcaacagtaccggtccttcccccgcgcggccgcgaaatggccgcttcggcaccctcaggggctggcgctggggctggggcagtcagcggttctggcggcgcgcaaaaaatcaaaaaccgcgcacgccggcagcccgtggcactcgatgccatccgcgcggtcgtggcggccgcaccacaaccgaccatagtggtggcaccaccaccgccgccggcgacgagtggtgctgtcgcgttgttggcaggtgctggtgttggggtaccatccggcgatcgcgatgcaacacaacaacaacaaccggctgccacaagccctgtattggcaccagagccgtcacacgccgccgccgctgctgccgccgctgtgacaacggctgctatgctgggcatggagttggccggctctccgcctcctaccggtccgggtatgggcaccggcggcggccgccgcgcgcaccatcacgcgtcggacggtggtgtggcagcggcggcggcgacggcgagcacgagcacgagcacgacgaggacgacgacgacgagcgtgtttgtgagcggcgtgttgggctgcaacgcgtttggactggacgaccggttgcgtgccgccgacctgttggcgcaagcgctgatgagtgtcgatggcggacgggaccggtcggaccgtatccgcgccgccacggcactggtcgacacaggccgtaccgatggatctgatgcggctgatgccgctggcgctggtggggcaacgcgcgtggcacgggctcggtacgtgacactgtaccgacgcgcatggcacgcggacagtgtacggttggctatggttgggcccagcgctgcaaggggaggggcacgcatggccagtgcgtttgatggtgctgtgtggccgggtgtggtcacacggtatgtacgtgcggccgtggaggcgggtgtggacagtgccgatgcggcgtcggaggctgtcgatgccgatccgccacgggccgtgtgtggggcgtgtatggccgacacgtttgcagccgtatgtccgctgttgccggtgtatgctccggccgtggtacggtgtgtgttgcatgcactgttgcggcacggcttggctccggcaccggctccgaaccgcagcagcgcatccggtagcagcagcagcagcagcagcagcagcagcagcagcagcagcagcagcagcagcagcagcagcagcagcagcagcagcagcagcagcagaagcgaggagcacgacgatgccgccgccgtcgtggagcgtgacgctgtgcgctcacaccggtggggtggccacctgttgttgcatgcgttgcgtacatgcaaagatgccgccatggcggtgagccttttggagttgccggtggcgagttttggtctgaacacagccacgtcccatatgtggccaccggacattgcgttttcgcatgcacgtgtgaacgcggcgtggccgcacgtgtggccgtatgttccgttacccgtcaaaccaccaccaccaccaccaccaccacccggcgctggtgcagcgaccgctgaagctgcggctgcggctgcggccggtgccggtggcgatgtcgcgggcggcactgccgacgcatatgcatgcgcatacgcagatagcgatggtgatgatgaggctctgttgagtgtgcggtatccggcacacctgtcaccactgcacgtgtacgtggcacaagagcgcggcagtatcagtccgtttggaatggccaccgccatcgaagcgctcgtggcacgaacgcccacacatgtgttgcgcggatatggccgtaccgacgatggcgcgtgcaatgcacgtgcactggcgcagtgggctgcggaacgcgcccaactgatgcgtgagcgcggcggcggtcacggcggcggacgcggcggcggacgtgagcgtgacattgttgtcgccgctgatggcgccgtggcagcggcggcggtggcggcggccgatatgatcgtggccgagccaccgcacgtgttcccgtgtgcgtggacgaccacatacagcctgttgcggcggtgtgtgacggggctcacactcccatccccgaacgcgctgcgttctgcacacggctttgatccggtcacaggtggtgcggtgcagctcagtgccgcactcgctgtggtggaactgccgacggcaaaacaggcactggacgtgttgcagtttgccgtgccgtatcgtcactgtgacgacgccaatgacccggccgcgctgcgtgcgttaggggtagtggacgtgttcgagcgtgacgtgaccaatggcggccgtacactgcgcgaactgctgcgtgcggctgttttggccgctgctggtgtgccgcgcgtcgcagaggcggaggaggagggggaggggtttgatgcccgcacaagtggtggcggcgtcgtcaagccgtcgtacgagttcatggccgtgctgaacgcgttcgacgccaccgaagcgcccgtactgcggtactggcgagttgcgacgcatcctgatgggctcaccaccaccaccaccagccgccaccaccaccagcgcagccgccgcggcggcagcggcggcgggtacgatggcgacggccgtgacggtggtgccgctcatacacgtcgacgggttgcagcggttggtgttcggttacgtgtgtgcatcgacactgccgcactcgcgctgagcgcgcactttccagtgctccgctgccggcacgcgacctcccacacgccgcgtcccggctctcatagaccgcgtccgtttttctctgcgtaggccgtctcagcctcctgaatttttcctgcgacgaaattcagaccgacgcgcctc

SEQ ID NO: 13048 - DNA, 3160 bp, Oryza sativa
  ref <308>: DATABASE ACCESSION NUMBER: AK110396
  ref <309>: DATABASE ENTRY DATE: 2001-12-06
aagcacatggcaggtggatgccgtgtagcgcgtttccattgtccagcactgcgaagcagcagcaatactggttcggcctgtcaccgtctggacagtggcacatattgatagtttcatgttgaccattgtcaaagaccatcaagaccgtgtgctctgaccgcttcagcaacaacgtcctcaaccaacagccagccagcataaaacttgtcgcaggcagcttggtggttatttgtgcatcccgaaggcctaagaaatgcagctatgttcaataatggtctgatagctagctcatatccagattagctgagtagctgagtacacactgcaacaacgatgaagtggtctaggatcagcgaaataagtgcctacaagcgcgctgatgctcacctcacaagacaaacaacacgtggtgcagttgtgacccttttgggagtgatcctgggcgtcacacttgccatccatgagatcacctggtacctaagcggcaagggcaccaccaagatggctgttgatcttgcgcggcggcatgacctcaacatccatgtggacatcacattcccagccatcccgtgtgcaggactgagtgtggatgtgatggacgctagtgggacggcgggcagtgatgccaaccatgctaagggcgtacatctgcataagatgcggctggacacacgcggcaggcggataggaggcaaagagggcgagtatgtgacaccacagagccagaagatggtgcatgacgcctcaggcacagtcatgcaggttgatctgggagcagccatgacgcagatgtcagacatggatgatgaaatgcagaagcatgagggctgcagggtgtatggtgaggtgtctgtccggcgtgttgcaggtcggctgcactttgccgtgcatcagcagagcttcattgatgtactgccgcagatgctgacgggccatgtgctgcccaagctcaccaacatgagccacatcatccacaaggtcgcttttgggcctgagtacccgggccaggtaaacccactggacggcttcacacgcataaacctgccgggggacgtgcccagggcatacaagtactttctcaagattgtgcccactgagtactacacgcgcgtgggtatggtgctggaatccagccagtacagtgtcggcgagtacgcaatgccgttgcgcagcggccccggcgtgccgacgcagaagcccagcgacaaggacaaggagggccacacgcacaagattgcagagggaacaggggccgagccgacagatggctctgctgctgctgctggtgacagccaccccaccagcaccgtgcagaatgcgtttgtggacttctcctacgacctgagccccattgtgatgacgatcaactcaaaccccagcagcttgctgcacttcatcgtccggctgtgcgctgtcgtgggaggtgtgctgagcgtgacgcgcatggcggacaagatcgtccacgcgctgctggtcagcagcggcgcctcggcggcaagggcccgtcgcgcggctacagcagcagcagcggcggctacagcagcgcgcggaacagcctgcctggcgacgcgacggcgtacgtgtcaggcagcccagtcagccggggagggacgtacggcggcgccagcttcaactcgtatcctgtgcgctccccaagcagcagcagtggcggggtggccatgggttactcagccggaggagcggcaccgggtgcaggggctttgcacccagatggcagcctccaccagcgcatgcacaccagccacccgggtggtggtgtgggcagccatccgctcagcaggttcaacagcggcagcaccagctacggtggagcgccagctatcagcggcggcggcgtagcaccggctgcaaacggggtgatgccggctatgcccggtgctggcagtttcggaggcgcagcacccaacccatatggtggcctggcgagtgcaaatagcttgggcggcagcagtgtggtgattggcgatgcaatccctagagcgggcagtggtggcagtggtggaggtggtgtgctgagctccgggggtgcagcaggtgccatcacgcctactgcctctggccaggtggcgccgctgcttggtgtgtcctctcctcctggcaggggctattctgctccggggggcggcctgatgcacagggctagtggtgggggtgctgctgccggcggcagcttcagttcagggggggcggctcctgcacctagcagctatcagcaacaaccgcagcagccgggcacttcccgattgtcaagctcttcagggccgatggccgggcaccagtttggtcgatagcagagcgtacacaagcgctagggggcgcctacagctgtttgcgatgctgtttagggtctgcatccatgctgccagccaacacagcgagttggtgtgaccagcggcattcgtgcttgttgtctgggtggcgtgcattgactgtcaggaacatgtgctggttggacagtgattgcagcagcaagggaaagggcaaggggtagcaaatgcatatgcatgacgttaacaagaagcacggtgcctactgatctgctttactcatggtactggtagctcagacatccttcttgctgcgcttggtgcaagggcagcagcacagcattggccaagaggcgtttcacaatgttctagggtagtccaggggttacaattgcaaggcaaggcacgccatatgagaggtttatatagggaatatatacaggggaacttctgtgttgcatcaacacacgggttgaaaaggtgctgactaggtgtgcttgagggggggtgcatgtcgaggccacgcctgcacgcacccttctgggcttgtggcgtgctcttttcgtgtcagctgactgcagcaaatgtgcaacagtggtgtttgaggcactgctgcaatgcgcatgcgcaatgtgtgcattgttgtcattggaggcagctgcagcccgcagctagctgtgcccatgttttctgcatgctatatttcaggggccagtggctgattacgcggtgcatgcaccatgatgatgggcgggtgatgttagcatagataggctgctgatcaatcagccggttgtttgcttaacaatttgggtgaacgttttgcggtatttcagcctggttcattcatgttcattgaatgtctagcttcc

SEQ ID NO: 13049 - DNA, 2933 bp, Oryza sativa
  ref <308>: DATABASE ACCESSION NUMBER: AK110397
  ref <309>: DATABASE ENTRY DATE: 2001-12-06
atgcggccactgcggggatggcaccgggtgatgcgctgccgtggccgtcactcgggaaagccccagtcccgcccgacgcacagacgacactggcgcgcatgagcgcgcccggcgctatgcgcgcgtgtcccatgaccgacgctgaccgctaccaattggcgtcggcgatgggccacgctaaacggctggtgacggcggaggcggacggcagtgcgggtgtgctgaagctcaagagcctgacagcatttgtgcggactcatgacacggcgctaaaccgtctcgtgctgtcgtgtatgcccgcgcgtctgctgctgtcactacgcgacgccgtgcagcgccgtcagccgccgatggaccgcgctccgtacaacgccgtcgcgtgggcgcctctgctcaccggcgatgtggtgaacagtgccatcgcgcgggagcaggacgcacacgtgcagcagtggatggccaaaggctcgaccgtgaagctgtatgacatcgccgacgcgcggtacggcagtgtccagaccgctgctgcggctggcgctaacgctgacgccgacgccagtgcgcatgcactggccactgacgcaaacgcagaacctgcagcaccacgtgtcgctgcggctgccggtgccgctgcacgtgccgctgccgctgccggcccgacgtgggccgatgaccgtgcgctgcgcgctgtggcggagagcgctgtgttggacgctgtactgccgctgttcggtggcgaccgcgcgatcggcgacgccgtggcacggtactaccagcgcgccgtcacagggtcaccggttctgctgaacgtgttccaccccaccaccggtcggttggatgcggccttccgccgccgcgcactcgacgccgacgagcagacacacccggccatcgtgccgccgcactcgctttttagccgccatacgaaccgaccggtgggtgcgctgtcggccgtgcgttctctcaagcgcttcgaacgcaatttcgatgcgctcacgtgcggtgccgtgcgtgcgctcgatctgcaccggtacggcgctgtggtcggcggtggcgcggtcacggctgcgctcatgccactgcccgcggcgttggagcaaatgcatgccgatgtggagcggtacgagcacgtgctgcaagggctggcgcgtaagcgcggtctgccgcgtgtgttggtcgatcgcatccgcgatatggccgatccgggcggtgacgctgagcagcggctgttcgtggcgttggatgagtggtacaactggcctgcgcggcggctcgcgacgtaccgcaatcccgcgccggactcgacgcgcggcaacccgttttgggcagccgatatcgacatctttgtgatggccgatagcgtggccgatgcggagcggaaaatcgacggcctcacacggcagctgttggtggagtaccgcgcgcaccggcgcgagatgcgtcgcgtgcgcaaacgcacgcgcgacgcgtttgagcgcgacgcagcagcgcggcggccgcagaaccgcgggtggacgtttgcgtggcagtactcagcggagcggttggcgtgtcgcgtgccgcagaagccgcgtctgttgcgtacggcgaactccgtaacggttgtgtcagagcatccaatgcgtcacgtgtagttcgtgacgctgctgcaccggagtgtggaggaactgttggcgttcgccgatgtcgacgcgacgtgtttcgcatacgatggcgtgcgtgtgacgaccacagcggacgggcgcggcgtcagagcgctcaatacactcacaaatttcctgtcgccgcagcgcgtggcggcgttcagcactgcgtcgcgtgtggcgaagtacgtgttgcgcggcttccgcgcggcggtgtttgaggtgtgcggctgcggcgccggcacgagcgcgagcccgagcccgcgctgtgacgtggtgctgcgcgatccgaacgccatactgcttttggccgatttggagcggcagtgccgcgcgcgctcggagccgactctgctgcaactgaaaggtcagtggcccgacgagtatcagagcaagttctggtaccggtggtcgccgctgcacgcgcaggagctgtatctcgaccgtttcgtgccgtatgggccggggtggacgccggacggcattgcgctgtatctgcagcacgtcaagccgtcggatgggcacaggctcgtggtggcagacacacacgacccgaccaccgccgacgacgatgcgctgcggcgattcggggacgtgcacgggcgtgtacgcgcggacatgatgcagcgactgaatgcgtacgaccgtcacaactatggggctgcactggacgagacggatggtgacagcagcgacgactccaacaaagcgttgaccgacccggcgctcacgctcgctcaggtgatggcaagcgatcaggcggaacgcgacgcgcagttggctggtgaccgcgaccacatgtggccgctgtcagccggtgcgcacaaccgtctgctgtttgcagcgaacccgaacttccccgtcgccatgggccataccgtggcccaactccttccgctgcacaacaacgtcgtgcagccgctgtcgtggaagcacacggccgtgcgcgcggccgcacaaacggccgaatactaccgcgccaccgcgccgctgcggcagcccgtcgtcgccgcagcgccaccacccgctggggctcgcgctgccgccggtcgcgtgccgggcggggcggctctgcgatgatgtgatgttgtgtgttgcaccttcaatcgcgctttgtttgcttttttcgccccttttggcttgcgtgttccgctgctgctgttagcgtttcatctgccgatccgctgtgaatccgccgcccatcggcggtgctcgttctgccccgctgtttgcctgagtctggctccgtattcgctcgttgggactgtttagcgctacggcgctgtgtcg

SEQ ID NO: 13050 - DNA, 3088 bp, Oryza sativa
  ref <308>: DATABASE ACCESSION NUMBER: AK110398
  ref <309>: DATABASE ENTRY DATE: 2001-12-06
ctaaaaaagtaacagtttctgtactttattgagtttcggaacccccctcaaaaagcagaaccccccgagtagtagaacgatggcctccacgcacatcgctttcctctcgactcggtcggaagcacgcggcgtcgtcgatgaaaagtcgctgcagcctcttcccacggtgggcagcgtcattgaggtcgtcgcccagtggtactttgcccgcatcacggccaagatggagttcgccaatgcgacgcctgccgtcgtgaagaccttcgtcgcgctcgagaccccccaccgcgtgggcggcttcctcgcctctgtccgtgtggaagccgagaaccacttcctgcagtcaaaggtgacggagatgacgcccgatccgcgcgcggccgttgccagtgccaagaccaacaaggtcttcacggtcgacgttccatggagcttgcacggtggccagtccgtcttggtcacagccgtcttctacgtgccgctgagcgttgtcaacgcccacggcgtttcgatcgtcattcccaaagagctcgtcccgaagaagatcgttgcgaaggcggacgacgatggcgacaacgcgactcccggcgccacgtggtcgtcgcgcttcgcgattgcgtcaactcaccgcgttccgccgacggtgctcgtccatggtcgtggcactctcttcgccgccgtcgacggtggtgcgaagtcgacgacccccggtgcggcagtctccaaaatgggcgatccgcgacgctttgaggtgcgttacgaaaaccgcgacgtgatcgaccagctcccgcaggacttcgagatcgtcgccaacatgatccccgacgaggatcagctcgtcgtgcaagccgttcgcgaggacgcgccgtttgtgaatgatgctcaccgtgttgcgctggcgatcgcctgcaccccgcagttcggcatcgccacagctacgaaggacaaggctgcctccgccgccgctgccgccatcgccaacgcttcgcccaacattgaactgtcgatcctggtggactgctccggcagcatggccccgcactcagcgcacgtcagccgcgctgtggcggagctcatcgcgacattgcccagctccgtctttgtcaacctcgcgcgcttcggagaaaccatcgcgtgggccctgcccgagtccgttcagttgaccacgcaagacctcgctgaccagctgctggcgttcccgctcgacgtcaatatgggcggtacgaggctgtacaacgctatcggagaggcgtacctcaggcctgtcgtggagggccacgcgcgcatcatcctcgtggtgaccgacggcgcggagctccgccacgatgtcaagcttgttgagctcgtcgctgccaacgtccacagcacgcgcgtcgcggcaatttcgcttggtgaccatagccacacggccctcttcaacaaattggctgaagtgtcagaaggcgtgcacgcccacgtgaagcaggtcagcaacatctccaatgatattgccgcggcactcaatccgctgctcgtcccaacgctctgtggcactaccgtcgagttcacgtacgacggcgttgaggagcatccccccgtgcgcctgacggtcgaccacccgcgcatgatctacgccggcacgcgccgtgtcatgtacgcctttgggcacaagacgatgcgaggctgcacggtcaaggtcgctgggcttgtcggaaccgagtacgaggagatcaagtccttcaccggcgccgccgacaagttcgatgtcaacagcagtaacgataacgacgtgagcaccatcagcctcgtccacgccgcggctgctgctagccgtatcgactcccttgtgaacctcaacgccaacgctgcgctttccgccgctgagaaggccgaagtgaccgcgctctcggtgtcgttcagcgtgccgaccccattcgcgcgactcgtgtgccgcactgacgacagccctgcaacgaccttcgacccgcagggccgaacagtgtgggcgcccttcgtcgagcgccgcgaaacgtacaacgtgcccccgcctgccgccgcgcgcggccgcgatggctttgctgtcgacgccgacttcgccaccccggcggcagccactacttccggcggcaccgcgacgacagcggcgtcgttcctgcgggaggtggtgcacgaggccgtggaccgcgtgacggcgccttcgagcgtgaacaacctcgtctcaacccagaagcgcggcggctactgggaggctgcgcgcagcttcttggcgctcgatttcgttgggctgccaatggccaagcttcgcagcacggtgccggcggagctgactgcggtgccgcacaagacgcaggccgcagcgcctgtggcgccgcccaccgccgcgacgctagctacggggagcgctcacgcgacgccggatgcggcgcacgcttcggcctcgccgactccggctgcaacggcggcgcacgctactcctgccggtgcagctcctgccactcccgctggtaatgcgcaggccactccgactgcccctgcctcaaacgcatcgcccaaggtgcccccagccgcgcactcgcccacacccgccgcgccttctccactgccggccgctgcagctgctactcccgccgccgcgcctgttgccgccacgccaccgccgcctccgcacgttgaggcaccgccgacgtaccttggcgcatccgcagaggatctctgggcgacggctgtgatcgcggcttggctcgaccgccacccccagtggaagcagcacccgcgcaccaagtggaccgggctccgcgccaacgcataccttaccgccgtaggagcgagcggcgtcaaggctctcgagaaggccaaggcactggtcgctaccttgtagattgacgacacccctcactggtaggtccgtcatcgatcgcgcgatgtaaatctgtccctcgctgacgctttgacaatgacggtcgcgagcgaaaagccaacgcacgcttcaatccttgtcgatttaaatattccgttttcctccttctcgaggagaaagacacacaaacaaaaggattcacgcggcttttctctccctctgtacccttcacgacacctttgacgacaagac

SEQ ID NO: 13051 - DNA, 2731 bp, Oryza sativa
  ref <308>: DATABASE ACCESSION NUMBER: AK110399
  ref <309>: DATABASE ENTRY DATE: 2001-12-06
attgctggtccgctttttccttcccacctccgcaccccgcctgcacacctccttcgaccgccagacttcgctgctgcggtcttgccctatcctcactcactcacctcttgcaccggacgcctccatctgcccttttcgagtgctgccctgccgtcgagactcgagactgcacagctctcttgagacagccccgcccgccgcttgctggggccgccttttcgctgcacacgcacgcacccattggacgagcccgcatccgcgctcgcagcatccgcaccagcaccagcaccaccgcccggccagcgaaaccacggcgcgcactgcagacgctctccgccgctgcaatcgcaccgcagtgcctgccgcactcgacgactccgctctgcgcctgcatcgcacctgcccgccacaagcccgctcctgccggttcttcgcggcggtgctctcgcctcgcttctcactctcttcccgacttttaacgacgctcgtttacgcagagacattgctagccagcaccaccctgcctgtggtatatgagtgccgcgccatagccaacaccacaccacaacgcccaccatggactacttaccagagaacaacgacttcgtgaaccctgccgacctctattcatacgcctcctacagcacctccgatcccgccatcaagaccgaactcgacctgttcgacggtgcgctgggctccggcagcctcgacgagtggaccaatccggccgacctcacccacagccaccaggactccgccgtcgatctgcgggggttctaccaggctcccggcaccttcccacgcctcaagacggaggattcatcagagctcgacaacttcctcaacacgccatattccaccccggcatccaactcgtccaacactgcgtctccccacaacgacatggtctttagcaacgccaactcgcccggagactacaccagggaccagagtcagacgagctcgccagatgccagcaacgatgcattcgtccgcgacagcatcgtcatcccccagtccattgagccgcctaaagtgggcatcttcttcgacaagacgaagacccgcgccgagacccagatcaagacgacagtgactctggatcctctgcctcgccagtaccagtgggctcgcttcccccgccacacgctctcaaaatcgaagcagcttgccggcaacgaggagatcgaggccaacgagaacggcgattctgccatccgagtggatctgacgctggtttgtgccaccgcagtagagcagcctgctggcctcgaacgtgccctgcgccgtgcccgaggcgccgagaagatgcccaggagagatcccggcacgcaagtctcggacatcgacaaggaagaccctacccaccctcagaacggcggcgctgtcgtcatctgtgaaggctgcaaagagcgcgaacgcaagcgatacgaccgcaagaagaagcgcaaccaagaggaggagaacgaatggagcaactacgaagacgaccgcatcattatgatcaacgagaaagaattcaagcgatggcaagatgtcgagcagggccatcagcaaggtgcggacgcaaagaaagtcgagttcgccatgcggatcacgtgctactgcagacatcaagaagagaagtctccagtcggctacaaggtcatctttacattccgagacaccagcaataccgtgctcgcacagaaggtctccgagattatccaaataacggacgaccacaagaaccgcgagatgccaatcgtcagcactctcacgactgacctcagcatgccccacccacagcccgaagagcagatgccccagtacgccgtgcccatgaacaactactactctacagcgcccacctatggcatgtactccacacctaccactccgatcatgtcacaattccagagcccgctctcgcccatggaaagtcactatccgcaagcagccagtcttggtatggctccccaggtgcctcagcagtcgacctttgccttcagtgccgccaatgttgcaccaacacctgctccctcatacgcaagtcaccagcgctaccaaagctactccaacacaccgatgctcagtcctactgagcagttcgcccaggctggcttcccactgcacaggccgcactcgatggattcgttcgccagcgctttcgccggtatgtacactgggccaaacccgtactcgcaaccgttcgcctcgcagccgccttccaggaatgtgtcgcggccagcatcgccctcgtgggagcagggcgcttcgcgttcgaagaagatgcgtgcagtgcccggcttcttcatggttgaggatcctgacaacgagtaaacgagactgttacgatagcacgagttacgacaacacaatacgataccaagggcaattcgagatgcatctgagaggcgtttggcgagaatttgcttccactgaaattacggcatgtggacttctgggcaatcacgactgattttggcgaggctggttcgcgtacccgctgcggcgtcgcatatgatctgcaagggcttgtaaaaagcaacgtggagcaacgtcctcgggacgattcgagctccacgtcattattattgacgtagtcaccattgttttccttttgactgattgtatagaccggacacttgggaattatgcctttaatcattagacgctactttatcttcacgttgaagccttctcgcgagggctcacggacacggacaatcaattcgcttcacaaaat

SEQ ID NO: 13052 - DNA, 3161 bp, Oryza sativa
  ref <308>: DATABASE ACCESSION NUMBER: AK110400
  ref <309>: DATABASE ENTRY DATE: 2001-12-06
aaagaaaaaacttacctggggcgatgtagccatatgatccggcgacggtgttggacgagcggccaaagtcgccgtcgtcgacgagcttggcgaggccgaagtcggcgatgtaggcctcgaagtcgagcccgatgaggatgttgttggccttgatgtcgcggtgcacgatcggcggcacgcagtcgtggtgcagcagcagccgaggaacctcacgatgttcttgtgccggatgcaccccagcgtcctcacctccgccgagaacgagtcgcggacgcgcccgccgccggcgacgtcgtccttgtcggcgccgttgcgggtgcttggccagagcttcttgacggcgatgacctcgccggtgtcgaggccgacgcggtacaccacgccggagcagcccttgccgatgatgttggcgtcgacgaggttgcgcaccacctgctcgacgctgaagctcagcttctggaacggcgtgaactgccacggccacgccaggtcgccgccggactccgagtcgctgctcccgccgccgtgcccgcccttcccgccgacgatgcccatcccgcgcgcccgtaggatcccgaccatgcccagcaccatcgccaccgtcgccgtcaccagcagcgcgatggcgagcttgagccggtgcatccgctgcacctcctcctcgtcggcgctcatcaccggcctcccgctggcgtcgatgctgacgaagcacacgtcgccgcccttggtgcagagcccggagttgccggcgaggcacgacgtcgacagctgccggaacagcttcgtgtccgggaggtagccggtgaagttgttgttggacacgttgagcgtgacgaggttgtcgaggccggcgagcggcgcgaggccgccgtcgagcgcgttgtacgacaggtcgagcaccgagagcttgctcagcgccgagatcctcgccgggatcggcccggtgagcccgttccggctgaggttgagcgcgatgtcgaggccatcaatggcgcagagttcgtcggggatgcggccggagagggcgttgtcgctgaggtcgaggagctcgaggttgcggcactttcccagcgccgccgggatggcgccggagagcgagttgccgctgaggacgaggcggctgagcgcctccagcctcccgaacgcgtcggggacgccgccggtgagctggttgtgtgacacgtcgatctcctgcaggccgcggacgccggcgagcgactccggcagcgcgccggtgagcgtgttgttgctgaggtcgagcatctggagctgcgagcagttgccgagctcggcggggacgccgccggcgaggcggttgctgccgaggtcgaggaagttgatgctcctcatcccggccaccgccgccgggatcgtcccggcgagccggtttcctcctagccgcagccgcacgaggctcgccgccttgccgatctccggcgggatgacgccggagaggtcgttggagaggaggagcagcttggtgaggttgcggagcaagaagatcccggggggaatggcgccggtgaggtggttgcgcgagaggtcgagcgcctggaggttggcgaggccggcgagcgacgccgggatggagccctcgagctggttctgccacgcgaacaccacctgcagcgcggcgaggcggccgagctccggcgggatgaggccggagatggcgttggtgtcgagctggagctggacgagcgacgtcgcgttcgccagcgccggcgggatggtccccgtgaggttgttgtcgctgagcatgaggtcctgcagcgccgggaggcggccgagcgacgccgggatggcgccggagatggcgttgatggagaggtcgagggagacgagggaggtgaggttgccgaaggtgtccgggatgggccccgtcagcgagttctgccatagcagcagcttctgcagccgcggcagcgcgcccagcgacggcgggagcgggccggagagcgagttctcgtagaggtagacgttggtgaggttgccgcagccggcgagctccgccgggatggagccggacagcatcgtcgtgtagatggacagcgtctgcaagctctggagccgccccagcgacgccgggagcgcgccggagatcttggtgtcggcgaggccgagcacgacgaggttggagagcctcgagaacgactccgggatctcgccgccgaggtcacggttgccgccggcgcgcagcgactcgagcagccgcagctcgccgagcgacgccgggagctcgccggagaggcggttgtcgaagagcaggaggtccctgagcgacgcggcgaggttgccgagcgacgccgggattgggcccgagagctggttggagttgagcgccagcgacgccatggccgtcgcgttcccgagcgaggccgggatggggccggagagcgagttgccgctgaggtcgagcacggcgaggcggcggcacaggtggaggtcgtcggggacgccgccggtgaggttggcgtcggagacgacgagcgacgcgagcgacgggagcgcggcgcagatgccgggggggagcggtgcggcgaggtgcaccgactggaacgtgacggaggtgacgctccccgtggcggcatcgcagccgacgtgcgaccacctgcacggcgacgacgccgacggcgaccagtccggcggccgcgccgccgtggtgttgagccattgcgtcaggaaggcgacctccgatgaagccgaggcggcggtggaggaggagaaggagaggaggtggagtaagaggagaaggaagtgcatggggcttggcaacaatggtggcaatggcagctgcatcaaaaatcgtgctgtgcttgcttggggcagtgcacaatacactatgctaaccaagcttgcttggttcaagagaggtgatgatctctatgaacatcgctctcactcttcactcactcaccatggttcaagagtgaaaacaaacaccttgtttctctctctctctctctctctctctctctctagctactctctctctcttttcctcctcaaaacactcaacaggttgagctgtttgcttgtgtcttggtgcttggttgcttgctccagatggatagtggtggtggtggtgtcatggtgaaatgtgggtgcttgcttcaatgcattgggcttctccccaacacaatttaacaaagttttgcttc

SEQ ID NO: 13053 - DNA, 3201 bp, Oryza sativa
  ref <308>: DATABASE ACCESSION NUMBER: AK110401
  ref <309>: DATABASE ENTRY DATE: 2001-12-06
tcaatgctgctacgggtgtggctgcttgcaactgcacgtcggcgaacttcttcggcgctgcttgcaatgtgacctgcccgaccggcaccaacggtcagtcctgcaactctcaaggttcgtgcgtctacaacgcagcctgcaacacggcttcgtgcaactgcaccgctggatcgaacttcttcggctcttcgtgctcaaccacttgtccgtcgtcgggtggtcaagtctgcaatggtgcgagcaacggcagatgtctgttcaacgccgtgaccggtgtggcgtcgtgcaattgtacagctgcgaatgcgtttggtgctgcgtgcaacgtgacgtgcccgacgggaaccaacggtcagatgtgcaactcacaaggcacctgcgtgtacaacgctgcgagcaactcagcttcgtgcagctgtacggcgggctctaacttcttcggtccctcttgttcgactacctgcccatcatcaggcggtcaggtgtgcaatggtcgaggtacctgttcgttcaactcaggcacaggcgcagctacctgcacctgtactgcagcgaacttctttggtccggcgtgcaatgtgacatgtccatcaggtacaaatggacaagtgtgcaactcgcagggcacatgcgtgtacaacatggcgaccaacacagcgtcgtgcaactgcactgccgctaacttcttcggtccctcgtgctccaccacttgcccatcttcgagtggacaagtgtgcaatggcgcaagcaacggcagatgtctcttcaatgctgctacgggctcagcttcatgcaattgcaccgctccgaatctgttcggtgctgcgtgcaatatcacatgcccgacaggtaccaatggccaagtatgcaactcgcaaggccgctgctcgttcaactcgcagaccgacacggcctcgtgcaactgtacggcgggctctaacttctttggctcttcgtgctccacgacctgcccatcgtccggaggtcaagtctgtggcggtagaggcagttgtgtgttcaactcggctacgggtgcggcttcatgtaactgcactacggccaacttcttcggtccggcctgcaatctcacttgcccgaccggaacgaatggacaagtgtgcaactcgcaaggcacttgtgcgtacaacgttctgaccaacacagcctcgtgcaactgtactgccggctcgaacttcttcggtccctcgtgctccattacttgcccatcttcgggtggacaggtctgcaacggcgcgacccggggcagatgcaacttcaacgctgtcaccggtgttgcttcgtgtaactgcactgcggccaacttcttcggcgcagcgtgcaacgtgacgtgcccaacgggcaccaatggacaagtgtgcaactcccaaggcacttgcgttttcaactcacagaccaacctggcctcgtgcaactgcacggcgggttcgaatttctttggctcttcgtgctcgaccacctgcccctcatccggtggtcaagtctgcaacggcaagggtcgctgcctcttcaactcggccacgggtaccgcgtcctgcaactgcacagacgcaagcgtcctcggtccggcctgcaatctgtcctgccctctgggtaccggcggcctggtctgcagtggacgtggtgtctgctctctctcagcgacgggtgtgcctcagtgcacgtgcagctccggctactcgggagtcaactgctccgtgctcacctgcccgaccgactcagcgggtcgtgtttgcggtggtcatggttcgtgcacattagtggatggtatccccacttgctcgtgtgaggcgggttactctgcgcccgcgtgctcacccaactgtcctgtctctcggaacggtttgatgtgtaacggaacgggaacatgccgcggatcgacgtgctactgctcttctggctttggcgcttcctgcagtgaccaatgctcggacgactgtcattgcgatgcgcccaacaatcccaataccccctgcttggtggcgggcgcctgcgtcaatggcacttgcactaccaagccctgccaagtgaacgccgcctttgccggccgagccctgctctacccggctaattcgaactacttctgctactggcctctctacggcttcttcgtgaatcagctcgacctgatcacttccaccacgtgcccgttcactccctcggtgagctttgctcgttgtgccgtgatcagtggaacgccaccggatgcgaatggctgccagtggttctccaacctggatatgttctgcttgcgagctgatcctggcgtcacttactccattggcgcctacatctccaacccttgcggcagacaatacgccaacaccaccgtgacggtcgtcaacagcattcccaatggcaaaaactacccctcggatgccgtgtatccacctctgtacgccgcctggaccagcacctcagcggcccaagtcctcattcccgaggatgctgtgccgggcagtgacggcttctccacaactctgatcgtcggtattggtgtggcggtcgccttcgtcctcctcgttgtggcagtggtagttgtggtgcgtcgtcgtcgtctggcgactcaccgcgctcgatctgccgcggccaccacgctgccatacaaccccgagagccgcgactctgaaccctcgcagtcgcgatccaatctgggcatggatgagacgtcacgtctgggtgaggtcaatgtgttttccttgccgctcgacccgagtcaagaagcgattcaagaagcggtgcatgatgccgcagaagcggacaagcagctcgcgcgggaggcagctgcgggtgaagacgctaaggaaggtgtgccggcagcggaggcggcggtggcagccgcagcggctgaagatgcacctaatgcggcgatgtcgcccagtgagaaacgcaagttgacgcgtgtctcggctatgtactcatacttggctgcccgcactgaagcggcggctggtgaacttgaaaatgagacggatctctagaggacctccttttgactttcccatctccttgtgacctgcttatatcttactacattttcgtttcgtttttctctttcttcgtatcaacgctcattctgtctgtctttctttttgttttctcttttctctcgtattaattcaattctatatttcgtcagttcccttttgactttactttcgtgaataaagcgttttctatttc

SEQ ID NO: 13054 - DNA, 3287 bp, Oryza sativa
  ref <308>: DATABASE ACCESSION NUMBER: AK110402
  ref <309>: DATABASE ENTRY DATE: 2001-12-06
tgcactctcgcactccaaaagcatacggccgagcatcgtgcttccccaacgcacccatcgccttcgcaccgccacgtcgtctgcgcacatccacaagcacattgcgagtagaacggcgcctcctgccatgcccgcctggtcctcgtccaccggcaagccgcagctgtcgtacgccgaccgcttgcgccacgcctccaagtcttccgccagccccaaccacgactcgctctccgccgctgcggcttcttccagctcctccgccttcgcaccgtcctcctcgcatccaccctcggccaccgacgcatccaagcataacgcaagcctaatccaacgccccgactccacttcaacatcaccgcataccaagcagagcccaggcaacgccaccactccagcacatgcacatgcacagacaacctcctcgaccgaagccaccaccgcgccaagccatgcctcgacgacagctcgaaatgacgccgcccctaccctcaacgtatgggaggcacgccgcaaacagatcgcagagcgtgaggccgaaaagtcgcgagagcgtcaacagtcgccagcacaccagcgcaacgacccgccttcctcaaaagcatcaatagcgacggccgcctccaaccccaaccacgccgctaccaagcacaagcttcccaccgcgccactcgccaccaccgcttcctccaaaaagggcccaaagccttcgtcgaatcccaccgcttccgacaagaagaacaccaagcccacaaaccagtctgccaccgccaaccccgcctcggcgtcaagtcagccggcttcgagcttgtctgacaccaagaatgcatcagcttcggcctcctcgtcgttcatcgctccgtccgcagccaagcccactacttctcaagcctcacaggcgctcgaagtgacgagagagcactcatcaaaacctcccacacgtcatccggcctcgtccactccttccgcccttgcaaactccgcagacatgccgagcgcacagcccaaggacacctccaatcacggcgataacaaggaacatcgcgcccgtcgcgagcccgcgcaattcaattctgcctccgaaaagggtacggctgcacgtgcccagtcggcatccaccacctcctcgcgccagcctgcgcccaccccgatgcctatgcacgacgacatcccgggcagccctgctacggtagcctcggccatcgaagaagtgctcaagaacggcggccccaacggcgcacagaccgaagacgacgacgcgtggctcgctcgcatccatctgctcaacggaggccagaacatgcccaaatttggaggcatcggccccaacggcgccctcggcctcggcggcgaggaagaggcacaggcagccaaaaaggcggagcgcgccgtcgccgcagcctggggcgccggcaagagcgtgtggaacaagtcgcagcagcacaacgcccaacataccgcacccgccaacaagcagagcgccgcaccgcccgccgacacctctgcaagccagccgcttcacttgagccacgcgatgaggctgtgcgggtggatgctgacacggcgcctgcctcgagctctacagcagcccaagtcgcaggcgataccgctacgaccagagtcgccgacgccggcaagacaactcccgcaaagggcaccaaagcgtccgccaccgcatcggcgaccaagcccgaccccgccgccggcacctcgggcaagaaggccaaggacgaggcgaccaagccgagcaaggctgcatcgcacaccaagacaccagccgcgagtgtgccttcgtttgaagacgtcgacaactggccgagcccgctggatgcaggcaagaagcctgtcgtcgaccgtgccaagcccaccacggctgctgcggcgcccgccgacaaggacgcacgcgatgccggcgccaagagtgcgacgcccgccaaggccaagagcttctacgagacgctcgacgagctgcagctgcgtctggcgccgggcgcgcatccgcagcccgccggcgcgagcgcaggcgcaagaaagggaaagcagcagtgggtgtcgatcctgccggacatcacgcacgccgcgtccggctcggctgccaagcccgcccgcacggttggtgaggccaagccgggcaagtcgggaaagcaggcacgcaaggagggtcacaaggcgagcaccgcgggcgcgcagcagaccaaaggcgacaaggacgccacggccaagggtaaagcagccaagcagcgccagggcggcgaggcgccgaacagtgcctctgccaagggcggcgccgcaaagacgagcaaggcgcaaagcagcaaggatgccgtggcgccgcagcctacctcggccactgaggaggcgagcgctcgcccacaagaggctgcgccgggagcggtagcggtggtggagcagcccgtggtgtctgcaggcgctgtcgcggcacagtccgagtcgggcagtcagtccgccaagccggcgcgctctgttgcgcgcgctgccaacggtgcgcctcccgcacccacgctcgcatcgctgcccaacggtgtgcgcgctccgcgcagcggcgcgtcttcgggcacacacacgcccgctggtacgcgcggctcgccacgcgcctcggtgtcgtcaccaccgacagcctaccctgcagcgccgttgttcttcccgccggcggctgcgggtgcgccggtgatgggcggatcctggcttccgtacgcgtcgtttgcaccggcggtggtgtacgagtcgacggcacagacgggtgcgcccgtgccagccggtgtgcagggccagttgctggcgcaggtcgagttttacttttccacgcgcaatctgcagggcgactttttcctgcgccagaagatggacggccagggatgggtgggggtcgatacgatcgccgagtttaggcgcgtgcaggcggtgacgagcgatgcgggcgtgctgctggatgcgcttagggcgagtgcggtgttggatgtggacgccgcggccaggagggtaaggaagaggtttggctggcaggcctgggtgctaccagagcagcagcagcaagtacaggtgcaggggcagacgcaagtgcaggccgaggatgagcctgcgttgggcgtggttgccgcggacgggatagcgtccaatcccagctcgtaaccagcaggcaagtagcattggcagcggcagcggcagcaccaatagcaccatcaccagcgttggcgggagtagcaccagtagcaacgtagtcgcatcgcagaagcagctcaatcgcaccagcagcagcacttttagctccg

SEQ ID NO: 13055 - DNA, 3220 bp, Oryza sativa
  ref <308>: DATABASE ACCESSION NUMBER: AK110403
  ref <309>: DATABASE ENTRY DATE: 2001-12-06
aactaacgctaaaaaagtaacagtttctgtactttattgggaggaacaagccgcgtgtagatttggtggaagcttgcctcgccgttgccccatcccccgctcgcccaacttgctttgtataggacagcaagtgccatcgccgcgggtgtagtaacgacgttgccgttctgcatctcatccgtcacttgggccataccctaacgaatctgcctccaccacaccgtctctccccccctctctaaacaccaactacagtgtgtgattttttttctttttcttcgtttctgtgcactctctcttttttgtttctctcggcttcctcttgtttgatactgttacacctctcacacatcagcaccttcttcaacatcggcctcggtgacttcaccttcacacagcccccttttgacgacgatttcgcaacagacgcactgccacagaatatgccggaaagcccgctccctgcgacaccgcgcaccaaccgcactacttccggcgtgccctcgccaaccaacaacgcgtccactccaggaagccgtctctcggatcgcgcggcagccttcgagtctccgtcgaaggcttcgcaagccctgcgtgaaggccacattccggatgccgcgtacgaggcgcagctgcgcaacattgccctcctggccgagcgtcttcttctggacgacatgcgatttgcgccggagcccttagcgacgtgccgcattctgcccttcgaactgttgacgctgaaccccagcatcgccgcgctttctgaaggcgatgcgcagctggtgtaccatgcactgcaggtgacacagaacctcacactcgaaacggatcgctacacgggcgcgctgtgggtcggcgcggtcgccaagggcggctgggcaaccaacgcgacagcggtggtgcacctcgaccttccccgcaacgcccctctggagctcatcgcggctgcgctgcaggtacacacctctcagcacatttggtgcgtttggatcggctccactcaggaccccgatcgactgccgcacgtccgcggcgccttctcccgcgaatcgggctacgtgtggtacgttggcttctcctgcggcgctgccgccgtcgctgcgttccgcgatctgcagaatctagacgtcctgtccctgcaggacggcacgcaggtgcgcgcgcacttccaccccaagttcaccggtatgcggagccagcgccgaatcgacgcgtgccacccgtacttaggcgcccacacttggagcacgcgcctcggcgtgtccggtggtggcctcgctggcacacggctgtaccgtccgcttcggactcaggcgtcgacgcgtcgctcctccgccgccgcggcgccccctgcgacgaagccgcagaagcgcggacgatcgtcagcccccaataccgctcgccagcgcgccccatcaaagaccggcggcattcgctcgcggtccgagccgctgcgcaatcagcgtcgggaaagtcaacagcagcctcacagcggtcctcagtacccgtccttctctcaaaccgtagacgttcctgtggcgacaagaccccttcgaacgatgcaaccccccccgccggcgccgctaatggaggtcgcggacaccctcgccgcgcccaccgcgccatgtgaggccgtcacccaccccatggcgagcgccagcagcacgaggacgcctgtccagagcgcagcgcccgcctacgtctcgaggcgtgccgcaccccccgacccgacgaccgccgtgccgcccaacgaaccgccccaaccgcagcagccacaacagcaacagcagccgcagcagcggcctgcgcaacaacagcaggcgcgacgcacccatcagccgtacgcgagcgtcgctgtgcaacccaccgctgagaccgacgacttgggttgcaggcacttggtcccgcgctgcagcgtggggctcgaagctgtgcacgccgctgcgtccgactggttccagtggtggtggtggtcgtccatccagcggcacggcgtcatgggcgcggccaatcctgagcagctgccgccgccgcagcagcaggaggctgtgcaagcacccccagcggcggaagccacgacggctccacgagtgagtcggctcaaacagcaacgccgacgacaaggagaacaacgcgaagccgaggaggaagccgcagcatcaacaacaccagcaccgacggcggcagaagtggttgcatccgcaacggtccaagcggaagtcccagcgcctcagtcgacggacgcgacagccaacgcaacccaagaacctctgcggacgcagcccaagaacaaggccgcagaggttgcgccacctgaggctgtgaagaaacacaagattcgccgacgctaccgcaagcacctacacagcaaaagtgacgcaaacggcacacgcaccacggtgaccaccacctgcgaggaggtgaacaagtcgtgggcggatgagccgacatgcatccctggcatagatgacgtggagttgcccacggttggcgccgcgtcatcgtccgggctgccatccaccacgtcgcctgcgagcgcgccgaggggcgaaagctctccgacacccgccgctcgcgcgtctacctccgacgtcgccgttgccacagcgtcgcctgcgactgcgcccaagctatccttcgcagagttgctgcgcacttcgcgagacaggccgccgcagcaaaaccacgtcgtcgtcgtagccgccgacgccgccccagcgcccgttcctcgcgcaaccgcggcgacaccggcagcgaagcccaaagccgcagctccgctcaagaacggcgccgttccgcgggtggcgcagcgtgcctgacttcggacctccactcctttttcatagaacaaaacaagttgccgtcttccactctccgtacaaagcagtgaagactgaacgacaaccatccagactgcgctttgtggcggtatggggtgctgctcccgacaccccccctacaccccaagcagcagcaatgcagtagagaagacagagagagagagagtatttgtgagagacgagcggaagggagaagtggagtgggggcaatcatccttccacacacaccacaccactcacacacacgtgcgaagtgaaacaacaattcgtacgccgtgccccccatttgcccacaccaccacttccatccataagaagaggaggaacggagagagagaactttcggtccgtttttctgatgccgccacaatcaatcacac

SEQ ID NO: 13056 - DNA, 2518 bp, Oryza sativa
  ref <308>: DATABASE ACCESSION NUMBER: AK110404
  ref <309>: DATABASE ENTRY DATE: 2001-12-06
agttgccaaaaagacacgaatattagggaatgacctaatattaaataactataaggggtgaggcttcgaacccaaattgtctagctcaccaccttgtggagctagctggaagatccctcggcgtttctcactgttctgttgccttaaaggtattttccgcatttgcaatccatctccttgctagcagcaatgatcaggagcagtgccattcctggaccttcagattcgggcgccgtgttgatgtcgcgtagctgagagcgattgatctactggggttccttccgatggagcggcggaggatgatcgccgatctgctcagggcgagcgcgagaggctcgtccctccgcggcggcgtccagctccacgccgcgctgatgaagctcggcttcgggtcggacaccatgctcaacaacaacctgatcgacatgtacgccaagtgcgggaagcttcacatggccggcgaggtgttcgacggaatgcccgagaggaacgtggtgtcctggacggcgctcatggtgggcttcctgcaccacggagaggccagagagtgcctccgcctgttcggggaaatgcggggttcagggacctcgccgaatgagttcacgctgtcggcgaccttgaaggcgtgcggcggcggcacgagagccggtgttcagatccatggcgtctgcgtcaggacggggttcgaggggcacgacgtcgtcgccaactcgctggtcgtcatgtactccaagggccggtggaccggcgacgcacgccgggtgttcgacgtaattccctccaggaacctcgccacctggaactccatgatctccggctacgcgcacgccggccaaggcagggactcgctgctcgtcttccgggagatgcagcggcggcacgacgagcagcccgacgagttcaccttcgccagccttctcaaggcgtgcagcggcctcggcgcggctcgcgagggggcgcaggtccacgcggccatggcagtcagaggggtctccccagcgtccaacgctatcctcgccggagcgctcctcgacgtgtacgtcaagtgccaccgcctgccggtggcgatgcaggtgttcgacgggttggagcggaggaacgccatccagtggacgacggtgatcgtcggccacgcgcaggaggggcaggtgaaggaagcgatgtgcctgttccggcggttctggagctccggcgtccgtgccgacggccatgttctgtccagcgtggtcgccgtgttcgcggactttgccctcgtggagcaggggaagcaagtgcactgctacacggcgaagaccccggccgggctggacgtgtcggtggccaactctctggttgacatgtacctcaagtgcggcctcaccggcgaggctggacggcggttccgggagatgccggcgaggaatgtggtgtcgtggacggcgatgatcaatggcgtcgggaagcatgggcatggccgtgaggccatcgacttgtttgaggagatgcaagaggaaggcgtggaggccgacgaggtggcctacctggcgttgctgtcggcgtgcagccactccggcctcgtcgacgaatgccgccggtacttctcgagaatctgtcaagaccggcggatgagaccgaaagccgagcactacgcgtgcatggtggacctcctcggccgcgccggcgagctccgggaggcgaaggagctcatcctcagcatgccaatggagccaacagtgggcgtgtggcagacgctgctgagcgcgtgcagggtgcacaaggacgtcgcggtggggcgggaggtgggcgacgtcctcctggccgtcgacggcgacaacccggtgaactacgtgatgctgtcgaacatcctggcggaggccggcgagtggcgcgagtgccaggggataaggggcgccatgcggcgcaaggggctgaggaagcagggcgggtgcagctggacggaggtggacaaggaggtgcacttcttctacggcggcggcgacgacgcgcacccgcaggccggcgacatccggcgcgccctgcgggaggtggaggcgaggatgcgggagcggctggggtacagcggcgacgcgcggtgcgcgctgcacgacgtggacgaggagtcgcgggtggagagcctgagggaacacagcgagaggctcgccgtggggctgtggctgctgcgcgacggcaccggagacgatggcggcggcggcggcggcgaggtggtgagggtgtacaagaacctgcgggtatgcggcgactgccacgagttcttgaaagggttgtcggcggtggtgaggagggtggtggtggtgagggacgccaacaggttccacaggtttcagaatggcgcctgttcttgcagggactactggtgaccatcaccatctttctctcaattcaattctacttgcattaccgaattctgaattggagcgaccgtgagaggtagcatagaatgtcatgtacacaatccccaatttagagagtgagtagctctttgacgcggaagacgtgtaaaagtatcatatggttcaac

SEQ ID NO: 13057 - DNA, 3091 bp, Oryza sativa
  ref <308>: DATABASE ACCESSION NUMBER: AK110405
  ref <309>: DATABASE ENTRY DATE: 2001-12-06
aactaacgctaaaaaagtaacagtttctgtactttattgtgaaagggacgagtatgcagaggaggaacatttttgacgaccgtgttgcgccgccgcccggacacccagcggcacgtcgccaaacccctgcctccccgtcccctgggcgcagccatcgcgatattctcgacgattctagccttcgaattgtatctaaccgcggtccagcgctgatgcgaacggaacgccacgacaagtccttcggccacgattcgtttattgcagccatcgacgcggcgacgtcagctattggtgcgccgcggaacgtcgaaacgacacccacgcgtccgcagcaacagtctgcagcgcccggcgtaacgactttcgccgatggaacgtcagggatgcgagacctcactattcggatctcaattacggacatgtcgacgccgcaagccttggtccatctgcccgcttcgggtgtgccgcacgccgtgaccgttcgcgtgcaagcggcttcgatgcgccagctcatcgaggccgtcgagtcggagttggagcggacgcaccgactgtactaccgtatcagttccttccagtacggccccttcaacggccacggcccatggcaggcggtgccggtgaacgacgaagtgtaccacgatgggcagacgccaccccccacgccggaacggtcccccgtcgaagaacgcgtcgccgaggcggtcatgttccaccaggcaaacgccatcgaagacctgggcatggtgaacgccgtctccgcgccgacgcagcgcttcgcgtcgatgcaagcgatcacggcgacagcaccgacctttttcgtcggtggtgggcgtcgattcgatctattgccaaacgccttcgccatgaagattattcccggcgcacggcgtctgagcatgatgatcaccgcggtgcttccagtggatcgtaaccacgtcaatccagacgggcccaccatcctgcagcggcgtgcggccgccatcgtctccacctccgcgtcgctctaccgtgtcgtctcggcggctattcatcacgacgtgctgccagagcggcacgtgctgctcgtgcaggaccctgagggggccgctggcgcgtaccgcgttgtgcggacaccagcgcagctgagcaccttctcagtgatcatggtcgacctcagcgaaacccttgacccgatgcgccgcgccgcgacggagctggaggaacaacagagccaccgcctcgaggccatcgaccttaacccggtcgctggccggctgccacagacgcaacgggagtactacgaggtgctcaacgcccctcctgtggtaccgcctcacctcgactaccgtaatgcgcggtccgctgaatccttcgcggcggccgtgtctgacacccactttgcgccgccgcttgtgacgagcgagcacaccgtgatcaaagtgcagaagcccacgcgcgaagagtccgccagagcgaccatcaacggtagtgtgcccttcactaccgcgcctggagtggccgcttcaatgcgattcaaggtccccggccgcgttcaaacgcccgcggcacccgagaaccttgagagtaccttcacggcgcgtcgcgtggaggaccatgttgtggaggaccctggctacgatgcgcgtgttggccgggacgttcgccgcgaggagatcgaagcgatggatacagacgcgttggttgccgccttcgggctgagcacgcaatatcacgatgctgttgtgaacccttcgtcgtccacaatggccggcttggtgcacagcgccgtcgtcgcggagaccttggagcagctggcggcagatcgagaacctctcgacttcacgtcaatcgccatcgctgaaggtgtcgcgcgttttccaacccgcggaatgcgagtcaacacgccgcgtacggccgcccctgtcgctcgcgcaatgcaagaaggcacgcccatccaagagcgcaagtggctcatccatgcggcgcttcagttcgtcatggtgcaccccgaccacgacctcttcgacttccctaccctcacgcgcatcatgtccgacgtcgtgcagtccttccgcgcatcctacaccgcaggcattgcgattcgattcccgctttctagaagcgacgagaagcagctgaaggagctggttgcggagacgatgcgtgtggaggtcgtcaaggccgagcagctggatgggtggacaccatttgtcccgtccgagaagactgacagacgcctggaacgcgtgaaaatcgctcagcagcaggccgcgggagtagccccgtcgcaactgcgcgtccggccgcactttgcgtcgtacagccctgagaaagtcatccaggcgcgcgagctcgtcgcaacggagtcccccatcgacccgcgctcattcgtgaacgcgcccgacgaccgccgcccaccgatcgcgcggccgctgccggaatctctgcgtggggctccgaaaatcgccatgacgcatccgcagtacgaccgaaaggcgaagacgctgacggtgtacgccaccacgaatctcgacatcttcgcgtccgcgactccggcgcaggcgcaggcgcggctggcacggtcgcgcacgctcaaggtgctgctggacgacccgtcgccgcccgcgttccgttggatcctcatgtcgggctcgatcctcaagaaccaaaagcgcgcgcagcgcggcggtgggggccccaacgaagtggctctcggcgcgatgatcgatctcggcgtcgcgtcgacggacgtcatctccatgaccccgcccgtcacactatcgctcactatcaacctcattcggtactcgcgcgccttcgacccgacgggcgaaaccggggagtggacgcacgccctcgaggtgggcgtgccatacactgtcggttgtattgttgatgatgcgaatggcaacacgctgacggctctagaagccttcacgattccaacggacttgaagccacagcttcctgcctcgcacagcgcaccgccgtctccgccgccgcgtggcacgtcggtggcctcatcaaccggtggtgctttgacgtctacagggggtggcagctcgtccgctgcacgcccacccactcgctaacttttgtactgttacag

SEQ ID NO: 13058 - DNA, 2295 bp, Oryza sativa
  ref <308>: DATABASE ACCESSION NUMBER: AK110406
  ref <309>: DATABASE ENTRY DATE: 2001-12-06
gtctacccgggcgggctcttctccgagcacctcgacaccacgctcaaggtcggcgaccggctcgacatcacgggcccgttcggcgtcttcaccctgcgcgagggccacaaggcggacctcgtgttcgtcggcggcggggcggggatggcccccatcctgtcgctcgtccgctcgatggccgagcgcggcgacgagcgcaaggcgacgttctactacggcgcccggacggcggccgacctctgcttcgaggacgagctgcgcgagatggagcgccggctgcccggcttcacgtaccggccggccctgtccgaacccgttgcggcgcagccgtgggacggcgaggtcggcatggtcaccgacatcgtcaagcgctacgaggcagacctctccggggcccacgcgtacgcctgcgggccgccgccgatggtcgaggcggcgatgacgctgctcgcggccctcggcgtggaggacaagcgcatctactacgacaagttcacgaccacaggggagaccgagtcgtcctgacgccggtcgcccgtcgacgcaccgcaccgcgacacgcacgcgaaccgatcgcacccgcgcaccgcaccgcaaccgcggagacacccgcctgacccagggatggacgatgacgaccacaccagaacgcagtgtgccgaagccggtgttcacggacgccgaggccggcgcgaaggagttcccggactccaacgcgcggcgcttcaactactacacgcccgccaagcgcaagcagacccactacgaggacgtcaccgtcgaggtccagccggacccgcggcactacctcgcgcagggctggctctacggcttcgcggacggccgcggcggctaccccctggagtggacggcgctcaaggcctggggctcggaccgccccgtccccgagcgtggcccgggctcgggcggcaagggctacgagtggccggcccacggctggcacgagttccgcgacccgaacgaggagtgggagctcagcttctaccgctacaacgccaacgtcgagcgccaggtcaaccagaacatcgactcggcccggcagcagaaggcgttcgagcagtggaacccgaactgggtgcgcttcgtggagtcgcacgtcggcgcgtggatgcacgtcaaccacggcctcgggctctacctcttcgccaacgcgaaccggcgcggcccgacgaacatgcacaacacggcgatggccgtgaacagcatgcaccgcatccggtcggcgcaggacctcgcgctctacaacctcacgctcagcgaggagatcaccggcttcgacggcggcgcgcacctcgtcgcgtggaacagcgacccgtgctggcagggcgtgcgcgaggtcgccgagggtctcaccggtatcgacgactggtgcgaggcgatcttcgccgcgaacatcgtcttcgagccgctcgtcggcgagctgttccgcagccagctcgtgcagcaggccgcgccgcgcaacggcgacttcgtcaccccgacggtcatgggtgccgaggagttcgactacgccgagcgcgacctcgcgtactcggtcgcgctgttcgacctgctcaccaaggaccgtgagttcgccgaccacaacaaggcgctcatgaacgggtggctgtccaactggacgccgcgctgcatcgcggccgcccgcaagctgcagccgctctggtcgcagccggacgccaagccgccgcgcttcgaggacgggctcgaccgggccaagagccgcttcgccgccatcctcgccgacctcggtctggacatcccgaaggagctgacccagtgagccagttcaccaccgcccccagcccgttcaagtccgacagcacgccgtcgaacatgtgcggcgtcaccttgatgaacaaccagatcggtgcggtcgtcgcggaggtgatgaccggccacgagggtgtgaaggtcgtccacctgccctcgatgatccgtgtcgacgcgacgcgccggatggacttcgactacgacgagatctccgaggcgctcggcgaggagccgggcttcttcgacgcggcgcagttcgaggagaacatgtcgacgcactacggccggatgatccacgaggacgaccggacgatcatgttcgccaaccccgaggacgccatcgagtacatcggggagatgccggaggtccgctgaccctctgcacgacccggaccgccgcacctgcaccactgcaccactgcacggatgcaccactgcaaccgaaggacctgacgccctgccgcggggcgccggcgccggccggcgtcccgcgacagggaccgc

SEQ ID NO: 13059 - DNA, 2605 bp, Oryza sativa
  ref <308>: DATABASE ACCESSION NUMBER: AK110407
  ref <309>: DATABASE ENTRY DATE: 2001-12-06
aagcgaaaaaccgagtttgtatactcgataaattaagatgtcgaccaaacccgaggcgaccgctgctcctgcgaccgcgacgcccgctgctgccggtggtgcatcggctgcggcgaaaaaaaaagaaaaaaaccaaagccaaagcggcgggtggctctgctgcggctgctgcggctgctccggcgactgcaccggcagcgtcaacggccgcaccggcgccggcaaaggctgcggccactgcggaggatgacgacgacggcgatgacgatgcggcaccggccgctgcggacggcaaagcgaacgcggcagcgggtgctgtggcgggtggtggcgcgggtgggtctgggtctgggtctgggtcgagtggtgcggcgaaaaagaaaaagaaaaagaaaagcgctgcggcgaaggcaaagagtgtgggcgggctgatggcgcgctttggtacggtgccgcgtgtgctgtcggatgcgctgcgcattcagcgcggcattgaggcgggctttacgtttatgaaagacaatcagccgctgttggcagccaaagcgtggtttgacgctttgcgcatcgaatgggcgggcttcacgcctgccccaatgctgcagagtctgatgctcgatgtcatcatcaaactcgtgaaagagcccgccgtcgcacgcaacgtccacgcactgctcgcgcgcctgaactggattcagggaaatgtggcgcaatgcgcctcacacctcggcctcgcgctcgagcggacggccgaacgcgacgcatacaaagccgagctcatggccaaccgcgcggtcgcatttttgcatatgtcaaagtaccgtgaggcgttggagtgcgccatacgcggtatcgaaattgtcgaacgcaaatccgcggacgaaaaaccggccgctgcggcagcggcagcggcaggtgcagcggcgggtgtgtgtgtgcgcgcgcacccgaacagggacgtggattgggacgtgtcacatcactattacatccgcagctgtgcgtaccgtctgacgggtgacgcaatgcgcgccaaacgcgatgtcgaccgtgcgctgtcgctcatcggccgttacaattacgcacaccgctatgcggctgatgcgctgtatgaggcggcggccattcagctgacgcgtcgcaccggtgcgggcgcgggtgtggcggaggcggcattcagcggcagcggcagcggcagcggcagcggcggtcagacggcgcgttatttttacgaaaaagcgaaattggcagaacacatccgcgatgacggcggtgtggtgcgcggcacgggtgtggccagcgatgcgaaagcgcttttggtggcgaaatttggcaaaaccgatgcgcccaacgcggcagccgttaaggcgtataaggcagcactcgagaagcagttgagtgagtacatgcaaaacgccacggcgcctgcgcgcacggccgatgagaagtgcgcggacgtgtcggactgtctcaagcgcgtcgttacggcgtgcgccgaaattgaggccaaacgcaaggcattggatgatgccttcgacaaagccgctgcagagaagaagccggccactgcggtgggtggcgccaccgccggtgccggtggcgcgggcggtaagaagaagggcggtgctgcaaagggcggtgctgcaaagggtggtgctgcgaagggcggtgacgcgcacgcgcacgcgcatgcgcatgcgcatgcgaatgcgaaggacagtgacccgaacagcgcggagaacactgtgagtgccgttgcggaggacaatatgtttctgtcgcgtgtgtacgccattcgcgcgtggtgctgtcacgcggccaaacccgccgattgggagcagagcgccacttcggctgagcgtgcgctcgcgctgcgcccatatcatgcggaaaactactttctgttggcaaatgccacggccggttggggccgcgcactcgcgcccgacgcgcccgctccggctgttgcggcggcggccgctgcaccctctggcgatgcgaaggacaaagcccctgccgctgctgctgccgtcgcgccggccaccgctgcggatggcaaagccgctgcaccagccgctgcggcagcgcctgctgtggacacagcaaaggagaaggaacgcgctgagcagctgatgcagagctctgcgctgattgcggcggcgaagaacgtggtggaagccggactgtaccatcagcccaaacacgttgacctgctgatgctcaagcagaagctcgcgtaagccacgcgccacgcgccatcgcacatctccacattcgcatgcgggcgtctgcatccgcgcgtgtgcatccgcgcgtgtgcactgccgcacgcgctgccacttaccacccaccccccacccatgcgttcgcgcgtgcacgcgcagcggcaagcgttcgggcgcgcagcggcagatagaaactgacattcgcatcccctgctgctgtgctgctccgtgcctcggcttactcgcgctcttccgctctcaaatccccgcctctcgtgcatcgcgtcctccatgtgtgcgcgtctgtctgtatgtgcgtctgtttgttcgcattcgtttgatcacatcgctgtcgctgtcgctaccgccaactgtttctg

SEQ ID NO: 13060 - DNA, 3620 bp, Oryza sativa
  ref <308>: DATABASE ACCESSION NUMBER: AK110408
  ref <309>: DATABASE ENTRY DATE: 2001-12-06
cgcggcggccgccgcaaaacccggggcgcgagcccgggcggagcggccgtcggtgcagatcttggtggtagtagcaaatattcaaatgagaactttgaaggccgaagaggagaaaggttccatgtgaacggcacttgcacatgggtaagccgatcctaagggacggggtaaccccggcagagagcgcgaccacgcgcgtgccccgaaagggaatcgggttaagatttcccgagccgggacgtggcggttgacggcgacgttaggaagtccggagacgccggcgggggcctcgggaagagttatcttttctgcttaacggcccgccaaccctggaaacggttcagccggaggtagggtccagcggccggaagagcaccgcacgtcgcgcggtgtccggtgcgcccccggcggcccttgaaaatccggaggaccgagtaccgtccacgcccggtcgtactcataaccgcatcaggtctccaaggtgaacagcctctggccaatggaacaatgtaggcaagggaagtcggcaaaacggatccgtaacttcgggaaaaggattggctctgagggctgggctcgggggtcccggccccgaacccgtcggctgccggcggactgctcgagctgctcgcgcggcgagagcgggccgccgcgtgccggccgggggacggaccgggaacggccccctcgggggccttccccgggcgtcgaacagccgactcagaactggtacggacaaggggaatccgactgtttaattaaaacaaagcattgcgatggtcctcgcggatgctgacgcaatgtgatttctgcccagtgctctgaatgtcaaagtgaagaaattcaaccaagcgcgggtaaacggcgggagtaactatgactctcttaaggtagccaaatgcctcgtcatctaattagtgacgcgcatgaatggattaacgagattcccactgcccctgtctactatccagcgaaaccacagccaagggaacgggcttggcggaatcagcggggaaagaagaccctgttgagcttgactctagtccgactttgtgaaatgacttgagaggtgtaggataagtgggagccctcgggcgcaagtgaaataccactacttttaacgttattttacttattccgtgagtcggaagcggggcctggcccctccttttggctctaaggcccgagtccctcgggccgatccgggcggaagacattgtcaggtggggagtttggctggggcggcacatctgttaaaagataacgcaggtgtcctaagatgagctcaacgagaacagaaatctcgtgtggaacaaaagggtaaaagctcgtttgattctgatttccagtacgaatacgaaccgtgaaagcgtggcctatcaatcctttagaccttcggagtttgaagctagaggtgtcagaaaagttaccacagggataactggcttgtggcagccaagcgttcatagcgacgttgctttttgatccttcgatgtcggctcttcctatcattgtgaagcagaattcaccaagtgttggattgttcacccaccaatagggaacgtgagctgggtttagaccgtcgtgagacaggttagttttaccctactgaaggcgccttcgaaattccctgaagtcaatcgataggcttaggacgcggaaagaatatcttcgaaagtgactggaaaaattgataatcttctcaccatgcccttagctctgagtctaggtgttgtcctgctccaggcgttatttacctgcactacctacgcgaatactagcagatttgggaatgctcgaatcctcgagcgccagtcggaactcaaagagtcctacgactacatcatcgctggagctggaacagcagggctgacactcgccgatcgtctcactgcatatgggaaattgaccgttctggtcgtcgaatactgctacccaatatcaaatcaaacgatcgcgcgaagtgatggccgcaacttcgctgacccaggcatcttctataatatcacctcagtacctcagccctcaatgaacaaccgtacacaagcagtccgtattgggtgttgcgtgggcggaagctcagctgtgaacggcatggtcttcgttcgcggcacgaagccggagtacgatggatgggctgagcttggtgggccgaactcgacgtggaattgggaaggtgtgctgccgtatttcagaagagcaagtcacctaaatccgccgactggggaaatgacgaggaacttcaatgttacgtgggatccggaggtctggggacgggataatagtacgcacctctatgctagttatccgaattatgggaatcctgccatgatcccattctacgaggccgcagcggcgatgcctggcatgccgattcctctcgatggcgcgggtgggaaatcaggccttttctggaatcccacaagtatggataatgagcgctactggcgctcttattctcgcactgcacactacgacggtaaggtcaacacgcgagacaattacgatgtaatcaccatgcataaggtgacgaaagtcacattcgacaatgacttgagggcgaccgggattcaaatgagtccaagaggtagtttgaatgatacattaacaatcaaggccaataaggaagttatcatctctgcgggaacagtacacacgccgcaaattctacagaatagtggaattgggccgaaagatttgcttgaagaggcaggtatcgaggttcttgtcgatcttcctggtgtgggtcagaactttcaggatcatgcatacctcagtgtaggataccgctggggagctggccgaggtcccacaggcccgaatattacacagtctggcaatccaagcaccgtagcaggccccaatctcggcgcatggcttggtctcccctccatgacgaatacctcctcacagctagccactgcctatgaatcccaagacccctctgcttacctcccacccaatacgcattccacggtcctcgagggctacaagcgcttccagaagctccatgccaacctcctacgctctacaaacgcaaactggctctggctacctctatccggaaacccgggcggcatcgtgatgagcatgcacatcgtatctcacggcaccatcaacatcgaccccaagaacccacaggccgagcccacggttgactaccgcgcgctgtcgaacccgattgacctggaaattatgctcgagaacatccggtacatgcggtggttcatggcgtctccctctttcgccccttacgcgcccatcgagacgaatccaggcatcaacgtcgagggcgaggatctcaaagcatgggtccggcgcgtgctgatcccgacaaatttccaccctatcggaaccgcggcgaagatgccgagggagtggggtggagttgtagatgaggagttgcgtgtgcatggtacgaagggacttcgggtcgtggatgggagtgttatgccgattctgccgggcgcgaatacgcagcagccggtgtatatgcttgcggagaaggcggcggatatgatcaaggcggcgcagtgagagaccatacgtaggtatttggatgcggtgtatatacgaaggtcctagaagacattgaccaccatttacaatattttctagcc

SEQ ID NO: 13061 - DNA, 3127 bp, Oryza sativa
  ref <308>: DATABASE ACCESSION NUMBER: AK110409
  ref <309>: DATABASE ENTRY DATE: 2001-12-06
cgcagcagaggcccaggacgcaaaatctggctgattggcctgtcccattggactgcttggactgctggccccacccgctggaacttcgggaacgtgcagcattctcgcgcaacagagcatagcgcgcgacccgtcgcagattccacaccatccacccatctgcacctgcacctgcactcgccctttgcgacaaccacaaccgccaaaccgttcatcgcccgcccacggatgctcgccacgccccgtctcgccgttgtcgccagtctgtgtcgcctccgccccagcctcgcgccccgccaattgctgttgctgcctcgctgctgagctcaaggccctcgctcgtgctgccgcgagctcggccgctcttgcgccgcctggactggaatgtactcagtccatgtccatccgcatccccacagccatccccttcaaaatatgtccaatggtggcattgggaacggcatcatggatccctcgggcaccatcgatccgtctgccctcaatgcccaaggactcgtaggcccgccccagcccgtagcacagcagcccgcgcgcggcctcaagcgcagtcgctcgcccgacaacagctacggcgacgtgcacgcgggcgacgacgatgatggcaagccgcgaaagcgcggccgcccgcccaaaggcataaaaggcacgtttgctggcagccccggccgtgcttcccactcccaaccgcccacgccctcacaccagggcatcgcgccgcccgtccaaactccgcagctgcagacgacgtcgctgccgcaggcatcgccgccccgcgcctccccctccgcaaagtcgacgccaaccaagccggccgtcatcaaggcactgcccaccgtgcgcgaccataccaccgaccagctcaaccccgaaggcgacgagtacataccccgcgaaatcgacgaggccggcgagcgcaaggtcacccagaccggccaccccctagatggacgcgaataccgctgccaaaccttctttgttcccaaccgaggcgacaagctgtttatgctcgccacgcagtgcgcgcgcgtcctgggctaccgcgactcttacctgctcttcaacaagaaccgctccttgttcaaaatcattgccacccaggcagaaaaggacgacctgatccaccaagagatattgccgtactcgtaccgctcgcgacagattgccatcgtgactgcacggtccatgttcaggcagtttggaagcagattgattgtcaacggccgcagagtgcgcgacgactactgggagagcaaggcccgcaagcagggtttcaccgaagaggacgctgccggcgaaaagcgaccaggtgcagccaaggcgggagaagctgctgctgccgaaagtgccagcgccatggcttttgcccatccgggcgcctataccggcaataaccaagactacctcggcgctgcggtcaaccctttgcagccgtttggagggttgaacccagcgccaggcagcctgccgactgtaggtacggatgcttattcccagcgcaccacaaccgacctgcaggcccgagactatagcggcgtgcagcgacctcgacacgatctagcaggtgtaccgtaccaggacctctcccgcccaacgccgtccggcgagattttgaaccaagcggcccagacagcagaactcaacaagcatttagagcagcagcgcaagaaccgcaaggaatacctggacaacatctggagccgcccacatgagccaccaaccccagccaaccgtccaggaactgccgaaggggaccaagtgccccaggtttctcaggctgtgcagtcaccacgtgccgtgccaacctcggtgactatgccaagcaatcaatacggcatatctgctcagacaccgcagaggccaggacagcaaatgccatcccaggcataccgccagcaatccctcccacagaacaacatggtgccttctcccatggctcctcagcacacaccgcttcgaccagaccaaatgcaccgccgcccaccaagtatcggtatgccacagggcatgacatcctcgggaatgggacccagcggaatgcttccaggcgtgcaaaaccagagccatggctaccctcagtcgcacatgtggcaaggtccgcctcagccttcaccactgtcgcagcagcacaacatgcagcagtatgcacagcggcctccacagcaatcaccgctaccgcaacagtcgccaatgcacgcttctcctcagctccaccacactcaaagtagcggttcaatgcatggcacgccagttccacagtaccaaacaatgggtgctatgggcgatcctggatatcaaaatatggggcagcaaaacccgtatcaacccagcccaagtccgcatccgttcatgcaacaccagagcactgcaggacagcagcccgccatgtccggttgggcaccccagcaaaccccgcaacaaggatggcaatcttattaggcaacaaattgtccgatccgccacgtaagagaaatcgaacgcatattccaatctatctgagtcaaaattctgtataggcgcaaagagaccatattggtatctgccaagcaaggcatgcagcgcttgcgcacctcagaaaccatctccactcgatccgatagcactggtaaagcaacaggatggccatggcacataacgcacacgagacgatgacaaacgaggagactgagccatgaggacgaacaccggcacgtgcaatgggggattagcaaatatcagaggcatttggatacagggatgttttttcatctttcctttctacgaccttggtcaatgttcctttcatactaccatcatttacgcattgcattcgttcgccatatcggaacccgtttacccctgccatgtcattgcatcgcacggataccatagtcttttgcagattgattgcattgcatgggtttgcgggatggttgatgtctcggagttctgcatcgtcagtggcgcttttattgcctcgtttgatcagactgctatacctctccacacatttagtttccttatccgacccctatccgtctcattggtggttcagtttggagtgattgctacttgcacaagattcccccgattccccctattttttctctattttatccattcgaattac

SEQ ID NO: 13062 - DNA, 3154 bp, Oryza sativa
  ref <308>: DATABASE ACCESSION NUMBER: AK110410
  ref <309>: DATABASE ENTRY DATE: 2001-12-06
ctaagaaatcaaagtcagatcgcttgagtaagacatcaagcaggaataagtatctcgacccggagcctgagcctgagcctgagcctgaacctctcattgaagagactccagtagaagaacctgagcctgagcctgagcctgagcctccagcagtcgaggtcattgaagccactcctaagaaatcttccaagaaggagaagaaggagaagaagtctaagaaatccaaagctgagcctgagccggtgatacctgagcctgagcctgaagtcaaacgcgcatctccagttccaggtggttttcccatggaggacgaaatggacttgattgatcttggtgaagcagtcgctgagcctgagcttgagcctgaacctgagccagaacctgaaccagtcattgtgcctgagaaaaaatccaagaaattaaagaagagcagcaagtcgagatcgatgcctgcggaagatccgccgccaccgccgccaccggaaccagaacctgagcccatggtagaagatgcttctgccgagcgtgacctgctcgatcttgatgatccgcctgtagacgctgaggaggatgcatcgaaacttcccacaccaccaccagaaccggttcgtgagcccaagtccgagtctcccaagaaggaacgcacaaaagttgtgcgcagcggaacggctgggtcatggggcttctggggggctggcgctgcagcagcatcaacacggaccaagcctaggaggacttctggcgctggcgatgataatacaagcagtgctgctggaggcgcgaaacctgccatggtccgcaccaaatcagtacgcacttcatcgaccagggacaacgacaccaagtcgagatcgtctggatcagacaagatgtcaatggccaaatcgccctcggtatcacgctcaaagtcgcaacgcacatcatcaggatttggggctatctttggtgttgcgcccccaccgtctcgtaccaagtcgcaacgaacctctgcgacgcctcgaaacctctctcgcaggtcgtcgatggaccaggacgcggctatgatgtcgccgccccatactgatactgatgtgaaggtgtcgtccaaggccgcaaaggtcatgggcatgaagagtgcgtcgcgccggtctagcaccagggaaaaaggcaagactcgagctgtaccagatccataccctatcgatgatgacttggatggcctgctcgacgaagactctcccactcccactccgagacctgaagcatcgcgtcgcaaatccaagcgcgactcggtccagcccgccgaggtcctgactgccccacccagtgccgacgaccccgttgtaccagaccacgaccccatggaggtggagcctggtctagctgaggctgaggctgaacgcccccgccgcgaacgagaaagagacagaggagaccgcccacgtcgcgagcgcggcaactctgatgcaatcaacacgatggctggtgttgccggtactgctgctgctgtcagcggtttcaagagcatgtttggtggtttcggtcgcaagaaggctgcgccgccgcctgaggatgaccgcagcgcacgacgcaggtctgcctacgaaaccgaggacgagcgccgacgacgcaagcgatctacgacccgtggtggaatgaccgaagacgaagccaaacgattgcgccacgagcgccggagtgtgcgccgcgagcgctcgtcccgcctacctgatggcgaagattacatggtatctggtggcgcaagtggacagcccaaggcagatgacgattacgatgctgaacgcgaggcgcgacgagcagaacgaagagccaggcgtgaggcagagaaaggatctcgacgtggtgaactcgacgaagtcgaggccaaggctgagcgtcgccgcgaccgagaacgcgaacgaggcggcgatggcgggaacactctggcagaaaagaaggctcgccagatggctgaactcgagcgccgcaacaaagaggccgaggaggaactgcgtcgtattgctgagaaagaagaaaggcgcaaactccgcgcagaacgccgccctactgatgagcgcgaccgcgagcaccgttcctcacgccgaaaagagaaggaccgcgagtcagctcgtccccaaaacgatcgacgtaggtcccatatggacgacgacccagaacgacgtcggcgccatgaagaacgccgtgctgctcgtcgcgcttccgaatatcctccgacgaacggcgatgttcccatcaatgactactttgacgagcgcaacggcactgttcaccgttcagggactactaagcgcagctcgcgtgcagctcgcgaggaagagaaccagccgtacatcaaccgcggcgcagacaagacttcttcgtgggttgagtcgctctcgaacgagcccccgcttcctccgcccatttcggagacggtgctcgaccccgtccccggcgctagagacgaggaggcagacgagatcaccgcatctcaggacgaagatatccgactgcgtatcgccggtcgccggagcaagcgcgacaaagaacgcggcgtcgagcgcgaacataaggataaggaccgcggcgaccgagaacgagatcgtgaacgcgcccatcgctcagatcgcgaccgtgatcgcgaccgagaacgcaagcatgcgcgtcgccagtcgcactacgagggcacgacgcgtggtgccgatgaagaacgagagcgcaagcgtgagtcgcgcaggaagagttacgcgccccagatgcccggcgcatatgaggatcaaccggtgcgcacatgggatgggcgtcctgcgatggatgctccctctcagggtgcgaagaggggaagttggtttaagaagattgcgggtggtttctaagcacttcccggtggaagcggaccgatgcgatacagtggttctacttgattaaatgaggagtcgcattggatacctacatgttgcataccgacgattgcatggaagcattgcattgcgcgggcgtttgtttcttgacttttggtctgggattggtttggaatgagtcgaggataaccgctctttgtgggctcactttggcacttcacgctccacgtatgtttgttcatttgatagcagccttgttttatattctgttggatttagtcgctgaaatacccacccttttattctttttcgcg

SEQ ID NO: 13063 - DNA, 2819 bp, Oryza sativa
  ref <308>: DATABASE ACCESSION NUMBER: AK110411
  ref <309>: DATABASE ENTRY DATE: 2001-12-06
aaaagcgcttctttcaggcacacagcgacgcactgtgtggctgttttaagcaaccatctagagtcagctgatcagtgcagcagtagagggaagccatggcggagcgcgaggaatatgcattccaggctgagattaaccagctgttgtctctgatcattaacaccttctacagcaacaaggaaattttcctgcgtgagctgatctcaaacgccagcgatgccctggacaaaatccgcttccagtccctcacagacaagagtgtgctggactcccagcccgagctgttcatccacatcatccctgacaaggagaacaacacactcaccatccaggactctggcattggcacgaccaaggctgacctgatcaacaacctgggcacaatcgcgcgctcaggcacccgtgccttcatggaggccctgtctgctggtgcggacatctccatgatcggccagttcggagtgggcttctactctgcctacctggtggctgacaaggtcaccgtcatcaccaagaacaacgacgatgagcagtacatttgggagagccaggctggcgggagcttcactgtgacccgcgacacagagggcgagcagctgggccggggcaccaagatcatcctgcacctcaaggaggaccagctggagcacgttgaggagcgccgcatcaaggacctggtgaaaaagcacagcgagttcatcagctaccccatcagcctgtggacctccaagaccgtggacaaggaggtgtctgacgatgaggaggaggagaagaaggatgacgaggaggagggcaagattgaggagattgacgatgaggctgagaagaaggacaagaagaagaagacggtgaaggaggtgcagcacgagtggaacctgctgaacaagcagaaacccatctggatgcgcaaccctgaggaggtcacccaagaggagtatgcggccttctacaagtccatcaccaacgactgggaggaccacctggccgtgaagcacttctctgtggagggccagctggagttcaagtccatcctgttcctgccccgccgcgcacccttcgacatgtttgaccagaagaagaagcccaacaacatcaagctgtatgtgcgccgcgtgttcatcatggacaactgcgaggagctcatcccagagtggctcagctttgtcaagggcatcgtggacagcgaggacttgccactcaacatctcacgcgagatgctgcagcagaacaagatcctgaaggtgatccgcaagaacattgtcaagaagtgcctggagatgttcggcgagctggctgagaacaaggacgactacaacaagttctatgagaacttcgccaagaacctgaagctgggtgtgcatgaggatgccgccaaccgcgccaagctggctgacctgctgcgctaccacacaaccaagtctggtgacgagatgacaagtctcaaggactacgtcactcgcatgaaggaaggacagcaggccatctactacatcacaggcgagtcccgcaaggctgttgagaacagccccttccttgagaagctgaagcgcaagggctatgaggtcatcttcatggtggaccccattgacgagtacgccgtgcagcagctcaaggagtacgacggcaagaagctggtttcctgcaccaaggagggcctcacgtttgaggagtcagaggaggagaagaaggagaaggaggagctcacgagcaagttcgagccgctctgcaggctgatgaaggacatcctgggtgacaaggtggagaaggtggtggtgggcgaccgcgtcgtggacccaccctgcgtgctggtgacgggcgagtacggctggtccgccaacatggagcgcatcatgaaggcgcaggcgctgcgcgacaacaccatgtccgcctacatgaccagcaagaagacgctggagatcaaccccaacaaccccatcatggcagagctgcgcactcgcgccgaagcagacaagagcgacaagaccgtcaaggacctggtgctgctcatgtttgagactgcgctgctgtcatcaggcttcaccctggacgacccagccacctttgccagccgcatctaccgcatgatcaagctgggcctcagcattgacgaggacgaggagccagaggcagtcgctgacgacctgcccccactggaggagggaggcgatgagggcagccgcatggaggaggtcgactaagcaccagctttgccatggcctagctgaccaggccctgcagttactcacctgctgcgccggggtgtgtgtgtgtgtgtgttgcttgtttgcacccagcatgtgtggtgtgtgttagtagtggcctgcagtggctttatcggccaggttggcatgagggttgagtgcaggattgtttgagcatgctgtgtcatgcgttgctgccaaggcaggcgtagccggcagtcctgtgctcaccttcccttgcgggaacagcagccacagcaggcatgttctgcctgctgcttggctgctgcagcagcagtgcatttaccagtgcgccttgtacagaagagtgagaaatcgtcagcattgcctgcaagcgtgagactgttgatttcttcacatcatggtgctactagtgtctagcataacgtggagtgtgtaggatatggcttgcgaccaaattgttggtttgttctgtacagaaacaaatggcccaccggtgggctgtgcgtggtgttatgcagcaccgccctgttgtggtgtgattgagcagaaggtgccaagctgtcagcttgttgcaggcctgtactgcataggcacagcttcagttcagagcccagtgtgtaacaggctttcatt

SEQ ID NO: 13064 - DNA, 3568 bp, Oryza sativa
  ref <308>: DATABASE ACCESSION NUMBER: AK110412
  ref <309>: DATABASE ENTRY DATE: 2001-12-06
gtgatgatgtgatgatttaattgcagcagtactgccaagtcatcaggggctgtcctttgaggcttgcctgccttggattggatcaccttgctggcctttgtgtttgcatggctaattatggtcacggccacccctgtcagcggcattaactgctgctggctctcaactacactttgtgccacctaggactccgtgatgtgaggtgcaaaacactcaataagcttcacctggtgcgatcattagcatccagatgagctgtgcgccaggagcgaatgcattcattgagaagtactttttggactgcgtatacaacttgcgtgactacattggcttctgtcttggccttgctgccattctgttctgggtggtggcccagatcccccagtatgtgaagaattacagaaccaagacagctgaagcgctcagtccgtggtttctggcacaatggctgctgggcgacacattcaacttgctagggtgtctgctgcaaggccagcagctgccaaccacaacctacacagcgatgtattttgttgtggcagatgtcttcatgatgatgcagtacatctattatggagcactgcagcggcggcgagagaagctgctgcagctgcaggcgcggcgccgccgccatcaccggcggcaaccccagcagcccagcagcagccgcagccgcacaccacccgcaagccagcagcggcacacgagtggagatgagggcaaacatcacgcctggcagcatcaaccgcagcaggacaggcctcagtggcagtcaaatgcgcgggcggggcagggtgacttggagtacggcattgatggcagcaccaaggagcagacccagcagtgcgtagtgcagcagggtgcagcagagtcagcagcaattcaggaccaacagtcgtgccgtgctggcacaagcagcacagaggttgctgcctgcgtgccttgcagcagtggcattagcagcagcatatggcactgctcagcagaggctgctgctgctgctgctggtgccagcagcagcacactgaaatcgggttgcggccccagcagcatgggggcaagtcgctcggttgttgcagtggggattttggtcagcttagggctggtgtcattgctggtgccagccaacagtacgcacggcttcttcccctcctcccagactgcagtggatgttgcagcagcagctcacccgcgcagtctggaggcagggatgccaagcagccttcacagcttacacactgacagcagcagcagcagcaacagcagtagcagatcagtgccactggcagtgtatgctggccatgtcaccgcaccggtgcatagcactggtgacagcagcagcagcggcggtggcggcggcaccaatcaggcaggtggcgggcaggagccagtggatccaccgcctcgggactgggcttttttgatcggcaccggcctaggctactgctccagcctgctgtacctgtgcagtcgcttgagccaaatccgcaagaactacacccgcaagagcagtgagggtctggcactcaccatgttcatgatggcagtgtgtgccaacctgtgtactggtgtcggtattgtgatgcgcacattcacctggcaggagctgaaggagcagctgccttggatcattggcagcttggggaccatttcactggacatggtcatactgtggcagagcctgaggtacggcaacaaggctgcaacaggggcagcaacagcagtgggcaatgtggcagagcggcagcacctgttgcatgctcagcactaccaccaccacacccaccacgaggtgacacaccacctcaatcagcagccgcagtaccgcccacagcaccagcagcaccatggcctgccacgcccaggacatgtggcagcaggtggtggcgggggtgaggcagctggcggcggcagcagcactgcagcagcagtgactgcggtgctgttctatcagcagcatgcctctggtgcagcaagcagcagcagcggcatggcaattcctggggtgcaggtggtgggagctgccagccgtggtgggtatgacagcatacccatgctgagtagctcggcccctgttgcacctggctggggaggtctgagcggcagcaccacagcaaggcggcacgcggttgctgcagctgctgatcacgcagagcagtcagaggtgtttgcgcccctgctgcagaccacctgagtttagctcattgtgggtatgcttggtgttccttccagagcaaggccacagcacagcattgtgcaagtgaaaagcacacgcacgtattgttttgcttggctttgtctgctgcagcgtttggatctttatcactgtctcattgattgtaggtctcacagctttgagcaagcttcaagaggtgtacatagtgagcacaatgctgaatatacataacaggaggcttgttgtagacagagcttgcaatcttggttaaacctgtatgggtgttgtagagagaggcgttcatgcttaagatggggctttgtgcgtgtgccagctccctgaattgtcataagaggctgggtgacggatttattgtgtcttgcactgttgctcctgcgatcaacccagttatgatggtagcttgtggcacagcatgcaatgaccatgttgagcacagtgcttgatgggttgttgaagggacgcttctccccaggattgctctcttattggccatttgactctcttttctttttcctatgcgggaacgcatttgcagcagcgtgggagctgcactgtgtggagatcatgcactgtacgcccttgcatggtcaccctgatgaatgcactcgagacctgaggggcttgaggattgacaggcgtgagagcttggctgcagtgccattgccctgaaggcagacctgtcgtctgtttgtggtgcatgtccattcaggcaccacagcagctcttgtgtccctgttgcacaccccaatcacactcaggcgccaacatgcacgtgaaagaaataggcacatgcaatttacagcagtgcactggcaattgcatcagcttgcaagctgatctggcaaagtgcaaggggcttacatcatgcagctgcaggtggggtttctctgacgccatcatcatcggtgactttgcattatatgtgcttggctttgccgtcggtagtcgtaaagtcagacaatggccttgcacacacaggaagtgtgctgctccaggtgttgtgttgctgcaatccttaccgttgtgtattgcaggcgtatgtataggctgtatgtgcagcttgacctgaagcgcacaagagcgcatatgcactcatgccatcgggtatacatatgtacactatctttgtgttttcagctacacttatatagagccttcacgtgtgtgagtcgattcatcgacttgtccggttgcttggtgccttaggtgcatggcacaatggcagggggagccgagctaccttatggtgctctccatggtgcaatgtcacgtgccaagaagaaataggcatgtcatggcgcatcccccttccttaatttacgcgcatggaactatccactgacgtgtagacactgtaactgtagagccttc

SEQ ID NO: 13065 - DNA, 3117 bp, Oryza sativa
  ref <308>: DATABASE ACCESSION NUMBER: AK110413
  ref <309>: DATABASE ENTRY DATE: 2001-12-06
aagcgaaaaaccgagtttgtatactcgataaattaagtcgcagcctcacacgatgtggagcaagctgctggtggtggcgtgcctcgcggccgtcgtcaacgccgacgtgtacatgcagtacccgaagggctcgaacaaccgcctcaatgaggccaaccgcggccgcaacaacgcgaaccgcctgttcgattcgcagaacaacaaccgcggcggttacaatgcgggtaacctgtacttctacgccggtactacgatgcacattgagtggaccaatcagcactcgtgcggtggccccaacaaccactgcgagatgattctgcagtacatgtgtgacccgcgtctgcgcgatggttcgacgaccaacaccatcccgacgacggctggtgctgacggtaacccgaccttcggccgtcacgagtcgttcgattactacaccaaccagtgcctgtaccgctcgcgcaaccgcggtctgttcacggccaaccgtaatctgcagaccaacaacggccgtaacggcgccatttacacgcgccagaatgaggacggcacgcgctacggctatgagtgtccggaggagcgcgactactacccgtattggcatccgacgcagtggcgcgacattgctatcttcaccaatcagccggagaagtgcccgtcttacatcgccgcctctcagaacgtggccgagcgctactactgtcaggccccgtctgactggatccaggaccaggcgtcacgcggccgcaatggcttcatcccgatcaacggcactgagtgcattcgcattaagtcgctgtatcaagtcgatcagttcaacaacaccgtcaacgcgcagtggacgtttgtgccgtcgttcggtattgcgccgccgtactgcacgggcaaccgcttcacgcgcgacaaccacctcggcaacgtggaggagggcttcccgaacggctacaactggacgatcccggcggacgtcatctctgagcgctgcaccctgcgcctgcgctacaacatctccaccagcgactacgccgctttcgctgacatcaactcgtacgacgccaacggcgcgcccatttcggccgtcgctgcccccgcgaacttgacgtacctcaacaactcgcgtaccggcaacaccgcgccgacggccaaccgcgatccggcgtacatcgatgtgtggtcgaagtacggcctgcagtggacggacgtgaacgtgtcgttcaaccgtcagacgaacgacccgaacggcgcggcgatcaagaactcgcgcgattacgtgcacaaagacagcccgaaggtggacattttcggcaacaatttgattccgaagtcgcagtccggtgacccgaaccaaccggcgatgatccgcctgcaattggccattaacacggaccagtttggccgtacgtttgaggaccgttcgcaccgcttcgccatccgttcgatgccggacaacctgcagggcgtgcgcgtgcacaatctgcaggtcaagggcaagcgcggcaatatcgtgcagaacttccctgccactgagtacgacttctggcccaagcgtctgaaggtgcagaacggagagtacatccacttccagtggacgggctctaacaataacggcgacaacaacgccggccgcggtaaagccggtaccgaccgccacaatgtgctgctgctgcgcgcgccggtgtacccgtacctgcagcgtacgcaggagcgcaatgacgcgcgcaacgctgtgcccaccgtcggcgcgctcggcgccacgtacccgacgcgcatcgacggttcgaacgcgactttcctgggctttggccgtaacgacctcaagtcgttggcgctgtggtcgacgtaccaatacggtggtgacatggaccagggcgatgatgccggcacgtacttcgacctcggcccgcggcaggtcaatctgaacggcatcttcaactacgcgtgcagccgcaacaacgacttctcaaatcgcgatcagaaggcgcagatcatcgtctccaatgaggccgctgccttccagtcgctcggtgctgccggtggtgtgctgacggccgactccggtgcgtcgctggaggtgccggccggcgcgttcactacgcagatcgtggtcacgctcctgaccgcgccgtccagcacgtcgtcgtcgttctccggttctgtcaactccgattacgtgacggttatcccgattaacctgccgctggccccgggcgcgacggtccgcatcaatgtgccgtaccagaacaagccgctcgtcatcccgcagatgtaccgctcagactcgatgaacggcgattggtcgacggtggacggcgcgtcgtactccggtggtgtggcgtcggctgacgtcacgcagggcggcacgtacgttgtgcagacgcaggtcaattggggcgctgtggtcggcatcatcgtcggcgccgtcggtttcgtgggcattgtggttggtgtcatgtactggcgcttcaagaagcagcagagcggcggcgacacggacgccaaactgcccgccaaagtctaagcgctcaactgcctttgaacaccccccataacctctctattgcagtgctgtaccaacgcgcagcactgaaagcgcggctgttcggccaccgcgacgacgcgctgccaccccgcgctctgcccccaaacccacgggacggagcggctttggcgccgcgccgcttcggaggtcagccgcgagtcatacgcacacctctcccctccaccgccacaactcatccactgcactgcacacaatattattcgcgttttcatgccctgctgtgtccacccgccgttccgcgtcctatcgccggcggcgattcactttgggcagcgccgcgccgcagctgccgcgcactgcccccaccatttcttcaccccctgtcgctgccgacctctgcaatctcgtcgctgcctcctgcccgacgcattcgcttttgcttgcgtctgctcgacccgactccgaccccgacccgacccgtccgcttcgcctgtccgcttccgaccatcgccgtgcgcgttcactctgccctccgaatgaccaaatcttctttagccgttgttcaaaaacgacgtgtctttgttcgatgtacataacaacagggcaaaacgcacgtcccc

SEQ ID NO: 13066 - DNA, 3050 bp, Oryza sativa
  ref <308>: DATABASE ACCESSION NUMBER: AK110414
  ref <309>: DATABASE ENTRY DATE: 2001-12-06
cagcctcttgccagccactctaccaacctctccaaatgtcgccggcgcgcacccgtgggcacaccgcagcaatggcaccgcagccgatccctccgccatctctgtatctaacgcaccctccagccattgccctactcgacgcgcattccgctatacccaccgccgccgcctccctcaccttcaccccttcaccgcacgtggggccccgtctccgactcccagctgggtgcgcccccagggtgcattcccattctctctgaacactcgccgtccgctccgccgtgacgtccagcagcccgcccgcagctcccaccctgctgcccaacgagccgccgcgtaacgagacccacgacaccacccacgaacagccttatcaaacatccctacagctacgccagcagcaggctgcagaatattaccggacccagcacaaccactcgcgcgcctcaagttcgaccggctccagcctgcgccgcacccccaatttcgagcgcgccaggtccacctctgtcgagccccagcagtcgcgcctagtccgcttcgccgagaaccagccgtccgccgctggccctcgcgcccactcgctcacacgcaaccccgagctcttcgagccccatcccgccctccgcatctcccgccgcaccgcctcggcgatccgcttcgtgctcgaggaagcgctccgcgtgccctactccttcacgcccgacctggtcgaggagaacgagctcatgagcgacctgacaagcggccgcgcagccaatggcggtgcgcgcacgacaggcggcccggtcccggtcacgcaggccgatcgctcgcagattcgcaccccgcagatgatcatgaacgcacggcggcagcggcaagaggcagaggagcagcgcaaagccgaggaggagcgcaggaggagcgccgagagaagagcccaagctgctggcgtagcaggcaccacaagcacagagccgggagctcagcggctgccccagccgggcaacgcgagacccggggaccaatatgcgcagtatccaccatcaaatactgcacgtcagcctgagagagttgtgtcacagccaggccagccacaggacacaacagctggcgcgtcgcacacgcgatcgagaacgaattcgtcaacgcagcagcagccacggccaccgcaggcaaatgtgtcagccaccatgcccagcgccgaatcgagacgaccgccacctgtgcagcaacatgcaaggcgaccgtcagggcctgctggctcgtcacaagcaggaccctcgagcgccgcaccacgacaaccgtccgcagcaggctcaacagctggccagccacgagactccgcggcgtcaagcttcccacacgcattcgagcgctgggaaacactgtcatcgcactgggagggtctcacgtcatattggatacggcggctcgagcagaacaccgacgaagtccggcgagagccgctagcccagcaaatgtcacggcagatcaccgatctttcagcagccggggccaacctcttccatgctgtggtcgagctgcaacgactgcgagcctcgtctgaacgcaaattccagcgatggttctacgaacaccgacaagaccaagagcgcgcccaagaacgggaggctgaattggtcaagtcattagaaagggagcgcgaagggcgcttggaggccgaagccaatatggagcggatggccacggagaagaagaatgccgagcgagcggtgactgagatgaagcgcgagctacagatctccaaagaagaagcaaggcgagcctgggaagagctcgggaggagagagcaagaagaacgcgaccgcacgctatcactgcgagaaggtcagcccacgttggttggcggcgtgcaggtggttcctcgagtacaaagcggagggtactcgggcgggcagggcgctgggtctggtggcatcgagcaacactactcgtacgaagaaggccagtcgccgaccgacacagatccgttcacagagagcgctcgccctgtgtatcgccagccagacgcaccatcgctggcccatggcacctatgtccctgcaggagccgcatcgacgtcctcagcacgaccgagcgcctacagcacagcacttgagcagtctcaacatccagcgcccttggacctcccataccgaacgacgcaggcacagcaagcgcctacgcagcccacttcgtcgcggcctgaggcattctaccaacagccgggctcgtacctacaccaggaacaggagacgcccatccccgaggacgaacaatcctatgtcacgtcgcatggagatgtgtccgacggcgagcaggagtatgccattgacgagtcgggtcaatacatgcgggacgcagacggtcggcgtattcccttccgctcggtgcggtctccggcgtcggacgagtatgacgtgcaagaggaccggcggcgcgagctagaacatcttcagcgttacggcactgcagccacatcgtccggtggctatgttacaagctccagcgcaggtccgtcgcacggcggcgggcatgtcacagctgggcagccggactacagcggcgatgggtacggcgacgagtgggtgggcatgcgacaccaccatccgacgaggctgagcgacgtgcccgaggaagacgagaggagccgaacaagccccagcagagctagccaagccagcagaggaaggctgtattagaggtatggcaaccgatacccgctgccgccctgacggtgcgcgtatccgccgcatttgttgcttctgagtacattttatcgcgagcatagttagcggcccatgtgggtcgtgttactcttctgcaaaaggtctcccgagactttagacttggctcgttggggcatttgttatttgcatcctgtgcatctttgcctgagcatttcgtgtattagtagctgcttttcctcacggcaagcatggtgttagcgggcggggcatctggcataggcacgcagcggtttaatgtggtaggagtcgagtccggtagtctgagcatctgagaggagagagagactcaataatgacgaagagcgatgtctggtg

SEQ ID NO: 13067 - DNA, 2874 bp, Oryza sativa
  ref <308>: DATABASE ACCESSION NUMBER: AK110415
  ref <309>: DATABASE ENTRY DATE: 2001-12-06
aaaacgagcgatatttacaggtgtatggcgtttggtgaagctctcacacagcttgggtaccatcagtttgagtttttacatgtttattgccattgtgcctgggcaaattacgatgtgcatgttattggtgctctgcataattcaacctacagactgatcaggactccgcagccctttggtgcaaccgtctcctcctgccagtgtgtgtggccccgatcttgttggggctgtgtgcgcaagacgtgatctgtaatacacacaccacatacattgctgtagcgttggtaggccctagctctttgtcatgcgtctcacccgcttgggcagcagatgtggtcaccagcatgccagcagcgtctcctgtatgccatgcagcagcctggaccacagggctgccacagcacagacgaggactgcagcgtggcttctgcagggctgttcttgtgtgccacgtcccatgtacaagaactggcagggccaagcggtggcaggtgtggtgcggtccagcaatggcacctcggcgtccaccacgccggcagcaacagcagcagcagcaacagcagcaatggatacagcgctagaagcagcagctggcgatgacctggacccacatcgccaatgggaggaagaaatagaagagacactgaagctggtgcgcctgctgccaccttcagtgcgtggcgtgctggagggccatgctcgcctgtatgagctgctagaggttgtgatggacctgggcaggcccccactggcccgcttccctggccacgatgagccgctcagcagcgagccagtcacacaggacgacctggactacgctacacagcaggtgggcgagtttggtggtgacaaccgtgccggcatcgacgccacgctgcaccgcatcagctgcctgcgcaacagggccggccgcatcgtcggactcacgtgtcgtgtcggccgtgccatacgcggcagcgccggactcgtggcggacttggtggccggcggcgccagcgtgctgttcatgggtcgcccgggcgtcggcaagacgacggcaattcgtgagctgtcgcggctgttggctgatgaccttgcgaggcgcgtcgtgatcgtggacacgtcgaacgagatcggaggggacggagatgtgcctcactgcggtattggcagggcaaggcgcatgcaggtcccagacccagagcagcagcaccgcatcatgattgaggccgttgagaaccacatgccccaggtggtggtcatagacgaaataggtactgaggcggagtgtgcagcagcacgcaccatcgcgcagcgtggtgtgcagctggtggcaacagcccacggcaatgagctgcagaacctgatcaagaacccggcgctgtctgaccttgtgggaggcatccaaagcgtcacactaggcgatgatgaagcgaagcgccgcggtgtacagaagagcatcctggagcgtgctgccccgcccacctttgacgtggcagtggagatgctggagcggcacaagtggcacgtgtatgcagacgtagccgcagcggtagacagcttgctggctggccagaacccaggtggccagatgcgtgagcgcgcagcagatggttccatcttgaagtacagctgcagcaagacgaacccggcagcaacagcagcagacgcccgcaagggtggcagcagcaacggcggcggcagccagcgtgtgctgccagagctgcggcggcccagcggtagtgctgccggtgttgatgctgcagacgcagatgcagcatcacctggcgggtttgtgcggccgcggctgtttgcagctgcggatggactacaagatgctgctgctgctgctgctgctggtactgttacgcggcggggtcgcgctgtgcggctggggtgtgcttcgcctgagggtgccctgcttcggctgtgctgtgctgacttggacgaggagagactgtgggaggtgatgagcgccatgggcctccacgacaaggtgtacctggcccccaggcctgctgaggccgatgcagtgctggcagtgcgcagccggctcaagacaaacacaacgctgcgtgcagcatcgcgtgaagcaggtgtgcctgtgtacgccatcaagtccagcagcagcagcaacctggtgcgtgcgttcaggacgctgctgggcctggagccgtcagcgggcggcttgtttggcagccagcctggcagcatggatgaggcggatgtctggggtggcggcggtgctgctgctgcgcctgaagccggtgctgggtttgatgccggactttttggaagcccggatggcagcatggacacgatggcaggcagcaacgacgacgagccgtcggatgatgagcagcagttatcatcctcctccttgtccagcagcagcagcaggggcagcagtggaggtgctgcccgggcacttgcggtggaggaggagggacttgaagaggcacggctggcagtcgagcagattgttgtcccgttacaacagcctgttgagctgctgcctcgcccggggcatgtcaggcgagcacaggcggcgctgtgtggccggtatgggctgacctggcagcttattgggtcagctgcccaggcgcgcttgcgcatactgccggtagcacagcagccgacacagccgggggctggaggggatgctggtggtgtgttgcaaaccgcgcccagcagtagcaatccacagcaggagtcgtagcatcagccaggggccgtggcaggcagcaggggagttactgtgacctgctgcactgggataggtgtacataggtacctgtgcagtagagaagaagcaagccttgcttcttgcgtgattctggcatgatgcaacatgccacgattgcaccttcctgtagcagtaatctttgttacatg

SEQ ID NO: 13068 - DNA, 3859 bp, Oryza sativa
  ref <308>: DATABASE ACCESSION NUMBER: AK110416
  ref <309>: DATABASE ENTRY DATE: 2001-12-06
aactaacgctaaaaaagtaacagtttctgtactttattgcgagtgccttcatcgctgtgcgtaagccccttcacccgaggccgcagcgacactccaaacgtcttcacgagagctgatcaagtgttcttctccgcagtgtacttgactatcgaaacactcccttcaccctacaagtccttcaaacgttctcttcaacgatgcgcgttgcgactgtcctgggcttcctcgcgctcgccgcgatggctgtccacgcgcagagcaccaccgccgtcgtgacgaacctccctgcgacctgccaacgtccagcgttcgtgctggacacgtacgcgcccaccaccggcgccatctccatcacggagtccggcacgacgtggatcgtgtacggcacgacgaacaccatccagtggtacaacgcgtcctgcgtgatgcaaggcctgccgactcccgccacgtggtcagcgaccggctgcgtctacaacgtaagctcgatgtaccccgtgacggcgctgatcaagacgggcacgaacatgttctgggctgtcgccaacgacacgctgacgctgtacacggcgcagaccgcgacgacgacgttcaccgtttctgggtcgtcgttcgacctggcggcgctgagctacccgagcaacccgtcgctgcgcccgcacacggtgtggaacgggttcctgtacatcggctcgcgcaacgtgaacgggaccggcatgtccgcggtgcgcaagatcgacgtgagcagtggcaaggtgagctggactgcgtggtcgccgaacccgcagagcaactaccctgtgtcgatcgcgacgctgactggcggcacgactgttgctgttgcgcagtcctcgactccgcaggatgcggtgttcgcccccttcgacgactcgactggcgccgcgggcaacgcgacgctgtcgctgacggcggttgagggccagaacggctgcagcgcgacgagcggtggcacgtacaactgcaacattgcgctgttcacgacgacgactgtgaacgggatcttctacattgcgtcgacgactctgagcgcgcagctgattgctgttgacttcacgactgggttctgggcgactgcgcagagcggctttggcggctcgaactcgaacgtgctttcggcgttcggcacttggatcttgctcgcgaagggcggcagcgtgcgactgatcgacacgactaagatccccgtgactgcgctgacgaagactggcagcgtcatcccctccgcgtcgctgacggggtcgctctcgctccccggctcctacaccccgtacgcgcaggctgtcatctactcgaacacgacgaacaccttctggctcgtgcacacggccggcatcgcgaccgcgacggtggctgacttccagtcgacgacgacgacgactgcgacggcttggtggtggtactggttcccgttcgcgagtggcaccacgtcgacgggctacacgcagctgaacctgcagggcgcttgggtggacgcgtcgaacccgtcgatgctgtacgcgacttggggcaagtccttcaccggatacacggccactgggtctgcgtggggcttcaacacgacgtcgaagatggcggcgtggagcttcggcgacaactacgacgcgcgtggccccgccatttgggtgccgaccaacgacggtggtctgtggtacggtgtcgccaacgctgcgacctccgtgtacggccgccgtgtcctgctggcgtggtcgactacgaccatcgccagcggtcaaatgctcctcgcggcgtccagctcgggcacgtggtcgagcgacacgatgcacctgtcgtacagcaacatctccggcctgctgagcgttgtgtcgtactcggacaacacgctgacgctgtacaacgcgacgacgatggctgtgaacgcgtcgtacacgacgacgtcgtcttcgtacagcgtgcgcccgtcgatgggcgtgatcactgttgggacgatgcactgcgcgtcgacgtactacaacctgcgctgcgttgactgggtgtctggcgcttcgtcgtcgttcacgctgagcagcaactcgattgccgggcagccgatcgtggtcggcaaccgctacgtgattgcgcgcgactcgtactacactgtgagcgtgctggacatgtccgccaagtccccgacggctgtgacgcagtcggtgtcttctggcagcggctacatctcggcgcagcctgcggggtggctggcgactgacggcagccttgtgttggctgttccgatgagcagcaccatgatgcgcgtcttctacggcgcggagactgcgtccgcgacgtctgttgacatcgcgacgagcgggacgggcctgacgactgcgacgccgaccttcacgacgaacgcgcttgcgttcggcggctacctgtgggttgctggcaacgtgtcgaagactgtggcgacgggctcgaactcgtacacttacacgtactacggccagatcacgcgcatccccgtgtcgactgcgactgtcgcgaaggcgtacacgaaggcgcaggcgagcctgtgggtgatgcagggcacgaacaaggtgggcaacatgaagaacctcttcgcgtcgccgctgttcccgacgatgctgttcacgctgggcgacaccttcactgggtgggacacggcgacgggcaacacgtacttcagcgtggcgccccagcagggcatgttttactggacggcttcgaactcggagggcaactacgactacttcccgactgttgaccccacgaaccgcggcgtggttgtcggcatgggcaacgtgtcgaacaacatcttcttggggtgggcagtgctgagccccctcgacggtacccttatgcgcttcgttcccgcggccgccaacggcgccagcggtgccagctggtctcctcaatcgaagggtgtctacaacggcaactcgctcatcatctcgtcgtccacgcacatctgcgaggacgcgacgacgtatccgtggaccacggcgatctccccgtccgtgccagattacgtcaacgctcgcatgtgcaccacggtcaacggccttgcgccagcctacggctccgttgcgatcggcgactggtactttgtcctcatgaacggcatcctcatcaagacctcgcgtctggtgcaattctatcagtcgatggtgcccttcaccatctctggctcgcccggcggcgctggcggcaacgcccccgctgacgacgactcgaagacgcctgtgatcatcggcgtcatcgttgcgatcgtgattgttgcgatcatcgttgtcgtcgtcgtgaagaagctgggcagcggcggcggcagcggcggcagcagccagggcacgaactccaacgagatgggcggcaagggcgtgtaaaacccctccgctgcaccatgacgctgtgttcttcttggtgagcttgtcaccgcacaatgcgcagcgccgccctccccccgtcgctgtactgctttggctgtggtgtaattcttaactctccctctaacccgaaacgataccccacacgccacaacccacgcctccccctctccatttcaaacaagaagaaaaaaaaaaacaacaaaacccaagaatgcacaatcaagaaacacgccccgttcccgcccgcgtcgctcccatccttccgacgacgagaggcgtcgccgattggaggcctatcgcaccccatcatggaggagttcaacgcactccccccagtctgttaacgcagacgatccaagcgagaagctctcgccgacgagtatatgatgatcggatgggacgggcgcatgacccttttcagtgtgacagaaagcgcgccccacgggaggagcgcttttaaccttgccctatgttcgcacgcgtttctaagacaattg

SEQ ID NO: 13069 - DNA, 2845 bp, Oryza sativa
  ref <308>: DATABASE ACCESSION NUMBER: AK110417
  ref <309>: DATABASE ENTRY DATE: 2001-12-06
agggttcgagttggagcacgcctgtcgggacccgaaagatggtgatctatgcctgagcggggcgaagccagaggaaactctggtggaggctcgaagcgatactgacgtgcaaatcgttcgtctgacttgggtataggggcgaaagactaatcgaaccatctagtagctggttccctccgaagtttccctcaggatagctggagcccattacgagttctatcgggtaaagccaatgattagaggcatcgggggcgcaacgccctcgacctattctcaaactttaaataggtaggacggcgcggctgctccggtgagccgcgccacggaatagggagctccaagtgggccatttttggtaagcagaactggcgatgcgggatgaaccggaagcctggttacggtgccgaactgcgcgctaacctagaacccacaaagggtgttggtcgattaagacagcagaacggtggtcatggaagtcggaatccgctaaggagtgtgtaacaactcacctgccgaatcaactagccccgaaaatggatggcgctgaagcgcgcgacccacaccaggccatctgggcgagcgccatgccccgatgagtaggagggcgcggcggccgccgcaaaacccggggcgcgagcccgggcggagcggccgtcggtgcagatcttggtggtagtagcaaatattcaaatgagaactttgaaggccgaagaggagaaaggttccatgtgaacggcacttgcacatgggtaagccgatcctaagggacggggtaaccccggcagagagcacgaccacgcgcgtgccccgaaagggaatcgggttaagatttcccgagccgggacgtggcggttgacggcgacgttaggaagtccggagacgccggcgggggcctcgggaagagttatcttttctgcttaacggcccgccaaccctggaaacggttcagccggaggtagggtccagcggccggaagagcaccgcacgtcgcgcggtgtccggtgcgcccccggcggcccttgaaaatccggaggaccgagtaccgtccacgcccggtcgtactcataaccgcatcaggtctccaaggtgaacagcctctggccaatggaacaatgtaggcaagggaagtcggcaaaacggatccgtaacttcgggaaaaggattggctctgagggctgggctcgggggtcccggccccgaacccgtcggctgccggcggactgctcgagctgctcgcgcggcgagagcgggccggcgcgtgccggccgggggacggaccgggaacggccccctcgggggccttccccgggcgtcgaacagccgactcagaactggtacggacaaggggaatccgactgtttaattaaaacaaagcattgcgatggtcctcgcggatgctgacgcaatgtgatttctgcccagtgctctgaatgtcaaagtgaagaaattcaaccaagcgcgggtaaacggcgggagtaactactttttatccttgctgcattggtcgctgctgtcttcgctcagctcccagctggtgtcaatgaaaaccagaaatacgtcgtcactcctgagcttgtacgtgacgctgagccagtaggcaagtcattcaaggcagaagaatgtgctcaaattagagaagtcacctgccaatacttgaagaaatgctccaaaattgcaaaggaaaacgaatgcttgaagtgggaaaccttcaacgtttgcgtccaagaaaaggttgaggaatacaaggagaccaaggaaatctgcgttcaattggaaacctttgacaaattccaacctgacaagtgctacaagtgcgcaaagaagggtactgagcaagtccctgcaaagagaaccgtctgcgcaaagtacgaaacccaacaaaagtgcactcaaagaggtccaagaccaatgtgcgaagagtaccaactcgtcaagcactgctatgagctcacccctgcatacgttgttgaaggaccaaagacttgcccatcaacccaagaactcttcttcactctccaataccaaggagctggcgagaagcacaagatcttgagacaatgcagaccaatcaccaacttcgcaaagacccaatgccaaggcactttggatcctcacatgaagtccaacaagggacaagcattcgaattccaacacactggtgacttcaagttcatcatcacttctgacggtgctttcgaatgccacgtcagactccaacacatggttcctggaaccaagtggactggtccatctgcttttgcttgcagagtcaacggtgtagatatcttcacctgggaccaaggaagcttcagagtcaatggacaccctgtcaccgtcactgcaacctcccaatacaacttgccagaaggtggtttcatcaagcttgagagctccggcaagagaatcagagtagtctctccaaacagagcagaactcttcttcgacctcgctggtacttacaccaacggcaacgacaagatccaatccgcaaacttctacggtttgattccatctgacttgggtgtttctggcctctgtgctggtggagacagcaagaccatcgctcactggttgaacgacagagcatacggcttgttcccattcacttatgaagcaaaggtccttggaagcgcattccctgtgccaaccttcactgctgaagaaaccaagaacgcagaagcactctgcactccaatctttgatccaaagttcagaaagctcgaattcgacaactgcgttgacgatgtcctcaacacaaacttcgtcaacagagatgctaccctccaagctgagaaggatgctgctcttaacactccaaacaagtaaattgaactgttgaatcttc

SEQ ID NO: 13070 - DNA, 2172 bp, Oryza sativa
  ref <308>: DATABASE ACCESSION NUMBER: AK110418
  ref <309>: DATABASE ENTRY DATE: 2001-12-06
atccacatcaacccagcgggctcaactccaaagcccatccactacccagcccaaacccagccctctctctctctctctctccatggccgccaccgccatcgccaccctcctcggcccaccggaggcacgccgcccctccgctgcggtggccgccgcgccggcgacgaccacgggcgacgcgttcctcgacctgatggacgccaacttcaacaagccggcgccgaggaaggcgctcacggagaacctctcgccgacgttcgtgtcgtcgggggacgcctgcctcgacttcttcttccacgtcgtgcccgggacgccctccgccgccgtcgcgtcgctgctcgccgccgcgtggggcgccgacccggcgaccgcgctccggctggtggccaacctgaggggcgtacgcggcaccggcaagtcggaccgcgaggggttctacgccgccgcgctctggctccacagccaccaccccgccaccctcgcgctcaacgccgcctccgtcgcggccttcggctacctcaaggacctccccgagctcctccaccgcatcgtcaatggtgggttgtccacgaggaagcccgggaagaaggcgcgcctcgccgccgctgatggcatcggcttcatcgcccgccgtggccgtggccgtggccgcggccgcggttgcttccgtggccgtggacgcggtttcgcccgcggctaccacaccagcagcaggaagcagtcgcgcggcgtcggttcggcggaggagcgcgtcgcggccagcctggagcgcgacgggaggctagcggcgaaggcggcggtggagcggcggtgcaggcgggcggaggccgcggcgagggcggtggagaggtacagccgcgaccctacctaccgatccctgcacgatcgcacgaccgatctcttcgccgacctcctccgcgacgacatgcgcaagctcgccgagggcaacgtccacgagttctcgctcgccgccaagtggtgcccgtcgctggacaagtcgtacgaccgctccaccctcctccgcgaggcgatcgcgcggcgcctcttccccaagggctcgttgccggagctcgccgcggacctccccgacgcgcattacgcctaccgcgcccgcgagcgcctccgcaaggcggcgctcgtgccgctccgccgcgcgctcaagctcccggaggtgtacatctcggcgcgcgcgtgggagtcggtggtgtacacgcgcgtcgcctccgtggcgatgaagaactacaaggacctcttcctcaagcacgacgccgaccgcttcaacgcctacctcgccgacgtcaagtccggcaagaagaagatctccgcgggcgcgctgctcccgcaccagatcatcagctccctcgacgacgacggcggcggcagcggcgtggccgacctccagtggcagcgcatggtcgacgacatgcgcgccctcggcaagctccgcaactgcgtggccgtgtgcgacgtgtccggcagcatgaccggcctccccatggacgtctgcgtcgcgctcggcctcctcgtttccgacctcagcgacgacccgtggcgcggccgcgtgatcaccttcagcgagagcccacagctccaccacatcgccggcgaggcactctccgacaaggcgcggttcatccgcgaaatgaactggggcatgaacaccaacttccaggcggtgttcgacaagatcctcgaggtggccgcgggcgccgccctctcgccggacaagatggtgcgccgcgtggtggtgttcagcgacatggagttcgaccaggcgtcggcgcagccgtgggagacggactacgaggcgatcgtgcgcaagtacacggcggcggggtacggcgccgccgtgccggaggtggtgttctggaacctgcgggactccaaggccgtgccggtcacctccggccagaagggggtggcgctggtcagcggcttctccaagaacctcctcaagctgttcctcgacggcgacggcgtcgtctccccgcgcgccgtcatggaaaaggccatctccggcccggagtacgacaagctcgtcgtcttcgattgagaagatggcagcccctgcagccctttccgtctcgtgttcttcatctttttgtaaagtttggggaagttttgtaaaaactagcaaatcttctctaaataaaggatcggaaaattcggtgc

SEQ ID NO: 13071 - DNA, 2822 bp, Oryza sativa
  ref <308>: DATABASE ACCESSION NUMBER: AK110419
  ref <309>: DATABASE ENTRY DATE: 2001-12-06
aatgcgaagcctttccggtgcagtcctgacgcgtcggcggtaacctaccacctgctgcgctatccgccggccctgttgaagcttgcgagaagcggacgctggggagggatcaggtcttgcagtctcgggcctggctcaacgttggcaacaccggatcaccatggcgcccaggactctcccacagcgccccagcagccgctgtgcctggcggccggtcagtgcactggctgccctggccgtgtaccttattggcatgccaggctctgcaatggcgtgcattgcaacggggtaccaagtgaagcctcagctcaatccaaagttgactgtgccggcgttcaactctgatggcaccttttctcgctatgggccctcacaggtcttcacccattttgggttccagctgcagcagcctccgttgaagtttgccaacagcacccgctccacattctcttgtgtcgattcacgtggcaacacagacatgctgggcaccccaggaggcgatctggcagagattgtggcggcggccatggcttacttcaagctgcagcagaagccagtcaacaaggaggacgtttccaccattttcaacgcattcatggcccgcattgcaagcccaagccgccccatctacttccacacagacgacagccgcctgcggcagatgtttgtggccctgaagaatgccagcgttaatccacagccatccaagtttcctttcaagggtccggatcgcaccaagaatgcagcccttgcacagaagtggatggacctgctgctgcagccacagtaccagggctgtggccacattcgtctgatgctgcagaacaccacagcaccctactacagcatcaagctgtccggcgacaaggtggccaactgtgtgggagtgcccgccagcgactgcatcagcagcagtgaggtaacagccgctgtcatcgacaacttcttcaggtactggtggtggaccaaccttggcagcgcagagagggcaaaagtcacccttgtggttgacctgggaccgctggtgggcaaagctgttgccatcgttgaaggcacagacaagaatggcagctgccgtgacatgagccccctggtgcggcccaacatcgccggcagcacgctgttcgtgtaccacgggaaggcggtgtcagagttcagggcatatgcggcacctcgcctgcaggtagtgcccgctgataaaggtgcacagtacggcaagctctgggaagatgtgggtggcctgcagctgggtgccaccctcacatacctgccacctgcaaatgacgtgggaatattcaacgtgaaggttgccacaaaggcaaactgaggcaaacttcaccgcaagccaagaggctttgaacctgccaggcacccgggtgcagtggataacaaatgcctgtgccaccacagacttcttggtcttgtggagggctggcgggtgacagagggcatgcttgaaaggtgtttaactattgcggcttcaaaagaaacctggaagtgggcaggggcttgagaagccttctcatctgagatgaacaaggatgcgtgtgtatccatcagaacatggggaggtatcaccttcaaccaccagagtggtgactgcacacacaacgatgtgctgcacttgctctggccttgctgaaatggtgttaccacatcccacttgggggatgcagtctgtgcaggcctgccagaagcaacatacaactcaagctgtgtctcccagccaggttgaaagaaatctctcttctgaaatgctgaaggggacaatacttttattaaggagaggaacgctgccggcgaggaaagcgttgggaaagtgtgtcgtcttgagaaccagggcaggcaccactgttcatttttcaggggatcattacagtggcactgtacaccgtacattgcagttgccatctgtgcaacagttgtaccgcatgcacacaagcaacacaacggctgtgcgctggtcaggcaagtgcattgatgcccaactctcacatgcaaaagcggcttttgtgccgttttgcagttgcaagaatgcctcgaggcttgttgtggtatccaccttagtccggacgatccttggtacttgtgcccacatgcgcccactatacagatggttgcgaacttcactagaagtttgtttggattttgtgcagtgctggctcgtaggcgggttttctttctttagtgtgtgcgagccagcgaggctttattttgcatatcattcgccctgttggtcaccagtgcaaatgtttgacatgagtttaagtgccaacccctaataatgatgaacgggactgccagccttctgcaatggaagtgcaaacgtctgatatgcacttgttcacaagtactttgtggtctgtgagcgtatttgcgatgcattcggggcgccagtcatgccaacactggtgaaccatgcttgtacagacgcagtgctgcagcgcatgcaagctgctgtgagcacggcattttgatcgtatatagttgttaaatagcagtgcatatgttgcaggctctgcttctctttgcaacaggatatatcctgcacttatctacttaataccttgtggcgcaaagttaaacactgattcagctggtttcaggccctgacctgaaaggcatgcgctgcagccagctctcagccagctggctgagagccaaccggttggctcacatatgtacctatgtgacactgcagtgtcaagggccagctggccctatgcggttcccatagttctacgctggaatgtgaagggatgtgcagacgttctctgcgcgtgcagagctgcatgcattacactgtaatggcatggcatgac

SEQ ID NO: 13072 - DNA, 2402 bp, Oryza sativa
  ref <308>: DATABASE ACCESSION NUMBER: AK110420
  ref <309>: DATABASE ENTRY DATE: 2001-12-06
attaacgagttgttgcttcctcctcgagagagctcaacggcgacgaagcagcgcgacgcgacgcgacgccctgcggtggcgtggcaacaccgcaacaatggcgccgccgccgccgtcgccgccgtgccggccgcgagtcaagcccgagcgcgcccttctgtgcttctccctcctcctcctcctgaccgccaccacggcgaacgccagcatcaccgactgcccaactacaagcagcaccaactccagccatgtcgacgacggtgccttcggggccaacctccgcgctctcctctcctccctttccgcagccgcggcggcatcgtcgtcggggttcgccgagaacgcgaccggcgcggcgccggacacggcgtacggcctcgcgcagtgccgcggcggcatcgtcggcggcggcaatggcaccagctgccgctcctgcctcgacgactcggtgcgggacgcggccaaggcgtgccccggcgagaaatccgccgtgatcatctccgactactgcctcgtccggtactccaacgcgagcttcgccggcgccgccgacgagcggacggtgaagctctggtggaacacggacaacgcgacgcagccggagaggttcaagtcgctgctggggacgctgatgggcaacctcaccgacgcggcggcgcgcgcgtcgtcgccgctgatgttcgcggccggcgagaccgacctcccgcccttcaccaagatctacggcatggcgcagtgcacccgcgacctcgccgccggcgactgctaccgctgcctcgtcggcgccgtcaacaacatcccgaaatgctgcgacgggaagcagggcgggcaggtcatcacgaggagctgctccatccggttcgaggtgtacccgttcttcgacgcccaggccgccaaggcggccatgtcgcctgcgccggcgccggcgccggtgacgacgcccaccggggtcaatggaagtaatcacacagtcagtaagtctgtgattgtcccagttactgtgggagttgccgtgttactagtggtaatactgctgctaattgccctttgtctgtgcaagaggaacagaaaaccacataagcatatgatgattggaagcgtcgatcttggagatgaagacgaaatgagaggctcagaatctctcttgtatgacttgagtactctaagagcagcaactgccaacttctcagaagaaaataagctcggagaaggtggatttggcccagtctacgaaggtacactgcaaaatggtcaagagattgcagtgaagagattgtcagcaacttcccatcaagggcaattggagatgaagaatgaggtagtcttggttgcaaagcttcagcacaagaatctggtcaggctgctaggatgctgcatcgaagaacgggagaaaatcctagtttatgagttcctctgtaacaaaagcctcgacactatccttttcgacacttcaagacagcaagaccttaactgggagcaaagattcaagatcattgaagggatcggaagagggcttctttatcttcatgaagattcaaggctcaagatcatccaccgtgatctcaaagctagcaacatcttgttagatgtagacatgaaccccaagatatcagacttcggccttgccaagttatttaacatggaagcgagcgtagcaaacactagcaggattgctggaacctacggatacatggcgccggagtacgcgctgcacggcatcttctcggccaaatccgacgtcttcagctacggcgtgctcctcctcgagatcgtcaccggccgccgcaacacctgcctccatgactccgaggatctcctggcatttgtctggaggcactggagccgcggcggcgccggggagctgctcgacggctgccccgccgccggccgccggccgcaggagcttctgcggtgcatccacgtggggctcctctgcgtgcaggaggacccgcagctccgccccggcatggcggcagtcgtcgtcatgctcaacagccgctcggtcacgctgccggcgccctcggcgccggcgttcgtctccgcgagccgtgggatcggcggaagcccgccgccggcggcggcggcgggagatgcgccggcgaggagcacggatcacgaggttcctacggctgctcgatagccgtcgatcaacggcgcttctgtctctgaactagagccccggtgacatcggagattcggaggactgacggctgggcccggcttgtgtttctgctttgaatttgaaaatttgttgctcgttttgcattcaaaatttctctcggatttaatgcatttctgtatgccgttcagtgttggagtagttaagtggatatgaaaatgtaatgacggctttgtaatttagatttttcgacgagcttagcaattcaagtggtttatgtagt

SEQ ID NO: 13073 - DNA, 3839 bp, Oryza sativa
  ref <308>: DATABASE ACCESSION NUMBER: AK110421
  ref <309>: DATABASE ENTRY DATE: 2001-12-06
atcaaggttcacttggccgatcacagtaattacactgggtaccagacgtccttggcatgataccaggtgtcagttgtccagcgtgcattgaagcaccccctgatgcgtgaacgatacgtgaacaagtttttatagctgcaataatatgcacaatctttcaccacacgatgccctgggagtaagagagacaacacaaatcacgttttagaatagctcagcctgtatcacaggtcatggcgcagacgaggcttctgccgctgacgcccaaccagaagcgtgcagtggctgttgccgttgtgctaggagggctaggaggagcacatcagcttcgacaatgggtcaaggcagcacaggcaaagcagaaacagcttgtcaaggacatacatggcaagcagacagcacgtggcaaaagttcatccaaagtagcagtaaatgaggtgttcttcaagcgactctgcaccattctcagcatctgcgtgccgggtgtgttcactcgcgagttcttcctggtgctggttcaaggcggcctgctagtgagccgcacactgctgacagactacatcagcagagtggagggctactgcggcagtgcactcaccagcctggactttgcaacctttgcccgtggtgtggtggactttgcgctgctgggtatcccggcagcggttgtgaactcaggcctgaagttcatgcagaaaaacctagagctcagctttcagagccgcctcacgctgtacctgcacaagctctacaccagtaacagggcgtattatgcagccagcacgctgggtgggctgacacatgcagaccagcgcatcacagaggatgtggagaagttctgcttctcaatcagcgatctgtacagccacacattcaagccgctgctggatgtgctgctgttcacgcggtcgctcagtcgggtgatgggctacaaggggcagatcgggctgcacgggtactacgtggcagtggcgtggctactgcgcgcactggcaccacccctagcacaaatgacagcacaggagagcgcgcttgtgggcgcgttcagggctgcccaccagcggctggtcgcccacagtgaggaggttgcgttcaacgacccccctggtggtgcggctgagcagctcattctcaaccaacacctggcacgactcatcacgttcagcaggctgtccagcttccaacgcttcctgcagcagattgctgacggctactttgtcaagtacttcgcaagctgtgtagcgctgctggtgtatgctgggcccatttacttcatggacccatcagcacgcggcgaccaggggcagctcacagcagactacatccgcagcatgcggctgctgcagaacacatcgcggggtgttggcgacctgatcatggtgtacaagcgcatgaccagcctcgcagggcacaccagcagggtggcagagctcatagagcaggtgaagcagatgagcagtgaggacaccgagcacaaagagctgttcaaacgcaacctgagccactcctcactggccgccctggctgaggccgaggaggagctgcaggacggcttcacctacgaggaccaccatgagctgcagcccatgtcaccagtgtcacccaagaggctgactggcgacatcatccgcttccacagggtggcactggacgcaccggacggcatgccactggtgcgtgagctgtcatttgaggtgcatcgcggctgcagcgtgatgctgatggggcccaacggctgcggcaaaagcagcctgttcagggtgctggcaggactgtggcctctgcaggctggtgagatcacctccccgcccaagcaggagctgttctacctcagccagcggccctacctggtggtgggcacactgcgcgaccagctgctgtaccctaaaccgccagcacgcgtgtggcagggcagcaagcctgaggacaagcagctgtttgtgtctgtggctggggaggagccctgctacaccaacagggacgaagagcttgctgcctgtcttgctgctgttgagctggactacctgctggcccggggccagggctgggacagcgtgcaaaactggcaggagacactgagcgggggcgagaagcagcgcctggccatggcgcgcctgctgctgcacaagccggcctacgccgtcttggatgagtgcaccagcgccgtgtctgctgatggtgaggtgaagctgtacgaggcgtgtgtcacagcaggcatcacgctgctgtccattgcacacaggccgacgctgaagcgcttccaccagctggtggtgcacatcgacggcacggtgtcaacaaccggcaaggggtggtggacagaggtgttggatgagaaggtgctgctgtccagcagctcagcagtcgctctggcagcaatctcagcagcaggaggacagcggccatgagggcactgctgctggtgtggtgccccacagacagcagttgctgggcaaggcagcctgtggcaacagccagtagtttacttgggcgaggcctgcatgtaaaccaacagcagcagcagcggtcgtggtggcttgggtgccaacgttgcttaggtgtgttgtactggaagcgtgacagtccttattgcgcccttgcagggaatgcagcatgtagcattcatcggctgatgttgctgcccgcagtgacccgccttctcatggcctgggaccctttgctgtggttcggtgatgtgctatgttgcctcctttgctagggcaggaggggccttgccacacacgattgtgattcctggcgtcaatgtttcttgacgggcgtgtgtcaggcttgtggctgtgctactaggtcagcacgattgccgccaacagcatggctgtgaacagcaggagtaatgtgcaaggtgccaaggtgctattgtgtgacatgttcagcagtatgtcgtgtttacgagttaggccatgcatggtgctggagggcgtgcagcccacgcttgaacaaaggcagctggtagtcagcttcttgaagtttgccaggtcagcttgccagtgcattgcacactgcacgtgcctatgcttttcttgcacctgagttgcgcacacgatcctgtgaggctttgtctcctcttttgttgcatatgcatgtacactgagctgccagggcagccacagcacacttaggtgcttatgctttttctacacccgtgttgacactctgcctgtgctgctgcctctacagcggctgatggctgcatcaccgctgcatgactgtgtagagttgtcagttcggctgcaggctcttggtcagacttttatgctttcttgctgtggccattttgtttgtgcacgtgccttgagggggcaacgggtctcgctttccccaccgctgtgctagaagcaccctttttattggtcagttgtgtcagtggtggtgctacttctgtggtgcagctgcctgggcagcatgcctgttgcatgtctgcaatacctgtactatatagtactcgtgcggcctggctgtgtgcatgtatgtatgtgggtagctgggcgggtttggctgtgctactgcttgcaagcgcttgcaactgctagcagctgcagttgcgtgcagagtacaaacaggtggaattcattgtgcgtgtgggctatgtgctaatggtcgtgctatggggcttgctgcctgtgacccacggtttgaccaagtgtgtagctacacatagtagctgcagtatgccatgcgcgttatgcggctgctgtgctgctggcgctctgtgcaagttgaaaagacaaagagttcaagtgtggctggcacgcagcaggtgttgtatgttgttgcatgtggcgtgcatgccttcagcaggccgtgtaacacttggtgac

SEQ ID NO: 13074 - DNA, 3130 bp, Oryza sativa
  ref <308>: DATABASE ACCESSION NUMBER: AK110422
  ref <309>: DATABASE ENTRY DATE: 2001-12-06
tgattagaggcatcgggggcgcaacgccctcgacctattctcaaactttaaataggtaggacggcgcggctgctccggtgagccgcgccacggaatcgggagctccaagtgggccatttttggtaagcagaactggcgatgcgggatgaaccggaagcctggttacggtgccgaactgcgcgctaacctagaacccacaaagggtgttggtcgattaagacagcaggacggtggtcatggaagtcgaaatccgctaaggagtgtgtaacaactcacctgccgaatcaactagccccgaaaatggatggcgctgaagcgcgcgacccacaccaggccatctgggcgagcgccatgccccgatgagtaggagggcgcggcggccgccgcaaaacccggggcgcgagcccgggcggagcggccgtcggtgcagatcttggtggtagtagcaaatattcaaatgagaactttgaaggccgaagaggagaaaggttccatgtgaacggcacttgcacatgggtaagccgatcctaagggacggggtaaccccggcagagagcgcgaccacgcgcgtgccccgaaagggaatcgggttaagatttcccgagccgggacgtggcggttgacggcgacgttaggaagtccggagacgccggcgggggcctcgggaagagttatcttttctgcttaacggcccgccaaccctggaaacggttcagccggaggtagggtccagcggccggaagagcaccgcacgtcgcgcggtgtccggtgcgcccccggcggcccttgaaaatccggaggaccgagtaccgtccacgcccggtcgtactcataaccgcatcaggtctccaaggtgaacagcctctggccaatggaacaatgtaggcaagggaagtcggcaaaacggatccgtaacttcgggaaaaggattggctctgagggctgggctcgggggtcccggccccgaacccgtcggctgccggcggactgctcgagctgctcacaactctcatacaccatcttgtttgaagaatattgataggtgattggtttgaggatttgttataagaaacatacagacaaccaatatggcactactacaacgctcaagattggctgcttcaggcctctccaggtgtcgtcctggacttcagtcagtgagaagataccaaagtgccgccctagcatctacaatctcccaaagagacgcaaagtcttcactatctttgtcagccagcacaccgaaaggatcaacagcacttcacaatgtctcacctacagcaattatggctcgtccatactctaccgccagtgaagatatgtacacagcttcctttgccttcttcgaggctatctgggatgctggtataacacattgcttcgtaaacctaggaacagatcatcctagtatcattgaagccatggttaagggacagcgtgagaagaagggccagtttcccaagatcatcacatgtcccaatgagatggtcgccatgtctatggctgatggatatgccagattaacaggcaaacctcaatgtgtcatcgtacacgttgatgtcggaactcaaggtctcggcgcagctgtccacaacgcttccacaggtcgagcaccagtgttggtattcgctggtctatcaccattcacacaagaaggcgaacaccgcggaagtcgaacagagtacatccactggatccaagatgtaccagaccagaaacagatcatttctcagtactgtcgatatacgggagagatcaagacaggagccaacgttaagcaaatggtcaaccgcgctttgcaattcgctacttcagatcctcaaggacccgtgtatctgtgcagtgcacgagagattctagaggctgatcttaagccttattcgcttaagcaagagcactgggagtcagttgaactcggtggtcttcctacgagtgccgttgacagaatctctgaagctctggccggcgcaaaggctcctttgcttgtgacgggatacagtggacgaaaccacaagattcctgccgcgcttgtggagttggctgataaagtcaagggtcttcgggttttggatactggtggttgcgatatgtgctcccccgcagatcatcccgcttggctgggtctcaagtttggcgttgacggtgctgttactaccgctgatacgattatcgtcctggattgcgacgttccctgggttcagacgcggtgcaagcctagagaggatgcaaagatcttccatatcgatgttgatcctctgaagcagcagatgcctactcattacatccaggctgatgcacggtacaaggccgatgctttgactgcggtggaacagatcagccaagctcttgataagaaggaatttgccagtaaacttgagtcccaagcggaggcagagaaggagcgcgcagagattcatcagaacaagctggctaccatcgccaaggccgctgaacctcttgcggacggtagtttcggcactgggcatctcagcaagaagctcaaagatctgtgtcctgaagataccatctgggctattgaagccgtcacaaacacaggtttcgttcacgataacgtgcagcccacacttccggggtcatggatcaactgtggtggcggtggtctcggttggtctggtggtggtgcactgggtatcaagctggcgacggatgctgagaatggcggtaccaacaagggaaagttcgttgtgcaaattgtaggagatggaacatatctcttcaccgtccctggaagcgtatactggatttcaagacggtacaagattccagtgttgactattgtgctgaacaacaagggctggaatgctccccgtagatctctacttctcgtccatcccgatggtctaggctcaaaggcgacaaatgaagagatcaacatctcctttgatcccgtacctgattacgctggtattgcaaaggcagccgcaggcggagatatccacgctgcgagggttgacaaggcatcggatttggaaagtgtgctaaaggaagctatcgccaaggttcaagctggacaaacggcagttgtggacgtcaaggttgcgccggattgctagtgaggatgtaatgtggaggttctagaccttgaggctgaatgccattattaagttag

SEQ ID NO: 13075 - DNA, 2292 bp, Oryza sativa
  ref <308>: DATABASE ACCESSION NUMBER: AK110423
  ref <309>: DATABASE ENTRY DATE: 2001-12-06
gtcctgcctatctatctaacaaacatatcactgctcaactcacgggtgctcgtgcaagaggcccctccattttcaggcacctagctagctcaggccattgaagaacgcatccaagaaaggtgcgagaaagaacaggagcagagactgatcaagattcagtgattcagaattggagagggaaggagagaagattcagagagaaacagaagcagtgtagatttggatttctagtccgttttgtctgaatttttggtgtgtttgaggcacgaggagtaagatggtggtgcagaagaatcagcggaagccaggagaggcttcttggcccaaggttgtgctgaagaaatggctcaacctcaagagcaaggattcggagttcaacgccgacgaggaagacgacgacgacgggagcgacgttgatgagcaagagaactgcggctgcgacggcggcgaggagcggcggcgggccgacggcgatctcgccgatgagaatgtggagggcggcgcgccgtacaggctgcggcggcgaaactcggagacgctgcgcgcgcagtacatcaacaccaaggagctcaagctctgcgtcggcacctggaacgccgccggcaaggtcccccccggcgacctcgacatcgccgactggctcggcgccggcgccggcgagcccgccgacgtctacgtgctcgggttccaagaagtggtgccgctgaacgccggcaacgtgttcggcgcggaggacgcccggccggcgcaggcgtgggaggagctcatccgcagcgcgctgcggcgggcgcggccgccggcgagtagtcggccccggtacaagtgctacagccaccctccctcgccgtcgcgcggggacgcgacggccgccgccgccgccaccgatgacgacgagctcttccctggcaccgatacggacacggacaccaacaccgatgacgactcgctcttcagctcgccggcggagtccgagcagcagaacgtcgccgccaccccgaggaggctgaccaggctgaaccatttcactgccgccgccgacgccgccgccgccatggacgactccggcgacgagcatcagcagcggacgcttctcaagacactgagcaggtcggacagggtcggcctggcatggccggagcagccgctggacctgctcgccaagcacgccacggcgacggtgagtaccaccatgccatcgtcaagatccttccgaacctacaactcattcaggccgtctcgcgccgccgccgccgccgaccagtcgaacgacgacctcgccatgatcgccgacctcgtcatggacctcgccgcggcgcgcaagaggcgttcgccgtacgtgaggatcgtgagcaagcagatggtgggcgtcttcctgacggtgtgggtgaggcgcgggctgaggaggtgcgtccacaacgtgggggtgtccaccgtcggcgtcggcgccatgggctacatcggcaacaagggcgccgtgtcggtgagcatgtcggtgtaccagaccatgttctgcttcgtgtgcacccacctcgccgccggcgagaagcccgccgacctccacaagcggaacgccgacgtgcaggagatccaccgccggacgcacttcgccggcgtcggcatgccgagaaacatctatgaccatgagaggattttttggttgggtgatctgaattatcgcatcgacgtcgcgtacgagagagcacacgagctgatttcgacgatggattggactcagctggcagagaaagatcagctgaagcgagagctaaggaagggtcgggcgttcgacgggtggacggaaggggtgctggagttcgcgccgacgtacaagtacgagctcaactcggccaagtacatcggcgacgaccagcgcggcggcaggagaacgccggcgtggtgtgataggatactgtcgttcgggaagggggtgaagctgatgagctacgggagggcggagctgacgatgtcggaccaccggccggtggtggcgacgtacgcggcggaggtggaggtgttcagcagcaggaagctgcagagggcgctgacgctcacggacgccgaggtggaggccggcaccgtcgtcgccgtgccggaccacctcgccggtttttgagggcgagagaggatcggtttctgcaaggataacttgtggttgtagcgctccatgtgtaaacactgtaatcggctaatcgcccatggccgtgaaggattctcttccttctcaagctcacaatccactggtgcatttgccattttgcttcatactgagtaaacccggagaaacgttcgtgt

SEQ ID NO: 13076 - DNA, 2654 bp, Oryza sativa
  ref <308>: DATABASE ACCESSION NUMBER: AK110424
  ref <309>: DATABASE ENTRY DATE: 2001-12-06
aagcgaaaaaccgagtttgtatactcgataaattaagcgatgatctccgaaggcggcgtgaccgctttggtcgtgatctgcgtcgccattggctttggcttcgctctgctcaacttcctcgccacgcgcgctgtgaaggttgatgctttggccggtccgggcgaggcttcggcgtcggacaacctgttggtgcacgcggtgcagggcaatgtggcggagaagatccgcaaaatcgccggcaaaatctccaccggcgccaatgccttcctcttccgcgagtacatttacattggcattttcctggtcgcgttcacgttcgtgctgctgctggtgctgggtctgagcactaaggactggtcgcgcacgggtctgacgatcttcgcgttcattttgggcgcgtcgacgtccgtggcgtcgggctatgcgggcatgtggattgccacgtactcgaaccagcgtacgtgcatccgcgccgcgcactctgtgggcgccgctttcaacaccgccttcaaagccggcctcgtcatgggcttcttcctcgtgtcggccgccatcattatgctgtacatcctcatgtgcatctgtaaggcgtactacaccaacgccctgacggtggccggcgctgccgacaccactgctatgtttgaggccattgcgggctacggtctgggcggctcgacggtggcgctgttcggccgcgtgggcggtggtatctacacgaaggctgccgatgtgggcgccgatttggtcggaaagctcgagaacggcatgcccgaggacgacccgcgcaacccggccgtcgtggcggacaacgtcggtgacaacgtgggcgatatcgccggtatgggcgctgacctgttcggttcgttcgcggagtcggcgtgcgccacgatggtggtggcgtcgaactcggtcggtcccaacggcttgtccatgaattgggcgtcgctgtgcttcccgctggccatctcgtcgacgggcctgctcgtgtcgctggtgacgtcgttcgtcgccacgcacctgtggcaggtgcgtgatgtgcacggcatcgagccgtcgctcaagcgccagatcggtctgtcgaccatcattatgacgcccatcgccttcctctgctgctactacttcctgctgacggagggcactttctcgatcggctccggtgacgccgcgaaggacgtcaagtattggtacgtcttcttctgcgtggcgtgcggcctgtggtccggtatggccattggttacatcacggagtactacacgtctcacggctgggagaacggccctgtgcgtgaggtcgctgaggcttgtaagacgggcgctgcgacgaacatcatcttcggcctggcgctgggcttcaagtccgtcatcatccctgtgttctgtttggccatcaccatctacgtgtcgtactcgctggcgggcatgttcggcatcgccgtggccgcgctcggtatcctgtccactctgcccacttcgctcacgattgacgcgtacggcccgatctgcgacaacgccggcggtatcgccgaaatggcgggtatggacaaaggcgtgcgtgagcgcacggacgccctcgacgccgccggtaacacgacggctgccatcggcaaaggcttcgccatcggctctgccgcgctggtgtcgctggcgctgttcggcgcgtacgtgacgatcgtgaaactggacgctgtgggtgtgaacctgctgaagccgttcgagttcgcgggtctgctggtcggcgctatgctgccgtactggttctctgccatgaccatgaagtcggtcggtctggccgccaacggcatggtcattgaggtgcgtcgtcagctgcgtgagcacccggagatcatggcgcagggctctgaggtggagccggactacgagcgctgcattgccatctccacggaccactctctccgtgagatgatgccgcccggcgcgctggtcatgctcacgcctatcatcgtcggcttcttcttcggcactcacgctctggccggtgtgttggccggcgcgctcgtgtcgggcgtgcagatcgccatctcttcggccaatatgggcggcgcgtgggacaacgcgaaaaagttcattgagggcaaaggtctgggcgagaacttgggcaaacactcggcgccgcacgcggctgccgtcgtcggtgacacggtcggtgacccgctgaaggacacgtctggcccgtcgctcaacattctcatcaaactcatggccatcatctcggtcgtgttcggcccggcgttggccaaattcgacaaaggcctgctcgagcagtggttctcgtaagcctgtcgttgcgcgcggcggcgcgacggcactgctctggcgctgacgctggcgccggcggctggccgcatcgcccgcaaaacacatcacacccaaaccgcgcccgccggcactggtcggggtcgcgcgttcgcgtgtccgctgtcgtccgttggaacattccatcgcatcgcttttttattgcgctctgccacgcctgcgcgcgcgtcgcgcggcatcgctggctcccgcactcaatgcggggcgctgtatgctgtgatacgtgtgcgtgagtgtgtgtatgagctttgcggctgtgtttgtgcgctgtctgtctcatcgctgggcagcagcgcgtgcaaatccgttcgtcc

SEQ ID NO: 13077 - DNA, 2754 bp, Oryza sativa
  ref <308>: DATABASE ACCESSION NUMBER: AK110425
  ref <309>: DATABASE ENTRY DATE: 2001-12-06
cacaagccagtgaacatggggccgtaccctgaggacaagcccaagggcaatgaggtccgattcgcggcagtacaagtggaggcggtggtgtcaggggtgcagccggggctgacgatggtggtgggcccaccaggcacaggcaaaacggacagtgcagtgcaaatccttcaggtgctgtaccacaactgccctgggcagcgcacgctgctgatcacgcactccaaccaggccctgaacgacctgtttgccaagatggtggccagggacatccccgcacgctacctgctgcgcctgggcatgggtgagcgagacctggacgtggatgatgacttcagcagggccgggcgggtgaacaacatgcttgccaggcggctgagcttgctggcagaggttgagaagctgtccaacctgctgggctacccacacgcggagtacacgtgcgagacagccggctacttctggctgctgcatgtcctcagcaggtgggagaagttctctgctgctgtgtctgcaccggacaggcaggggcagcctgggatggtgggggagctgttccctttcaaagagttttttgcagatgcaccgcagccgctgttcaaggggcagaactatgacgaggacctggaggtggcgaccggctgcttcaggcacatgcgcctgctgttccaggagctggaggagacacggccgtttgagctgctcaagggccaggccgaccgtgtgagctacctgtgcaacaagcaggccaaggtggtggcgatgacctgcacgcatgcggccctgaagcgccgtgagttcctcaacctgggcctcaagtacgacaacatagtcatggaggaggcaggccaggtgctggaggtggagacgttcatccccatggtgctgcagcgccaggaggacggcgtggcgcgcctgaagcgtgtggttctgattggtgaccaccaccagctgcccccggtggtgcagaacatggccttccagaagtacagccacctggaccaaagcctgtttgcacgcttcattcggctaggcacaccatacgtggagctcaacgcgcagggtcgtgcccgtcccagcattgccagcctgtacaactggcggtacggtggcctgaaggacctgcctgcagtaacacaggtccctgccttcctggccgccaacccgggcttcggctacgactaccaactcataaacgtgccggaatacaacggccggggtgagtcagagccggcgccctactactaccaaaacctgggtgaggcagagtatgtggtggctgtgtacagcttcatgaggctgctgggctaccccgccgccaagatcagcatcctcacaacctacaacggccagaaggacctgataagggacgtcgtggaggcgcgatgcgcacagcacccgctgattgggcgaccacacaaggtgacgacggtggacaagtaccaggggcagcagaatgactacgtgctgctgtctctggttcgcacccgggtggtgggccacctgcgggatgtgaggcggcttgtcgtggcgctgtctcgcgcgcggctgggcctgtacgtgtttggcaggcaggagctgtttgcaaactgctacgagctcaagccggcctttgacaggctgctggcaaggcctacgcagctggctctggcaaagggtgagagctaccagacctgcagccgtgcactgggtgacctggtgccgctgcagctgatcagcgggccgcaggagatgctggggttggtgcaggcaatcagcagggagcaggcggccattgcagcagcacaagcagcagcatcggccactgctgtaccacctccacgcccaccaccaggctcaccaccaagcccaccaccggcagcagcagcggcaggacgggagccaggaagagaaggagcaggtgctggagatgcaggctcaggtgcaggtactgatgcagcaggagtgccagcatctggtgagctgcccgcaccaacagcagcagcagcaggagcagcagcagcagctgatgtggctgctgatggcagtgatgcagcagcagcagcagaagcagcggatgcagctgatggcggtgatgcaccggcagaggcagcagcagcaggtggaggccgaccggcagcggagcctgtggatggagcgccagtagtagcagcagcagcgcctgatggtggggataacgcagcacgttgacagcaggttgttagtgttggccatgaggtggtcaccacaatgacggtttgattgttatctgggagcaagagcgcttctacagtcaggttttgtggagttttttaaccggttaccattgcaggctgttaaagggattgctctgcaccaaggcaatgggccgttggctggcagcctcaacgttgtggcaatggaggttggagctgctggtgatgggtgcttttgcattgcggcaagcactgcttggtggcgtacagctggcagctaccggttgctactgccaacgccttaaagacatccatgtgaaacgggtgtgaatgcacatacagcacaacggtcttgtggaactgatcaacacatccttctgactgaaatgttttgccagtggcattgctgctgctgcacacccgcattgctaccagtagccagtcagcatggttgtctcatgtggggaactgccagttgtgtgcattcggcgcagtgtatattctggcaggcataactggcactatcagctgtgctgctgctgctgctgcaaccactggccatggcgtaacaaaggtgaacgtc

SEQ ID NO: 13078 - DNA, 2604 bp, Oryza sativa
  ref <308>: DATABASE ACCESSION NUMBER: AK110426
  ref <309>: DATABASE ENTRY DATE: 2001-12-06
atcactgcttctgttcacacactcgcaactacgggatgatggaaggcgagcaacagaagtaccagaaggaagggccgcccaacttgatagaggagtggcggatgaaggccaaggaagaggagaaggagaatgctcctcttcttgcctccaccgagcaggacgaggaggaaaccggcagcacgaagccgaccccagaggagcgaaggcgagcattcgtcgatacgccgcgcgctcttggcttttgcggctcggtggcctctctgctttcctcggtcccttcttttgcatcatctgccacgatctccacgcgcagacgagctcggccgtgcctgcgacgatggcgcttctccttctcgcgatggcctcttcgcttcctcggtctgcacgatcagccactgcgcaaacagaaagacaatcccccggctgccgaggaagagattgaggaagaagaggaggaagatgaacaaattggcgaagatgtggtgcaggaagaaacgaaggggcgagcggtgctgctaatcaatctcctagtagcgctcatctttgtcaatgccttcgttttgtcgctacgcctgtggatagatgggtggcatcatctcagctcctggcaatcgctcttctcaatgagcgtctatggatgccttctttggctggcacgatcgctcaacgaccacggccgcacctcggcctgggtatcctgcctctacttcaaccttgttctcatctataggtgcctgctgtacggcgtccgaacggagacgttctcgtggatcgccatgatgccgctcgttctgttctgcctggtggggccgcaggccggggtggtcgccaccttcgggctcatcggcgagagtctgctcctctacgccctcacacctgacgacgcgcacaacggccaagcgttcgatctggcgtgcgtacagctgaaacaggagcagggcatcgtgttcgttcccttcgcgtgcgccaagttggacggtcacggcgcccacatcggtcgcttccaggcgagcctccaggagctgctcacgagcaagatcctgctgatcgcgttcatgggcgtctttgcctacgtctacgaatcgaacaggcgtagcgcgctgaggcggatgacggtggcgctgcagcagaaggagagggtcaacgtttcgctccagcaggccaccaaagccaaaacggccttcctcgccaacatgagccacgagctgcgcacgcccatgcacggtatcatcgcgatggcgaaggacctgatggagatgccgctcagcgaaggggcttgcgaatcggcgcgcatcatcagcgattgcgcggaccacttgctgggcctcgtcaacgacatcctcgactttgcccgcatcgagtccaatcagctggaactggagtccattccgctgtcggtgtgcgaagaagtggacaaggccgtgagcctccacacgatcatggccaagaagaagcaggtcgccctcatctccgaaatcgacatcgcacagcccctccgcctcggcgatccactccggtttcggcagatattgcacaacctgctgagtaacgcgatcaaattcacgcccgcggagggccgcgtcatggtgtcggcctccacgggtccggccgaccccgagattgtgtcggtcagcgtcgcggacaccggcatcggcattccgccccagggcctcatcaacatattcaagagcttctcccagctggatgcgagcgtggggcgaaagtacggcggctcgggtctcggcctcgccatcagcaagaaactgtccctcgcgatgcagggcgatattacggtggagagcgaggtgggcaagggatcggtgttcaccttcaccgtccgtctgcccctctaccagcccaaaacgccgttggccctgcgccgcacgcacccgaccaccgaagatgacaccaccgctgccgctattaaggacttgctgcacgggaggaaggtgctggtggtggaggacaacatcatcaaccagaaggtggccaccaagatgctcacctccctcggctgctccgtcaccatcgcgggcgatggcggggcagcggtggcgttgttcgagagggggacgttcgacgtgatcctcatggatgtgcagatgcccatcatggacggcttccaggccacggcccgcattcgccacatcgaacaccaccgcgcccacacctgggaggagtaccggtgcgaggagaagccgaagagcaaggagctcgagcctgaagaagacgacgagaacgagaacgagaacgaggacgagaaggaggcggagatcggaccagcgacggatgaaaccgaagccaagcgagcgacgcacgggacgaggagggtgccgatcgtggcgctgacggcgtcggccacgcgcgactacgagaccgagtgcctggagaagggcatggaccgattcctcaccaagcccttcaggaaggagaccctccaggccaccctgatcggtctcttccgaccacctcctccgccctcggccccttcttcttcgcctccttcgcccgcccctgcctccccaccctcctcgccccactagcccacctggtctattttcttcaccaccttcatcaccaagaaagctgcgaatcgtggagagc

SEQ ID NO: 13079 - DNA, 2837 bp, Oryza sativa
  ref <308>: DATABASE ACCESSION NUMBER: AK110427
  ref <309>: DATABASE ENTRY DATE: 2001-12-06
ctcccccttacacacaaccaaacgggtcgcaaactcataggatatttctttcagccgctctcccagacaaccaccctctgaaagatattctaccccgggcccctgtcaatcttttttttgtgcgtcatctcccacactcttttcgcctccttggctttttccttccttgatatctttttccgctcgttccgtcgctctcttggttgaatatacaccaccgaatccgaatagccgatctgcaaacggggccgtattccctcccccccctttccgttcgtttgttattcggtttcctagtcccgttcgctgcgacacccgattgccactaccccccgactccgattcaatacccgataccgaactgccagctctcttggacatctgcgcagcattcaagatgttcaagcgctccttccgttccagcaacaaggagcactcccagggcgggagcggcggcatggatgcgcaacaccgcgtggacaagtcgtcgaggttgacgaggaaaggagccggcggcaatgcgggatcggggcgggatccacagaagctgtcgaaactgcagcggtcgctctcaagcgctgaagaggcctccgcggcggcgagcaagacctcgtcgcagtggaaacagggcgcaagcccaaagtctctcgcgccctcgcccatcgtcacgctggcgatcggccgggaagggcggttgtttgcggcgcacgaggacgtgctgtgccagagccccttcttcgaggcgctctgccaggaacagtacctcgaggcgcagagcaaaaggattgccctaccagaggaggagcctgaggtcttctcaggcgtgctcgagtacctctacaagggcgactactacccgcgcttgcttcacaacaagcaccgaaactcttgggaactagaggactccgacccgcgccaacgccacaccccacactcatctcccaaccccaacaaaaacggaggcggccgcgccggcagcgccagcagctcgccgtacgtgccctccgctgtcgaggcgaccgtctacatctcggctgtcggccagcacctgctgcgcgacaccgtcatctactgcgccgccgagcggtatgggctcgaggagctcaagcggctggccctgcgcaagcaggggctccagtccggcatcgacgtgggaaccatcctgcgctccgcccagtactgctacgcgcacacgcccgactcggacagccgcctgcgcgctcactaccttgcactcatcacccggtgcagaaagaccttcaaacggagcggcaccatgcaggccgagatggagcgcggcggagagggctccaagctgtactttgacctgtttgttgcgctgtgcaaccacctggacgatgtcatcgacgcgggcaacgcccgctccccgaggaacatctgaagggtcgatggtttggacctgcctcctttttcatgttttcctcctcattttggtcctctcggcaaaaggcacaaaagcccaggcttgctggcgtcatctgtctgcccgccctagcggtgtggcgattggatttggacggcgtgcgtcctgaggcttcctgctttcctccgaggccagcgactttattcgggtctcccgggcgttacaaggcgttaagactcacttcacggaagacagggcatacaccacgcgaggattgatttgctcccaagagctgagggatccggagttcaggcgcagtttttgttgtgttcctgtccgtctttttacttgggcgatctcccattcttgtgccggcgttcaccttgttttcgcgtcttacctcgtttgcagctcccaaccatggttcatcagattggaaacaccatttgggagaatgactttgctgtccttcttcacttctctcaggaggttggccgaccgattttgatgattccaagggggtgagagggaatggcctaatcagtggatccgatacacggaagatcacgaccagccccggtatatcgacgggaggaaagcaagcctggattcccctctaccctcttgttgtgttatttctctcatcgttttgccttgtttctttttccctgatttgctgtttttctgtcctcaaaagttataccccgtggtggatttctctctgaccttgtttggctttcacactgcctggcgtttttgggagtcttggtcgattcatacaaaccaaaaatcatcagtcggggggaggcatgagcaaggactaccggatgcgatccaggggtatcagcccctcgaacaatcgacacacaaaacccaccgcgtcaacccgtctttgacgaagaacccccatcgaaaagaaaagaaaaagaacaaaaacacaaaaaaagagagagaaaggcgtttgctttctgacactccactcgcagcggttctgggcgcagagaggcggacggacgggctcggctgggcctcgacggttcacccagcccttccatccctagggcactccctgtggccattgccgcttgacacatctccgctacaacggcgcaatatcttcctttttcctttgtcaaactcgcactatacaaaagaaagattgcacagctgtcgggggttcttttctttcagggcctgtattggcattttttttttttgcttagcttgcgcggagggctggcggttcattcattcgacatgatgatgatgagattacgaactttccccttcttactgttggattatatattgcctcagccccatcagagaagggggtcttgctgggcggaggaggggttttattctagagtttcgtcaggtctcccacagtggattgaccccgcttgtctcgacgccctttgagggtcttggtaatgagagagtcggccacctc

SEQ ID NO: 13080 - DNA, 3557 bp, Oryza sativa
  ref <308>: DATABASE ACCESSION NUMBER: AK110428
  ref <309>: DATABASE ENTRY DATE: 2001-12-06
atatcctcctctgcatgtcgagttttgcatgttgtttccgcgccgcctcgcccgacaagactgcctcatagggcgtgacctggctgcgcgcctggacaacccgctatcgctatcatcaccaccaccatcgcacccaccgccgccgccgacgggcagcatgagcacgcaacagcagcacgacagcgccctcactgccgtcgttgtcgcccccacccgcactcgcgcaggcaaggagcctgccgccgcccacgatgcgccgttcctcagcctgttcgaaagcgtcgtgaccgcctacccgcccgttctggagtcgctgctcgcccagatacccaccgctgcgctgctcgatctctaccacacatcccgccacctgcgcgactttctgcgcaattacccgctggcatggaagacgctgtcgttccgcctcccgcagcccgctgtcacggtgggctcgccggggaacgagacgcccgacagcagagagcgggcgtccaaagcctactcgtttgatgcgctgctgaagcagatcatcgcgcccaacggcacgcgcctgacgagcctcgacctctgcaacacggccgtgacgggcattgcgcttgtgggcagcgtgcttgcgccgcgcatcagcaccctgcagcacctgtctgtccgcggctgcaagaacgtctccatcaaataccacattgtccccttccttgagccgtacacgctgcacgacgcgccctgggcccaaaaggacctcgccctcaagagcctctacacctaccgctgccgccatcaccgccgccgaccctacctcccctcgtccctcattcgccgcgactccgactcggaccccacccaccagctcatcgagatatgccaccagctgggcatctggacagacaccgcctggtgccctagtcccgacggtcgctgcttcaggagaaaagactaccatgcagggagggctgggccgcagaacatggaggtatgggtgccctttgaccgattatggaggtccagcaaccgcataggcgccgtggagggcacatctgtactaggcgaccacgatggccggttgtgggagatatccgagactggccaggatggcgaacccctaggcacagaacaaggaccgttccagggcgagggcaagcacgttcctgcccatctcagaaagagccacaaggtcttcgtcgaacaagtcaagtgtgcccagtgcagcgatgtcatcttggagcgctgcgagtcgtgcagtgtccgcatgcactgcatgggctgccgcaagacgctttgcgcgagctgtgccttcaatcgaccgataccacgaaagcgggcgaagacgcggcactttgccaatttggcctttgggagcagctccacgctgggcggcacattgggacaggtggcaggctcactcgcccccatggaggatcgaagtaatgaagagaaggcggaacgcaaccgcttctggtgggcaccggggtcgacgcgatcacccaacctgatgaacgagagcgcaaacgacgacgattcctccgactccgaagacggcggaaatttcaacaacggacttcctgcattacaagcgaaccgcgagccgccgaagctgaacatgtcctggtgctgcctagagcccattttctctggaggcggcggcatagccgtgctgggtacggggctaggcggcagaggtgcggacaagatacgggcagcgccccttccacgaacgaagcaattcgaggatcctgatttcagcaattcgctacggcctgtagattacatccgtgaactgaagaacaacgggctctacgagtatgtcctaggcgaagacgtcgatatcctgtcttatttgaagcaagactcgcttgatctgcagcaacagacttgtccacgagggctgtgtcacgactgctaccggagcttcagatggaaggtctcgtgtcgggcctgcaagaatccgatatgcaaagagcacgatttcagagcgctcaaggtccgcaagtgtggatatcgagacatgcagaccgagcgagaccacgtccgcacacacaatgagcctccacaacgtctcgtcatccccgagttcaatccgaaccgagcttccactcctgatcccgaacgtacgcccacggcctcgcagcaagacctcttctccgccgacaacgagtccgagtcatcagaaacaccaatgtcacaatcgcaaatactagtcgcctcttcgatacccggctccgtcgagatgacagccacgacctccttcaattctaacatcacaaacgaccccttcgcacacgcatcgtcccttccattcgtccctgttagctcagctcgaccgcgatcgttcagtgtctccggtgtgcgaggtcgcctacctgaaacctgggccatgacacagaaggcgcctcgaccgcaaatccccaactcgatcacgaacccgctacctctaccgtgcaacccgagacatcctgtgcagtgggaaggatgtggagcatacttttgccagtatccaagacctgttggtgacaacaggccgcaatgcccagggatactaaaagagtgctccgaatgtgcggtcttggtctgtgatcaatgcgcttctgcatcaccatcctgcacatgcactttctgcaccgtcaactaccactgcccaacgtgcactcgcaagcctagcgttcgcatcaaatgccgtctcgacgccgaagtgaaagcgaaaagggaagccgagcttcgtgcaatggcaaaactggagaaggatcgggaagagcgtggccaagccgatgaactcgctggggcaatgaacgaattcttctccgccctctacgtctcagatatggtgtctggctttgacaaccgcgtctctgatgcctccgacttactcggtgctggtcctagcggcagcgaatttcctctcgccagccccgactccattaccgttacgactgagtttggtgtcgtggaagaatcgggcactgttaccatcatcagctctagtggacctagcccgcatcatcaagcttttgacaacgacacagaagatgaaaataacgtggaaatgactgaagatctcaacgacgagctgggagttgagcatatgcaggatgtcagcgacgagaatgacgaatttgacgacgatgccgagagctcgttcatcgaggaattcatagacgacgatctaggaatcgatggaggaatgctcacgcccactgctacggtcgctgccgcgtaggacgattattaagaagtgccgatgaagcgtgttctcgattgaagagagggagtatagcacggatattggatttggattatggaattatacccaaaatggcattcaaccagcgatcttcatatgtagtgaagaacagattgagtcgagcgaaggcgctagggaaagggaggaaattgcatgggttgcatctattcaagcgcagggaaatggcaaatgtcagcgatgcatcgcatatcttgtaacggagttttcatattttcaaacttgagtttcacgacaagtagcatactacatcatatcacaccatatcatatcatcatgcctgatgcaatatatcgatctatag

SEQ ID NO: 13081 - DNA, 2519 bp, Oryza sativa
  ref <308>: DATABASE ACCESSION NUMBER: AK110429
  ref <309>: DATABASE ENTRY DATE: 2001-12-06
aacgaacgctaaaaaagtaacagtttctgtactttattgcatccctctctctgcgcgtggcagtagtagtggcagccctcatcccggattcgacccaccgttgctttttgaattgtgcccctcgtaaactgtgcgtcgagcggcctccaagacaagaagaccaactccacccatcgaaactcctgtgtgacgactcctcgcaccgcttttcgcaacaacaagacacaagcaacagccctccactttccaagccatggcgaactggttctcccgtgccgtggtggtgtcggtggtctgcgcggccgtcgtgctcggcgcggcggacgacaagtcgagcaaggtcgagcctccgtgcgtcggcatcgatctcggcacgacgtactccgtcgtcggcgtgtggcagggcggtgaggtggtgatcatcccgaacgagatgggtaaccgcatcacgccgtccgtggtggcgttcaccgagacggagcgtctgatcggtgatggcgcgaagaaccaggtcgcggggaaccccgcgaacaccatctacaccatcaagcgcctgatcggccgcaagtacaacgacccgacggtgcaggcggacaagaagctgctgtcgtacaacgtgatcggcgacaaggacggcgacccgcgcgtgcaggtgatgttcaagggcgagaagaagacgtacacgcccgaggaggtgtccgcgatggtcctgcagaagatgaaggagatcgccgagacgtcgcttggcaagacggtgaagaacgccgttgtgacggtgcccgcgtacttcaacgacgcgcagcgccagtcgacgaaggacgccggcacgattgctggcctcaacgttgcgcgcatcatcaacgagccgaccgctgcggccatcgcgtacggcctcaacaaggccggcgagaagagcatcctggtgttcgacttgggcggtggcacgttcgatgtgtcgctgctgacgatcgacgacggcttcttcgaggtcgttgcggcgaacggtgacacgcacttgggcggtgaggacttcgacaaccgcatgatgaagttcttcgtcgacggcctgaagaagaagaagaacatcgacgtcagcaaggaccagactgcgctggcccgcctgcacaaggcgtgcgaggcggcgaagcgccagctgtcgtcgcagctggaggcgagcgttgaggtggacaacctgcaggagggcttcgacttcagcgagaagatcacgcgcgccaagttcgaggagctgaacatggacctgttcaagggcacgctgacgcctgtgcagaaggtgcttgaggacgccaagatgaagaagagcgacgtcgacgagatcgtgcttgtcggcgggtcgacgcgcatccccaaggtgcagcagctgatcaaggacttcttcaacggcaaggagccgaaccgcggcatcaaccccgacgaggctgtggcgtacggcgccgcggtgcaggcggccgtgctgacgggcgagtcggagctcggcggcaaggtggtgctgatcgacgtgatcccgctgtcgatgggcattgagaccgtcggcggagtgatgacgaagatcgtcgagcgcaacacgcagatccctgtcaagaagagccaggtgttctcgacgtaccaggacaaccagccgtccgtgacgatccaggtgttcgagggcgagcgcagcatgacgaaggacaaccgcctgctgggcaagttcgacctgaccggcatcccgccgatgccccgcggccagcctcagattgaggtgacgttcgatgtggacgagaactcgatcctgcacgtgagcgctgccgagaagggctctggctcgaaggaggagatcacgatcacgaacgacaagggccgcctgtcggaggaggagatcgagcgcatggtgaaggaggccgcggacaacgaggaggaggaccgcaagatgcgcgagaacgtggaggcgcgcaactcgctcgagggcgtggcgtaccagctgaagagccagatcaacgacaaggagaagctgggcggcaagctgagcgcggaggacaagaaggtcgttgaggacgccgtgaaggaggcgctcaagttcttggacgacaacccgactgcggagaaggaggagtacgaggaggccaagaacacgctcacgagcaagacgaaccccatcgtgtccaaggtgtacaaggacgccggtggtgcggctggcggcgcggaggaggccagcgagagcacggacgacctataaactggctgtcccgtcactccactcgacaagcagagagacagaggtttcgattttctttttctctccttcccctaccctttcacacgaaaatgatgaagcgagctgtgtcgggcggtgtgcacgcgcgggggcggtagttgtgaagtagccgaccgcgtgttttgttagacttgccggatgcgtgcactgtgcgcgccgcgttcgcgcaacctgacgactcgcgcggtgaagtgaagctcccccccgttgcgccggcaccgctgactgcgacaaacagacccttgcgttc

SEQ ID NO: 13082 - DNA, 2784 bp, Oryza sativa
  ref <308>: DATABASE ACCESSION NUMBER: AK110430
  ref <309>: DATABASE ENTRY DATE: 2001-12-06
gatgctgggctcaagcatgctgcgttgccacgcccgaatcctttcgataggcccccccccgctcacaagctgtgcagaacaccgtcatttaatgtgaacccccggcattgtgcgcaaaatcatttgtgttgaaagttgcgaggtgcttggtgatctgcttgtgtgtgatggcttgtttgttcacatcaacaactccccccgcaattgctgcaaattacagcagatcaaccgtataccgttgcaagtgtaccgcaggacagggtggtacgctgcgtggcagaatcgcatcacaacataggcagcaagctgggtggcaggtgcaaactcgcgcgctgagcgcagccacacccagcagtaggtccttaccattatgggagcagctgctgagcacagcagccaatagaccagcagcctgcccggaggtgctctatggggagtatgccacccactttggggcgacaatagtggcgccgcaggaggcagctgatgtgcaggcgctcaccacgctgggtttggtccgcagccgcgtcgtgaagaataaacgaggctactggcgcatccgccactttcagccaacagacttgcatgctgtggcagacctgcaggcagctgccttccacgagtctctcccagtcggcgcccttgacaagctcgcctacactatgttcaaagcagaagtgctggatgctttgaagaagaaagtgggcgtgcttagcgaccatggctttgctatgatggtggtggagacctgccagctgggcagtgctgggtgcagcagccaggatgctgagctgtgcccgacagacagtgactcagacacagacagttcaagtgaatgtgactgggagtcagctgtgtggtacggtgaccagcaggcggcgtcgtggcctgcaggcggcggcagcagcagcagcagcagcagcggcggcagcttgcaggacagggactgcatggccaggccaaacagcatcatgggtgtggtggaagtgggtgttcaagatgaggcagatgtgctgcagcacttggcaggccacagcggcacatatgcgtacatcaccagcatggcggtggcgccacacctgaggcgctgcggcgtagggcgggcgctgctgcaggcagccgagcagcaggcagccaactggggccaggacgtggtggcactgcacgtgtatgacggcaacatagctgcaattcggctgtatgagaagcacggcatgcgctgttgtggcaaggatcctgcatggaaggcgatgattggcggcaaagtgcggcagctgatggtgaaacctgtgcgcagcgccatgccccgcagcagctaagccaggccgcacacaaggctggtgccctgttctaccggcacctgtgtcaccctggtgacccaggaagcagtgtggcgtgccgttgctccagcagctgctgaagcgcatatgatagcgacagtggctgcagctgctgcgtcactgcctgcctgagcaccccttgcctgcagtcagacactgctgcggtggctgctttgtttacggctgctgtgaaaattgcacgcatgcacgcacctgccacgatgtcacctggcagcagcggcccggatgtgtgagcttggctggggggacaggtgggtgggtacacacctgtgcattcaccccacaggccatggtgtgtatgtcactttgtgttgatgcggcggttaatgttcgcctgggctctaagcacacgccaggacatttgtgggttgtatatcaggtgccagggtccatcgaatgatttggttactgttaccgctgttggtgtagatgatggcgcttgtggtggtgcctgtgtgttacttgtgaaggaagaacagtgtagcatcctgtttgtttgtatgcatgttttgctggcagcccttttaggtggtggcatgtgctggaggttgtagcaggacgttttgatggcaggtcctgctgcggcaactttacaaatttatttcatctaggttgtggtatagcccgttttggtactgcatgtgagccattgcatgtgtgggcacaagtatgccctgtttgagggtggagtcgtacagagtgttacggatgttacactggaacaggcataggccctggtcaacatccagtcgcagccattgcaacagctttggtttctgagtttagctgtgacttggtgacagctaatacaacatgctttgcttcaaggttgcagccttgctgtggtctgtttcacgtcagctgcattgccatcccttgtgcctacgggctatgcttgtatgctggcgcccttttgcatagttcgacagggccaagcaccaagttcagggcgttcacggaaggctggcaaacaccccagcgtcaacaaagggcacccggaccacttgtgcagctgtggtgctggtgccagcaggtatggtgtcagaattaagagagagtcactgggggttactagtctcgaggccagggctggcatcacaccctgattggtgcacgctacttagcacatcagtttgtgtgcgattttgatgctttgagcgttatccccttgctgagtatgtgtgcacacgtctgatcactgctgtttgctgggcccagaggtgcagtggcagatgtgcacatgcaccctcatgcacgccatggagcagtactttagtaaaggggtgttgtacagcaatgagagatggatccacttggcacattgcagcctacgttgtagtcgacacgatgattgtgtgctgggcttacagctaaggtcctgcgcagtgataacaatgtcagtgttgtaattcaaccacccgtg

SEQ ID NO: 13083 - DNA, 3324 bp, Oryza sativa
  ref <308>: DATABASE ACCESSION NUMBER: AK110431
  ref <309>: DATABASE ENTRY DATE: 2001-12-06
aagcagaaaaaaacattgacgaggaaaaaaagtcctacatcgcgcgtcatcggtcagctcacctagagcccctctcctcggtacagaaatcttttgcgcctgcaccgcccgtctcctccacagtccacagccagcgtgcagtcgacgagagcccacggtccacagcccgtccacagtccgcagtccaccagagtcctacccagtattacctaccactaccaccaccaccgccgctactgctcctgctactgctaccacatccgggagccgcatccagctgctcctgcctctgctgccgtcgctacctcacacttgcctggcccccccgcttactcgcgcgctgccacccctcccttatcgtcctccacccctccctccttcgccgcattgagtcttgtcctgtgtcccggcgcctgtcctgcgaagggaccctccttgtcggcccccagcccgccagcctgtgctcttgtccatctgggcctgctcacccgcctttttccccagccgacacctcacctcagacgcacacccccttgggcttaggtcccctcaggtcctacctaagctcaattaatctcgcctgtctcgctgtgcccttattccgtcctcttttctttttttcttgtttttttctattcccctccccgtcgacgccccgttccatatgagttctatgaactcgcgcttcaaagccttgggttttggtaaacgacgatccacagccagcatacaaggccccgaggccccaacgtcgcaccagcaaattccgcagcagcagcaacaccactcgaatacccctcaccctcctcccatcccgccgaactcgtccggtccaccacaactgccgcccgtcttccccgtccgtcccgggccagcgccctcgatccagtcctcgtcgtcgcagcagagccttgctggaatgaatcacccaggcgccggcccccgcccgcctagctacacggcaaactacccgccccagcccggcggcccggcacctcccctcggccgcaccagccccctgaccaaccaaggcccaacccgcactccgccgtcccaaatggttggcgggccccccccgatcaacacgggcgcccccggcggcgtcaccggctatcctccgcccatgggtggcccgccgcccatgaccaacgcacctccgggctatgctggtgccgccggctatcccccgccgggccctccccagccccagggcaacatgcccatccccgccgcctacggcaggaatcccgctgctgaggtcgagggcaacagcaggagcaaggcccagctgattgtcggaattgattttggcactacgttttccggtgtggctttcgctttcgcgaccaacaacgaggcgaaggaggacatcattaccgaatggcctggcgccggttcgtacacaaaacaaaagattcccaccgtcctttactatgaccagtaccaaaaggtggtgggctggggccccgatatcgccgatgccctcgcccctaccggataccccaagcccggagtgcagaaggtcgagtggttcaagctccagctcatgctttcaggcaacacatacatcgaccccatcaacctgccgcccctgccgcccggaaagtcggagattgatgtagcggccgattacctgttcaagctacgccaggccatgcgatcggcgctccagaagacgctcggcgaggtcttcaaccgtgaagagcgcaacatccgctactacctgacagtgcccgccatctggaacgatgcgggcaaggcggcgactagggccgccgccatccaggccggtttcctgcgcgacgagaacgacaacaggttgacactagtcagcgagcccgaggctgcctcgctcttctgctccaaggccggcctgctaaacctgaaggtgcacgacgcggtgctgattgtcgactgcggtggtggcaccgttgatttgatcgcatacgaggtcgaggatgagaacccctccaccgtggccgagtgtacggctggttcgggtgactcgtgtggttcgacagcgctgaaccgcaacttcagcaacatcctgcgcaccaagatccgcaaaatgaagctgcccgacgggtccaagactgcaggccgcgtgtacgccaagtgcatcatggatttcgagaacaggatcaaggccgacttccgtaacaacggccagaagtgggccgtcgacgtgggcatcgaggccgagttccccgaggctggcattgaggagggctacatgaccttcaccaacgaggagatcctgcagtgcttcgagcccgtcgtcaaccgcatcctggagctggtgcgcaaccagatcatcgccatccaggcccagaaccggacgctgcagaacatcctggtcgtcggtggtttcggtgcgtccgagtacctgtttcagcagatcaagctccacgtgccgccccagttccagtccaaggtcgtccggcccatggactcagtggctgccatcgtcaagggcgccgtcacggcaggaatcacggagcgggtcatcacgcaccgtgtggcgcgcaggcactacctaatggcgacgctgcagcccttcaaggagggctaccaccccgaggcgtaccgtgtgccttcgctggacggaaaggacaggtgcaagttcacgcgccagatctttgtgcaaaagggccagaaggtcaagattggcgagcccgtcaaggtctcattcttccgccaggtcgcaccgggcgccaccctcatgtatgaggacatactgtatgcgtgtgacgacgatgtgtgcccggaatacactaaggatccccgcatcaaggaggttgtcacgctcacctctgatctctcgcgtaagaatcttgagaaggattttgagcgcatggacacgccacaaggaaccttttacagggtctactttgatatttacctgacgctcgacggatctgagttcagtgccgagctggtctgtcaaggagaggtcatgggacggtgcagggctcgcttcagatagaaggggtcgaaaatccaagcgggacgggggctgtccttttggttcatgccagggctgtataaggggaaatggggggagagggctgtcctattatatccacatattcttattccttgacgacccgcttctcgttctcccctactgtttcttcttccatatcctccattccgcgatttttcatgtcttgctttatttcttgtttgacattccagcaagctgcaggtttatagagcctggccatccatgaaagtttccctccgaaaagaatctgatctcgggcgcgcgcaggaattttgggttttattgccggctatgaatcaatggatacctcgagatat

SEQ ID NO: 13084 - DNA, 2794 bp, Oryza sativa
  ref <308>: DATABASE ACCESSION NUMBER: AK110432
  ref <309>: DATABASE ENTRY DATE: 2001-12-06
gaacagaaacagtgtgatcagaggattgcctcggagatcatcatacaacgcctaagcagaaaccacaagaaggacagcatcagttcgtttacacacttgtaagctgatcggcatgcactgctgataatgcagtacgcactcagcaaaacatgtgggctcggcctgcggggagtgaaaaccaacacactcgtaagctcccggccagccaggctacgcgttgtcgctgctttaagaccaggtgctttgacaccatctaacttgaacaatgagggccccaagcaaccgcgaggagacctgcagagagtggcaggcgcagcagcagattacccctacaaccctccatcgtacaaccctcagtcatttggggccccggattcctctgggcggattggagacgcagcaaggcagtcgctgggcaaagcaacagccgccatgagccgatatggctggatcgggttctgggtgcagctgaccctgtcggtcgtctccggggtaatcctgctgttctctgtggctttcacctcacagtcgggtcccaaggcctctctgtacctgactgtggtgggcattttggcgggcttcctgagtacgttctggaattatggctaccagcgcaccgccacacgcatgcaagaatacttggacggcgcaaacgtggcaaaggtcaaaaagcagcaggtcatggagctgatcatgcgcggcatactcatcaacattgtgggcatggcctccacactgatcggcatcagcacgctcgtcggcctgctggtggccaaaaccctcagcaacgcgtcagtgaaccccttcatggccagcgcggcagcgggctacaaccccgtgctggcgctggatgtgttcctggtgcaagcagccaccaacacgctgctggggcacttcctgagcttgctgtgctcgctgtggctcctcaacgtggtgggggagggacgcgggctacgatttcaggtagcttaggggcacgggcgtaggcagcacatgcagagggtgaaggaggctgatgggcctgggggcagccttatgagtgggactgtcaagggttttgctggggtttatgacatccccaaagccctgggcggcaggggcgggtcggggggtgcagcaggtagagcaagcggcaacacctggcgtacacgcgcagcagcagagccagccacaggcaggcgaatggggtacagtaccagcagcagctctcccagtagcaggggttttgcaggagatacttacagcagtatgaggagcagcagtactcgcagcatcgggcgcagcatgccagcaggcgggatgcctgtggtaacagcagcggcttcagcagcagcagcagcaccttacagtagcagtgatgcactgctgctgccacaggcggttgctgctgcaccagcagctgttgcagcagcggcagcagcgcctgcagctgcagcagcagcaggcctgaactcgtttacgctgtggcgtgacagcctgccaggctggagggcagcagcgcggccagcagcagctgctgctgctgccactgccgaagccttggaagcagcaggcttgccagcaccgcgtgtgcgggcgccaaagctgccagagcagcggctggcgcaggactttttgctgctgccaacgcagcacagcttgacgtacctggatggctcgctgcctggtgattttgggtttgacccgttggggctgtttgaccctcaggtgactagcacaagcgagcgggcttggctggtcacctctgaagtgatgcacggtgggccatgctgggggctgtcggctgcctgctgcctgagatgatgggcaggcagcccttctttgtcactggctggctaccttcttcattagcagcagggcaggggccctcctactggacagacgtgcatacgctgttcgcaatccaggttgtgctgatgggacagtagaatggttccgctggtgcgacctcgtgcggccgggcagcataggggagcagctgcaggtgctgctgccgcagcggcaggagctggcgggcggcttctgtggcagcgggtgtcctgcgtacccgtcgggggtgttcatcaactacttccgggctgtgacgtccgggccggctgtcgcgcagtacaaggaggcggagccgcggcactcgcggctggcaatgattgcgatgctagggtttggggctctggctgtgctgactgggcaaggaccgtgggccaacttggtggcacatctgaagtcacctcttcgtgccaacatactgacatcgtttgggagtgtgtttgggcagtaggtgttggctggcagcctgtgctttggctgcagggttggtgctcatgttggcagtagaggtactttgacctctggttgcagcgcgcagcagccggcgtcaacttcgtcgctgtggtagggagagtgcaggagatgggtgccgaggtgaccttttgaactcctagtagctgctgctgatgtggtcatggatgcagttgcagccggcaaggtagctctgatgggttaggggtgcacagcatgcagctgcagatcgctgcttcttcaggcgtttcagtgttgccatagcatcgcaccttgcaatgtacatggcggtactggctgaggccgtgttggtacacaaaccctatgtgtcagatgtagggctggtggtatgtgcaggtacttcatagcgctagggactttgtccttggacagcaatcgcaaccgacatgatttcatttctttttgtgcatctgcaggcagcacttgaacgctgtggtggttgttagcagaatgatttggtaaacattgccctttg

SEQ ID NO: 13085 - DNA, 2892 bp, Oryza sativa
  ref <308>: DATABASE ACCESSION NUMBER: AK110433
  ref <309>: DATABASE ENTRY DATE: 2001-12-06
acgctttcacaccgttaatggttagcttagctagcccccgaagcggccgagctccggtcatcatgtcttggtccggcgagctgtcgccgccggcggcggcgtcggggactcgcctcctccacggcgacctcgacctcaccatccacgaggcgcgcggcctccccaacatggacttcctctccaccctcctccgccgcctctgcctctgcctccggccgccggcgagacggcccagccccggccagagccgcggctctgtcccggccgacgaagacggccgccgccagccgcacggccaccacctcctcccgacgtccgacccgtacgccgccgtcgtcgtcgccggcaacacgctcgcccgcacccacgtcgtccgcgactccgaggacccagagtggtacacccatgtcctgctccacctcgcccaccacgccaccggcgtcgccttccacgtcaaggacgccgaccccttcggctccgacctcatcggcgtcgccatcctccccgccgccgacgtcctcgccgcggccgccgcgcccatcgtcaggagggagctccccctgtaccgccccgacggccgcgggaggccgaagcccagctccgccatcgtcatcaccgcctcgttcgtccccgccggcgagcatcagagcatctacgacgcggaacacggcggcgtcccggcggcctacttcccggcgcggcgcgggtgcgaggtgaagctgtaccaggacgcgcacgtggccggcggcgagctggacggcgtgcggcggcgcggggtgttcgagccggggcggtgctgggaggacatgtgcctggcggtgctcggggcgcagcacctggtgtacgtggcggggtggtcggtgaacaccaaggtgcggctcgtgcgggaggcgatgtcgccggagatggcggcgaaggtggaggaggtgcggacgacggcaaccgacgacgacgacaatccggtggcggcggagggcatgtcgctgggcgcgctgctcaagtacaagtcgcaggagggcgtccgtgtctgcctcctcgtctgggacgacaagacctcgcacgacaccttcttcctcaagacaggcggcttgatgcaaacacatgacgaggagacgaaggagttcttcgaggactcgtcggtgatctgcttgctgtcgccgcgatacccaagcagcaagctcagcatggccaagcagaagcgtgcagattgtggggacgatgtacacgcagcaccagaagtgcctgctggtggacacgccggcgtcggggagcacgcggcggatcacggcgttcctcggcggcctcgacctcgccgcggggcgctacgacacgccgtcgcacaggctcttcgccgacctcggcaccgtcttctccggcgacgtctacaaccccgcgatcccgccggcggggaacaagggcggcgccggcgaggaggggccgcggcagccgtggcacgacatgcactgccgcgtcgacgggccggcggcgtacgacgtgctggagaacttcgagcagcggtggaggaaggcgacgaagctgttcagaagggccaaggcgcactggaaggacgacgccttgctcaagctcgagcgcatctcctggatcctcagcccctccgactccggcgccggcgacggcgacggcggcgacagccacctctacgccttgcccgatggtcaccccgattgctggaacgctcaggtgttccggtcagtggactctggatcagtgaaaggattgcctcgttgctgggagacaaaaaagatggaggcgaagcacctggtgtgcgacaagaacgtgacggtggagcagagcattcacacggcgtacgtccgggcgatccggtcggcgaagcgcttcatctacatcgagaaccagtacttcatcggatcatccttcgcatggccatcctacaagcaccaagaaggtgctggaaatctggtgccgatggagatcgcgctgaaggtggcgagcaagatcgccgccggcgagaggttcgccgtgtacatcgtgatcccgatgtggccggagggggttccaacctcgggccccatccaggagatcctcttctggcagaggcagacgatgcaggcgatgtacgaggtgatcgcggcggcgatcagggcggcggggatggagggcgcggcgcacccgcgggactacctcaacttctactgcctcggcaagcgggaggcggcggcggcggcggcggcgggctcgccggagcaggagcacaacccggcggccagcagcgcgcggcggcaccggcggttcatgatctacgtgcactccaaggggatgatcgtggacgacgagtacgtcatcgtcggctccgccaacatcaaccagcgctctctcgccggctcgcgcgacaccgagatcgccgtcggcgcctaccagcccaatctccgcgccggcgccggcgccggcgacggccaggtgttcggcttcaggatgttgctgtgggaggagcacctgggcagcagcgagtggcgggagctgaggtcgccggagtcgccggagtgcgtgaagcgggtgaacgagatagcggcggagaactggaggaggtacgccgccgacgacgacgatgtcgccatgcaggggcacctcatgaggtacccggtggacgtcggcgacgacggcaagatcagcgagttgcgcgggcacgagttcttccccgacgtcggcgggaggatccttggctccaccaacaacaactactgggattatctcaccatgtaggcatgtagctgcctctgcattcccaaattactattcggattaatatatgggactttctaggtgtcttttgacagaaaaaacctccctaaatcttgcaaattatgaaccgttggatcaatcgtgcaacataagtaaaacctacttttcctc

SEQ ID NO: 13086 - DNA, 2627 bp, Oryza sativa
  ref <308>: DATABASE ACCESSION NUMBER: AK110434
  ref <309>: DATABASE ENTRY DATE: 2001-12-06
aagcgaaaatccgagtttgtatactcgaataaattaagagatctcgaggagccgcaaccaccactggcgcgtgcaatggctggttcgttcctgaaagccgcgcagtcggcgatgtccaaagggctcaaagcggtcgggctgcagagcagtgggccgccgccggacgagaagctgacgcgcgcgctcacgcgtctgaacgctttggagaaagtgattgcgaacatgacaaggggcttccgcgtgtacgccgacaccgtcacgcgcgcctccgcacaggccgtcaacctgtccaccgacatcacacgtttctataacgacaacccgccgcgccttacatcggtcaagaaatatgcggaggcgcaggccaaagtagagagcgccgccacgcgcctgttcgatcacgatctcaacttcgaacttatccccatattcgcagactggtcgccggaggtgcagcgcatcaaaaagcagattcaggagacggaggcggcgcgcgtgcgcgtgtacgagctgaaggtgaaggtggaggacatgcgttcggaacagaaaaagcgcgcggacaaaggcactgccagctatgagggcggtcaggcgctggcgcgggcggaggaggagctgaaaaagcacaccgccgcgtacgacgtcatgttcgccaacgccaaggcggcgacaaaggagcttatggacaaccgcttcgccgccctcgaccagtgctacgtgcggctgctcgagctgcagttggatttctacaaatccgcggccaacgccgtcgcgccactgcagaccgctgtcgataactaccgcaagcgccaccccaagacggggtacgcatatgcggtatctccgacgaatgcgaacggcgcagcggcagcggcagcggcagcggcagaggcgaagcaggcgccagcgaacgacgcggcggccggtgcgcagaagccgtcgccgtcgccgtcaccaccggcatcgcagcgcaaagcagcggccgcaccatcagcgcagcagctgtccgatgacgagctcgaagtgccgtccaaagccgttgccaaagccggcggcggtgaggggccgaatggggtcaacagcaacaccagccgcaagccgcagcccgcgcccgcagcagcacccgcagccgcagcgacgcccaaaccgccgccgcccctcaccacaccgccggagtctgcagcggaggccgagcgcaagcgcaagctgaaggcgcaggccgacgtgttcggtgcgttggagggcttcgatgcgatgcgcggcggcggcgcggagaagccggatccgctggcggacatgacaccgcacaactcgcgcgacgccgacctctcgtctttggcgggctttggcacgcccaaaatctcaaaagccgcatccgcgtccagtgggttcgacatcttcggcgctgcatcgccgactgcgcgcgttgccactgccggcgctgtgggcggcgctgccccgatccccgccaaatccgcaactctggaggacaacttcgctttcttcggcgccggcgcagcgcccgccaaacccgccactccggcccctgcgccggtgcccagcccgcagcccggcgccagcgccagcgatgcattgggctttgacttcagcggcggagcgaacgcgcgtccggcagccgcaacgccgaagccgtcagcgccgcagcaggtcaagcccgcggcgtcgggttacggcgaattcgactcattcatcggcggcgcaggcgcttcctctgccggtggtgtgtcgcggcagcaatcgtcgtctgcagcggctagcagcagcagcggcggcggtgcggaggacccggacatgacgctgcccggcgaactggacggcccgccgtcggaggtggccgcacgcgccgctgcgtctgctagtccgttggacgatttggacgacgaaccgcctgtgcgccggccgccgccgccgcagcagcagcagcagccgcagcggcccgcagcggcagtgcacgatccggacgacttcacgtcgcatctgcgcggcgctatgactgtggagcagaacgccaaagctgccgccgcgtcggcgctgcaggactatcaggatgcggaagacgcgcgcattcgcacggctgaggcgaagcagggcgtgtcgcaggcgctgaaggataagctgtacaattgggagtacaaatcgggcgttcagaagggcattcgcacgctcctgtcgtcgatgcagtctgtgctgtggcctgacagcggttgggcggcgctgagcatcggcgatgtgagtgacgacaaaaagctgcacaaattcatcaataaagcgcgtctgctcgtgcatccggacaaacagcccgcactcgaccgcggcggcacgcccgagcgtctgtacatcgccgaacgcattaacgaagcgatcaacaccgcgtgggccgcgtttcaggccaatcccaagggcaagttctaactacacttcacactgctttgcgctttgcttcgctgcttcagcctcggcgctgctgctgctgctgccctgcgtgcgcctttgatcggaactccaatcgtcgtctgctgtgcgttcggctctgttcatcattcgtccgttcggttcttccaatctctgctgctcttgcttgtgctgatgctgctggtctgcgcgcg

SEQ ID NO: 13087 - DNA, 2306 bp, Oryza sativa
  ref <308>: DATABASE ACCESSION NUMBER: AK110435
  ref <309>: DATABASE ENTRY DATE: 2001-12-06
taatctcgtgttcaacattgcgcaggccgaagatggattcgttcttcaagcaattggacaagggactggattcgattgccggcaagatcgaaaagatggagaagaaatggaacgaggggggcgtggcaggtggggaagagggagtgggcgatgtctactccattaacggctcacgctaccgcgttgtcaagaagctcgctgaaggcggcttcgcgtttgtgtttctggcggagcaggtggagactggccgacctgtcgccctgaagcgcatcctcgtgcaggacgatgagcacatggagatcatcaagcgggagatcgacttcctgaaaacgctgagcgggaaggagggcatcgtgcccttcctaggggccgcgtcgttcaggaagcccaaccgacaggaggtggtggtcctcaccgagttctgcccgcgcggtagcgtactcaacctgatgtaccagagggaacggaatcgaatgacggagaccgagattctgttcatcttcgaaacggtctgcaaggccgtgtaccacatgcacagcctcgaaccgcccatcgcccaccgagacttgaaggttgagaatgtgctggtgggcaagaatggggctctctacctgattgactttggcagtgcgaccgtggtcacctacgacaccgacaagccgcacatcaggaacatcgccgagaacgacatcaacaggaacacgaccttgctctaccgcgcccccgagatggtggacctctaccgcaagcagctcatcaacgagaaagtcgacgtttgggcgctcggttgtatgttgtacaagatgatgtactacgccgacccgttcgacggcaagctgggcatcctcaacgcgcgctaccgcgcacccgacttccctccctacacccccaagatgcacgacctgctcaagtttctgttgacggccgaccccgagaagcggccagacatctgcgacgtcctggagaagctcggcacctccgtgccccgcatccagcgcaagtccgcgccagccaagcagaagagcccttcgacgcgcgcgacagagaacggcggcggagagggcggcgctggcggtggcagcggcagcggcaaggacctcttcgcgatgctcgattggcagaagaacgatgaaggcgcctcgtcatcatcatcgtcagcggcggcgggccaacggagcagcgcgagggaggcccgcgctcgttcgccctcgcccaccgccggggccgacagcctcatctctgactttgcgcagaaggccaccatcggcaacggcaacgcggccaacggcaacggcgacgccaccgacttcttcgcgacgttcgatgtgatcgcgcagcgccagccctcgccgacctcttctttctcctcctcctcttccgcggccgcttcgaccgacgtattcgcctcgtcgtcgaacaacaacaacaacggcgacgacgcgtggggcgacttctccaccttctcctccgccgcctctgcgaccacccccgcgccggccgccggcgccggcaccagcgcggccgcattcgggggcctcgattctctgatgatgggctcgcccgtggcgtcgcccaccactgcgcaccgggggcacccggagaagaaggacatcctcagcctctacgccaccgcccccgaacccgctgcgtcgcccgtggcgtcgcccatgtacggcggccacgcggcctttgcgccctcggccccaccgatgtccggcggcgtcggcaccacctacaactcggtgccgatgggcatgcccatgggcatggtctacgtgatggcccagccgacaccggtcggcgtcggttcgccgatgacgtcgcccctctacgcccgcgcgccgtcgcctctgagcgcgccgcagcagggtgcgccctacggcagtggagcgtcgccgctgatggcccagcgcgcgccgctcggcaacaacggcggcctgacccccatgtcgacgccaccgctcacgcccctctccacgccgcctctcacgcccatgagcggccgctcgggtcccggcacctcctccgggcctgccagcggtggcggcccagcgcagggcgatcccttcgccgacctgtggaagaccgtcaacaagtaagccgaccacgccccagcaccgccaccgccaccacggcgagcgacaaccaccactactacgacgactacgtcaacgacaacaagggaccccgcatcgaccagccggcgcagcgcaacctgagggaaaagagaacgaaagagcagcgccccgagacagagagaggcaccatggggtcttggcccgagacaacaagatacgctttctctc

SEQ ID NO: 13088 - DNA, 2781 bp, Oryza sativa
  ref <308>: DATABASE ACCESSION NUMBER: AK110436
  ref <309>: DATABASE ENTRY DATE: 2001-12-06
aagcgaaaaaccgagtttgtatactcgataaattaagctgatgttggtacgtcggttgcagcgcgtgaccaccgctgctgcgtcggcatcacgtggtgccaccaacaccacgacgtcactgggcactgcagcggcgcgcgcggcgctcgcagccaccacgcgccgtgcgttcgcgtcgctgcagtcgcagaatcacaacgccacgacggcggccgctggcggtgcggccggcgcgacggcagcggcgagcggtgcggcggcagtgtcgctggcactggcgcggcgctttgcgtccactctggcgcgcgcggcggccggcactccggcggcggcggcgtcgatctgcggttagagcactgcggcgtcggcgcacacgcggcggcgaagcacggcactgctggcgtacggcgcggtgtcgggcggcagcagcgtgggcgcgcggcgtggtgtggtgacggctctggacgatccggtggcggagaagacgcgtttggcgcgcactcgcaacatcggcattagcgcgcacatcgacagcggtaagacgacgctgacggagcgtgtgctgttctatagcggacgcattcacgagattcacgaagtgcgcgggaaagacggcaaaggcgctctgatggactcaatgccgttggagcgcgaaaagggcatcaccatccagtccgccgctacgcacacgcagtgggcgggccatcacatcaacctcatcgacacgcccgggcacgtggacttcaccattgaggtcgaacgctcgctgcgtgtgctcgacggcgcggtgctcgtgctgtgcggcgtgtccggagtgcagagccagtccatgaccgtcgacaagcagatgcggcggtacaaagtgccgcgcatctgtttcgtcaacaaattggaccgcaccggtgctgacccgttcgccggcatcaccgacctcaagtccgtgttgggtctgcactgcgaggcggtgcagatcccgatcggtgcggaggccgaatttgagggcgtcgtcgacatcatcaaacgcaaggcgtactatttcgatggcgaaagggtgtgaacgtgcgtgaggatgaggtgccggaggagctgaaggagctgatggaggagaagcgcaagctcctggtggaggccgtggcggaggtggacgatgaggtcggcgaaatcgttatggccgacggcgaacccactgtggagcagctcaaagccggtatccgccgcgctaccattgcgctcaagttcgtgccggtgtttatgggctctgcttataagaacaaaggcgtgcagacgatgctggacggcgtggtggactacttgccggcgcccacggagaaggccaatcaggcgctggaccagtccaacggcgagaaactggtcgttttggagccgaacagcagcaaaccgctcgtggcattggcgttcaaactcgaagagcgcgccttcgggcagctcacgtatctgcgcatctatcagggcgcactgcgccgcaaagacacgattgtggagccgctgtcagggcggcgcattaagatcccccgtgtcgtgcgcatgcactccgccgctatggaggacatcgatgaggccggcgccggcgagatcgtggcgatgttcggcgtcgactgcgcgtcgggtacgactttcaccaacggcgagctgaagtacacgatgacttcgatgtacgtccccgaccccgtcatatcgctgtcgattgcgccgaaaaagaacacggatgtggataagttcggcaaagcgttggccaaattccaaaaggaagaccccaccttccgcgtgtcgtacaacgcagagtcgcagcagaccatcatcctcggtatgggcgagctgcatctcgacatctactgcgagcgtatccgccgcgaattcaactgcgaagtgataacgggcaatccgcaggtgaacttccgcgagtgtttgacgaaacgcgcgccgttcgcatacactcacaagaagcagtccggtggttcaggtcagtacggcaaagtggtgggttacattgagccgatccctccgaaagaggacggctctccttcggacaaaacctttgagttcgtcaatgagttggtgggcaataacgtgccgccggagttccacagcgccatcgaaaagggcttcaaagagggcattgcgcgcggcgaactcactggttacccggtgcagggcgtgcgcgtcgttctcatcgacggccaggcgcatagcgtcgactccaacgaaattgcgttccgtctcgcagctcagggcgggttccgcgaggcgtaccgcgcggcaggcgtgtccgttctggagcctgtcatggccgtggaggttcaggtgccggtggcacatcaggccgcggtggtgggcggtctgaaccggcggcgcggcgtgatgcagagcgttgacgccaaagacgcgggttttaccatcatcaaagcgcacatcccgttggagcagatgtttgggtacagcacggacctgcgttcgtcgacggagggcaaaggcgagtactccatggagtgcctcaaacacgagcccgtcacgaaggaacgccagggcaagctgcaggaggcgtacgcggagcagcgcgcgaaggaacgagacgaaaagtaaccgccactttcagcgcggcagtgccgccgaccagcagtgctggcacacctgcgccggcagcggcacagcaccacctgcagccgcgcggcagcctttgactgtctgcacgcactgctgctgctgacgtttgcgttgtcatcgcccagcagcagcatgcgcagcagcacgcatctcttcttc

SEQ ID NO: 13089 - DNA, 2166 bp, Oryza sativa
  ref <308>: DATABASE ACCESSION NUMBER: AK110437
  ref <309>: DATABASE ENTRY DATE: 2001-12-06
cctgtcactcctgctccacgaggtcgtggtggtcgtggtcgggggcgaggcagtgcttccaccggtcgcaagaaggcggcttctcgacgtcagactgcagtagtcgctgcggctcccgaggaaccgctcgtctacgaccctcaaccaccttctccctcccctgtctacacacccaccaccccttccgctcccgtttacacccccatcacacctactgctcccgttttggacatcagcagcgcgctcgaagatgcatccactcctgcaacagccgactcatcggctcggacaacctctcgttctcatcgtcccgtgaagacgccgaaattttttaacgccgagagctcctcgggtaagctttcagaccctctgcgcaaatgttgtgatctggtgctcaagatcatgaagcataagtgggcttttccttttaaccaacccgtggactacgtggcgctgaacttgccgacgtatcctcaagtcatcaaacagccgatggatttgggcactgtcaagcagcgcctggctgacaactactatgagactgtcgaagcgtttgacgccgacgtgcagctcgtgtggcacaatgcgatgactttcaacgccgcaggtcatgatgtgcatatcatggccaagactctgaagggcgagttcgatgaaggcctgaagaagatcatggctccacctgacactaagcgaaagcgagttcgtagcgagaaggccgcctcctcccgtcccgccgccgctgcaggtggtgctggtgctggcaccgcaacccccaaaccccctcgtgcgcgtgcgcctgctgccgctgcagctcctcccgctgctgtcgaccctacaccttgggcaacgatcgaagcccttcaaacgcaggtggcggttatggctgaacagctgaagaaggttcaggaagccgcggcgacgaagcgtggtgggccaaagtctggtccccttacgtatcgcgagaaggcagcgctgaaggaagatatcgccaaacttcccgacgacaagcaagcgcatgtgcttaatctgattcgtgacgaaaatccagactgtgctctcacggaagaggatggggttgagttggacattgatcgtctttcgacacctgtggcccgcaaggtgcagcgctacgtcaagtctgctctggctccccgcaaccgtggtggtgctggtacgggtcgaaaacgttctcccaaaggtggtggtgctgctgctgcacatgctgctgcgccgcctcctaacggcaacccttttgctactggtccgattcaactcgaagccatgaactcttctctcgaacaacgccaactgcacgctcagcatcctttggattatggtctcgtttcgcatcatccttcagatatgcacgcgggttcattccaggctggcgctccagccgaatccgacagcgactcttcaagcgattctgactcagactctgacgatgatggttctcgaaagcgccgcaagtttccccagcccggcatgaatttcgctgctcaggctgccttagccgactcgaaaaagaagcgcccttcagctcctcctgctagctctagcgccgcttctccctatccttcctttggagacccttctttgttctctgctgccccccttgacactggtgaccagtctgtcagccacagcggtatcatcaagaccgtggaactgtcccaatggcaaagaccggttcggcggaggtgaagaacgtcgatactaacgtttggagcaacttcgctgacaccaccatggacgattcaaatccctttgctgtccctcctggtcaaggcggagacgacaaactgtggtctgatttcaagaacaaggatgtcgagatgaagcaacgacaacgagaacttcaagaagctgaggagcgtgctcgacgtcaacgggaagaggccgaggctgagcgtgtgcgtgagcaagaacgtctcgttcgccgtcagcaagaggaagccgaagcccgaaaacgacaagctgaggccgagttagctgagaaggcccgtcttttggaacaagaacgcttggccacgctcgagcgcgtcacccagcgagatgatgcagtcaatctcgatcagcaacgtctgggtggtgctgatgtgcgttcattcaagtcgaacctcaaaggcctgtttggggacgattaaaaacgttttgcttgtc

SEQ ID NO: 13090 - DNA, 2305 bp, Oryza sativa
  ref <308>: DATABASE ACCESSION NUMBER: AK110438
  ref <309>: DATABASE ENTRY DATE: 2001-12-06
cgatgagtaggagggcgcggcggccgccgcaaaacccggggcgcgagcccgggcggagcggccgtcggtgcagatcttggtggtagtagcaaatattcaaatgagaactttgaaggccgaagaggagaaaggttccatgtgaacggcacttgcacatgggtaagccgatcctaagggacggggtaaccccggcagagagcgcgaccacgcgcgtgccccgaaagggaatcgggttaagatttcccgagccgggacgtggcggttgacggcgacgttaggaagtccggagacgccggcgggggcctcgggaagagttatcttttctgcttaacggcccgccaaccctggaaacggttcagccggaggtagggtccagcggccggaagagcaccgcacgtcgcgcggtgtccggtgcgcccccggcggcccttgaaaatccggaggaccgagtaccgtccacgcccggtcgtactcataaccgcatcaggtctccaaggtgaacagcctctggccaatggaacaatgtaggcaagggaagtcggcaaaacggatccgtaacttcgggaaaaggattggctctgagggctgggctcgggggtcccggccccgaacccgtcggctgccggcggactgctcgagctgctcgcgcggcgagagcgggccgccgcgtgccggccgggggacggaccgggaacggccccctcgggggccttccccgggcgtcgaacagccgactcagaactggtacggacaaggggaatccgactgtttaattaaaacaaagcattgcgatggtcctcgcggatgctgacgcaatgtgatttctgcccagtgctctgaatgtcaaagtgaagaaattcaaccaagcgcgggtaaacggcgggagtaactatgactctcttaaggtagccaaatgcctcgtcatctaattagtgacgcgcatgaatggatcacatttgacgatatcctcggcgacgcactcgcagcagattccgctgccgctcccgctgagatcgctcctgctgcacctgtggaatctgtcgcacctgctgagagttcgcccgctgtggccccagctgacgagacagcagctgtacctgccgccctagatgtttctactgtgccagctgtcttggcaccgctcgtagatgcgccggtcgcggatgcatctgtggtccctgtggaggatgctagccctgcaccggtggcaccggtagcagaagtatctccagcattggaaagtgtggcatcagatctcgatactgtcgctccagctttcaactggcctcctgcacctgatgctccagctcctgttgttgtctcagagccgctcaactctaccgtcccagagccagtcagtgatttgtcttctgccatcgagacacctgctccgcttcctctcgccaacgtgtccaccgtcattgcacctgctgcagagtctgtgaacattgacacaagtcttggcgatattcccactccagcccttccatctactccagaaagtgacgctggacccgtagtgattgacccaaccacggaagatgtttctggaacctatctcgacactgtgccaaccggaccttccgatgaggtccctagtgccagtcctgtgcctagtagtgttccaatcgtgagttctatattgtcttcgctgccttcaacctacgaagatgatacattgcctcctggccctgacttcgaaaccccgcctccaacagtatcctcgcctgcggctgtcccagcagccctggacatcactactctgtcgccatcagacccagtgtccgaagattctgtaccagtaggtcctgtcgaggttcctaccactgccccaactgaatcatcggccgcccctgtagccgcaaagatcgtggacctcctcgactctctgacctctttgttggctcccaccctcgacaagagcccagctcccgctgccgcactcagcccagcagccatcagtagcacagcacccaagcacaggctcgatacacataaccttggtgctaccctcaacaacctgcccatgaacggaaattgggcagacgcagaatgtgagagcgccgcatctccctacaacgatttcctctttgaaaaatgaactatgtcattgctggaaaagaagaaggccgggacgctccgccatgaatgatgtgactgacgagcaacgaccagtataagattggaagatggatgacacagtatggttgttttccgcgcgattgaggtttctatataggacattatgataggacacattgtgatctgagattgcaaatttcatatgctaaacttttgcttgatc

SEQ ID NO: 13091 - DNA, 2643 bp, Oryza sativa
  ref <308>: DATABASE ACCESSION NUMBER: AK110439
  ref <309>: DATABASE ENTRY DATE: 2001-12-06
cggtggtccaaatccaagggggactggttctccctctccatattctgcctatagaggttctggtggttcaccaagtccttatggagctccccgtggcaacccctatggaggccaagcctaccaggcaccgaatcgcaatgcttaccaacctccgactcagaaccaatatcagcaaccccagaatcagccgcagccgcaggaagaacagcctgctgaacagccgcagtaccaagaacagccgaacgattacgatcagcaattgcagcaacaacaagcgatgcagcagcaacagatgctcgctcagcaacaagcccaacagcaagccgctgagcagcagcgccaacaacagatgcagcaacagcagatgatgcaacagcagcaaatgctcgcccagcagcagcagcagcagcaagcgatgatgcaccagaaccagcccgaacaggcggcgagcgagtacgatggcggcaacgacgcgtctggcaaccaggcctacgaggacgcgcagtaccagcaggaccagcaggcgcaggacaattacgatcagcagcaacaagatcagcacctgcagaatcagcccgtcgacaaccattacgagcagcaacagcgctaatatgaccagcagcagcaaatcgctcagcagcagaatcaatacaatcagcctcagaatcaccaccagccggagccgcagtaccaagagcaaccgagtcagtacgatcagcaacaacagcagaattcgcaatacgagcaacagcagaacaaccagggcgcctatgctgatcagcagaatcagtttgaccagcagcctcaggccactcagtcgcaatacgaacagccgcagaatcaatacgaacaacagcaaccgcagaacaatcaataccagccgccaagccctcaccagcagcaaccgaacaatcagcctactcaacaacagccgcagcctgtgaacaaccagcagcaacagccgaaccaaccgacttcgcaccagggcggctaccagccaatgcatcagccaacgacgggctatggcggcggcgtgtcctcgccttcgactggcggcggctatggcggctatggcggctatggcggtggctctccgtctgcctatggtggctaccgtggtggcagcatgtacagcccgacgccgcgcccgaccgcgccgacaacgagcgcctatggcaactatggcgccccgcgtggcggcatgtcgcaccagtactccttccgcggcggaccgactggcaacgcctatggtggtggtggtggccagccgaacaactcggcgaacaacaatccgaatgccggcaatccaaatggcggcggcgcgaatccgtctggcaacaacaacatgcctgtcttgcccaaggcgccgaatatgccgcaggtgccgcagatcccgcagagcaatggctacaatagtccgcagcagaatcagtacaacgcgcaaaacaacgcgactgcgcagaacgatggatcctcgagcgacccttctcaacccacacaagaaggatctccacagagccactcgtcgaatcctcctccacgctcgatctctgtctcgcgcgagaatccaaattatgcgacgacccctaccggcaaccgtactgccacgcccagctatgcgactggaaatggcatccgaggcacgcagcctccaatgggcggcacccagacctatggcatgtacggcacggcgccgcgcccctccaccaaccagctcgtgcagcctgagccagcgcaggagccgccacaggacaaatcgaacgcctactccactgaatctgacgacaagagcaaccagccgactaagactgaaaaccgcaattctggtcctacgcttgtgagctcggcggacaaagggaacaaaatgaaaatgccgacgatgacgaagagcggtggcaacactggcagctcccagccactcgccaagccaatgaacaacaaaaacatctacaagattgtgattgttggaggcggtggcgttggaaagtcagccattactattcaattcattcaaggcttattcgtcgaagattatgatccgactattgaggactcttaccgtaaaacctgtactattgacggcctggttactgtgattgatattctcgacacggctgggcaagaggaatacgctgcgatgcgtgatacctacattgctggtggcgagagttttctgcttacctatgccatcaactctttacatagctacgaagaaaccgcaagtttttacaaacaaattttgcgaatcaaagactgtgactccttccctattgtgctggttgccaacaagtgcgatttggagaaacagcgtcaggtgcctgaagaacaagcgagacaacaagcgaagcagtggaaagttcaattttttgagacgtctgcctatatgaagatcaatatagaagagatattttttgaagccgtgcgagagattcgacgttacgacgcggccgctgagtcggcgaggaatggtggaaagcctccaaaatcgagttctggtggaaagaagccgtcctgtactttattttagaatcgacactgacacctgatgaatatctgatggtctgcacatagttcttgctcgttcccattttattgatgatatgatgtacatagtgctagtaataaatactgttcaatttccgt

SEQ ID NO: 13092 - DNA, 3512 bp, Oryza sativa
  ref <308>: DATABASE ACCESSION NUMBER: AK110440
  ref <309>: DATABASE ENTRY DATE: 2001-12-06
aagcgaaaaaccgagtttgtatactcgataaattaagaggaagccgctcggccgctcagcatttcagcggattcgtaaattcggactttctgtggcgcgcgtacggttatggcgagtgcgagcgcgagtgaagccgcacgcgcggcgggcctgagcgtgggcgcgggcctgcaggatctgacggtaaagcactatctcgcgggtacgctgaaggagcacgtgcgcgattttcagacgcaattcgtcggctttgactttgaaataccgcagcacctgctcgcgctcacgttcgatgagtcgacggatactgcggccggtgacactgcagacactgctgcggctgcggcagcggcatcggcagtggccagtgcaccgcctgtggagggcaaagcggcagcaccaacatccgcaacggacggcgacaccgacggtgtggcgacggtgtatgacccgtcggcgttcattgtcgtcgacccacaccacagcgcgtacagcggcaaacaggccgctggggctggcgccggcaccgtcaaacccgcggtgctcattggcgccgctccattgggtcacgccccggcgccagcggcagcgctggcagcggcgaaggaaatgtcgccggcagcagccgcgggcggtgtgtcgggcggtgtgtcgggcggcgaaaacgtcgaaatcgttgagtggattcaggacaaacgcttgatcgagcaaatcgaacggcgcgacgagcagcagcgctctgccaactcatccgtctcatcgctgccgggcgctgacccacaggtgcccgccgccgccgtcgcagccgtcgcaccacaggtgccggcgtcgcactcacccgccgcagcagcggcatcagcagcggcatcagcagcggcatcagcagcggcatcagcagcggcatcagcagcggcatcagcagcggcatcagcagcggcatcagcagcggcatcagcagcggcggcggcagcgtcgtcatcgtcgtcatcgcacacaccgcttccacttacgaacaacaacgcacgcttcacgtacggcaacggcaaaatcacagacgtcggtttggacaaaatcgcgatcgacgtcgggccgtggccgcccgcggaaggctcatccgcttccgctgcggacggcaaaccgcgcgacggcggtcacgcgcgtcactgtgcaccgctcgatgccgccgctgtggccgcgctcgggctcataccgttgtcactgcccgaacccgcccccgccacagtccccgccgcagcggatgcgaaggacaagccgtcagccgcgaaaggcggcaaaacaaagaactcgccgacaccgataccgataccggtaccaccagttgctgccgacccgctggtgccggtgccgccgctgcagtgcctttcgctgtcgttcgatttgcggtttacggtgacgggaatgagcgggtattggcgtcgcatcagcggctctgaatttttggcgtccaaaatcgcgagcgaatccaaaggccaattcagttaccgctgcgatatgacggcacacgtccgcatcactttcgtcatcgactcgtgcggctgcctcttcctacagcccgcgtcgtcgtcgtcatcgtcgtcgtcgtcatccactgcgctttcgcccgcctcacactcgccgtcgtcgtcccccgtatcgccgggttcaccggcgccgaacggcgcgcacgcgcatcactcgcggtctgcgtctgggcctgtcgtaccgggcgctgctgctgcccccgcagctgcgggtggcggtgggacaaaagggctggtgctgaacccgaccaccatctactcgttcgcaccgctgccgccgggcaaagccgcgcaggccgtggcgctgtcggcgggtgcgacgaacgtgggccacggcggtggtgcggtttcgttttcgctgactccatcgttcagtccgtactttgacccccacacgacgctgcagagcccgctgtgtttcgcgctgtcacacaacgacatccgctacaaactcgaacccgtcaccatcagccgcaacttgggctcgcgcagcggatgggtgtcgtacgtcagccccaggagctggaccgagtggctggtggaaggcattatcggcgaccgcctcacactgtcgttcgtgcatgtgctcagccccgtactgcgcgaccggtgttgcgtgccgtttttcctacggctgctgtcgcagctgccgcggacgtgggcgccgttcagcgccgccaaacgggagcacaaacacgccgctgatgccgcacgcgaacgcgacgagcgcgtgcgccagcacctggcgtcggagcacgcggataaggcggatctcatgcgcttggcgcaggtgatggagaacaaactgcgcgctaaagctgcggcggcggaggccgaagcgctgcaactgaaagcgcgtgtgacggccgaagtcgaagcggcacgcaaacgcgcggcggcagaggcggcagccgaaaacgcgaaagtgcaggcgcaatgggacgccgaacgccgtgagctgcagcgcgtgattctgagcgaacgcacgagagcgcaaaaggcgcacgatgcgctgacgcacaacgagaaggccgttgcggtggtgcgcgacaaagccgtgcgcgacgctgtggagaggggcgctgcgcaggcgcaggcgcacgccaaagacgctgtggccaaagccgttgaggccgaacgcaaacgcgccgctgacgaggcgcagaagcaggccgctgcggctgcggcggcgcacaaacagcagatcgctgccgccgccgaagcggagcgcaagaaagcggcggcggcgcggcacgacgcggaggcgaaggtggccgctctcacgcaacagctgcgtgacaaagaggcagccaacgccaaagccaccgccgacgcgaccgccgcgcaggccgcagcgtccgcaaatgacgccaaactcaaagcgcgtttggccgatgagctgaaggcacgcgactcagagctgctggcgctgcggaagcggttggatgaggcgaaggagtcgcacgtcaaacagctgcaggacgcaggggagaagctgtgtgtcgtgtgcaccgacaaagcgtcgaatcacgccgtgcagccgtgcggtcacctctgcctctgtgaggaccacgcgccgctgtacgcaccggcgaagaagctcgcgtgcccgatgtgccgcaaccccgtcaccgcggtgcagcgcattttcttcaactaaacgcaccgtccgatcggtactttacgttgcccgtagccgcgtgtgtgttcgcctgttcgtcgcccaccatcaccctcccatttctccctttcattcagttgcgcgcacagcgaaccacagcgattgtcttgctgctgccgctatgtctattctgtacggctctctctctgcttccgcactcactaacactcactctgcgcttccgcttgcgccatccccccggttgctgctgcgcgcgcggggggctgcgtgctgtcccttcagtctcctttccctttcgatttcgctttggctttgacctttggtttcgc

SEQ ID NO: 13093 - DNA, 2048 bp, Oryza sativa
  ref <308>: DATABASE ACCESSION NUMBER: AK110441
  ref <309>: DATABASE ENTRY DATE: 2001-12-06
atgagttgtctccgttgcagcgaacgagatctgcgaccggttcgccacggcggggttcggcgcgaacctgatcacgtacctgacgcagcagctgcacctgccgctggtggaggcgtccaacacgctgaccaacttcaacggcacgtccagcctcaccccgatcctgggcgcgctcgccgccgacgccttcgccggccgcttctggaccatcatcgccggatccgtcttctaccagctcggcatgctcgccctcgtcgcgtccgcgctgctcccttcgctccgccccgcgccgtgcgcgccgacgcacggcgctgcgtcgtgccgccgcgccaccgggtggcagctcgccgtgctctacctcgccctgctctgcacgtccctcggctccggcggcatccgcccctgcgtggtggcgttcggcgccgtccagttcgacggccagcagcagaagcagcggcagaagggtggcggtggcgcggcggcggcggcggcggggaggaagcggagctacttcaacctctacttcttcacgatggggctcgcggtgctgctcgccctgacggtggtggtgtacatccaggagaacgtggggtgggggtgggggttcgggatcccggccatcgccatgttcgtctccatcgtggtgttcgtggcagggtacccgctctacgtcaggctgaagcctgggggcagcccgttcacgcggctggcgcaggtggtcgccgccgcgttccggaagcgccgcgctgccgtgccggaggaccccggcatgctgtaccaggacaaggagctcgacgcgctcatctccaccaatggcaggctgctccacacaaaccagctcacgttctttgaccgagctgcgatcgtgacgccgggtgacatcgccggctccggcgagccggacctgtggcggctgtcggcggtgcaccgcgtggaggagctcaagtccatcgtccggctgctgcccatctggtcggccggcatcctgctcgccaccgccgcgtcgcacaacggcaccttcaccatccagcaggcgcgcaccatggaccgccacctcacccctcgcttggagatcccgccggcgaccatgtccatcttcacgacggtggcgatgctcgccggcctcgccctctacgaccgcgccttcgtgcccctggcgcgccgcgtcacgggcctcccctccgggatcacctacttccagcgcatggccatcgggctgggcatctccatcctcggcgtcgcgtcggcagcgctcgtcgaggtgaggcgccgcggcgccgccgcggaccacggcctcctcgacagccccgccgccgtcgtgcccatcagcgtgttctggctggtgccgcagtacgccgtccacggcgtggcggaggcgttctcgtcggtggcgcacatggagttcctgtacgaccaggcgccggagagcatgcgcagcagcgccgccgcgctcttctggctctccagctccctcggcaactacatgggcacggtgctcgtcacggcggtgcagcgcgccacgcgcggcggcggcgagtggctccaggacaacatcaaccggggcaggctggactgctactactggctcgtcaccaccctcacggtgctcaaccttggatactacctcgtctgcttccacttctacaccatgaagccattagaggtggcagaggaagacgatgacgagaaggagtgtgagctctcctccgtccacaaaaatggcggccccggcgggttggtgtgacgaggtagattaggataattttatcagggtggataatgttgttaattacggagtacgaagtaattagctgtgcatgtgcatgccaaatacaatggttgcaaaatacagcctttagggcatgtacaaaaatagagtcagatatgagtctctatattatttagagactagcatcttacaacagttagagacaatatggtttctaatcattaatgtatccaaatactttttcttactcttctttcctttttttcactatcatgcaacaaaatttgctctaataaatgctaagagtcgactctgagcc

SEQ ID NO: 13094 - DNA, 2770 bp, Oryza sativa
  ref <308>: DATABASE ACCESSION NUMBER: AK110442
  ref <309>: DATABASE ENTRY DATE: 2001-12-06
cagataagcatcggcactccgtcgtactggatcagctgggagaatggcggctcaaccccaaccaatggaccgaaaaaccccgattctccagcagttcagcctacaaatcagttcagcctcgggaccccatccggatggatcagctgggagtcaggcaagccagcccctacgctaacgcccggggatcctagttacccagctccaggtaagccatctgatcaattcagtattggtacaccttctggatggattagttgggttggcgatggcccaaagacatctgcacctgagccggtgaagtcttcctctgcgcccaaaccttccaaaaagactgggtacccagaatatcctccacatttcccttggcctccgaaatcgaggtcaaagcagcaatcgacgccagcagcaagcccaacaccaacgccagcaccgcctcaagggagtggccagatcagtattggaaatccgacagcgagcgtttcttggaatgtggccaatgtgaaacgcgaggtcggcgattatcccccacccccacctaaatccacgcctaagcctccatcaagctctaaggcgacaccagttaaaagctcaaaggtagtttcgactccaaagactactcctaagtccactcccaagccaacaccgaccccgaccccgactccaggtgatgaggagccaccagaggaggagccacctgtggagaatcctaagccaagtgacaacattggcatagggccaatccgtccaagtattagttggggaaaacgagcggctccaccacctaggccaacaagagcgcgtagatctagctcagtgaagacaaagcctatcaccactgcaacaccatcctctattccggatgatgacgaaccagaagacccaccagcgcagacatcagacgagccactaccgagtgaccaaattggtattggtccaattcacgtcagcatcagttgggccaagcgagacatacctccttggagtaaacctacgcctaagcctaagtcgagctctgtaaaaccaaaaccgtccagcactccaaaacctacgcccacgcccacgcccacaccctatcctcctgatgatggagaaccagaggaaccaccagtcgagcaaccccagccaagtgacaatattggtattgggccgatccgcccaagcattagttggggaagacgagaagctgcagccaagtacactgaatctatgccgcccttcccctggccaacgaagccgaatgacattggtctttcgccgccatcagcaactgtgatttggggaaaacggcaggaggaagaaaacccggaggatcctgaggatcccgagggtccgatagaaatccctccattccccatgcctacccagccaaacagcatcggtattaatccacctactaatactgtcatttggggaaagcgtcaagccgaagctgagcccagtgaagtcccagaggacccagaggatcctgagggtccgatcgaaatccctcccttccccatgcctacccagccaaacagcatcggtattaatccacctactaatactgtcatttggggaaagcgtcaagccgaagctgagcccagtgaagtcccagaggatccagaggacccagaggatcctgatggccctatcgaaattcctcccttccctatgcctactcaacccaacagtattggcatcaacccacctaccaacactatcatttggggtaagcgccaagaggaagacccagaggagactggtcccattgagatcccatctggccccgcgcccactcagccaaacagtatcggtatcaatcctccatccaacaccatcatttggggcaagcgccaggaagatggaggcacaactgagatcccacctgcccctaagcccagccaacctgacagcgtaggcatcaatcccccgtccaacacagtgagttggggcaagcgtcaagacttcagcatcggcctcccagtccctaccgccacagtccctacagctatcattctacccccctccaacagctccagtggagccggctattcagcaaccgtaatctggggaaaacgtaatgcagcacctgcacccacagctgccgccaacctcaaggaccgcgaagccgtcgcccagttcacatgcagcgcgacatctaccagcaccttctaccggccttgtccccgacccatgtgcaacaccggctgccatttcacacccgagtatttcgaagtcaccgactcaaccgaccccatcccccgctgccctgtgatcaaaaccgcagtcaacatctgtgcaacatgcgtgtgtccaaccggcgcgccagtgccccccaagccaacgcccacaagctgtgtatcgacaaccgtgattcgaccgacggcgtgtgtcccgcccaagtgtccgcctcgtgcgacgccgtgcgatttgaatcggccagtgcccaagatggttaaggtgaggcagattgagaagacttttgttacgattcagacgattgtgccgagcccaccggcgagcaggtgtgaggttaaggcaacgaagacagagtatgcgacgtgcccgacatatacttgtgtgccagggtgtgatgcagcgcaggttgtgcgttaggagaaaggaatgtagggagttggcgatgtgctgtgatgttcggatgtttcgctaagttggattgcgtagagagggaaggtcaagcttggatggaacggccgttgacacgatctggcttgtagcatatcgtgcttttgattcgatgtaggaattgaaattcattgtttatctcttc

SEQ ID NO: 13095 - DNA, 3115 bp, Oryza sativa
  ref <308>: DATABASE ACCESSION NUMBER: AK110443
  ref <309>: DATABASE ENTRY DATE: 2001-12-06
acacacatgcgtcacgctttgttaaggctggctttgagcaactcctcagagcgcacacacacagacaatagttgagtcctgttttcgccaccattaccatcggtataaagccagcagcatagcatagaagaagaactgcaagcttgttgtactctttacccagcgatggtgctttgaaacgacaaggctgcgcagagcaggggtgagctgtctggtcccttgatgtgcagcctggtagcacaggagccttgtcagctgcattcggagggctttttggcatcagtccattcagcggaacagaatgcacagcaaggcatgcagcaagtggtgatggcaagcagccaaccggcagaaaaccactcaggcatgactgtcagggaagccactcagtactggtacacacgtgcacaccgtgctctaaagcagcgctggagcgattacaaccaaatgatgcgggagtaccagcacgtggcagcactggacgatggcatagagcatacaactagcgtggcaaagagcaaggcagctggcgggcgcaaccgctactgcaacgtattgccatacgactacaaccgggtggtgctcagcgaccagcagtacatcaatgccagcctggtgcaggtgcagctgcccatgctgcagcggccctgcagctacattgcaacgcagggaccactgcccacaaccgcagccgacttttggcgcatggtgtttgagctgaaggtgccggcgatcgtgatgctcaccaacgtgacagagtgcggcatgagcaagtgcgcagagtacttcccagcccagcccagcgggcgcatcagcttgccaggcttcaagctgcaggttgagcaggtggtgccgttcagcccggactgcacgctgcgagtgatgcggctgagcgacctgggcagcgacagcagtcacatgctcagccactaccacttccacgcctggcccgaccacggcatccctgacagcagcgcaggcctgcgggcggtgtgcagggcgctgtcgacggcgcgggagtcaggggcgccagtggtggtgcactgcagcgcgggcatcggccgcaccggcaccttctgtgcgattgacatcctgctacagcggcttgacgcctggccgcagtgccaggacggctgcgggccggaccgtgctgaggtggaggcggcgctcaacgtgcccaacctggtgcacgagctgcggcggcagcgcatgggcatggtgcagacgctagagcagtacgcgtttgtgtacaaggcagtagtggacgacctgcaggcgcgcaccaagtcctaccagcggcagcagcaaggaggcacgcagtgacccgccgaccgccacatggacgctgcttctggggaagcgtgagagcagtgttctcctgctgtgttgtccacaccactgtgacggcgcacggcacggctgcacccggcggtgcagtgccgattttgtcccagccagaggcctgaatgtggggcaatttggggaggcatgttgtgccggtgcagtgctggtgctggggatatggtgcaccgtacagcacagagtgcgctggtattcttttgctgtgagattctgcgtagtgttggtcgggcgctctgcaggttggaagcagcgctgtgcatcaccaggcgcgtgcggggtgatcaattacgctgcagctgcagcacggtgttgtgttgtttgcctgcgctgcacagccggtatgtatgtgccttgcagaaagcctgggtcagcagttgttttgcacaaatttgggcactggtgcagggtcgcaggcactccgtgcactgtgcgatgctgcacagaagcaggccagaagaagataaggggtttcaatgcctgcatttgtgggttaggtcggggcaagtgcctgtttctgtgcttgcacttcaattatctgtctactttgtgtgctctgaaggctgcactgtggggtcacttctgagcagtggccgttggcctgcacaaggcaagcctgactgtttgttgattttgtatttggcggtatacgttgccactggtggcgggtttgattcactgcagaagaggcacatcagtggcttggatgttagcaactactgctgtcattttacttgcaggcggaattttcagacaggatgaatgtgtctggaacaagtagcaggtatgtttaggaaaggggctggcggttctcactgtggctcacaactacgtggctgcatatttattcataacacgagcatgcatgctgcatgcttatgagcacaggtggcatctcgtgcacaggtgtgtgcgctttctcctcacatcatgtcactatagcggcggtggcccgttgccaaccatagcaatgttgctcagcaaagaagttttgctgctgctgctaaatagtgtgtttgtggaccaagtaatgctgatgctgatctgctgaggagtgtttgtgtgcgcacagtaatgcaatgcaatggcgattcatatgcaaccttgctgcactctcttcattgtgagcagtgagcagcaagcatcagattcatgtgctgttgaatcacaatttgcccgatactcgtgatagctcatcatgacgtgtgttttaggcatctgcatgtcctatgcttttcttaggcgtggttgtttgtaaggggcagataatgtgacagagctggctgccacacgactgctcacgtatgcactcaccctgatgcacatgggtgacgagggtgactcacctttggaaggggcattgtccttgtggttttcgcctcacctatccttaatggcccaccctggcaggcggtcttggacagactagtagtctggcttgtatgaaaagagttgcatgtgcacagtgtggctttggtgcacagaggcagcagacattgctgccaggccggcatcacagtgtacaacattgggcgccccgagcctgcaagtagcaaaccagctatatgggtgtcgcatgcgcagtaacaatacgtttggttccgggctgttgctgtcaagggttggagccaacaggactgccatgcggtttcttgtccctgcaaccctgaatagctgttgcactggtgggtgctgcggttggttgcagcagcagcagcagcagcaggagagggcaaagtgtaaagaaggtttcacc

SEQ ID NO: 13096 - DNA, 2786 bp, Oryza sativa
  ref <308>: DATABASE ACCESSION NUMBER: AK110444
  ref <309>: DATABASE ENTRY DATE: 2001-12-06
aactaacgctaaaaaagtaacagtttctgtactttattgcgcgaagttgcgtttcctactcgattcgctccattcgcccatcgctgctttgaggcctcggatcggattcacatccttttcttctcggtctcaatcccgcttcttcaccgcttctttctacttcaaacaaaaacgaatcgaccggctgcaacagctcgtcgaaacccgttctcaagagactccggcaacatgtcgttgatgcgcacggctgcattgacgctgacggtcctcgcggtcgtcttcgtcgtgctcgtgcagggcaagcccgtgacgaccgatgccgtgactgaagtcaacgcgcccagcctcggcgagggcgcgacggcgttcttcctcgtcgcgatccctgcgatcgggttcgcgttcggcatgtactggtggcagctggccgccgagatcagcatcgacccggcgaaggccgcgggccgcaacagcttcctgacgaccgagatcatgcgcaacgtgcagaacatctcgcagaaggtgtcggacggcgcgacggcgttcctcttcgcggagtacaagtacctgttcatgttcatgacggggttcggcggcctgctgtgtttcatgctcggcacgtcgctggcgagcccgacgagcggcgagaagccggtcgaggcgccgtgggtgaacgcgttcctgtcgctggtcgcgttcgcgatgggcgcgtcgacgtcgattgtgtccggctggatcggcatgcgcattgcggtgttctgcaactcgcgcacggccgtgcgcgcgacggagggcgccgacgagggcgaccagggcgcgggcttcgcggcggcgttcgagacggcgttccgcggcggcatcacgatgggcttctgcctgacgtcgctgggcatcttctcgctcttctgctgcgtgaagatctgccagggctacttcgggacgagccaggcgatggcgccgcagctgtacgagtgcgtggcggcgttcggcctcggcggctccgcggtggcgtgcttcgggcgcgtcggcggcggcatcttcacgaaggcggccgacgtcggcgcggatctggtcggcaaggtcgagaagaacatccccgaggacgacgcgcgcaaccccggcgtgatcgcggactgcatcggcgacaacgtcggcgacattgccggcatgggctccgacctgttcggctcgttcggcgaggcgtcgtgcgcggcgttcgtcgtggcgtcgcagtcggccgagctgagcgcgagcttcacgagcatgatgtacccgctgctgatcacggcgtccggcgtcattgtgtgcatgggcacgagcctgcttgcggcgacgaactgcggcgtgaagaaggcggaggacgtcgagccgacgctgaagcgccagctgcttgtgtcgacggtcgtcgcgacgttcgtgctgatggctgtgacggacgtgtgcctgccggagcacatcaaggtcggcaacacggagacgaccaagtggcgcgcgctcgtgtgcgtgctgttcggcctgtggtccggcctcttcatcggctacacgacggagtactacacgtcgaacacgtaccgcccggtgcaggagatctcggaggcgtgcgagaccggcgctgcgacgaacatcatctacggcctcgcgctcggctacctgtccgtgctgccgccgacggtcgcgatggcgtcgactgtgtacgtgtcgtacaagatggccgacctgtacgggtacgcgctggccgcgctcggcgtgctgtcgacgatgtgcattgcgctgacgatcgacgcgtacggccccatctctgacaacgctggcggcttcgccgagatggcgcacatggggcacgagatccgcgaggtgactgacgcgctcgacgccgcgggcaacacgaccgccgcgatcggcaagggcttcgcgatcagctcggctgcgttcgtcgcgcttgcgctgtacggcgcgtacgttgtgcgcgtgcagatccccgtcgtgaacatcctggaccagcgcgtgatgcccggcctgatgatcggcgcgatgctgccgtactggttctccgcgatgacgatgaagtccgtcggcatcgccgcgatggacatggtggaggagatccgccgccagttccaggacccgaaggtcgcggacgggacgaaggagcccgactacaacgcgtgcgttgcgatcgcgacgcaggcgtcgctgcgccagatggttgcgccgtcggtgctggtgatcttctcgccgatcgtgatcggcgtgctgttcggcaagtacacgctggcgggcatgctgccgggcgctgttgtctccggcgtgcagatggcgacgtcgtcgtcgaacacgggcggcgcgtgggacaacgcgaagaagtacatcgagcgcggcgggctcggcaagggcaagggcaagggctcgccgcagcacgcggccgccgtcacgggcgacacggtcggcgacccgctcaaggacacgtccggccccgcgctgaacatcctgatcaagctgatggcgatcatctcggtcgtgttcgcgccggtgatgcagagcaagatgggcggcatcctgatgaactacctggaggccatgtaaggctgagagcgatggtcgaagaaagaagaatggtactcgaaaccccagacaaaactgcgcaaaaactcacgtcactaggatgcaaaatgcgaaagaaaaaccacatccgaaggtcgctcgtgtcgagctgcgctgcacagcgtctccaaggcgtttccgcagtcggcttcgctaaaacccaatcacgataacagtcaaaacac

SEQ ID NO: 13097 - DNA, 2981 bp, Oryza sativa
  ref <308>: DATABASE ACCESSION NUMBER: AK110445
  ref <309>: DATABASE ENTRY DATE: 2001-12-06
aagcgaaaaaccgagtttgtatactcgataaattaagaccgatgcggttgaacgtgttggttgccattgggctggtcgcgctggcgtgcacgagcgccaacgccgagcaggcggacgcgttggcgaccgccccggcgatggctgagccgagtctgatggagacggacgcgggcgtggcggtggcttcgccgccggtgacgctgcctgcgcggtactctgaggacccggtcattctgaaggcgaaaaaggacgacgtttggctgaaccagaagcggcgtccgttggcgcgccaacccgcgcagatcgtggccaaaggcgaactgcggaacatcatcgcatacgacgcggagcagcggcagcacgagctgtcgcgtgccaaacgcctgaagcgcatccgctcgggcgagaccgctcagcccaagctcctgcccgcgcactaccacacgtccacgctcgtgtcgccggcgcaggataaggtgacggccgatgtgatcgggttcaccggcgacagcgtcgagccggaggtgatcggtcacgtgcccaccgccggcgcacccgctgcagcgcgcttcgtcacgcccgcgtaccgcgcggcttcgaagaagccgctgtcgcgtccggcgaacaacaagcgtaagggcccgcgcgttcacatccacaaaaagcgcgctgaccccaaagcgccgggtgcatctgcctctacctctgcctctgcctctgccggcgccaaaaagccggccgctgccaagtcgtctgcggctgctgcgcccaagcgccgccgctcgtggaccggctcgcgcccgtaccgcggccaccgcgcacacgcgcggtacccgaagaactggaagagccgttgggccaagcgcaaggctgcgggccgcgccgtggcaccgcgtgcactcgtgaagaagtctgctctcaaggcgcagcgccagcgcatgacgcgccgcagcgttctgcgtcgcattcgccgcgagcagcgccgccgcagtcagctgcgccgtcagcgcgcgcgtcaggccgctgccgtcgtgtcgcgccgcaatgccggtgcgaagttgacgcctgccactgctccggccgccgtgtcgcctgcgacgctgaatggggccgatgcggaggcgaagcagctcgcggacgccgccaacaccattcgcagtgtgaaggccgacacgacggagctggtgaagggccagaagcagctgttggattacgcccgcactgccacgcgctcaaaccccatcgcagagcgcggtgttaagatcgatgagaccgttctccgtcacgtggaccggctggagaaagagctgttcgctatgtcggaggagaacaaggcgatgcgtgcgctgcagcgtgcgaatttggatcagctgaaagcgctgtcggcggcggtgcagagccgcggtgtgtcgaagcagttcccgcacctccgcgccgtcgccgtcagcatcacgccggacgcggattcggacagcgccccgcgcttcgagcagctgcacggcgctgaagcgcacgcggacgcggcggcgcagttccacgccacgctttcggcggagcagcacgcgggcgcggcgctggacgccgccgtcgcggagcagcgcgctgtgtcgggtgagcacgtggaggcggctgccagtgagcaggagacagaggcggctgatgcgggtgtcaagaccgaggaggagctcgcgctcgagaagttcatgagctcgctcttgcagacgcagacgcagcagaccgcggaggccgctgacgagtcgcaggcggaggcggaggcggaggcggaggacgagtccgaagacgagtcagaggacgagtcggaggaggaggaatccgatgagtcagaggacgagtcggagtccgaagacgagtctgaggacgagtctgaggccgaagaggaggccgaggacgaggctgaggacgagacggaggaggcggctgaggcggaggcagaggctgaggcagaggacgatatggagacgtccggtgccgccgccgctgccgctgtgacggccgctcagacgagtgccgacgacgaggaggccgccgccatcgacgccgacagcacggctgagtctgatatcatccgtttggcggagcacaacgccgctttggtggagcagcacgcacgtcgcgtggccgctctgcagacggatgaggacgctgccgcggagcaggaggctgccaacgaacaggccactgcggacgcgcgcgccggtacgctgccgtcactgtcgctgtcagaggtgtcagccgatgccgctgccgagaccgacgcggaggctgccgtcgacgccgatgcagcggacatgttggggctgccgcagctgccgtcatccgtgccggtgccgcgtcacgacgacatgacggaggtggaggcggaggtggaggcggagttcgctgcacaccgcgacgccgatgccgacgccgactctgaggcagaggcggaggaggctgatgtggcgccgcgcttcgcgcagttgcacgccgacgctgaggctgactctgaggccgtttcggaggccgactctgaggcatcggaagacgccgagttcgaggcgctgatgcacgggcgcgacgcggaggaggagggcatcaacgccgaggtggagcatgagctggagaatgaggacgccgccgacgtcgacatcagcgatgaggcggagggcgcggtggccgctatcgacgccggtctcagccacacgctatcggcggacacggccgaggaccaggcggaggaggcgctggccgtcgacgccattgacagccacgaaggcgtcaagggcctgcgctcgctcgtggccaaactcaacgccgaactcgacaaagtcaaggccgaaggccaggcgctgtctcgctaacagcccgcgccaccggcaacgacggcgagcggctgcaacggctgcagcgcatcaccgcaatttcgaacctttctctcttcgggcactgagtttcttgtgtgaacgactcctgtgttcttc

SEQ ID NO: 13098 - DNA, 3018 bp, Oryza sativa
  ref <308>: DATABASE ACCESSION NUMBER: AK110446
  ref <309>: DATABASE ENTRY DATE: 2001-12-06
atctctatttgtactggtaatagttacatctagactgtggcaaaaggaaaaagattgactgcggcgttgctgcaaacttctgccagggggcttactttacgacgacatataccggaatgtcactgcaaggcaggttgaagcctttaggctataggtgtcagctgctgccaacaagcaccatccttgccgtgcgaccctctgcagcacgtaggcagctggctgtatgtgtacagtccagtagttctgtcccagagcagcatccgaacagcaaccccttgtcaaatggcgcgcagccgctgcccagccagcccacaccccgtctgccgttgatttcacaaccacagcagcagcagcaggaactccggcaacgatggagggtgaacagcgtgccagcagcagcagcggggggcggcagcggcagcggcaatagcggaggcagcagctcagggggaggcggcagtggtggcggtggtggtgacgagcagcctgatgatgacgacagcctgatggacctctcacaggctgaggcagctgctgcagctgccaaggtgcgcctgcctgccgacatgctggagactgccaagagctacggcatcaggtcgactgcactggccaagtacatcagcctgcagtcgctggtgttcacaggcggcctagtgcagcgctttccttggattcgtgaccgcatgattgctgatgagaaattcctgctcaaggtggtggcagaggtgctcatagactcaggctgtgccactgttgctgaggtgcgcaagcggggcgatgagttctggcaggagtttgagttctacctctctgacctgctcgtgggctgcgtgcttgacgtggtgctggtgtcactgatggccccccgggctgtgctgggcggcaaggcagctctgctggggcagtcagcgctgcagaagtgcctggggggcattccatcagcagcactggaagctagtgtcaagggtgtgaagcagtacactcttggcagccgctttgcgtgcctgggtgtcaagttccttgagtactcactggcggggatcacgtgcggcttcatcgggcagggcattgccaacagcctcatgatgctcaagcgccagattcatggtgagaaggaggacgacgtggctgtgcctccgctgttcaggactgcgttggtgtggggcctgttcatgggagtctccagcaacctgcgttatcaggctgtgtttggcctggagcgtgctgtggacctcaccatcgccaaacgcgtgcctgccatcgcgtacggcaccactgtggccatccgcttcatcaacaatgtgattggtggcgagaacttcatcgacatggctcgctgggcaggggtgcagtagcaggcacagcggccgtgacactggcaggatatcagttctatgttgtaggtgaacctagataaccatcccaattggctgtcctgcacatacatggcactaaatagtttgcttggagatagtggtgagtctgtcctccagaccatggctggaaccaccaacactcaaaaccatgcaggtaaatacaccacatcagtcatttgcgcagtgatggagcacagtgcaactgcatctgatgaagccctgctggtagtccagccgtgccaggcagtgccatgcagatggtaaagctgggctgcaggctgcaagctgcagaggaaaaggcggtgagggtttcataggcttttccgtgagaatcagcagcaccaacatgccaacgtcgcatgcgctgcacagtgcagggctatgcggcaacgcttgcttgttttctggccagggatgactggattgcctctgcaggtatgtttgtcgtggttgctatcatggcgtggttgggcctgctgactgctgctggtgttcctctggtgtcaactaagcttgggttgttgtttgtacctgcagctgcttggcagcatgttcatctgggcatggtaggttatcaactacgtagcaggttccaaacgaaagcctgcctccttaagcagttacacaacgcaagggtgtgtgtatggctctgaggtttgacgtgtgtggcaagcagtgatggctgagttgaccgcgcgcaatatctgcttcaagccttacatagcagatggtcagctgtgctggtgcaagtgcaactgcagccagggcacccccagtgcagctcttttgctcgttgttgcagctgttgcaggatgctgttgactaatgctggcatgtttttttgacgctatactgcttgcaaggctgcctgcctgcaaggcacaagtgattattgccatggcttgcacagtgccccattgcttcaggtacagatgtcttggtttgccgtattggaaatgggtcctgagtaggcaatgagcttccatgtggtgtggtgctgtcggacaagtactgttgcaagtgtctcagctgctgtcaacctgcatggtgctgaagtgatgccacaagatgagcgaagcagtaaggttctgggctgtaggtggataggggtcatacgtgaaggtgcgggtatggcagccgctgccatggtgcggcaccatgtggtagtaagctgcctagttttgcaatatgccagtagcacagggtggtgcaaagtctttttgatcgcaaagtgaggcaggactgaaccgctcatgagtgatgactctccctggccagggagtgcaacttgactggtgcagtgtacactgcactgcatgtgcacgtgcctatgtcataggtacagacggagcagtgctgcttttaacgactgctgtgcacagcagcacacgtgtgctgacaatcatcatatggcatgccatagtgtgcacatgtgcacagccatcggcaatcaagaacaggccaggtcagttggccagttaaaattggctgcaaattggcagtacttagtgcttgtatttgtatcaatgtggcagttgcctagtcataacttcagctcagtcggtaggtgtgtgtgtggcggcttttggcctgagccctgcaaagagcgcagtggtgctggtgtaaaggagaccgctgt

SEQ ID NO: 13099 - DNA, 3740 bp, Oryza sativa
  ref <308>: DATABASE ACCESSION NUMBER: AK110447
  ref <309>: DATABASE ENTRY DATE: 2001-12-06
aaatgtcactgcctgcaaggacttctgcaacatttccagaacggaacgctcacgcgcactgataatgcattgaacacgtgaccaaatcaaatcgtagatgaatctcgcttttcgacgtttattaagttctcgcctttgcagaggaatctgccactctacccacagcctttccaccaggcagagtctgtgcctgggcgtaaggccagtcagccctccagcttttcaagggaaatgttctgcaaggcctagacactggctgaggcccagcacgactgtgttagcccagacatcacagcaggtgctacagcagcagtatgggtccatccacagctcagtagcagcgttgagcagcctgcaatctccatcagacctgtgtgcagccatcgctgacgcttcaacgcatgcagcactgcagacccttgcagtcacagcagcaagcgtaccacaccagacgtggcttgctcaggagtacaaggtgcagctgcttgagtcgctggaccagcaggaggcagccagtttggccaagagcctgctgttctatgccaagctgggcccagggcagctggacctcttccaagcggccataccagtgctttacaaccagctgggtcgcctgacgccgcaagatttggtgcgcatcctgaccgcatactctgcagcagcacagcacagccccgcagcatacagccaggagctgtttgccgccgccacagagtttctgtgggagagcctgggtcagctggagacgtgtgcactggcagacgtggcggcagcatacgcagctgtgcagcattatgacgatgacgaggacttcttcaatggactggtgcaggctgcactgcagaggttgcaggacttctgcccagaagacctttcccggctatgccactccctggcattgctgcgcttctcagccctagagcttaacgcagcagcactgcagcagatgagccagcaggttgaaggttggccgctcagctgcgttggcaggctgctgtgggccctggcagcagtgcagtgctcgccagacccctgcatactggaccgtgtggctgggcacgtcagtgtggtgctgcgtaacttgcgcacgagcactgacggtcagagggtgctggctggtatagggtccagaggccccgctgctgctgacgccagcacagctggcaagctggcaggtgatttaggcagcttacctggtgtggggcctgcggggtacggtgctgctggagggcccacctggcagggctttgggatggcacgcagcagcagcggcagcagcagcagcagctctcccagcagcactgccagcatgagcaccagtaccagcaaccaaagccttggctctataggctgcagtgagcccgccagcagcagcgcacccacaacgaccactagtggcactgacggtccccccgttgacagtgttggcagtggcagcagtggcaatggcgatggtgctgccagcatttgggctgcggcgaatagcagcatgtcacattacgagtacacagagcaggacaatccgctgggccctgattacatcatggtgacaaactatggcccggatgggaaggtcaccacaacatacatcaagcgcacagaagcagcagcacgcagcagacctagccccagcagcacaacaacaaccgatgtcagcagcagcagcagtttgactggaaccagcagcaactacctgcgtggaggacttgtattgcctccgagcaacaggggtgtcagcagtaccagcggcagcaggagtgtggcacccagcagcagtggcactgccactgctggcagcagcagcagcagcgctagtggcagcacgggaagcagtaggaaggccggccggccaagctggactcggcagcagcagcagcagcagcagcagcgcgatgagtgccccgcagccagctgggccaccagcatcccggtggctgctgattgccggcctgtgtatgacaatgcagaagcgctgcagtccgcgctcgtcaatcttgcctgggcttttgcaatgctgggccacctgcacagcaacatggccaaggagtgcttcaaggccctggcgctggtgatgcctgaggcgtttggggatgagcagctggtgatgctgtgggcagcacacatgcgctaccagcagctggggcacgtgatgctggaccccaaccccctgctggcggagagctacagcgtgttcctcaaagagctgtcccgtgctgcgcctcgcaccatcagcctgccgctgcacttgcagccactggcagctgccaattggctgctgcacacggtacggcagtcgccagagtatgagcagcagcagccagagcaggagcagttgcagcagcactttagcagctggaagtacagggacccagcggtgctgactcagcgtgggctggaggccagcgtgaggcaggcattgcttcaccttggcctgcctgtgggtgagccatgcatcacactggatggcgtggagcgtgtcggcctgcccctgaagcacaacggggtgtctgtggcctgccaggttgtgccgccggcctggtgcagccgcaacccaccacacagccccaccgctgaggcacagatgcaccgctgggcgttgcagtacaggggctacacggtgctgacggtgcccttccacgagtgggcgcctgtgctggagagtggggatgtggcggtgcaggccgggtacttgcagaacatgctcaacggcctgagcgtcaggaggagggtgccaccgccatagcccgacaggatcccaaagtcgtcaagcttctgaacagggccgctgacgctgcattgttttgtcagtcggaagaattcagtcccttctacatttgctctggcctggcctgcatgatggatgggtgcagtgcataggcgagggtggatttctgattctgatctgtgttggtgtgggacagagtgcattaggatcctcttgcagctcctcaactgtgcgcaattgcgctcttaggcacgcagttgttctgagcattgctctgatttggcatgttgtgggcgcttacggtgtggtggccagttttgtgtactgttggtgtggctgtaacgtccactacacatcggttagccggggctgctctcttttcctttgccttttggggaggcctcgctgcattgatgcactgcaatagggtgttggttgataagtgtcaccactgttgcacgtttgacttaagctggtgtgctacgaacatgccacgttttgcacagtgctccagcgagctgcggcctgttttcgtggagtaagttgccggcagggatttgtttcagcacctgattacactgtcagtggttggtccatatgggtgtgtgtctgtatgtgatgcgtgtgtgttgcaacagctcatgatcaggcgcctattataaagaactacatacttccggcctttgatcctgacctctgtcatggcacggcgccggcccacctgtgacgtgtgaggtatctgggcagggcctacgaggttcacgtcaggagaggtcgcccccatcaggaacccatcaggttcagcaggtccccagccattcatctgctgcaactgtgcatgtggtgcagcgggtccccagccacaagaagctcccttgcagattgtgtagtgatctgcacagtttatgtgtttatgtgtcggaaagtgtagcatggtcggcgcctgttcttgtgttaggtgcagggactgtcagtgttatcaggccataaaacagcggtgactctgagcagggtg

SEQ ID NO: 13100 - DNA, 3148 bp, Oryza sativa
  ref <308>: DATABASE ACCESSION NUMBER: AK110448
  ref <309>: DATABASE ENTRY DATE: 2001-12-06
aactaacgctaaaaaagtaacagtttctgtactttattgccttacctcgattgctgatggttacctacaccttgaacgcggctcggtttgcacagctcgcggccgcgctcgagggcgccagcattgcggtcgtcatcggtgagacaaaggacctccccacgaacagccgttcagcggcgctcctctgtcgccttttcgatttgcccgtggtgcccgccaacgtggccatcgtcgcgtctgcgggcgccgtgaccgtgtttgccaagtctgcgacagtcaaggcggaggcgaacgtgcccgccttctcggtcgtgacgagcgccgacgccttcgctgcagccgtcaccgccgtcgcgtcctcgttgcgtgtgttccccaaagagctgaccatccaaacgggttcctgggcgacggacctgctttccaagatcagttccgccaccggagctgcccaagatggcgccgcgtccgctgcgagtttcctgaccgtgaaggaacaggctgaaatgcagcacgtgcagatggctcgcggtgtcgccacccgcgcgctcgaagtgcttgttgtccctcggctcaaggcggagctcgccaagttccgcccggccacggaagccgctctgtcggctgagttcgacgatgctcttgcggccccgaccaaaattccagggcttgaaaacgtgaacagcgccgatttcgaaaacgccttctcgccaagcgcggtgcagagcaacccgaaccacttcaagctttcgtctcgcgacgcgcttgtcggcatcgagaacacgaccctgtcgctgcgccgtccctgcgtgaccgttgcggtcggctccaagtgccgcggctactcagcgctgagcgcgcagaccttcttggtcgagccgtgccctgctgccatcacggcggcctatgacttcctgcacgccgtgtatgaggagctgctgtcgaagcttgtcatcggcaagcctctcaaggacgtctatgcggagacgctcgcgttcgcgcagcgtaccaacgcgctgttggcgacgaagctgtcgagcgacttcggtttctccacgggtctgcactatggcgagcctcgcagcggcatctccgcgcgcgctgagtttgctatcgcagcgggcaacgtctatgtcgtgcgcgttgccctcgaaggcgtgacggtgacgtcagacgttaaggcggaagacggtgatcagcccgagcccgagcgctacggtctcgtcatcgccgacaccgtcatcgtcggcgccgacaaggtacgcacctccaagtttgtccgcaagccaagcgcgatcacctggagcatcgcggagaagaaggaagagaagaagacggaagtgtcgtatgagcctcgcatgacgcgtggcgccgccgctgccgtgggcctcgacctcgaggcggcacgcaaggacaggcagcgagagcttctgaagcaaaagcgcgaggcgtggatcgccgcgggctcccccgagggtgttgacgctgccaacgcgcaggaggatacttccgcgatcggccgtctggcccgtggcgcactgcagagctacaacaactccggcatccccgccgagttcgcttcgaagggcctcgccgttgaccgcgcgcggcagactctcattgcacccatcgctgggcagctcgtcccgttccatatcagcacaatcagcaaggtgacgtgcgtgccggacggtcacggcaagacgtctctgaccgtgaccttcgcgacgacccaggccagcaacgccgccttcgctcgccaccgcaaccggcagtgggtcaaggagctcacctacgtgcgccccgatggtggcttcctcttcgagattatggcgagcatcaacgaggtgcagaagatgatcaaggatctggacaccaagagcaagcagtcctccggcgttgcacccgttgagaacttgaagctctcgccgaacgcgcttcgccttccaacggcgaagatgcgccccgcgcccgctcaagtgtccaagggcggtgccatcaccggcaatctggacgcccacgcaaacggcttccgcttctcgttcggctcgcagaccatcgacattccgtactcgaacatccagcacttcatcttccaaccatcaaggaaggatatcgtcgtcgttcttcacctgaaccttcgcctccccatgatcgtcgccggcaagaagactgacgacgtgcagttcgtggctgaggttctcgagtccagcgttgccgttagcggcactcgcaagacccacgaggaggagctcgatgctgaggagcgcgatttggcgcgtgtcgccgcgacgaacaagcagttcagcaccttcgcgatgcaggtcgctgagaagcacggtctggtcctcgagctccccatgaagggcgactccaaccgcttccagggcgtggcgaacaagaaaatgacatggttcaacatcaacgagcacgccatgtggtcgctcagcgacttgcccttctgcgtcgtcagcctggacaagatcgaggtcgtcgcgctcgagcgcgtgctcccgagccagtccaacttcgatgccatgttcattcacaaggactacaaaaccgtcactcccatcaccaacatctcgatggtgcacctcgaggcgttcaaggattggctcggcgagtccgcgaagatgatctacttcgaatcgacagcgaacattgcgtggtccaacatcctcaagaagattcgcgatgacccgggctgggccgcgtggggcccggacggctggattcagtacgtcgacccgagtgctggcgacgaggaaggtgccggcgagggcgaggacagcgatgccgacgacagcgactacgaagacgaagagtcggacgaggaggaagaggacgagtcggaggactccgagtgggccgaggaaggcgagacctcagacgaatccgcaggcagcagtgatgacagtgacgcgagcagcggcggctcttggtcctcggttgaacgcaaggctgagcacgccgaccgcaagcgcggttacaacagcgacgactccgaccggcccaagcgcggccgtggcgcgggcccgcagccagctcggcgcaagcctccgcagccggcgcaccctcgccgttaaaaaaaaaacgcacagccttttaaaatacgtcgtggaaaggggaagacgaaggcatgctg

SEQ ID NO: 13101 - DNA, 2836 bp, Oryza sativa
  ref <308>: DATABASE ACCESSION NUMBER: AK110449
  ref <309>: DATABASE ENTRY DATE: 2001-12-06
gtgctcgatcgcattgcaacaccaagaaagctacagcctcgaatcgaatatggcgtcgccggacacaggaacgacgccgccggcgacggctgatcagcagccgccgaagccgccatcatgggagtaccagctgagggagtacctcctgctgctgagctcggtggtggccatcgcgacgtactccgccggcctggcgccgccgggcggggtgcggcagaaggacgccggcggcggcgggcagtacaaggccggcgacccgacgctccaggacatcgcctccgccggcggcggcgcggcgcacgcgcggtacctcgcgttctactactgcaacgcgaccgccttcgcggcgtcgctggtggtgaacctcctgctcctcgtcctcgaggaggcgagcgctgtggggctcgccatgctccgcacggtcatggtgctcgacgtcctcgcgctcatggcggcctacgccgccggcagctgccgggacctgcccagcaccgtctacgtctccaccctcgtggtcgccctctccacctacctcgccatcaggatcatctaccagaccggaggaaatccattaatatcggcgacgaccaccaccaccacctcgcccgccgccgccgccgccgccgccggcgacgacgacgacaaccagctgcgcaaggtgctgatgctgctggcgacgttcgcgacggagatcacgtacacggcggggctgggcccgccgggcgggttccaggacgacgggggcccgacgctgcggtcggccgggcgcgggcagtcggcgcggctggcgaccttcttctactgcaacacggcggcgttcgtggcgtcgctgtccatcgtcgtgccgctgctgagcagcaggctgcagaggatgcacctcgagctgtacccgcccaccctcgccgcgctgctcggcctcatgggcgcgtacaccgccgggagctccagggatctcaggacgatcgcctacgtcgtcgccctggtcgccgcggtgcttgcgtatatcctcctcgccatggcgattgctctgaagaagaagaagcacgacgtcgacctcgccggtggggtagaagattcagagacagctaggcctcctaggaatgaaaaagatgggcaattagaaggtgaaaaggggagcaaaaataatgaaccaatgaaggataacgattttgtactactgcttgccactctcgcggccagcatcacataccaagctgggttggaccctccaggaggcgtctggtcagaggatgacaagctctacgggcgtaaagctggtgacccaatactcttatccacgcatgttgaacgctacaaggcgttcttctactgcaattcaactgcgtttgcagcatccttggttgtcatcctaatggtccagagtaagattgttaagggcaaagcactggtgatagcaacgatgatactggacctgtttggcctcattggagcatacgccgcagggagttgccgagatgtgagcacatccatctacgtcattgccctagctggagctgtcctggtctatgtggtgatccatgttgtgttctggcctgacgattgttacgtgagcaatcagaaggacaaggaggtagagaagcggagggagcggcttctccttctcgcgatcctagtggccaccattgcccaccaggctgggctaaccccaccaggtggcttttgggacaaagacgatggcgaatccggccaccatgcaggtgtccctgtcctcctcgacaactacccaagaagatatcatgcattcttctactgcaatgcaacagccttcatggcgtccgttgcactcatcatcttgctcgtcaaccctaagctgtacaagctagggataaggtgttatgcgctatacgtgtgcatgatggttggcatgtttggactcatgggggcctacgctgctggtagtgcccggaaagtgcggacatctatccacgtctttgtgttagtcggtgtggtgattgccttccttctcgtgcaactcgtatatttcaacattcaggcagtatggaagcagctccttgtgttcctcaacgtcaagaaggagcctacctctaattcagattcagcaaacacaacaaatgggtcatcatctgattcaaaacataacattgcttccaacactgaagaggagtccaaaaagaaagagtgcctgatgacacttgccatcctggctgcaagcgtcacataccaggccggcctaaacccgccgggtagcatctggcaggatggagggaatgtgggtaaccccgtgatgcgtgacaacaactaccctcggtacaacgcgttcttctactgcaactctacatcctttatggcatccattattgtcatcatcctgctgctacagcagtatcaaaagaagtatggtggtttcctgctctatgccatgaatatggtcatcgtggtcgatctgctcggcctccttggggcttacgcggccggcagctgcagagactgggagacgtctgggtatgtcatcgctctggctgttgttgtgcttgcctgcatcatgatccacttcatgttgttgtaccataatggaaggtccaaaggaagggtgggaggagtccaagagattaacacacttccggtcaaccatagttaaaaaaattgagctagagtgcatatatcatatatacttgtgttcatttgatttataccatcacatggttgttctatgaatccagtagatcttccttgttttccatctttaagatattgtcccgtgcttatgtatagaagttaatttgtagttagtggtgtgccaataagtttggtcagctactttaagctatataatgaaatggatttgctaaactac

SEQ ID NO: 13102 - DNA, 2802 bp, Oryza sativa
  ref <308>: DATABASE ACCESSION NUMBER: AK110450
  ref <309>: DATABASE ENTRY DATE: 2001-12-06
aagcgaaaaaccgagtttgtatactcgataaattaagcacgagggatgaaagccgtgcttgtggttgcgctgctcgttgtggcggcgttcgcggcggaggctgaggtggctgtggaggcggagaagccgaagcgcgctctccaccgcccgcgcatcatcggcgtcgtcccgggccgcggctcgcagacgctgaaggtcgtgattgttccgaaaggggacccgcgcgcgcgctacgccgcgccgaacccgttcctcccgcaatcgcccgcgtcgtcgatgccggtgctgcgcgcttcgggtccgatgacgtccattacggtgtcgcagctgctcggctgcatgcccgggctgtcgtccaccaaagccaacaccgtgctgccgttcatgaacagcgccatgcaggaggctgaggtgaacacgtgctcgcgcacggcagcgttcctcgcgcagttgggccacgaatcgggctctctcgtgtacatggaagagctcgcgtccggtgcagcgtatgagggccgccgcgatttgggcaacacgcagcccggcgatggcaaacgcttcaaaggccgcggcccgatccaactgacgggtcgcgccaactacgtggcggcgggccaggcgctggggctggatttggtttcgaacccgacgatcgttgcgacgaacgccgtcggcttccgcacgtccgcatagttctggaagtcccacggcctcaacgcgttggcggatcagaacgcgcagaccgccttcaactcgatcacgcgcacgatcaacggcggcaccaacggcgccgccgaccgcaacatgcgatggggcaagtgcaagatcgcgctcgcgtgcggctcgtccacgcccgcggttgaccccttcgcgcagtgcaaagccaaaggcggcaactgccagaccacgacctgcggcggcacggtgcagcgcggtctgtgtggctccggcgcggagacgtgctgtttgccgaagaccacccctacggcggacccgttcccgggctgcacggcgaagggcggtaagtgccagacgtcgacctgttcgggcactgtggtgcgtggcctgtgcggcgccggcgctgagacgtgttgtgtcccgaaggtgctgcaggccgcggccccgaacccggccttccagccgtgtgtcgacatcaaaggcacgtgccagaccacgccctgcacgggcgttcaggtgcgcaacaaatgcggccccggcgctccggtgtgttgcgtgccgccgggcgcgctgccgccggcgccgaccatcggcgctctcggcgttgacgtgtcgcaaccgctgaagtcgtccactgccacgtgtctgaagagcaaccactacgcgtgggtgagcatccgcgccggtcgctcgaacggcgctgtggacgtgaatgcccccgcgtcgctgcgtgtggccgccgccgcgggctacggcccgtcgcagctgtcagtttacattttcccgatgtctgacaccgccgactcggcgtccggcggccgtcaggtgacggcgatgtggaactccctggcgtctgtgaaggacctgttcggcacgatttggatcgacattcaggcagcaaaatggcgcacgaccggtcagaaccgcctcttcttcgagtcgatggtggcggcgtgtaaggcgacgggcaagacgtgcggcgtctacacgtccaagacgttttggacgcagattatgggatcaacctacaccggcggttcgtcgctgccgctgtggtacccgcactaccagtcgccggcgcagcaggcgatgacggacttcagcgcctttggcggttggacgcagccgtgggcgaagcaatacaaagagacgacgacggtgtgcggcatcggcgctgacatcaacgtcatgaacgccgcgtggaaggcgcctgccggcgcggtgctgcagtcggcggcgccgtcgagcccgtcgcgcggagtggttctgaaagcctccgcgccgcccgcgtcgtcgtccattacggcggcgcagctgcgtagctgcatgcccggtctgtctgcgtcaaaggccaacaccgtgctgccgttcatcaacgccgcgcaggccggcgccggcatcaacacgtgcaagcgcaaggccgcgtggctcgcgcagttgggtcacgaatccggttcgctcgtgtacatgcaggagctcgcgtcgggtgcggcgtatgagggccgccgcgatttgggcaacacccagcgcggcgatggcaaacgcttcaaaggccgcggcccgatccaactgaccggtcgcgccaactacgccgccgccggccgtgcgctggggctggatctgattaagaacccgacctcagtggccacgaactcggtcagtttccgcacgtccgcctggtactggacgacgcacggcctgaacgcgttggcggatcagggcacgcaggccgccttcacgtccattacgaagaagatcaatggcggcaccaaaggcgcggcggaccgcaactcgcgctgggcaaagtgcaagaaggtgttgggctgttagaggccggctcaagtgcgcggcgttccgcgattcgcccgttatcccgcgccacacagcaccaccgcgggcgacgcgtcgcgctcgttctaaccacagaacggcgcgaaccttaggcatatctctccgtttcgccatccaccgttggtcgtacgcacaacctctgtgcgcgcgaccgggctgttctaagccgccactgcacccgcctgcccacccgccgcgcggctgcagtcatctccgcgctgtgtcgtttgctgcccctttgccgtagcgcgttttgcagacaccattttcacg

SEQ ID NO: 13103 - DNA, 2345 bp, Oryza sativa
  ref <308>: DATABASE ACCESSION NUMBER: AK110451
  ref <309>: DATABASE ENTRY DATE: 2001-12-06
aagcgaaaaaccgagtttgtatactcgataaattaagggccgcgcgatggggccgaagacggcggcgcagctccgcaaagccaaagcggcgaaagcaaaggccgcgaccgcggcactggactttggcggaggtgtcggtgcagcaactaccggtggcactggctctgcaccggcggccggcgcgggcggtggaaaggcgccgaagttctatgcgtcgcttcagcgcgcgctgtatgcgcacgccgctccggtgctgtggggtctgcccactgttcggctgccgcgcgagctcgtgcggctgtgcatcgaatacatcgcgtgtgagcagttgcacgcgtttgtgcacgccgtggagcggcgtgacggcgacccacagcccgacaccgacccccgtgacgcagacgcgtgtgccggtggcgtgggccacacaccctccacgtggtacggcgttgcacgcgcagatcacgtcgcgcgcgcggccggtctcgggccgccgaccgccgcgcaacagcagcggcagcagcaacagcagcagcaggccgctgtggctggcagtgcgcgtgccggcgcgggaggagcaccggtggacgctgtgcggttcggctccgaagcggtactgaatcgcgtcgcgtcatacggatggtacagccccggccccagcgacccggtgctgatgcgcgcagagcagcgggccaacccgccatcgctgttgggtctcatcggatgcggcatcaccgggcagctgtacgtcgtcacgacttacgccgtgtgtgtgtacgacgcgcagcgctccgagtgggtgctgcagcctccaccgccgccgccttcgccgcggccggcagcagccgatgccaaaggccctgcagcggctgcggccgcatcgggcccggtaccggtgctgtccggcgacgccctgcgccgtggcaatcgcgatgcagcggctgcagcaccgatcaagcccgatgcgcgggagcgtctgaagatcgtgcactatccgctgctgaagtcgcaccggccgcgcggcacagcaggcgtgtgtttggtggagaacgaattcgaacgcgccatctacgtcgtcggcggagacatggcgtacgtcgagcgcttcgatttggccgccgccgcgtgcagcggcatgtcacagctaccggttgtgcggtcgcatttgcgtgccgtcggcatcggcgcgcggctgttcgcgctcggcggcgcgctggagctggaccataccgacgccgttaacacgtgctacgcgctggacctgagggcggcggtgccggtgcggcggccaagcgcgcgtggaagcccgccgcgcccatggccttccgccgccgcgaattcggcgccgcggcgtaccacagcgccagcgcgagtgcgcgcgaccggcgtcgcggcgcacagccggacagcatcgtcgtgtgcggcggcaggggcaaaggcttgtacacagccgatgccgacgacgcgattgcggcgtatgcgcacggcacggatatggtgtcgcacgcgtgtgagcgatatgacgtggcgtccgacacgtggcacccgctaccgccgctcaatgtcgcgcgcgatcatgacccgtcgtgtgtcgtgttgggccgtgcggtgttcgtgtttggcggacgcgtagacacgtaccggcccgatgcgccgccgtggatgcgcgccgcatccgccgtgcgcgcgctcgcagcggttgatgagaagagcgacgacccgctgagggcgcaacacgcgcgcgctgtcgccgcagcgctggacctgcgcgatgccgtggcagaggctgacgcaaaggaggccgcagcgtcgcacgccgcgcgcgcggcgggcaaagtgctggtaccggccgccaccatctcgcagctgctcagtgacacgcctcatgtcattgatatgccgcgcccggtccgtcctgccggcgctgctgccgccgcggctgtgccggctgtaccgccgccaaccgcagtgcacaagacaatgccctctgcggccgatggcagcgctgcggcgtcatcgccctgtcagcccgacgacgagtccgacagcgatttggacgccgctccggctctggtggacgcgtggggtgcggaccacacggctgcagcggcaaagtctgtgccgcctaagccgcggcccgtcaccggattcgatatcgagcggttggacgaagtcgcgtggcggtgggtgccagtgccgggtgtgcacacgctcggtcgcagcactgtgctgctcgtttaggcgcacatctgctcgttcttgccgccggtttcgtctcactgtcacttcacctagcagttgtcgcactactgttgtgccgcaccgaattcctttcccaaaaaaag

SEQ ID NO: 13104 - DNA, 2973 bp, Oryza sativa
  ref <308>: DATABASE ACCESSION NUMBER: AK110452
  ref <309>: DATABASE ENTRY DATE: 2001-12-06
tgcaatatcatgacacggtggctccgaaaaaacaacaacaatcaactcctgatcccatcagtagcaatcctaccagtggttacagtagcggtactcatggcagtggcagtagcagcagtggtggtggcagcaggagtggcagtggcagtggcagtggcagtggcagtggcagtcggggcagtgccaacaacaacaatacggcgagtagtagtacaagtagtagtgccgatcaacatttcacagtgcgcagtcaatcgtcagaatccatttcttctggagcaggatctgattcctcgacttctgaaggcatcacgcccactaactccttcgacctagaagtggcggaggtgcgacgaagcttcaaacaagcgctccgcaagaagaatttgggtcaaatgaagaactgcgtgctggagctgagcgagctgagtaagctgcctgaagtgaagggcaaccccgacttgcattcatcgatcaaaaacctgaaagtgcaactgcgggcgcagaccgaccgcgtgcaagctgaggtgcagcgctccaaacgcaagtccgagtttggttcatatcggcttggcagctctaaaatccatcctgaagaggcctcggagacactgggggccagaacgtctcgcatcgtcaaatcagatcttgtcttccccatccttgaaagtcttcgtctcaccaactctatcccttctccaccctcatctccctcaacccttgctttctcctctcctttgtcgacaggagcagcaggatcatcaggaggagtcggaggaggaggagtctcaccatcaggaggaggacttggaggagcgggaggaggaggcaatcacagtggcctctgtacttttgatcacgtgttgcgccaacatggagcctcttttttactgcagagcatagattcgtttacagcctggttcactttcatcaaagagaccctgttcaaaatcaagccgcgcacaacgggcggcgagtacgaccccagatcactgctggcttgcttttgctacgcctgcgagaacttgctgtcgctgtacggccacagcttgattccctttctgaccgacaagatgaaaacggacctttcctttctggtctttgcctacaacatcaaagcagagttcggccccaaacagaaggatcacatcttatcctgcatggcctttttccgcaagatgctcgccgaagtgcggcaggcgctggccagccattaccaacacatccaagaccagacccgcacgctgctgatcctcatccgcaagtccattcccggcctcacactgcgcgtgcaggaggacgtcaatctgggcgactgctcctcgtcggaagaccttttcaactacctcaacacgatgttcaatcctggcgacggcagcagtgatgcggtgagctcggagtacatcctctatttcttggactggctggtgtggcagcagtacctctattcggtgcccgccacagggcccatttgctggcctggaccgggcagcagtggccgccacttccgctttgcttctgtggagaacaatcctttggtgccttctgccatttcgctgtcctgcttgctcgacgatatgcgccgtgacctggacctcaatggacgggaagagtgggtgctgggccaccgcatcgtccgttatttgggccactacccctacgccaagggctgggagcacctgattctgtactccctgttggagcagcagttcctcgtgggctcctcagcgcttgatcctcacgaaagcaccttggcgctggaacaagccttctcgccgacggtgcggcagctgggctccaagacgatcctgctgaagagcaactacctgtggcccgagaagtacttgttccacgcctttttgaaatgtggcaaacaggaactggagtgtcgcaactgcagcaagcaatgcgaaattgccaccacggcacccgacttgacactgtcggctgtcgattcgtttgtgcgcttggaggatccggatgccttgatttcctcggcggtggagttggggcgaggtgcctttggcattgtgtatcggacgcagtatcaagggcgcgctgtggccctcaaagtggcactgcccagcgagaactccatcgccgtcctgtactcggagttccgcagcgagttgctgctgggggtgcggctgcgcaactgcccctatccggtcaccgtcatcgccatctcgctgcagccgctgtgccaagtgatcgagctgatggacttgggcgacctgttcgccttcatccacaaggagccgtcaccggccttccagacgcgactgtcgctggccttgaccatcggcaaagcgctcaagttcctgcacacctgcaacccgcccattctgcacttggacgtcaaaacccccaacatcctgctcaaatcagggcccaacaacaaactgatcgccaaactgggcgactttggcctgtcacgggcgctgcggctgactcgccacatccagctcgaaaaaagcgacaactgcatctggctgggcgtcgagattctgatgggcgaaagcgccaccaccaaaaccgacatcttcgcttacggcattgtcctgtgggagctgctgttctggggcgatccctaccctgaccacacctggatgagtcagctggaggtcgacatcaaggctggcctgcgccctgtcatcccgcccgactcgcgccagatcttccccgaatacatcatcctcatggaaaaatgctgggaagccttgccggccgagcgtcccgacatctgcctcgtcgtcagcgaactcaaaaaaatccaagacggcatttcgcgtaatctgactgttcccatcaagcctgaccctcccttctgtagcgaaccacttcctcgtggtatccgtcctctcagtcgtattgcttgattctttattgtctttttccaaatcaaacccaagttaatttaaatggcattctcaattctgtgggatacacccatgaataaagcaagcaatcaag

SEQ ID NO: 13105 - DNA, 2368 bp, Oryza sativa
  ref <308>: DATABASE ACCESSION NUMBER: AK110453
  ref <309>: DATABASE ENTRY DATE: 2001-12-06
aatcaaacatagcagcttagctcactttcagttcgttcgatctcgcttccatttcttcgccatttgagctttcttggaggcgtttgatcgatcaggatgatcgcacgcgataccgttctgcgtttcgccgtgcgattgttcgtcgtgatcgtcgtctcgtctcgttcttcctcggccgacgacggcggcggcgacggcggcgtcgacttcatctaccaaggtttccagcacgcggcgaacctgaccatggacgggtcggcgaaggtgctgcacggcggcgcgctccagctcaccaacgacagcaaccgcctcgtcggccacgcgttccacgccgcgccggtgcggtttctcgacgacggcgccggcggcggcgggggaggagtggtgttgtcgttcagcacggcgttcgtcctcgacatcgtcaccgtcgggagcggcggcggccacggcctcgcgttcgtggtggcgccgtccgccacgctccccggcgcgtccccggagatctacctcggcgtcctcgggccccgcaccaacgggaacgcgtccgaccacgtctccgccgtcgagttcgacacggtgatggacctcgagatgaacgacaccaacggcaaccacgtcggcgtcgacgtgaacagcctcgtgtcggtcgtgtcggagccggtggcgtactacgccggcgacgggagcaccaaggtgcccgtgcagctggagagcgcgcagcaaatccaggcgtggatagactacgacggcggcagcagcatcctcaacgtcaccgtcgcgccggcgacggtgacggagcggcctcgccggccgctcatctccacgaagctcgacctcctgccgatcttcaaggagaacatgtacgttgggctctcgtcggcgacggggaagctggcgagctcgcactacatcttggcatggagcttccggacgaacggcgtcgcgcaatccatcgatctccggaggctgcccaaagtcccgaggcagagctcgccgccgcccaagctgctcatcatcaagttcgccgcggtggcctgtgcaggaacactcaccctgatcgccgcggcgatggtcgccgtgctctggctccggcgaagggcggcgctcgccgacacgctggaggagtgggagctggagcaccctcagaggatcccgtacaaggagctctacaaggcgaccaaggggttcaaggagagcgagctccttggcgccggcggcttcggccaggtgtacagaggcgtcctccggcgccgctccggcgaggcggtggcgatcaagcggatctcgaacgggacacggcaagggatgagggagttcgtcgccgaggtcgccagcctcgggcggatgcgccaccgcaacctggtcgagctgcgcgggtggtgctagcacgaccaggacctgctcctcgtctacgagttcatgcccggcggcagcctcgatgcgcggctgttcggcacggcggcgtcggcggcggcggcggagggggtgaaagcgccaccgccgccgccgcttctgacgtgggcgcagcggttcgccatcctcaggggcgtcgcccatggcctgctctacctgcacgaggagtgggagcacgtggtggtgcaccgcgacgtgaaggcgaacaacgtgctcctcggcgccggcgacacgggggccgcccggctcggcgacttcggcctcgcgaggctctacgagcacggcgcgacgccggcgacgacgcgcgtggccggcacgctgggctacatggcgcccgagctcacgttcaccagccgcgccacgacggccaccgacgtgttctccttcggcgcgctgctcctcgaggtggcgtgcgggcgccgcccgatcgagccggcggcggcgggggaggcggacggcgacgtgctcctggtgcggtgggtgcgagaccgcgcgctcgacggcgacggcggcggcggcgacgtgctgcgagccgtggacccgaggctggaggggtgctacgacgaggaggaggcgaggctggtgctgtggctcgggctgatgtgcagccaggcgaggccggaggcgaggcccagcatgaggcaggtgtgccggtatctcgacggcgaggagatgctgcaggaggacgccacgccggcggcgatcttctccggcgccgactcgtccgatctcttcggtggctcgttcgtcgtgtccatgacgtcatcctccgccggcggcaccatgtcggccagctcgctgcaaggcggccggtgaactatagaagtatactgtataactatactgtactgaatatgagtgtgttgtgtgtacagtagtgattgctcaaacaaaattcagagaagtgatatggatgtagcccaaacaaaagaatctgaatttttgtctactcctc

SEQ ID NO: 13106 - DNA, 3803 bp, Oryza sativa
  ref <308>: DATABASE ACCESSION NUMBER: AK110454
  ref <309>: DATABASE ENTRY DATE: 2001-12-06
tactttgaaaccattggtcccgttcaagatcacattcccatacgacactttcttggaagcaggcaagcgttttacttaccttgccactcttgccgatcatacgcctctgcctgcatggatcaagtttgatgggccatcgattagtttctttggtaccacgccgccaacagactcaccccagtccatcgatatagcccttattgcgagcgtggacccaggatttgctacgtcacagctgtctttcacgatcgtgataagcaatcatgtgcttgcattcgacccctcatcccaggacgtcaatataacaaaaggctccgacattcgtatctgcaatctggacaagcaattaaaactggataatgcgccaataacgagcgatagactgcagtcaatgaaagccgagttgccgcaatggctcaagttcgacaataaaaccttggagatatcggggaaagcaccttcgaatgtcgctctccaaaacgtcaccgtcagggcgaaggatttgtttggcaacgaagccgtgcaaagcatacgtcttgtgattgaatctgagctgttcatcggcggaatcggaagactacatatccgggttggagataagtttgagtatcagataccaagccctattttcaccagcgatgatgagatcgtcacggccgattttggagagctctcgaaatacctcacgttcgaccctgaaaactttaggatctctggcaccgtacctgacacatttccagcgcagacagtgaattgtgttctgacagcagagtcaagcgaccggagtactactgatgcccaaagttttcaaattgatgttgccaatgccaaactcagcgccggaggaagcacgtcaaatgatctcgagaacggctctaatgaagctacgcatgatacgcatgatacttcaaagcgtcatcgagacgctgtcatagctggctcagttataggatcacttggttgtgccgctttgctgctcggattgatcttcttactgtgtcgaagaaggaagaattcgaaaagctatatcaataaaaggccaccgcgaagtcctaacaaatcagacatatcgcgtcctacattcataccgtatggctggcctgacatccaagaccctgtagatgagaaagaagatgcgcggaaggtcgatcatgaagacgaagatcccttcgtagacaagactccggagaatccaccaaagctggaccttgctcttagtcgtgttcccacagataccacttctttaggagagtctatcggagacgcagacacgagaatcctggacacattcgaagactcatcttggggtatccataacgatatagcaccttcccagcatcctcatgactcaatgaagatagccactgagctcgccaaacggtcgtcacagaaatcagtacattcgtaccgcaggcacaaaagacagaccacaacagtgtatcaggatcagattcatcggagcactggcctgcctgtcaatcgacgtatcgtcggtgtggtcaatggacatggttctgctccttctcggaatgacacgaaccccacccgatctggacggcgacctctgagtgaaagctcagtgaccaccacaggacgtacaagtgtttgctctacagccccttcagcgttcccacagcccccgaaagcacggaaacatactacaatggtgacaacgcccgctgaagaacgccgtagcatacgcataataccaacctcaatacggggcagtttgagagactcccgcacgatgcacgaaagacgaaattcttacattcgaaacagggcgtccaccccttcaccctttttcacctcctatccacatgcatgttcctcgaactatagttctcctcctgctttcatcagcgaagtgcaacccaaagacaacagcgatccctcgctcacctcacgggggatgatagtaagaccggatgatacaattgtggaggttcaagaacaggaagtagcgacagggcaagtatcaagcaagtctcctcctgaaagtccccaatcagatttccccgggagtcttcgcaagaatcgaactgcgaggtcgctcgctgcaacgcatgcaaagtcggaccgcgttgcaaaaagatatgcaaggccctcatcacgaacaggcttaggccgacgtgctagtacacggagtagccttcgtgcgtatgagctgaaagcctcattgaatgaccttaccggcacgaaagtgtttgaagatgacgagatgagtgacagcgtctactctgacgaagagagagacatcgaggaagcagagaaccgaactacaatgaaaccagaccatttcacactaccaccactggatcttgtcagagtggacaccatgcgaaacaagaagagagacagcaacaccgagaaacgcaagtcaaagcgagatagcaagagcaagaaagaattgaaaaggaccagtgagcgtgaccccacaccctactatcgtggattcgaccatgagcatggaggaaaagagaatgcgccttcatcataccacttcgggaagaggacatcgccaatacgcacacagtctacacctaatgcaaaagtgctcgcagagtcggaggccaacaagtcgattatgactcgaccaagacccaagactgatgtgcacagaacgactcgccagagcgcagatcgtgtttctactcatcaagacaccaacaaagtcaggcactctcgcagatcaattcactcgcgctccggttctcgcacatccgctccagccctgaagaagcgcactcactctcatactcaatcctctgcctacccttatttcgacgccgcagcggtcgaatcgaccaccagcctaagtcgccacaatcggtccagcctcgccgatgcagtcacaaccgctgccgacgccgtcacgatctcggaaagtccaaaaggaggcctgtccaatacagtctccccgtccgcctcgcgctcttcctgcattactcgcgagcgcgacttatccggtaatctcaccttctacggcggccttgaagatgccaccatcgaagaactgggcagcagcagcatcggcgtccgcacctcgaacggacgcatctcattcgcagcccgccaccaatcgcccctcgcgcctttccacctatcttcacagtcgatcaccaagatccacattccagcacccacgccctcgccccagccatctacccgacgtgtgcccacgacaactgctgtgaaagagaaagagaaggagaaagagaagcacggggtcaaggggacacctcgcatcccacccaagagcgaacgcagaggcacagtcataaaatctccacagcgccccccttccgccgtcggcatcgcgctcttccccagcgaaggtcccagcacgcccgccgaagccgcacggcgcgagcgtgagacaagacctgggccaagaccccttcaagctggagagtcggacatgagcatgaccacaaacatgaccgtgaacacaaaggtagaccaacgggatgtcgaggcgcagagagaggacgaaaaagggacgcctgggcggggcacgtggggggcgctcaaggggtattttggacgcggacgaagttgggccagcggggagttttgggagaggcagggtcgagacgataaggttttcatttaggtgacttcagagaaagggaataatatgtcgcaccggaagagtacgtttatgttgtggatgacggatggatataagaggaaggaggagtgacggaatgagagagagtatatcagggatatcattagccttttttgacttgccttttgatctagatagcaagtgatgtagattgagatttcacgttttt

SEQ ID NO: 13107 - DNA, 2890 bp, Oryza sativa
  ref <308>: DATABASE ACCESSION NUMBER: AK110455
  ref <309>: DATABASE ENTRY DATE: 2001-12-06
aactaacgctaaaaaagtaacagtttctgtactttattgagaggtgtcgcacatccaaatgtcctatgcctctccatctttgagtgccaggagccctcgtcaaacgcagcagcagcagcagatgcccgttgtcctgaccgccgaggacctgcactcgatgcgcacaggaagcatctgcagcagcggtcagttttcccagcactcgccacgctacgtaccgccaccccttccatcagatcccgtcgagcgcgcacgtgtcaagggagagctggctgcggacgcgaacaagcttcctcggttacccctgctcaggcgggagtgtgtgtaccaaacggacaactaccgccgtctcgtcctcgcgaagcgtgccgcactgcatcgtgaagaggcgttgcgaatcgcggagaaggcccttgggcccgaagacgcgcggctgcgggaggcacgcaacagcgaccgcaaggaacagcaggagcgcgaagagcgacaaaagatgtggctcaagatcatggccgccgtaggcttcgccgaggtgcaagaaaaggcagcgcagctggacgccatggcaaagttgaaaaagcttctcacgcctgtcgtgaggcgtgctcgggagcgcattcggcttcgccgccggaatcagttggtgctggctatctgcgagcgcgacatgcagaggccaacctttgaagtcgtcgcggcgtccacgcagctggtgtcctggtggagcaagagtgcgctcggtgcactgcgagaagcactcgttcctggcgtcgcgctgggcgacatgctcgtggtgccacccggcggtgtcggcaatgcgggactcttcatcatcgactcaggggcagtgcacgtcgtcctcaaccgtgatcccaacactatgccgccaccgcagagtgcggccctcctcaccgcggagcgccagcgcatgatgttccctcttcacaagcagttcggcctcatcgcaccagacgccgtgcgcatcgacgtgatcagcactcgcggcacggccttcggtgactacgggtactgcctcgatgcccctgctgctgtcgggtaccgcgcggcgagcggacgcttcctttattggacatgcccgcacgacgagttccacgacctgcttacccgtgaggcggccatgaacccaaccgccgcgaaggcggccatgcgatccattcgcgcgacgatgatcccgaagctctatccgcccacctaccagtcaatgcagaattgcgggctcaacggaatcatcagccagttcgacgaggtcgacgctgaggcgctgcgtgcgctgttgacgcccctctccgtcgagcgagggcacgtgttctgggacgtgggggacgacccgtcgtccttcttcctcgtggcgaacggttccgtcgtagtccaaaccgccgccgccgcttccaagcgatcagcaacggcggcggcgccatccctaatgtccaccgtcaatggtcttgccgccgtcggattggaggacggcgatgacgacctctcccgccacctcagtccgtcatcgtcggcggcagcgaacggcactgtgctcacccgtcggccgtggtcggcggtaggctttgagggcgcggttgcactcgacactcgcagcacacgcgtcgtcgcggccgagatgacagacgtgtggacgtgcgactcgcggcgtcttctggacatgctactgtcgcgcgcgagtatcttcctgcgcgtgctggacgacgtggagcgcgtcaagacggagcgtatgcagaggtccgccctagtggacgcgctcgctctcgagcccctcttcaaggttgtgcctcgaggcaacctcgataaaatcgccgcgaccgccacgccgcgttggctgcgctgtcacgaaagcgtgcggccgctgcacggcccgccgtcgtcgactctcttctacacgacccgaggtacgtgcatgataaagaccgtcgtcttcgaggatggtggcgacgcgggggcaccggtcggggcgggcagtggtgggttgggtgccggcgagggtaaggcagcccagggaggccgaggtgcctctccgcgtgcaggggcgtcgcacagctctgcatacgctggagacacgcaccacctcggcaagcagttccgagcgccggccgcgatcaacatcccacaggccctcctacccaacgtcaacgcttgtggcccactgcaagcgtcgctcattgtagggaccacgccactggagctgtgggagctgagggctcctgtggtactcgaggcgttggccgcgccagccggctcgccgagcggtaggaaccaaagccggtccccctcgcccacggccacagtggcgacagcatcgcgactaccaaccgccaccgctgcagccagcggagcgtcgacggcccgctccgctgcctccaccgcatcgtcggtgcgtcctgccacgcgcgagtcgatcaagtcggttggcggcagttcatcgagccgcattggaggaaagccctctgtacaagcgcctgcaccgccgccacccaagacgacgacgacggcgacgggaagcccacggcacggacgaaccgctgcggcgaacggcggcgttggcttgacaggggcaggactggtcgcggttgtgcttgagcgagccctcaaggcaatcaacgataaacgtgacgacgtgctcgagctggcgtcgaccgagcgctcatacgaaagcattcgtctggcgcttgaagcagaggcttcgtcgaacgcggcggcagcgtcgcgtaacgagatggagcggtcacgtctgcgtgaaggcatcgccgactactgacgtcgtcagctcggctttttgcgccgactcgccctttcacacactcactgtatctaacagcagaaagcccttccatccgtttcctccaggacggggccctccttc

SEQ ID NO: 13108 - DNA, 2806 bp, Oryza sativa
  ref <308>: DATABASE ACCESSION NUMBER: AK110456
  ref <309>: DATABASE ENTRY DATE: 2001-12-06
gatgaaccggaagcctggttacggtgccgaactgcgcgctaacctagaacccacaaagggtgttggtcgattaagacagcaggacggtggtcatggaagtcgaaatccgctaaggagtgtgtaacaactcacctgccgaatcaactagccccgaaaatggatggcgctgaagcgcgcgacccacaccaggccatctgggcgagcgccatgccccgatgagtaggagggcgcggcggccgccgcaaaacccggggcgcgagcccgggcggagcggccgtcggcgcagatcttggtggtagtagcaaatattcaaatgagaactttgaaggccgaagaggagaaaggttccatgtgaacggcacttgcacatgggtaagccgatcctaagggacggggtaaccccggcagagagcgcgaccacgcgcgtgccccgaaagggaatcgggttaagatttcccgagccgggacgcggcggttgacggcgacgttaggaagtccggagacgccggcgggggcctcgggaagagttatcttttctgcttaacggcccgccaaccctggaaacggttcagccggaggtagggtccagcggccggaagagcaccgcacgtcgcgcggtgtccggtgcgcccccggcggcccttgaaaatccggaggaccgagtaccgtccacgcccggtcgtactcataaccgcatcaggtctccaaggtgaacagcctctggccaatggaacaatgtaggcaagggaagtcggcaaaacggatccgtaacttcgggaaaaggattggctctgagggctgggctcgggggtcccggccccgaacccgtcggctgccggcggactgctcgagctgctcgcgcggcgagagcgggccgccgcgtgccggccgggggacggaccgggaacggccccctcgggggccttccccgggcgtcgaacagccgactcagaactggtacggacaaggggaatccgactgtttaattaaaacaaagcattgcgatggtcctcgcggatgctgacgcaatgtgatttctgcccagtgctctgaatgtcaaagtgaagaaattcaaccaagcgcgggtaaacggcgggagtaactatgactctcttaaggtagccaaatgcctcgtcatctaattagtgacgcgcatgagtggattaacgagattcccactgtccctgtctaacaaaagggcttttctagcaagttactacgtcattcgagtacgcgcggacagcttacggccttgctacactggcagggcgactttcactccaccaccgtggcgtcgctaagcaaccttgtcgacgaattgaagaattccttcaacttcttcaactcccactcactactcagctcaacgacgccctcatcgatacacgataaagagaatcagcccacagacgcgctctcaaggtttgtgcgattcttgcaacatccacgtctccacgacatcaccgagtttctcacgaacccccacctcgacgatccaacctaccttactacccttgctatcgcactagcatccgtcgtcgtaaccatgtcctggttctctcgcagcaccggcggaaactggggagggcgcttctcacccttcgggcgaccaggcaactcaccaaatgccggggtcgtcaatgactcggatttctcatacattacgaacgaagatctgcgaaggaacggtcaggcgcaagcgcctgaaatcgtagattgggacgacaagaacccagagcgagagacagacgttctcatcttcaagaatgggcgcacaaactatcccacacacttcccggcgcacagcatacgggatggagatctgaagattggcacggtgcgccaagcggctgcgaagaagctaggcgtcgatgaccatcggcgcatacgcatgttctacaagggcagaaacttgaagcacgatgaacgcaccggacgagaggaaggccttcgcggcgatgggagtggtagtgagattctagtcacagtcggcgagaccccggcaggcggtctggcacccggcgcaggagagacacaacgcgcatacggtagcgaaggtgaggatgaagatgacgacgatgaagatgatgtcgactcgggtgcgaataccacaagcaagaagaagtcccgcaagcgcggcggtaggaagggtaagaagaagaacgcttcatccgcaaacgcatctggcacttcaacgcctggctacaccactgccggcgcgggcgcggaatacctccccatcccctcgcacatcaacgcaaccctgcgcccaacctccgctcctcccttgaataccaaacccgccgaaccccagaccccgatcggcaaactcgatgccatcgctagcaagtttcacaccgaatttgtccccatgtgcgtacagttcatggctggaccaccagaggacaaggcgaagaggacgttcgagtacaagaagctaagtgagactatcttgacacagattatcttcaagctggatggtgtcgagactgagggtgatccagacgcgaggctcaagcgcaaggccctcgtcaaagaggtccagggcatgctaaccaggctggacgaggttggaaaggctggttaagctgtcacaggagatgagagagatgggagcatgggatagaacaggtctgcgcaccattctatgatgtagtgaagcaagaaaccgagttcgctaatggaggcacgaacatgtatggtcaccttgctgtcgctgtacttcctggtcgaaattgcattgaaagatcatgatccaatggacagctctgatgaagggccagcaatcgagtcgcgtaccaatgtc

SEQ ID NO: 13109 - DNA, 3027 bp, Oryza sativa
  ref <308>: DATABASE ACCESSION NUMBER: AK110457
  ref <309>: DATABASE ENTRY DATE: 2001-12-06
tggccgctaccgcgtcgagcgccaaactcaagcagcagttgtcgcgcgctgttgccgcgcgcgacctcgtggcgtgcgctgcgctcatcaaacagaccggcgctctggacgatgccgctgcggcggatgagaagcacgtgagcccgtatgcggccgaactcactgccgccggcgcgtgcgtcgcggagttcagtgccgcgcgtgtggcactgaagcaggcacgtgatgctgacgcgctcagtagggccattgcgcgcgcgcagcagctgcagagcagcaccagcagcgggtctggtggtgcggagttcgacgccgaactgagcgccgcgcagacagctttggcgaagtctgtgagcgaagaactcgacgccgccgttgaagcgcgcgacgcggcgcagctcgaggccgcgctggcggctgccgcccaatgcgggttcgcgcgcagcaaagccgcggccaaagccaaagccgtacagcgcgctgtggcgcgtgaagcggacgtgcgtcagcgcctgcgcgccgcaatcgacgccgccgaactgagccctgcgctggaccgcgcgttggccgacgcagcggacgcaaagatgagcgccgccgatgcgacggtggtgcatgccaaggagctgcgcgccaaactcaaagccgaccgcgcggccgcggccgaagccaaagcggcggaagccaaagccgccgctgcagcgcaggcggcagccgcttccgcagcgctggcagccgcacgggcccgcgctgttgtgccgcaaccggtctcggagcagccagcgacagaggcgaaagcagaagcactcgccccgacgcacggcagcggccagtccatggcggctccgcaaccacagccggagcgcgaacccgttgccgcagtggctgcggcagccgcgcctgctgctgctgctgcggaggtgaagaccgacggcgcggcagcgccggcgtctgacaacggcgcacctgcagagccgcgcgcaaatggtgtcgcgccggtgactccagtgccggagcggaagaagcgttcgcgtcgttcagctgctccaaaggcggccaaatcggcgggtgcgccgccagagactcctccccccgctgcggcgcctgcgaacagcgttgacgcgctcgcgccgctctccgccgccaaactcgaccgcctgttcagcccgggcgtggcgggccgccgggctgtggctccgctgccgctggtgccggcatttggtgccgcgcagcccgccgcagccgatatggtatcgcgtctacctgttctgccggacggcagttccgtggtcatccgcgtgttcggtgtcgtcgcgctcaacgcgccggccactgccggcaacgctctgagcagcgcgtcggggccggcgccggcgccggtgttggacgcacaccactgggcgcagccggcagcgctgaacggcaaagacttgcccgagccgttgcgtcgcattgtgactgactgcccactgcggtcattgcggttcggtggcggcggcgacgaaaagcatcccgacgccgcgctgacgctggccgatccggtgccgctcgcggacggggagctgccagcgccggcgcgcggcctcactctcgcagcgagcagtgtggaggtcactgcagcgggagatcgctttgcgtctatcgaatacgcggcgcgttggtccgccgccgccgcagcgctggaaccactggccgccagcgccggcggcgatgcaaaggcgtcacggcgtgtgttcgagcccgcgcaactgcaggcgtgtttgagccgcgtttggtacgacctgtacgcgcgcgcggagagcaaagctgccgcagagccgggccttcgcgcgtcgctgccgatcggttcgccgctgttcggcggcgcgctcagtggcgcaggcgcagcgcaggccgacttcgtcgcagcgctcgtcaccgtaacggttccagccggttcgtcgcccgccgcgctgttgccctctccgcccgctttcggtgagtcgaaggcgtcggccaccaccagtgcgttgcagcagtgtgtgcagttcggactcgaacgcacggaagcgtttacgcccgctgcactgccgcggccgcacgggctgttggcgtcggcgaccagcagtggcgccgccatcgccctgcgcgtgcccgcagtgcctattatggcagtcaaatccgcgtctgctgcggcgcttgacgcggaggatccgcttctgctcaacgccttccgcctcgcgtgcgtgtcgcatgcggcgtacgcgtcgctggcgcgcgcgccggtggggggagcggcgtcgccgtcggccctgtcaccgctggaccgcagcgcagccgccattcgcgccactgagcgcgctctcatcgatgtgcaggacacgctcgaaccggcgctgtacttcggctcgtctgtgcggctgtcggaggcgctgtcgtcggcgtcgacgcccgcaccgcccggcggcagtgatggccgcaaagccgcgtcggcatcggcgtcggcgtcggcggtgagtatcgacgacgcgtttctgttcgcccagagcgtgtccgcggcgtttgggtcgcagcgtctgaagcgcgcgctgcagtccaaactgcgctttggcttccattcggctgccgccaacggccacggcccggccgcaggcgccggtgccggtgccgtacagtcgcgtcgcagcgacgacggtgacaccggtgcgggcgccggcagcgacctgtcgccgtcgggtctgctcagctccgtgctgcagccactggacaactccagtgtgatgtggcgtctgttcggtctgctgctactgtttgtagtgtgcattaagctcctgttccggcgcgtctaatactgtggcccactccctcgccacccctatgccagccacgcgctcgtcctattcatccgcataacacgctttctttcctccgccgctcccccaccaactgttctcccgccgtccgtaggtctggcctgctgctgctcttgctcgctgcgcgtcgctatatctcatgttctgccgttttggctgccgtatctcgctttcc

SEQ ID NO: 13110 - DNA, 2936 bp, Oryza sativa
  ref <308>: DATABASE ACCESSION NUMBER: AK110458
  ref <309>: DATABASE ENTRY DATE: 2001-12-06
aacgaacgctaaaaaagtaacagtttctgtactttattgccgccttccccagaagcgccttccaacacccactttccctattgtcctcgccggacccacccgcccaccatggctgcacgaaaatccccgcagacccatctccgtcgcgagtcccctcagcccgagggcgcaccgcgaagcgttgccatgtccgagcagctcaagaaaggcacttacgagtgcatgatctgcacggaaggcatccgttctcaagtcgccacctggcactgtcgagagtgctatcaagtgtttcacctcttttgcttgaagaagtggtcaaagagcgaggggtctggcgtcgggaacagcttccgctgcccgagctgccaaacgcactacgataacgcaccgaacaagtactactgcttctgtggaaagcgcgtcgatccgcagccggacgctttcatcacaccccacacgtgcggtgatgtttgcagtcgacgccgcccgcacgggtgccctcacccgtgcgcggccctctgccatccaggcccctgcgtggactgcacgcaggagacggagccgaagccctgcccctgcggcaagtcgacctactcgcaccagtgcggcaagcccgaccccaagttcacctgcgcggaagtgtgcggcaagacgctcaattgcgggacacacacctgcggccgcccgtgccactacgggccttgcggcacctgcgaagtgactctcgcgacggcgtgcaagtgcggcaagagcacccggcaactggtgtgcggttcgccggcctactcgtgtgaggagtgctgcggcaagttgcagcgatgcggagttcacaagtgcaacgtggtgtgccacgcggggagctgcccaccttgcgacgccgaccctgcggtggtgttcacgtgtccctgcgggaagacgatgcttccggagggatgccgcaccgcctgcacggaccccatccccacttgcggtcaggtgtgcgcgcgtgtgcttgggtgtggtcgccactactgcacgcgcctctgtcatgaaggggaatgcggtgcctgcgacgcgcgtatcaacgctcagtgtccgtgtggagccacgcagcggaagcttgcttgtgctgaggccgatgacttccgatgcgaccgcaaatgcaaggcaaggctcgcgtgcggccggcacgagtgctcgaccatctgctgcccgcatcgacgatccgcgaacccggctgatcacatttgcacgcggccgtgcgggaagcaactcgcctgcggccatcgctgcccggatccctgtcatcgcgggaactgtcagccgtgcatcaacattgttacgacggagctctcgtgcgcttgcggcagcgtcgtgttggaaccgccgcagccctgcggcacggcgcctcccgagtgcagccgcccttgccaaatcccgctgccctgcgggcacgccagcgtcgagcactcgtgtcatttcggtgactgccccaagtgcttcgagaaggtggatcgcgcctgcttgggtggccacacaatcatcaagaacgtattgtgctccgggggtgtgctttcatgcggcgcgccgtgcgggaaggacttggcgtgcggacacaagtgcctgcgcaagtgccacggggacgactgtgtggagttggatcgcggtggccgcccgcgcaagtgcgagcagccctgcggcgcgccgctgccgtgcggccacacgtgccgcggaaaatgccatccagagaaggcggagtgcgcgccttgttcaaccaacacgcccgtcctgtgcgagtgcggcgagacgcaaaccaacctcagctgcacggccttcgccgagctcaaggctaacaccccaccaggcgtcgccatcatgaccaagtgctcagccgactgcctctccaagcaacgcctcggcttcttcgccaaccgagcggatggtgccgcgccgaaccgcttcccggaggcggagcaccgcgaccagaagtgttactactcgcgcaatctgtggaccgttgccaaggacacgccggatgtggcgctggaggcggaacggcatcccgtcaatttcgtgcgcgcgcaggagaagatgtcgatgctcccggcgatggcgcgcaacaagcgcgcggtgatccacgagctcgctcagtactttggcatccggacggaggcggtcgaccaagagccgaaccgaacgatttgcttgtggcgaaccccgctcacgcggctgcccatcaagctgctctcgttggcgtcgcatgactcgagcatgaaccccgaccaaatggtgtccaatgtgatgcgtcatggcgctgcggcgtgcatcctcgtcttcgaggctcgccctgaaaccatcagcgagaacaccgtgttcggcattctgcggttcgccgccggcaagttcgtcatcgtcccgccagaggacttccccaacattttcccggaacgagaggtgccgcctcgcgcccaggcgcatctgggcaacgacacggtggcgtacttggccatcttcggtcgtgggacggacgcgcaggaagcgttcaaggcggttcgacagcaggggtgctcaattcttttccacaagtacggtgaagccccgcccccgatgaactttgccgacccgcagctggccgagccgcgctacttcttcaacgaagccacgacgaccacggcggcgctggaggcacaggcagcgaaatcggcgactgtggcagtgccgaaaccgggttcgacgtcatgggcgtccgctgtgcgcaaggagacgtcccgtcagaaggaactcgctaagcccgtcaacgtcgagaccgctaacaagttcgccacactgcgtcgctaagtcatctctccacccactcacgcacattcgttgtctgttttgatcgcgccccaccagcacccccaccagcttaagtgaattgtgtcgacgagcatttgcaccccccacgctaacgcatg

SEQ ID NO: 13111 - DNA, 3160 bp, Oryza sativa
  ref <308>: DATABASE ACCESSION NUMBER: AK110459
  ref <309>: DATABASE ENTRY DATE: 2001-12-06
gtgtcctcaagcctgcgacctggccttgccaatgtgatggctggaacgacgtagccgtgttgtaccattatctgtcgctcctttaccgtggctcgttcagcctgcgcttggttaccatgtttcggtaccgcagatatcgtgtcttcttggtcttcgctgtcatcaccattttcgcgctctataagtttggcaggtccagcacaacatggcgggatgcggcatcgacagcagccgaattgaagaatgaggcagaagacgccttgggttttggtcacaaacctcggcctgcactagcacacgataccaagaagcttgaagtgcacatacccgccgcgagtggctcactttttcttcagacgcctccacctgtcaaggtgttcagcactccttcgcctccaagcccaccgccggcaacacgtccgccccagcagaagccaaccgtcccgacgcccacgcgaccacgaccccacggtagaccgcctccagttggcgcaggatacgacacaattagcatcgcggcgatacactggaccaaattgccggagaattttcctgtccctcctcagtctcttatgaaattacctactggcaagtccaaggctatacctaaaatccaagcaaagttcgcaccggaagatgacattgcgaaagccaaccgactgaataagctaggcacgattaagagtgtattcaggagatcgtgggagggttacaggaaatatgcatgggagcacgatgagttgaagccagcatctggccagttcagagatcccttcgcgaactggaaggctacattggtcgatgcgctggatacattgtggattatgggtttgaaagaggagttcgaagaagctgtcaaggccgtcgaggagatcgactttaccaccacgacacgtgccgacgttccacttttcgaaacaacaattcggtatctgggaggcttgttagcagcatacgacgttagcggtgcgaagtacgacaccttattgaaaaaggcagtggaactggcagaggtgcttatcagcgcgtttgacacgcctaatcgtatgccggaaacgtactactactggagaccgcaattctcttcacagaagcatcgagctccaagtcgcgctgtcctggccgagattggttcactttccatggaattcacgagacttgcccagttgactggagagcacaagtactatgatgcagtcgcacgaattacggaccatcttgaggaatatcaaaataatacacgactccctggcatgtggccaacgcttctggatacttcgggctgtggaaaacctccgattgacttcccaatacaagcaccattgctcgatccagatctgccctccgcggctccagcaggaccctcgcccacgaatttgttgtcaccagagggaaataagtttatccctctgagtaagccagatccggttgtcttcaagcctgcgactggcgtgaaacatttacagaccccatcgcaaaaaacggctccgattcttgccagtccggctgctgattccatgtctgggtccaccggattgtcaccagaaggcaataagttcgtgcctttacaaaagccagatccgatcatgctgaaacctgccaccccaagtgctcctgacataggcgtggtgcgcgactggcaaggcaaaccgctagagagaagacagctcgaggtcgatcctgggccgcaaccgcctgttgcagctcagcgctaggactccagtcccattgccacgaactcgcccatggctgacacgcccagactacccgaatgcgtacctcaaggcttcaaatcgacatctgaatacggtcgtgaagagtacacgctcggaggaatgtcggacagcacgtacgagtatctgccgaaacagtacctactcttgggtggtcaggtcgaaaaatatcggaagatgtacgaagactcggcagatattgtcaagaagcatttgatcttccggccaatgcttcccgacaataatgatgtgctcatgtgtggtaagctcaatgtcccatcattggaccatgacggtaaaattggcgatttgacaggtgagaatgcacatctgacctgtttcgctggcggcatgtttggcatggcggccaagatgttcgatcgtccagaagatcttgagatcgcaaagaagctgactgagggttgtgtgttgagctacagcatgacacctagcggaatcatgccagaatcttttgaagtcttgccctgcgatgatgcgaaagaatgcagctggaacgaaacgctctactgggacatgcttgacccgcaagcagaataccgcgcgactacctacaaggaacagattcagctatatcggtcgcagattgcttctgcttcgtcgtggtacgaggctcaattggctgcgatgactgcgcctccgacccgaagcgctgatgctgcattttctgcccttccagccatgccaactctggtagacactctagacaagcgccagcttgtagatcttactgacgaagccgaggtcgctgccagcgccccttcaccttcagctccagagcgccggccagccatagcggaggaggatcagaaatattatgtcgatacatcaccgtcaagaactgtcactacgccagaagaagatggtatagaccctgtgcccagtcgggtcttacccgtgttcccctacgtgtattcgcccagtgtaccgctgaaccacaaagactttgtcgaaagcaggatacaagaagaacgtcttccgccaggcatgaccaagatcgggtcgcgagattacattctccgaccagaagctatcgagtctgtctggtacatgtaccgcatcacaggcgacaatcactggcgcgaagccggctggcgcatgttcaaagccatcgaagaacacacagccaccaaattcggcaactcagccattgacgacgtaacgaaattgatcccagccataaaagatgagatggagagtttctggctagcggaaacattgaagtacttttatctgctatttgacacagaagatgttattagcctggatgattgggtattgaatactgaggcacatccattcaagcggccgtactagagctgtaagatggaagggcgttttggatgtagatttgtagaagatatgcatcaataagaaagcacaaattcaagatatgtttgtttgaaaag

SEQ ID NO: 13112 - DNA, 2397 bp, Oryza sativa
  ref <308>: DATABASE ACCESSION NUMBER: AK110460
  ref <309>: DATABASE ENTRY DATE: 2001-12-06
cggcccggaccctgtcgccccacgaggcgccgtcaacgagtcgggttgttagggaatgcagcccaaatcgggcggtaaactccgtccaaggtgaacagcctctggccaatggaacaatgtaggcaagggaagtcggcaaaacggatccgtaacttcgggaaaaggattggctctgagggctgggctcgggggtcccggccccgaacccgtcggctgccggcggactgctcgagctgctcgcgcggcgagagcgggccgccgcgtgccggccgggggacggaccgggaacggccccctcgggggccttccccgggcgtcgaacagccgactcagaactggtacggacaaggggaatccgactgtttaattaaaacaaagcattgcgatggtcctcgcggatgctgacgcaatgtgattaacttctccacatctcaaccccaatgcgtcgaatatcgcgcccctcgcgggcaattgatgcaacctcgcctctcctcttatccgtaccgcagcgtgtgacgccatcaccatgtcaaattgtggtagcaaaggtcacccatcttcaaacctcaacggcgaatttctccaccacgcagtccaatgccttcctcctcgctggcaaacaagacaagaagaaacatcaacaatttgtgcgaagatggcaaaaaagacttctcggtgaatcagaacctattggagcccatgtcgatccttatgatcccacttcaccggtacggatagctcccgaggagcaaggcgattaccgggaagtgctcgaagaagataagcaagatgtatttgaaaatcataattaccactacttaccggctgaggaacgtattaatgcgagacatggcagaaatctcttttttgttggtggagataattggatacggcataagctggaagcgggtatagctagggatttcgaaaagctcacacaaaggacatacacgccactaagcttgaatatggcggatcaaattgagaatctcacgggcacgccgtatacgctacttaatgacaacttgaagctggcgcagcaagtgcaagaggtgaccaaccgtcccttcacaaatcaaaatttcggtttacaaggaaaggtcactaagcatgaggacctccaccgccggtttgcgcaagctatagccgaaatatacacgcttaaggacatcaagctccatagaactactactggtgaattggcacttgtttatcctaggcactggacggctaaggattttattcaaatcatacgaaaggcgcctgaatggggcccgtcagagttgatagaagaggaagatggccttgtagatgaagtagcggaagaagtagaatcggaagagcctaccccgattatggatccggccacgccggctttcaaacaggaagccattgtcaagattgatcccaagaagaaagcattggatttcatgtcaaaccgcccagtaccgcgtgaaaagccagctgaagctcaaaaagctgaggaaattgtgagattggaaggttccgcagccgagtcacctatcttcaccactccccgcttggctaaaatcgcatctgcattcgagacatcaaagtcaactgtagatgtattgcgttactccatcattgagcatcgagcagcacgactagttgatcaagtcacagtactaagtgctgccgttcacaaaactaaacactcttctacagttcaaaagaagtcttcatcggcagaaagtttaggcgaagagctcaaatggcgacaggtgctcataaacggcctcgacatcaaattcgctctgttcaagcgcctattccagctcactggtatccgtgtatctgatccgcagctctcctcttctgacacgcttggtcaactttatggctatctttgcgccgcatccaagccacgtccaaccagccttttcagtgcgattcatgtagaagggcaaaaagcacgagaaaatgccaagaagcaaacatccgccgaaatggcatctcgccgaagagttaatctgggtgatctcatcacactgggcaatgtcgaattacgtcgcacacgggccaccaagtctgagagacgtacaaagacaggaatggcaaaagtcgtcggctacgcactctgggaacgtaaacttacagggcgctacaatcaacctaaattcaggcatggttcaaaaattatcgagggctcgcgcagagtgcctgagtttggtaagcctttacccagtaaatctgcaatgctgttggccaagtggaccagggaacagatggagaaagcgaagaagacagagttgtaagaaagttaagaaaggtggctcactcctaattagaggctggacagagacttgtcacagacatcatgatttgagtgctgtgtagaaatgctttgtatagtatgcattgattgaaatatgg

SEQ ID NO: 13113 - DNA, 2096 bp, Oryza sativa
  ref <308>: DATABASE ACCESSION NUMBER: AK110461
  ref <309>: DATABASE ENTRY DATE: 2001-12-06
ttgcagacgacttaaatacgcgacggggcattgtaagtggcagagtggccttgctgccacgatccactgagatccagccccgcgtcgcacggattcgtacggagaaagctgagaaagaaacacgcactaatcaaacaatctcttcttcttcttcttcttcttctgttcacaagcaatcagaaaagaagaggacacgccatgtcccttctcgtcgtcttgttcttcttcttcctctcgccgccgctcgccgccgccgccgcctacacggagtactcgtgcaatggcacccggggcaacttcacggaggggagcgcgttcgggctcaacctggagctcctcgcggcggagctccccgccaacgcgtcgtcgtcgcggtcgctgttcgcgtcggcggccgtgggcgccgccgcggcgccggaggacagggtgttcggcctggcgctgtgccgcggcgacatgagggacgccgccgcgtgcgcggggtgcgtctccggcgcgttccagcgcctccgcgcgctctgcggccgggaccgcgacgcgacgtactaccacgacctgtgcgtggtgcgctactccggcgacgacttcctgtcgcggccggacgacaactcgccggtgatcaacgcgctggacgcgaacgcgtccacctactacgggtgggacgggcggaacgcgacgacgcggagcttcttcctgtcgctggtggggacgctgttcggggagatggccatgtacgggtcgtacaactcgtcggcgcggcggtacgcgagcgccgtgatgtatgtgaacccgcagctgccgacggtgtacgggctggcgcagtgcacgccggacctgtcgccggcgcagtgctggcactgcttccaggggctccaggagcagaaccggcagtggtacgacggccggcagggcggccggatcctcggcgtccggtgcaacttccggtacgagagctaccagttctacgccggcacgccggacgtcaggatcggcctgcaagacgtcgcaccctcaccaaccgcaaacaatggaaccaaccacaggaagaccttagttatcgttctatccgtgtcaatcacggtcttctgtttcatgctggtcggctgcctcctactgataaaaaaactacggaaaggagacgggaggaagtcgaatcggcagctggaagcacattccaggaacagctccaagacagaggaggcactgaagctgtggaggaccgaggagagcagcaccgatttcacgctctacgacttcggcgatcttgccgctgccacggacaacttctctgaagatcacaggctcggcacaggcggatttggacctgtctacaggggtgagttgtctgatggagccgagattgcggtgaagaggctggcagcgcagtccgggcaggggctgaaggaattcaagaacgagatccagctcattgccaagctgcagcacaccaacctcgtcaggctcgttggctgctgtgttcaggaggaggagaagatgctggtctacgagtacatgcccaacagaagcctggacttcttcatcttcgaccaggaacaagggccattgctggactggaagaaacggctgcacataatcgagggcgtcgtgcaggggctcctctaccttcacaagcactcacgtgtacgcatcatccaccgcgatctcaaggccagcaacatactcctcgacaaggacctcaatcctaagatctccgacttcggcatggccaggatcttcggctccaacatgactgaagccaacaccaacagagtcgtcggcacctatggatacatggctcctgagtacgcatcggagggcattttctcggtcaagtccgacgtgttcagcttcggcgtgctgctgctggagatcgtcagcggcaagaggaacagcggccaccagcactacggcgaattcgtcaacctcctcggatacgtacgtttttacgttgttttttctatcttaatttctttttctctctcgctgaaataatggcgtgttactattctagtacgacctttttgtgtgtgtgttcttaatcaaaaccgtacttgtcgtccgtggattaataaatgggcacgcggcttatcctgtac

SEQ ID NO: 13114 - DNA, 3503 bp, Oryza sativa
  ref <308>: DATABASE ACCESSION NUMBER: AK110462
  ref <309>: DATABASE ENTRY DATE: 2001-12-06
gatttgctccctgctccatcgccattcgccaagcctagctatcagatcggtcgcggtggacttgggagcatgcgtggcaactcggcctcttcgccgccatgcacgtcgtggtgatcttgccacggcggagagccggagatgagtagccgggtcgtcgtcgtctcgggagttcttgtgctggttttggtcgtcgtctccgtttgtggccgggcagctgcgtgcgttgaggcggagagggaggcgttgctgtccttcctcgccgctgccgcgccgccggcaggggatggcatcgccgcccagtggcgagggtcgccggactgctgcgcgtgggacggcgtggggtgcggcgtcgacggcgcggtcacgcgtctgtggctgccgggacgcgggctcggcggcacgatctcgccgtcgatcgccaacctcaccgcgctcacgtatctcaacctgtccggcaacagcctctccggcaggttccccgacctgctgttcgcgctgcccaatgctacggttgtcgacgtcagctacaaccgtctctccggcgagctacctaacgcgccggtggcggcggcggcggcgacgaatgcccgcggcagcctctcgcttcaggtgctcgacgtgtcgagcaacctcttggcggggcggttcccgtccgcgatctgggagcacacgccgcgcctcgtgtcgctcaatgccagcaacaacagcttccatggctcgatcccgtccttgtgcgcgagctgcccggcgctcgccgttctcgacctctccgtgaacgtgcttagtggggccatctcccccgggttcagcaactgctcgtggctgcgcgttctcagcgtgggccgcaacaacctcaccggcgagctccccggcgacatcttcgacgtgaagccgctgcagcgtctgcagctaccgtccaatcagatagaaggccggcttgatccggagcgcatcgccaagctgaccaatctgatcacgcttgatcttacctacaatatgttcaccggcgaattgccggagtcgatcagccagctcacgaagctggaggagctccggcttggccataacgacttcaccggaactctcccaccggcgttgagcaactggaccagcctccgatgcctcgacctccggtcgaacagcttcgtcggggatctcacggtcgttgacttccccggcctcgccaacctcaccgacttcgacgtggccgccaacaacttcaccggcacaatcccgccaagcatctactcctgcacggcaatgaaggcgctgcgtgtcagcaacaacctcatggtcggccagatctcgccggagatcggcaacctgaaagagctccagttcttctcactgaccgtgaactccttcgtcaacatcagcggcatgttctggaatctcaagggctgcacgagcctcaccgcgctgctcgtgtcctacaacttctacggcgaggcgctgccggacgccggctgggtcggcgaccacgtctggagcgtccggttgatggtgatgcagaactgcgcgctgaccggcgtgatcccgtcgtggctgtcgaagctgcaggatctcaacgtcttggatctctccggcaaccggctcactggcccgatcccgagctggctcggcgccatgccgaagctgtactacgtcgacctctccgggaaccagctgtccggggtgataccgccgtcgctgatggagatgcggctgcttacaaccgagtaggccatggcggaattatacccaggccatctcccgctcatgttcaccctgacgccgaacaacggagccgcgagccggcagggccgcggatacttccagatgtccggcgtcgccacgacgctcaacttcagcgacaatggcatcaccggcgcgatcccgccggagatcgtgaagctaaagacgctgcaagtgctcgacgtcagttacaacaacctctccggcggcatcccgccggagctgagcagcctcaccaggttgcagattgtgaacttgcgctggaaccgcctcacggggacgattcctcaggcgctcaaggagctcaacttcctcgccgtcttcaacgtggcgtacaacgacctcgaggggccgatcccgacgggcggccagttcgacgcgttcccgccacgggacttcacggggaacccgaagctctgtggcgaggtgatctctgttccctgcggtgacagattcgacgcgacaggcaccacttcgtccaaggtcgtcgggaagaaggccctggtcgccgtcgttcttggtgtctgcgttggcctggttgctctcgtcgtcttcctcgggtgcgttgtcatcgccttcagaagagtggtgtccaatggagccgtccgtgatggcgggaaatgcgtggagtcgaccctgttcgactccatgtctgagatgtacggagacagctccaaggacacgatcttgttcatgtcggaggccgctggcgaggcggcgagcggagtgacgttcgtggacatccttaaggcgacggacaacttcagcgcgggaaacatcatcggttcgggcgggtacggcctggtgttcctcgccgagctgcaggacggcacccggctcgccgtgaagaagctcaacggcgacatgtgcctggtggagcgggagttccaggcggaggtggaggcgctgtccgcgacgcgccaccagaacctcgtccctctcctgggcttctgcatccgcgggcggctgcggctgctgaactacccgtacatggcgaacggcagcctccacgactggctgcacgagcggcgagccggtgccggccgcggcgcgccgcagcgtctggactggcgcgccaggctccgcatcgcgcgcggcgtgctctacatccacgaccagtgcaagccacagatcgtgcaccgcgacatcaagtcgagcaacatcctcctcgacgaggccggcgaggcccgcgtcgccgacttcgggctggcgcgcctcatcctccccgaccggacgcacgtcacgacggagctggtcggcacgctggggtacatcccgccggagtacggccaggcgttggcggtgacgctgcgcggcgacgtgtacagcttcggcgtcgtgttgctggagctactgacagggaggcggcccgtcgaggctttgccgcacgggcagcagcgggagctcgtccggtgggtgctccagatgaggtcgcagggaaggcacggcgaggtgctcgaccagcggctgaggggcaagggcgacgaggcacagatgctgtacgtgctcgacctcgcatgcctctgcgtcgactcgacgccgttgagccggccggcgatacaggacattgttagttggctggacaacgtcgaattcatcggctgatcagacgtctgaatgtctgtgatctccaatggcgaacatgtcggattgttctgccaaaatggagcatttctgtatgctgagcaggtgttgaaaaatgcaaaaatgactgtaatctgaacagtggaaaattacgtatcggtggagcagtgagttgcttaacaatc

SEQ ID NO: 13115 - DNA, 2861 bp, Oryza sativa
  ref <308>: DATABASE ACCESSION NUMBER: AK110463
  ref <309>: DATABASE ENTRY DATE: 2001-12-06
catgatgttaccatgacttcttccttcacagctgaatccatcgagctcgtggagcgtctcgcagagtgctacatggagactaggcagctcgacaaggtcgaagatacgtacaaccgcctgttccgcgctgttctcgtagccgacaaggttgaccaagcgacttttgagaagtccagatcgcttttgatcaatttctacgacaagcatggttattcggacaaagccatcagcatctaccaagagttgttggtctactaccgtgccaggctcggacctgctcatgagcctacgatccagacactatacattttggcacagcgatgccagaagcatcctcgcaaccacccgtactggattgactactatctccaaatcatcactagcctgaacaaagactctgatgtgtgccacccgaatgctctggacgccatcatcgtggtgaccactacatactgggaagacaggcgctatgccgaggctgtgagcatctaccgcgttctctggaagaccttcaccacgaagaccaaggagcacaagatcttcagcgatgtcaagtttgtgcagacactgtacgagcgatactaccagtgcttggaggagaccaaggccagctggtctgaactgtatcaagtcagcaacgaataccgcgagaccgtcaagaccacctttggtgccgagtcaactatcgctgtggaggctacactgtcacttgccaaggttgcccagcgcagtgaagagcatgcgtctcaagccatcgcactgtacgaggaggtgtccagccgttccaagacggttaccacccgtaccagcgtcaccgacatcaatcaggcactgtcatctctctacgtcaagcagatgcagtcctcaaagtctagcagcatgaaggccgagacggttcagcgtgctctgagcatgtccgggtctcagttccaggagtctaccaaggcctacggctactcgcacgagtcttcgctcactcatctgcgagaactgtcgacgctgtatagccgtcagcagaagacagatgttgctgtcaagcaattgagcactgcagtttctgagatcatcaccaaggagacttcgagccagaagcaaatcgagagtgcagcctcaattgcctctaccttccgctccatccagcaagagagcactgcccagagtcttgtccaggaacttcatcgccagatctgtgcaaaggacactcgctacgcatctaagtggtctttcgatctgacgaagagcagccgctcctcgcttgctttcctcgcagctctccaatataatctgcgcaaggacttgaacatcacgttccccgagatcatggctgatctaactctcgaatacatctacttcgagcagttccacaacatgctccgcaacaatgagagtcttaccaacattctcctcgcagccgcgcctctgcgctggttcctccgccgcaacgaccaacaagacatgatcaccgtcgtcgaagaccaagccgtcggcttattcgagaagcgcgacgcccaagacctcaacacgcaaagcaagcaatctccgcgcatcttcatcatcggcatcctcgaccacctaggcaacgggcgcaacaaaaacttcaaccgctccgtgatccccgcctccaacgacagcgtcacaaaactcaccaaagccaagaaattccccgaagcctacgacatcgcccacctcgggtttctctacgccagcaagcacgacgggtacaacggcccgcgcgccatcagcatgggcttcaagctcgcgtccctcctcgtcgggcgcgcctcaggcgaaaagtgccccgacgccgcgctgcgcaaaaagatgctcgagctctcgaaccgcatcgtcaagcggatcctcgaaatctgcaagaacctgaacatcaactttgcgcagatccagctgtacgaattatcccacctctccgtgctcctgggcgagcaacaagactacgagactctcgagtggctcctcacgacgctgtggaatacgcgcgacgcacaacgcacttggcccgctgagattcttttgaatcttggtcggaggctgatttgcgcgcgatacctcgctaaccgtcccgttaaggcgattcgtctcgccgaagacattgcgtacaacatgcggcgggcccacgggccccgggcgcccgtgacgatcgagacgtacgagctgctcgcggagctgtatacgtcgacggggctggcgtaccaaaaggatagcaagacggctagcctggcggcggagtacttcaaaaaggcggtgggcgtgcacgaagacattttgcggctggcggtgagtgagtatgggagtggggatgtggatgatgatgatgacgacgatacgactgcggagttgttggcgcgggagggcgtgaatgttcatcgtcagaaggcgcaacaggagacgccgaaggcgctggatcagaatcaacttgataggagtgcgttggcgctcaagcatttgcatctgcttaagcttgcgtatcagcgcttgggcgggtggccgaagagttatgaggagtatgagcggttgaatgcgcagcttttccgcgtgtttggaagcgagagtaagtggaagggtgttgaggggacggagaagtgggatgcaaaggcgtttgggcagggcaaggcggagagtaaggagggggtgtttgaggggctggaggattgggggtttggcgaggagaaggtgttgctcgaggcgcagaagaggcggcagggggcgaatgtggggggagggatggtcatgatgagtgcgcagtagatgagcattattatgaggagagatggagggttgaggcgtgggtagagggcgtggatggaagattgtaatgataatgacgtggtgttttcttctgtttc

SEQ ID NO: 13116 - DNA, 2606 bp, Oryza sativa
  ref <308>: DATABASE ACCESSION NUMBER: AK110464
  ref <309>: DATABASE ENTRY DATE: 2001-12-06
aagcgaaaaaccgagtttgtatactcgataaattaaggggatgcgtcgtacctctgcgaccgtgctcttggcactggtgtgctgcgcggcgctgttcgatgcggcttcggcgctggacaacgcgcgtcgcctgcagcgcacgctgcaggcgcgctccaaggcgcaggccagcactggcgtgcacgcgcgtctgcaggcgctggcgcgcgcgggcctgacgggcggcgccgccaaagcgcacgcactgctggaccacgtgatggccggtaaaatcggcgcagggctgggctttgagggttacgagcactcgtacgggtcgggtttcgatgcgaaaggcacggccgacgccatcaaattcaaacgcattaacggcgccggtgccgtggaagaggtgaccaccgccgaccgcgtgttggtgtcgaacgacggcgttaacttttcgtactccgaaatgaccggtgtggcgggcgactattgggcgccgaaggacctgaacagccgcatcatctattcgctgaacacgaagtcggcgaagacggacgtacggccgaccggcgccgctcagctgaagcgtttcaccgatgcgttcaacgacatgtggtcaaatccggactatggccgtaacggtgccattttggccaagccgctggcgacgggtgcggactggaagaagctgtcggatcaggagaagcgcgacggctggatgggttacatggaggagcagttgcgtctcatgatcagtcaggaaaaagccggtgcgatggccaacttccagaaagcgcccactcccggtaaggccgtcgaactgcacccgggctctatgtattacgagggctcggccaagtccgctctggagaatgtcatctccatcgccagcgacgtggcacgtgccggcacgcgcgcaaaagaggcggtcagcgctgtagccgagggcaacggtcgtgcactgtccattaacgacgaccacttctggcactgcgcacaggagacgtacgcgctcggccaccgcgaggcagtgaaagcggcgttcgcggcgggtcagcagtacgcgacggcgacctcccctgcggcgaaggccacggccgccaaagcgctcaaccgcgcgtatgcgatggacggctttgtgtcgcactttttgtcggatcagttcagttccggtcacctgcgcacgccgcgcgtgcaactgcgtacggcgtgttcgatggtgactgacggcgccaaagaggccggtctgacggccaacgtcatgcacgacgaagacaactggaactgtgtgttggtgaaaaacgcacgcggcaacctgtggtggtcgtgcggtgaccaccgcttcttcgaccacgaaaacggcatgaaccgtcgtatgctgcacgatgccatcgccgcgtccgttggggctgtgtcggcggcgtttgaggccggccaaaccaaaggcgctgtggacccgaccaccaaagccagttggcgcgccgaaggtctgcagtacatcggcagcaccaccggtctgtcgctgcgtcagagcgtggagaacacgtgcccgctgtaccgcatcaacagctcgaacaaagtggagcaccgcgacggcccgctcgccgtgtggccgcgcccggcgattgcgaaaaaataccgcttcggctcgtcgctgcggtggaacatgaacggtgccccgttcccggcgttcgtcgatatgacggctcccgcggtgtcggctgcgggtgcgtccaaaacgcgtctgccgttctcggacctgtcggtgtcggactcggctttcctcggctcactggggctgaaggcggtcacgtccgatctgacgtgtcacgactatcgcccgttccgcgagcgtgcgctcacgagcgccgacgactgctgtggggtggccggtcgtgccactccgcagttcgtcaccgccagcacgacgtgggacgacctcaacgccaagacaaaatggccgtcgggtgccgacccacacaacgtggacaaacgtgtcacgtacctgaacaagtgttttatcacgcaaaacgtggagttggccggccaaaaagtgaaagacgtggccgtgacggtgggtacggccgtggtcaatggcgctacggtcgtcaaaaacgtgatcgttgacggtgcggtggcggtgaaggatgccgtcaagaaggtgctgccgtaaaagcaagcagctgtggttgcctgtgcggactcgacgaacgcgcgcgcgcgcgcggatgcgcgtcggattcagatttcaccgcaaaacaactgcatgaccgcacgccggtagcgacgcgcagagcggtcgctccgaaacagcggcggttggcggctgcggctggagcttcgtctcgccgttgcgtgcccatcgcccgacgacagcccatgaccacgacggaccacacgacgacaccaccagtcaacacctcttagtcggccgtacgctctatttctttttgttttgacccgccactgctgccacctccgtgttgtctgcgtcgctctcgtccgtccgtccgtccgtctgctgtcgccggccgcgactgctgttgatgtgatttctttctccgatttgtccccactatctctgctgttgtgacagcaatacatgtagtactgtctctttc

SEQ ID NO: 13117 - DNA, 3365 bp, Oryza sativa
  ref <308>: DATABASE ACCESSION NUMBER: AK110465
  ref <309>: DATABASE ENTRY DATE: 2001-12-06
tcacagccggccgcactgcaccagcaggctctacaagatgccgggctacacatccgcgccgcaacggccgcatcgtcgtccaccgcttatcacaaccctttcgcttctcctggcgctggcagtcaccttgctcgccctggcagccccagcgtcggcactcgaagtacgtgcgaccaacgtgcgcggcacggcacctagtctcgagaggcgatatctgcagacctaccgctccatattctccaactcatccatcggagatcgaccgcccaactgtcctccctgccccgaacccgactgcttcaactgccagttacccgcgtacgaatgctaccagtttggcgagtgcaacgagtacgacggtctctgccgctgccccgtcggcttcggtgggcccgactgtctttcgcccctctgtggctcgccagccgacggccccaagcgcttccccaagggcgaaccgggcgacgacaggtcctgccagtgctccgacggctgggacggtctcaactgcaacgtctgccgaaccgatgcagcgtgcgccaacttcctgctcggcggagagcgcctgggcgagaacggcacgtgctacgacggcggcgccaccatccagcagagctcccagcagtgcgacgtgaccaaccaaaagatcgtcgacatgctccccggccgcccgccccaggtgacgttcagctgcgacaagagcgacgcctcctgcaactttcagttttggatcggcgcgcgcgagtccttctactgcggcctcgacgactgccaagagtcgatcgagatcggcgcgtcgtccaacaagacgtcgtacgactgcaaaaaggtggcgtgcaagtgcatccccgatcgcatgctctgcggcgagtccggcagcatcgacatctcggacttcctcaccgaagagatcaaaggtcccggcaagatgtcgtgcaagaccgatgcggacggcgtgcgcaagtgccgcttcgaagagccgggcatgaacgggctcatctcggacgtttttggcgacgaggccatcttcatcacgtgcaagtcgggcgagtgcatccactttagccaggtgcccggctaccaggctcccatcgctcctgagcgacccgtcacctgggtggtcatcagcgctgtcgccgccctcctcatcgtcgtcgtctccgtcagcctgctctggatgctcggcagacactacaaggacgacgaggtgcgcctgggcagcgtccgcctgccccaagaggaggccgacctcatgaaggaccacatccccgccgcgctccactgggaggacgtcggctaccgcatcggctccaaggcgctcctcgacggcatcagcggctgcgtcaagccgggcgaggtcatggcgatcgtgggtgcgagcggcgcgggcaagacgacgttcctcgacatcctcgcgcgcagggacaagcgcggcaccacctcgggcaccgtgctcgtcaacggccgcaagatggccgaccaggagtacaagcgcgtcgtcggcttcgtcgaccaggaggacctgctcatggagacgctcaccgtctacgagaccgtgctgtactcggcgctcctccgcctgcctagggacatgtcgctcgaggccaagaagttccgcacgctcgagaccatgcaggagctcggcatcctcgggatccgcgatagccgcatcggcggctccggctttacggcgggcggcagcaaggagggtcggggtatcagtggcggcgagaagcgcagggtgtcgatcgcatgcgagctcgtcaccagccccagcatcctcttctgcgacgagcccacctcggggctggatgcgtacaatgcctacaacgtcgtgcagtcgctcgtcacgctcgcaaagacgtacaagcgcaccgtcatcttttccatccaccagccgcgctccaacatcgtggcgctgttcgataagctgctgctgctggccgagggccgcgtggtgttctcggggcccttcgcacgctgcagcgactacttcgccgacgtcggccacgcctgtccgcccgggttcaacattgcggatttcctgatcgaccttactgcgcgccgcacccacggcggtggtgaggaggctgaggcagatgttgagggcggggcgcatgtgcgcggcgagacgagcattgtcacgacgggcaccaactcgcgcgacgaatccaccgagcttcgcacacggcccaactcaatcgctgaaggcagcacgggcaacggggtgcgcaagcgcacgagccggctggcgagtggactgcgcagtgcatttgccaacggcgagtcgaacgggcacgacatttggatgcccgcgctgagcagcggcaagctcgtgcatctcgtcaacgcctttgccgactcggacatggcgggcgacaccaaggcggagctcgacgcgttcctgggccgaaccccgcgcggggtggagaacgatctgccggacgtggcgaatgacggggcgctgctgcgcacgtacaagaaggcctcgctgtggacgcagttcaagatcctctcgggacgtgcgttcaaaaacctctaccgcgacccgattctgatggtggcgcattttgggctggcgattgtgttggcgctcttctgtggggtgctgtaccacggcgtgacgaacgacatcagcgggttccagaaccggctggggctgttcttcttcatcctggcgctgttcgggttttcgtgtctgacgtcgttgggcgtgtttgcgaacgagcgcgcgctgtttgtgcgcgaacgcagcaacggttactacacgccgctgacgtactttaccagcaagttgctgttcgacattgtgccgctcagggtagtgccaccgttgctgtttggcgggtgcgtttactttttggtcggcttggtgccgggtgtggccgagttttggaggttcatccttacgctcgtgctgttctcgctcgccgcgagctcggcggtgtttttgatttcgatcgcaattgcggatacggggttggcgaatctggtgggatcgttgaccatgttgttctcgctgctgtttgcagggttgctgatcaatcgcgatcgcatcccgtacgggtttaaatggctgcagcatctgtcgttcttccatgcggcatacgaagcgttgatcgtcaacgaactgcgcaatcttagtctcaaggaacacaagtacggcattgacatcgaggtgccggcggcaagcatcatcagctcgttcggattcaactcccaggccttctggttcccagacatcgccacgcttgctgcgctgtttgtcacctttaccacactcagcgctgttacacttgtcgtattcgtgcgcgagcgcaagtagcccccccacacattgcggaaatagatttgcattcacggtt

SEQ ID NO: 13118 - DNA, 3473 bp, Oryza sativa
  ref <308>: DATABASE ACCESSION NUMBER: AK110466
  ref <309>: DATABASE ENTRY DATE: 2001-12-06
taagaagcccacagagggcgagatgtacaagtcgtacaacccgcagatggtggaggcggcctggtatgactggtgggagcggtgtggcttctccaagcctgaccccaagtcagacaaaccgcccttcaccattgtcatccccccaccaaatgtgactggtgcactgcacattggacacgcactcaccaatgcagtgcaggacaccattgtgcgctggcggcgcatgagcggctacaacgtgctgtgggtgccgggcactgaccatgctggcattgccacacagagtgtggtggagaaaaagctgcagaaggagatgggcatcacacgccatgacctggggcgcgagaagttcctgtctgaggtgttcaagtgggttgacgagtacggcggccgcatttgctcccagctgcgccgcatgggcagcagcgtggactgggacagatgcgtgttcacaatggacgagacacgctcgagggctgtgctggaggcgtttgtgcgcatgtttgagtctggctgcatctaccgtgacaaccgcctggtcaactgggacgcacggctgcgtactgcagtcagtgacatcgaggtggactacattgacataccaggacgcacactcatcaacgtgcccggctacgagcagcctgtggagtttggtgtgctgaccagctttgcctacccgctggaggacggcagcggggagattgtggtggccaccacgcgcccagagacaatgctgggagatacagcagtggcagtgcacccagaggatgagcgctacaagcacctacacggcaagtttgtggttcaccctgtcagccagcggcgcatccccatcatcactgacgcagagctggtggacatggagtttggaacaggtgctgtgaagatcaccccagcccacgaccccaatgatttcctggttggcaagcggcacagcctggaattcatcaacattctggacgacaacggcaacatcaatgacaacggaggggacttcaagggccagccgcgcttccaggctcgtatcacggtggtggacttcctgaagcaggctgggctgtaccgcggtgtgcatgacaaccccatgcgcctgggtatcagcagcaggagcaaggacgtgattgagccgctgctgaagccccagtggtgggtggcttgcggcgacatggcggcgcgcagctgcgaggcagtgcgcaacggcacactggagatcatccccaaggagtttgaggcggtgtggttccgctggctggagaacatccgtgactggtgcatcagcaggcagctgtggtgggggcaccgcatccccgcatactacatcacgctggagggggagacaccagaggctgctggcgtgccgggccggcccagtgaagacatgtccagatgggtggtggggcgcagccaggaagaggccgcagcagctgcagcagcaaagtaccccggcaagaagtttgagctgcaccaggatgaggacgtgctggacacatggttcagctccgggctgttcccgttcagcgtgatgggctggcccgctgcgactgaggacatggccaccttctacccaggcagcctgctggagaccgggcacgacatcctgttcttctgggtggcacgcatggtcatgatgggcctgcagctgacggacaaggtgcctttcaagcaggtgtaccttcacgccatggtgcgtgatgcccacggcaagaagatgtccaagtccctgggcaacgtgatagaccccatccacgtcattgagggcatcaccctgcaggggctgcatgacacactcaaggctggcaaccttgaccccaaagaggtggctcgagccatggacactcagaagacagacttccccgacggcattgaggagtgcggcacagacgcactgcgctttgcactcgtggcttacaccacacaggctcgtgacatcaacctggacatcaagcgtgtggtggcgtaccgctactggtgcaacaagctgtggaacgccatcaggtttgccatgatgaacctgccagtgggcttccagcccctgccacagcagcagctgaacgagcagatgcccagctggccgctagcagcacgttgggtgctcagcaggctgaatgcagcagtggagacaattaacaaggctatggaggcatatgactttgccaccgccactcagactgcgtatgcttggtggcagtatgagctgtgtgatgtcttcatcgagctgatgaagccagtcatggccagggacgaggcaacagacccaggtgctgctgctgccaaggctgccacccagcaggcgctgtgtgctgccctggacaacggcctgcggctgctgcaccccttcatgccatttgtgacagaggagctctggcagcggttaccaaagacaccagagcaggcctccaccgcgtcaatcatgctggccccataccccgcagcacagccgggctggtcgcagccagagcttgacaagcagtacgagcaggcacaggcagtggtggcagctgtccgcaagctgcggagcgactacggcctcacgcggcaacgcacgactgtatatgtggcatgcagcagcccagagcgcgcggcaacgctgcaaacgctggctgccgacatagcctgcctgtcaaccagtgcggaggtgctgctgctggacgagggcgcagagaagccagcatactgtagcgtggcaattgtggatgacaccactacggtgcacgtgctgctcaagggcattcttgatcccacgttggagctcgccaagcttgagaaaaagcaggcagaggctcaaagccgcattgatgccatacataagcgcatggccatgcccagttatgctgagaagaccccacaggcagtgcaggcagaggatgcggacaagctagccaaggcagaggcagaggcagcagcagcagcacagcacatggaggatatgcggaagatgatcgaggcgcagtagtggcagcaggagagagtatgcagaggctgggaggttgtgtgtggcagctgtcacagctgctgaagtttagcatgtggtgtgccagtgtgcacatgcatgggggtgagtgtgatcatgtcaaccccaccatgcacacctgtgactacaatgcggagaaacaccgtgctgagcggcagtgcaatgggtgtttgtttgtgtacgaagtacccacgttttgcagtggcgtgctgtggcatatgcccatgcatgctgcaggcatgcaagcaaacaacgtcgttctgaggatgcggttggtgggctgggatccgccatgctttgcaggcaaacactggtttcgtgcacgagcatggcatggccttgccagtccttgtatcatagcacagagcttatcataaggtaaggtgtaataccgtacgagcctacagctgccagtgcggatggttgtgttggttgtgctgtatgcagcagcaatgcatatgatgcagcagacgggccaactccactgtaacctgtgtggcag

SEQ ID NO: 13119 - DNA, 2729 bp, Oryza sativa
  ref <308>: DATABASE ACCESSION NUMBER: AK110467
  ref <309>: DATABASE ENTRY DATE: 2001-12-06
gaatgcattaggaatatatttgaagctagagagagcacatgccgccgtcagcaggcttggccactgagagcttgccggcggcgacatgcccggccaagaaggatgcctatgccgcggcggcgtcgccggagtccgagacgaagctggccgccggcgacgagagggcgccgctcgtccggacgactcgcatctcgacaactaccatcaagttatacaggctcaccatctttgttcgcatcgccatcttcgtgctcttcttcaagtggagaatcacctacgctgctcgcgccatcagctccaccgacgccggcggcatcggcatgagcaaggcggcgacattttggacggcgtccatcgccggcgagctctggttcgcgttcatgtgggtgctcgaccagctgcccaagacgacgcccgtccggcgcgccgtcgacgtcacggcgctgaacgacgacacgctgctcccggcgatggacgtgttcgtcaccaccgccgacctcgacaaggagccgccgctcgccacggcgaacaccgtgctgtccatcctcgccgcgggctaccccgccggcaaggtgacgtgctacgtctccgacgacgccggcgcggaggtgacacgcggggcggtcgtggaggcggcccggttcgcggcactgtgggtgcccttctgccggaagcacggcgtcgagccgaggaacccggaggcgtacttcaacggcggcgagggtggcggtggtggcggcaaggcgagggtggtggcgagggggagctacaaggggagggcgtggccggagctggtgcgcgacaggaggcgggtgcgccgcgagtacgaggagatgcggctgcggatcgacgcgctgcaggccgccgacgcgcgccgccggcgctgcggcgcggccgatgaccacgccggagttgtgcaggtactgatcgattctgctgggagcgcgccacagctcggcgtcgcggacgggagcaagctcatcgacctcgcctccgtcgacgtgcgcctcccggcgcttgtgtacgtgtgccgcgagaagcgccgcggccgcgcacaccaccggaaggccggcgccatgaacgcgctgctgcgcgcatccgccgtgctctcgaacgcgcccttcatcctcaacctcgactgcgaccactatgtcaacaactcgcaggccctccgcgccggcatttgcttcatgatcgaacgccgcggcggcggcgccgaagacgccggcgatgtcgcgttcgtccagttcccgcagcggttcgacggcgtcgatcccggcgaccgctacgccaaccacaaccgcgtcttcttcgactgtaccgagcttggcctcgacggcctccagggccccatctacgtcggcaccggctgcttgttccgccgcgtcgcgctctacggcgtcgacccaccgcgctggagatcgcccggcggcggtgtcgccgcggaccctgccaagttcggcgagtcggcgccgttcctagcctccgttcgggcggagcagagtcacagtcgcgacgacggcgacgccattgccgaggcgagtgcgctcgtgtcgtgcgcgtacgaggacgggacggcgtggggcagggacgtcggctgggtgtacggcaccgtgacggaggacgtggccacgggcttctgcatgcaccggcgagggtggcgctccgcctactacgccgccgcgcccgacgcgttccgcggcacggcgccgatcaacctcgccgaccgcctccaccaggtgctccgctgggcggcgggctccctcgagatcttcttctcccgcaacaacgcactcctcgccggcggccgccgccgcctccacccgctgcagcgcgccgcctacctcaacacgacggtgtacccgttcacgtcgctcttcctcatggcctactgcctcttcccggcgatcccgctcatcgccggcggcggcggctggaacgccgcgccgacaccgacgtacgtcgcgttcctggcggcgctgatggtgacgctcgcggcggtggccgtgctggagacgaggtggtcggggatcgcgctgggtgagtggtggcggaacgagcagttctggatggtgtccgcgacgagcgcgtacctcgccgcggtggcgcaggtggcgctcaaggtcgcgacggggaaggaaatatcgttcaagctgacctcgaagcatctcgcgtcgtcggcgacgccggtcgccggtaaggataggcagtacgcggagctgtacgccgtgaggtggacggcgctgatggcgccgacggcggcggctctggcagtgaacgtggcgtcgatggcggcggcgggtggtggtggccggtggtggtggtgggacgctccgtcggcggcggcggcggcggcggcggtactcccggtggcgttcaacgtgtgggtggtggtgcatctctacccgttcgcgctcgggctgatgggtcgccggagcaaggcggtgcgccccattctgttcctgttcgccgtcgtcgcctacctcgccgtccgcttcctttgtctcttgttacaattccatatggcttaaaggcattcttaatttcgaccctacaattacagaattactacttttcactcactaggaattaagctggaattcacgaagctaaatggtatagatatttggggtgttacacttttaacccatgttgctcattgtttcttttctctatggtgttacaagatgttacgagcaagtttaatagtatagcaaactactagcttc

SEQ ID NO: 13120 - DNA, 1566 bp, Oryza sativa
  ref <308>: DATABASE ACCESSION NUMBER: AK110468
  ref <309>: DATABASE ENTRY DATE: 2001-12-06
aattcttcctcctctcatcactttgacccgataacgttgctgcctcgcatgctcgaccaagaagagaaggaaaaaataatattagcttagctgatcgtctggttacatatagtggcaagcaacgacattgatcatcgaattctatagaggtcagacgaaaatactagtagcttctgatcagcttggacgtcgatcgcatcgagtgttctgtctgagtaatatgggcgccacgttcaggtgctttggcgggtgcgtcaagccagatgatcagcaagttcatgagcccaagaaggtggtggcgccgtcgtcgagcttcgatttccgggaggagtacacgagcgcgttccggaccgagtcgtacaacgacttctgggcgcgcgtcctggacatcaccctcgcgcacggcgcagccctggtgccgcgccatggcggcggcggcggctgcgcggcgtcgaagcggctcccctcctaccgcctcttcgccgagcacctgctcgagccggaccagcgcgccgtcgccgcagccctcgcgtcgccgcgcgggagccgcctccgccccgacgtgcgcggcctcctcgccgcctactacgccgagacggccaacgcctcgttcctctgcagccacctgctcaaggacatcgagcatatacgcctccgctaccgcccgctcaagcacacgctccgcaagctcgcctccgacgtcggggtgtccggcctcgccgacgtctccgccgcgctggggcagccgttcaccgcgctggccacgtcgcaggggaggctccgggaggtgcaggccggctcgggcgacctgctcaggggcctcgacgccgggaggaagaaggcgcgccaccggatcaggagcgtcgcgcggctcaggcgggcgctgtcggtgtccttcgtcacggccgtcgccgtcgtggccgtcgtcggcgcctgcatcggcgtgcacatcctggcggcgttcgcggcgttcccgatgatgtcgccggcgtggctaggggagcggttcttctccgggcgggcggcgcggcgggcgctggtgcagctggaggccgcggcgaagggcacgtacatactcaaccgggacatggagacgatcagccggctggtggcgcgggtgcgcgacgagggggaacacatggtggcgctgcggcggctgtgcgtggagcaccggccggcggcgggcgccggcgggaaggggaggctggtgcaggaggtgctgaggcagctgagcaagaacgaggagagcttcaggcagcagctggacgagctcgaggagcacctcttcctctgcttcatgaccaccaacaaagccaggatcatggtgatgaacttcatggctgctgctgcaaggtagagctctggatgcatcaacatgatgaaggaaaaaggaaattcgtacctctgtaggacacattttagtctttgtacataacaacagtagatttatttttcttagtacagaaaaaagggaaaaatatttcatttggcattaaaggtttttgctttattttttttgtacatatatacacacagcatgtaaacatgttacagcattgaggaaag

SEQ ID NO: 13121 - DNA, 3020 bp, Oryza sativa
  ref <308>: DATABASE ACCESSION NUMBER: AK110469
  ref <309>: DATABASE ENTRY DATE: 2001-12-06
aaaaaccctcatttcttcttccctgggcatcctgatcgtaacctccagtctctttcctctttatctcaccaccaaagggctctctgtaagagggggtttgcagccattaaccataaccacaagacaacgccatggacgagaagtcaggtctgccgccgtactcggcgccggcctttgatcaaccacgtcatattttgagagggcctcgtctggcacgtcgctctcgcgcggtcaaggtcttcgcgctcgcctgtctcggcttcattgtgctggcgcaatggggccagctatggcgtgcccagagctctgcaccactgttatctcagcagaagctgcacgacgacctgcaggcctgcaagaggctgcgacacaggcctcaggatccgccgggtgctggacgcgagagaaacgcccggtacctgggtggcaaggctaccctcgtcaagaacgcgaccatctggatcggtgagcccgtgaagggtaccagtgctgaggacgcgcgtgctggcaagggctggcagtggaccaagggtgatgtgctgctgcagaacggcctcatccagaaggtcgaggctgagatctccgctgagagcattccggacgatgcgatcgtctacgaggctcgtggacgacctctcacagccggcatcatcgatatgcactcccacgttggcgtgtattctctgcctatgctggacggaagctccgatggaaacgagatgtccgacaacatcacgccctgggctcgtgccatcgatggactcctgcctttcgatccccagttccaggtcatcaagtccggcggcgtcacaacgtctcttgttctccccggctccggtaacaacgtgggcggagaggcctacctggtgaagcacgccatcggcaaggcagacggccgcgaggagatcagcgcgagggacctgctcgcaggtcccgagcagaactggcgctacatgaagatggcctgcggcgagaacgccaagcgagtccactccgaccaggtcttctcccgcatgggcgaatcctacgccttccgccatgccttcgagcaggccgccgagctggtccagaggcaggacgactggtgcgacaaggccgagtccctcggcgtcgacagcatgagcgactacctgccgcaggagatccgctgggagtccctcggcgccgtgctgcgaggacaggttcacatcaacacccactgctacaccgtcccggacctggaggccatggtcgaccacaccaacgagttcaagttccccgtgagggcattccaccatgctcaccagaccttcctgatccctgaggttctgaagcgcacctggggaggacgggccccgtcgtctgccatctttgccgacaacatgtactacaagacggagtcgtacatcggctccgagcacgccggcaagtacctctacgacgagggcctgaccccggtctacgtcagcgacaacccggtcctcaacgcccagcacgtgctgttcgaggctgccaagggctacaagtacggtctgccctaccacgctgccctggccagcgtgaccacggctcccgccgacgaccttggcatgggtcagcgtctgggcgaggtcaagccagggttcgacgctgacattgtcgtctgggacagtgacccgttgagcatcggtgcttccccggtccagctctggatcgatggcactgcgcagttcgagagtcccgtggagctgaagaagcccttctccgctcccatcgtgccggacaccagcctcggccacatcgtcgaggagcccacggaaatgaccgatgcctacttccagggtgtctccaagattctcctgtacaatgagaccacctacgatgtgtccgggggcgatggcaccttgaacgtcgtcgtctcgaagggcaagatcacgtgcattggctcctgcaaggccgagttcgacgtcgccgctgcagcgggcgttgagcccattcgtctgaagaacggttacctcacgcgcgccctcgttgctgcggccggcacgctcggtctcagtgagatcgacgccgagtctgtgaccaataacggcgcaaaccacgacaccttctcccgcgccattgacggtctcgccctggagagcaagaagctccgcgccggctaccactacggcgtcactcgtgccatctctgctccggtcttcaacggcggggccactcactacggaaccagcgtcggattcgtcaccaccgcccgcaccagccttgaagagggcgctgtgttcaactccgacgttgccgtgcactacacgctcgacctcagtgttcgcgcggcaggactgagctactcggctgcgtttggcggtctgcgcaccaagctgatgaccgctgcgtctgccgaggccccggcgagtcccttctccgagtacgcggagctgcggaaggtcattgagggaaagaaggttctggcccttacaatcaacagcgcagacggcatcgccgccgcgcttcggatcaagtccgaggtcgacaagcacattcgcagcctgaacaaggatgcttctccgctgcgcctcgccatcgtgggcgctgctgaggctcacatgctggccaaggagctcgccgcggccgacgtgggcgtcatcactgcttcagcgcagtccatcggtgacacctgggacacccggcgcacgctttctggcgcgccgctgaccaacggcacgacgctcgaccagctcatcgcggctggcgtgactgtcgcagttggtctcaaggaggactggatggtgagggacctgggtttcgccgctggtaccgcctaccacaacggcgaggggcggatcacggaagccgaagctctggacctcgtcagcaccaacgtgtacaaggtcctcggagtcgagatccctgaggactctcactttgtcgttcacgagggaaaccccttggacattggatcccgcgtgaaggctgtcgggtccggcaacggcaagattgccgtttttgtgtgaaatttttaagggcaattcaagccaatcagacagaaatcgagacacatattc

SEQ ID NO: 13122 - DNA, 3020 bp, Oryza sativa
  ref <308>: DATABASE ACCESSION NUMBER: AK110470
  ref <309>: DATABASE ENTRY DATE: 2001-12-06
aagcgaaaaaccgagtttgtatactcgataaattaagcgcagcagatgctggacgaccacctatccgctgcggtgaaggaggtcgaagagcacgaccggcaacggaaggcagcgcgtcagagcgccgcggtcacgcgtccgaccactcacgcacgcgctccgtccggcggcgccggtgccggtgcgccgccgatcgcagcgcatccgtcagcgctgctatcgtctcagcgcagcggcggcagttcgacggcctcaacgcccactcacagtcggccgcactcgcctgtgcgtggcaacagcgcgtccaaactgctgctgacgcaggaagctccagcggcagccacagcgagcggtcacggcaatgggaccgcctccggcagtgctggcggtggcggtggtgctggtgccgcgtcttcggtgggtgccacactcctggagctcgccgctgacgacgacgacctcagcgctgccaacggcacggatctgcccgctttgggtgcgcgcggcaacggctgcggcagcggtgcacagcagcagcagcagctgcagcagcagccgctgtcgcacaactccaatctcattagcaccaccggcgccggggcaggcgtgccggtagcggcagcgggtcattcgccacagcccgtgacggcgcgcatcagcaaacgtctcgtgacacacaccagtcacagcccgaaagcgtcgcccggtccgtcgccgcagccgtcaccgcaacgcatcgtcgttgatcgcgccatcggcggtgccggtgctgctgcgagtggcactccgggcgcgtcgtcgcgcagccgcaccgccggcggtgcccatcacttgcgcaactccagcgccagcagtgcgctgccggcgctgatgccgaccgtaccgtaccccgcgggtatcgctgccggtgcgggtgcggttgcatcgccgctgatagtgccgcccgcacggctcacgagcccgccctccgccgcatcgtacgccatcagcactcacaccgcatacagccacgcgccgagcagcagcagcgcccacagctcgcccggcagcagcccgcacagcgtcaccgcggcggtcgctctcggcggcggcgaacaccacacgctgcaggcgggtgctgccaacgcaccgggcgctgtggcgttggccaatgcgctgttccatttgcccggcgcatcggcgtcgagcggtggcgcaggggctggggcgaacggcaacagcagcgctgtcgtgcactaccaccacgcgcccagcagtgctgcaccgcccacggcgtcgggtcatttgggcgcatctgcggcggcggccaacatcgggcgccctccggtgcaccaccgccgcggccacagcgggttgggcggtggcggcagcgggcagtatgacgcgctggcgcttcgctcacactccaactcactcgatcgcatgtctgtcgctgcgacggcggcgccgatggccggcagtgcgttcggttcggcgccgaccagcaccatggccggtggtgggttcggcacgcaactcctctcgcagcagcacgtgctgttcagcggtggcggtgggagcggcggtctgttcagtccgctgttcgacagcgcactgcgttggctgccggtggaggcgcaggtggcagcagcgcggcacgtcgtggccgacatccagtcacacgcagcggtgtgggagtgtgtggactcgctggtgcggcgcgtcgtgacggacacggagcagcagcggctggacagcgcgcgcgcgcacgcggcggaggtggaacgcgacaccaaacagaagcgcgagcggtgggacatcgagtcgcagcggcttgacgacgcagtgccgccgtccaatcagcacattgacgcgctgtcggcagccaacgcgcagtcgcaacgctcaatcgacgatttgtcgcgtcagatcgccgctttggaggcggaagaggcgcgactcgcggaggtggcgcgcgccgaactcgatatccgcgacttagcggcactgcacacgcgcgcgctcaagcacatggcgcgttttctcgttccgcgcgacctgtcggcgctgatcggcacgtgcccgcgatgggcccatgcgctggaccgcggccccctgtggcgcgcggtgtgcgtccggacagcgcggcgcatcgaacgcgacagcgccaaagcgcgtgagcaaaagccgacgattccgccaaatgtcactctgatgctcgataatgcgatcagcaaaaaagacaaaagctccagtgccaacgccacggatgtgaaacagaagctgtttgacaagtgcgtgggtgcaattcgggacaaagccacggccgcggcttcggagacggaagacgcggcgtcgaaagcggccacagagcggcaggtacgcgcgttcctgcagcagcaggtggcagaggcgcgtgtgcgcatcggccaaagtcgtttggagcagctcagttgggaccggcggatggaggacgttcagcgcgaaaaggcacacgtcgcgaaggagatcgcacgctgtgagcggcagatcggcgacatcgaacgcgacaaacagaacgcggagcaaaactaccgccttactctgaagcaactcaatgagcgcgtgcaggcgctgcgtgacatcgcgcagtacgcgcccgcactggccgcagcgacgggcaatggcggcggcggcggtggggcgggtgtgctttcggtggaggataaggcggcaaatgaggcgaaattggagcagctgaagcgcgataagaaggtgctggtgaaaggcgtcaagaaactgcgcgaagagctgcaggacgtgacgcgtgcccgcgatctgtatcagtcgcagatcgacacctggcgccagcgcctcgacgcggcgcagacgcacgccgcagcggccgcattcggctccgcaggtgctgccggcgctgcccggtagcgacgcgtccgctgatgcgacgctctcgcgctctgcagtgaacccttttcgacttctgatttcatttcttacgcttgtgacacgcgcgtgtttggtgaaaagactgttccatgatc

SEQ ID NO: 13123 - DNA, 4710 bp, Oryza sativa
  ref <308>: DATABASE ACCESSION NUMBER: AK110471
  ref <309>: DATABASE ENTRY DATE: 2001-12-06
aaaacacgcaccatcgggtgagcatttgagttgcccaatcgcatctacccatttttgagttgccggctggcataccacaagttgtttcgagtcctgctagggatatcaaaatataatatgttgagctagtaggtagtggagcgatctgccagcgaacagatcaacaacaatgggttctccagcatggtggagcccagcgatgccggagctggttcatagaagggagttgatgcaaaatgtggagaagtggcagaccatgtatgttcgctacaagtgccaaccagaggcccaggttacacagaccggctgggacttggccatgagccagcgctatgcagatcagctggcgttggaggagcagcagccatacctcagtgaggagagcttgctgtacaatggcctggctccaaccaacattgctctgcgcatcgtcgaggcaccagcagagtttgcagtgccagttaagcaagacaggcggctgacccccaacttcaaagtgcgtgtggaagtgaccttcaagcaccgctgctcctttcccctgacactgaaggcatacgtcatatcccaacaggagaaggacagcgtgcctgagtgggtgcctgatgacttcttggacccggacctgccacagcggaagccagtcacagagctgaagggaactacagttatcacacaccattttgagggctctgcagggggctctcccaagcatggcgccgcagcacacaagggccagcagaatcagctgggcaacctgctcagcggggcgctgggtgacagtgcagcagcagcacaggcgctgctggcaaagggcgcagaccctgccttgctggccagcatggggcttgcaggagacatggacccgcgcatgctggagcaggtgctgcaggagacagcacggggtggcgccgtggacccagccacggctgcagccctggcagcagcagcgcagctcggcggcggcaacaccacgctggatgcactcagcaacgcgctgggcggcggagcagccgccatgcagggtgttgaggcccacatgtcccacgactacgagttcagcagcgtggagctagtgaagcccacacgcatgaacaaggtctacctcgtgtttgcatgcagcatcttggagcaggacctgatgttcgtggtgtacaacatcccaaccgtcggcatctgcagggcggagcagcgcgccaaggcgtgccagaagctcggcgtgagctatgcggagctgggaggcgtggacgcgctgtttggggacaacccgctgggattaggccagccctcgaggtccatgacgcagccaaacggggcggcgggccagcagcagcgcaaacgcggcagcgggcagggctgggacgctgcgatgatgggcatggacgggttgcatcaaaggggctatggtgctgaagggggcataatgggcttgagtggcagcgacatgaacctggctgcattggcggctggtgggctggaccccaccatgggcatgggcatgcagatggacggcatgctgccgggcttcggcgccgagggcggcatgggcgtcataaacagcctggcaatgggcgtgaggcagggtggagcggctgcggatggtgacgctcagccgcgcatcaggcaggcactgagggatctgctgcttgaggagtatgagggcacaggcctgcaccgcaaactgagcccgctggacttacaggccctggaatgccaggctggcttccccattgacattgacagcagcggccagcaggtcaccatcagccaggtgcagtgggacgagtttgtggcgcaattcaggctggtgctcaagctgctgcgccagatagcaaacgtatggaaccttgaagacccgtgtgtgattgccggcttcgacatggaccggctgggcaccgtgcaggcactcagccttgagcctgtcggcaccttcatctgccgcttcagcatgagccagccgggctgcctggtgctcagctgccgagtggctgccagccaccccaatgcagacggcgacggcctgctgcatgcaatcatcaagctggatgacctgtttgagcggcgggtggagacctggatcagggactttgcgggcgcgacgcacattctggacgtatacaagaacaagcgcgtggacaagcgcaaggtgttcacaagcaactacacacggctgcgggcaatggatgtgctggatgcctacgacgacatttacatctgaccaccctcgggggctatcacggttgtgcgtggctggggactgtgtgcactgttcagcttgcatatgtccggccaagcaggcgcggcattgatgtggttgctggcggctaacgaggggtgaggctgtgtgttgctgcctacatttacgataggagtgctgaagccaacgttgtggtttgagcctgctcgccatactgcttgacagctgccgtgcttgctgctacatgcatagggctttgtgctaaattagattcattgcactcaacaattcaacagctacttgagtatgtgcagcggacccatgccatcaacatataaacttgactggagatttgcactttgcttgactggagggctgcagtgtgtaccaaaagcgtgtgtgcagtgtgcactggccaattcagtgaagttggtgatgctaattatattcttgagggctcatcaactgccttgctcaagcagcgttgggtttcggctttatgctgcttgcacgttgttctctcaagtagctggctgactgaggacagtttttgtagtcctttcagacgcattcccaaagtgtattcagcgcattgccaatgtgtagcccacaggggctgcaccctgagcaaatgcagtagggtatctgctgctgatgatagcaagctgcataccagttgtgcagcagcagttggggctgggcttgtaccgagcaggtgtgtgctgtgactacccagggtttgcaccagttgcgtgaagcgccctcttggtgtgtgccagctgaacggcgactgatagtagctgtttgtgatgatgctcagtgtcttgttgtccccgctttcctttggttttgttagctggtttgcttgcagacagcgttgctgcaccctggtgtcttgggtgtaccatccactgcttggcaagctggtgccgtgagcagctagcctctgtttgctgcagacaaatgatgctgcaaagccattgggattaccccgtgcggcaagccttcaggcttgcgggtgacggctgcggtagcagttttgggtgctacgcatgttgtccaaccgcacaggtgctggcctgcttgtgtcaacacaaaacaattggacatcccacttgtactgtagatgcctgaagaggaggttcaatgcacctaactctgctgcaatgtcagcagccttggcaatagtggtctagcagggcagtgtctttacttgataatggcagtcgtggccctgagccttgttattgctttgcgtgttggtttgcatgatcaggcatgtcattgcgtggcgcagcacgcaagctggtctgcatgattggctaccgcgcctgcccatcatatgcatgttgtaaaacagcttgaaagatgcccagcctctgagcttgcacttggaaggcatgcgtgcagcagtctgtacacacgtaggggcttctgcactgactgcaggctgtatgcgttggtggtgtgtgcctgcctacctttgtgggcaatgcatcatagcaagtgaagggtcatgcactgagacaagcaacactgcatctgccgcagcgccactagtgctcttccagcagtgcctcctgcattccagtagtgacctgagttccaaggccctgcttcatgcatgctgttgccagaaacttgctgaagcagtgctccagtggtgccaccagggcgccaagcaccaatggcagtgataatggttgatacagcagggctgtaggtcttgagctacggctctggttgcatagctggtaagcttcggctctgtttgtatgtgagtgtggtggtggcacggctttgctggttgtgtgtagtgctggcgccgtaggttgtgctaaaggcatcgccagggctactgctatgtttcaggctgggtggtgcccttgtagagtgtgtatgctgcatctgacggtttgggcacgggtgcttgcagtacaggcaggggtcatctgacccaacagcatgaagccagctcacaaacctgtccattatgtccatccactggcctctgcacgtgaacaccgttataaggactcacaggctgtgggaaggcctttgatgcattcctgtgcctgtggagggctgcgtttgctgactttcatggatgtggctaagcaacttcagcagtcttcccaatagcttttggttcctagttcctcaaggagggctttccagcactgtgtcggcacatgcatgtgcatatgcacaggttgttacaggacacaggaaggtcacacagcatgatgagcgtgagttacaggtgcacctgtacgatgcatgacactgttgcgagcaagcctacaccacgcttaggcgcgctgcagggtcttgacaggttgtagcttgggattatccatagccttcagctagctgtcaggtacctgcttcgccggtgtagttttgcactgtatcacacacacgcgcggaaacagtcagtactggcccccctctgctacggcatcattaccagtactgactgtttcccattatgcgtgcaggtaatcatgcgatgc

SEQ ID NO: 13124 - DNA, 2452 bp, Oryza sativa
  ref <308>: DATABASE ACCESSION NUMBER: AK110472
  ref <309>: DATABASE ENTRY DATE: 2001-12-06
ttcccactcacgccattcaacgaccaacacgacaccacacacctcagacggactcaccgaccaacaccgaccagcgatgatgaccgcgccgaatcagacacagcaggccttcgcgcgtgtacccaccgacgtactgctgcatcgagtggcgaatacattcctcaccgaccgggacgcgcacgcactcgcatcgacgtcacatctcacgctgcgacagctgcgtcagtatgaggtgaagcgtcgcgtacggagtggcgtcgccgcggagttcggtgccgaggtcggcgtcggcgtcggtggcagcaccagcagcggcagcgtgagcgcatcattcgcgcctcgcttcggcgtcatccgtcgcgtcctcttcgccggcgagtacgcgagcttctccgtcgcgtgcgagcatctgcgccggctgccggtcaccgtccgcgcactctacctcgagaccgcgacgcccaccgccggtgatgccgatgccgatgccgatggcgtgtggcgctggccggcgcaggtcgaagtgattcactacgccaactgcccggctgggttcatgtatggcaccctcggcgcaccgctgccgggtggcctcctcgatctgcgcagcacctaccaccaaagcctggaagcggagatgcaagcgcagatgagcgctctgccgcgcacgctgcgacagctgacgatcgccaaggacagcctcttcggcgcggcgcccactaaagtgccgctgccggcggcgctcccgccgaacctgacgcgactctgcctcgcggccgcgaatcagccgacgagcacactgccggacctcccgccgatgctgcgccatctcgacttcggcgactactggaaccagtcgctcgaagggtacgtcttcccgcccgcactccagacgctgaatctcggcggatgggacggcgagatctcgacgctgcagctgccgtcgcgactcgagtcgctcaatttcggcgcgcgattcgatcgttcgctcgcgggctggaaggcgccggcctcgctgacggaagtgaagatggagcggtccatgttcacaggttggcagcgaccggcctcggagctgatgctgccgccgtcccttcgcaccttcacggtgccgctctgggatgaacgaactccgctcgatggcttcgcgccgccagcgggactgaccgagctcaagtttcagaatctgccccaccatccgctggccgcgatcacctggccgccggcgttgaagcgcctcgagctgccactcaacagcaatgggtgcgaagcggcgatgctccgcgatctgcgcctaccggctggtcttgtatcgctcgccattacgacgaaccggtggacgaccgacctgcccctaccggcgtcgctcactgagctcagcatcgcatgtcggtacgagttcatcagccgactgccggatcacatcaagactctcacggtctgcagtctcgagcacccaggcgggccagccctcgtcgcgagcacgcctgccgctggtgcgacacactggcctgcgtcgctgactcgactgtcgatgcgcaactgcgaaggctatctggcgccgggctggctaccggagggcctccttcatctctccttcgatcgacaaggcgcggaccgacgtcgcagtggcgccatcaccgatatgaccgtgtacgatgagcccaactcgtttccgctgccgtcgacgctgcagaccttgcgcttcaccggctggttcaatgtgccggtacagcaactcaagctgccggatggactgctggagctggcattcgactcgaccggctatgcgtccgatgagttcaaacagctggtgcatgaatggtcgctgccggcgagtttgcgccggtttatcgtcgagggtcgcagcttcacgctgccggccagcgcattgccgcatcgtcgactgagtgacctgccggaggtgcagcactacttgcaggatcgcgctcgtcggtatcccgctatcatcctgtcgccgtcgccaagtgacactggttgcggcttcggcttcggtggcttcggcagcggcttcgacttcgttcgcggcttcggtaccagcagcttcggctcaggcggctctggtaccaaagtgtcggacgatggcgctagcgccttccgtgcggaggccaagctgcgtgcggacatcgcggcggccgacgccgacacagctcaagtcgatgatgaccgcgatgccacggccgtacatctcgacgccgatagtccacacccgtcgaagcgacaagagagcgactaatcgggatggccaaaagagcaactcatcggggtggccacgatcattcttcttcgcgcgctgctggcagttgcaggcgaatgtatcatctcgccttactccttcgaattcctgcgctcagacccaagcaggtttaagcaccacttgttttttttttgcattcagtcctcaccagcatacacgtttacatcagcatcg

SEQ ID NO: 13125 - DNA, 2644 bp, Oryza sativa
  ref <308>: DATABASE ACCESSION NUMBER: AK110473
  ref <309>: DATABASE ENTRY DATE: 2001-12-06
aagcgaaaaaccgagtttgtatactcgataaactaaggcgtgtgccgtgacgtgacgccgctgcgggcgtaagcactgaagcgtagggccgaagcgcagggccgaatggtggcgtacgaattcgtcgttgagtcggcgctgctcgtgagcgtgtcgctggcggcggtggccgtcaatttgcggcagatttggtggaatcggcatcagccgtcggtgccgctgttgcggtggtggtactggcgcgtgtcggcagcggccgggctgttgctggccacaggcggcatcgattcgcagaatggtttggagcttttccctgaccaaacactgccattcctcaccgccatgttcgcttccatcgccatcaacgcattgggcgctctctttgtcttggaatcggccaaagcgctgtatcagacggagcgctccaccgcgccactgtggctgcagcgcctcatcgtcgtcgtcgccagcgtcgtggcgtgcgtattggctgcggccgtcatctacgcggcggctacacagatgctgttcggtacggtggtgattgtgttccccgccgtaatgctgttgttcgtgcagttcgtcggtttcgttgtgctgtaccgccgcttcagcacgacgctgctcactcacgtccagcgcttggagcagcgccaacagcgcatcactgcggccggtcagcagcacggcacgggatcgcgctcaccgcacggctcccacaccgctggcactgcagccaccgccggcactggcactggcactggggctgagggtgtaacgcgagtgcaattgggcgtcacatcgcagcagccgccgtcgccgctgcacggtggtgagtcgcagcataagcagcgcgccgaccagccgctgctgcctgccggggcggggcagcccgtatccccgcacaacgtcatgtccgctccgtcaccgcaggccgcagcgcccggccgtacattgggccgtacaggctctgtggcgtggaacgtgacggccgaacagcagctgcagacgcaaacgcagccgcagcagcccatgagcgctgcactggacacggagtacgtccggaagacgcttcggcggttgtggtggttctgcgccatcggcgtgtgcgggtgcggccttatggtcactgttttcttcatcgtattggtgcaggcattggacgacccaaacactcccttcgacctgtcgcggccgcggcccgtgcattgggacagaaccagcactgtgggtcaagcgctgtgtgtgtgcgcgctttgggtcgtcacgtggtacggcgcggcgccaaagccttcgaagtatcgccctcacagtgccatcgccagtgcgcccgcacccgctgcggctgccgcgcccgccgtcgtggccgtacagctcgccggtccgccgggcgccgacacggtgttggcgtacgaccgcgaacgcgagtccacggccggccgcgtcgatgcgggcgtgacgggtggccccattgtggcgggccctaccaccggtgccaccactcccgtcaacgctgcggccggcggcggcggcggtgctggtgacgaagcgactgcggcgttgggctatttcgggcctccgcccgtggcgggcggttacatgcgcggcagcacgacgctgcacgcagacagcgctgtggagcacacggtcacgcgcactgccgcgccgctgcccgttgcgaccggcgcagcgctgggcgccaccgctgcggcgcgtgagcgcgagcgtcagcgctatggcgccggcacgggcctgccgccgcgcccgccgcgcgccccggatgggagcgccgatgtggcagcgccagcggctgctgctgtcgctccaaccgctaccggtagcagcggcggcggtggtggcggcttccgcgtcactccgacgcacacaccgccgatgttgccctccggcggcagccgtgcaggttacactgcaggcgctggtggttccggtgctcaatcgctggtggccggcaccaccggctcgcagggcccggcgtcaaccgcttaagccgctcccttgccctccgccttctgcccttcgccctccgccttctgcccatcgtctgccggtgccgaaggctctcgtgtgttctgttgtgttgtgcttatgtcctgcgactgtgattgtctgtgtctgtaccaaggcgtgtaagcgagagctgcccaattacttgtgcgcactgccatttgtaccgatagaaccccccctgtgcggcgccgccgctgactgtcgcgtgtgccgtctgccgcgctgcaaacttaaatgccgcgcgactcaaaccctgcgtcccgctttactgccactcactcgcttcaacttagcgcacacgccgctatcacgcccaaatggccattctgtttcgcatcacattcagcgctcatttccatgcccacacgttcgtcccgtttgctttcgtacgaaacgctttcgctcactttcccgcccgctcccacgcttccaccgactccgttcaacaccgcgactattcatcgccgatcaccgcagagctgctactgcgacctctgtcctttgaaagctgtattatgagcgccgccgccacttgggccgccgcacgcgcactgccgctgctgttccccttcacttcgcgtcttcgctgtctgcgcgctgtacttccacgtgctgt

SEQ ID NO: 13126 - DNA, 2290 bp, Oryza sativa
  ref <308>: DATABASE ACCESSION NUMBER: AK110474
  ref <309>: DATABASE ENTRY DATE: 2001-12-06
attttgtatacacgctacatgtagttgtagactgcagagcaaattgaatagtaaacaatgaagcgctgccagagctcccggccgacggcggcagtagctgccgtcgttgcagctgtctccatgatcatcgtcctcgtctccggcacggccatcccgtcggcggccgcggcggcggccgtcgagcacacgttcgtggtgagccaggtgaatatgacgcacttgtgcaaggagatggcgttcacggtggtgaacgggcagctcccggggccgacgatagaggtcaccgagggagactccgtgaccgtgcacgttgtcaacaagtcgccatacaacttaacaatccattggcatggagtgtaccagttgctgaactgttggaacgacggggtgccgatgatcacccagcgccccatccagcccaaccacaacttcacctaccggttcaacgtcgccgggcaggaaggtaccctgtggtggcacgcgcacgacgcctttctccggggaaccgtacacggtgctctcatcatacgccctaggcacggcgccgcctcctatcccttccccaggcctcacagggaggtccccatcatcataggggagtggtgggagaaggatcttccacaggtggacaggaacatgaccaacggttactttgatgattactccagtgggtcaacaattaatggcaagcttggagatctcttcaattgctccggcgtgttggaagatgggtacgtgctggacgtagaacctggcaagacgtacctgctgcgaataatcaacgcggcgctcttctctgagtacttcctcaagatcgccggccacaggttcacggtggtcgcctccgacgccaactacctcactccctacagcgccgacgtcgtcgtcatcgcgcccggcgagacgctcgacgccattgtcgtcgccgacgcgcccccgtccggcaggtactacatcgccgcccagcccatccaggcgccgccgcccaacacgcagacgccggagtacgccaccagaggcacgctgcagtacagcagcaacagcaggaactcgtcagccgctgccatgccggagatgccgcaccagcacgacacgatgagatcgttctacttccgcggcaacctgacggccggcgcgcgcctccaccgccacggccggcggcgtgtcccggcgcgcgccgacgagagcctgttcgtcacgctcggcctcggctccgtctgccgccacggcggcgcgtcctgcaagagagggggcaacctgaaggagtccatcgtggtggcgaacgtgaacaacgtctcgttccacatccccgccgcggcggcgacgccgatcctggaggcgcactactaccaccgcctccacgccggcgccggcgaggaggaggaggagctcgccgagcggccgccgagggcgtacaactacacggaccaggcgctgacgccgttcgggccggaggagatgcggctggaggcgacgtcgagggcggtggtgacgcggcggttcaggcacggcgcgacggtggacgtggtgttccagagcacggcgatgctgcagggggactcgaacccgatgcacctgcacggccacgacgtgttcttgctggcgcagggcatcggcatctacgacgcggccagggatgagggcaagttcaacctggtgaacccgccgaggaagaacaccgtgctcgtccccaatcttggctgggcagccgtccgatttgtcgccgacaacccaggggcatggttaatgcattgccacttcgaattccatttgtcgatgggcatggctgcagtgttcattgtagaggatgggccaacagtggatacatctctccccccaccaccggaagatttctaggacggaaggccatgaagagaatctcctctcctgcgaaattaattcttacctccaagtctcaggaggcatgtacctaaaaatataattttccaccgttaatagttttcgaataaactagataaactaatgaatcacatgtatgttttcttcgaggcaaaatgtatctgtgtgaatttcatatatctttcctaaacattaattgattaggctgttatgccaaaaagatctctatcaacaaataaggtagtacgcacatttattcatagagataggtgtgtgtttatatgtttcgatttatcacaatcataagactataagtccacagggtgtgcgcgcctttttaatagtgagtacgcatgcagttacacatgtaagtatatgcatctgtaatgtatttgcaataagaaagagaaatgcactatgctacgatgct

SEQ ID NO: 13127 - DNA, 2777 bp, Oryza sativa
  ref <308>: DATABASE ACCESSION NUMBER: AK110475
  ref <309>: DATABASE ENTRY DATE: 2001-12-06
cagccatacccaggtgccgcgtccggaggtcgtggccctggtgtcttgctgccgctgacagggcgtcgccggcagttaccacctgtgcccaacgtacggagcgccgtccaggtgctccggcgatgggtgctgcctgcagaaggggcgaacaccatgaatcccatcccacgggcggtcctcggccgccgcggtgcgcgcagggcgcgctccgccgttgccttcctcgcgtccgccgccgtggtcctcaccggcgtcggcgtctccgcggccgctccggcgaaggcggtggtcggccaaggcttcacggtgagccccgccgacctcgagttcatcctcaagcagatcaagatttccgagtaccacgcgaacaacacgaccacgacgaccggtccctgcggcgcgctgctcggctccggcccgaaccagatcgcgagcccgctgctgtcgttcggcctgcggaccgtggacggctcctgcaacaacctccagtcggggcaggagaccttcggcgccgcggaccagacgttcccgcggctcaccgagccggtgttcagcccggccgaggactcgaacgtccctggcatcgggcccgtgggcccgcccggcgcgaccagctacgcccagacctccggctctgtcgtcgactccgagccgcggacggtgagcaacctcatcgtcgaccagacctcgaccaaccccgcggcggtcgaggccgccggcttcccggtgcgcacccagggcaacgagggcgtcgtaccgtgcaccgtcgacccgtcgccgggtgacccgaacgggacgcccgacggctgcgtgccggagaaccagacgttgttcatcccgaacgtcaccacggacgtcggcctgtcaccgccgttcaacgggctcttcacgatcttcggccagttcttcgaccacggcctcgacaaggtcacgaacggcggcggggccggcaccgtcttcgtcccgctcaaggccgacgacccgctcgtcacccggggtcccgacggcatcgcaggcaacggtgacgaggtggacgagagcctgcggttcatgactttgagccgcggcaagatcgtgcccggtgcggacgggttccggaacgcggcgaacacggacaccccgttcgtcgaccagagccagacgtacacctcgcacgcgtcccaccagttcttcctgcgcgagtgcgacagcaccagcggcacgccgaaggccaccggtcggttcctcgacaagaccggcgacgaccacggcctggccacctgggcggacatcaagacgcaggcggcgacacagctcggcatcgagctgcgagacgtcgacgtcaacgacattccgatggtcgtcaccgaccagtacggcaactacatcccgggcccggcccggggggtgccgcagtatgtgctcgcggacggcgtcacgttcgtcgagggcgacacggccagcccggtctccacgagcgggttgaagaagatcgggaccgcgttcctcaacgacatctcgcacagtgcagcaccgacgcagggttccaccgcgctgacaccggacagcgacaccaacaccgggaccagtctcgacccggtcgcccccggcgagtacgacagcgagctgctcgaccagcacgcgatctgcggggatggtcgctgcaacgagaacatcgccctgcaggccgtgcaccaggtgttccacaacgagcacaaccgcctggtcggggacatcgaagccaccctcgccgccaacccctcgctgcgcgacgcgtaccaggccgtcaacctcacgccaggcagcgaccggaccttcacctacgaggagcggctcttccaggcggcgcggttcgtcacggagatgcagtaccagcacctcgtcttcgaggagttcgcccgcaaggtgcagccggcgatcaacccgttcgaggcgttcgcgttcaaccagaccgacgtcgacccggcgatcacggccgagttcgcgcacgcggtctaccggttcgggcactcgatgctcaccgaggacatcgcccgcaagaacccggacgggtcgaacaacgacatcccgctgctcgacggcttcctcaaccccgccgagtactaccgaggagccggaggcgccccggtcaatgccaagcaggccgcgacgtcgatcatcatggggatgtcggaccagaccggcaacgagatcgacgagttcgtcaccaacacgctgcggaacaacctgctcgggctcccgctcgacctcccggcgatcaacatgacccgggcccgcagcgagggcatcccgccgctcaacgaggtacgccgccagatcttcgcggcctccaacgacggccagctcacgccgtacacgaactgggtcgacttcgggcaggccctcaagcacccctcgtcgctcgtgaacttcgtggcggcgtacggcacccacccgatcgtcaccggcgccaccacactggcgggcaagcggaccgccgccgagcggatcgtcaacggtctggtccttcccggcccggacgggatcctcgcggatgacccgctgaccctggacgtcgacgagagcgcggacaacgtcaacccgccggccgactccggcgagttcatgttcggcactgacagctgggcagacgccggcggcaagacgtccaccggcgtcgacgacatcgacctgtgggtcggtggtctcgccgagaccaccaacccgttcggcggcctgctcggcacgacgttcaactacgtgttcgagaaccagctgacgaacctgcagaacggtgaccggttctactacaaaaagag

SEQ ID NO: 13128 - DNA, 3404 bp, Oryza sativa
  ref <308>: DATABASE ACCESSION NUMBER: AK110476
  ref <309>: DATABASE ENTRY DATE: 2001-12-06
tcaagatcgcacagggtgccaagcctggagagggtggccagctgccaggcaagaaggtgtcaccatacatcgccaacctgcgccgcagcaagcctggtgtgcccctcatcagcccaccaccccaccacgacatctactccattgaggacctggcacagctcatctacgacctgcaccagatcaaccctgctgccaaggtgtcagtgaagctggtggcagaggctggcattggtgtggtggccagtggcgttgccaaggccaatgctgatgtcattcagatcagcggccacgacggcggcactggcgccagccccatcagcagcatcaagcacgccggtggccctgtggagatgggtgttgccgagacgcaccaggtgctggtccgcaacgagctgcgcgagcgcgtcgtgctgcgtgcggacggcggattccgctccggccgcgacgtcctggcggccgccgccctgggcgctgacgagtttggcttcggcactgtggccatgattgccaccggctgcatcatggctcgagtgtgccacaccaacaactgccctgtgggtgtcgccagccagcgtgaggagttgagggctaggttcccaggcgccccagctgacctcgtcaacttcttccactttgtggctgaggaggtgcgtcagggcctggctcagctgggtctgcggtcgctagacgagctggtggggcgggcagattacctgcagcagcgcgatgcaccactggccaagaccggcggcctggacctgtcattcctcaccacatatgcaggcgagtgcggcaccagcagcatccgcctggctcaggcggtgcacagcaatgggccagtgctagatgacgaaatcctggccgacaagggcattcaggaggcgattaggacccagggcactgtcagtaagtcatacgacatcgtgaacgttgaccgtgctgcgctgggccgcatctctggcgctattgccaagccatacggcgacaacggcttcaagggtgccatcaacctgcagctcacgggcagcggtggccagtcgtttggcgtgttccttaccaccggcctgaacgtgcacctaacaggcgaggcaaacgactacgtcggcaagggcatggccggcggcgagatcgtcattgtgccgccgccggcctcgcctttcaaggcagagagcgcgtcgctggtcggcaacacttgcctctacggcgccaccggcggcaagctgtttgtcaacgggcgtgcaggagagcggtttgctgtgcgaaacagccgggcggacgctgttgtggaaggcactggcgaccactgctgcgagtacatgactggcggctgtgtggtggtgctgggcactgctggcaggaatgttgctgctggcatgactggagggctcgcctacttctacgacgaggagggtgatttccctgagaaggtcaacacagaaattgttgccatccagcgtgtggttactccagcaggcgagcagcagctgaagggcctcatcaagcagcatgctgacaagacgggcagtgccaaggccaaggccattctggcagattgggccagcgccaagggccggttctggcagctggtgccaccagctgagaagaacacagcgcaagtcaaccccgcagttgatgacaccactgtggcagcagcagcagcgccagtgcaggtggcagctacagcgtgatttacagggctgtgttactgtgagaggtcatgacgtgtgctctgggtgtttatgcgtgtggtttgcttgttcagactgacgttgacggtctgcaggtgcacagtctcaccggcggctgcgattgttctgtacacggcaagccgctgctgtggggagagagaggagtggcctgaggggtatgtgagttgagaagtgtgaggctgctgcagctattgctgcagctgtaaacaccctgtcctgttgcagtgagtttagtggtgtgtcctggtgttgaggggactctcagtgcggtggcagcagtgctgctcccccccccctcatcatatgcgtgcagtggatcgagtgggtagtagctgccgcagcaggcttatcctgcttgcaccgtcatgactcagggttgtgcaagtacaagccttggatctgcgaatgaaacaactgcagctgctgtgttactgcaaggtgacagcactgtcggcagctaaagttgttcgcctgccggtttgtgtgccaggagtatcctgctgcttcagttcggctgctttgcatggggttgagaggaggcctgactgtcatgcgtgcgggcgcatcaattttgtgcagtcagtgaaatgcccaggatgatgcccggcacagcattgagtgaaggtgcagaacagaacagcatggcatgttagatcatcagatgatgatcagggtacgttgctgtgtgtgtagctgtgagctggctagcaccatcaagactgagtcattgctggtgggctggttaaatacctttggtctcaaagacctgcatgttacacgcagttgcgttgtgttcagacacacatccttgtggtcctgagcagtggcatcctgctgtactttaagatggtttgaccgtctttgccagcctgagcctgtctgcaattattcacccattaggcagtttgcttgtaatcctgcgcgccattggcctggcatgcaactgcgtgccagggcaggccagcagttgacagctgtgcatcagaattttgcccagcgcttgcagtgtgatagcatctgggctgcagcagtgcggagtggaggcttctttacgaacagaggtgttgatttcctttcacaccactggcaggtttgtgcatgtgcacttcatatgtgcgttctgtatgctagcctccgagactctcctgcgctgtagatgcggtgatctcggcgatcacgcagcaccaaatgtatagcgagtggtagagtggaaacagaacaggtaggcaccgtttgtgtgcttgacaatggaatggcagcagctgccatgacaatggagtggagaaacatggttggaaggcggtggggcctgccactgcagtactatgtacagtacactcacatttggcttacgccatcacctctgctgcctggatgattgtgtgaagggcttggtgggtgcaggccgcttaatcgtctggtgataagctggcagatgcgtgaagggcggctgtgtcagactgagcggggcagccccaccatgggatgcacaggtcatgccaagcattgcaaaggttggggacagcagatagggtcctgatgtgtgtcatgttctgaaatgacttcttgatcaggtagtgtgcgacggctcttgtttgctctgtcgtctttgcagcagcccaagccccatgcgctctcagcgccaggctagtgcccgtatacaaactgatctgtctgtgtaacccgatatgcagt

SEQ ID NO: 13129 - DNA, 3448 bp, Oryza sativa
  ref <308>: DATABASE ACCESSION NUMBER: AK110477
  ref <309>: DATABASE ENTRY DATE: 2001-12-06
attgctcgaggcaacggctcctacatcaggaactcgccctctgtctcttccacattgcgaagcccttggtgtcgacaatttgctattcgcttctcgtccctttcctgcacttgcctcttgaggagtattctcgaggtgtacaatcttacaatagccggatggcctgttgagcagctttcccttcacagtcgaaccgcgacccagcgtcgccagatccgtatcgttaccgttacgtctttcttcagcatttcctgtcccaatcgcccatcatgccgccttctctcaacgcccactcttccttcacccggccgaggaccggtgatcgcgagggacgcccgagcgcccgcgatcagggtggcgacaatctgttgatcccgagccggacctcctcgctgcattctcgaatcactcaacccattccctcgactctcagcaacaagccccagcagcgcactccaaagactctgacccatgcttacatggtgtgcggtgtcggccgcgagccctctcaatgggtcaaggcgcccgcacctgctcagggcaagattggccacatgaagggtgccgtcggccagttctggctccctgaaatcctcggcagcagcccgcgcctggagcaagacaacgagattgctcgtgctctccacgcggccatgcgtgcctgcttccctcacgatgttgagatctgtactggtcgcagccagcctcactgcgttcaccatgccttcgttctccagcaggactcttcccacaccctgtacggtatttctctgcgcgtctggtcacgcgccgacgagaagagggccgagaccatccgtgatctgcgcaagagaaccgagcccgatttctacgacaaccctgacgagacatactggatcccgtactgcttgtctttcctgtctcgctaccccctgtataacctgctcggcgactacctcaggggcatgtggattcactggaacaaggccaccaacctgttccacgccgaggaggtttctcgtatcctcagcttcccggcccctcgcctgaacgacctcgtccgcatcgacatgaaggactacgccctgtgctatcagttcccttcgtctcccactggcttccagaactttgccatgtggcccctgttcacgtgcttgtcgatccccaacattgtgggtgtaatcgaggccgccatctcgccaacccgccgtatcatctttgtgagccactaccctgctatgcttacaatggccgccgaatcgatccgctactgcgttcgcgtctatgagtggagcggtctctatgtgcccgtggtccacgctcgtcacgccaaggagcttgtccaggaacccggtccgtacatcttgggtgtgactgcagaatgccgatctctattcactgcacccacagatgcccttgttgtcgacctcgaccgcaatttcgtccttacctcaagccccccgactgctctgacaccaagccagcgcaacaaatttgttacgcgcctgactcagtctctcaacggcgatgtcactccctctggtgttccacagcatcttcgctctgcctatggcggtggcaagctagttcccgctggtcagatcatcgtcatgcgtggcgaggttgaatctattcaggatcccgagtggtggaaccaggactctgtcatggctgtcatggaccacgtttgtgagaagatgggtcgcaatactggtatcaaggccgttttcggcggctctgtgaagaagcccctcatgaccaaggtttccatgcgtcacctcaacgagattgtccgggagaggaaccagtactctcgtgacgctctcgaggcttggcaagatttcatcaacctcaagggtcgcatggacacggagctcagcaaggttacgaagcgcaacaactaccttgttgaggagctcgagtcttggaagcagcagttcctcaagttccaggccttcgctgagcaacttaccaaggaaacccaagacctcaaggtcaagattgagaaccacaagcgtgagaatcgccgcctcgccggtctcattgaccaacaaaaggacgacaacgctcgtctctcagtgcgtctcaccggaaccgagaagcagcgcgatgatgcccttgaggcgcttgtcctccaacaggagatcgctgaggagctcgagcgtgagcgcaagaggaacaagaaggagctcgctcagcttcagcacaccaacgccactatcctgcgtcagcgtgacgaggctcgtcgcgttgttctgcacttgcgcagcctggttggcggacagagccaccacatggagcacatcgtgcagtcacttaccaagcctgatgatctctcttctgaaattgaggagggctacgagatggaagaggatgacgagaagtcttctgaaaacggcaagttgagagcctcctctcgtgccagcaagaggcaatctggcgctagcttcgtcgatgttgccgatcgtcacctcaaagacaagaccgatgctattgctcacattgtgcgcaacatcgccgagcagtgcgctgccgctgttgagagcctccagctcgcccaggatgccgagctccgcgagaaccgccgccacagcaacctctccgctacccagagcgaggacggccactctgccgccacctcagaccttggcgaggacagcctcctgcagccatccggcaggacgtccagcatccctcccactccggacttgatccccaaccgcgccagcactgcaatgtccttcgcttccacaaccaccacacctgagcgatccagccagcagtacatggtcaaggatgatattcctaccaagattgtggaagacgaggaggaggacttcgaggatgctcgcagcgacaatggccacgccgctcacgagagcggcgtggtctccaagcacacggagtccctcatctcgcgccctgctggcgctcgcatcagcgcccttggtggcactcggtaatggcgtgttgtttgataccctatgagaacccttgcatctccttcatgagatgactgcaagcttacacagcatcttccatgttctctgcaacgccacgtctgtaccgttttacccggcaagaacggtggctattgttctttgatatacctcttgggctgcattgctccgcggcgcccatcttctagttgatcttggcggctttaggatttcaaaaacttttctgggcaactggcgttgaaatgtccttttcccttgcgtttaccgcgctccctgtttttcatacctgtcgaattaccatgttttgatcttgcagtctgaggccaagcaagctttgattgttttctctttgtccccttgttctttcttgaggctggtcacagcggaggatgtcttctgggagtcggtatgaaagtgtgtctgttctatgatagttttcggggacatttcgattctcgacgctccttgacgcaactttagactaccagcaatcgacgttcttaaacatg

SEQ ID NO: 13130 - DNA, 2973 bp, Oryza sativa
  ref <308>: DATABASE ACCESSION NUMBER: AK110478
  ref <309>: DATABASE ENTRY DATE: 2001-12-06
aagcgaaaaaccgagtttgtatactcgataaattaagcccgtgccatctgcgaagccaccggcagtcatggcagccgcagcgccggcgccggccaccaccgcgccggcgccaatgagcggtcaaatgccggccacgaaagccgccgctcccccggtgaggaccggcgacgggttgatttggttgcgcgtcgccgtgtaccagtgctgcccgccgacactgaccgatgtcatcgccgatctgcgccatcgactgcacgcgttgacgcgcggtgtggaccggccgcattacgtcgtcttccccgagcacttcatcagcacttgcggtcggtccggattggccgacgacaagttcgatcacaccgacgccaccgccgcatccgccgttcaatccgaactcacgcgtttggcgccgtttaaagccgaactgttgagtgcactgcacgaactcggcgttggcgcaatcgtcggatggcacgaacactcggaaccgccagcaccagcgattgaatccggtgccggtgccggtgccggtgccactgcagtgtcagacgctgacaccaaatcaaagccacacccaaagccgatgcacaacgcctgtgcgttggttcatccggtgacgggtgcggtcacttatacgtaccacaaacgcggtgtcgtatcggacgagagtttggcgcacatcacacgcggcacacgaccgggtctgtttgcgctgcccgttccagtggacgccgacgccgccgctgccgcggccgctgcgggcgatacaaaggccgatgccggtgtattgggtcacgtgcgggcggggatttggatctgctccgacgcagagtttgacggagttctacgcgatgtgttggcgccggccgacgccgcgctcacgccagcgcttgtgttccattccgttcacatcccatgcagcagcgaagctccggccggcgtcagtgcgggtgcagcgctgcaggtgcacgcagcggcggccggtgtggcgcgcgcttcacagcgacacaaattcgagcacctgacgcgggcgcacgggtgttgggtggtgcgcgcggattacccgctgccgcttggctttggcacgagtatgtgcatcggaccggctcacacgctcgtgccggcgacccattcggatgcgctctttcactgccgcataccgctctcgcgcgcggctctgctctcagttccgccgggcgctgcaaaggcggcagctgcgggtaccgtaacggctgcggacgtcaaaacgcccgccgtccgcgtggatgtcgcgacaccacccgtcagcccggcactgcaatgggatgcgctgatgcacgtgccgcagctgacgcgttccgatccgcgggacaacaacggctatcgcgcggtcatacgcgcgctgcagcacccggagcgtgttcacggcgatgtaccaccggcggtggcggcgtcgagtccggtcatcgcgtgcgtggtactgggtggtggcgctggtgcgccgctgacggtgcagtggctcgcgctgctgcacgctaactcctatgtcacgctgtgggacgcgcatcggctgtgtgtggccgctgactccattgcaccaccaccggatgtcgtcggcataacggcgttggaggcatttagtgttcagtcgccgcagccgacgcccacgcccggcgctgcggccaaagcggtcgcgcctatccgctggcgttacgcgctattcgtagcgtatgccggcagcgctgcggacccaaagcgcgccggcgtacagcggtggtttgcggtatccccaactgcgggcacgccgccgggccgtgccgttgggcagctgcagcacgacgaagccactgcgctgcgtgtgacgtgcgttgccgccgacgcgctgcaagccggtgcgggccgttgtgactggtgcgcggcgggtacacaggacggtcaggtgatgctgataccaatcccgacctccgcaccggggacgacgtcggccgccgacgcgccggcgccagtgggtgcggtgaaatatctcacgtcaacaccggtatcggcgtatggcgtcgcgtcactggccgtttgcggacgcgagcggctggcgtttgtgacgggcgacaactgcatcggtgtgtgtgacatcgcgtccggcgccgttgtgatgtgtgaggacgtgagcgagcccgcggcccggtcgcacccgcacgtggtggcatcggatgacgcgtcgttatgggtctgtgcacagcagcacgcagacgatactgcccgctgtcagctgacgcactaccgcatacccacgaccgacggcgatgccaaacacaaagcgacccaaaagccgtctgaacggcgactgactgtggccactgtcgacctcagccccgtggccgtactgcggcacgcgtgtggcgcgctgacgattgcgggcgcggcgtggtctgacggcgcgttacgcatcgctcgacttccgctgtcgaaccccgcgcatggcgtggcgcagtgcgtgtttccgcgcgccgccaccgacgatcgcgcaccgtcctctgctgctgacgctgccgtacctgcggtcacgtgggccgcggcacggcaggtggcgcccgggctttcgacggtctgtatcgtgacggtggtggtgcgcggcgccacggtcgtcacactcgacagtgcgggcggcgtcaccgtccattcgctgacgctcaaccaaacgccgatcgcgtggatcgacgcactgcgcgatgagtagccactgcctgtcggctcagtggacgtgcagcgtttctcaccgtacctcggtttgtatgagagttcgtcttgatttggtgcgctgtcgcgtctgtttcgcgcttcccgtttctcccgtgcgtttcgccgcagctgtgaccacgtgatggtcaagtctacccgccgcggcttccagtattgttgcccgcactacttcgtgagacaccgctttaccggtattcgcagtgttcagagctttgaattgtgcgctttgtggcgttc

SEQ ID NO: 13131 - DNA, 3296 bp, Oryza sativa
  ref <308>: DATABASE ACCESSION NUMBER: AK110479
  ref <309>: DATABASE ENTRY DATE: 2001-12-06
cctgcaccatctagtcacagccgtagtggtgctttcttgttgcattggtgtggcagctgttgttgactgaagtggttgccagatcgtggtagagcaattctgctgagcagggcttggaaagatgaattggctggcagaagtcagtaaccttgtgctggggcctgcagaggaggagcaggagcccgcaaaagacgcagctggcacagcgaaaattgaagtgtttgccaaagcaggaggaggcgccagcagctgcagtgatgggagtgctgctgatgaggaggtggacgcggagagcgaactggcaaacctgaacttgggtaactctgacagcagggatggctaccttgccgaggttggcaaggtgctcatgcagcccagcaagatcagcaaatacatcggcatggacatgacgaacctcatgagcgtgccgctgttcatcatggagcccttcagcatgctgcagaagatggcggaaatcatggagtacacggagctgcttgaccaagcagatgcagcagacgacccatacgagaggcttgctctggtggctgcattcctggtatcaccatttggtgctgctgagcgcacctggaagcccttcaacccgctgctgggcgagacattcgaaatggagggcgtaggcaatggcgtgcgcttcctggcagagcaggtgtgccactcaccaccagtgagtgcagcacatgccgaaaacgaccacttcacctatgacattgtgtccgcaccagccaccaagttccagggcaactccctggaggtgtatcccaagggccgcacacgcatcagcctgcgccacactggcgaggtattcagccatgtgccgccccaggccaaggtgcacaacctggtgttgggccgcacctggattgactcgtacggcaccttcctggtcaccaacaccaagaccggtgacaaggtggtgctggagttcaagccatgtggctggtttggagcaggccagtatgaatttgagggccatgtgctagttgctgagggcaatgccaggcttgccatgagtggcaagtggaacagctatgtagatgtgtgcgcctgcaacccggatggcagcgagatcgagggagcagagctgcggcggctgtggacatgtgcagagaagccagctgaggatcagtacggctgcacgcactttgcttgggacctgaacaacaccaagcacctcagcaggccacccatggcgagcgacagcaggcggcgtgcagacaggcacgctctgcaggagcgggagatggtgcaggcagcagcagccaagcagcagctggaggaggaccagcggcaagaacgcaagctgcgtgaggagcgcggcgagcagtggcaggcgcgctggtttgagccagcgcctgacatgcaggtgctgccgggagaggaaccagctgacgttgttccgctctggcgctggaatggcaagtactcggagcagctgcgcgacagcttgccaattggatcagacaactggcaagacgatgtgtgtggcaagggcttctccacgtctgtgcctgtagccagtcagtagtggaatgtgcgcagcatagcctgcacctgttgactggatgctgatctgtaggactgcagcagacccactgcagctgtgccagcggctacgtattgctgaacctttcctgctttgaggctggacttggttgtcggtagcactcacctgcagacaagtcgtggagccacagtagtcctgccttaatagacggttgtaatgtaccataggctagcaaccagcatggaaattcctaccttatgcaaacatagatcattgatgcagctgcacaagcaggttcaatgggtttaatatgtgtcgcattggctgctgcgcttgacgactcctcgtgccctgtgccagctgtgctgtggcttgttcctctgtgttttgtattgcacatgccatacatatttacatatggcatatctgtgagctaggcacatgcagccatgcatgtttaccttaggcttaggaaacttagcttcttgtcaggaacatggaggtcagcagaagcgtaacctgaccatgtgctttattacaccgagttgccgtacagtgtcgtgctaggtgtctgttctcgttgactgcataagcgtgggtgacttctgcagccagtggtggctgtgtttggcgtgtatcctacgacagcacgggctgtgaagagatagtcgcagggcaagtctgtggtagtaatgacatggcagccggccagctatagcccagcgcctgccttgtacgcttgccacaagcagcccagacctcgtgtgctgcggtgatttccacacctgggctctcgacgtcttagccgcatgttgctgatggtaatagttgactgctgacggttgcatcacctttaacacaagggcagcacatacgactacgctgttgggcttgtgcggagtggcaagcgctaccgccagctttatgggaaggctgcagtctgtatggtgtgcatgctgtcaatgtgttttctggtgttggtgatggtcacatgacctttgacgcaagagtgcccttcatcatctacgacttactctgcaagcacaggtgcctgctacttgcagagtgggcttgcgctagcacagtgtgtgcatgtttgtagcacaacaatcgtggggcaggtgcggtgtgtggaaagctgttagtgaggtgctactcttgttcagtgattgcttttttgatgaatacgcatccctgtgctcagcagaggctgtgcagggatgcaaaactgccatgctagaccaggtgcgtccaggtgcagaggcctgtgacactgccattttgcagaccgcagcacagcgccctttgtgcaggcagacgtgactgtgattggactgatagcgtgatcaacaaaactgttcacatgcagcattgccttgccgctgcacttcatgtgacattgccttgcacccttagcttgcaagccacccaaccaacctagtggttgcagttgccatcagaacatgatggtcatgccatgatgaggggcgtgccagctctgaaaggctttgggtttggctttgaagtggctagaacgtctatattaccagtttgcccgccttgcccttcttacacctgttgcattgccactcaggccaatccgtatgtgtttgggttactacttggttcacacctgaaagtgagtctccacgcacaggtggagtaggcaccaaaggggatgcccagcatgagccatgcatgagcttgcgacgtgtcaatttggctgtgcatgtcactgtgactcactcgtgtgatgtttgaagctgtt

SEQ ID NO: 13132 - DNA, 2792 bp, Oryza sativa
  ref <308>: DATABASE ACCESSION NUMBER: AK110480
  ref <309>: DATABASE ENTRY DATE: 2001-12-06
aagcaaacgaactagctagtagcccgaccaggaagaaaaaaaaaagcaagagaaagctagctagcaagcagcagctggggggcatggcagagacggcgatcacggcggtgctgtccaagttcggggagctggcgtcgcgggaggcggcggtgctggtgcaggtgggcaacgacatcatgctgttgcgcgaccgcctcgagtggctgcaggccttcgtccgcgacgccgaccggaggcgccggctgggctccgacgacttcacccgggtgtgggtgcgccagacgcgggacgtcgccttcgacgccgaggacgccctcgaccacttcttccacaaggtcgatctagaggcccagggttaccgtggttggagaatctggcgcagatacttaaccggctgcaccacgcaaatctctgttcgacatgatttatcaggccagataaaaagaatcaagagcagactagaccagatatcagagaatcacaaggaattcaagatcgagcatacacctggggcatggacatcttccatcacagaagttgctgcatgggacaacattggggacgctccggtgggatttgatggttacttgagggcactggagaatcatctcctttctcatgaacatactccacagcaaagattcatttccatattgggggagactggtattgggaagagcacactcatgttgactatctgtaacaaaatcattaaggatcatgaaaatcattttgataagttaatctggtacaacatgccaccaaattctagtgcaaatgatctcctgaagcaagtctatgaaagggcaccggataaagtaccatcagaaggggaagatactgatatcaccaagaagctccgttcttttctgcatgataagaggtatctagttatcctgggtggcataaactctataacagtgcttaattgtgtgaaggcaagcttgccagacaacagaaatggcagcagagtggtgcttatcttagagcctgagagccaggaagttgtaaagcatgctgacaccctcaacaaaaaagtagatgctgattccaaaaacattagtggaagtacaatccagctgggcaggttgaatgaaagccaaagtgcagaactgttctgtcgcagggtctatggttacaactacacgaagccaagagggtataaagtcagttacaatgaacaagtctttaagataactgggggtcatcctctagcgattgtggttttggcaggactattacggtcaaaagagatgcctgtcgagtgggattcagtgctgcaacagcttatgcctggcgtagaagcgggagagagtcaaggtaacaagatagccggtgttctcttgacgaaagaaaagccctttgagtgggatgccttgctccagcagttgatgccaaccacagaagctaaactgtccaatagaatgacaattgagaggatcttctcaacaagttttgatgacctcccgcatgacctcaaatcatgcttcctctactttgctgcttaccctacaaatatcactcaccctgcggatcagataatgcgcatgtggatagccgagggcttcatcaagccagaaaagggcaagaacatggaggacctagcccaagaatatctcaaggagcttatctcaaggttcctagttgaggttaaatataggaatgaatgcgaaaagattgagttagtgcaggttcacaatcgacttctacggttcctgcaatcagaggctcgtgaagctagcttcattgagattcatgataacactgatgttcttgcaccagcagcagtgcgccgcctttccattcagaatgacagtggaaactatattccttttggaaacagattccccaagctgcgttccttcatatgtcgtgtcgaagagggagaaggtgccagcgctacaccggacctgaagaatgacccaaagaacataccaaggaaagacccattaaagtttctgtgtggctctaaattccttcgggtaatctccataggtggaatacatcttgctgagctgcccgatgcgattggcgatatgattcacttacggtacataggtgttaccagctgtgatttggagaatctcccatcgagcattggaaggctcctcaacttgcagaccctagacataaggaacagcaaagtcaaaattattgcgccaaaattctggaggattaagacattgcggcacgtgatcgctgcacagcttcaactgccaaactccgttggtgaactgaataacctacaaactctacatggtgtaaaacctgcggaaaattggggtggactgacatgtccattggacatgatgaccaatcttcagtctttggagttgcatggatttaatgatgccaaccatggagtagcattggaacgtgctctccagaagctagagctccttgggcatttgaaattgactggggacaagattccatcatctgtgttcactgcaccaagccttcgctatgttgagagcttagttcttgatggggatattaaatgggcagataattcttcaaatacttccaactactcaccagaagttgcattgggcatctgtgagttgcgaccaaaccttactgtgctcaaattgaatagtgtcagtaaggagctcgaggagttcatagagaaaattaggccccaccttacagtatatgaatgtcccacacggacagatgcttagaaaaaattctgaagacacgcgtggttcaaatttcatatgtgttacaaatcaacaaggaatatggctcaacaggctcacaaataacggagttaaacccaaatttctttc

SEQ ID NO: 13133 - DNA, 2744 bp, Oryza sativa
  ref <308>: DATABASE ACCESSION NUMBER: AK110481
  ref <309>: DATABASE ENTRY DATE: 2001-12-06
tggccggatctcgagtccggcctcccgtacgacgtgcaagccaaggcagagagagaatgggtaaaggcaacaccaagaccaagaggcgcgataagtactattacctcgcgaaggaccagggcttccgctcgcgtgccgccttcaagttggtccagctcaacaagaagcatgacttcctttcgtccgcccgtgccctcatcgatctttgcgccgcccccggaggctggctgcaggtggcggccaagtacatgcccgtgagcagtgtcatcatcggcgtggatctggtgccgatcaagcccatccacaacgtcatcacgctgcaggaggacatcaccacgccgcggtgccgcgccgcgatcaagaagcacctgcagcactggaacgccgacgtggtgatctgcgacggtgcgcccaacatgggtaaggcgtggatccaggacgcctacacgcaggtggacctcgtgctcaaggccctcaagctggccaccgactttctgcgccccggcggcacgttcgtgaccaaggtcttccgctcggccgactacaacgcgctgctgtgggtcttccaccagttcttcaagaaggtcgaggccaccaagccccaggcctcgcgtaacacgtcggccgagatctacgtcgtgtgcacccactacctcgcgcccgacaagatcgacccgcgtctgctcgactccaagcacgtcttcaaggagctcgacatgcccctcaagaagcccgacatctttgcgccggtcaagaagaaggtgcgcgccaaccagaacggctacgaggagggcaactacacgctcttcaagacctgctcggtggtcgagttcatcgaggccaaggaccccgtcggcgtgctggcctcctacaaccagatggcctttgacgacggcgcccgcgcgctcaagctcgaccagcacgcctcgaccgagatcaaggcctgctgccaggacctcaaggtcctcaacaagaaggacttcaagaacctcctcaagtggcgcctccgcgcccgatccctcctccaccccgaggaggccgaagagaaaaagaagctggcggagggcctggaggacgtggaggtggcgccgatcacgcgggaggagatggaggagcagctcgacaaggagctcgaggacaagatgtccgagctcgaccggaagaagaagcgcgagaagaagaaggagcgcgagcgcaaggccaagctcaggcagcgcgcggccctcggcatggagacgcccgtcgacggcggcgtgcaggagcaggaggccgacctcttctccgccgagtcggtgctccgcaaggacgccgccgaccttctcctcgaccaggcccccgacgaggtcctcgagtcccccgaagactctgaagaagagaatgagtgggccggaaagaactacgattcgtacctggatcatcagctggactcaatgtactcggcctacgtggagcgcaccaagaagcgcgcgccggcggctgagcccaagaagaagttccggatgggcgacgacgccgacgagctgcccgaagacgagcgcttcgacggtgatgaggaggacgaggagtatggcgagaggcgggtgcgattcgacgttgacgacgaggaggacgggatggaggaggagacacacaggcccgccgcgagggccgacgcgaagaaggccaagcaggcggcgctctggttcagccgcggcatcttccaggacgtcggcgccatcgaggacggcgagcccgacgagagcgaagacgaagacgacgacgaagacgaggaccacgccacggaggtcggtggcaggagggccaccacgtcgcgaggccagaagcgcgcggccgctgacgatgacgatgaggaggacgaggaggacaccgagcagcagaagaaggtgaagcgggcgaggaaggagaagctgctgcaggcacagcagggcggcaacccgaagaagaagcagaagaagcagaccaagctcgaggaggaggagtcggcggcgctcgacgagttcgaggaggtgccggtcgcgccgtcggacagcgactcggactcgtccgaggccgagcccgagagcgacctggacgaggtcgccgccaccctggccatcggcaagaagttcttcctcaccaagaagcgaaagcgcgagttcgaggacgacggctacaaccgctacgccttcgacgaccgcgacgatcttcccccctggttcgtgcaggatgagaacaggcacaacaagccgcagaagccgatcacgaaggaggaggtggaggagatgaaggccaagttcagggagctcaacgagcggcccatcaagaaggtggccgaggccaaggcccgtaagcacctgcgcatgcagaagaaggtggagaagatgaagcagaaggccgccaagatcgccacggccgacggcatgtccgagcgagagaagatcaagtccatccgtactcttcagaaatcgacgctgggcaaggcgggagacgcgaaggcggcgccggtgtacatcgtgagaaagaagcaccagacggcccagtcgcggaagggcccgagcgcgggcaagaaggccaaggtcaagatcgtcgatccgcgcctcaagaaggacaagcgcggcgagaagcgcgcctccgacaagaagcgcggcggcaagggcgccggcaagggcgccggcaagaagaggagatgatcgtgcacctcatgagctccttgatcatcatcatcttttcttacatctttcattgaatgaacttcgaagaccatc

SEQ ID NO: 13134 - DNA, 2291 bp, Oryza sativa
  ref <308>: DATABASE ACCESSION NUMBER: AK110482
  ref <309>: DATABASE ENTRY DATE: 2001-12-06
aaccaaccgtcgtcgcgatggacacgccattgctgctgctgcttcccttcctggcggcatgtctgctcgcgccgcggcacgcggcggaggcggccgtcacgagctgcgcgccgaggaggtgcgggaacgtgaccatcgcctacccgttctggctgccggactcatcgccgccgccgtcgtcgtcgtccgcgccgtgcggccccgcggcgttccaggtgaactgcgacaacggcagccgcgcgtcgctggcccgctccttccgcagcgggtacaagatcctcggcgtgtcgtacgccaaccgcaccgtcgtcgtcgccaacgacaacgtccagaccgacgccagcggctgcccggtgcccaagatcgacgtccccgccagcctcaccctcgcgccgttcaccgccagcccggccaacagccagctcgtcttcctcttcaactgcaccagcagcagcaggccgccgccggcagggttcgtcaacgtcacgtgcccgggagcgaaggccgtggtccggctcgacacgagctacaacaacaccgccgccagagtggtcgccggaggttgcgactacgcggccgttccggtggtcggcgtgccgggggcgagcccgacggactacccgcagctgctccggggaggctacatgctggagtggagggcgcccgccggcgactgcatggcgtgcaatgccagcggcggccagtgtggctacgacgccgacacggaggcgttcgcctgcatctgctccgacggctcatcgcgcccggggatatgtgatgcaaagaagtccgggaacaaggtcatcctgatagtgtcactgtcgatctgtgcgactgggttggtgctattggcatgcatcgccaccgtctacaagtgtcgccgacgtatgcaaaatcgtttcagttttctgaacgccatggacggtgcaagcagaacggatactgcaaaggtggagaagctgctgcagagttacggatccctagctccccggaggttcaggtactcggagctgaagaagataacgaagtccttcagccagcggctcggcgagggcggctacggcacggtgttcagcggcacgctcgccgacggccgcgccgtcgccgtcaagttcctccaccactccaagcccaacggcgaggagttcctcaacgaggtggtcagcattggccggacgagccatgtcaacatcgtctccctgctcggcttctgcctcgagggctccaagcgagccctcgtctacgagtacatgcccaatggctcgctggacaagtacatctactcgacgtcggcggcggcggcggcggaggcggaggaggcggaggcgacggcgagccctgacagggatgttctggggtggaaggtgctgcaggagatcgccgtcggcgtggcgcgggggctggagtacctgcacgacgggtgcaacacgcggatcatccacttcgacatcaagccgcacaacgtgctcctcgacgagggattccggcccaagatcgccgacttcgggatggcgaagctgtgcaacccaaaggagagcatcctgtcgatggcggacacgagggggacgatagggttcatcgcgccggaggtgttctcccgcgggttcggcgacatctcgaccaagtccgacgtgtacagctacgggatgctgctgctggagatggtcggcggcgggagcaacgtcaaggcctacgccgagaagggcgccagcggcacgttcttcccgctctgggtctacgaccacctgctcgaggacggcggcgtgctgcagagcgtcgccgccgccgccgccgccacggccggcggcggcgccggatcaccgggaggcgaggagatcgcgaggaagatggcgctgatcgggctgtggtgcatacagaccgtgccggcgaacaggccgtcgatgggcaaggtgctggagatgctggagagaagcgtccacgagctcgccatgccgccgcggccgtaccactcgaactcgtcgtccccgtcgcggccgtcgagctacccctcctctgcctcggatttcacgcagcgatcaaggttatcaacaccgggaagcacagcgtgaaaagtggcgatggaatgactatacttgaagcagacaactggctagtagactgtaaattaaagaaaaccagagtgggagctttggttttgtatgtagagcagattagcaagaacaacaaaattagacgttattactgtttgaatcattaattcgttctcttatggttttctgtggaaatcatgtactactcctattcagttttagtttaacttgtgcttgacg

SEQ ID NO: 13135 - DNA, 3115 bp, Oryza sativa
  ref <308>: DATABASE ACCESSION NUMBER: AK110483
  ref <309>: DATABASE ENTRY DATE: 2001-12-06
attgccgtgccagtgtaggcagttgcttacgagaacaaggatggcagcagctctgcaaatcggcagcaggcccctggtgggcctgcgctctaggcagcacgtggcaccaaaggccccagtgctgagggctttcagtggtcagaacaggaacctcccaggccaggtccagccagctggccttgtgcccctgcagaagcctgttttccagcagccagccgagaagccagtgctggttgagccagtgcaggccgcagcaggcgatgccccctctgagggcaagaaggtgctgggatacgatgtgttcacctggcagaagattctgcctttgggtgcaatgttcttctgcatcctgctcaactacaccatcctgcgcgacactaaggacgtgctggtggtcactgccccaggctccggtgctgagatcattcccttcttgaagacatgggtcaacctgcccatggcgattggcttcacagtggcgtacgccaagctggccaacgtgctctctaccgaggcgctgttctacacctgcatcatccccttcatttgcttcttcggtgcattcgccttcgtgttctacccactgagggatgtgctgcacccaacagctttctgcgagaacctgttggagcaggcaggtcctcgcttcgcaggccccattgccatcctgcgtaactggacctactgcctgttctatgtgatggcagagctgtggggttcagtggtggtgtctgtgctgttctggggctttgccaaccagatcaccactgtggatgaggcgtctcagttctaccccccgttcggtctgggtgccaacgtggccctgatcttctcaggtcgcgccgtgaagctgttctctcagattcgcgctgagctgccacccgatgtggacggctggggcctgtccctgcgcggcctgatgggcatggtggtcattggcggcatcctcatcgccggcatttactactggctgaaccgcacagtggtgcctcgcgtgcagaagcgcgagagcaagaagaagaagagggcaaagatgagcgtgggcgagtcattcaccttcctggcaggcagcaggtacatccgtgacctggcgaccctggtggtggcctatggtatctccatcaacctggtggaggtgacctggaagtccaagatcaaggcccagttccccaaccccaacgactactccgcattcatgggcgacttctccactgccactggtgcagtgaccttcacaatgatgatcctgtcccgctacatcttcaagtacttcggctggggcgtggctgcgctgatcacacccacagtgctgctgatcacgggtatcgccttcttctgcctggtgctgttcagcgacagcgtggcgccaacactgaaggccctgggcctgaccccactgatggcggccgtgctggttggtgctgcacagaacgtgttctccaagagcagcaagtacagcctgttcgacccctgcaaggagatggcatacatccctctggacgatgaggtcaaggtcaagggtaaggccgccattgatgtgatctgcaaccccctggacaagtccggtggtgccctgatccagcagttcatgatcatcggcttcggctccctggcagcctccacaccctacctgggtgtgatcctgctgtccatcgtgctgctgtggatcggtgctgccaacagcctggctggccagttcgctgagctgaacgccaagactgccagcgagtgcggcgacagcatggacgcatctggcacccagcagttcaagtatgtgcttgatgccggctccaccaagggccagtgggtgcctgtgacctcgggcgagacaccctccggccaggtcaaggtgatgactcagtctgaggcagacgccctgaacaagcagtaaccagcagtcagcagcagcttgtgctggcggctcagggttgctggtggcgggggcaggggctggccagtgcgctgctgcagcagcccaggcagcagctggcatggcagctggtgctggtgctgctgcacgcgcgctggtatgttgccggcctaggattgcgcggtgcagcgcggcagcaattgttgccggtgctgtagtacgtgcaataggaggcttacacggcgcaggtgcatggtggtgcgggttctcctgtgggcggctctgcttcgtggtggtgtcaatggttcactgggagaccgcatgtgacatggcttgctgccaggtgcttggtgtaacccaggtgctgttgtgttgctgcgctcgtcactgttgcatgctgcaagtgtgctcaacgggcacccatgctgagcagtgcgggtgcttgtttgcagggaagggtggtgcataggatgctgacactgagcagaattatctagtgtgtgtttgcagtccttttaacccaaataagcggcactcctgtcgcacattggcgcgcttgcttcgccgcatgaagaggggcgagcaggtgtggaggtgtgtggctgcgcctatatctgttactgatgtgaacaattaacggtttttgttgtgcctgtagcccttgctgtggtgttgagcctttacaggggccagtggtgtggcgcccagctgttgcaggttggagcgatctaggtggctgctgctgcatcagtttgatgaccacactcactgcaggatggtgacggacaatggcgcggctgtgcctgtattgtttggcgcagctgctgtccatgcatgcctgcacatgcatttgctggctggcagaggttggcaggagggttggcatggcatggtgtgcaacaccgcatggcggccatgacatgcacctagttgtgtgcaagtgttgtgcacatgtgactgcataccaattggttgggagctcagccattcttgtgtgtgttgctgcatccattgtggtaggtccgatggcaggcaggggcgatatagctgagaagctgcatcgttttgctgctgtgggggtgtgcgaggttcacgtaacaggggctgcatttcattttatgtgacctgtgagaacaatggatgtacctgcttctcagaaactcaaacccatcatgcgaacagaatcatagctgcggcagccacgtggatctggtggtccacaggtgtgtaatgacaggactccag

SEQ ID NO: 13136 - DNA, 2465 bp, Oryza sativa
  ref <308>: DATABASE ACCESSION NUMBER: AK110484
  ref <309>: DATABASE ENTRY DATE: 2001-12-06
aagcgaaaaaccgagtttgtatactcgataaattaaggcgatgctgagggctgtagcgattgctctcagtgtgctgctggtcgcgacgggcgcggcggcagcggccggtgactacgtggtggtggcgacgaaccagcgcgtgcgttgccccacgtcgggcctcgtccacgcggagatggtggatgagctgccgaccgcgacggagttggcggcggaggcgcaggtgaacgtgcattcgctcgactccgcgaatggtatcgtgacgtcgcattcggtggactctgcggagctgcatccgctgcgcaatggcgtggccactaccgtgttcgcgtcggcgccgattctgtccgccgaagcgcaggccgaagcggacacgcgcgcgcaggagccagggttgttcacacccgacgcggtgcagagcgacgggctggcgcactcggcgtatgtggaggtggaggagggcgtgcagctgctgacggagaccgagcgccttgcgatgatggagaccgctgcgaacgcgcacacgcacgcgcaggtcggagtcggcagcggcccgcgcaagtacctggtgcacgcggggatgaacaacggcggcagcgtgttggcgcgcttcgagaagcagaccgccgcgacctgtcaggagcggtgtgagggcgacgcgcagtgcgtcggcttcagcgtcgtccgtaacccgcagaagcgcaagggcctgtgtacgctgcggagcacgtgggggtcggcactggacaatccggatttcgactcgtatcaggcgcacgactacagcgtcgcgccgacgccgtttcaggacattgagacgcacgtgaagacggccattcccgggcagcagctgctggttttggcggacttcgcgcgcgtcaagcccgcgcgcaatcagaagacggcggagctgctggtcagcgtcgaccacaaccagcccgacgccgtgtggacgaacgtgccgtcgaactaccgcgacgccaactcgttccgcgcaccgtccgttgcgggcgtcacgaacccgctcaagtcggccggtgaccacaccgttcgcatcgattactcgcgcgcgtttgagacgcccgctcagatggacgaccgcagcggctgccagcagcagcgcctgacggccattcccttccccattgagctgtcggccacgcgcgtgttcgacgtcgtcgggcagcactggaacctggcgcctgcctcctccatcactgcgaagaacttcgtcgccatccccgggggcgttccggagggggatgtggagggcgacggcggtgccagcgcggcgggcgatgcgggttcgatgagcatcaaactcgcagtgccggaggacggcgcgcgtgtgctcgtgttcgccgacatctcgcgcgtgcagcactcgcacggatggacgaactccgtcttccgcattaccgtcgacaatcaggaaatcgcattcaccaacaccggtgagcactacggtttccagtaccgcgccattgcactgcgcggcgcttcgggcagtctgaagaagggagagcacacgatcgcggtacaggccaagacgcagcgcggcaaactgttctttatctctgacggtaacgggttccagcagcggcgcctgacggcactggtcgtgccgaagggcaatctgtggaacaagaagtgaaacctcagcacggcgtggctcaagccctcgaagtgggcggagctgccgggcgcgcccatgcgcctcacagtgacgacggagcagatggggcagctgctcgtcaccgtcggcatcagccgcgtgcagtcgtggggtaacggcaacgtcgagctgcggctggtggtgagcggcgaaaaggacgacgtcgcagagggcgagggctacgagatcgcgcgtacgaacacgggcaacgtcaatgggtggcgctatcaggacgtgtcgttccacgccgtcacgccgctgctgacgccgggcacccacacagtgcgcgttcaggtgcgcagcaaatcgggctcaacggtcgtgttttataacgacggcaatggcatgcagcagcgccgcctctcagccgtgctcataccgccgtcggccgggctcaagtccgtcacgcagtccggcgtcacgtgtacgcccaaactgccgccgtcgccgctgccgcccgcaccggctccggctccggcaaaaccggccgcttcgggcactgcggcgactctggctgccccgaagcccaccgccaccaacacgcccgcagctccggctccgccggccccggcaccggctgctccggcacctacgcctgccgcatcggctgctgcggcggctgcaccggcggtgaagtcggcgtactaagcgcaggcgcggccgcagaactctgctgctgcacgcaacgcgcgcacgcgcgtttggctgctgttgcgcgctgctgctgcagcgttgattcgccgtctctccgccgtctttgcgtcggatttcgtcgaaatcaattgttttc

SEQ ID NO: 13137 - DNA, 3096 bp, Oryza sativa
  ref <308>: DATABASE ACCESSION NUMBER: AK110485
  ref <309>: DATABASE ENTRY DATE: 2001-12-06
cttttgtataatgggtcagcgacttatattctgtagcaaggttaaccgcataggggagccgaagggaaaccgagtcttaattgggcgttaagttgcagggtatagacccgaaacccggtgatctagccatgggcaggttgaaggttgggtaacactaactggaggaccgaaccgactaatgttgaaaaattagcggatgacttgtggctgggggtgaaaggccaatcaaaccgggagatagctggttctccccgaaagctatttaggtagcgcctcgtgaactcatctccgggggtagagcactgtttcggctagggggccatcccggcttaccaacccgatgcaaactgcgaataccggagaatgttatcacgggagacacacggcgggtgctaacgtccgtcgtgaagagggaaacaacccagaccgccagctaaggtcccaaagtcatggttaagtgggaaacgatgtgggaaggcacagacagccaggatgttggcttagaagcagccatcatttaaagaaagcgtaatagctcactggtcgagtcggcctgcgcggaagatgtaacggggctaaaccatgcaccgaagctgcggcagcgacgcttatgcgttgttgggtaggggagcgttctgtaagccgctgaaggtgtgctgtgaggcacgctggaggtatcagaagtgcgaatgctgacataagtaacgataaagcgggtgaaaagcccgctcgccggaagaccaagggttcctgtccgacgttaatcggggcagggtgagtcgacccctaaggcgaggctgaaaagcgtagtcgatgggaaacaggttaatattcctgtacttggtgttactgcgaaggggggacggagaaggctaggttatccgggcgacggttgtcccggtttaagcgtgcaggtgtgaagaccaggcaaatccggtcttctttaacactgaggcgtgatgacgagccgccacggcggtgaagtaactgatgccctgcttccaggaaaagcctctaagctccaggtaacacgaaatcgtaccccaaaccgacacaggtggtcaggtagagaataccaaggcgcttgagagaactcgggtgaaagaactaggcaaaatggtgccgtaacttcgggagaaggcacgctggcgcgtaggtgaagggacttgctcccggagccgaggccagtcgaagataccagctggctgcaactgtttattaaaaacacagcactgtgcaatcacgaaagtggacgtatacggtgtgacgcctgcccggtgccggaaggttaattgatggggttatccgcaaggagaagctcttgatcgaagccccggtaaacggcggccgtaacgataacggtcctaaggtagcgaaattccttgtcgggtaagttccgacctgcacgaatggcgtaatgatggccaggctgtctccacccgagactcagtgaaattgaaatcgctgtgaagatgcagtgtacccgcggcaagacggaaagaccccgtgaacctttactatagcttgacactgaacattgagccttgatgtgtaggataggtgggaggctttgaagcgcggacgccagtctgcgtggagccaaccttgaaataccaccctttaatgtttgatgttctaacgtaggcccgtaatccgggctgcggacagtgtctggtgggtagtttgactggggcggtctcctcccaaagcgtaacggaggagcacgaaggttggctaatcctggtcggacatcaggaggttagtgcaatggcataagccagcttgactgcgagagtgacggctcgagcaggtgcgaaagcaggtcatagtgatccggtggttctgaatggaagggccatcgctcaacggataaaaggtactccggggataacaggctgataccgcccaagagttcatatcgacggcggtgtttggcacctcgatgtcggctcatcacatcctggggctgaagtaggtcccaagggtacggctgttcgccgtttaaagtggtacgcgagctgggtttagaacgtcgtgagacagttcggtccctatctgccgtgggcgctggagaattgaggggggttgctcctagtacgagaggaccggagtgaacgcaccgctggtgttcgggttgtcatgccaatggcactgcccggtagctaagtgcggaagagataagtgctgaaagcatctaagcacgaaacttgccccgagatgagttctccctgaccctttaagggtcctgaagggacgttgaagacgacgacgttgataggccgggtgtgtaagcgcagcgatgcgttgagctaaccggtactaatgacccgtgaggcttaacctatcaacgaaaaactacgtgacagcgtgacacagggggtagttaattactagttattcgcagtgcgtgcgtgtgtgtgtgtgagcgatcgattgatcgagatcgacatggcggtgatcaggggtgtcgtggtggtggtgctcgcgctggtggtggtggcggcggcggcggcggacggtgcaggggagtgcggggcgacgccgccggacaagatggcgctgaagctggcgccgtgcgcgtcggcggccaaggaccccaagtcgacgccgtcgagcgggtgctgcacggcggtgcacaccattgggaagcagagccccaagtgcctctgcgccgtcatgctgtccagcacgaccaggaacgccgggatcaagcccgaggtcgccatcaccatccccaagcgctgcaacatcgccgaccgccccgtcggctacaagtgcggagattacactctgccatgagcaacaaagagtactgcatgcagtgccggtgccgtgtctgtcatccgcttaatttatcgagtttatgtcgtgttacttactaaagctgtatgctgttgtgcgttcgtgcagtttagtgtcagtgtcaaacaccaaataaaagggttccatcttccgtgggacttcgtgatttcagtccgtagagttgtttctccaagtccaggatagtgtgtacttgatcatattatctcggagggatgctgagacgctcccctgaattctctgaataatagtacaacttggtttgttcatcgattc

SEQ ID NO: 13138 - DNA, 2807 bp, Oryza sativa
  ref <308>: DATABASE ACCESSION NUMBER: AK110486
  ref <309>: DATABASE ENTRY DATE: 2001-12-06
gtttgaaggctgttgaaaaaagaatacaccagctgatcatccagcagtccttcaccttgctgtacagctctgcatccagatgcagtagtccagggtcttgacagctttcaggtcttctgcaaaaaccacatgatcacttgctttacgaacgcagtttgataatgaaacgataggaagtgggatcggagctccagcagcagagcgagtgggcgtaccaggcagatggtggaaaagcgtgcagcagagaacggcagtgatggcccagatccgaagaagtctcgcacagatggggcggcagcgccaggcaagccagccctcaacctggaggcactgcagaaagcaaaggcactgctggagaagcagaagcagcttcgtgagaagttgaaaaagcttccacaggtggcaggtgctggcgctgctgctggcgctggtgcagctgctgcgggcgtgccgagcgcagctgcacttgctgccagcgcccacccactggcacctggcggggtggatgcagcactagtggcagcaaaggcggcaaaggcggtggagattgcctcaaagtttggcgttcaagcctcccttgcgtcagtgcccgccatccaatcagcagcagcagcaggggcggcagcagcgccccggccgctgctgccgcctggcgtgtcaggcgtgccgtctctgcggccgccgctgccgggtgggctggccggcccccgcccgctgcggctggatgccctggggcgggaggtggatgaggccgggaacgtgatcgaagcggtgcgggcgccgatcacaagcagcctgatcaaccagcgtcggcctgaggagccgcttgcccccccagagcccgccggtcccagcaacgaggacttcattgaccccagcctggcagccaagccggcagccagggccggtgctgctgctgctgccagccaccggcgccgcaggggggcgctggaatttgtggaggaggggaccttcagcaggcaggcagagataatgaggctcaagcagaagtacggcgaggcggacttcaagaagcacctgcccagccacctgaggcggccaccgcgcggtccagcagggccagcagagcgggcaggaggcgacgcaaacctgaccccactgggtgcaccacccatccccgccctggctggcctggtgcagggcccacctggggcaatcagcgatgccaacctagtgccaataggagcacagcaggctgaggagaccgaggaagagaagctgcgcaaggtgctgccggaggcctcagcgcccccaccagacgtggagtggtgggacaagccgctgctggagggaggcgcctacttcaccagcagcagcagtgcagcagcagcagcagcagcagcgggcaagcagcagccgcatacagatggcggcgagcagcagcagcagcagcctgagcaggacggcggagagccgcagcagcagccgggtgagcagcagcaggggcagcagcagcagcaggacaacatcattgctgctgcaccggacggcagcggggcagtgatgcggctgcggctaggcaaggtgacgcactacgttgagcaccctgtgcctctggagccgccagcagcaccaccaccgccaccaccgcagccactgaagctcacaaagaaggagttgaaaaagatgcgcacgcagcggcgccaggcacgcgaaaaggagaaacaggagctcatcaggcaggggctgcttgagccccccaagcccaaggtgaagctgagcaacctgatgcgggtgctcggcgaggaggcaacgctggaccccacagcaattgagcaggaggtgcggcgccagatgagtgagcggcagcaggcgcatgacgaccgcaacctggcccgcatgctgacacccgccgagcggcgcgacaagaaggttaagaagctgttcgactccgggcctgaggccagcctgaccagccagacctgtgtgtaccgcgttgaggacctcagccatggccagcacaagttcaaggtggacgtgaacgcacaggagaatcacatgtcaggcatcatgctggtttgccccggctccttcagcctggtggtggtggagggctgccccaaggccatcaagcggtatcacaagctgatgctgcgcaggattgattggaacgccacacccctgccgcagccaggggaggatgaggagcaggaggaggcagcaccagcaggggatggggaggcagggggcaagccgcccaacagctgccacctggtctggcagggtgttgttgctgagcctgccttcaaggactttgtcaaggaggaggtggcatcaccagaggcagcatgcaagctgctggaggacaggggcgtggcgcactactgggatgcagcagccaactttgactttgacgcggcaccgctggcggagctgccatgaggactgcggggctgcaggactcctagctctcctagctcttgaaacggttgctagcgtgtataggtgtgagacattgtggctcagcaacgaatagcttagccgaactcaaggttgagttgtggcatttgagcttgggcagcttgggcagcgctagcagtgcctgaaatcactgtcatcccaacagcacatgacggcagcgctggatgggactgtgtgacctggatgaagcaggcagcagtttttgctggaaaccagcacacctgcatgtctatgcggtttatttctggtctggcgtggtggttgcctggtttggggctcctctggtggtttggggcggtactgcacatgtactgccatctggcattgtcaaagacgccactgtttgcctgaacccgttgatgttg

SEQ ID NO: 13139 - DNA, 2697 bp, Oryza sativa
  ref <308>: DATABASE ACCESSION NUMBER: AK110487
  ref <309>: DATABASE ENTRY DATE: 2001-12-06
aatggaagcaggagcttgtttgcatatcgtgtgtggcgcatcataactgaagttgccctgtgacacagccactgctggccaatgctccttacagtgacgatttcacgccaaatccaaacatcttaattgcctggtgccgggctgcatagcccggttgttgcctacgtgtcagccatggctcagcagcgagacaagaactggtggctccgcaacaggcagtatgtaatcattgctggagctgcaactgtgggcggctttgcggcgtacagggtctaccaggcctcccaggcacccctgaaacgtgctgctgacactctcgagaaatacagcacagcagcggccacagcgggcgatgtgcttgccatcctgtcagcagacatccacaagttcctctcctcagatacgaatgagctgccaaacagcctgcagcagctgggcaagctggctaggtcacaagaggtgcaggacacactggctgcatgcatcgcctctgcagtcaaggggctgctagccaccagtcctggggctgacggcatgcctgcagagccttcagtggtggacaagatcatagaggcagtgctcagcgaccggggccacagccttgtcagcctggcggtcaggacagcggcacagacatcatcggaaaccttctgcaatgtgctgcgagtgggcattgaggcagccatggggtcctgcagcagcagcaacagcagcagcagcagtagcagccatcagcagccagctgggagcccaacagtgtccccggcgcggcacaggagtttccagcaacaacagcagcagcacccggggggtcttcaagccctgcacccagcagcagccaccctggtgtctgtactagccaacccccaggtgctgaaccttatagatgccctggtgtcaacgacggtaggcagcgcagtgggggcgtacgtgcggcaagccggccaggagaacatgtttgattctgtgctggagactctggccaagccaggccacaaagaggtgattattgaggtgatgtcatcagtatcagcagccttttgccgtgaggtggcagcagcgtgcgtggcaccggcatcatcagtcgcctcgcggccaccctcgcgccttgacgccgccctggagcagcagcaccacgccacgcacacagtccgcgcagcttcagcagcagcagcagctgcagcagcagctgggcctggcagcagtccactcaagccgctgcatcccagcgccagccgtggcagccttgcagcagacaatggcagtgaacccagcacaccacagagcgggcccagcacgccagagccatcggttgcagctgagcctgtcggcgccagtgcagctggctttgccagccgcagctcgtttgcaggcagtgcagttgcagggctcatcctgcgccgcaacagcttcccagggctaggcggcagctggggctcaggcagcaacagcggcatcgtggatcctgcaaaccttgggccaatgagcacgctggtgagcctattcgtccaggctgcgcggtttcaggagtttcgcagcccgatggtgggcgtcagcaggagcagcacgcgagagtttgtgctgagcctgctgccaagcagctggagcctgtcgcagcgcaggcgcgatggcagcgcctcactggcgtcagcagcactgacggcgtgcatgtaccgtgtgtacaccaccatgtcggtgctgctgttcctgatgctgtatgctgtggggccaaagacactggagtaggcagcttgcagtgcagtgggttcagttaatctgagcctgcacctcagtgccacagcactacggtgcagagcactacgacagtctggagcagcaagaaacctctgggccaactagtaccatatgcagcaacttgaatagggcaacacaaccgtagagccgatggtgtggtagactactgtgatactgtatgaagggttttgtattttggtgggttttgacttgtgaaggctgatatcgtgcccactgccttgcaatcatgtgtctgcgtgagagcaggcaagtgatgcagccagcagcctctatttgtactcgtaaggcagcccctgaaaactggcgtatgcactgtactttttgaggggcacatgtatgtgtgttgttataattgccgctctacatgtattatgtgtgaacgtgcctgcgacagcccctttgtttggtgctgcatgcgtgttgaaggagtgaacttgctcagtcagcatcgtgtgtatcggtatttgtaacgacttgtttgcttgcttattcaaggtaatgtagcctagacacagtcgtggttttgcaattctgctttgcttcgtacagcacttgtatggcggtgtgcttggctgcacagctgtttgccctggcacgcacaccttctacctcgtggaatggctgcagcatggatgtgctgtatgcacacagagaacgtgcatgtttgcccttggcttgagttacctgctttgtgttatacagtcattgtgttcagggccctgtgtgatctggttggtgctgaggttgtgacagccaagcttgggcacaggcggccggcggcatgtttatacttgctgaatacacagctgtgcatacttatggctgcggtcttgggccggttcaggcctttgttgttattcaattgcaggaaacacggttacagcctcgactaccatactagagtgtaagttggtagtgttc

SEQ ID NO: 13140 - DNA, 3921 bp, Oryza sativa
  ref <308>: DATABASE ACCESSION NUMBER: AK110488
  ref <309>: DATABASE ENTRY DATE: 2001-12-06
acgctgcaccctcccatccagactagtacctgatctgcccgtgcctcgccgtccgcctgctcttcccccgcgtccctgctttgctcaagcgtgattcaagaagcatgatcgcccgcctaccaggcgcctctcagattccctgactaacaccttcatcttggggcaaccgcacacgcgagccggcccagccacagcgacacaaactccgccctaccccagacgcgcccgctgtcctgccctagcaccacacgactccgctgctgccctgcccgccggcaatgacggcgcaaatcctctccatgcatgctggccacccttcggaactgggcaagatacgacccagttcccagagaagatggacaccaatgtcggtcctgctgagccgcccacgcccgcatcgccagacagcggcgagggccggggacgacgccgcgaccgcagcgatgaagacggcggcgagggtgacgacgccccgggctcgcgaaagagacggcggagcaggaagggcctcgacaagaagttcgagtgtccgcacgagggctgtggaaagagctactcgcgcgcagagcacctgtaccgccatcagctcaaccacaatcccaagcaaatataccactgcgacttccccgactgccaccgctccttcgtccgacaagacctgtgcgcgcgacacaaggagagacacacggcgcgtggctcccaattgctgcgcaaggacacattcaacatgcacaacctcaatcccatcgtgacggcagcactgggatcgaagaacgggacgccacagaagccgatgggcatgaagagccagacaccgcatggtctgcaatcaccagcgtctgcgccgccaccgggtctcgcaggccagatgtcgccaccaaactaccactcgcccgcctcgacactgagcagaaacgactctctgcagcgcacaggcagcgacgacgcatatcgcagcggctctgagactaagccttatgatatgcagtcccagagcgctgggaactttgcacccccaccgcgtccgtccactttgggtaactacagtggaggtcggacaccactccacaactccccacatgtgggtaacggcagcttcacgcggcccgagctgcgagcacaaacatcgaacctctcctcgtatggctcgggctcaccctacaactcagccgtgacgccctcccagtcctacccgccctcggctgcgtctactgcataccaaggccattctgcaagtgggttccagtcccagcaaaacttccctccattctcatccttacctccgccagaatacccgtcgcactcgggcactcccgtgtctagagatcaggagaaccagaaccagtactacaatggcacatcgggccagactccaatgaatggtgtcgaatccaccgccgctcagctggactctcgtatgaatggtgtgtctgatgctatcatggaccaagcaccctcttacgccattccaatgtttggcggtgagggatacagtcgttcgccatttgctatggctgatgacttcgcggcgtggctcttcaacgacaaccaattcggcccgggtggcgcatcaccaatgggctatccaggcggaggcaaccccgtagcgggagcatcgtctcaaattggtctgcaggcaccttatttcaactacgatccatctgttgctggatacttgaacaaccctgcgccgccctccgcacaccccatggccgtgcacagcatccttgacacgacattaccagagtcggccctttccgaagaaaagcgcaaagaccttcttgagctcatcatccatcgcttcaatgagacagaccatgcgcttgtcaagaagcagaaggaggatatcatggagggcaaccgggaagatgaccaccacgtcctgagtttgcacatgatgcagacttacatcagctcatactgggtccacttccatccacagctacctattctacacaagcctacattcaacgcaagcacttgtccggaccttctcctccttgccatcatgtgcctcggagcgtcgtgtcttgagaagaactatggacacgaggtgacgcaagcttgttcagccttgtccaacttcctcgcatggcacctaagatgggaactgttcatggacgccgacttccgcccgcccgccaagctctggatcttccaaggcctgctgttgcttgagatctttgagaagatgtactcgacacgtcctctacacgaacgtgctcacattcatcacgcgactaccttgaccctgatgcggcgaggcagctccttgatcgggaggtcagccctggactctcccccaagcatcaaggacggaaagaacaactcgatcgggggcgcaaacacacctgacgagtggtggaaccattggatcacaaatgaagctactagacgagctgcattcgctgcatttgtcatggacagcatccatgcgacgatgttcggtcatagcgctgtcatggttgcacatgagatgcgtctccccttgccttgtgacgaggcgttgtggtctgccaccagcagctcagaagtcggtcgcgtcgaagcgagcctccactccaacggcatcaagcctttgagcttcctcgacggcttgaagaaaactttgaacgcccagaccgttcgaacaaactcgtttggtcgcactattctcatggccggcttgctgagcgtctcgtggcacatgaaccaacgagatctccaagttagctcgcttggtgtcacacatgcacttggaggtcgtgacaagtggcgaggctcactaacgcgagcgtttgatctctggaagcaggatttcgacagctcgttagcgcggccgaacgatctcgccgcgccgaacgcttatgcctactcgaacggagtggatgacgagaacgtattcgagtcgaggacggtactacaccaccttgctcacatggccatgcacgtcgatatcgttgattgccaaatctacgctggcgccggacgattgctgggccgctcgataactccgcaggactacaatggtgcacaacgccgcatgaaagaagtctgggccccgaccgctcgtgcacgtgatgccactttctatgccttgcagttcctctccaacgtcatggtcgcaggtgatcattccatgaaacccaacagttcgccaccatctggcttctcttactcggctcgagacgacttcctcctcaatcgaccgtgggttctctacttctccactcttatagtctggtcctacggatacgccctggacggacctgtaaaacagccctactcgattccgaagtacgaggataaggtaaaggacatggtcggctacctcacgcgcgttggtggcgtcagtaagcccgatgacctggccacacttcgtgatcgaaatgcttgcttgggtctattgatcatcatgcgagacatgttcaagaagacacgatgggagctgcttcacgaagcaagcaaccttctcacaaaatgcatcgacatgctcgtccctggcgctggcgatttgtagtgccacaaaatcacccagcgccaactttccactcactccggcgcttcggcgcaatatattcaacataccacctattatttctactgtttccccaaatcccaccaaattggcgagcgagtcacaacaagttttgttacgatgttatggcttctttgctctttgcaatttctttttatttgtcagcaatggggagcattgtcacgatcctatttctgtacatcattgcatctccccgggttggtggagtgctacagctgctttatacccaagggtggatgtgtttatgttcgggcctgttcagtcgaggaacagggattgtcatcggccatatattctgcagtgttgtccggtatatggtagtgatgatgtattggcagcacgagtgctcgctggggattaatgagaatgattgcgatgttgag

SEQ ID NO: 13141 - DNA, 3401 bp, Oryza sativa
  ref <308>: DATABASE ACCESSION NUMBER: AK110489
  ref <309>: DATABASE ENTRY DATE: 2001-12-06
tgtgattgtgattaatctgcactcccccaacgcgaccgacttgttgatcgcagggatgacacgcggatacgtctgcctcgttaaggaactgttcggcgccttcccgagagcgtggcggccgatcatggacaccagcgccttgttgaggcacgcgacgacggcactctcggttccagttgatcgccgggtcgtcgatgtgcatccgtcgtttcagcttgttttcgttggctccaagccgcttccggccgacgtgtccaattccgttaccatggtcagctgtgatgacgaacaaggtgtcaccgaggaagtttgggcccaacttttactcacaagtcgcccaatgctcgacatcgacgattccatcttcggcgatcttaaagaactgcataaagtcgaagggcgccgccttggatgccgagactcaatgtcatcgttgatccgggctcgtggcgcacgcattatcgacgacgagtcacttatcgaccagcttgatgaccacgtcacaggattcgtcagagcagtggctaacggttcggacatcggcaaccggatttcgcgcagtgatgaacgccgtcggcgagtggtgacaaagctggctcgtgcatgcgacacgctgttcgccgccttaaaggtcgcggagcgcgtcttccggcggtgcttcgcccttcacgtcggctttttcgtcgacatggtcacaaaggcgtacactctgaaccgatccgtgaacatggcagtggcacagcagaagcttgccgggatgtctgcgatcgaagaacagaagtttgtgggattgttcgtcttgcactccgtgcttgacgtcgtcgcgacctcgttcccggggtcggtccggaacatcttcggtgcttggctgacaatggcactccttcagaacgagctcttcagcgacaagcgtcccacctggtggtcacccgacgttgtgtcggagcttcgacgtgcactcttgcaacaaccgtctgctcaagtgagcggagctgtcatcatcaacacgaacatcgctcttgatctcgttcgcgcactcgacgctcgcgataacctcaccgtagcggcgacggctgcacaagtgatggacacttgcggccgctggatgtccaagggtggaagtgaacactcgacgtcgatcacacgtaaccacgtggcagcggaacttcgcacggaagtgaagcctgccatccggtggacagaagcgaatggcgttcccatcatgtgctcatccccagatggcgtttcggccgccgtcgctcaaattcagcgtcgcggctacgcagagcaatgtcgcgtggttatttcgacgccagtcacggtagatactgtcttcaccctgagcgaaagagtccgcgagaacgcgcgtggtagctccgtgtcgcccctggtcaaaggtgtgtggcacatcgccatcattcgcgacacaccgctcgacgcgatcgccgccgaagccgcgatcgctgcccttcttgagctcaattcgcgaggtgttttcacggaacgtgagtggcgctatcagttgtggttcgtcatggcggacgtctcgaagacttcttcgccgtcggccgcatatcaatcgctcttcccgtgttgtgtgcacttgagcctcggctacggaagcgcccgagagcacctgtctcattgcattacatacggccctgcatacccgcgggactggcgagaatcagttggccaccttcccgctaagttggcagcctgtgcggctttgcttcatgtttccttggccgaacggtctcacttcggagctcaaggcggcttcgctcctgcgaacattaccgacacggacttgtcgatcgtgctcgccctgctcaaaaagatgctcgatagtgacaagtgtacccttctggtgtcgaatccgttctccatcatgcggtacgcggcttactttgtgtacgcagcgcgatccagcaccgctttctactggagccgattgcagaaaattgtgggccatttcttgtccgtcgcgtcgatttccccagatttcttgctggcgggactagtcaatgtcggtgaaggcgacatctacgaaattttccaacgaagctttgccaccaccaacatgcacggactcgctcttgccggtcacgatcctcgagcttccgtacttcgcgcgaacggctgtggttgcttcaaatggatgattgctgcctcagaccctcgcgacacactacccgctgtcacggaagagccactgaccccccttcggcgcaagatcagcgttgttgacatggccctcggcaggcgaccaaactctcgcccaaactcaagcgcaagtcaagcgacacttgttccacaacggccctcttccggtcggccaccgtctggccctcgattaatgtcggtcgcaatcggcagtgcggcgatgcggatcgttggcgcgttgccgaccaaatttgcagacagcttatggcgagctgaattcgcttcgttaggtgctgcggaagtcgcaccgtacaccccgagtgatgttgcggaacatggccgcttcttggaacggcgcaaagcagcgctccatcgaggcatcagcgtacgtgtggccgatacgcgcagcgtctggcttccggcgctggcgtacccgcacctcttcctgcaactcttctggatgtcaagatcaaaagaagcttttgcagcggtagatgagcgtcaattgctcaacgtgcctcagggccatgtgatgcagcctcgtttggtgcttgtcgtcgccagtgatgactcacagcttttcgaacaaggcgattgcatcttggagagcgcttacgcctgcccctcaggagacgtcgcgtcgctcgtcgactcctggaagaaaaatgaaagcgatacgttacggcccatcaaagctgcgattcgggttcaggtatcgccagtcccggtcgatttcgccagcccgatttctcccgtcgtgtccttgctcggcaagcaggcagacccgctgccggggagctcctcggatacaaccgcagcgtcgttggtgaaacttgacattcccctgatcaccgccacaacacgacaagaacaaggtgttgagtcagtgatcgaaaacgtgggcctcaagctccttgccacgttgccagcagtgtatctcgatgcggcagcttcggccgccttcgtacctccgttgccggttgctgaaaccaaagttcttggaggacagtccgcaccagccctcttgtcgcccacaatgactgctggcgatagcgaaagcgatgacatcagcaccctcatgggagacgaaggcttggagggggcgctactggccgagcagcacgacgcgctcaaaaagtttggtgtccaagtgtccctggtgttcccctactaggctcgatgtacgcgtcaaggtcttcaaaaaatacggtagacaagcaatgcatccactccac

SEQ ID NO: 13142 - DNA, 3492 bp, Oryza sativa
  ref <308>: DATABASE ACCESSION NUMBER: AK110490
  ref <309>: DATABASE ENTRY DATE: 2001-12-06
atcttgcatcaacaccacgccagcggcctgcgtgtccgcgtccactctcttctattcgctctttactgcatactcccaagtaataatacttctccacgctccttagcaaaccttgtgcctcttcattcgttccagcccctccttctgcgcgtcactcgtactgcgaccccagtcaccatcctatctgatccgcgccttcccaacttggaaccttcaccaacttcgaagaaactcttcgacaacctaatcgtaattcttcaatggcagtctgtctgccaccactaatcttcgcgatcgttaccgtatacgccgtcgccatgcaacccttccgcttcttccttctctccattgctcttgcgctgtgtctccattctgtcgtcgcaatacctcaccaagcacttcgtcgacaagatggcgaccggtcggaatcgtcgcaagtacctccgttaaccactcctcgttctcttccaccatcggcaaccattgcaccatctggagatgcatcatcactgaggtcaagtgcggccgcttctacacaaacctcagtccagccctctgccacaggcaacatgcaagtgccagcagagactgcatctttaacgccacagcccacgtcttcagccacgattgatcccaaaaatcctctgccaattcatccaaaggtcacgcctgctatgggtttggcgggtgcgtttctgctaatcacagggctgatatatgccattatcggcatcaagaatcagtggatctatgtctttggctcggcagcttacctgaccgctcttgctgtcacagtgctgatcgtgtatctgatgaacccaccagtatctgatggcgtgcagggagccttcttcgttgcggcgttctttactggtctcatctttggtggtcttgccctcgtattctcagatctcacagaaggtttcggctgcctccttggcggcttttgtctgagcatgtggttcttgagtctcaaggaggacggcttgatcacatcgtcgactggccgtgcaatcttcattggctgcatgagtgctggcggatactccctctcgttcagccactacactcgcaactatggcctgattggatccatagcgttctcgggcgccacagccacgatgcttggtatcgactgccttgcccgcgctggctggaaggaattctggctgtacctctgggctctcaacgataacatctttcccctcaacacagacacgtacccagtcacgaagaacatgaaagcggagcttgcgggtgtcgtcatcattgctgtctttggcatcatctcgcagctaagagtctggaatctggtcaaggagcgtcgcgagaagaatgaagcacaggagttggaaaagcagcaagagaaggatcgtgaagaggaggaacgcggccgcaccgtcgaagacaaattccagaaagagcgtgcacagtgggaagccacatacgggaatggtgataagagcatgcaggagtcaagtgtcaggtcatcggtcgccagtcctaagggttctacgagcatccgcgagaaggaggtttatgctgatagcgttgagatggtcaacttatcgaagggcggtgtcgcggccgctggtaccactgttactgtcagcgtattgagggacgacgaaatccagcaaatcgacgagcacggcaacccgattccccagcatacgaccgtctcgaaaagtagagctagtatctccgagcgctcagtatctggcgcgtccgagacctactccggccttgctaagaagtcttctttgaacaagcgtcccgatccccgctcgtctcttcctcctccgcctgttgtcgttccattgccattcaccgtccccaccgaggatgacgctcgaagtccagctgatgacaacacatccgtttcagcagtgcctgagtccaactacgaacctgacgccagccgaaggcccatgtctaagcgaatctccgacatgtctatcacccgacgattttccaagagagcatcgcgtgctttctcagagtcctccgaagcacttgttgatgaatatcaggtcgaggacgatcgtgcatcatccattgcagcgacgctggacaacgaccatgacaacctctccgtccgcgagatctcaccggcacgatcaccaattacggaggacaacgtcgcaacgaaaacttcagatgcagtagatgtgaaggaatctgatgttgccacaacgcctcctgcagccaaacgagcagctttccgtcaatctttgacaagcagcacagatccaaagcccaacacgatggacaacaagcgttcatccctacgagactcaagaattcggtctgatactctggttggcgacaaaagtggaactggacagagcgaagagctgaagtcgtctcaaggatcacagaatggccgacccgagtcacaagttggcagccttcaagaaggaggagttctacctgcgagattatccaaggtggctctctcataccgaaccaacgaatgggcaaagcatttggagactgcagagaagccgcatatcgaggacctggcactatcagcgccaccgaacgtcatcctggaggaagttccaaaggaaaaggctgcgcctgtcagtgacgaaattgctgcaccgctcgtcggcagcaggcggcaatcgaagagagcatcggttgacagcgcgttcaacaagcccagcggactcgaccggtcagcttcgactttctcgcaaacctcgctccttgagcagcggacctacgcacaaccagccgcagcagctagtcagcccattctgtctcgatccaactctgcagcgcaatcccaagccgatgctcttgctccactacccaccaacacgctccttggccggcgagaggacttgatgaggaagcgaacctcatctcagtccatcaccccaggctcatcagcaaccaacctcctcgaactagcggaccaagaaagcatgtccctcgcccaacgccgccaaatcctccaacaccatcaagcctcatccacccccaccctccaacaccaaccctcctcggcctcggaaaaacgaagccccccctccacctcgcacaaatggcaaaacaagaactgggccatcaaaggcgcgcccgccggcttcgactcgcaccagcccaagcgcacgtcgagctcgcagtccgaccagaagcgcgaggagctgtacgctgcgtggcggagtaatacgcgagacgtgacgccgccgcagacacaggggtacatggcggagcagcagcgcgcggcgctgatccaggagagaagaatgaaggagatggaacgtcagcagcgggtggcgaaccagcagcagagggcgagtcagatggagagtatgatgcggagtggacatatgttggatgcgcataaggaggcgatgaggaagatgcaggcgggggcaaatcgacatgtttcgtagaagtcgatggggttgattgtatgtggtgtagtgtagtatgtatgtagatgtacacagtcagggcctcgcagctggcattttc

SEQ ID NO: 13143 - DNA, 3157 bp, Oryza sativa
  ref <308>: DATABASE ACCESSION NUMBER: AK110491
  ref <309>: DATABASE ENTRY DATE: 2001-12-06
tttttttgggtcagacttccagtccaggattaggaaaacaaaggacctcaggagcccgtctcctctcttccttaccttctgatctctctgcctcctttgtctgccgtatttggttggccccggctcttgcccttgcaagaccgacttcctcctggtttctctctctctctccagctctttctcctccaccggatccgccgacctgggaactcggttcccaacacgcgccaacccacccaggagacagcttttttttttttttttttttttgaaatctaggaaacatgcagtatcagtatggataccctacaccgccagcatcgccctcgccgttcgagctccccaagtgcgcacaacaaccacagcagcaagccgcaccgatcgagccccgatatgtgcagcccgctcccgaggagaggttaggcaggttccttgccggtactctccagctgactgggatcctgggcacgggcgcgtacggagtcgtctactcggccgtcgacatcaagacgcacgtccggtacgctgtcaagacgctcagcaagtacaacgcggatggcacccccctggaccggagacaggtcgccttccagacccgggagatccgcctgcactggctggcctcggcgcaccccaacgtggtctcgatgcccaagatcatcgacgaccccgactgcacctacgttatcctggagtactgccccgaaggtgacccgttcttcaacatcacagagtgcgggcagtacgtcggtaaggatgcgctggccaagcaggtgttcctccagatcctggaagccgtggagcactgccattccctgggaatctaccaccgtgacctcaagcctgagaacatcttggtgtccaaccagggtgagaccgtcaagcttgccgactttggccttgctacgtcttcagacaggtccgaggactatggctgtggttccactttctacatgtctcctgagtgtctagaccacactaccaggaggccctactactactgcgcccccaacgacgtatggagcttgggcgtcatcctggtcaaccttacctgtggccgcaacccctggaagcaggcctccttcgaggactctacctaccgtgccttcaccaggagcaagggtttcctcaagaccattcttcccatctctgatgagctcaacgagattctggccgccatcttcaccaggaaccccgacgagaggatcaccctccctgagctcaagagccggatcctcgcttgccagaggttcaccgagcagccttcgcaggctctccccaccactcaggccgcgtgcgtgagcccagtctcaccgcccgcctcgcctgagtcttacgtttctgcctacgaggacgccatcatcgacgaagacgacgaggacttcgagtacgacgacgccccgctctcgcccgcctcctctgacgactcgctctcggacggatcctccgacgatggctccatgacctcgagctgctcgagcctcgaggagctggacgaggacgacgacctctgcccggagccccggggagcagtgacgccgccgccccagccagagatcaacaccgccatctacgacctcgagactcaacaccaggtcatgggctacccgtccgagtacctgcaccagcaaccctgccagcctctttcattcgccaaccagctccctcaggagcagcccatgccagtgcagccgcacattaacatgggattccaggtcccacaaccacagcacaacttccttccctccaaggtggctccccagccaccagcaccctacctccaccaacatcacctgccctacatcctggatgtcatgtacaagtttgcacacccgggccagcaccaggcagcccagccagtcatgcaccatccccatccggttcccttcaatcagcctcaggtccccatgtttgcctgctactaaagcgtcctggcatctctaaactacgttttccaacactccatcccgccggggcctcttgaatctgggacatctccatgatgtctcaacaaccggttgcccgctttggcctcttctggtccccggatggagctgccttggaactaccggatgaggacggccgctgtcgccgtcgtcgttctatcccgtgggcctagttcttcgcaccagctatcccacaccccatgttatcaactggcatctggagccatctagaagctggtgaccccaactctcttggcgcgcccctgcgcaccgagaaccctacgaccccgaggtggttccctgaggaaggatccatctcaatctggacaacattaaaagccaacaaaaaagctggtcctttttcttttacagatttttattcccttatacccaaaacacagccaacaatactcttactgtatttaattccgcttggacacgaccacgaaggaaggaccattttctttgattattcacatcacactttctatcttttcttttgtcacgaaatttacttccaggggcactggcgccgcgagttcccaaggagcgaacaacaaactaagccatggagacgaaaactgtttgatttttccatgacggcgcaggaaaggggaaagggcttgaaagattaaagcttggagttttttcttttctttattttgtctgtttgggtccaaacagcctccttttttgggctttcgccgcaagaaccggctggggaggcaatccttgcttttttcgatctctttctggtttttttttcccaaaaaagggcctggcttttgcaggttcatggaaaatacggagatcagggtggagaggctccacgagacgtctttttctgggtgataccacttctattttttttcccttcttttcagcttcttttgtctgtacaccctacttttgggccaagaggtttgacctgggcggcatgcacgtttgaacttttttgcgacttgcagggacatcggatctcacgaaagaatcaagccaagcgaacatttggtttattagatattaacatcgggtcaaacccaaacgcagggcgcaccaagaagctcgaccgggatctgaaaagacatttcagtcaccgtatccggtaccgaggcgccgagaaagatgaaaaaaaaaataacaaccgaaaaaaaggaaataatatacaagtgattggattcgccactcgacaagagttggcatgccaaacc

SEQ ID NO: 13144 - DNA, 2370 bp, Oryza sativa
  ref <308>: DATABASE ACCESSION NUMBER: AK110492
  ref <309>: DATABASE ENTRY DATE: 2001-12-06
tgcaaagcacagaagaagcttagcacacgcttgcagctgaactaggagacaaccaaacaagccatccttttgcactgatcacacttactgttagtactccattgtgatttgtggagagagagagggagagagagagagagagagagagagagagagatgggcgtggcgacggtgacagagctgaggcagagcttctccgggaagagggcattaagaccaaccctcaccagccgccatgccaatgaatggcctccgaccgacgtctccagcgacctcaccgtcgaggtcggcacgtccagcttcgccctgcacaagctgctcgcgcagttcccgctggtgtcccggagcggcaagatccggcgggcggtggccgaggccaaggacggcaagctggcgcgcctcgggctccacggcacgccgggcggcgcggcggcgttcgagctcgccgccaagttctgctacggcgtgggcgtggacgtcacggtgggcaacgtcgccacgctccggtgcgccgcgcactacctgcagatgacggaggacttctccgacaagaacctggagctccgcgccgaggcgttcctccgcgacgccgtgctccccagcatcgccggctccgtcgccgtgctccgcagctgcgaggcgctgctcccggccgccgaggacgtcaacctcgtcccgcgcctcatcgccgccatcgccaacaacgtctgcaaggagcagctcacctccgggctgtccaagctggaccagctcaagccgccgccgccgccgcaggcggtggtggtggccgccgccgccgccggcgacctcgactcgccgggggactggtggggcaagtcagtcgccggcctcgggctcgacttcttccagcggctgctctccgccgtcaagtccaaggggctcaagcaggagacggtcacccgcatcctcataaactacgcccagaactcgctccacgggctcatggcgagggacatcgcggccgccgccaaatgcggcggcggcggcggcgacaccgacgccgtcaagaagcagcgcgccgtggtggagaccatcgtggggttgctcccggcgcagtcgaagaagagccccgtgccgatggccttcctgtcggggctcctcaagacggcgatggcggcgtcggcgtcgagcatctgcagggccgacctggagaagcggatcgggatgcagctcgaccaggccatcctggaggacatcctcgtcgccgccgggcccgtctccgccgcggcggcggcggcggcggtggagcacacgctgtacgacacggacgtggtggcgaggatcttcgcggtgttcctcaacctcgacgacgacagcaacgacgaggacgccgtcgtcgtcggcggcgggtgcggcgcgttcgactacgacagcccgaggtcccccaagcagagcctcctcgtgaaggcgtcgaagctgctcgacagctacctcgccgagatcgccctcgactccaacctcctcccctccaagttcatctccctcgccgagctcctccccgaccacgcccgcctcgtcaccgacggcctctaccgcgccgtcgacatcttcctcaaggtgcacccgaacatcaaggaagcggagaggtacaggatgtgcaaggcgatcgactgccagcgcctgaccccggacgcgtgcagccacgcggcgcagaacgagcgcctccccgtgcagatggccgtgcaggtgctctacttcgagcagctccgcctccgcagcgcgatccaggccaccggcaccaccaccacaaccactaacaccagcatcggcggcgcgcacgacgcggcgctcttcttcgggtgcgccgccgccgccgcggcgccgcggtcggggagcggggtgggtagcggggcgatgtcgccgcgggacagctacgcgtcggtgcggcgggagaaccgggagctgaagctggaggtggcgcggatgcggatgcggctgacggacctggagaaggaccaggtgagcatgcggcgggagctggtgcgcgtcggcccggcgaaccgcctcctccgcggcctcgcgcggcgactcggctcgctcttccacttccggggcgccgccgccgagccgggcctccagcagctcggcgccaaggccaccgccgacgccaaggtcctcttccagcgccgccgccgccactccatctcctgatcatggtgacgacgatggtgatggtgcaattaatgaatttttggatgttgttgttgttgtgaatttttgtgggatttggatgcgaatttgcagttgttgtaatatggggattgttattgatggatggatggatgatttcgatgtaggtgtacaaattaatgtgcagattatggatcatatgctaagtttctgtgatgt

SEQ ID NO: 13145 - DNA, 2964 bp, Oryza sativa
  ref <308>: DATABASE ACCESSION NUMBER: AK110493
  ref <309>: DATABASE ENTRY DATE: 2001-12-06
atgtaagagagaacacgtatggttgcctgatctgacatgcgtctgtgtttcttggcgagagaacagtagttgagctgcccatgaagagctgaaagcaactcatgcatcagaagtgagccacgcctgatccggatggcggatagggtggagattccgacagtcgctctcacgcaggtgatagaacggctgacagagaggcggatagtggtggagaaggctgtcagcacacttggtgaagcaccccagggcctgcgtgatgtgtttgagctgtgccgtgggtttgagaaggcgttttcaaacattgtcaatgaatcgccagttgccaacaggatcaaggaggcgttcttttcagagaagggccttgcagggaatgtgcagcggctgccgtttgataagctgttctctattgacagcgtaaagaagatcaccaaaacagcagatggctaccagccgcatttggtgtcacctgaacggggcttgcagcttatggccagcaaggcgctggaccaggtggagaacccagtgcaggagtgtgtgtctcaagtgtacaccctgctggtgtcagcagcacgcgatgcagcagcggtggctggcgagcacacagaggcggccatgaacggcaaggtgccgctcattgtgcctgagttcaagaccttcatcatgccagccgtcatacgagcgctggatgagtggcgggcggagggagagaagatggcgcagatgctggtggacatggagcgcagctacatcacggcaggcttcttccggtacaccatgtaccgccgctttgaggccagccagagccaggcagccgtacagaaagcactgcagaaaggcaagagcaagcagggcttcatggagcgcgtgggcctgagcaagtccacagcagacgcagatggtgcagcaagctcaccagagggagcgattgtgcctgcgcagcggatgagtaatagcgggcctgctgcagcacctcagggcatcagcttgggcagcttggcagatcccaatgactacatcgcagcgcactttgacaagaaggtgaacgaagagagcgccaggcagtctttgccggttgatggctggcgctggcagaagcgcttcttcattttctcagactccaacaagacgctgtactacttcaagacgcctgatgacgtgcccaagcccaacggcctgcgcgggcagatcagtctggttgactgcatcattgaggacctggacgagcgcggcaacgtgcggccatcgattggcagtgccatggtggagatgcagcgaggtgaccgcgcgtcattgctgctgcgcatccggtcgctcgacccacgcaggccgtgcgtgaaggaccacagcagcattgtgctgcgcgctgagaatgtgggcatcaagcacgagtggattgctcgcatgatgcgcgctgtagcagcatcagcagggccgcccccaccagtgcaggcagcaaccccacagcagccggaagccaggcggacaagcaaagactcttccgacgccaacggccctacagctgctgcacctccagcagcagctgccatgagcagtgcaccctcagaggcgtcagagttcctggaccctgtcaccacagaggttggggtgagcttggagcgccgcaacagctttgaggtgttgacgaccacccgcctgggccagggagccaagtttttccgcgctgaggagttgcgtgacaaccacggccgcctgcagccagcaccaaccattgtgctggggcccatggcgccgggcgcagcagcacagacagacaacacactggccaagctgaatgagctggccaagcggccactgtccgttcaggagacctgggagacacgttacgagcagctgatggagcagtttgcgtccgacatgcagatgtacatcaccatggtgtgtgacactattgtgaccacggtgcccaagagcgtggtgcactgcctggtgcgcaaggcggagaaaaacctgctcaaccacctttttgggcacgtgcacaagatgagtgaggaggagctcaagcgcatgctgcaggaggatgccagcgtgactgagaaacgcgctgcagtgcgcctgctgtacgacaagatcaagatggcgattgacgatgtgcagtacaagcaggagaaggtcaagcgcaaggaccatgagggagacaatgtgctgatggatgcggaggtgcttgcactggcggtgatgactgaggtgctgtctggcgagcagcgccgccgctatacagacatgattgacagccccttcatgcctgcactgcgggcaccagtgccactcagccacgtggacaggcccaagaagctgccaacagcaccgcagggcttggttgaggggcaggcagcagcagctggcttagcccgcacctcagtgggtgctggcgggcagccggtgcggcgcgcaccagcagcaccatcacgcacaggtgcaacagcagccaacggggtgccaacaataccagcagcacgcagggcaccacccccgcccccaaagtgaccagctgggcagcatgagctgtacgtggggcagcagtcctgggcgagaggttaatttgagccctggggggggggcatccttcagcattgtgtagatcaggccggacatgctattgattgtgtttgcacagctgagagccagcatgaaggagagcaagccttgcccgcggcagcaagccaggggcatcctgatcaagaactcgtgcggcttgcatgcacgagtctggctgtgggcatatttacagaagtgatcagctcgagcacaaaattggaaaaactattttgccatgatgctgtgttgaccatgagagggtgtgttggagtgctccaagtctgtggatgtaatttctgtaccacccttgggttcgcgctacatgttctacactgtgcacagtttacaggttatgttccgtaacacacaggttgcttgatggttacccttgtaatgctaaccatgatt

SEQ ID NO: 13146 - DNA, 2883 bp, Oryza sativa
  ref <308>: DATABASE ACCESSION NUMBER: AK110494
  ref <309>: DATABASE ENTRY DATE: 2001-12-06
aacgctaaaaaagtaacagtttctgtactttattgaaaaaagaagcatcgctgcagtcgaaactgctgcttacacattaagttcgcttgcacagctcatcgatgcattttggtggtggtgacgaggtggacgcgccgttccccgacaatcatgttggcctgtcgaccgacgaggcgacgcaccgcctagaggtgcacggccgtaatgagcttgccgaacgaaaaacggcagggtgggtgattttcctccgctgcctgtggggccccatgcccatcgcgctgtggatcgccatcatcatcgagttctctctgagcaacttgccggatgccttcatcctcctcgccattcagttcggtaacgcgacgatcggttggtacgagacgacgaaggctggcgacgccgtcgccgcgctgaagcagtcgctgaagcctcgcgcgaccgtgttccgtgacggcatatggcaggagatcgacgccgcgaccgttgtgcctggcgacaaggtgaagcttgcgagcggctccgccgttccggctgactgcacgatcaacgacgagccaggatcagcttcactgcctcagatcgacgtcgacgaagccgcactgacgggcgagtcgctgcccgtgacgatgacgccgaagacgcaccttgcgaagatggggtcgactgttgtgcgcggcgaggttgacgggactgtgcagttcactggcacgaacaccgtgttcggcaagacggcgctgctgctgcaggcggtggaggctgaccttggcaacatccactacgtgcttgtgaaggtgatgtacgggctgactggccttgcgatgctgctgtgcatcatctgcttcatcttcctgatgacgtaccaccacactgacttcaagtccgcgatcgagttcgttgttgtgctgcttgtcgtgtcgattccgattgcgatcgagatcgttgtgacgacgacgcttgcgcttgggtcgaaggagctgtctgcgaagaaggtgattgtgacgcgcctgtccgcgatcgagatgatggctgcggtgaacatgctgtgctccgacaagactggcacgctgacgctgaacaagatggagattcagcaggactgcccgatcttcatgaagggcgaggaccgcgagagcgtgctgatgtacagcgcgcttgcggcgaagtggcgtgagccgccgcgtgatgcgcttgacacgatggtgcttggcgcggcgccgctggaccgttgcgacaagtacaagcagctggagtacaaaccgttcgacccgcgcgtgaagcgcactgaggcgacgcttgtcgggcaggacggcgtgcagttcaaggtgacgaagggcgcgccgaacattgtggtgcagctgtgcgcgaacgcgtccgagatccagtcgcgcgttgacgggatcatcactgaccttggcagccgcggcatccgatgccttgcgatcgctaagactgttgaggaccgctggtacatgcttggcatcctgacgttccttgacccgccgcgtcccgacacgaaggcgacgatcgcgaacgcgaagcactacggcgtcgacgtgaagatggtgaccggcgaccacgttctgattgcgaaggagatggcgcgcatgctgaacatgggaacgaacatccagacgtcgcacggcctgccgcacttccccgagtccggcgacccgaaggacatccccgacacgctcggcgacgagtatggcgagatgatggagaacatggacgggttcgcgcaggtgcacccggagcacaagtacctgattgttgagacgctgcgtcagcgcgggtggacgtgcgcgatgactggcgacggtgtgaacgacgcgcctgcgctgaagcgtgctgacgtcggcatcgccgttcatgggtctaccgatgccgcccgtgctgcgtctgacatggtgctgaccgagcccggcctgagcgtgatcgttgacgcgatgctgattgcgcgcggcgtgttccagcgcatgctgtcgttcttgacgtaccgagtgtctgcgacgctgcagcttgtgttcttcttcttcatcgccgtgttcaccctgtcgcccgcgcggtacggcgtaccgtccgtgccgtatttccacttgcccgtgctgatgttcatgttgatcaccctgctgaacgacggtacgctggtggcgatcggctacgaccgcgttgtgccgcagcctcgcccgcagaagtggaacctgcccgcgctgtacatcatggctgcgtctcttgcagccgtcgcgtgcttttcgtcgttgctgttgctgtggctcacactcgagtcgatcaacaatttcgaagcgagtttgctttaccacattggcgtgccgcgcttcacattcggtcatgtcgtgaccggaatttatctcaaggtctctatctcggatttcttgacgctgttcagctgccgcggctggtcgaagccgttctacgcgcatccgccgagcgccatcgtacttgccgcggcaagcgtgtcgctcgtcatctcaacgattgtggcgtcgacgtggccgcagtccgacacaggcaccgtgccaacgctgggcctgtctcgctgtgccccgggcgaggaggcgtcgtttagccggcgcatggtcccgctgtgggtttgggcgtactgcctcttctggtggctggttcaggacatgatcaagatcgtggcgtatcacttcctcagccacagccgttggatgcgcgacgagggccgtgtcttcgatgacaatgcggccgcagaggacccccttatttcgtagagacgtccgcttcgcccccaaatcccttttcggtgtgttgccgtcaaacagcagtgctttggcatttggtcgtctctcatcattattgtcgttgctgcttattgcatgtgccgtatttgctaatttg

SEQ ID NO: 13147 - DNA, 3143 bp, Oryza sativa
  ref <308>: DATABASE ACCESSION NUMBER: AK110495
  ref <309>: DATABASE ENTRY DATE: 2001-12-06
atgatgacagccgtaaaaggaacacgacaaaagacactgaaatgtcatacgctgaagagtgcgaagatttgctgtccacgtgttaccgtgtggacttcaccaatgatggacgtgtgaaccaaagctgctaacaaatgtataacacacaatgagcaggccgttgctgtctggttagattccaatagctctctcagatgcccccacactggccatgtactctgcaaacggaggagcgaaacccaagaaagagcggaaagtaacaataatattcaaacatactgccgcgaaccagcatgttgcgggagttgaggcactagctgtttcgccggacagcagcaggttgtatactgcttctcgggactccatcgtcaaaaggtggaatgtaacagctggcaggccggaatgtgacgccagctttgaggggcacattgactgggtgaacgatgtgctgctgtaccaggacaagctggtgacatgcagctcagacaggacagtaaaaatatgggggacaggcgaggaagctcgctgtctgcacacagtgcagcaccactcggactatgtgacctgcctggcagccagtgaagcagctggcaagctggtgtcagccggacttcgcagcgaggtcatcacatatgacatgcagacgctacaagcgcacttgctgatgccgtatcccagcagcggcgcagccagtgggtcaagcactggtgcagatgcagcagcagaagcagcagggtcaggcggtggcgggcagccgccgcaagccccaatgcgcagcgtgtacgcgctggccatgagcaaagctgggacgctggtagcagcaggcacgacagagtcatacatcaggctgctggatccacggtcggggcagaaggtcatgaaactcaagggccacaccgacaatgtgcgagcgctgctgctgaatgaggagggcacgctgctgctgagtggctccagcgacaacactgtgcggctgtgggacctggggcagcagcgctgcatccagacgctcaatgtgcacacggacagtgtatggtgcctggctgcctcaccagacttcagtgtggtgtactcgggcggcagggacaaggcgctgtacgcaacacacatcttgaaacgcaaggcgtggctgctggcgcgtgagagccaggccatacgcagcatagcactagcaaacgagggcacgcggctgtgggtttccactacgctgtcaaccgtcaatggctacgaaataccgctggagtactgcaatcctgcagtgcagcagcagcagcagcagcagttgcagcacatacagcaccagcagcctgaccgcaactccgcggatggtggtgtgggcagcagcccagcatcgccaatagcagtagccttgcaggggcgcagcttaagccacaccggatctggccggaccatttacggcgccagcccctcaatgcggctgcggcacagctttgaccctggtgctcttggggaggtgccgctgctgtcaccttgtgtgcgcatcgacggctcgccagggctggttgcgctgcgtgtgctgtgcgacaagcggcacattttgacgcaggactcaaacggccaggtgcagctgtgggatgtgctggcggggcagccaatacagcagcttggccaggtagacttagcagacatggagcggcggctgttccggccgctgtacgttgagtcatggttcacggctgacatcaagctgggggcgctggcgctcaacctggagccgccaaagtgctttgcagcagaggcgtacgcactggacctgggcatacgggacgtgccagatgatcagaaggtcaacctaggggcgtgcctgctgcgcgctgcgctgagccagtgggcccacgagttcagcaagctgtacatgggcggtgcgcccatacctggagtagatgacacaggagcagagcagctgccgcggttcagcgatgagctgccgccagcagtggtgtccacgagcgcctctggtgtggcttggcggctgggcgccaacgccttcaccggccgtgagcgggagggcgaggacctgcccaactgggtgtgcgaggctgtgctgcggggcatgctgccgtacgtgaaggagctcaaggccgcgtttgtgctgctgcctgccgagggcagcgggctgcccagcttgctgcagagcaggctgaatgcgccacgcatcctgcaggtcatgtaggtggctaactactgtgtgaccaagttggcggagctgactgtgccgctcagcacgcatgaagttggcgtgacgccagacacacagctgccacctgcgaacacagggctgcagtacctggagctgacgtgcaacgggatggccgtgccatactcgatgagcatcgctaccatcaagaagtttatctggaaacgcagtgacgacgtgttgttccactacagggtgctggaccccagccgcccggcagccttccctacatttggcaagactggggaatcgtgacatccgctccatgcaatcccactccatgtagctgtagacgcctaggtagcttgtgtgcaggcggtgtcggcagtgcttgcgcgctgactgtttctaggcacgctggcacgctcatggcagctttgtgcacacagagtgtgctgggcggctagcaccatggttgactggtgtagggcgaaccttcagctgaggtgctcagtgagggctttttcttgctgagcatactacacgtggtgcttgtgattgcggcgtgggactgcgtgctttgcggtggttattgcaggacgaaccggcagggtgcatgaaaggagaaagctgtgcggctggcagtgtgagacagcagcgagtagccatgctggggctgtgcggctggcagtgtgagacagcagcgagtagcgagcgtccacttgggctgttgcacctggaggtttctgctgctagcggaagtagtggccgcatagagcatcaggatgacatgaggcgagggtgtgtgagctgtgtcaggcagcattgctgggtgcaagctgcccagccatattggtgtgcagcagcacactgtgcacggtgtttttgccagacacggcactggtgattatggtgggtgttactgcatttggagccgtgctccattctaaggtggaagttccatattgttaattgcgccctgttc

SEQ ID NO: 13148 - DNA, 2827 bp, Oryza sativa
  ref <308>: DATABASE ACCESSION NUMBER: AK110496
  ref <309>: DATABASE ENTRY DATE: 2001-12-06
aaccgccacgacgagatccgacgcccgcccctgccctaccgcacacgcacacgcacacgcaccgcgccgccatgcctttcgtctgaacgcccatgggtcgcccaacactcgctgctgctggatccagtatcgacaccaaggatgctgggccactcctcgtggcccgccgccgccctgacggccagggaccagagtcgagccctccactgtcccttgtataaactgcccgcctacggcatcatcgaactcgggcccggcaacttcatcaacctcgactcggacgccttcttccgcccgtcgtgcaacaacggccagcccaacggcctcgatgacacgacgggaatcacgagcatcgccgacatcagagaccccttccacgcctccatcaccccgcaggcctatgcgactggcgctgccaccgtcatcgcgtggatgctcgtcatcatgctcatcataacaccgcgcaccttcttcgtcggcaacgcgaccggccgctcggggctcatgggccgtcgcggcatgatcagcggcgcgacgggcggcggctccatcataggagtcggcagccgcccgtggctgcagaaggtcgccgccctcaccgtcgccatctcgctcacgctggccaccgccgatacgttcaagatcgctggccgccagtaccgcgagggcttcatcgacgccatggagctgcgcgaccaggtcgtggccggcatggagatcaaggtgtcccgcatcatatccgacatcttcatctggcttgcccaggtccagactctgatccgcctctttccccgccacaaggagaaggtcatcatcaaatgggtcggctttgccctgatactgctcgacatcaccttcagctctctgaacagcttcggtccctacgagaacaacggccgtcccgtgcacttcgaaaccgccatacccgccctgagttatctgttccaactgtccctcagcatgttgtatgccgcctgggttatgtactatgccatcacgaagcgacgctacgccctctaccactccatgatgtggaacatgagcgtcgtcgcactgctctccatcattgccatcctcacacccgtcgtattcttcatcaccgatattgccaactacaccattgccggatggggagactacttccgatgggtgggggcagctgccgccagcgtcattgtctgggaatgggtggagcggatagaagccctagagagagaagaaaggaaagacggcattctgggaagagaggtatacgatggcgatgacatgcttgcacctaccccgtcgtcatcggattcacgctggccatcgaaaagagaagatcaatcatcacaggacgacaagaagcaaggaggcggcggaggattcgttgggggattgggcgggatcggagcgttcacgtcgatgcacactgatcggatcaacaatttcgcccaccggttgggacggaaaatgaccgagtcaccacgcgcgcaagcccgccagaaacgaagcattcatatccccgccccagcccccgcacatcgtcgttctgagtcggcgaatcgtcatgacaggagctcgcggacctatgtacgagtacaaacaccaccgcccgtgccagtgatttcctcgccagtcagccggacagacacaacttccgcagactcgactatctacaccgtacgataccatcccatcagcgataccccacccgccaatcaaccccaccaagagagccacgtcccacagcaaaccatccccgccccacagacgacgacccgggaaactcggcaacagaccgctgacccagaagatccagaaaagggcggcgatccccacccggcacctgtagccaacaaaagcaagtggcactggcaggcagtggccaacactttccgtcgtcacgggcgtacaccgccacaagagctacagagaggccgggtcatagaacctctcgctgttgacgatgtcactgcaaatattcccccccggaactacacgggactggcactggcagatcgactaggcacgtttgctgctcaacaaggagaaagatttcgagcaaggaagaaaggtgatcagcaagtggaagctactctgcctgtgaccatcattcccgcccagccccgcggtcaaacgtggtcgcctgatatcatgcagcaacaacagcaacagcaggaccagcagcagcaaacggcccagcatgacgagatatctgcctcgaatggcttcagcttggcgagagtgccaattgcaattgaagaagaggaagcacagtcgcccacgcggtcgactgagataaacaggcctagtgatggtgcgcagcactcatcctccaccgcagtgtcagaccgcaatccacacattcggtttgcacaagctgccgacgtactcggtaatcgtgtcgcacacactgcttcttcttcgccggtgcatcccacacgcacgtcacaccattctgctcatacaatcacatcgacaaaccacgacagatagccagaggtcgaagtaggctgatgtcattttttctgttatatcacgactttccacggtgttggtacgcattgtatacccatatgtttgaaaaggcgcaagagcgggacttggagtagccacaaagtggctgaagacattacacagcattggcatggaattggcgcagcactggtgttcaaaagatactgccggaggcatttggaatttggatgtttaggatacccactggattacgagatccagtttgcacttgttgtgaaagtgcgccgtgacaggcgtttggttgaacattgcaagcattgcaagatgatgtcaattctggatagcgactatcaaatgcgaattcttg

SEQ ID NO: 13149 - DNA, 3058 bp, Oryza sativa
  ref <308>: DATABASE ACCESSION NUMBER: AK110497
  ref <309>: DATABASE ENTRY DATE: 2001-12-06
ttcgaaaaggccattgacacactggagctgctgcactttaatgctgtcaaggcctggtgggaggagcagcagagtgggccgtccacttcatcaccacaggtgcctgacatcccggcaatgaagcgcctgctgccacgcgccaccgctgtggaggcactgttgcggctcattcccgacggcaagctgtctgcacaggtggtggagtattgggtgcgcaagcgccagcaggagggcggaccactgctgcccaggctgtggtttgaacagccctggaagctggtggcatttgctgagtttgtggtgtctgatgatgaggactttgatgagcacctgccgttcatggcggtggagccacgcagcgcccacagaaaccggcgcggcggcaaccagcggcgtcgccccatcagcgaggaggacgctgtggatgcactgtttggcctcaggaatgagctggaggtgctgcgtacacttgctgaccaggtgcgcaagagggagaagctcaagcgccagatattgatggtgtcacagcaggagacacaaatgcgcttgcagctgggactgccgctgtcagcacccgtgccgcgcacagccaggcagcagcagcggctagcacctcacgctggaggtgcaggcacgtcagcagcaaaagcaggcacgtcagcagcagcagcaggtacatcagcagcagcagcagctcgtgggattgcaccacctgagcggctgtccccgcctgcagcagctgatgtaagcaagcggcttgcaaaggcagcagctgcagcagctgcagctgcatctcctgctgatgccagccatgccaggcagacgcgcacagctgcagcagcggctgcagctgcatttgagctgacctttgccgccaagcgggagttcttggctgccggagtggcacctgctgaggggccaggcctcagcaggctgcagcgcagtgcagctgcagcaaagacagatccagcaggagaggaagtgctcccagcaccagcaccctcgaacagcaggctgctgaagcgccgattggcctcaggcgctgcagcagaacaaggcaaaggcaggggaaagggtgcaaacagacagcggcgtgacaggcaggctgctgctgcagcagccgatgctggtgaagcagatgatgagatggaggcaggcgctgagtcaggggtgaatcctagcagcagcatgcaggctggtgctgagcgtgaagcagctgacgacatggcggcagtggagccaccaaagcagcgccgcaggcttactcatggccagcagcagcagcagcacaagcagcaccaaggacggcagcccaaggcagggcaagtggagccggatacgagagtgcagcagcaaaaggtggcacagcagcagcagcaacgccggaaccagaccaagcagggtaaggcaagccgcagggcggctgctgctccctctcgtttccccagcaatcagcatgaggacgactctgatgacagtaatgatgcagattatactgcttcagaagaagaagcagagcaggatgagctagaacggcagcagcagcaccaatggcagcaacggcagcggagacagcagcaagcgggcgatcggcagttgcggggcaggttggggactgcttatgagccagtcagcaatggcccaagcagcatcagctctgaaggggagggagaggaatcagcttgggagtcagacgaggattttaggcggcgcagtcctaggacattcaggcgcgtgaagcagctgcagcagcagaagcagaggcagaggctcaagcaagcagcatcacaattaccagcagcagcagcagcagcaccacgcatggcggctgagggggcagaaaacccagcacagcaggcatcgctaaagcagcagcagcagcggcaagagcagccaacggctggtctgcagaatggcaggaggaatggctttgtgatcagacagctgcaccctgtggcattgccagcaggtcaccgggggttgggtgacagcaacacggggagtgatgctgaagcagcgggtgtcccaccagctaaggtgcgaaaagggcccaggacgcctggcaagcctgctgcttacctgcctgcacctcctgttgctcctgcggcaacagcaactgctgctgccagaggccaacggtcgaagcagcagcaaggcatacagccacccgctggcggcggaggtggtgtaccagcagcacgcagggcagctgcggcggcagcagcggcagctgctggtcacccagagcgcacagtgctgcgaccgcacaaccagcaacagcgggcaggcaatcagctggaagtgcagcaaaaatccagcaccaggccagcggcgacaaaagcagcttcaggggaggcagttgctgttcgtagctctgctggtgctgctcaggtagccagacctgccagtggcattgggcgcagtgtgggggctggggccagtgtgcggcgtccgtcagtgatggctgcaaatgctaagtgcaagcgtgcagcaaggagtattggcaaggctgagctgcactccttgggcattgcagcagctggccttgcagcacccagcacacaaagcaggagaaagcgctgagtggcaataggtgactgggtgtgcgctcttgcttgttccattgtccagcaagctgttgagcctacagctgtgtatcgcttgttgtgtaccactttgtctattgccccatttgtggcacctccgtccttgattaggtaggatgtgccagtttgcatggcagtataatgtacagcagcagcacaagcatgttgcattgatgcccatcaaaatcaacacgttcagggacttcacctttcgagttgctggctccttggcgtggtgaagaatgtataggcaagacccgcaaggtttgtgtctgccatgcaaggtgccatgctattgatatggtactgggtgtgccgctccattgcatcatggttgtaccgtcgcaacttgtacaagatgtggcaggcctgcaggtgaaacccttggcaagccctgttggcagggtgcacctccagaacgtgttggtgtggatgcaacgacacctttacag

SEQ ID NO: 13150 - DNA, 3246 bp, Oryza sativa
  ref <308>: DATABASE ACCESSION NUMBER: AK110498
  ref <309>: DATABASE ENTRY DATE: 2001-12-06
atccaggttacgaagacatcttgtttttcttttccttttttttccctttccttccttcccggctgctgttttggttccagaagcatcgtcttgtcgaattaggaggcgttttgctcgcattcctgtgggctgcggaggagaaattggccttgcgcgcgggcgggggattccacagcgcatgcgtcggctggaatagggaagccaagcagcagcgaaaggggaggaaaaaaaatacgcggccgcagaacatcagaaaaaaaaaacagaaaacagcagacgcacaagaaccggacctcagcttgggtttcctcctctctcaccttgtcagcctccttccaggggctgtgccgaccagaactgatcttccgaatcgagaacgaccggcttgcagagttggaacgtatcttgaaccgctgctgcggctgcgccaacaagctacattttattttcttccttggtctcacgcaaccccgagcgcagacgatcggacggcggacggcttgcacgcacacaacaacctaggcagacacccgcgcgcacgcgagaggagccccgttttgcccctcacagcacccgaggttcttggtctggcgagccgtcgacaaggccacccatcggtcgcgtctcccccgtccgtctttccgccaccagcccctctcctccgggccaagctccgcttcagagcctctcttttcgcccgcattgggtgatccgactccttttttttcgccactggctgtctcttggcctggcggtctccccccgcgcccggggctctcacggagaaagggcgccgaactcaatcgggcgtgtttgcgcttgagttgccgtttggcgcatgccgagcacggcaaccgggacggcgtttgtgcggtgccttgtcttcgttccttttctgaaccgggatttcccctattcctgcccctcgcccgggacagctgagtagagtcagaccaagggccccctgcccgtctgcactccggcctcgtcgtcgccggaccgccgccgggagacatcacgagcaaatcacaaccacccaccaggagctgacggccggccagacaccatggctagtttcaacctgcctatccggtcggtctcgtcgacctcgacggcgagctcgataagaaaccgggaatccatatcgggcctgagcaccccgccttcgtcgacgggcgctgctgggcccgcacgggactttgcgcccatcgccgaccgcctgattgtcggcgtcgactttggaaccacgttctctggcgtcgccgccgtctacacgtccacgccggacgacatcgagatcataaagacatggccgggcggcaacggcatcacgtcggacaaggtgccgaccgagatctcgtacgacgtgccgcccgacgcgcccgtcggcacgagcccgacggtcaagtgggggttccagttccggcccgaggactcgcgcctgcgctgcatcaagctgttcctggaccggtcgcagaagctgcccttctacgtcagccagctcgagacggcgacgcagctgcggcgctacaacaagacggtcgtcgacgccgtctcggactacctgacccaggtgcaccgccacacggtggacacgctcacgcgccgctacggcgagagcttcatggcgtcgataaaggtcgactacgtcctcacctgcccggccgtctggtcagacgcggccaagaacacgacgctgcaggcggccgagcgcgcgggcatgggcgcgcgggcgagcatctccatgatcagcgagcccgaggccgcggccgtgtacacgctcaaggccatccagcccaaccacctgagcgtcggcgacaacttcatcgtgtgcgacggcggcggcggcaccgtcgacctgatcgcgtacaagatcatgacgctcaagccgctgcgcgtcgaggagtcggccgtgggcacgggcgggctctgcggcagtgcctttctaaattatcggttcgaggagcacgtcaagggccgcctgggcgccagccgcttcgacgagatgaaggtcaagaagagcaagacgtggcagatggggctgcggtactttgaggattatgtgaagaggaatttcagcgaggagtcagacgagttcaacgtgccattccccggcatcgccgacgacgaagaggccggcatcgactcgggcttcatgatcctgacggcggcgcaggtcaaggacatcttcgagcccgtggtcaaggaggtgtgcgacctggtgcagggccaggtcgacggcctgcgcgcaaagggcggcgttgtgtcgggcatcatcctggtcggcggcttcggccagagcgactacctgtaccggcggctcaaggcgcactttacgagcgcggcccctcccccatacagcgagcggccgacgcacgcagctggtggatcgtcagccccgggcggcggggacgataacgcctcaatcgaggtgatgcagccgctctacgcgtggacggccgtagtgcgcggcgctgtcctgcgcgggctcgagggcagcatggtcatctcgcgcaaggcgcggtaccactacggcacgtcgtacgcgaccgtctacgacgaggacaagcactcggtcaacgagcggtactggtcgccgctgtgggagcggtggatggtgtctgaccggatgcagtggcatatagcaaagggcgaggccatatcccctctctcgcccatcgccttccactacacgcgcaacttccgccctggccagtcgctcgtggtgacggacgacctgatcgcgtgcgaggccgacgagccgcccgcggcctacacgcgcgacctgatccacacgtgcaccctgacgacggacctcaacgccgtcccgcgcagcctctttacgcgcctgacaacgacgaaaggggtcgagtttgacaacctcgactttacgctcgagatgattgtcgacagcgccgggctggggttcgagttgaaggtggacggggtgaggtatgggagggtcgaggccgagtttcattagctgtttgttggcagggggcttcgtggctcttgacaacgctgttgtcgttttgtgtcgttttgggggagttggatgggaatcggctccaggcgctgtttattttgtgtttggtctctcttggttttcttattttttcttctttttcttttggacatttgtcgttttctgatgctatatattcaccagcgacgttggagctttctggtcttgtacacggagccaagcatgaaaactttaataatacaaacaacaaaattggctac

SEQ ID NO: 13151 - DNA, 2943 bp, Oryza sativa
  ref <308>: DATABASE ACCESSION NUMBER: AK110499
  ref <309>: DATABASE ENTRY DATE: 2001-12-06
aattgtttgctcgtttctcggtgtcctcccttcgtctcgaacccccatagcgacagccatgacgtcttcttcgtcgtcgttggcacgaatgttggttgcgttggtgtgtctgtgtctgtgtggctcctcgctcgcggatcgcaccgtcttctctctcgacagctcctggaagttcgagctgcaagccagccccgccccggcttgccaagaccccaacagcaccttccccctcaacatgaatgaccaacagtgcttcggtctctcccaggtctcctccgcctccactcaagacgcgtgtcaggacgcctgctgtgctgatccctcgtgtgaagtctggcagtggtgcgcctcttctgactgttccaataaccaaacctgctggatcggctcgatggacgactgcaaggccggtaagggatggatctcgcgcggccgcactgtctccccgcccactcccggctcaccgtgcacagacgcgcgctgtgacccctccactgacgacagtgggtggcgctccgtagacatccctcacgacttcgtggtagagggcaacttcagtgcggacgctgacaagtcccatggctacctcccctttggtgtgggctggtacagaaagcacttcgcgccgcccgctgacctctccgtggcttccaccctgtggctcgactttgacggtgtgcaaaccagttccatggtgtggctcaacggtgtactgctcggctctcacgcctcaggctacactccctcccgatacttcgtcgataattctctcatcaaattcggagaagacaatctcctcgcggtccaggtcgatgccaccaaaccggatggctggtggtatgatggcggtggtatctatcgtcacgtgtggctcacagtggtcgacactccgggtcccttcatcgctccttggggagtctacgcgccctccaaggtcactggtgacatcacgtggagagctgacggcactcctcaagcggacagcgaggtctggcccgccgtggaggtttggaacaacgccagtcttcacgactcgtacaagttctccctccaagtctccgtcactgacgcgtggggcctcgtggtgggcaagacctctggcgagggctctgtggatcccaaggccgctgccttctggaactcttctcaacctatcgagttgtctgaagcctctctgtggcacttggtggctgagcccgcccaccccgctctctacacagtgagcactcagctcttcgtcaacggtgacctcgtcgacactctcaacgtcaccatcggtattcgtcccactcactggagcaacgccacggggttctggatgaacggacagaacatcaagatcctaggcatggccaaccaccaagactttgccggtgtgggagtggctattcctgaccacctccagtggcaccgcatcaagaaactcaaggagatgggcgctaacggatggcgcactgcccacaacccgcccacgcccgctcttttacatgccgctgatcaacttggtttcctcgtatgggacgaaaaccaccgcaacggccaggacgaccagatcccgctcttgatcaagcgtgaccgcaaccatccttccgtcatcatctggtcgctctgtaacgaggtgctctgcaacaccgacaactccaaacgctccttctcctcctccttggtcaaccgctctctcagctctgagaactggcgtgccgacagcgtggcctcgatgggtctggatagcgatgatcaagatggactgggtgactgggtgagtgcagctaagcgactcaaggcgctcatccgaaccctggacccgctgggaggcagacccgtctccgccaatcagaacggctggatcggacccgacacccctctggacctgcagggcttcgactactccactgacaactacgacaagtggcaccagcaagcccctcatattccctccatgagctcagagaccagcagcgctgtgagtgacagagatgagtactccaatgacgagacgggcgggcacgtgagcgggtatgacgtgaactaccccgggtgggggcagacggctcagcaagcctggggcggcattggagaacccaacggtcagggcattctcactcgacccttcattgccggaggatgggtctggaccggatgggactacaagggcgaacccactccctacagctggccggatatcaacagtcactttggtattctggacatcgctggtttccccaaggatcgtttctactggtaccagtcgtggttcgtccagccctcgcctcccgtgctgcacctcttccctcactggaactgggagaccggagacaacgtcactgtctgggcctactccaacgctgacgaggtcgagctgctcgtgaacggagtgtctcagggacgtcaatccatgactcagtactctcacgtggagtggaacaacatcacctacgctcctggcaccatcgaggcgcgggcctatgtcaacggttcctctgcccccattgttattcaacgacgtcagaccacgggacctgctaagaagctgcaaatcgctgtgaaggacaatgtgggatccacgccttacgccggctgtcgcgacgtcacgctggtggcggtgacggtggtggacgcgatcaaccgtctggtgcccactgcctctgatgaggtgaccttctctgtgtcgggccccgccactctgctcggtaccggcaacggagaccccgcgtgtcacactcccgataagtcccccactcgacccgcctatcacggccagctgctcgctgtgctcggagtgggagatgaacccggcaacatagtggtgacggcctctgctcccagtctcggctctgtgtcgctcactatcacggtgtatcctcaagatggaaaccagtctccggagtggtgccacactgaacctcagctctaagcctctagcattacaggaacatctatgac

SEQ ID NO: 13152 - DNA, 3439 bp, Oryza sativa
  ref <308>: DATABASE ACCESSION NUMBER: AK110500
  ref <309>: DATABASE ENTRY DATE: 2001-12-06
aactaacgctaaaaaagtaacagtttctgtactttattgaacccccttatcccctgatcatgtggcagtccgtgatgcggccccccgtgccgcgtgactacgcgactaaggccttcacgttccagttgctggattgcatgcagtccaagcgtgagcctcaaccgcgcgtcagcaccgtccaccacaacgagatccccgagttgcgtttgttcggcacgacgcgcgagggctactccgtgctcgtgcacgtgtacaacttcgagccctacctgtgggtcgaagcgccgcgcggttggaatcccaacttggccttcgcgttccaggccgtgctcaacgctgagctcgcgcagggcactcgcgtgaacgacgccgttgtgcgaatcgagacacacgaacgtcagacgttgatgcactaccaaggcccgcatgccccgcgagtgtacctcaagattgtgactcagctccctgggttcgtcccaaagattcgctccctcttcagcgagcgcggcgtgtgcttcgagcaactctacgaggggccgatgcgctacgccaccttcgagagcaacgtcattttccccctgcgttacctcgttgatgccggcatcagcggtgcgagttgggtcacggtgagccactcgttcccgactccgttccccggcagcacggcacagatcgaggtagactgcgactacacctgtgtcacggcgcacgaagccgtgggagagtacatggccatcgcgccgctgcgcattctgtccatcgatattgaatgtatggggcgcaaaggcttcttccccgaggccgacaaggaccccgtgatccaaatcgcgaaccacgtcgtcctttacggttcctcgaacgtcgtcgacaagaccatcttcactgtcggcgactgcgccaacattgcaggcgctgaggtgaagtgcttcaagaaggaggaggacatgctcgttgcctgggcacagtacctcgtcgccatcgaccccgacatcctcactgggtacaacattacagggttcgactttccgtaccttctgaaccgcgccaacgcgctcaacatcaccaaccgcttcgcgtactggagtcgcatgcgcggtgaaaagtgtgtgccgcgcgagaagcagttccagtcgaagcagatgggaaaccgcaactatgttgaggtcatcattgatggtcgaatcgtcatggatgtcctcgtcgtcatgaagcgcgatcacaagcttcgctcctactcgctcaactctgtggcgcagacgttcctcggcgaacagaaggaggacgtgcatcactccatcatcgcggacctgcagtgcggtgacagcgagacgcgtcgacgcttggcagtgtactgtcttaaggacgcgtacctccccatccgcctcctcgagaagctcatgatcatcgtgaacaacgtcgaaatggcacgtgtcaccggtgttcccgtcggctggcttctcgagcgcggccagggcatcaaggtcttctcgcagatgctgcgcaaggcgcagacgcgcggcctcctcttccccgtgtacgagccccgaggtcccaccgacggcattggctatgagggtgccacggtcatcacgccggagaagggtttctacaattgcccggtcgcaacgctggacttcgcgtcgctgtacccgtcgatcatgatggcccacaacctgtgctactcgacgctgctgcgcaaaggtgctgagcgcgacatggacccggagagttacacggtgacaccttcaggcgactgcttcgtcaagcgcgacgtgttcaagggcatcctgcctgagattctggtggacctccttaccgcccgtaagatggcgaagaaggccatggctgccgcgacggatcccctcgagtacgcggtgctcaacggtcgtcagcttgcgctcaagatcagcgccaactccgtctatggtttcaccggtgcgacggtgggcaagctgccttgcctcgccatctccgcgtcagtgacctcttttggtcgtcagatgatcgaggagacgaagcgactcgtggaggcccactacagcgacgtgcgtgtcatctatggcgatacggactctgtcatgatccgctgcgctgacctcccagcacctgaaggcgaagacgaggtgaaggacgccccggccggaggcgctgaggcggagaagctgacccgcaagcagtccgcagcggcgaccgaggcacgcgacaaggagcgacttgccgcggcgatgaagttcggactggaggccgcgcagtacgtctccacgcacttcaaggcacccatcaagctcgaattcgaaaaggtctacttccccttcttgctgatgaacaagaagcgctacgcagggctcctgtggaccaatacggacaagttcgacaagctcgacgcgaagggtatcgaaaccgtccgccgcgacaactgccctctcatcgcctccgtcatcagcggtgtgctcaaccgcatcctcattcagcgcagcgttgagagcgccgtcgaatacgtcaaggggaccatctcagatctcctcatgaatcgagtcgacatttcgcagctcgtcatctccaaggccttctccaagtccgcggaggagtaccaaaacgagcaggcgcacatcgccctcgtcgagcgtatgaagaaacgcgacgctgcgtccgcgcctaccgtcggcgatcgcgtctcgtacgtcatcattaaggctgcgaagggcgcccgcgccttcgagcggtcggaggacccgatttacgtgcttgagaacaacacgcctattgatgtgcagtactacttggatcactcgctgacgccgccgctgatgcgcgtgttcgaggccgtcccgcccgaccccatggtgctggtcaagggcgaccacacgcgccacgtgtctcaggtcatgccgagcaagaatgcaggcggcctgatgaggtttgtcaaggtgcaaccgcaatgcctctcgtgccgcagcaacctgcccaacggcgacaacagcgctgtctgcggggcgtgcgaagacaaggctcccgacgtgtacgccaacatcatggcgaagcgcaaccatttcgaagccatctacagtaaggtgtggacgcagtgccagcagtgccaaggctcgctgcatcaagacgtgctgtgctccagccgcgactgccccgtcttctacatgcgcaagaaggtgcagaaggatctcgacgaacaccaggctatgctcgaccgcttcggtgtcgttgggttggagtaaaagagttgtgagttggggcgacgcacgcacgcgcccgcacgcgcgtcaaaacatacaatacaagatccgcgcccgggaacgatcgacagagcaagggtggaaaaaatatgcgagcggaccagaaaggaacaacatccatagactgatgctcctgtgtgatgaaggagggcactgcgatatcctcaccaccaatatttcgaggggggtgc

SEQ ID NO: 13153 - DNA, 2551 bp, Oryza sativa
  ref <308>: DATABASE ACCESSION NUMBER: AK110501
  ref <309>: DATABASE ENTRY DATE: 2001-12-06
aagcgaaaaaccgagtttgtatactcgataaattaagtgcgtgcgtcgatgtcgtccaaaccgcagacgaccgtgagcccgagtgatcgcatcgcagaactggagaaagagaacgcgtcactccgcgcgcggctgcgcgacgtcgagcgcacgctcgcggtggagacgcagcgcatgcaacagcgcgttgaagtcgcagcaaatgagaatgcccaactgcgcgcacagcagcgcgatttggagcgcatcgtcagtgcgttgaaggcggagctgcgcgatgtcgtgacggccgcagctgcagccgctgccgctgcgccggcgactaagaaggcgtcccccaaagcgccgccccgcgcgctgtcggtctcgaaagtcgccacactcacggcctcgaagctctcgtcaccggccgccgcaccgggcgcaggcgctgccggcgctgcggccagtgcggcggctgcgcgcgccagcgacgcgctgaatcaggccgctgcagcgcgcgtcactgcggagcggcagctgatgctgctgcagcgcgaggcggagcagatgcgcgcgcaacagacggagatggcacggcgcgccgccgacgtacaggcgcgtatggcggagatggcgcatgtgatggacgtcatcgcggcggagaccgaccgccacgcgcgtgcgcaggacgagatgaacgctcagctcaagcgcgtcacccttacggccgcgcaagcgaaagagcgcgcggaagcgctcaaagccgcggcggcgcaacggcgggagaatgcggcggcggtcgcagcaggtggtggcgctaccggtgccggtgccggtgccggtgccggtgccggtggtgccggtaccggagggggcgccgacgcagacgctgcaatcgccgaagccgacgcggagcaccggcgcgctcaagccgcggccgcggagctgcgcgatgcggcggagcagcgtgcagcggacctgcgtgcggtggcggccaaacgcgacgccatccgtcgcgaggccgacgccatcgccgcagtcaacggcgaactgcggcgtcacatggaggaagtggaccgacgcgtggaggagtgtgttgagcgcgtcaacgcggaacgcaagcgcgtcgcacagctctccatcgccgaagccgaaggcaaagccgccgccgcggaactggtggaggctgctgctgctgctgctgctgctgctgctgctgctgctgctgctgccaatgcatcgtcgcaagcgtcggcggcgcaggtgccgggtgcagccgctcccgctcccgccaacgccaacgccggcagcgcgagtggcagtgcgatggtgacggagatcgaacggcgcacgcgcgaggcagcgcgactgcgcgaagaggcggtggcgcgtctcgcggcggagcgcagtgcgcgcgagcgcgtgcagttggagcgcgagcagcggcggcgcgaactggagttcgcgcgcgaccggttcgggcgtgagcggctggaggttgcgcgtcagaacgagttggaggcgctgcgcgtcagcaccggagcggacgaacaggaccagcgtcaggcactggacgatcagatgcgccgcgaacgcgccgaacgcgaagaggcagagcgcgtgcggcgcgaacgcgaggagcaggaggtcatggcgctggcgcgtgagcgggagctgctcatggcacagcgcgagctgcgggcgcagcgcgagcgcgaggatgaggagcgcgcgcgcgaggcgctgatgcgcgaacgcctatcgcgcgaacgcgaagagcgcgagcgacgcgaacagctcgagctcatgcgccggcgcatgcaggagcgcgcggaggccgagcgtctcgaggccgagcgcgcggcgcaggtccgtgcgagggccagcgtcgacgccgaacgcgcccaacagcacgcgctggaggcgcagttggccgctctgcagcgcgagcgcgcggcgatggcggtggaggcggaccggcagcttcgcgcggcggcggaggaggaagatgagcggcgggtcgcgcagcgacgcgctggggagctgctggagcgcgaacgcgaccggcgtatgcaggcggcagacgaaaaacgcgccaaacagcggctgaaggagcagatgaaggccgagcgcgaactgcaggaggcgcagttgcaggcgcaagtcgaggtgcgggccaaaagcagtgcgcagctcgcgcttgcgggcgcagcgctgggtggtgcggccgccggcgaggcggccggtgcgggacccaaacccgtcactggtaaatctaccgtcacgctcgcgcgctcatcgttgctgctcaaagccaagcccagcgccaatgctgcgggtgccggtgctgcgggcactgccggtgcggccggcgctgccggggcaggtggtgcggcggaggacgacgctggtccgatgcccccaggcggtgcgcccgcaacgcatccgaacagcgccactgcgtaagcggtcgtcctgcttgtttgtgcaattgaatgaatgaattcgtctcaatttgttgttgcttcatccgtctctctgtcaattttcgtacatctctttggcttcc

SEQ ID NO: 13154 - DNA, 2593 bp, Oryza sativa
  ref <308>: DATABASE ACCESSION NUMBER: AK110502
  ref <309>: DATABASE ENTRY DATE: 2001-12-06
gcacgaatctcctcaacattctggatacatttgaggaccaaatcatcgatcgtgttccaaagtatgacgcacccttcaagcggccgtgggtagaatcgaagcgtactccaccattgagcaagacgattgtcgacaccgtagagttcccagaagaggacgagtctaccggtgagattcagatcggctttctcggacccgagtccatggacgatgtagctgagacagctatcaacacattgctgatgtatcttgcgggctcttcggtttccgtccttgtcaacacacttgttgagaaggaacatctggccagcatgatatatttctacgtcaagagccactacgacatgatcatttggtggaccatatctgctgtcgagactgacaagcttgctgaggtggaagcacgattcttcgaagttctgaaagagcacgcttcgaaacccttggacatgagctacctcacggattgcctacatcgattcaagcgtcaattcctgtactctgcggagaccggacaagatgagtacaaggatcctgtcatcaaggatcacttgtttggcaatcgcaatggatctgatcttgaagctgccatgaaggatcttgagggattcgataagcttgaaagctggaccgaggaagagtggcgagcattcttgaacaagtggcttgtcgaggctcatcacgtctctctacttggcaagccttccttggccctcaacgagaagctcaaggctgaagagcaagcccgcgtcaaggcgcagcaggagaagctcggagaagaaggcttgaaggaaaaggccaagaagctcaaagaagcccaagacgagaatgacaagccgatccctgaggagctcattgctgatctcaaggtgcctagcactgagtcaatacacttcttcgaaaccacaacggcacgatctggcctggcgaaaaagctcggtgtatccgagaacaagatccaaaagattgtagactcggatgagaatggtctcccactcttcattcatgtcgagcacattcccacatcctttgtccactttggcttgatcctcgggacggcccaactccccactgagctcaagccgttgctcggcgtatatctgaccaacttctttgccacccctatcgtggtcgatggcaagcgaatcgagtttgaggaggtcatcaccaaaatagagcaagacaccatcgatgtggcagtagaccacggctccgacattggcaactcagagatggtctacatccacttcgtcgccgaggccgccaaatttgagacggttgtgaagtggctcaagacaatgctcgtcgattccgtcttcgacatcaagcgcattacctcagccgtcaagaagatgctcgccgaagtccccgacgaaaagcgcgacggcaacagcatggccttcgccgtcgaccgcatcattcactacgatgccgccagctccgtccgcgcaggcaacacaatcgtcaagggagcctacctgccccgaatcctgcgcctcttgaagacctcaccacagaccgtcctcgacaaactcgaggccttacgaaaacacctcctaaccttctccaacttccgcattctgctcacagccaacctcgaaaccctccccgctccaatctcaaccttcaagcacctgacccaagcatttcccccaccatcctcgaatccctccgtcaaccccatcgacgaccgtaccgccctgctctcagacataggccgcgcccccggcggcacccacttcctcatccccatgcccatcgactcgtccttcgccgtgctgaccgccaaaggcctaaaggggtacacgcacgccgacctgcccgcgctcatggtggcactctcgtacctcgacgccgtcgaaggtcccatgtggagctcgatccgcggcacgggtctggcgtacggcacgaacttcttccgcgacaccgagacgggcctgctcaagttccgcatctacaagagcccgaatgcgttcagcgcgtacgcaaaggcgcgcgatgtcgtgcgcgggtacgcggatggcagcaggcggttcgaggcgctggcgctcgagggcgcgattagcagtattgtgcgcgactttgtggacgagcgcgcgacggtggtggacgcggcgcgcgcgtcgtttgtggatacggtgacgcgcggcgtggggaaagggtggcaggagtgggcgctgcgcgaggtgcgcaaggtgggtgcggaggatgtgcgtaggatcatgggcgaggtggtgagtgcggtgtttgaagcagataaggcggatttggtggttacgtgtggtgcgattatgctcaatgctctcaaaaaggatttcgaggacgcgggcttcaagccacaggtcaagaacctggcagacttccaggacacgtatagtctcgagggtggagagaagggtgagggcgaggatgacgacgaagacatggaggatgcggacggcacggacgaggatggcgaggacgagagtgagagcggcagtgaaatggaggagtaactgtcgaaatctgcaggttacagtagttctcagcagagtcacaatcaagtagggtgatagagtagagcatgtgtgatccacgttcttaggttgcattc

SEQ ID NO: 13155 - DNA, 2973 bp, Oryza sativa
  ref <308>: DATABASE ACCESSION NUMBER: AK110503
  ref <309>: DATABASE ENTRY DATE: 2001-12-06
caaaggccatttcgatggtcgccgcagtgacgagttcgctgatggcgggtcaggacccactgatccacatcggcgctgtcatcggcgggtgggtgtctcaggcgcgcacgggctttctgaagatcgatgcagcgctgaaactgcatgtgttccgcaatgagcgcgaccggcgcgacttcatctccatcggcacggcctgtggtatggcgtcgatctttaacggcccgtttggtggcacgttcttcgtcgtcgaagaggtgggcagcttttggaattgggaaaccactgcgcagatgttctttgcgtgtgtcatgtccactgcgacggccaacttctgggtgtcgggcattacgtacggcaaatggggcgtgttcgatccgcgcgccatcgtcgtgttcaacatcggcacgagcacgactttctatatgtatgagttggtgctgttcgccatcgtcggcgccaccggcggtctgctcggcggctgcttcgtgcagggaatgctcaagatacagacgtggcgtcgcaaatacatcgttcaccgatggcaaaagttcaccgaaatggtgcttatcctcacctctacctgtctcacgctcttcgtactgccgtacgtgttcgcgtgtgcgccgacgtaccacacgccgctcgagacgacggccacattcggaatgtacaacccgttccgtcacgagtgcaacagcggtgagtacaatgagtttgccactctggcaatgcagggtcaaatcaacaccatcaaacacttggtgtcgcgcgatgtgccggatatgtactccatcgccgtcactttcacgtacggcctgtgggcgttcggctttctcctcatcacgtccggtgcgacggtggcggccggtctcgtgacgcccatatggctggtcggcgccgttatgggccgtctgtggggcgagatcttcctttggatgttccccggcagcggcatcgacccgggcgtgtacgcggtggtgggcgccggtgcgatgatgagcggagtcatgcgcatgatcgtgtgtgtggtggcttttatgatagaagtgacgtcggacctgcagttcgtgctgccggtcatcgtcgcggcgctcgtgtcgcgcagtatcgccaaccgcttcggccaaagcatgttcaacacctttatcgcattcaaaaacatccctttcctaccgcccgaacccgtcacctccaacgcgctgctcaataagatgcgcgcatatgacatcatgtcacggccggtggtggcgctgcccgtgcactgccgcgtggcggacgcgttgcgggtgtgtcagaagacgacgcatcagggctttccggtgacgcgcggttcaaagcgcggcggcgagctgacgggcctgatatcgcgcaagtttctgctcattcttctgaaacacaagatttggcgcgacccgacgctgtacaccggacgggactaccacttcatgatgcagaagaagatcctgagcgtcgatgaggtgaaggcagagctgacggacgacgaccgcgagcaatggctggatcttcgggcgttcatgaatcgcgcgcccacgcgcgtccacgaaaacaccaacgccgcgctcacgtaccgcatcttccgcctcttgggcctgcgccatctgccggtcatcaaccaccagaacaagtgcgtcggtatcgtcacgcgcaagaacctgttggagcccatcctcgtgcgcgcctttgcagagtcgctcaaacgcggcgcactggcgcacgccaaactgcgcgaagccgcagagcgtgttcgcgagcagagcctgtcgtcacgtgcgccgaacatcaaagagttgagccctgacgacgactatctgatcgaagacattgacctggagatggcggcgaaagtagcgttcgacgacgcacgcgacattctgacgggtaagaagaaactcaacatatcactgcccgaaatcgctgacacactcaatcccttcaaactcggtattaagcgcacgcccgcaaaacagggcgtcaaagcgggctcaaaagcaggatcaaaagtcaccactccggcgctcaaagccgccacaccgtcgggtgcggccgcaggccccgccgtggcactccccgcagccgccgccgccaaaggagccattgctgcggctgatgtgaaggattcagacgcgaagaagcccggcggtcacgctcgcacgcgctccatttcgaagccgcccgcacagccgcgcccgaatccggccaacgccacacccgcagagctggccgctgcactgcccaaagcgccggcaccgaaagcggcactccccggttcggtgggtgaaggcgtgcgcgatctggcgcttctgccggtgaagctgctcgacgcggtgctgccaacgtccgatgaaggaatcacacccgacgcaaataacgacctcgacgtcgacgcggagtaggcgcaggcgcgcgcctgcacgtatgtctgcgtatgtctgtgcgagtgtgtgcgctctctcaagcgtcgcgccgcgttgtcgtgcgttgcatcggtcaacgccactcgcgcgactgctcatggccttgcaattgagttcgattgcgttcctttgcgtttgttgcgcaccactggaggcggcagcacctgcacggctgcactccgcaccacacagcgccacagcactgccacatctacgattcatttcatcacatcgcatcaccgcatcacctcctccacccgccctcctgtccgctcgtccactcgtcacagagactctattgttttcggccgctgcatgtcgcgatgccgcgctgctgcatgctgccagtcgcatcgctcactcacatttcagttcaatccgtttgaagcactctctctgtcggtcattcgctcgttccgtcgggtctgccgtcgtccgctctcgtcgcgtcgcgtcccgtcgctgtcgtctccatcccgtctcactgctgctgctgctgcacggccacgttttgcaaatgatcacacgcctggcc

SEQ ID NO: 13156 - DNA, 2880 bp, Oryza sativa
  ref <308>: DATABASE ACCESSION NUMBER: AK110504
  ref <309>: DATABASE ENTRY DATE: 2001-12-06
accccactgcgactgtgactgtgcccaccacaaatacccttgaccctccctccggcaaccctcactcgtgagcactgcagcaaacatgtctcgattctttgccgccagcgacagctcctcggaagagtccagcgaggaggagctctactccaatgacgaggagtctgaacaggaagactcggagcaagattcggatgaagatgactcggatgacgactcatcctcagattcagaaggtggaggtgccaaccgcttcttgaaggatgccagcagcgacagtgagagcgaggacgaggacgcgaataaggtcctcaagagtgcaaaggacaagcgctttgacgagcttgaggccaccataaggcaaattgaaaatgcccagaaaatcaatgactgggcagttatttcagaccagttcgacaagctcaaccgccaggtgccgaccctgatcaagcaaaatgatggcaaggtgcccaagctatacatccaggccattgcagacctcgagaccgttgtcctcgagacacacgagaagcaaaaggtcactcccaagaagatgaatcaggtcaacaccaagggtttcaacgccgtccgccaaaaggtcaagaagcacaaccgcgagttccagaaggacatcgatgcctacagagagaacaaggatgaattcatgcgcgaagtggatgaggtcgaagtcgccccgaaggagaagaagaagaagtccaagaccagccaactcgacctggggctcgtcgaagacgccactgatgatggcttcatcacggtcggcgctggcggcaaggcagttcaatacactccagaaggcattctcaagcatctccgtgccattgttgaacagcgaggccgtaagaactctgacaaactagaacatatccgcacccttgagaggctgttcgatgttgctatcaacgactaccaaaagatccgcgttctcctcacgctcatctccactcgcttcgatctgacatctggtacagccagccatatgcaccaagagcagtggaagcttgcggaccaagaattcggtaaactgttggaaattcttgagaataccaaagaaattgttgtcattgagaatgccgaggagtgggaggacgatgaaaaactaccacccattactgaaggcgagattttccgtatcccaggcagcgttgtgtccttcgttgagaggctcgatgacgagcttactcgttcactgcaacatattgacccacataccgccgagtatgtcgagcgcttgaccgacgaggctttgctttacgcccagctcgtgcgtgccttaatctatgttgaggggttgaagaaaaacccaagcttggacctaccacaagaatcgctaaaccgtgtcgttatgcggaggttagagcatgtttacttcaagccctcgcaagtcgtaccatcatggaagcaaacagttggaaagctgttcccgataccctcgattctcaaatcacaccacgggccatctccaacgatactacctccctcgttcagaccctcagcacatatctcttccaatatagcgaaggcattattcgtgctagggcgatgttgtgccaaatctatttcttggctttgcatgaccaatactacaaggctcgcgacatgatgctcatgtcccatttgcaagagacgattagcaacttcgatgtcaacactcagatcctgttcaaccgtgcgcttgttcaagtcggcctatgtgctttccgagcaggtttggtatatgaatcccaaacgtcactacaagaaatctgcggcagcaacaggcaaaaggagctgctcgcacagggcctacagatgcagcgatactcgcaaatctcgcctgaacaagaacgactcgaacgccaacgccaattacccttccacatgcacatcaacctcgaacttctagaatgcgtctatctcacttgctccatgttgctcgagattcctctcctcgctcaacttggctcgtcgcccgatctcagaaagcgtgtgatcagtaagacctaccgccgcctcttggaataccatgagcgacagatctttaccggccctcctgaaaacacacgcgatcacgtaatgcaagcatcaaaagcgctttcagctggtgaatggaaaaaggctgctgagttcatcaactcaatcaagatttgggagctcatggccaattcagaaaagatcaaggaaatgctctctggacaaattcaagaggagggtcttcgaacataccttttcacatacgcaccattctatgacacacttgccgtctcaacattggcgtcaatgttcgagctctcagagcgtaaggtgtcggccgtagtagctaagatgatctcacacgaagagcttgccgcagccctcgatcaagtcaactcagccatcatcttccgaaagggcgtggagctctcaagactccagacccttgcactcagtctatcagacaaagcaagcggcctcatcgagtccaacgagaagacgctcgagcaacgcacacaaggcacagccaacgccttcgaaaggcaaggcgggcgcggcggccgaggcggaggtcgcggacgaggaagcggtcgtggcggcggcgtaccgcgtggcggacgcaatcagcaattcacaggcggtgccttaggtcgcgcgatccaggcttaggtggctgatatacttgatgatcacgagactgatgattatgggagtagaagagagggtgagatgaagacgaatgggatgtggtagtcaagaaattcatggacggcgaaattacggttatttcatctggggttgcgatcgatagttacatgtagtgtcaggtcgttgggtggtcgtggtggatttatatttcgtcaagactacctattagcatagaggcatgaatgaaaagtaaagtac

SEQ ID NO: 13157 - DNA, 3310 bp, Oryza sativa
  ref <308>: DATABASE ACCESSION NUMBER: AK110505
  ref <309>: DATABASE ENTRY DATE: 2001-12-06
aagcgaaaaaccgagtttgtatactcgataaattaaggtgagatgtgtgacgacgacccgtcccgcaactcgctgtttcggtcgcgaccgatgtcgtacgtgtccatcacggccatgaccgacatcgcgtacgacacgatccgtgagttgggcaacttcgggctgttccacgtcgtcgacctgaacgccggcaaagaggcgagcgtcaatgacaagaacttggcgggttacaagaagcgcgtgcaggactgtctgatgtatgagcgcaaactgcacgacttggaggagcaaattaaagagtacaatattccggcgccgccgccgctgcgcgagcacgaggagcgccgccatacccataaggacaacgccgttctgccggacatccgcgcgcatttggagccgttggaggagcgcctgcgccgctccgtgcaggtgcaggccgacatcacgcgcgccatttcagagctcacagagcgcgtgtgggtgtacaaaacctgccgcaacatgcaggtcggccgtgtcgaagctcacgacgacaaacacgaggtgccatacagcgccgctgccgccgcagtgccgggcgcgatcctggtgcccgggaccactgcggctggcctgcccgccgccgcagcagcgcttgcgccgccgccgaagcagaacaaggacgtggagttgggagagcggccggtgggcacacccccgggtacgacgggcggtggcgacagcaaactgaatcaattgggtgtgtcgctgctgtcggcggaccaccacgcgccgtcgggcgcgggcggtgcggcggcgaagtttgtgctcccgaaattccgcaccactctgacgggcgttctgccgaccgacaaatcgtcgttctttcagcgcatgctgtaccgcatcagccgcggcaacgccatcacgcacttcacggacattcccgtgcccatccccgacgcagtgagtggtgaattggtgaacaaaagcgtgttttcggtgattatcgtcgtgagtgagctgttggagaagcgcatcaccaaagtgtgtcagctgtttcaggccacgctcgtgcgcatgcccgacacgcaggccgccatcgatgaggcgctgcaccgcacagaggcgcagatcgacgaacagcgcatgctgaaggtcaacactctgcgcgacatcgagcaggcgctgcgacagctcgcgggcgacccgcaaaacgtgtctcccctccgcgagtggcagtacctgctgcggtgcgagaaggcggtgtgcgatacgatgatgaagtgccacttctacctgacgatggtcgccttcgagggctggtgcccggtcgaggaggtcgataacctcaaaatcgccgtcaaacgcgcggtgccgccgggcgataagatcccggagccggccgtggaagtggcgccggagaagcccatccgcgacccgggtatgccgccgacatactttaagctgaacaaattcacgagcatctttcagggcatcgtcaacacgtacggcgtgccgcgctaccaggaggtgaaccccggcctcttcacgatcgtcacgttcccgttcctgttcggtgtcatgtacggcgacatcggccacggcacgttcgtcaccatcctctctctgcttatgatcatcttcgaagacagactcacgcgcctcaaagagtccggtaacatgaacgagatcttccgcatgtgcttcggcggtcggtatctgctggtgtgtatgggcgttatgggcatttactgcggtacgctttataacgactgcatgtccatccccgtgtcactgtacgcgccgacgtgggagtatgaggggacggctgacgaaccggccacccgcatcggcgctgtgtacccgtacggcgtcgacccggcgtggtaccacaccaagaaccagctgacgttcttcaacggcatgaaaatgaagacctccgtcatcctcggcgtcacgcaaatgacgttcggcatcataatgggtctgctgaaccacatccacttccgcgatcagatctcgatttggctcgagttcctgccgcagctgctgttcatgttatgcacgttcgggtacatgtgcattctgatcatcatcaagtggtgtaccgactggtcgcagacgtcgcaggagccgccgaacctcattcaaacgatgatcactatgttcctcggcctcggcggcgtcaaggagggcgcgcagctgtacgccgggcagagcacggtgcaggccattctgcttatcatcgcgttcggctccattccggtcatgctcttggccaagccgtgtattctcgcgtactgttcgaaggacgaccacggccacggtcacgccaagccgcaggccgcacagccggctgcagccgctgccggggacgtggaggcgaagggcttcgacgagaaaggcgaagtgattccggcagaggcgccggccgccggcgctggcgcggcgcacgaggaggagcacacattcggcgattacatgatccatcagagcattcacacgatcgagttcgtgctcggcactgtgtcgaacacggcgtcgtacctgcggctgtgggcgctgtcgctggcgcacagcgagttggcggacgtgttttggacgaaactgattttggagtacggtatgtataagaacagcgccttcttctctatggtggcagtcgcagtgtggttcgtcatgaccgccggtgtgctgctgtctatggacgtgttggagtgcttcctccatgcgctgcgtctgcattgggtcgagttccaaaacaaattcttccacgccgatggctacgcattcaaacccttctcttatgacgtcgtcgaagagtcgtaggcgacgactcatacgcgccgactcatacgcgacgcctcgtacgcaccgcctcgtatgtgccgcctgccgtatgcgatgagccgcgtaccaccaccgcgtaccaccaacttccgccgtccgtccacccgaagcgccagtccgcctctgtccgttcgccgccgcggcgtggcacctgatcccgcgcgtgcacattggcgtgcgcgttgggtgagtgcacgcgttcggcgcgcgtccgcgtgcagctgagggcgcagtgcgtttgctttttacgacctccgttttgtgtgcctctcccactacttctcttctgcactcgccgtctcgcttccccccgtcccctccgctgctgccaccgcacggcctcgcggtgggcggtttgtgtgacagtgtcttggcttctgcccgcgtgtgccgttccctttgtgtcgtgcgcgtcggttggtagcgccgtgccgcggcgttttaccaccgcaccgttcggaacacacgccgtttc

SEQ ID NO: 13158 - DNA, 2724 bp, Oryza sativa
  ref <308>: DATABASE ACCESSION NUMBER: AK110506
  ref <309>: DATABASE ENTRY DATE: 2001-12-06
gtttctgccggtcttcatcgtggccatatcatcagagaggattggagcatacgtggagaaccaaccgtcgcgatgaaattctctgccatcctgataaccgctctcccggccgtggtcgaggcggtctactcatggaagaatgccaagtttggaggcggcggtggctttgtgccgggcattgtattccatcctacccaggctggcgttgcttatgctcgaacggatataggaggcctgtacaggtggaacagtgatgactcgtggacgcccatcaccgactccatcaccgacaatgcgaactggcacaattggggagtggatgcgcttgctcttgatccccaggaccccaatgtggtgtacttcgccgcgggcttgtacaccaactcctgggatcctagccccggcgccatctacaagagcacggacaagggtgcgacctggacatcttcaacgctcagcttcaaggtcggtggtaacatgcctggccgcggcatgggcgagcgcctggctgtcgatcccaagaactccaacattgtgtatttcggcgcacgctctggaaacggcctctggaagagcaccgacgccggcaagaccttcaagaaggtcgactccttcaaggctgttggtacctacatcccggtccccagcgacagcaccggctacaacagcgacatcaacggcctgacctttgtgacctttgactcgacctccgcaaccatcaatggtgccactggccgcatattcgtaggcaccgccgataacgtcacggcctcgctttacgtttctgaggatgccggcagcacatggaacgcggtcaagggccagcctggcaaatactttcctcataagtgcaggctgcagcccaccgaaggcgcactgtacatctcttacgccgacggaacgggcccttacgatggtgcctctggcgctgtctggcgatacgcgctcgcgaccggcacgtggacggacatcactcctgtctccggtagcgacctgacctacggattcggcggcctctccgtggacatgaagaagccaggaactctggtcgtcgccagtctcaactcttggtggcctgatgcgcagatcttccgcagcaccgactctggcaagacgtggtcaaggctctggcagtggggtaactatcccgagatgatctactattacggcatctcgactcccaaggccccctggatccgcaagaacttcctcgataccgactccaagtggctgggctggatgatcgagtccttcgagatcaacccgactgacagcgaccacttcctgtacggcaccggactgaccctctacggtggccacgacctgaccaactgggacaccaagcgcaacatcaccatccagtccctggccgacggcatcgaggagaccgctgttcaggaggtggcctcggcccccggcggcagcgagctcatggctgccacgggcgacatctccggcttcaccttcgcatcggcggcagaccttggaacttcaccaaagcgggtctgggacaaccccaagttcaccacctcagccagcgtcgactacgccggcaactcgcccgggaaggttgtgcgcgtgggcaacgatgccggcgctcagatggtcgcgacgtcgaccgatggcggcgtcacatggaacgtgtaccccggcgccgacacgaacaagaacggcggtgccgtgtcctactctgccgatggtgacacgatcgtgtggtccaccggcaccggtggcgtgtaccgctccgtgaaccagggcagtttctccgccgtgtcctcgttgcagagcggagctgtcgtggcctcggacaagcgcaacaacaagtacttctacggcgcatccgcgagcactttctacgtctccgctgacggcggcgtgacctttgcggccggcggctcgctcagcggcgccacgtcgatccgcgacatcgccgcccacccgacgacggctggcaagctttatgtgtcgaccaacgcaggcgtcttcaccagcagcgactttgggcagacctttaccaagacttccgccggcctgagcgacacgtaccagatcgccgttggcctgggctctggttccaactggaacctgtacgcctttggcacgggcggcaacggcgccaggctgtacggcagcgcggacggcggctcgtcctggactgatctccagggcgacaagcagggcttcggcatcatcaacggatgcaggctcgctggcagtgggaacgtcgccaacaaggtatacgtcgggaccaacggccgcggcgtcttccagggcgacggttccatctccggaggcggcggcagcagcccgtctggtacaagcaccactgcccgcgcgacctcggcggccgcgaccagcaccagcaggatgatgcctagcagctccgtcgtttcgacttccaccccgacgtccaagcctgtgactggcagcaccacttccaagatctcctcgaccaccctggtcacttccgctcctcccaccaagacgtcttccgcccccgctggaggaccgacggccggaacttacgagcagtgcggcggacagggctggacagggccgactcagtgtccctccggatggacgtgcaagaaatggaatgattggtactcccagtgtgtgcagtaaggctgtgagataagagcgagagaagcgcgacatcgtgcgtgagtgagtgagagggcgcagggtaaatataggtgatgtttatatgatcttattcttccg

SEQ ID NO: 13159 - DNA, 3223 bp, Oryza sativa
  ref <308>: DATABASE ACCESSION NUMBER: AK110507
  ref <309>: DATABASE ENTRY DATE: 2001-12-06
cacacgctgtcgactcacgacttcctcatgcgctcgacacggcgcctcacctctacggcggcgcgcatcgagcgcgagcgcgtgcacgaagccgcggcgtcggcggtagcggcgcaggcagcggcggccgctgcagccgctgccgaagaggaggcgcgtgccgccgccgaagcggccgaagcagcagcggagcgcgagcggttggcgcgtgagaccagcgccagtgcggcggcggtatcggcgaacgcatcatttacgtctgccgccgcgccggtgtcggtcgcgccggtggtcgttacagccgctgcccgcaccgacagcgccgccgacgatcgtgcgcgagcgcgtggtggtgcacgacgcaggtacgtcaccgatggcgcagcgcgaccggccgccgctgtatctgcccgaacagcgcacggcacggcacggcagtgacgcgcagcggaccaccaccacgacgtcgagccgtacgaccacgaccgtcacaacaaccaaatccgcccaacccgcaccggcggcggcggcggtggccggcgtccccagcgctacggctacggcggcagcgcaagcggtgccgctgcacgcgaccgcggcgcccggcggtgccgttgtggcggccactccggcgcgctctgctcctgtcctcggcgccagcgcgagtgtgagtgacatcaaacactcaccgtttccggcagtcgccacagctgcgacggccgttccgcgcgcaaccgctgccaacagcccgggggttgcagccccagcgctgcctctggctgcagataccgcggcacccagcgccagtagcagtggtgcaccgccgatgcaggcgcttctgcagtacgcgcagcgcgcgattgagcatcactcacacgagtcgcaggagcgcgcgcggcaggagcggctgctgagccacatctgcgacgcactgcagagcattgcgcgttcggtggagacagaatttccgaattcgtactttctcgtcaccagcgacgagtcggtcgtgcggcagctgcgcgctctcacggatctgcgcgcactcgatgcggcgctcaccgctgccgccggcccaccggctgtgcccgctgccagcaccagcggcattcccgcgattgccgctgacccggctgctgccgcggctctggcgatgcaaccggtcgatctgttggccgccaacgcggcagccgctgcacacatcaaacagctcgagcgacagctcgccgcggcgtcggcgccgattgtggtcgctgcaccgctgccgccaccaccacctgctgttgtcgccccaccaccggcggcggtttcggtcgcgccaacacccgcccgacccgcctccgtaccggcgcatcagcccgacgaggagaagcagcccgaagtggacgatcgcgaaccggagccgcatcgcgctgccgcggcagaacctgccccggcagctgcaccgccaataagtgcaacgccttctgcgaaccggaacgaacgcgcagagggagcgccgcgcacggccaatcggcccgtcagattcggcgatcccgtggtgtcgcgtgcgcagccgctcgcagtggcagccgccgcggcagcagtgccgcaccgctcagatcgcaggtcgcagccgcccgccgcagcggcgggtgatgacaatgacgtggacgtgtacgtcgacgccgaaccggtggtggcgcagccccggtggcagcgggaacaagcgccagcggcagccgtgaaacagcagctgcacggcggatactctacagccactgcggtacacagcaacggcgtgtcgagtcgcgtgcgcaccgctcactcccgcgacaccaaacccatcgccgctgaccccaccgcagcctttgccccggccggtgccgtcgaaccgagtggtcgccgcgagcgttcggtgacagcgcgcgtgacggtgacgcgcacgggccagcctcacggcgacccgcgtggcgcacagcagcccgccgcgccggtggcggttcacttccacacggagcgccgttcaaagccgcgcggtgagagcgtcgcggcaggcagcagtgtggaagcgccggtggcggatgcgcgccgattgcaccgcagcacgcgtgcgccaccggcagtgcccgctgtcgcacagccgcagtacatctcacacgcgccgtcatcgtcgtcgcggtcgcagcggcacagtcacgatcgacgccgcagcggtggtgctgcgcgccaatcaccgcagcggtatgcgcgctcgtcgcgcggtgcgtcgtcgcgcggtgcgtcgtcgcaccgccggtcgcactcgcgctcgcagggccaccgcgaccgctcggcgtcacgttccgtatcaccgtactccggctctgagtacagcggcagcggaagtggcagcggcagctggtgctcgtgttcggacggcgggtcggcatacggaagcgatggctcgcgctcgccctctcctgtcggcgcgcgcggtggcgggtcgcatcgccacgccgtcgtgcatcggccgcgccaccacgaccacacgcacgcgcactcgcactcgcatgcgcatgcgcattcgcacgcgcacgttcacagcggcgggcgtcgcagtgcgagctatcgcgacgcgctcgagcgtgaggtggcatcgcggccggtcgccactgcggccgctgtgagcagcactgcggcgaacggcgacgccaaatacagcacacccgcgcccgcccgtgccgttgcggcagtgaacgcaacggcacgtacggccgccgtaacaccggcgccggtgtcaaccaccgcaaccggtggaagtgccaccgccactccgcgcaacgacgccggtcactcgcggtcgggttccgcctccgctgtggcagaggccggcgctgcaccaccgagcgcgagcgcggcggatcgtaagatcgaagacatgcggcagcgcttggcgcagctgcgcgccgcagtggccaacaccgcggccacagcgtcggcaaacggactcgcaccggcgctgcactccgcggcagccgcaccgacagccgccggagggacacccgcgagccccgcagccgccgcgaacggcggcgatccggacgcatcgctcgtgctgtcgacacagcccatgtgatctgatgactgactttcgtatgtgtgatgacactccatagctccgtgccgcttccgtatcaccgaatttcgtgtgccccgccttcgcgcgctgttctgtcgcgcgcgtaatgcaatgtgttcgatccgt

SEQ ID NO: 13160 - DNA, 2706 bp, Oryza sativa
  ref <308>: DATABASE ACCESSION NUMBER: AK110508
  ref <309>: DATABASE ENTRY DATE: 2001-12-06
atgaaggaaccgactgcgcacatggctcccgtcgtccaccgtttcttcctcgtcgacgtcgtcgtcctcttcgccgcggccgcggccgctgccatccctgcgtcggccgaagcggcagcgtcgtcgtcgcagaccgacgcgctgctggcgtggaaggccagcctggacgacgcggcctcgctgtccgactggacgcgggccgcgccggtctgcacctggcgcggcgtggcctgcgacgccgccggcagcgttgcctcgctccggctccggagcctccgcctccgcggcggcatccacgcgctcgacttcgcggcgctcccggcgctcactgagctcgacctcaacgacaactacctcgtcggcgcgatcccggccagaatctcgcggctgcgctcactcgcctcgctcgacctcggcagcaactggttcgacggctccatcccgccgcagttcggcgacctctccggcctcgtcgacctccgcctctacaacaacgacctcgtcggcgccatcccgcaccagctcagccggctccccaagatcgcccatgtcgacctgggagcaaactacctgaccgggctcgacttccgcaagttctcgccgatgcccaccatgacgttcctgtctcttttcctcaactccctcaacggcagcttcccggagttcgtcatccgcagcggcaacctcactttcctcgacctgtcgcacaacaatttctctgggtccataccagacatgctgccggaaaagctcccgaatctgatgtacctcaacttgtccttcaacgcgttctccggtcaaattccggcgtcgatcgggaggttgacgaagctcctggaccttcggattgacagcaacaacctcaccggtggcgtcccggtgttcctggggtcgatgtcgcagttgaaggttcttgatctcggattcaacccgctgggcggtactatcccacctgttcttggccagctccagatgctgcagcagctcagcatcatgaacgccgagctcgtttcaactctgccgcctgagctgggaaatcttaagaatctcactgtcatggagctgtccatgaaccagctctccggtggattgccgccggagttcgccgggatgcaagcaatgcgggtgttcagcatttcaacgaacaacctcaccggtgagatcccaccggcgttgttcacgagctggcccgagctcatatccttccaagtgcagaacaacttgttcaccggcaagattccgccggagctgggaaaggcagggaaactgatagtgttgttcatgtttggaaatagattatcaggcagcatacccgcagcattagggagtttgacaagcttggaggatcttgatttgtcagataatgatctgacaggaggaccgattccgggaaatatgggaaacaatttcaagatgcagggagttgatcattcgtcagggaattcctctaacagcagatctggttcggatttctgtcaactgctctccctaaagatcctgtacctgtcaaacaacaagctcactggtaagctgcccgactgctggtggaacctgcaaaatctgcagttcatcgacttgtccaacaatgcattctcaggtgaaatccctacagtccagacgaactacaactgttctcttgaatcggttcatcttgccgacaacggcttcactggtgtttttccatcatcgttagagatgtgtaaggcgctgatcaccctagatattgggaacaacagattctttggaggtattcctccttggattgggaaaggccttctgtcgttgaagtttcttagcctgaaatcaaacaacttcacaggtgaaatcccttcagagttgtcgaatctctctcaacttcaactgttagacataagcaacaacggtttgacaggattgattcccaaatcttttggcaacctaacttccatgaagaatccaaatactttatctgctcaagaaacattagaatggtcttcttacataaattggctgctttactcggatggaatcgatacaatctggaaggggcaagagcaatttttcgaaaaaacaattgaattactaacgggtatcaatttgtcaggtaactcattgtcgcagtgtatccctgatgagttaacaaccctccaaggccttctatttctgaacttgtcaagaaaccatctgtcatgcggcatacctaaaaacattggtaatacgaaaaatctagagttccttgacctctcattgaactaactttcaggagccattcctccaagccttgctgatatatctactcttgacattctaaatctctcgaataatcatctatcaggtaagatacccactgggaatcaacttcaaaccctcagtgacccatcaatataccacaacaattatggtctatgtggctttccattgaacatttcatgcacaagttcttcacttgcatcggatgagagattttgtagaaaatgcgaggaccagtatctatccttctgtgtaatggctggagtggttttcgggttttgggtatggtttggaatgttctttttcagtggaaccttaaggtatgctgttttcggctttgttgattgcatacagtgtaaggttatgcagaaggtgtactgtattaatcaatttctttcaagaggaactactgcttagtatctgtaagctgtggtttcttaatgtaccttcttatgatgaactatatttagtttttcc

SEQ ID NO: 13161 - DNA, 2431 bp, Oryza sativa
  ref <308>: DATABASE ACCESSION NUMBER: AK110509
  ref <309>: DATABASE ENTRY DATE: 2001-12-06
cttccagatggatccattgaccgtgcagatctgctgtgcaacaaggcagcctgctactatgcactgaacaagctgaaggaggctgtgaaggagtgcggctcggcacttgaggtgtcccctggcagcatcaaggcgctgcgccaccgcgccaaggcgctggagaagcagggcatgtacaaggcagcactcacagacatccagtccatcaacaagacggagtccgcaactgacgacacccgcgaggccgagcgccgcttgaaggacctggtggcaggccgcaggccaagcctggccaacggcggcgcacgcgcagcagggcccagcggcagcagcagcgccctgcgcggcgggcgctcgcccctggcctggccgttctcggccaaggtgacgctgggcaatgagacgcgactggttcagctgactgccgctgctggttacggggacctgctgggacaagtgaaggcgaaattccccaatgcaggacacgtgctgctcaagtacgttgacaaggatggtgaccttgtgaccatcacgtgccgcagcgatgtgcagacggccctggctgaggcgctgaaggcaatggacaggcggctgggtgtcatcccgcccatcaagatcgcctgcgtgcccgttgcagacgcgtctgaggtgccacagatcccatacgatgagctgcaggaggcagcacagctgatgctgcagcagcagcagcagctggcagcagccgcagcagcggcacaacagcagcagcaggtgcagcagaagcagatggcgcagacgacgtctggcgagatcatcgagattgatgactggctggtggactttgccaacctgttcagggagatgagcggcatcgacgctgacaggcacattgacccccacaacgagggctgggcagccaccagcaaggccatggacgtcatgctgggcagtgaggaggcggccccgctgttcgacaaggccatccagcgcttcaaggaggtcatcgccatcggctacctcagctggggcaacattttcatatgcaagggccacaaggcaatggagattgccgcgctggcggaaggtgaggtggatgctgagctggctgccaagctgactgccgagttggatgccgctgaggccaaggtcaagcaggcactggaggtcaaggacgacctggtggagggcctcaccacattggcgggcattgaggttgaccgcgccaaggtggctgccaagttcctggtgaagccaacgccgcctgcacctgagggcctggcggagggcagcaaggaggcagaggcagcggcaaaggcggcacaggaggccaacgcagcagcaacacgcgaggcgctcacaaagatcaaggctgctgatgtagaggctgccaagccccacatagaagctgcccacgagtggtacaaaaaggcccacgcagtaggcctgcaggttgagcagcagcgcaaggcagagcaggaggcaaagcacaaggagcaggcagccaatgcagatgcagcagcagccggcagccagcaacagcagcaggagggcacaaacccgggtgagatgagcttgtcagctcatgcccaggtgctgtatggcaacatgctgtacgagtggagccaggtgctggcttcagtcggccaggagtggcggcacctgctggatgatgcagcagcacgcttcagggatgcaggctgtgcagagaaggacatccgcagcgcgctgaaaaaccacacgcaggctgaccagctggacctcggccctgacccagagccagaggctgagccagagccagcagcagagcagccagcacagcagcaaaaccagcagcacaagccagccccgccagaggcgaagggcctgccaaagctggagcgcaagccaaaggagaaggcagcacagtagaactgccgggtgctggcttgcatctccctagcacggtcaggcactgcgggcaggtgcagcgggaataggttgtagtagcattggcaacagctggctagtcggaattgctcctgctagcagggcgcacagcagcgtgtgggttggcacttgggggtggcgtgcccgtgctgggaggctgtttgttgttatgttgaatgtcaagtctttgcaggcgtgtggtgatgctttttcaggagttcacagtcggtggcacagctatgagcgtgactgctgcttgtggcccctgctgcatgcacagcgtggtggatcctgcgtccagatcagtaagtaatggcgcaggctcccagacgcatttttatgtttagatcggtatgccgtagcatctttcacgcatctgatcatgctcgagacgcttgaccgtgggtaggcagttggggcaggccatgctgctgctgcggctgctgctgctggtggctgttgacctggacaatatgacacaaagttggacgcatgcttgcactgtttaacagctataatatag

SEQ ID NO: 13162 - DNA, 2378 bp, Oryza sativa
  ref <308>: DATABASE ACCESSION NUMBER: AK110510
  ref <309>: DATABASE ENTRY DATE: 2001-12-06
aaaaccgagtttgtatactcgataaattaagcccgcgatgtactcgaagctcgcggtcgtggcggtcgtgctcatggccgtcgccggcgcgttcgccgatgacttcacgaacaactgtaacgcccagaagcgcgtctgccagaacggcggtgtgtgccacgagaacctgccggttcttggcaccgacgccggcagcgtgaacgcgtggaaagacccgttctgcatctgtcaggccccttacggcggcaacgactgttcgcgcaccattcgcgagtgtaaggacagcccctgccagaacggcggcacctgcagcccggcctcttgcactcagtcccacaactccgagcagtacgactgcttcacgtgttcatgcccgttcggttggggcggcgcgccgtcgtatcagggcggtagcaaccccagcggtgtgtgcgactggaagctggtgggcaacgactgccgcaacggcaacctctgcgccaacggcggtacgtgcacctccacttcgccgccgttgccgtacgcgtacggctaccagtgctcgtgcccgacgggctggctcggtggccagaccggtcagaccggcgtgcgcgccaatgtggcgtacaactgcacggttccggactgcaccacgtccgacggcgcgtgtcagaacggtggcacgtgcacgggcggcctgtgttcgtgtggcttcttcggcggttaccgctgtgagctgccgcgtttctgtgacgtcgcgggcgcgtgtccggacggttacacgtgctccaacaccggcccgggtacgggcacgtgtacggccccgtcgttctgctccacgcacacgtgtcagaacggcggtacgtgcaacaacaacggcggcccgggcaacggtgcgtactgctcgtgtgtggccccgaacgacggcggtctgagctgtaactcgacgctgttctgtaactcgaacccgtgtcagaacggtggcacgtgctcgaacacgatctcgtacgtcggcaaccagggcacgtgcacgtgtccgctgaacttcgccggtaagttctgtgaaaaacccgtggtcggctgtgcggcccaaaaggtgaagccgaccgattacgagcgctgcgcgccgggcgcgtcgtgtgacgtcaacgagtgggtgtccacctgctcgtgcccgagctccaccactggtggcctgatctactacgactgtggctgcaactccaccaccatctccaagtgcccgggcacgtccggcagcctgcagggcgcggcggccgatatggtgtgtcagaacggcggccaatgtgtagagtctgccgaccagacgctgtgtcagtgccgtgcgggtttctggggcgacaagtgccagaactacgacaatccgtgtctcaacagcccgtgcgagaacggtggccagtgctacatcacgtcggagacgtcgggtctgccgatggacgaccgcttctgggcgtggcgctgccgttgcaaatggcctttctatggcaaaaactgcgagaaacaggcgccggtggccactatggacggcaaagcgccggtggtgtgcggtgacgccaactcgccgtgtcagaacggtggcacgtgctttgcgcgtccgtacaacttcaatctcggcggttactttgactctgacccgtacacggacaacgacgttgaggccgagccgtgggcgtgcgaatgcccgtccgtgtctgcggtgcagttgggttggaagggcatgcagtgcgagatccccgtggagcagtgcacggcttcgacgtgtcagaacaacggcaaatgcacgaacggcgccggcaacagcggtccgaattgcgcgtgcccgtgcggttacgccggtgaccgatgtgagttcgctgcgacgaacatcgacgccaccgctgtgtcgctgttctcgaacggtggctctggcggtatcggctatcacctcgagttctgctcgcgtgagccgtgtcagaacggcggcacgtgttaccacgacaagaacggtgtcacgttcggctgtctgtgtaagtccggttgggccggcacgctctgtcagtactccgtccgctcttcggcggccggtgtcgtgccgtcgctggtggccgtggccgctgcgctggccatcgccttcgccgcgaagcactaagcgcctttggcggtgcgtcgcacaacccgcttcgtcgcgtgtggcggccctatcgccccgcgcgccgccgcggtatatccgctctttcgctcccgttgcgacagcccctattgtccgccattcctcctaacaccgcccgagcgctgctgctgtgcccttttgcgctccgctgctggtggcgctgactgctgcaatcagcgcttaagtctctgttagtttgtcgtgtcttctaatgcatcccactcttcgc

SEQ ID NO: 13163 - DNA, 2433 bp, Oryza sativa
  ref <308>: DATABASE ACCESSION NUMBER: AK110511
  ref <309>: DATABASE ENTRY DATE: 2001-12-06
atgaaaacgttgaatcgagcgtgctcaactggttcggcccggctcggcgatggcggcggcggcggcacagggcgagcggccggacctgggcagcctggtggacgagctctgcgccacgggccgcgccgccgaggcgcaccaccgcgtctccctcctcttcctctcctcctcctccgccgccgtgccgtcccgccacctcgacgggcgcgccgccgatggcctgctccgccgcctcctccgcgcccgcaagccgctgctcacgctccgcctcctccaggccgcgccgcccgccgcgctcgtcccctccctccccaactacaaccgcctcctagccctcctctgcggctcctcggccccgctcctcctcgtcctcctcgcccaccgcctcctcctccgcatgcgcgccgccccggacgcggccacctacgccgcgctcctcgacggctacgcccgcatccccgacccgcgcgccgtccggaagctgctcgacgaaatgccgcgccgcggggtggctcccagctcactcgcgcgcagttacctcgtcaaggccttgctccgcagccgcgacgtcgacggggctatggcccttgtcgacaaccatctatggtctagcatggagcgcagcaacggagaagaccaggaactgaagaatgccgcgttcgccaacctcgtgcaatgcctctgcatcgaggggttcttccacattgtcttccgaattgccgaggagatgccacagcaacggtgcggtgttgccgacgtgtttgcctactctcagatgattgactccctttgccggtctgggcagcaccatggtgcatccaggatagtgtacatcatggggaagaggggcatgtatccaagcaccgtctcctacaattgcattgttcatgggttgtgcaccagccagaagcctggggggcgcttgagggcgtaccggctagtgatggaaggcgtgcgtttcaggtatcacccaagggaggtaacatacaaggtactagttgatgagctctgcctggaggatgagctcgcaaaggccaaggatgtcatggaactgatgctgaaggttactcctgatgatgacaccaggactaggatatacaatatgtttcttgcagcactccgtgttgtggacaacccaagtgagcagcttgatgtgctagtgtccatgctgcaggaaggatgcaagcccgatgtgatcaccatgaacactgtcatccatggtttctgcaaagttggaagggcccaggaagccaggaggattgtagatgacatgctgaatgggaaattctgtgctccagacgttgtgaccttcaccaccctcatatccggatacctgggtgtaggtgagtttgcagaagccctgcatgtactgtccactctgatgcccaagcaccagtgcttgcctaatgttgtcacttacaattgtgtcctcaagggactgctcagccttgggctacttgacagagcaatggaggcccttgaggaaatgaagtccagtaacgtcattcctgactccgtgactcacacggtaatgatcaaagggttctgcgatgctggagaactagagaaggcaaagtcattttgggacaatgttatctggccatctggaatgcatgatgattatgtgtacagcgcgatcttcagaggcctctgtaaactagggaaactagaacaggcatgtgatttcttatatgaattggtggactctggggttgcacctggtgtcctgtgctacaacattctcgtcgatgctgcctgcaagcagggattgaagaagctggtttatcagttagtgaaggagatgagaaggaatggcatatcaccggatgctgttacttggaggattattgacagattgcgcctctacagcgatgaaaaacaggatggggagctccagatgtccgctactgatggggatccaagttctgcggatgacacagtagataccctcatttcaaatagagatgagaagcatacgccgtcattgccatctaaaacatccaaatttgggacggtggtgcgtgacgatagcagcaaatgtgaggaagaagaggttgactactcaccatgcgctagtgaggatccaccaaatattattgaacctgccaaagaagaagcatgtccaatgaataattcaggcgctggtaccacaatgggcaacaggggtatgactagggaagaaggccttatgaagccagataagcagcctttgaaaagagagctgctgtctagagtggccagaaaggtgtttggactgttatagaaattgctagtgatttgcttatttttcgctcgcgagattagttagcaaaacagcatcaaatgagaactgaaatgcttcatagtaatattgtattggtacttgttctgtaaattatttatgacttcttagagcaaatgtagctactgaaatatatatcagattttgctgtc

SEQ ID NO: 13164 - DNA, 3053 bp, Oryza sativa
  ref <308>: DATABASE ACCESSION NUMBER: AK110512
  ref <309>: DATABASE ENTRY DATE: 2001-12-06
attcacttcgcttttcccccgggtcccttccattcaaccccaagtcttcgctgcgcggagcgtctatctttactagtacgctgttgatcggcatttgagggttatacccttttaatatcccacccaactcggctccttgtacattctgtattcggatctcaccccacttcgccaaacccagtcgacccggatttcgaaagtaccctttagtaataatagcacgaggctgagctcaccacgccccaatatatactacatgccagagatacttcaacctgcagtgtacaaccctgcaccgcttggcactatggacgagccccggtttgtgtctccgctggaccagagacaccctcttaatgtcgctgacgacgactccaccattgccacctactacttcgcggcaacatactcaccctcatcgtcatatctccccagtgccgtgtcaccacacaacaccgacgactttcctacaccaaaagcacgtctatttgacatgacaccccgggagaatacacagttcgcccttcagccggcgccttcctctcgagccacgcagagccgagaagacagcgacttcgattcgctatacgacgtcaccgacgatgaggcagaggtaccgctacatgcctccaagtctgtcaggatagtcgcaagtcagccaaaacgacgccgcttcccatcgatcgtcattccgtcgccatcagcttggccgactattgagaagctgaagagcgcaacgtccgcagtgccaatgacaccgtcaaacttgctgacgccctcacgacgttgtctagcgatgattgattctcacaatttgcaagtgccgctacattctgcggctccgtctctggacggtagtttgacttcggaagagatggataggctgagttgtcctgcaaccccaatcatgcaaataagaccggtttcgacgtcgagcgccgactcttggggcccggtgcagctcgatctacaggccatggaaactctgcagcatcttggcaactctccctcaacagggcagtcagagcagtcagctgaccaagcctcttcgaatacggagggaccctgggagatgcaggaggtggctcgcccgtctctaggcctcgtgatccccaatgccatcttcggcaatgtctcaagtggtagcacaccaatttccgccctctctgtcccgtctccaggaggcttcttctcttcattgcagtcaacagctcgccacacctggagccttcccaagcgcgatgagtctgtccccaacacgtccaccgcggagaacttctacggcgtgccatggaaaagcaggcgcaacagctcacctccgccgctaccagcccgtcgacagagcgctctttcaggcccgacactcaatgagcttgaagatggcttgccaacagcacgaccggttgttctcagcccagttgacgagaacgtggaagtcaaggagatcaaccccagcaagacaatcttccagtacaacgagaactacaacgccgagctccagaagctttctgcagccaatctcgagatgactggccggtggctggaggagcaggtcgagcttcaagctgcacttcgggagatgaacaccatgggctcacccatcgcttcgaacgaggcgcacagccgcgacaactctgtcgacaagccggtgatcaagaagactgttacattcgcggagccacagaagtcaccagtcgaagaggagtccaagccagagccaatcatgacttatgttcaaggacttgagtatctccgtgctcgctcgcagaaaagggacacgttcatccaccgccaagctcgcgccgaggctatgcacgtacagcgccgatgcacacctcttgctcaccgcgatcagctcctgggcaagttcgagctcagtgagccggaccgcccagcgccaccgcgaccagtctcggagttcttcatgaacgacccgactgtcctgaaggagaggattgcacgcgcgcagaaggagcgacaagcactcgaccagatgctgcccgtccagtgggttctgcaagcgcagaagcagctcaacggcggcaagctcctcagcaaagcctccatccgctgcatcacacgcaccagcgctccccgcatcctcgacgtcggtggtgtcgtagctaacgactgggcctggaacgtcgcctacgactacccctacgcccaagtcaccaccgtctacacatgcggcaacaaccactccaccaacgtcgcgggcccctcgaaccacaagcacatgcccgtgcccaacatgtggaccctgccgttcccgtccggccacttcgacgtcatctcagcgcgctccctctacgagctgctcaagacatccaagccgctcggccgctcagccgacgagtacgacctgtgcctcaaggagtgccaccgctgccttaagcccggcggcgtgttcgagttcaatctgctagacgcagatatgctgcacgcggggcgcaacgcgcaggccatgggcgtggaattcggcttcaatctcaagacgcgcgggtacgatgcgcagtcgaccaagagtttcttgccgcggctcaacaaagcggggttccgcgacgtgcagcgcgcgtggatggtgctgccgatgggcaacacggcggcgaagtggaaggatgagctgaacgttggtgcgaaggcggtggaggcggagaagacgattggtgtggatggagaggtcgggtttgagaaggcgccggtgactggcactaccattgacgcggcgcagttgacgggtattgttgggagctgggcgtgggagaagtggttgttgaaattgcagatggagatgggcaaggacgaggagaagttgttggagggagcggtgcagatgctggaggagtgtgcgccgggtggggcggcgtggaggacgttgacgggtcatgcgaggaagtagattgatgagagatgagggatgatgggtggggtatatagagggttgggcaggtgtttgggtaatgggttggttggttgggggattggattgataccacttagcgacaaggctcttttgttagttaggatagggaaatcgagatgtatcaacc

SEQ ID NO: 13165 - DNA, 4062 bp, Oryza sativa
  ref <308>: DATABASE ACCESSION NUMBER: AK110513
  ref <309>: DATABASE ENTRY DATE: 2001-12-06
gttttttgcacttggcttgcggcttttctgccgttcctgctggatctcgccttcctgctgcaccaccatcatgaggcgagcaggactgaagctgcaacagtttgttggacaaagtgtagcagatccgacattagcagaacgtttactctcaaatagttttgctggaaccagcggtgcctcaaacatctcgaccacattcagccgggtgctgcacagctctggccgagtagcgatcaacggagtgcgtgcaccagctggaggacttttgtcgctgccacaggccacaagagggaccaggcagcagcggctccatgcaaggcttgcagacttctttcgccggagcctgtcagcagagtctgggccacagaaaagcttcaaaaacttcttcccaaagggatccaagccaagcaatgcagcaagcaacaccgagaacaagccacttgagggtggcagcagcggcggcagcggcaaggaggacggtggcaacaagatgcctgaacttaacatcaacgcaaatgtgatgctggccaccacattcatgggagcagtcctggtgtaccagatgctcatgaactctggccccaaagcgcaggagatctccttccaggagtttaagacgcagctgctgggtcgcgggcaggtggggcgcctggaggtggtgaacggcaacatggtgcgtgtgtacgtcagggggagccctaacggatctcctgccggcgtagcagtggctggaggggcgcccggcgctgccggcaccgctggcggcagggtgtcttcagaggagctgatctcagctggcaccagcggggaaggcgtggagcctcgccaccgctactacttcctcattggcggtgttgacagctttgagcgcaagctggatgatgctcagcgggagctgggcctggatagcaccgcatttgtgcctgtcaaatacagcagagaggtgtcgattgtcaacacgctgctggagttcctgccaacgctgctgttcttcggttgggcatactggctgatcagcaggcagatgaggaacatgccaggtggctttggaggcgcgggcggccccctcagcaggattggccgcaacaacgggtccaacaacaggggcgctggcgggttctttggcatggcgaaggccaacgtcacgtctgtggacaagaacgcaaaggacaaggtcactttcaatgatgttgctggctgcgatgaggcgaagcaggagatcatggagtttgtggacttcttgaagaaacctgagaagtacaaggagttgggcgcaaagatacccaagggtgcactgctggtgggaccaccaggcacagggaagacgctgctggccaaggcgactgctggtgaggctggtgtgcccttcctgagcatctccggctctgatttcatggagatgtttgtgggtgtgggccccgcgcgtgtgagggatctgttttcacaggcccgcagccaggcgcccagcatcatctttattgacgagattgatgccatcggacgggcgcgcggcagaggggccatggcaggcggtcatgatgagcgagagaacacgctgaaccagctgctggttgagatggacggcttcaacaccaccagtggggtggtggtgctggcaggaacgaatcgccccgacatcctggacaaggcgctgatgaggcctggcaggtttgaccgcaccatcagtgttgacactcctgacatcaagggccgtgagcagattttcagggtgcacttagccaagctgcggctggagaaggcactggagcactactcagagcgcctggctgccctcactccaggcttcagtggagctgacattgccaacgtgtgcaatgaggcggctctggtggcagcacgggccagcgacaccactgtcaacatgctgcactttgagcaggcgatcgacagagtcattggcggcttggagaagaagaacaaggtgattagcccagaggggcgccgcacagtggcgtaccatgaggccggccatgcagtggtgggttggttcctggagtatgcagagccgctgctcaaggtgtccatcgtgcctcgcggcagtgcagctctgggctttgcgcagtaccttcccaatgagtctctgctgctcaccaaggagcagctgctggaccgcgtgtgcgccgcactcggtggccgcgcagcagaggaagtcatgatcggcaagatcagcacaggcgcacagaatgacctggagaaggtcacgcagatggcctacgcccagatcagtgtgtatggcatgaacgagcgcatcggcctggtgtcgttccctccaaggcaggaggcgtttgacaagccgtacagccaacagacggcgcagatgattgaccaggaggtgcgtacattcatcgatggtgcctaccagcgcactgtggccctgctgcgagagaagaaagacctggtggatgccatggcgcaggcgctgctcaagcaggaggtgctcaacatcgatgctgtggagggcttgttagggaagcggccgttcaccagccaaacaatgcagaacatagacagatacaggcatggcaatgccggcgtgccagaggagccagcagcagacccttcaaaagctgaaagcagcgaggaaggcagcaaaagcggcagcagcagcagcggcagtggtggcgagggaggcggcagtgggggctcaggggaggagaagaagggcgtggatcggcagctcccagaggggctggcagtggctacatgaaaagggcagacggttggcttgtgcagcttgtcagtaagttctacatgcagcatagtgctgggcacttgtggactacaggctgagggcttgcaaagggctgtgagcagcagcatgtccagggctgcagtcgagtgttctgttgcttgcggactgtttgttgtgcggctgttgtatggatgaggtagatagcagcgggtggtgcaaaatgttgcacagcccatcccagcctcttgctatctactttgtcccccccccatcccgatatgccagtagttgagacggtgcaccctagagggttgtgatgcggccacgcttctggtgggcggtgtgagcagaaggtgtgtagaggcggtgtccgcacgtgttgggcttcacacagcacagcttactgtcggcttcagttgaaccgcagcttgttgctgccagcttatcaggtttttgttgccatgttgacatatttcgaggtgtcacagcacgttcgacagaggctgtggcgtgctccacgcatctcttctggacagggtcctgttagctgggtgatgctattgcacaacatctgtcgaggagtgtcagctgcagggcagcttggcagtcactgctgctgatcaacgagtggacccaacaggtattgtggttgtgaaagaattggcaggtgctgtgtcctgcatgggctagctagcagcagtcctcaactgcggtggctggcggttttcaggctgcagtgcacttggtgttgcattgggactggcaaaggggtgtgccactgttcagcaagctcctaggcagtatggagtgctgcattgtgtaccatatgtgtgcaggtgtgtgctgtactcgcttgggttttgcgtagttggcagcagtaggtgcaggaatacttgacaaagaataggcgcatcacttgttgccacattgcatgctggtggtgttgtgtgtgctttttctgcagcgtccgtggatggtggtgtcgtgaaataccccgtgacgcggctgtacggcatggtgttgctgtgccatacctgtcgtgtatggcatggtgttgtgtggtgcactgtttgtgttgtgctgtgccatacctgtcatccagcgtatagcacagagggtttaagacagctcaagtgtaccatattttgtcagtgccgacgaccatttaaagattaataaggtgtgtctgtttggccgtacacatgccatgctgatgtagggctagccttgcgcttattgccgacagtcactgcaagcaatgggttccttgcataacagctttggcaacactctggtgtgcgttggccatcatgcacagcggcgcgttcctgtaatgtatgattaccgtt

SEQ ID NO: 13166 - DNA, 3218 bp, Oryza sativa
  ref <308>: DATABASE ACCESSION NUMBER: AK110514
  ref <309>: DATABASE ENTRY DATE: 2001-12-06
gagcatcactgcactgcactgcggttgtcataagccagcagaacccccagcctcgaagcgccgcctggtgacgacaagaccgccgcccacgagctatggaaggcgcgaccgcgtcgaaggaagccgcgtcccacggagaggaaggcaccgacggccagaacaggaccgcacacacactcactgcctgctgtcgctgccgcacgcgcaagacgagatgcgaccctgggctcccccgctgcgggccctgcgagcgcacaaactcccactgcgagtactatgatcccaccaagggccgcaagatcccccgcaactacgtcgtccacctgcagcacaaggtgcgcgagctcgagaagcagctggccgaccttgaacgggacgatatagagccagatgcggaggatgtcatgcgaggcgcagcagcagtgcgcgtccaggacaccgacgagtccaaattcctagggccctcgagcggcatcacgataacgcgcctggtgatgcagctggcgaagcagtttacagagtccaagagcatatccgaaatcatcccccacgcgcgcgcaaagtcgataaagacgacattcacccaggaagacaagcgtccgacgtccaaaatctacccgctcgtcagcgatgtcgccgccgaagagctgccgaatcgcgaactcaccaatctgcttgtcgacctgttctactgcaaagtgcaccccatgtatcccatcttccacgagcccaccttctcgaaacaagtcgacgaggtgtataatggctctaccgacccttatctgaactactgcctgcgcatggtcatcgctatcagcttgcagaagatggacacgcagtatgctggtctagctgacagctattacctcgcggccctcaactactttgaagccgccatcaagcccatgaacctcaaaacgctgcagtgctttgccctggtcgcgggctattcacttcttacaccgacgagaaccgccgtctactatatcgtaggactgggcgttcgcctatgccaagccttgggcctccatgaagagaagaccatcactctggggcctggcggtcggcgggcagatcccctggaaattgatatgcggcggcggttgttctggagtctgctcacgatggactatggcttatcgcacagtcttggacgaccagcacatttcgcgactcgacgcgaacacatcgatgtcaacttcggcgaattagtcgatgatgtcttcatcacgaaagagggcatcaagcctgcgccacaagcttcactcaaaaagtggatcggcatccacttctacaagatgcgcctcctacaacttgaaattcggaagatgctatatcaacggaagaagccggagcccaaggatgaccaacacccctggttcgcagagatgcagtccaagatagaggcatggcgagacacttctcctgaggtggacggcggttccggcctgaacaaagtctggttcgtcggacgatacaacacaatggtcgtcttcatgtaccgcccatctcttcaagtcccccgtccctcactccatgccgccatccgctgttacgacgcctgccagttcaacatttacatgacccaaaagcagatcgaaaccaagaccgtcgacatgacctggatcttcgtccaagccatcttcatgtgcgtcaacacaatcctatggaccttgtcctactccgaagtacgtcgagtccacagtcgcgaagaggtcgaaggtcacatgaatgtcgccctcgagtccattaggctctgctcggaacgtttgcccggagttgcatccgccatggagctctactacaacctcattggtgcctgcatgaagatctacgacaaagacggcgacgtaccaatcgccgccggttctccatcagacaccgcatctgtcatctcgaacaacattgtggacggcatcaatcgatcccgaacgacgagccccgcgaccgcgtccactgcatcagtgagcacgccctccgataaagtttccgcgccgttcggctatttaccaaaccagaaccagcaggtcttcactttcgccaatggccagtcgaatggaacaagtccatatgctacgtcgcctagcgcgcagcacgcttcaatgcaaagctccccgcaacaacagcttcacgcttataccgacatgagccccaaaacatccatcgacgccaccatgccgatatacagctaccccccgaccacgcagttcacctctttacccaccacttttgccgagctcccgcagtggaacccaacattctccatgcctcaacacgatcctttcagtgccccgaccatgccattatcgtcgcccttttacaacgaagcatacgccgcgaaccaaggctacgaggtcgcagactacctcaatcccggatggagtcaggaagctaggggcaacggtctgaaccagcaacagcagatgcaactgatgcaggactttgagatgcacgaaacgagcaagattgaggagatgattcagcaaagcaaccagctgttccgcccaccacagctgcagaccttctgaatgacagacgcgcggtcttgatgccatcgtggacataaagaccatgattcagatcattacacattggtgggcggacatacatccggcgcgactccatcaccacgagtaatgtgtggttgaggctcgtgcgcagccgcgtggagatgcgccgagctctaccgaggattgtctgggccggccgatcccgcagatcttgaccacccaatctcaacgactcgttgcccaaagtcgaaactgccgccgaacccaaacaaggtcctcttccgcgtctacctcaccttctagacctgccaattcgccactggcgcgcatgtacttacacatacaacccggggtaacgatgcatcggcccggctattcacaccctctaggagaatttgctgatgtgtaatgtgctcgggaagattctggcacggcagctgccgcggagaagagtttttgactgtcacgaagagcagggagtggtgtggtaaggaggtatacatgacagttcgtggctgctggatacgagtcgcaagaactggcgaaggaatgagaaagttttgagagaaagatttcttcgcgataggaagggcacccgagcaatctggaattgttgggcagcgaagcgcagaagcagacaatgagccgaccagctggatctgggttagcgacatgtaggatagtgacatatagaagacgataacgtgg

SEQ ID NO: 13167 - DNA, 3586 bp, Oryza sativa
  ref <308>: DATABASE ACCESSION NUMBER: AK110515
  ref <309>: DATABASE ENTRY DATE: 2001-12-06
aacacagcaaacaccacgccgtctcgcaaccatgggcggtgaaaccaaacccgccgccacggctcccaagtcgtaccccgtccgggcccccaagcccgtgggccaatggatctctggtatctaccgcgaccgcctcaaccagtttctcagcggcggccagtatgagggccagaacctgctcgccatgatgcgcgaggccgttgccgccggcccgcatatcgagctctcggtctggtccgccccgaacctctcgcgcccgaccttcaaggaggccgtgtcgcacgagtacaagcccaccgaggtcggcgcctggttcggcccctcgtggtccacccactggttccgagtcaagctgcgcgtgccagactacatggtcaagcttgagcacctggagctgcactgggacgcaaacaacgagggcatggtctggtccagcgacgggcacccgctgcagggcctcaccggaggcggcgagcgcgtcgagtggatcctccccgactcgttccgcgacagcaagtggcacaccatctacgtcgagatggcctgcaacggcatgttcggcaacgctcccggcggagactccatccagccccccgaccccaaccgctgcttccagctcgcccgctgcgagatggtcgccatcaacacccaggcccgtgcgctccgcatcgatgcctggctcatcaacgacgccgccagggagttccccgaggagtcgtgggagcgccacaaggccctcaaggtctccaacgacatcatcgacacctttgagctcgggaacaaggactccatcatcaaatgccgcaagattgcccaggagtatatcggcactcttgttgactctcacagagtctacgaaagcgacaagactccgctggtctacggcatcggccactgccacattgattcttgctggctgtggccttgggccgagacgaagcgcaaggtcgctcgatcatggtcgaaccagtgcgacctgatggaccgctacccggagttgaactttgcttgctcgcaggcgcaacagtacaagtggctcaagcaggactacccttatgtgttcgaccgtgtcaagcagaaggtcaaggggggccgctttcatccgattggcggcagctgggttgagcacgacaccaacatgcccagcggcgagtcccttgttcgccaattcctctacggccaacgcttcttcgaaagcaactttgggcagcgttgccagacgttttggctcccggacacgttcggatactccagccagctgccccagatctgccgcctcgctggcatgacgcggttcctgacgcagaagctgagctggaacaacatcaacaagttcccccacacaaccttcaactgggtctccttggatggcagccaagtcatctgtcacatgccgccctccgaaacgtacacggccgacgctaactttggcgacgtcaagcggagcatcagccagcacaagtcgatggaccaggacgagacatcgctcctggtcttcggcaagggcgacggaggtggtggtccgacctgggagcacattgagaagctgcgtcgttgccgcggtataagcgatcaagtcggcctgctccctaggcttcacatgggcaattcagtcgacgatttcttcgacaagctccaggacaaggccgacaagttcgtcacctggtacggcgagctgtactttgagctgcacagaggaacctacacaacacaagccaacaacaagctcaacaaccgcaaggcagaagtgactctccgtgatgtagagcttctggcgaccatcgcatctctcaaggacagctcgtacaagtatcccaagaaagagatcgacgatatgtgggagggcacgttgctgtgtcagttccacgactgcctgccaggtagctctatcgagatgtgctacgacgattccgatgaactctacgccaaaatcttcaagacggcggataagctccggaaggacatttacagggttcttgggctgtctgagaccaatgccacctctgtccaggatgttgtggccctgaacacactgccctggcaccgcaaggaggttgtcgaccttggcgagaaggagtgtggcgtcgcctgcggcgctggaaacgtcctcagcgttcgggccttcaagacatcggcgactaagaaggcggtgtcggtggcagaggagtctagtggcgtgtttgttctcgagaacgagcagctccgcatcaaggtaaaggatggtgtcatcacatcgctatacgaccacaaggtcggacgagaggtgatccccgagggaggaaaggcgaaccagtttgtcatatttgacgacaagccgctgtactggcaggcctgggacgtggaggtgtaccacctagacagccgcaaggagctctcgagcggcacgacgcagatctcggaggagaaatcacaccgggtgagcgtggtgacaaagaccaagatcagcgacgagagctcggtcaagaccaccatcagcctgtcagcggcgcttgagggacagcaatcattcgtcgaggtgcacagcgaggtcgactggcacgagacgatgaagttcctcaaggttgagttccccgtcgacgtccgcaacacggaggcgtcatacgagacacagtacggcatcgtgaagcgaccgacgcactacaacaccacgtgggacatggccaaattcgaggtctgctgccacaagtttgccgacctgtcggagagcgactacggtgtctcgatcctcaacgacagcaagtacgggttcgccacggtcgggaacccgatgcggctgtcgctgctgcggtcgcccaaggcgcccgacgcgcacgcggacatggggacgcaccacatccggtgggcaattctccctcacgagggggcgctgggccataccacggtgcgcagggcgtacgagttcaacaacaggctgaaggtcatgtcgaagcctgaggaggcgatgcaatcgctgctctcacagtggccggtcaggctcacaggtagcccgtcgctggtgctcgacacggtgaagcggggggaggacgacgaagatgtcagccggggcgagctgccgacgcgcaagggccgcagcgttatcctgagagtttatgacagcctcggcggccgcagccggggaaccatcgagacgagctgggacgtcaagaaggtctacaagacgaacctgttggaggacgatctggaagaggtggcgttctctgatggcaagttcgacatcgacctgcgggcgttcgaggtggtgacgtacaggttgcagctgtaggcgacgagttggccagtgcgggctgcattgtaagctgaaaggagacagacatgtttacttgtgtaggagggagcgtgaggatgattgatgacgatcgacagctttggagaagcaacaaacggaggagagtacaatacgcatacgcattgagacgatgctgtgcctcggagagactgcatcagagggggataatcgagatgttcattcgttacactgttggattggctaggaaacatgtactatgggcatctatgcctgtttttttggaggcatggatccattggtagatcagattgagctgaattcacgttatgtggtgtctcg

SEQ ID NO: 13168 - DNA, 3765 bp, Oryza sativa
  ref <308>: DATABASE ACCESSION NUMBER: AK110516
  ref <309>: DATABASE ENTRY DATE: 2001-12-06
acagtcagtgctctgcacccttgtacatcggaggtattcgacgtcgcttgttgggtttgctccttgcatgaactcaaacaacggcgcccacaatgcagcatctaccaatataccggagcattaggactctatctctttgcatgcccttcctggcacaatatgcgggagcgagcctccttgaacggcaatcacttgcgccaccagctactctcccggatacatggtcgtaccaaggctgttacacggactccgtaggccaacgcacgctacgcggagcgacgaccggaagcgcaaccaacagtgcggcgagctgcatcgcattctgctctgcccctgcctacgccttcgccggtaccgagtacagtcaagaatgttattgcggaaatgcaattgcgagtaccggtaccaaggccacggatggctgctcaatggcatgttctggtgcgaccggcgaagcgtgcggtggtcccaaccggatctcaatctacgcgacttcgtccccgagtggcggcggattgacgcaggttgagggaacgactggaacgtggacgagtctcgggtgttactccgacgctggcggcgcgcggctccttgctaatggtgttgaacctctcggcggggtccaaaacaacagcgcgcaggcttgcattgcttcatgtgaagtgaacaagtacaaatatgcgggaactgagtattcgggggaatgttattgcggtaatacgctggacaacaaccagcaaccagttgacgatggatgtgatatggcctgcaatggaaaccagacgcagttctgtggtggtgcgaaccgtatcagtctctttggcgtgaatatcacccggtcggtgtcttcgtctgcgattgtggcatcaagcacagttctgtcttcgactcccacgcctgaggtaacgccaactccctcgccaagcgatcccgttgtggtcgtctcctcggctgcagccagctcttcggctgcaccgcagaaagtcggatggcaatacgaaggctgctatacggatggcgtcggcggcaggaccctcacagctggcacagccattggtggtggtatgacgaacgccaaatgtaaagatgcctgcagagctgctggttatgtcctcgctggtaccgagtacagtggagaatgctactgcgacaacagcctcaagggcactggtgcacccgcgcctgatggcgaagctcagtgcaatatggcttgctctggcgacgcaacggaaatctgcggtggtcccaatcgccttaccctatggaagttctataccggcaatgaacccaccggcgcggtcagtagtgctcctccaccagtcgcgtcgagcagtgctgctcctcctcaagctaccggccttcccacgggcttcgaatataagggctgctacgtcgatggcccaggattccgtatcatgaactaccaacagccggacagccagcaaatgaccattgcatcctgcgccaacgcctgtgcgaaggcaggctacaaaatcgccgccatggaatacagctatcagtgcttctgcgacaatgtgatccgcatggacggcaagccggcgacctcggacactgagtgcagcagcaattgcgctggtgacgctacccagaagtgtggtggtcccgacaggttgagcgtctactcaagccagacaacactgaaggtcatcggtgtgcccaagcccgtacagaacgtcggtgactggacatatcagggctgcatctcggacacaaacggtcttgtcttcccgtggaagtctgtcaatgcgactggcaactcgcctgaatggtgtcttggcaagtgtaaagagtacggttacatggccgccggaatggagtatggtgaagagtgctactgcggagacgtcgagggcatccaacagcaaaactcccaggtccgtcccgaatctgaatgtaacacggcttgcccaggcaaccctgaggctatctgtggtcaaggcaaccgcctgtcctggtacaagtggaccggcgatccaatctacgtctggtcatatcctaccggcccggcagccggacagtaccaactgatcggctctggtcccataatccctttgatttcccagcctggtattaacggcaaggtctctcttctcgagaagcacgggactggcactacgggaaccaccggtgctttcgaatttgatccttctgataacagctttcgcgagcagcagggcatcaagactgatattttctgcgccgcaggtctcactatgccagatcgtgctgggcgacaggtcaacatcggtggatggtcgctcgactctacgttcggtgtgcgcattcttactccggatggctcgccaggtgtcccaggaaccagtgcgtggcaagaagacgtcaatacaatcaaactccagcgcggacgctggtacccgactggtatggtaatggccaacggttccatgctcattgtgggtggtcaagatggatccaacggcgctccagtccccagcatggagatcctgcccagagtcggccccgtctacgaagcacaatatctccgcgacaccgatccctataacctgtaccccttccttgcggtcatgccttccggtggcatctttatcgaatactacaacgaggcccgcatcattgacgagaggaccctggacactgtcaagattctccccaaggttcccggatccgtcaatgatccctctggaggccgcacctacccattggaaggcacccaagtcctacttcctcaatactacccctactcggatcccctcgaagtccccatctgcggcggcgccgcgcgtgctcctcgctggggtcttgacaattgcgtctccatcgcgcccgacactggcagcgcctggaccatcgaacgcatgccctcgcgccgcgtcctctcctgcatggccaccctccccgacggcacctacctgatcctgaacggcgcgcacatcggtgaagcaggcttcggtctcgcggaagaccccaatttcaacgccgtgctctacgactcgcggaaacccaagcacaagcgcatgagcatcatggccaacacgaccattgcacgcatgtaccattctgaagccgtgctcctcgatgatggccgtgtccttgtttccggctcggacccagagggaccgccgtatccccaggagttcagatatgagtactttttgcctccgtatctgctgtcgggcaagccgaagccgaagttctccattgcgcagaaagattggatctgggaggcacagtacgctttcactctcacatcgaccagtggtggcgcaatcaaggtctcgctgctgggatccgagtcgagcacgcatggtagttcgatgggcgcgcgcatcttgttcccgcaggtgtcgtgcagcgggaacgcatgttccgttacttcgcccaagggtccctacgtcgcgcccgcgggctggtaccgcatgtttgtgcttgatggcgacatgccgtccatggctacttgggtgcgtatcggcggcgacccagggcagttgggtaactggccggcgaataatcccgtgtttgcgccgctgccgggtgtgggtccgattgcgggctcggggacgagtgcacagtcgacgggtgcgaatactggtactgttgcgaggagctttgttgggtaaggaaaagttggtgggatgggggtgtgtgattgttaatgtttgatatccagtgatatagatgatgatggggagggaggtttggggtactgatttgggttatagatggtacatgcaatacaggcaacgaatgcatattttcatgatg

SEQ ID NO: 13169 - DNA, 881 bp, Oryza sativa
  ref <308>: DATABASE ACCESSION NUMBER: AK110517
  ref <309>: DATABASE ENTRY DATE: 2001-12-06
caaaaaagaaaaaaaaggctcacctacctcgaaccctttggcgccatgcgcatcatcaacccaatccaccgatcatcgagaaggcgtcttttcctcctctatatcaaatcgagcgagaacgatagcgagagcgaggcagatggtagcaaaagcatcgcgaagaattattaagaggaaattgaagagatcgggtaatgtcgctcaccaatgctccctcgtcgatggtgtcgatcgtgacgccggtgacggacagggacagcgggcggacggtggcgggcgtgccgccggtgctcgtcggggcgtccgtctcgtcggcgccggagctgcgggggcgggcgtacctggtgcaccacgtcttctacgaggacggcagcgccagcgccgacggtggcggcgtggccccggcgtccagggcatcgatcgcggcgctgagggaggtcgaggaggaggatgacgacggcgaggaggcgtccgactgcgcgatctgcctcgacgacggggaggagtccagggagacgtgcgggagcgggaggaggaaggagatgccgtgcgggcaccggttccacggcgagtgcgtggagcggtggctggggatccacggcagctgcccgctgtgccggcacgagatgccgccggcgacggcggcggaggcggaggaggaggaggtggtggtggcgatggtgcatggggagagggtggtgatgagggggaggcgcgtggtgctgagcgtgctggtcatgggccgggcccacgatgacggcgagggcccggagcaacgcggcacggatccgattcctcctcttccgcgtgtgctcatagatgatgtggattaattaataactcctctcaaatttaagaaagggtgatctggattaactagg

SEQ ID NO: 13170 - DNA, 987 bp, Oryza sativa
  ref <308>: DATABASE ACCESSION NUMBER: AK110518
  ref <309>: DATABASE ENTRY DATE: 2001-12-06
aaaagcaaaacccacaccggccacgcgcggcacgagctctccggcggcggaggagatccacgcgtcgcgcgccctaatggcggaagaatccaggacatgatcagtgtgtgtaccgccatccaaacggattgtgtgtggttggtttagcttcagcccatattgcattgaaagaggaaggggggataactgccgttgatttcaatgttgggaagtcagaccgcagtgagatgaaagtcacaggaaaacgcaaaaggaatgcacaacatttgcaagaaaattcagcgctgtgtaaagtctgcacaagtagtaattcttttgtagtgaggtgttgtgtgaaaggatcacttttggagatcaatgatagattgatcaaacaaccagacctgcttaacacctctgctgacagagaaggatatatagcaatttttatgccaaagccagctgactggctaaaaatcaaggataaatttctttgctacgatgattacaagaacttgaggggaacatgctgacatccaaaaggaattttcgacaatgatcccacagcctaggcatgagtcgaccattccctcaggatgaaagatccttgcacgatggtccactgccatttatttacctgtttacggaatttggaaacaatccagattccagatttatccgtactggtgctaatgaagaggaagttctcgtgtgtgctatgctggacagtctgatagaagtttcatcagctacacactaatacttgacggtcctatcatatcaagtggcatatcaaatttgtgagttggaatcatgttaacctcacaatgaggagcattttgtattacaactgattgctgctcctacatgcaatgtctgatgattatcatctcattgatactaaggaaaacatgttcgattaagttctgttggaacatcccgtgtagagacgtgtaatattctgtcataactattggtttggtgaatcttcgtttaacaagcttgtcc

SEQ ID NO: 13171 - DNA, 1415 bp, Oryza sativa
  ref <308>: DATABASE ACCESSION NUMBER: AK110519
  ref <309>: DATABASE ENTRY DATE: 2001-12-06
ctcttctcttctcttctctaggcaagccggccggcagctagggaggaggccgcggggtgaggcgggagaggggctggctgcggcacggcggcggagaagctcacgctcttggcgatgccgctgccgtagaggaagtccagcggcgtcggcgtgctgtcgccgctggcgcacttgctctccggcgacttcttgacgaggatgttgtcggcgtgtcggtcgatgttgaggaggcatacgtcgaggatgccgacgcgatgcacggacgccacggagaaccgcgacgggccgagctcgctggcgtcgtactcgtgtgccgcaaagcgctggatcgaggccgtggtcgtcggtagggcggcccaaggcacacctgttcaatcggccaccgtcgccgctggggaaggagccgccgccgcaccagaagggcggccagagcaggcgaagcggcggcgtcggcagcgagcgcggtggcggagcggcggcgtcggtgggtgagcacggctgcggagaggcggcgtcagcaggcgagagcggcggcagcggcaggcgagcacggctgcggatggggagaggcgggcgccgacgactccacgccgctcggccttgtcgtcgacggctgctcctggcgcgggcagagcaaagcggggacgcggagcataggggcagggggcgcggcgggcgagcgacagccatctccgagagacgggctcttaccctgtcggccaccgaccgcgcccgccgcgccgaccctcctcccccaccgaccgctggcgcaccgccgcgtcacccggcccgcctccacctccgtgcccaccgctgcggcactattcttcgccgacgcgttcccgttcctggaggcggaggcggcggcatcgccggtgacctgcaccacggcggcgtctgcatcatgttgcgcttgcgcgtcatggagatggacaccttgtcgccgtggttcctaggctcgctgttacgcgtcgacgcgctccttcagtaaggcggcgacgtgagtggctaggacgggctggccgcggtgagcgcgaccatggtgggcgggcggcggggcaagggcgcggaggcagcggcgaggcagcggtacgaaagaagagtgagagagaggggaggggaagagagagggtgctgacatggcatcctatacgtgggtcgcacgctaaatcagctgtcacgttggataaaactggtgttaaaaccaccgaataacctagagtaaacggttttttttaaagttggggatgtcatatatctggttttgtggttggggatgattttgtagctcgattttcggtgcacattttccttttgggtagtactgaggatggggagttgtgaaacaggaatgctagctcaatttctgttctgaccacgatttttttttgactggtgtcctgaccatgatttag

SEQ ID NO: 13172 - DNA, 1038 bp, Oryza sativa
  ref <308>: DATABASE ACCESSION NUMBER: AK110520
  ref <309>: DATABASE ENTRY DATE: 2001-12-06
atcaatccatcaagccatcagttcatcacaccacacacagcagtacagcagaggagcactggtcaccggaggttgagacacctgcgtgtgcacggctagagtgtctgcgtttgcgcgatatggcttccgtgaaggccggcgtcgtgttgggcgtcgcggtggtcgcggcggccgttctcgcggctgagggccgcgctgcaaggaaggacctgggcgtcaacctcggcggtggcctcggagttggcggtggcggcggattgggcgtcggcaccggcggtggcctgggactcggctcggggattggagtgggcatcggtggtggtggtggtggtggtggtggcggcggctctggctccgggtcttactctggctcaggctccgggtcttactctggctcaggctcgggctccggttcagggtctgggtcaggttcgtggtctggctcaagctcgggttcgagctcgaggtcaggtggaggaggctcatcggccggctcgagcgctgagtcaggagccggctcgaacgcggggccaggtggtgcggggtcatacgccggctccagggctggctcgtatgctggctcgaatggtggagatggcggctccggcgcaggctcgtacgctggttccagtgcaggctcgtatgccggctccaacggcggaggcgcagggtcgtacgctggctcggaagccggctcgtacgcgggctccggtgctggcccgcatggaggctctggtgccggctccggctcgtatgcagggtccagagccggctcatacgcgggcagtggccatggcaagtaagctcgtcacgacccgcgtgaagcttaccaaagattatattgttgtgtgttcctagcttgtgtagtttgtgttctatgtgttcagatcaccttattcatgtatgcataaataagtgtgtaggtgttgatgaatgactaattaataagcgctacgcgcttgcctatcgatgtacacatttatgtggatgaataattcataatagaattttatttttatgtatagaatttgtttatgc

SEQ ID NO: 13173 - DNA, 1419 bp, Oryza sativa
  ref <308>: DATABASE ACCESSION NUMBER: AK110521
  ref <309>: DATABASE ENTRY DATE: 2001-12-06
cattcgcgcgttcactcattcacgcacgtcttggtcttgcttgctggcttgcccgctcagtcattcctttaacacccacagccttattactcgctccaccagcaccctcgacacgccgttgaacgccgttacgacctgactgctgtacaaatacccgtccgtctcttcaaaatgcgttactcttccgccctggtgttgagcaccattgtcgttggtcaggccgccgccgccaacctccacaaccgccatgccagctttcacgctcgccgccaagctgaggccaagcgcagcgctgacaaccaggtcgactggagcaaggttgcctacgacctcagcgatgtcgactgggacaaggtctttgctaagcctactcccagcgctcctgccccggccccagctaagccagaggcccaggctgctgaggttaagcaagtcgacagcgctcccaagccctccagctcatcgcctgccccccaggccccgagcaaggctcctgagccaaccccagccaaggaccctcttggcgacatcctcgacgatgttggtgacattgtcgaaaacgccctcaacggtctccagtctatgattactggtctcggtgccaagatcggaaagaaccccaagaccaacgagaacggtatctggctcggcaaggacagcaagtggagggcccagttcaccaacgacaacagccaggacgccgttctcttctgctggaggtccaacgacttcaagaacatgtgcatcaacgagatgcagcccgagatttccgtcggtctcaagtctggacagtctgtcgacatttcctttgaggagaacgcttctgctgcctgcgctcccgtctaccccggcaccaagctcgccatgttcggtggtgtcgacaacacctggtgggaggtcaccatgggcccacagggtgctttcgatgtttcccgcaacgtcaacatgaacggcagcaacatctcctccaagggctccaagtgcacatccgacatggacacctgcgtcttcaagtgcaagaacggcatgagcagctgcgagaagggcaccgactacgacctcttcaactgccaatctagcaacggtggtggcggtggctacgacccaatcatggccggtactggcggtggttgctccatgggccagaacggtgaggtcatcaaggttgtcttgtcttaagcgtagccaaaccgattctgtcgccatggctttgtgttctttgtctgcgtacttatcttcgccatattcccccttgttcattagcgcttgaatacgactctatacactccgtcttctagatatgggtgactggtcgcatactcaggcgccctttgggtactggtagcctgtctgatacgcttttccttcgaggctcctagtggtcaacgtgtatttagtaaatgtttattgttagtctgc

SEQ ID NO: 13174 - DNA, 944 bp, Oryza sativa
  ref <308>: DATABASE ACCESSION NUMBER: AK110522
  ref <309>: DATABASE ENTRY DATE: 2001-12-06
aatccacaataatcgcctcttgtcgaaccccccttcgtcactaaccacagcagcaaagatggtccgctacggagctaacgagatcgagtcgcaaaagtcggcccgcgcccgcgggtcgtacctgcgcgtctccttcaagaacacgcgcgagacggcccaggccatcaacggctggaagctgcaccgcgccgtcaagttcctcgagaacgtccaggagaagaaggaggccgtccccatgcgccgctacgccggcagcaccggccgctgcgcccagggcaagcagttcggtgtctccaaggcccgctggcccgccaagtcggctgagttcctgctcggcctcctgaagaacgccgaggccaacgccgacgccaagggcctcgacaccggcaacctcgttgtcaagcacatccaggtcaaccaggctcccaagcagcgcaggcggacgtaccgtgcccacggtcgtatcaacccctacatgtcgtcgccctgccacatcgagctcatcctgaccgaggctgaggaggccgtcgagaagtccgaggccgtcaccagcaaccagcacctcagctcgaggcagcgcggtgcccgcatccgacaggccatcactgccgcctaaggcagcagcgtctcctttttgttgacgatttttctttgatggaactgacgggcgaaagacgcggcgggcgcacgaaagacgggacggggctgggtttttggcatggttggctgggccggctggctggtagagtacggattggcctaccgccacctgggcgccgcccgccatctcactcttgcgggtgaagggaaagggaaatgcggcgtggcgcggtttgctcatgggattgcttcacctacctattcgcgtttcttttccattttaaacggtccaccggtgttgtatctgagcatggcattcgggaacaaaaaagaattttccaacc

SEQ ID NO: 13175 - DNA, 1464 bp, Oryza sativa
  ref <308>: DATABASE ACCESSION NUMBER: AK110523
  ref <309>: DATABASE ENTRY DATE: 2001-12-06
atctcatcgaatcaaacacaatagagatggaggcgaaatgtacgcgatgccgaacgactccctcgtcggcgccgccacggagtgggacaggcggcgggcgagatccaacgggtggctccgccgcgcggtctacagctccgcccgtgacctcgacgacgcgcgggccagccccatggccgcgcacgcgccgctccgcttctctgttgcgccaacggcagccgccaagcccaaggtcgtcggtacattttttaaactttcaagtttcaatgttccatagatctagaacaactacctttccttttgtaaaaaaatttttcagggattttttcgttatgtctaccgttggtgttgatatgatttttattacttggccgaggaggattcgaacatttttatccattcttcacacgaggtagaagcagatctcggtttactgctccagattcttgtgaaccaacggttaagcgagtgtaggttacagaatgagttatgtttgtaaatgcacttttttttgttcttatatatgatttagtttctttcgaccttgtcctgaaactttctgtaatgttccactctcaggaaagcttccactgaaaggagagaagttttctttgaggctatgtctgagaaagtagcagatagttcttctgagagaacgactagtcctttagaatcagacagcgacgcattttataaaaatcttgatcccctcttttctgtattacatttttgtaagctgttaagttcaaaaaaaattaagaagaagagttaaaagattaaattgaattctgcagggtaaaccagattaaaccagaagatgtggttgcccagcgaggatgaggctgctgaaatgtgctactggtggttattatgtcaaaacattagttgattatgctgtaaataacattagatgtgctactggtggatagatattaacgtttacataacattcttcttctttttgatcaaattgatagggaaaaatggtgcaaaacgacgtacagtgtgattcttcataacacatgtcagagttaaacgtgcgagtgtggtttgagtgagtactttggcattctctgatgtcatgcgataagtgttatgctacatctgggcgtgcgtactattcctcaatgccatattaatgatgcgatggaccaagaaagctcgtgactctatcccagcacaccttgggacctttccagatgatgttgggatggcccaggcaagagtattcaggcataatgttttgcaaagcactgcgaatgagatagttaggctcggtgatcaggataaccaatcttttgagattcttcttcgttatcttggggaagcaaaggaggagattgccaaagccgcttccaagatgtctggtgctgcggccagttttcatttcatttcatttcagatgttttcatttcagatgtttcagtctcttaatggaatccatgcaactgtacctttcgagct

SEQ ID NO: 13176 - DNA, 1470 bp, Oryza sativa
  ref <308>: DATABASE ACCESSION NUMBER: AK110524
  ref <309>: DATABASE ENTRY DATE: 2001-12-06
atcaacttcccacccccacatcgaggttcaagacaggacctacgatcgtcacttcaacacagtccacggccctgccaccgactacgctcccactcagattgacatctctgagcgcgagttccgtgaacgtactcgtcctatcgtcgctgagcaaggttacaccaacctcagcacccacgcatcccagtaccaaccacaacaacaacaacaaggctcccgctacgttaaggagaccgtcactgccaaggacacctacaccacccgtggccacgttgacaacgttgacagccgctacccttccgtctccaaggttcgagtagaagaaactactcgtgccactgccgacgcccccaagaagttcaagcgtgatatgggatattacgacgacgacggtcactaccactcgcttcgtcacggtatttccaaagctgcccacaaggtcgctgaacgcgtagcccaccccatccaccctcaccgccaccaacactactccaccgagcactccaagaccggcgcaaagtacgacgatcttcgcgaggagatcattgttaaggaaaagtacaccactgctgttcctgcctctgcccctgcccgccccgttcagtccggagctcctgttgaacgcgtcgtccgtgtaaacagcgcttctacctacgcccctcgtccctcaggcccagccccagcagctcccaagtccatcgctcgtccatctgccccagccaccgcagccaagatgtcttcccccaacaccatcaccatcccctgccaccacatccgcattggcgatctcctgatcctccagggccgcccttgccaggtcatccgcatcactacctcttctcagactggccagcaccgttacctcggtgttgacttgttcaccaagcagcttcatgaggagtcttccttcatctcaaaccctgctccttccgtcattgtccagaacatgcttggtcctgtcttcaagcagtaccgtgttctcgacatccgtgaggatggtcgtgtcgtcgccatgaccgagggtggtgatgtcaagcagggccttccagtccttgaccagagctccctcctctcccgtctcacagagtcgttcgacaacggccgaggcagcgtccgcatcctcgtcatcaacgatgatggtatggagatggctgtcgactacaaggtcgttcacggctccaggttgtagacgtctctcgccaatggccgcgtccaatctttcaactgtacaatgcacccatgggagtttgtttccggacggccgcttcttaaattgtgttcataacttttgcttcatcacttggctggctactctgccgtcttgcctcaggcatgggttggagttcgtcgcttgcactctctgaggcaagcgctgcttcattcatacggtagcatgtggcgctggttctctagttaagtggtgtatactcggagctacattgtggatagttaatgaattgcatctctttg

SEQ ID NO: 13177 - DNA, 1695 bp, Oryza sativa
  ref <308>: DATABASE ACCESSION NUMBER: AK110525
  ref <309>: DATABASE ENTRY DATE: 2001-12-06
aacgctaaaaaagtaacagtttctgtactttattgggaagtctttccgctccaaaaacacacagcaactccacaagccatgcgcgctgtccgccttgccctggccgcttgcctcctgttgctcgccgtcggcgtcactgccatcgactcgcaggcatctgcccgctccgtcgaggaccgctggaagaactgctcgcaaatcaaccgtggccgcctcggtgccctccacgatgcggatggctcccagatgcagttggcattcgacaagctgcgttaccccgccaacgcgaccgatgattacgtcaccatccagttctcaccctgcgtacccaagtacgactcctggacggactacatcgtcatcacctccgtctccacttggggaacaaagaatctccctggacgctccaccattgccgcgttcaaccaggtcctcgtggcgggcacgaacaccgtcgccacccccaacggagagcagcgccttgtgaccttcaccatgcccgacacctcggatgctgtgcccatgctgactgccaactaccgctccacgagcatcactggtccgaccatctccctcgctgtgacggccaagtgcgaccccagcatcaccggggctaacgtcacggtcttcaacgcgacgggcacgcagtggaccatgaccatcaacaccgtggaggcctgcgcgcgcttcccctacaccaaccaggccctccccgccggtggtgtggccgcgctcatcatctgcattgtgtgcttcctcctcgagttcgccgcgtgcttcaagtaccaccaggacaacaagaaccactcgcccctggatgaggagtccatgcgttaagtcgccaactccttttcagtgcatgctcaccgagtcgccatgtggaggaggaggaggagggggcgaaagtacgccgtcgcaatttcttcttcatcaaaaaagaaaaaatctgtctccccctttccggtgtgacctccccaacttcttcatcctttccgagatcagaaaagaaacaacaatccctcctctcactctaccgtttattaccacacacttgagggttgccgcgcgtgtcattacttttttctctctaactctctatccttggtgcagtggaagaagccttgaactcgacgactggaagagagtgcgcgaaccgcctcttcaagatccagcgcctcccagacgtcgacttcaccgctcgcaccaggccgtttaattcttcacacaaagagaccaaacgccgtgtacacacgtcacagtactgctgcgcactccccttcaggaacgcaccctcgcatcggtaaccgggccaccaacccgcgcaggcgcatcatggcatacacacatcgtcgctccccccatcgtgtgtctgtcggtgccttgtgtccaactacaaaaaaaactacccggcgggtgtgcgtgctgagcaactacggacgatctcttcagactcacgcgtgtaatccggcaataggtgcttccggtcgacccatccaacaacagcgctatttctcgcgctgtctgtgatgcgcccgttcgaggcctaaccctttgtcgcgcgtgaaacggtatcctaaccaccaaaaaatgccaaaaacaaaaaaatccaaaaccgacatttggagaggttgctgcagcgaaggatgaaggatagggggcgcatatcctactaagccgcttctacacgcaaaaacc

SEQ ID NO: 13178 - DNA, 847 bp, Oryza sativa
  ref <308>: DATABASE ACCESSION NUMBER: AK110526
  ref <309>: DATABASE ENTRY DATE: 2001-12-06
ggtgttaagaaattgttagtgaagtaattaatcaagtaattaagtctgcttaattaatcaactactacacaaagaaaaagatcgatggcgtctcccggcgttgtgtgtactactgtaacgccgacgtcgtcggccgggtcggaccaggtcgtggccggcggcggcgaggcggcgcggcggccggtggcgccggcggtgatggaggagcggaagcggaagcggaaggagtcgaacaggctgtccgcgcagcggtcgcgggcgcggaagcagcagcagctggacgagctggccgggcaggtggcggcgctgcgcgcccggaacggcgccctgggcctcgccgcgcgcgaggcggcgcgccggtgcgccgccgtgcgcgccgagaacgagctgctccgcgcgcgctccgtcgagctcgccgcgcgcctcgactccctcaccgacctggcgcagtgcctgcacgacgccgccgcggcctcctccttcgccgccgcgcccccgatgatgatggcgggcgccgccaccgccttccccaccggcgccgtcggcgccgccgccggcttcatgatgccccagctgccgccgccgctcctcgacgccaccaccatgggcatgcattgcaactactactactagtctactatagctatagctagcgtgtcaagtcttcattaagttagctctagtaagctctctctctctagtctctctacatgtgtccaaagtgtttgtgcctcttcttttgtgttgttattaggtgacctaatcaaagggcaagaaggacatttcatgtgtgtatgagactttattataaatgtgaaatggacatcaaggacaattttatgtggtt

SEQ ID NO: 13179 - DNA, 971 bp, Oryza sativa
  ref <308>: DATABASE ACCESSION NUMBER: AK110527
  ref <309>: DATABASE ENTRY DATE: 2001-12-06
acaatttgattttaataatcataaaagaaattgataaatcgggagagaaataaaatgttcaagtccataaatctcatgtttttgggtattctagcccttgtgggctcggcctactgcgccggagcgacggtcggcaccgatgacctcgaggacgcgcgtcttctcgtcgtcaagaacttcctcaacaactatttggtcgagaatcttgacatatcggttaaatataccatctacaacattggcaatagcgctgctctaagcgttaagctcgaagacaacaacttcccggcggacaagttcgaaacagtgactggcttcaacaagatgaagtgggctcgaattccgccctcatcaaacgtcactcattcattgactgtccgaccaaaagtcggcggattgttcaacgtcacgtcagctttggttagctatttgccaagtgagaagaacggtcaaactcagtatggttactcgagcgatattggcgaggtctatattcagacccaacgggactataaccgaaagttcgcttctaatttgctctactgggtgttgtttggagtcatggtttcgccatcgcttgctcttccctatttcctctggtcgcagagcaaacaaaagagaagcaagttggccgccaagagcaaatcaaagtagacgcgtttctaggattgaattttaaacattaaacgactataagatacacttgaatgatgatacaacaaaatgttttgttctctctatatatattaagttttgttttttaacttttcattcgttcattcgttatattaattcattatatatttgatttatttgtgatgacttttccgttttccattttttttcttcttctttctttgaattcgatgtttttttttctttctctcggtttttaaactctctttagaattatatatttaatttaatttaacaacaaaaataataataaaaaaaattttaataaaaaattt

SEQ ID NO: 13180 - DNA, 2712 bp, Oryza sativa
  ref <308>: DATABASE ACCESSION NUMBER: AK110528
  ref <309>: DATABASE ENTRY DATE: 2001-12-06
gtcgaacatcattggaacccgtatctaaaatggctgaagaaaacagtcaaggcatagcgggcgctcaagagccgcgtcaggaaatggaagctgcagatcccccacgtacgacggaagaaatcgtagagaagaaaccgggatgtatgagtcgctgccttggaggactctttcgacgaaagaaaaaatccaagcagggggctgaagaggcatctcccaagggaaatcctgttgcagacgagatagagggacaggatgtgccacctgctgatggcgtcgcaaatgtcggaacagatcatgtcatggaggaagaggcggtgccctgcaaaggtgcacacgctcatgatgccacttgtaatcacatggaacaggagcacaatcccgaggaggtgccagtgcttgagggtgagcagctacttcgttcaagtcaatgtggtgaggagcatcggggaagcaagatcgtcaaggttgatgacagtagtcgtcctgcaagtctatttattcaaaaggggatcatggaccgacaacagcaagccattgaggaggaagagtccactctcggcgatgattctgaagatgatgaaaagccagtagagacacctcaagatatccaaggtccacctgatgccactgcactggaccagccagcgtttcctcacgtagttgttgcggacgcagcagccgtagagcctgagcccgaattggtccatgctcacgacacggcacttgaggaaattcttggaaaagttccagctccagtagaatcacaggccttggatgtcccggagactgaagcagcacctgccaatatcgcagtggacgatgtagatccggtgatggctgaagaagtcgccatggccgaagaatcactcatcgatgctcttaacgagggtcctccagctgtcgtttcagatgctgccccggaagtggctgaagatgttgtagaaagcaacgagcaggtcgagagcttggaggacattttaagagcagggccgcctgcaggtcttccagaagaggttccaagtcttgatgagactgtcccatctaatccggcgcctgaagttcacgagggccaggaagagggtgcagcagaagccacgaccgttttgaatgatagcaatgaaagtccgatcaaagttcatcctatggaagccctagatggtcttccacaagcggaagcagccgccgagactggtgtcgtagacgacattgtggaaactcaccttgaagatccaattacagcgcctacgatgctagagcctgaaacagcagcgctcgctactgaagatgtggcagatcattcggttccggccaacgaacagggcgataatgttggcgaggtggcaacaatggtggaagatggcagtaacgttgcgagtggaagccatcattcatctggggccattcccaatgttgtcgaacacgccgacgaagcggcagtggaggaacatgtttcgcatgactttagtcccctggaggcagacaaggttgccgaacctgccattgccgacaacagctttgagacaccagtcaacgatacgattgaaatgccgcaggacacctattctgaagctttacagcagtccggtgcggccgctatactggcagcgccgcttccggatgttgaacacaatgaacacattctaagcaatatgtaccagaatcaagatgagcaacagccagtggaaacagagtttgcagcccctcgggattcgctgtctgaaacgactggggaggctcccgcaaatggtggattgttcccgcatgactttgacggggagccaatgccggaatcttcagcagataacatcgtgccacagaccgacggtgagccacttgctgcccaaacacacgacggtgcaccggtaatgcctttaggtttggaagatccagcgcaagacgttccagctgccgggctattttcacatgaatttaacactggcattgatccaacacacgacggtgcaccggtaatgcctttaggtttggaagatccagcgcaagacgttccagctgccgggctactgtcacatgaatttaacactggcattgatccaacacacgacggtgcaccggtaatgcctttaggtttggaagctccagcgcaagacggtccagctgccgggctattgtcacatgaatttaacactggcattgatccagcacatgaaattatacctgacatgccctctgagccaatgcaagaggctcccgtccttgatcatcctgtcccaccccatgtagagtcagagggaatcgaagatgttgacatggataatgttgatcaagaagatcatgacacgccagcggtagtggttgataatttgacaggtgaggcatttgtggttttcagggaagctccagccgagacaacggtaaatgatattactgccgagctaggggagatgcttgctggctccaagaatgatagtgagacggtaccaatggcagctgatatcgacacccctgtggatgcattagtgaaagattatcttgaacaccaggctgccgtgttggagaatattgaggatggcggaaaaagtccactagaacacgagatcgtgcagaaagtcactggtcccgaatcgtccacggatgcagagacatccgaacaacccatttctacgaaagagcattgaatcaaaatgtatacaatgaggaaatcatatgcaaaagaaagatagccaggtcgataaataaacattgcactcaatt

SEQ ID NO: 13181 - DNA, 1636 bp, Oryza sativa
  ref <308>: DATABASE ACCESSION NUMBER: AK110529
  ref <309>: DATABASE ENTRY DATE: 2001-12-06
tggacgagttcggacgtaacaaaagcccccaatccttgctccacgcagccatcatcgtacttgttcaaaagaagcattgcgatccattaaggcagtaaccgttctctagtgatccgatcagcagaataacaactctgttgatacagggctccgcccactagctgggggccccgacagggctgcctggcattgtgcagcagcagcagcacacagcagcaagatggctttgtcacggacaggaaagctgctgcagtacgtcaactaccgcatgcgggtaacattgacagacggcaggcagatatgtggcagatttatggcatatgatcgccacatgaacttggtgctgggagactcagaagagttcaggaaattgccgccaaagaaaggcaaatcagatgaggagcgggaggagcggcgcgtgctgggcatgctgctgttgcgtggtgacgagatcatctccctcaccatagaggggccgcccccagcagaggagacaaggccagcaaagcagcaagtggcaccagctggccctggtgtaggcagagcagcaggcaggggcctgccagtggggatccccggccaagcgcccgcgggcctggctggtcctggtcgcggtgtgggtgctcctgcccctggcatgatggccccccgcccccagatgactggcgccccagtgatgcgcccacccgctggaggaccaccagcagcaggcatgcctccacagccgggaatgaggccaccaggaggccctccccccatgggcatgcccccaatgcggccgggcatgcctccgccaggcgggccaccgatgggcatgccacccccagggatgcggccaggcatgccaccaccaggcatgcctccccctggctttgcacctcctcccgggatgcctcctccaatgggcatgatgcccccagggatgcggcctggcatgcctccccagggcatgccccttccccgcccaggcatgcctggtggcccaccgcctggagcacgcccaccagggccttgagcgcagcaagggtgctgatgcagctctgacagcagggtgcagccacttgcaaaggatgcatggcagcgggggcaatggctgcagccagacttgctgctgccgctgcagcagttggatgtgagacaaccccatttgtgtcattgtctcagcagcaggtgttacatcttgttggtgtggattgcatggtcatgctgcattccggacatcctgcagcagctgggagctgccctgcaggaggcagcagggggtgtgatttgggcattgttggggagttgatggcacacacgagctctggttgcaactggcagcggagtgtcactgacgcaggtataatagtggatagaatcacctattttgtgttttggttgagcttcagtggcaagcatcctgttgcctacgggcactgtcacagaccgcttctggtcaggggcgcccctggggccggccctgggtacagctgtttagtggcttgccttctgtgcgtgagccgcaacgcatgtctgtgctgggcgtctgggacctcagacctgcaggagcggccccatgcgcatgcggcgtgttatggtgctctggctgttacaccacacactgacacttctcgttggcaatacttaagatggg

SEQ ID NO: 13182 - DNA, 1391 bp, Oryza sativa
  ref <308>: DATABASE ACCESSION NUMBER: AK110530
  ref <309>: DATABASE ENTRY DATE: 2001-12-06
agtttcttaacgagctctcaatcttccacttccctgtcagaccaaatccatcaccatgcgatctgcagttgtcgcattcgttcttccggccaccgtgctgggtcaaagcgccttgtggggccagtgtggcggtaatggctggggtggttccaagtcgtgcgtttctggcaccacatgcacctatgtgaacgattggtattctcagtgccagcctggcaccggtggaggagacccagcacctgcaccgaccagcgcagctcccgcacctaccagcgcagctccaaccacccttaccactaccaccacagctagcggctctgcgcccactggtggtaattcagcagctggtgagctgaacgccaagttcaaggccaagggcaagctctacttcggcactgagattgaccactaccatctcagtaacagtgctttgatgactatcgccaagaacagctttggtcagatctctcctgagaacagcatgaagtgggatgccgtcgagccatcgcgtggaagcttcagctacggtaacgctgacaaggtcgtcgactgggctctgcagaacggaaagtacatgcgtggccacacccttctatggcactcccagcttccttcgtgggtcagccagatcaatgaccgcaacacattgacaactgtcattcaaaaccacatcaccaacatcgtcacccactacaagggcaagatccttcagtgggacgttgtcaacgaaatctttgccgaagacggcagcctcagagatagtgttttcagccgtgtgctcggcgaggacttcgtcggcattgccttccgcgccgctcgcgccgctgaccctaacgcgaagctctacatcaacgactacaatctcgacattgccaactacgccaaggtgaccaccggtatggttgctcacgtcaacaagtgggtcgccgcaggcatccccattgacggcattggctcgcaggcccatcttgctgctcccggtggctggaacccggcttcgggtgtgcccaacgctctcaaggctctggccgctgccaacgtcaaggaggttgccattaccgagctcgatatcgccggcgcctcggctagcgactacctcaccgtccagaacgcctgtctccaggtttccaagtgtgttggtatcaccgtctggggtgtatctgacaaggacagctggcgcgctagcgacagccctctgcttttcgataccaactacaggcccaagcaggcttacaacagtcttgtcagtgcgttgtgagtgattcctttggagaagtcagtcgttacatatgaagattgggggagcttcacaattgtacatattttgaaagaacgttgattctttctattttagcttttagacagtgactcttaaacgtacctagtcggtg

SEQ ID NO: 13183 - DNA, 1100 bp, Oryza sativa
  ref <308>: DATABASE ACCESSION NUMBER: AK110531
  ref <309>: DATABASE ENTRY DATE: 2001-12-06
aagcacttcaagaaaaagtcaatttttatagcagattagagattgggctacagctagcctaaacacatgattgtggaggatgtttcagagtcctctatgactccatgctccatgacaaatgagctataaaatagctcaattctgaagctccatatgaccccctcatggatgcagaagaatagtagaaaagtacttcaagatggagagagttcctgcagttcatctggcagtggtgctcctggccttctgctgcctcatccatgcatcatcaagtgctgaaactccactcccacctggtaatcttctcggttcctcgcctccgtatcttcttcgtggcatattgttttttcagaaattcatagtaaaacataatgagatctgaacattctgactgaatattgatgtttgagtcacaaccagccctcaaggtgatgcagcgttttgaagcaactccagtctctagcagaggagatgatcaggtgatccgggtccagctctcttttccatctcataactttgattaaatcaagttttttttttgaaaaaaaaagagagagatcagcttacactttttttagaacctatatattcagataagtaataactgttcatgttcaccatgctttcaagtagtactagtagctacttttcagaacatgttctgtttagctgcaattgcaaaactgtctgctcaatctcaaccatgatccataaggctgccgccgtcatcgccggagaaccggaggccggcgaggtcaacggcaggatggaactggagctcaccgattacccgggctccggcgccaacgatcggcactcgccatgggggcaggagaggagaaactgagcagcagcagcaaaaaatcttcagagaaaacttcatccatggtcactttcttcagagagaaaattcagactttgtacctgtaccatatcatgtatacttaattatctctactattttctacacaactgttacagtgtttctacaccctgtgtaacatgaaagagaggatttgggagttaattaacgactgataatcagtcgccggcaccataatattataacaattaattataacatttctagtaagtttttt

SEQ ID NO: 13184 - DNA, 1500 bp, Oryza sativa
  ref <308>: DATABASE ACCESSION NUMBER: AK110532
  ref <309>: DATABASE ENTRY DATE: 2001-12-06
aaacacagagcttctctcctctgttctccttctctgttccattgctagcaaaataatcaacaacaacaaccgtcaccatcgacgaccacgcctccggctccttctcccgcagcgaggccttcctcgccgtcgaggcctatctcagcgcctccccctgcgccgcccgcgcccgccgcctccgcgccgaccgcatggccctcgccgtcgacgaccacgaggaggtcgccgacgacttccgcggcgcaaccatgtggtggcgcaagtccaaggccatcccccgcgccaacgtcatcagctgggccccgcgccaggacgagcgccgcagctaccacctcaccttccaccgccgccaccgcgccctcgtcgaggccgactacttcccccacgtcctcgccgagggccgcgccgtcaccgtccgcaaccgccagcgccgcctcttcaccaacaaccccggcgccgactggtccggctacgacgacgcccgcgtctggagccacgtcaagctggagcacccctccacattcgccacgctcgccatggaccccgtccggaagcaggagatcatcgacgacctcgacatgttccgcgacggcaaggactacgcctccgtcggcaaggcatggaagcgcggctacctgctgttcgggccacccggcaccggcaagtccaccatgatcgccgccatggcaaacttcctagactacgacgtctacgacctcgagctcacggccgtcgagagcaacaccgagctacggaggctgttcatcgagaccaccggaaagtcgatcatcgtcatcgaggacattgactgctccatcgatctcaccggcaagcgcaagaagaagaaaaaggacaagaagaagaagaagatgatgccgccatcggacgacgatgacgaggagaagaaggtgacgctgtcggggctgctcaacttcatcgatgggctgtggtcggcgtgcggcggcgagcggatcatcatcttcacgaccaaccacaaggagaagctggacccggcgctgatccggcggggcaggatggacatgcacatcgagatgtcctactgctgcttcgagtcgttcaaagtgctggccaagaactacctgggcgtggagcagcacgagatgttcggcgagatacggcagcttttggaggaggcggacatgtcgccggcggacgtggcggagaacctgatgccgaggtccaagacaaaagacgtggacgcctgcctggagaggttggtgaaggcgctccacgaggccaaggagaccaaagcagcaggcggaaacgacgacgacgatgagtcttccagttccagcgacgattctgattctagttctgactctgaagaacaagacaaactagcagtagtaacaaaactagatttcagtttggcccagccaaactatatcatctgatattggacttgtttatatgtacactctatgtgttggagctgggctgtttgtcttatgtttggttgtggagaagccttagttgtgg

SEQ ID NO: 13185 - DNA, 1144 bp, Oryza sativa
  ref <308>: DATABASE ACCESSION NUMBER: AK110533
  ref <309>: DATABASE ENTRY DATE: 2001-12-06
attcgctaatacccggttatcaccgatcacattcgttctctacgacctccatcgccttcttacttaataccaaccgtattttaataccaaccccctacaatcaagatgcgctccttcgccgttgttgctggcttcgctgccgtcgccattgctgctcctcactacgaggctgctcccccagcttccagctccgctcccgtctacccggttgagacccccagctctgctccggcttacccagccagctctgccccggtctacccagccagctctgctcccgtttacgctgcctcttcggctcccgtttaccccgttgcctcttcctcggcccctgcctacaccaccaccgaggtcatctctgctaccacctacgtctgccccgaggagaccaccatcacctacggacccagcacctatgtcgttagcaagagcggcaccctgagcatccctcagtacaccgccacctacgtccactaccccgtggcttcttccgctcctcctgcgcctgccaagtccacccccgttgtccctgaggccagcgccagcgtgcccgcttacactcccccggcttactctgccgccccccctgctcctcactaccccgccaccaacggctccatgccctccgtccctgctgcccagggtaccgccactggcgccaagcccactgctaccaagcccgcctcccctgagttcactggtgctgccggcaaggccaccgttggcttcttcgccgttgccggtgccgtcgctgccttcttgtaagcagtgagctcttgagtggtttgttgaggtgtagttgcaactatgtctcatctgatctattctcgagagttgggtgtcgagtaaagaggagggagatgaaaaatatggcttcacgggttacgacttgataaactgcattcacgattcagtctcggattgagagtcgcggttgttttctggtacgagcccttgcttccttgcgcaattctgtcgcagcagcatttcgatggaaaatataatacttggtattgtaatacgcattagttggaatgcttagtcgccctatggagggagtcgtgtggtccgggtggacctacttgtcttccatagatttcttgcctatagttttttgagaggaatcgccaacgtaattgacagt

SEQ ID NO: 13186 - DNA, 1144 bp, Oryza sativa
  ref <308>: DATABASE ACCESSION NUMBER: AK110534
  ref <309>: DATABASE ENTRY DATE: 2001-12-06
gggccactggctccgtcgagatcttcttctcacgcaacaacgcactcttcgcttcctcaaagatgaaggttctccagcgcatcgcttacctcaacgttggcatctatcccttcacctccgtcttcctcatcgtctactgcttcctcccggcgctctccctcttctcggggcagttcatcgtgcagacgctcaacgtcaccttcctcacctacctgctcatcatcaccatcacgctctgcctcctggccatgctggagatcaagtggtccggcatcgcgctggaggagtggtggcggaacgagcagttctggctcatcggcggaaccagcgcccacctcgccgccgtcctgcagggccttctcaaggtcatcgccggcatcgagatctccttcaccctcacccccaagcagctcggcgacgacgtcgacgacgagttcgccgagctctacgcggtcaagtggacgtccctcatgataccgccgctcaccatcataatgatcaacctcgtcgccatcgccgtcggcttcagccgcaccatctacagcaccatcccgcagtggagcaagcttctcggtggagtcttcttcagcttctgggtcctcgcgcatctctaccccttcgccaagggcctcatgggcaggaggggaaggacacccaccatcgtctacgtctggtctggcctcgtcgccatcaccatctccttgctctggattgcaatcaagcctccttctgcacaagccaactcacagctaggaggatccttctctttcccctgatatacatatattctcattccgcacacccaatccagactacctgtctctctgctatctgcttgcttaggattcattcatatgctagctggtcgatcgagctaccgcagcctagggaacatgatcatatcacccacagtctgtttgcttcatggagcaaactgcacttcaccccagtccagatctgcttcttcacagtgagtgagatcactatttttgcttgtttgtgatttttttttctaaaattgtttagagctcattgtcatttgaatggcattcctagaaaagggagaaagaaaagacacttgacatcaacacaggtgttatacattgttactagagaatcggcaatataatgttactagagtatc

SEQ ID NO: 13187 - DNA, 1098 bp, Oryza sativa
  ref <308>: DATABASE ACCESSION NUMBER: AK110535
  ref <309>: DATABASE ENTRY DATE: 2001-12-06
agacgtcgcaagaagagtcgagagggcggaacagcaggaggcggcgcaggcgcagatggcgcgctggcgccgtgattgtttccgtgccggacggagaatagtacgatgcttgctctgttttgataggatctgtttataagtttgttacgattagtttcctttcaattagcatccgtttgttacattttgtatacctatttaaggcaattaatcttagaataaaggcaagcaagatcaaagctatctcctcatctccagcttcctctgtttctcatctctttctgtcgctgtgtccatcacgggtcgccgatcattctcccccgatccgccacaacccatttggtgagctcaagcgcctcacgcagacgagcaccgtggtggcgtaccaggagtgttttctggcacttaccagtcgcatcccagaccccctcaccgagagtcagcaagtgcaacttttcatcgccggtcttcaggatgatatcagcatcgacgttgaactgcagaagcctgatgatctccaggacgccatgagactgcctcgggcgtacgagtggaaggccaacaaacccggcgcaccgccgcggagggtgtttgctcgcgctgcggccgccatcacaccggacccaccgccagctggtggctctaccgccgcagactccattccccgacagttccgtcgactctcaccggccgagctcgctgaactgcgaaagtggtgctcccggtggggaggataagataaggatgactttgagtttggataggtacgattattgcggattgactacgtaaggttccgcctgcaaaaatcatatttttttaggtggagcacttaagagttctgcctataaaaataaaggtattttggtctgcgtggaaaaattgattttcgtagatggacaacgaaatataaaaaggcatccaaatatctctttctcattgtaatgcaccaccaatagtgagctatcttgttgcgtaaatctgtctttatgatcctcatagctgaaaagaatctttcaactgatgctgttgccactggaaggatcaatgtaaacccaatgagtcaatacactaatggaaaagtcatgttctttctgg

SEQ ID NO: 13188 - DNA, 1207 bp, Oryza sativa
  ref <308>: DATABASE ACCESSION NUMBER: AK110536
  ref <309>: DATABASE ENTRY DATE: 2001-12-06
atcccgcaaggcccgctcgaatggcgcctgctgctggcctggctgcgcgaggacggctggatcggcgccgacgacgccgaacgcgtgacgcgccgcttcggcgcggggccgtcgagcctgcacgcgctggtgcgcctgggcggtgccggcctcgcgaagaagggcagcgggcagccgctggacaccgaggcgctgaccgaatggctggccggccgggcgaagctgccgtacctgcgcatcgacccgctgcgcgccgacgtcggccgcgtcaccgacgtgatgagcgtcgcctacgccgagctgcgatgcgccttgccggtggcggtgggcggcgccgagatcacgatcgccaccttcgagcccttcgacaccgcgtgggtggccgagatcgagtcgcacacgcggcgcggcgtcaagctcgtcgtcgccaacccgctggacattcggcgctacacgaccgagttctacacgctcgcaaagtcggtgcgggcggcgcaaaagtcgggcgagacctcgccgagcgccagcttcgagcagctggtggagctgggcaaggcgaacaagcagctcgacgccaacgaccagggcgtggtgcaggtcgtcgactggctgtggcagtacgcgttcgaccagcgcgccagcgacatccacctcgagccgcggcgcgacatgggcgtgatccgcttccgcatcgacggcgtgctgcacaccgtctaccaggtgccgctgacggtgatgaacgcgatgacgtcgcgcatcaagctgctcggccgcatggacgtggtggagcgccggcgcccgctggacggccgcatcaagacgctgcgccccgacggcaccgaagtcgagatgcggctgtccacgctgcccaccgccttcggcgagaagatggtgatgcgcatcttcgaccccggcaacgcggtgaagacgctggagcagctcggcttcggcgcgcacgaggcgaagggctggaacgggctcatcgcgcggccgcacggcatcgtgctcgtcaccgggcccaccggcagcggcaagacgaccacgctctactccacgctgaaggccctggccaccgacgaggtgaacgtctgcacggtcgaggacccgatcgagatgatcgagccggcgttcaaccagacgcaggtgaacagcgccatcgacatgggcttcgccgaaggtctgcgcgcgctgatgcggcaggacccgt

SEQ ID NO: 13189 - DNA, 1110 bp, Oryza sativa
  ref <308>: DATABASE ACCESSION NUMBER: AK110537
  ref <309>: DATABASE ENTRY DATE: 2001-12-06
ggaaaaaaaaaaaaaagagagaaaaagaaaacaacagacagccaacgatgcaagggaagttattgagtttgggatttttggttctttttcttgcagtgctgattgatggatttcaaacaaaggtagacatgggagcacctgtggcagcatgggggcctggagccggcaacacacaggttttttcgaatcttttcagcgcacaagatttgcagcggtcactgctgtccgtgttgggcttggagcagggagcagccgaggactttgtgtcgccctttgccagcttggaaacggcgcctgagattgtggtgtttttcgtggagcccgagctgtcgacgcaggatctgctggtccacactggcgcgcactcggcgctggtggctgtgcaagaagcgcccttgacgcagctgcgccgcaccatcgactcgtccaactcggtgttcctgaccaacctggctctgcaatacacggagctcagcgagatcctggccacggtagccaacgcccagctggctcagcacatcacttcctcgctgctgatcgcctcagacaacagcgacgagttcgccctgtcgctgctgccccttttccccgaacgcgccacccacctggccctgggccagctggaagagcacctggctcagaacccccagctcggcaccaacggcgtcaccgatctggtgctcgtctacctggctagcaacccactgagcgacaacgagctgcccgccaagctgcgccaggacgacagcaagatcgccagcaccatcgactccgtcgtggccctcactcccgactacttggctttcttttcctctgagttcagccccgccacctacttcactggccctgaagccgagcactacgccagaatcatcgccagatccacccacaacggcaccaccacctacccctcccgattccctccctccgtcgcccaaggcctcatgactgccgctgttctccttctcattctcttcgttggcctttgctgcctctgttacactcaaacacctgatcgtttccctgaagctgtccgtgagggtcaaccaaaccctcatattttatatcccaataagcaataatcatcagctttttttccaaaaaaaaaac

SEQ ID NO: 13190 - DNA, 1289 bp, Oryza sativa
  ref <308>: DATABASE ACCESSION NUMBER: AK110538
  ref <309>: DATABASE ENTRY DATE: 2001-12-06
cacacttctgagccgggcgagggagccatgacggacagacatgtcgtgcggttcgaaccggtgggcatcgaggtcgaggtccccgaggaccagacgatcctgagggccgcctccgagcaggggatcatgctcatgcacggctgcaaggagggccagtgcgcggcatgcaagtcgttcgtcctcgagggtgaggacatcgagctcgagaagtactcgaccttcgcgctgccggactacgagaaggacgagggcttcacgctcctgtgccgggcgcacgcctacgaggacctcacgatcgagctcctcaactacgacgaggagatgatccggtccggcctgcccatcaaggaggccgtcaccgaggtcgtcgagatcgacgcggtcacccacgacctgcgccggctcgtcctgaggctcgtcgagccgacggacctcacgttcttcccgggccagtacgtcgacatcgccgtgccggggacggacgccacccgctcgttctcgatggcgaacacctccacccgggacggcgggctcctcgagttcgtcatcaaggtctacccgggcgggctcttctccgagcacctcgacaccacgctcaaggtcggcgaccggctcgacatcacgggcccgttcggcgtcttcaccctgcgcgagggccacaaggcggacctcgtgttcgtcggcggcggggcggggatggcccccatcctgtcgctcgtccgctcgatggccgagcgcggcgacgagcgcaaggcgacgttctactacggcgcccggacggcggccgacctctgcttcgaggacgagctgcgcgagatggagcgccggctgcccggcttcacgtaccggccggccctgtccgaacccgttgcggcgcagccgtgggacggcgaggtcggcatggtcaccgacatcgtcaagcgctacgaggcagacctctccggggcccacgcgtacgtctgcgggccgccgccgatggtcgaggcggcgatgacgctgctcgcggccctcggcgtggaggacaagcgcatctactacgacaagttcacgaccacaggggagaccgagtcgtcctgacgccggtcgcccgtcgacgcaccgcaccgcgacacgcacgcgaaccgatcgcacccgcgcaccgcaccgcaaccgcggagacacccgcctgacccagggatggacgatgacgaccacaccagaacgcagtgtgccgaagccggtgttcacggacgccgaggccggcgcgaaggagttcccggactccaacgcgcggcgcttcaactaaaatg

SEQ ID NO: 13191 - DNA, 2375 bp, Oryza sativa
  ref <308>: DATABASE ACCESSION NUMBER: AK110539
  ref <309>: DATABASE ENTRY DATE: 2001-12-06
gtcgtgtccatgcaaggctgagattgcttttgccttgctagaaggttgatttacgctcgccacctcagcatttgcagttcagccaggatgcttcgtttggtgctgctcgcgttgatctgttgtgctgccttagcagttgagggccagacaagcctacttggcctggcgaagagtgatcccaaggcggcatatgcaacctggctgcgccagcatggcaaggagaatgagaagaacgtgtggagtcggctccaggtgttcaagagcaatgtcgacttcatccatcaatacaatgctgagcacccaacccaccagcttgacctgaacgagtttgctgaccttacgtgggagcagttctccaagacccgcctgggcttcgaccataagcagtaccttgcaagccgccagaaccgcggccagactcccttcaggcatgccaacgccaacccaccagcagcgatcgactggagggataagggtgtggtgtctgacgtgaagaaccagggcgcatgcggctcttgctgggcgttctccgccactggtgctgttgagggcgtcaacgccatccagaccggggagctgctggtgctcagtgagcaggagctggtcgactgtgacaccatcacaggcaatgcaggctgcggtggtggcctgatggactacgcctttgactacatcaagcacaacgggggcattgacacagaggacgactggggctactacagcggctggggctttggcacctggtgtaacaagcgcaagctgcaggacaggcatgttgtgaccattgatggctacgaggatgtgcccaagaatgacgagtctgcgctcaagaaggcgatcagccagcagcctgttgccgtgggcatctgcgcaagccaggccatgcaattctacagtggtggagtgattgacacctgctgcagcgagctcaaccacggagtgcttgctgtgggctacggcaccgatgaatccaccggccatccatactacctcatcaaaaacagctggggtggcagctggggtgagaagggctacttccggctcaagtatggtgtgggcaaggagggcctctgcggcatcgccaccacggcgtcctacccggtgaaggccagccccaacccctcggtgcccctgatgtgcgacccctttggctggagcgagtggcccagcggctcctcctgcagctgcaactgggcattcttcttcaacctgttctgcatcaggcacgactgctgccccctgcgaggcggtgtgggctgtgacgacctgcagcactgctgcccacgtgacgccccaatttgcaacaccgaaaagggcacctgcagctcagaggacggccagaaagtgctggagtggacggagaagaagcctgctaattacgagctgactaattctggcagcagcggtgagggcagcggcagcgtggcagagaccgccaagttctaccggggcatccagaggatgcagcatgcagagcctgcagaaggcacagggcatccagcagcagctgcagcagcaggagcatgacagtgtgtactaaacattccttgtgcagctgaaccaatggatggactgatcggttacaaagttgctggttggttggcgcatgggtgggtgggtgtttgacactgcttctgtcacattggcgagggcaaggaaggtgtggaagccagtgcagtgtcagctggacccacatccagccttcaccccgcagttttgcccccacacttgctactgggcagtagcacgagctgccgacgctccagagagactcttgctgtaccactagctgaagccacgtgagcagttggggtgctgtgcttttgcgtccctgattgcagctgttgagtgcaggatggagtggtgagctgctgctttgcagcacccactggtgactgcaccctcactgaatgctgactatgcctgattgttcgctggccagcttttgttgctgtggcgtgtggtggcttggtcacgggcgggagttgttggccgtactatattgatttctagattgtaccatacgcatgtgcgttgtatcagcatgtactataggcatacgccatggctatggtgttgtacgggccggtcttgcacaaatgttctagcatatgccagcaggctctttacacgcgtggtgctttcattggtgaagctgccagcatgggcaagcttcagccacctcctgttcgcaggcatgtgaacaaacagatgacgcagccatgtctgggggttgggcatgagcgtatgggtgccacccgcagtgcatcatgttcataatgttgagctcttgcttatgccattctgctacacacaccgtttgcttgacaagtgggtgttgtttacggtacagcggtgtaaacagctgggacttg

SEQ ID NO: 13192 - DNA, 1006 bp, Oryza sativa
  ref <308>: DATABASE ACCESSION NUMBER: AK110540
  ref <309>: DATABASE ENTRY DATE: 2001-12-06
ctcttttttgaaaccgtggtgtggtttctgagcagttgaggcaccatgggtatcgatttgatcgctggaggccgtaacaagaagacggccaggaccgctcctaagagcgacaatgtgtacctgaagctgctggtcaagctctaccgcttcctggtgaggcgtacagacagcaacttcaaccaggttgtgctgaagaggctgttcatgtccaagacaaacaggcctcctctgtcactgtccaagcttgcccagttcatggccggcaaggaggacaagatcgctgtgctggtggccactgtgacagatgacgcccgcctgttcgaggtgcctaagctgcgtgtctgcgccctgaggttcactgagaccgcccgtgcacgcattgtcaaggctggtggtgagtgcctcacctttgaccagctggccctggagcgccccacaggcaaggactgcgtgctgctgcgcggccccaagaacaaccgcgaggccgtcaagcacttcggaccagcaccaggtgtgccccacagcagcaccaagccctatgtgcgtgcaaagggccgcaagttcgagaaggcacgtggtcgcagaaagagccgcggctacaaggcataagcagcggcaggatgggctgggggcgctgcagcagcagctgcatggcattgcgcagctggcacagtctcagcagcggcggcagcagcatgcgcagcgtggcagcagcgtgtatggctttgggcctttgtttgaagcgtgctgctgggtgtcagccttcttacaatggagcagcaggtgtgcttggatgcagcaccagagccaggcaggcgttggcggctggtgtgttgggagcagttggttatttctcagtgcagctgcattcaaacctagctgggactgcactacacttgtttggtctgcttgcagctgccggtgagcatcagcgtttgtagtggcttcaagagatgtgactgttgtccctgctgcactggggccagctgtaacttgcaccaggtcc

SEQ ID NO: 13193 - DNA, 885 bp, Oryza sativa
  ref <308>: DATABASE ACCESSION NUMBER: AK110541
  ref <309>: DATABASE ENTRY DATE: 2001-12-06
cagcgaactggagctactaccgtcaagccccatcagcagcgacagctatctcctcccgaagcgcatccgccaccccctctcccaaccgtgcaagccccacccccggcgcatccagcacccccagctccctccccaccacactcacctccggcgtcgacaccgacaccagctcctccagttcaaagagaagcaaagcctggatcgccggcgccgtcatcggcccactcgtcggcctcgcgctcatcggcgctgcggcattcttcctcatccgcaagaagaagaacaaggcccaagaccaacaattcgtccccgcaacaggcagcatgccgcccgcccccggcccagccggcgttggaggccacacagcataccaagccaaccaagctgctcaaccaccgcaatattatcccaacaacgcgccgcagatgcagcagactcaacccatgggcatgccggtcaagcaagatggatactacggcgcgccgccccagggcgctcaatcgcctgttagcccttataacggaactggtgcccagcagtggcagcagcagccgcagcagggtggacagccggtgtacaacaacgtcccaagcccatcgatgagtcctgcgccgcagcagatggcggcgcccgcgccgtatcatgcggaggcgaggccgttttcgagcgagctggagggaagtgggatgcaggggcatgggacgccggagttggtgagtgtgcagccgaagaggtaggaggagagaaggaggataagcgggaggagaggggaggggagatggagaaggttcaacatgagggggaagtgaggaggggagattcgatcgctttagtgttgtgtagtgttgataccctttgagagaagaatcagattgcattattgtg

SEQ ID NO: 13194 - DNA, 1467 bp, Oryza sativa
  ref <308>: DATABASE ACCESSION NUMBER: AK110542
  ref <309>: DATABASE ENTRY DATE: 2001-12-06
agacgaagcatgcgcgcgtgttcatcggcggcggggaccatcggtcgctgcgatcgctggcgaacaccggcgaggaggtgatcctcaccgtgcccaacgaccagctcgagcacatggccgagttcccggaggaggccgagctctgggtcgccgccaacgtcgcgcggttcctcccggcgacgaggatcacgcacgtggtggccggcgacgacgttgtggccaggtcaccggggaacgcgtacttcctcctcccggcgatggccaacctccacgccgcgctcgccgcgtcgcgcctcgacggccgcgtgaaggtgtcgagcgcggtgtccggcgccgcgctgcaggctcccccggcgtgggccgccgccgccgtggcgggcggcctcctccggttcctgaacgccaccggcgcgccgctgttcctcaagacccggccgtcggagtccacggacaccatggtcgacgcggcctacggcgcgatgcgcgcgctggggttccccgggggcgccatcccggtgatcgcggcgccggtggagacagaagaattcggcggtggcgcgacgacggtggtgtaccacagctacctgctgcaggcctccggcggcgtcggcggcggcgagaggcggtcgctggcgacgtcggcggggatgttctgcgtggcgctgcagaacgcggacgcggcggcgctgcaggcggggctgaactgggcgtgcgggcccgggcaggcggactgcgcggcgatccagcccggcggcgcgtgctacaagcagaacaacctgccggcgctggcgtcctacgcctacaacgactactaccagaagatggcgtccaccggcgccacctgctccttcaatggcaccgccaccaccaccaccgccgatcccagctcaggatcatgcgtcttcacaggaagctcgatggcaggaggctcgaacacgagcgtgccgggagccagccctccgacgacgctctccccaccggcgggcctcacgccgccggtcggcaccagcccaccgaccgacttcagcccgccggcggccggcacgacccctccggccggcggcttcaccccgccggcgggcggcttcggcaccccgccgctgggcgggttcggcacgccgccgtcggggttcggcccgccggggagcttcaacgggagcggctcgtcgttcgggcccagcagcgccttcagcccgtacggcggcgccggccaccgcgacggcggcgcctccggcgctcgcctcgccgccgctgccctcgccgtgctgctcctgtccgtcgatctcatgtgaagttcgtttctatttgtgtaaatttgggaatcatgcgttgtgatgttgctctgagaaattgctggtctctgtaggcggcggattgaaattatgcatacgaaaaattaggagtttatatatatatatgtaattatgcatgtatagtatatatacttgatcagcatggacattatct

SEQ ID NO: 13195 - DNA, 1114 bp, Oryza sativa
  ref <308>: DATABASE ACCESSION NUMBER: AK110543
  ref <309>: DATABASE ENTRY DATE: 2001-12-06
agctcagctcgatcgagtagtgctcatccatctgcagattgcatcgatcgatcgacgatggaggggaaggccgccgtcgtcgccagcgccgctctgctctccacgctaatcatcccgctcctcctcctctcgcagcaccagccgcgcgccatcgccgaccatctctccgccggcgccaccgccgcaacgctgttcgacgccttggcgcgactcctcggcctgctcagcccgaggaaccacatgatcctgctctgcaacgccatcctcctcctcgtcctcagggacgccggcctcctcgcctgccccgcaccacctgcgcctgcgcctccgcctcgccaccacgccgccgccgacgacgacgcctcaccacctgtcgccgcgagttctgctgcttcctctcgccgccggccccaacgaccgaggagcagcgccgccgtcgtcgtctggcgcccgagcaagctcgccgtggtagacgtgctgcacgttgacgacgaggacgacggcagcgatggcgataggcggcggcgacgtcgtccagcacagcgccacgagccggccatggcgacgacgatggcgccgccgccaatcgcgctaccgccggcgggggaggagaaacagagctacgacggcctcgtcgacgacgacgatcatgtttccgcgggagcgatcgtcgtggtggatgatgatgccaacaagatcagctcccctgtccccgactccgatcaccatcgctactccggcgaggacacaaacggacgagccgacgacgaagaggaagccttcgaccagtgcggcggcggcgacgacgacgacgatgtggacgacatgaacaggaggttcgaggagttcatcgccaacacaaagaggaagatgcagatggagagcctccagctacagctagtcatgatgaaggtttagaacaataaataaaaaaaactttttttcttttttccctctctttccagggagaaaaaaaaaagaattgtaggagaaactaatagtgcttgtacttgtacagtactaccggctgcatgatcactgtacaaactttttggattttgttcactgatgaaattaaaaccaaaccgcctagtttgggaatggccgaaaaaac

SEQ ID NO: 13196 - DNA, 1453 bp, Oryza sativa
  ref <308>: DATABASE ACCESSION NUMBER: AK110544
  ref <309>: DATABASE ENTRY DATE: 2001-12-06
ggatcgacagccccaagcactcactcacttccaacagtcgacatcatgaagggtcttttcaccgccgtcctggcatctgccgcctcgtgcgtgctcgccgctccctcccccgttgagcagggtcccatcactgctcgtgccgctggcgccgctgctgcagcatgtgccactcccgtcactctttctggcaaccccttcgcctcccgcaagatctatgccaacaagttctactcatctgaggtcgtctcggctgcgtctgctatgagcgaccctgctctggcttcggccgctgctaaggttgccgacatcggtaccttcttgtggatcgatacccgtgccaagatcaacgaggtcgtcgaagatggtgtcaaggatgttccttgcgaccagatcgccgctcttgtcatctacgacctgcccggccgtgattgtgctgccaaggcatccaacggagagcttcccgttggtagcttgagtacttacaagactgagtacattgaccccatcgtcgccatcttcaagaagtaccccaacgtggccattgctctggtcattgagcccgattccctccccaacctggtcaccaacgccgacctccagacttgcaaggactccgcatctggctaccgcgatggtgttgcgtacgccctcaagtcgcttaacttgcccaacattgccatgtacatcgatgctggtcacggaggctggctcggctggaacgacaacctgaagcccggtgctcaagaactcgccaaggtctacaaggccgccggctcccccaagcaagtccgcggtgtctccaccaacgtcgccggctggaactcatacgacctctccccaggagagttctccaaggccaccgacgcccagtggaacaaggcacaaaacgagaagcaattcgtcgcactcttctcgcccgagctcaagtctgctggcatgcccggccaagccatcatcgacactggccgtaacggtgtcactggtctccgccaggagtggggccactggtgcaacgtcaagggcgctggcttcggtgttcgccccactggcagcaccggcaacagccttgttgacgcctttgtgtgggtcaagccaggtggtgagtcggatggtacttctgactcgtccgcgacccgatacgacagcttctgcggtatgcctgatgcgtacaccccatcccccgaggctggacagtggaaccaggcctactttgaggaccttgtcaagaacgctaagccagctttgtaagcgacgcggagctaggcagataatgccagcttttttttggtgattgggacagtcacttgtatatagatttatgatgtggaggacgaggagagaggcaaaaagaggtggatgaagatgaggatggagatccggtattgttttcatgtacattcacctttttgataaaatgcaaaatgcaaagactctcgtttagaaaaaaaaaaag

SEQ ID NO: 13197 - DNA, 1166 bp, Oryza sativa
  ref <308>: DATABASE ACCESSION NUMBER: AK110545
  ref <309>: DATABASE ENTRY DATE: 2001-12-06
ctcactcaggtggtgcagttgctggcgttgcacacgactacgtaatacgtaggcgagatttctgcagcgacgatggagctgaaatccgccgtgctcgccgtcgcggcgctgtgcctcgcgctcgcgctcctgctcccgcgcgtcgcgctgtcacagaggctagctacagcggacgcccccgcgccggcgccggcgccgcgccacgtcgacctcgccgagctgctctccctcgccgggccgtacggcacgttcctgggctacctcaccaagacgggcgtgatcacgacgttccagagccaggccaacgacaccgccgccggcgcccccggcgtcaccgtgttcgcccccgaggactcggcgttcgcggccgtcggcggcggcgccgcgctgtccaacctcaccgccgaccagctccgcacgctcatgctgtgccacggggtgccccggtaccacccgctctcgtcgttctcggcgctggccgcgtcgggcccggcgcccacgttcgccggcgggcagcagtacgccgtgaacgtcactgacgccgccgggacggtccgcatccagtccggctgggccaccgcgaagctcgtcagcagcgtgtactcgacgtcgcccgtggcggtgtacgcgctgaacagggtgctgctgccggagcagatcttcccgaccgcccctaaggtcgcacccgtgccggccccggccccggcgccggtgcacggggacaaggcgaacgacggcgcaccgggcgcaggcgagcttggcgcctcggacgttaagagttcgtcgtgccgggttggcgccgggcgccttctcgccatcttggctgtaatggtatccagtttttctgatgatatagtggtgtgatttttttttttttggcgtgggtacatatatacagtacttccctcgtttcataatgtaatactttctaccattaaccacattcatttagatgttaatgaatctagacatatgcatgtatttagattcattaacatttatatgtatgtgggcaatggtaaaaagtcttacattgtgaaacggagggagtaatgtttatgttttttgtcaattcgtttgtcgcatctctgtatgtaaacattcattttgcatgaacatatctgcaaataacattttctggcagtttaaacgaaataagattctac

SEQ ID NO: 13198 - DNA, 1197 bp, Oryza sativa
  ref <308>: DATABASE ACCESSION NUMBER: AK110546
  ref <309>: DATABASE ENTRY DATE: 2001-12-06
ctcctcgcgctccacgcgcgcccgcgctcgccgccagcgcgcgctgccccggagcgcgacgacagctgtgtggggggcagcgacagcgccactggcgtcagcaccagtaaccgaagccgcgctcgctggctacaaaacacgcgccccctcctcccctcaccgcggctgcgcacgcattccccattccccattcccctatctctcgaaccctagcccctagtcccctcccgaaccctagcccccaccgcgccgccgccgccgccctcccgatcgcgatggccgccgagagctactggcagtaccagtacgccgccgtcgacccgcgccagcaggcgccggcgccggtgcctgtgcccacgcccgcgctcatgtggcagcagcagcagcagcaggcggggtatcagcccgccgtggcgccggtcgcgcccccgatggctgctccgccactgcccgccggccccccgccgtcgttcaagcgccagcgcccggagtacttcgacatgccttctggacagggaaacagcctcttccacgaagcaatgaacccccattatgtccatcgcttgaacaatcagatgtcctatgctgctggtgctaaccaaagtgctattccacttggtgggatggccacatattcagcaggcatggacagtggaaaccatggcgctacaataactgaatcaagaactctctatgtggaaggactaccttcgaactgcacaaagagagaggttgcacatatctttcgccccttttctggtttccgtgaggtgagattggtcaacaaggagattaggcatgctggaagctgtaacctcttgtgttttgttgatttttcatctcctcctgaagctcgtgctgctctggagactctgcaaggctataagtttgatgaacatgaccatgagtcttccaacctgcgcatacaattctctctcactcctcgcaggaggccaattggtgggcctcgtgttagaaactaagtttcttgggtggagttgaattaataatgcagagcaaaatttgtggagaatctctagggagacttgtatacaatgctagaccaaacttgactctgatgcaccgttagtgttgtatgttgttgctttgcaaagattctgccgtgtaggttggtatggatgtgttgataactattggttggatggaaacaaagtagatggggctgaaaaattgttt

SEQ ID NO: 13199 - DNA, 2403 bp, Oryza sativa
  ref <308>: DATABASE ACCESSION NUMBER: AK110547
  ref <309>: DATABASE ENTRY DATE: 2001-12-06
acacacttgttttcacctaaaccagtcggcccaacgtttacacgttatggatccgtcagacgcacgcagggaactttctgaggatgagcccgaggcattcattggagaaggaggtgtagatggctttgagggggaagtcttagacgatcttgatggcgaaggaatgcaaggtgacgatgccgaaagcagcggagaagcagaaggaggcgatgtaggcccgccaggggatcaacccatggaagacgattccctgcaggcgtttgaggggcaccaagatgctgtgctggcggttgcatggagccctacacagcctgacttggtggcaacagggggccaggatgacaaggcattcatatggcgggttggccaggaggcggccgaggcgacaggtggctccatggccaccactgagctggctggacacaccgacacagtcgtggcagcggccttcaacaccacaggctccctgctggctactgccagcctggacagcagtgtcagggtgtggcgcgtggcagatggcagctgtgtgcaggcgcctgagggccccggtgatggtgttgactggctggcgtggcaccccaagggagacatcctgctggcaggcagtgaagacttcaccatgtggatgtggctggcacaaacaggcaactgcatgcaggtgttctcaggtcacagcgggccggtgactgctggcgcttttacaccagacggcaagctggtggtgtctgtaggtggagagaacgactgcagcttacgcgtgtggaaccccaagacaggagaatgcacggtgcagttgcagggccggcctttccatgaagacagcatcacatgcttgggggtgcatccagatggcagtgtggtcatcacaggggcacaggacggcagcgtacgagtgtcaaacatacacaacagcaggatcgttgcatcactgcaagggcatgaggactctgtggaggctgctggcttcagcaggcacctgccactggcagccacagcaggcatagatggcaagctaatcatctgggactgcggcaacttcactgaacgaggcgtgtgccagcatgagcagccaatcacccgcatggcttgggccagccagcagccgctggttgccactggctgcctggatggtgtggtacggctgtgggacctaagaacgtcagcctgtgtgaagcagatgcacggccacagcagcgccgttcaggatttgaccttcagccctgacggcagcatggtactaacaggctcagacgatgctacagcacgtgtgttcgcgtgttagcctagctgaccagttttgagcagcaagagcgtttagtttgatgtgtaccacacaccccttcattcaaggttgccaggatgcatgtagctctgccaggagtgtgcataccattcaaacgggttggtgcactggctggaagccagcgacactgcgggctgctcgcttacgggtgcagccagaaagccaggctgggttcaggccacggcacgttgctgctggtatggcatgctggctgtggatgtttgcccaggaactatgcagagtgggtgcatgaaaccacggctccagcagtgactgttttaagcatgcaccattggctggcaggggccttcttgactccggcagtaggaggcacattttatgcaactgcagtgcatggcctgttatgagctgttgatgcatgttggcacagccgagtgtgatgcttattgatctgatgtgcagcaacagttgtgtgtggcacctgcgtcacctgtggcacagcagctctgtcagctatttcccttgtgcatgcagctggccagctacccttgtgcacgcagctggcatgagggcatcaaggattatcaaaatccatatcgagttgatcatccttgatgccctcatgcaaaaaaagtacacagggtggcaccagttgctgctgaaagccaatagttgtgtattcatgcatgtgcaagcagttcatttgtcattgccttgaggatctcttcacatccctgattttgggtctgggcctggcccagttagggctttgatggcggcgtgcattgccaagatttgtgatggacgtccctcagacgcacttatgttgaaaacacaaagggaaaatgcaacataagatgcaattatgtgtcgtgtgcttacagtagcccgcacttgcaagtcaattgaggcatgcatgcctctgcatatgcagagcagcagcctccttattcaagattacattgtgcaggcgcagtgttctaccccgagtcttatggtaagaggagtcttcctttatgtgcacagtgtgctacggacgtttgtgcgagcagccctcagacttgtgtaatcaaacctgttgttttgcttggaatgggtagttgctgttgatggcgccacttgtaaagcaacaagag

SEQ ID NO: 13200 - DNA, 1741 bp, Oryza sativa
  ref <308>: DATABASE ACCESSION NUMBER: AK110548
  ref <309>: DATABASE ENTRY DATE: 2001-12-06
catcatcatcatcatcgtcgtcgtcgtcttcctcctcctcctcttcctcttcctcttcctcttcctcctcctcctcaggatcaccacatcttattgttgaaacagatggagaagtagtcagcgcatcagaactataccaagtggcagagcccaagccagtggaaacgccactcaacgagatcaagccagcatttctggcgcagaaagccaagttcagcacaggagccacgcggagctacgagtggagaatccaacagctggggctgctgcgcaacctggtggcgcaaaaccgcgtggccatttcaggggccctcttttccgatctgcggcgcgaccatttcgccagcgacatgtacgaaatcgaccccatcttggcggagctggacgagaccatcggcaagctgaaaggctggatggcagagacgccagtgaaggcgccgctgatggccgggctgcgcagccaagcctccattcgccacgaagcccggggagtggtgctcatcatttctcccttcaacttccccttccgtctgatgttcatcccgctgattggcgcgctggctgcgggtaactgtgcagtgctcaagcccgccgaaacggcccccatatccgccctgctcatccgcaacctcatcaacctctactttcagcctgaggatgtcaccgtcgtttgtggcgccgtgccccaggccgtcaaactgttgaaacaaccgtttgatttcgtgtttttcactggctctcccgccgtcggcaagatcgtcatggcggctgctgccaagaatctgacccctgtgtgcttggaactgggtggtaagagtcctgtctatgtgggtgcttccgccgatatcgctgctgctgctcgccgtttggtgtcgggcaagtttatgaactctggtcaggtttgtgttgctcctgattatattcttgttcatcattctcgcttttctgagtttcttcagcaagtatcaacgactcttcttcatttctttggtcagaatcctcacaaaagcgctgatttttcacggattatttcccgagcacattttgatcgattgatgaaactgttgggggaagtggtgagcacagcagtggtgggaggagaaacagacggctccgatctgtacatttcaccgacagtgttagaaaatccgccactggactcgcaactgatgcaagaagagatcttcgggccactgctgcccgttttctcagtggaaggggtggaagcagcagtggacatcatgaaaagataccccaacccactggcgctgtacatcttttccgaagacgaacgggaaatcgagagcattttagccgcggtaccgagcggaggagtgtgcatcaacgatgtggcgatgcatttggccgttcccgagctgcctttcggcggtattcgctcttcgggcatcggtgcttaccacggacaccacactttcaagctgttttcccacgaccgtagcgtgctgcgttgcgtcacttggcccgatcctgctttccgctaccctccttacaccgaggccaagaagaaacaattgcgccgtgtcatgcaggctccttctctttccaatgttttgcctcctctgctgattggtgctgctctcattgctacgacggtctttcttgctttcaagaaacctgccctcccttcttccttttcttcccccgactttctttcttctcgtcaaattgaacgtcttggttaatacgatggcttttcaccttccccctttcccccctcatc

SEQ ID NO: 13201 - DNA, 1070 bp, Oryza sativa
  ref <308>: DATABASE ACCESSION NUMBER: AK110549
  ref <309>: DATABASE ENTRY DATE: 2001-12-06
ctgattcattcccgggaggaccccatggccatcatccagaccttgctgcactacggtagctatctcgccgcgttctacgccgtctatctgctggcgggcagcctggcgttcgggctggtgctctggcagaaggtctacggcaaggcgcagcgccagccggtgccggtgcgcgtgcgtgtgcattccgagcggatggacggacgcgagcgcgattcgtattaccgctgaagcgtgaatacagtgatgcgtcgaacgtagacaatcgctgttcgcctgcaggtcagccaagggctggattcgtggaatccggccctttgtctttgagggcatcagtacaagttggaggacagcgcaagcagcataaaacaacctagttggtgtaatacacgtactaggttatactccgccgatggaaaagaattcgcctcactgcccgctttcgacagtccgtgacttgatcagacagcagcgcgtcgctgctacccatacggcgaaagctggcgcggcggctgtcgggctgagctttctcgacatgcttgatgtggtgatggcgctgaccgatggcgatttccacaaagccatgaccacccatgcggatgacaacgtttggcaggacgtcaacaagccactgacccacgtaggccagctttacgtgaagctgaccgtggtgaattccctgctgattgtttccttcaaggagaaatgagatgaaatgccccacctgcggtgccgctgaaatggtgcatgacacccgcgacctgccttatacctacaagggcgagagcacgaccatcgcggcagtgaccgctgatttctgcccggcctgtggcgagtccatcaccgacttcgccgagtcatcccgtgtctctgccgaaatgctggccttcaaccgggaggtgaacgccacccgcatcgaaccggcggagatcgcggagacccgtgcggcgctgaagcttggccagcgcgatgccagcgttctgttcggcgggggcatcaacgcgttcaaccgctatgaggcgggttccaccagaccgcccctgtcgctggtgcagctcttgcgcctgttgcgc

SEQ ID NO: 13202 - DNA, 1202 bp, Oryza sativa
  ref <308>: DATABASE ACCESSION NUMBER: AK110550
  ref <309>: DATABASE ENTRY DATE: 2001-12-06
aagctaatcagctaattaacccgatcacatctagctagctaactaagagtaattaggggctaattagtttcaaagtgaagtgaggcgatatggagggagagaagaagagcgtggtgctgatcaactgcgcggtgagcatgtacggcaaccgcgtccgcatcgcgctggcgaggaagggcgtggcgtacgaggagaagccggagaacctcgccgccaagagcgccctgctcctctcctccaaccccgtccacggccaggtccccgtcctcctcgtcggcggcaagccggtgtgcgagtccctcgtcatcctcgagttcatcgacgaggagttcgccggcgtcggcgagccgctgctgcccgcggggccctacgagcgcgcccaggccaggttctgggcgtcctacatcgacgccaagctggcgccgtgcgccgggagggtgtggcggtcgccggcgggcgccgcgggcgcggcggcggtggaggcggcgaggggcgagctggtggcggcgatgcggacgctggaggcggagctcggcgggaggaggtacttcggcggcggcggcgaggcgctgggctacgtggacgtggcgctggcgccgttcacggcgtggttcgcgacgtacgagcggttcggcgggttcagcgtggcggcggagtgcccggagctggcggcgtgggcggcgcggtgcgtccgggagaacgcgtgcgtggcggcgtcgctgccggatcccgagttcgtgtaccagttcgcatgcggcatgaggaagcacttcggcctcgacggctgagatcaaaatgagctcgccggcgccgcgattggccggccggtgcaaataagcgaaaccatcgcgcgtgcatgcatgcctgcatgggaaactatcatttccccgttttcgcggcaaggtctttggctatttttgtgtgcttcgcttgcgtgtgtactccctccgtctcaaaaactaataaatgaatcgaatatcacatagtataacgaatctgactatagatttgttatacatgttctagttaatcttagattggttttgtgggacggagagtacatgcgtgtgttttttttcgcaatagctttttatgtgccttttaatttgcttggcgattcgacattgacatatcgatgtgtgtgtttcttttgtggtggtgtgtgggcgtggcgatcgactgcaattcctgagttttgtcct

SEQ ID NO: 13203 - DNA, 993 bp, Oryza sativa
  ref <308>: DATABASE ACCESSION NUMBER: AK110551
  ref <309>: DATABASE ENTRY DATE: 2001-12-06
gctcatgtcggaggcgatgttccggttcatgtccaagaacgccgccgtcgtattattcgctgatcccgaggcggctgcggccgtacgtgacggtgtcgtcggcggcgtcggcgtgcagcacggacgtggcggcggcggcgagcggcgagcactcgtggaacgacacgctcgtcgtccccgtgggcgcggagttcctcgagagccgcggcggcggcggcgtgcacgtggcggtgtactcggagccggcgtgccggctcgtcggcggcgccacgccgctggggtggtgcaggatccccgccgccgacgtgctcgacggcctccgcccgccgcgcgcgctccgccggctcagctactccctccgctgcccgcgcaccggcggccccgcccgcggcgtcgtgcacctcgccgtccgcgtcctcggcgacctcgtcccgccgcctccgccgcagcatgccccgtcgacgccgccggcgcagccagggtggtgccgcgtggcgatgggcatcccggtgtcggggacatccgccgccgtggtggggatgccggcgtgggcggcgtggggcggcgaggcggcggcgtcgcggtgatcgatcgcgacgcggcgaggcaacgagagagactacccgtggaaaaacggtggaaaaattcatcgccgggtcggacttatttttatttattttttgttctgatcgagacgttgactaacccggtaatgggttggtcaaacgtctcgtcggctcgtcgcgttgttctgcgtgtgtacgtatatacgtacgtacatgcccggaagcttcctctcgcagctatacgtatgtacatacaacccacgtacgtatagtatcaatcataagtggctgtactcggattggtggtgtatatgtgactgaactgtgggaccagggggttgcaggggttttgtaattgtaactgtataaatgattgctaccacttgattgtgagatgaattgataagagaaaccctaagtcgaaaag

SEQ ID NO: 13204 - DNA, 961 bp, Oryza sativa
  ref <308>: DATABASE ACCESSION NUMBER: AK110552
  ref <309>: DATABASE ENTRY DATE: 2001-12-06
aagcgaaaaaccgagtttgtatactcgataaattaaggtgttcggcagcgcaggcgctctgcggatcccactcatccgcaccgccgcgcgtcatacgttcaggtctgttgcacgcgcaaacatagtgagagcgatggccgcagccgccgaagcgacgtccaaagccgcggccgccggtggtggtgccgcaacaggcggtggtgtgatgggcgccgccgcagcgtcgagcgttgcgctgacggcggaggccgcagcggcagcgcagaagaaagcggccaaagagcaggtggaagtggtggacgacgcgaaccgcaccgtccgcgtggcgtcgcgcgccgaagtgcgcggccaaaacctgacgcaccgttcgacgtatgtgtatgtgatgacgcgcgacaccgagcagtacctggtgcagcgccgtaccgccatcaaagactactgcccgtcatatctggaggtgtgtgcgggcggtgtcatgacgcccggcgagacgtatgcgctgaacgtcgagcgcgaagtgcacgaggagttgggcattccgaaggcggcgctgacgctcatagaccacggcgtgttccgctatcgcgacgccaaaatcgacaccttcggtgggctgtggaccgcgctgtgggccggcaaactctcggacctgaagctgcagcccgaagaggtcgccgccattcacctgcagacgtacgcgcaggtgcacgccgcggtcaaagcgggtgagaagtacactcccgactcactgcacgcgctggagctgcagcgcaaagcgttcgccgaatggaaggccaaacagcccgctgccgctgcggttgccgttgccgctgcggcaaccacagctctcgataagtgacatccgcatccttcgcgcagcgctcattcggcctaacttgtccgccgctgcagtccgctttggttttttcgtgttttttcgccgttcagttagtcttcg

SEQ ID NO: 13205 - DNA, 1770 bp, Oryza sativa
  ref <308>: DATABASE ACCESSION NUMBER: AK110553
  ref <309>: DATABASE ENTRY DATE: 2001-12-06
agcaagtgtgtcaagttcagagttgttgtgttcgtttttttgtctattcttttttatccctcccccctttctcatctcttactctctccacaggcctggtgccatctaatcactacactaccgacgaccttttcccccaagcccccatttttttttttagcaattattcaattctttgtggccggtccactccaacgtaatacgcagctctacttgctcgaaacgaacgaccaaaatcataccgacaacgtaacctcgcacccctcagcgagactctcgacatacacacactcaacctcctcagcaatcttgacgtctatccattagtttggtactggacgaattgaaagaaacgaaaaatatcataatacaagtctttttacacagaaagaaagagatagaatcacaatggccgctatccagctcaactttactctccgcacttcctccaactgcaagacagtccaccttctcggttcctgggatggctatcaaggtcagctcccgctttccaaggatcccaagaagtcaggtggctgggtcggatgcttcaagttccaaggacagactttgaagcaaggtcagcgatactggtactactacatcatcgacggctaccatgtctcgcacgaccccgccaaggaccacacgactgaacccaccactggtcgcaagctcaacatcatcgacatccccgctgccaagtcaagctcaaagtcatcctcatccagtgccgaccgcaagacccgccgtgtctcaactgcttccatcccaaagggtcgcggcctcagtccagagcgcatcgttgcccctaagccccaacggcccaacgagacgcgccaagtcatcaacacccagtacgacaagaccaccttggaagaactcaatcgccgcttcgccactcaaaagattgaagagtcatcagacgactccgaatacagctccgatgaggactcagacgtcccatcgctcaccagccgctcgacaaacagctctagtccgtccagtatcagctctggcagctcatgctgcacgtgcgaacgctacggcatcacccgcactggtgaccgcgtcaaacttgactgcggtggtgcacgctgtggatactctgatgattcttccgaatgctcatccgaggacgagtacgtgtacgaggagaagaccacccgccgccaaggtgttgtcatacgcgcttaagaacgccttctcttcctaccgcttcaccctctggacagccatttgtgccgtgtctttttttttctgttcgcctaccctcgtgcgacagaccgaagacgaccacctacctttcttccttctttcatgtgcatattatgataacgacactttttttttctctttcttttacttcttcttataccacagccgtcgctagcctcgcacctttgagagactccggctttccactcacttattctaattggatctgcttttttaataacgacgacatgcgacatgctttgttttctgttgctgctggaattttcccccaactcgagagttgggagggggcggatgggaaggaaaacatggaacaagcgaacacgccctcctcctatcttaccctctctccctctctttccctcactcttgcacgcttacgaactcttaaacaccgggcggaaaagcttgtcttgttccgcgtcgggaaagcaaagaaaaaaacattctagatatgtttttgctaaatgtgccaatctgcacgcctcatgtaggttttatactctgctcgaataccaatgaatcgagatc

SEQ ID NO: 13206 - DNA, 1033 bp, Oryza sativa
  ref <308>: DATABASE ACCESSION NUMBER: AK110554
  ref <309>: DATABASE ENTRY DATE: 2001-12-06
agcagcttcaagtaacaaaagaaaaaaagctcatcacctcatttgctcagttcatggcaggtcctccttcatgccgcggacgaactcctccgagtgttccttggtgacgcagctggcgagcatccgcgtgccgtcgagcggcagcggcgccttgaggatgacgacggaggcgatgaagtcgttgttgacgagcgggccggcgaacttgggcgggccgaagccgtagtccacctcggcgaacccgagcttgctccagtcggagacgtagatggactcgtagttgaacgtcatctggaacgggtcctgctccgtctcctccttggcgaactggaagaactccaccgccatcctctccttcgcctgccggatcatgtccaccacctccatcaccgacgacgacagcaccgtctcgctcggcgctgacatcttcaccgggaagatggagttgccgtagtaccccctgtccagcttcagcaggtggcgcacgctggcgaagaagcagagcttcacggtggcgccgggctcgaggttgagtgccctggtgcggcattgccacagcttcgccgtcagcacgtcgaagccggagcagaacttgccgctgtgcgccttgtactgcgccttcaggccgtcgatgtagccggtggggaagtcgaggacgatgtagtcgagcgccagcaccggcagccccggcagggggccgggcttgatgctcgggttcgggaacttctccctgtcccacaccggcttcaccctcggctccgggagcccccgcgccatgtcgcccaccgcgttgatgaactgagccgcgcccatgccgtccgccgacgcgtggttgaaccggagccccatcacgaacccgccgcaggtgaatttggtgatctgaagtcatatgcaacttgaggttagctcagctctgaagaattcgatcagtatgatacattggcatgcatgttctgagaaaaattggcatgcatgttctgagaaaattttgtgtatgtaaccagaaacaatttggcatgataatcaaggatcc

SEQ ID NO: 13207 - DNA, 1304 bp, Oryza sativa
  ref <308>: DATABASE ACCESSION NUMBER: AK110555
  ref <309>: DATABASE ENTRY DATE: 2001-12-06
aaaaaaagcacacacaacttcagttcagtactcgtagctgcttctgcatttttgctcgagcgattcatcagccatggcgactaagctgcttgctgctgtgatcactgtgctagctttgctgggccatgtcatgggccaaggagggtacggcccaagcccaagcccaagcccgagcccgagttcgagcggcggcgggctcgccgtcggctactacgacagcgtctgccccaacgccgaggagatcgtgaggggcgtcgtcaagaacgcggtggcgcaggacgccggcgtcggagcggggctcatccgcttgctcttccacgactgcttcgtccaggggtgtgatggctccgtcctcctcgacgcgacggcggcgaacacgcagcccgagaagctggcgccgccgaacctgacgctgcggggattcgaggtgatcgacgaggccaaggcggcgctggaggcggcgtgcccgggcgacgtctcctgcgccgacgtcgtcgccttcgccgcgcgcgacgccaccgtgctcctcagcggcagcggggtcgacttcgccatgcccgcggggcggctcgacgggcgcgtgtcgctcgccagcgaggcgctcggcatcctcccgccgccgacctccaacctcagcgccctcaccgccagcttcgccgccaaggggctcggcgtcggcgacctcgtcgtgctctccggcgcgcactccgtcggcaggtcacactgctcctccttctccgaccgcctcaactcgtcgtcgtcgtcgggctccgacatcaacccggccctcgccgcctccctgacgcagcagtgcagcgcgaacgcgagcagcggcggcggcggcgaccccacggtgatgcaggacgccgtgacgcccgacgtgctcgacaggcagtactacaccaacgtgctcaacggcagcgcgctgttcacgtcggacgcggcgctgctgacgtcgctggagacgaaggtggcggtgctggcgaacgcgatcatcccggggctgtgggaggggaagttcagggcggcgatggtgaggatggccgccgtcgaggtcaagtccggcgccggcggcgagatcaggaagaactgcagggtcgtcagctaattaatacaattgcatatatcaagccatatgtttaatacatgactgaaaaaaaaaccattcaattacgaacttaaattgagctgaatttatacattggtacatggtttaatttattgatttataccagaagactgtattgttactcatatttgttgttactgctaaaatgttacagtaatccgacatattgtagtat

SEQ ID NO: 13208 - DNA, 1109 bp, Oryza sativa
  ref <308>: DATABASE ACCESSION NUMBER: AK110556
  ref <309>: DATABASE ENTRY DATE: 2001-12-06
accaccacgaacaaaactccgaagccttattagaggtgcgattctaccaggaaaaacatgaaggctttcaccaccgcaaccgccctgctggcgtccgctagctcggcctttggagccctcacgcaagtgacaggcttcggatccaacccgaccaacgttcagatgttcatctctgtcccagccaagcttgcaacgaaccctgccatcatcgtcgctcttcacccatgcggcggcagcgctcagggctggtacagtggcactaggctcccagcatcttccgagagtcttggcttcatcctgatctacccccagaccaccagattcagcaactgctgggacgtcaacgcccccgcgactctcacccacggtgctggaggtgactcagctggcatcatcagcatggtcaactacaccctccagaagtacaatggcgacaagtccaaggttttcgtcatgggcggctcttccggcgccatgatgtccaacgtcatggttggctcgtaccccgaggtcttcgaggccggtgctgcctactctggaactgctttcgcatgcttcgctggatccaagagcgaccccactcccttcggtgccaatcagacctgcgctcagggccttacccacactcctgaccagtgggcttcctttgtcaagaacgcgtaccctggatacactggcaagcgcccccgcttcctcgttgctcacggtctcgccgatacgcttgtccgcccgcagtgtggttatgagcagctcaagcagtggtctgctgtccttggcgttacgaacactgccaatcaaactggcgccggtgtcgatgagggctcacagtacaccaagatgatctatggcgacaccaaccagctcgttggatactttggacagggtgttggccacattgcgcctgtggttgagtcggtgctgctcaagttcttcggtctgcagtaggctattgaaactgtcactcgctctcgcgtatcgccgcgacctgtagaactagttctttctagagccggttgaggacattgaagtacgaaaaggcatttctacgtaaatatttatgagcccgtacataaatcgacatcaaatactcccacatacgggagccgagt

SEQ ID NO: 13209 - DNA, 1054 bp, Oryza sativa
  ref <308>: DATABASE ACCESSION NUMBER: AK110557
  ref <309>: DATABASE ENTRY DATE: 2001-12-06
atcacttccggtctccttcaccattaatctgcctcgccgcgcagctctctccgccccgtcgtccttcaaaatggcaatgaggcttgctgtcagccggccattgggtgccgccgcgcgcgcgtcgacctgccctcgcgccgccgttcgtacatttgcgtcgactggacttcgtgcgaaagaagtcgcaggacagagttcggagacgccaaacatgcggttcgctcctcgcgaccagcaaggccctctcaaagcccccatcgtcaaccctgccgacaggttcaaggaaaagagcgagcagctacacaaatatggacagtatctgatgtcatgcctgccaaaatatatccagcagttctcagtctggaaagacgagtcgaccatttacattcctcctaacggcgtcatccccacctttaccttcctcaagtaccacaccgctgcggaatacactcaaatctcagacatcacagctgtcgactatccaaccaaggaccagcgtttcgaggtcgtctacaacatgctcagcatccgtcacaattcgcgcttgagagtcaagacatatgccgatgaggccaccccagtccctagcttatgcgatctctacgatggagcgaattggtatgagagagaggtctatgacatgtttggtgtcttcttcgttggtcaccccgatctgcgccgaatcatgaccgactatggtttcgatggccatccactaagaaaggatttccccatgactggttacaccgagatccgctacgacgaggagaagaagcgcattgtcgttgaacctctagagatgacccaggcatacagaaatttccggggtggttcagcagcatgggagcaggttggtcctggtgacgatttgaagccagagagcttcaagctccccacacccaagccagagccaccaaaggagggtgagcagaagaaatagacaaacagaacgaaaaatgtaaatacctgttcatgatcgcttttgtaaaacagatagcagtttgaccatttgtcaattcattgctcatcacaaattgacaaatgagtcattctc

SEQ ID NO: 13210 - DNA, 1429 bp, Oryza sativa
  ref <308>: DATABASE ACCESSION NUMBER: AK110558
  ref <309>: DATABASE ENTRY DATE: 2001-12-06
atgtgtggtgactgctgcggccgcggtgccgggggagccgccgaggcgggggcggccggcgccggcggcgggaggaagcgggggtgcgcggggacggcgctcgccctcgtggcgctggcggccgccgcggcggtcgccgtcctggagggcaccgccggcggtgtctcctacgtgggcgacgggtggctccacgagtgcgccaagtgggacgccgacggacggcggctgctcgtgtccaacttcttcggcgccggcgtgtccgagctccgcgccgaggcgaaagggaaggagaaggaggaggagcgcgtggtcctggcggatcccgacgtcgccgggagggtcgcgctgggtctcaccgtcgacgcgccgagggggcgcctgctcatcgtctacgccgaccggttgccgcggttcgcgtactccgccgtcgccgcgtacgacctcgcctcgtggcgccgcctcttcctcacccgcctcgacggaccaggtgattcaacgctcgccgacgacgtggccgtcgacgaggaaggcaacgcgtacgtgacggacgccaagggcaacaagatctggaaggtgagcccggacggcgagccgctgtccgtcatcaagaacgccaccttcttccagaggccagggtggatcaacaacttcgtcggcctgaacggcatcgtctaccaccccaacggctacctcctcgtcatccacacctccggcggcgacctcttcaaggtctgcccgaagacggggagcgtgcacgtcgtcaaggtgaagggctcgctgaagaccggcgacgggctggcgctgctgtccccgacgaggctggtcgccgccggcctggtgagccggctggtcgagagcgacgacgactgggagaccgccgtcgtcaccggccggtacgtcggcccggctcaccggatcggctcgtcggcgacggtgaaggatggcgacgtgtacatcaaccacatcatcgggttcgggctcggcaagaagacgcatgtcatctccaaggcggcgttcgcgcctttgtaggcgctggcggactgattgttgacgcctgaggattatgcttcaaggttctttgatctcgtgttacttcggtgacagattgattgttttatgcctgaggattatgcatctatgcatatgctcgtccaacgtccttttttgcaatccattgccagtttgtttagaaattagaacaatctctgcttgcaattgcacgtgttatttttgtgcaaataccagattaatatgcgaagagtgcacacttgattgtcaatagaagtatgactatgaactagtcctactatttcagtttcaattgtaggagagtaaatttcgcaagaatgcaattattttgtcaacaggtattttgattggtgacttgtataacagtccaagttgattccatttgccagtgtttcatatc

SEQ ID NO: 13211 - DNA, 1032 bp, Oryza sativa
  ref <308>: DATABASE ACCESSION NUMBER: AK110559
  ref <309>: DATABASE ENTRY DATE: 2001-12-06
aagcgaaaaaccgagtttgtatactcgataaattaagatggcaactgcttcgaaacccgctgagaaggctgccgctgcttcgccggccaaaccggctgaggccggcaaagacgccgccaagcccaaggctgaggacaagccgaaggactcgaagccgaaggtggaggacgacaacgaggaggacggcgatgaggatgaggacgacgatgacgacatgccggcgctggagaacgccgctgccgtcaaagatgaggagggcaaagccgccggtaagggcggtaagcagaaccgcgcggagaagaaggcgcgtaaggccatgcagaagctcggcatgaagcaggtcccgggcattgtgcgtgtcgccattaagaaggcgaagaacattctgttcgtcatctctaagccggacgtgttcaagtcgcctgcgtctgatacgtacatcatcttcggtgaggcgaagattgaggacatcaactcgcagctgcaggccaacgccgcggagcagttcaaacacgacgccccggcgggtatgcccgacgctgctgccccggccgcggctggcggtgccggtgccggttcgctgctcaacacccctatcgacccgaacgaggtggtggatgagaccggtctggacaaagacgaaattgcaacggttatgtcgcagacgaacgtgtcgcgcgcgcacgccgtcaaggccctgcgcaagacgggcaacatcgtcgacgccattctggcgctcaccccctaagcggtcgtgtgccccgggcgtgtggctgtcgctggacctgttgttcggtgcgtcggtgcggcacggcgtttggctgcgttttatggcggtgcagcgcgtcgatgcggcggtggggaggaaccacatcggtcggggctgtgtgcggcggcggcgaacggcgggcgcgcgtgagcgagcgggcggatcgaacgcttccttttgcagttgatccgggggcttgacacatgctcgctgtttgctactgtcgtctgtcggcttcgatcggtgtggcacgttgctatttg

SEQ ID NO: 13212 - DNA, 922 bp, Oryza sativa
  ref <308>: DATABASE ACCESSION NUMBER: AK110560
  ref <309>: DATABASE ENTRY DATE: 2001-12-06
ttgaagaaattagagtgctcaaagcaagccatcgctctggatacattagcatgggataacatcataggattccggtcctattgtgttggccttcgggatcggagtaatgattaatagggacagtcgggggcattcgtatttcatagtcagaggtgaaattcttggatttatgaaagacgaacaactgcgaaagcatttgccaaggatgttttcattaattactggacctctcacttcgacttctcgtcgctggccgcctctcctccacgaaggccgcgtgcgctgcactaccctcgacgcaccggcacggccggccgtgcgtgctagtgtgcggtgttatgggtgcacggccagtaccgcggcgggaggaggtggtggtcgtgacggagctggagctgcggatgcagctgctcggcggcggcggcaactgctacaacatcaacgacaacgccgacctcctcgcggagatcctggcgcggctgggcggcgccatcgcccacgcgcacgccagggcccgcctgtccctctccctctcgctgtcgctcttctccatcgactgctacgagcgcctcggcggcggtggcggcgccggcgccggcaggcagccgcagccgtcgtcactgctcttcctgtgcaagccagtggacgtctcgtgagtcccctctgaataggcgtacacgtgtacgtacgcggtcgcatccgcccacccgctcgggcaatccgggccgtacgatccacgccgtcgcgttcttcttggcgtacgtgcgctgctactagcttgtctggcgcacgacgcttaacataattggttacttaattattattattagcagtacgaacaataagaattgattattattaagctgtacctgcgagccatattcaatatgggaaaaaaataattaatgatacctttgtttct

SEQ ID NO: 13213 - DNA, 1269 bp, Oryza sativa
  ref <308>: DATABASE ACCESSION NUMBER: AK110561
  ref <309>: DATABASE ENTRY DATE: 2001-12-06
tcttggagaagggaggagaagagggggaggagagcatggatcccggccgcgtcgtgttcgactccggcgtggcgcggcgggcgtgccccggcggcgcgcagatgcttctcttcggcggcggcggcagcgccaacagcggcggcttcttccgaggtaaacagagatccaatagagatcgtcgtcgtctccgtctcaggcgagtgacgcgtgttataacgcaggcgtgccggcggcggtgctggggatggatgaatcgcggtcgtcgtcgtcggcggcgggggcgggggcgaagcggccgttcttcacgacgcacgaggaactcctggaggaggagtactacgacgagcaggcgccggagaagaagcggcggctgacggcggagcaggtgcagatgctggagcggagcttcgaggaggagaacaagctggagccggagcggaagacggagctcgcccgccgcctcggcatggccccccggcaggtcgccgtctggttccagaaccgccgcgcccgctggaagaccaagcagctcgagcacgacttcgaccgcctcaaggccgcctacgacgccctcgccgccgaccaccatgccctcctctccgacaacgaccgcctccgcgcgcaggtctcccactgatttttttcacccttctcaattaattaattaccgcagttaatttcttgtgatcgaaggaccgctcttttaaaattcgaacaagttcgggggcttcggtgcaaaatggtagtaccgtagtttaattttgtaaaaatagccccccccccccccccttttgtaaaaatacaaccgcacttgtaaaataagattccactttttggcgccttttcattggatagcgaccagcggcgacccacaactcgatgcgtttttttaagtttttttttaaatcaaactttttaaacagtggttaggaatctaacgaacatatttatgctcgtttcccaaagtctaagcaccgctaatctaagcagcacatgcatatttctcttaattttttttagaatatcctgacgactagatgtactctttgttttgttttttctcagctcgtgtaatcacgtgaattcatatggttgctccgtttcacagttggctactgcttcagccgcggtcaaattttgaaatttagagcttatttttagaattaatttagagattgtttcgtctttgtcagccttcagccttggcttttaaacgctaaaactattttttttcagcgtaggtcaagtgccttttaacttgtaacccac

SEQ ID NO: 13214 - DNA, 1335 bp, Oryza sativa
  ref <308>: DATABASE ACCESSION NUMBER: AK110562
  ref <309>: DATABASE ENTRY DATE: 2001-12-06
acttcacacctctgctggcacgctcaacgctcgttgctcctccgcaaaaccactacaaatggccgtcaccatgaggaccaacgttgcagtgcgctctgcagcccgcacagctcgtccctcaaggaccgctgtggtggtgcgcgctgaggcccgccgtgaggtgctggctggctttgtggccgctggtgcagctctgctgagcgccagccaggcccaggccgtgaccccagtggacctgttcgatgaccgcaaggccaggagcaccggctttgacattatctatgaggctcgtgacctggacctcgaccaggccacccgtgacggcttgacccaggcacgcaccgacctggacgccactaagaagcgcatcaaggagagcgaggcacgcattgacaggctggtggagccaagcatccagaaggcatactggactgaggcccgtgaggagctgcgccgccagctgggcacacttcgcttcgacctgaactccgtggctggctctctgggcaaggacgcaaagaagaaggccctggcactgcgcaaggacttcatcaaatcagttgaggacctggatcttgctctgcgcaagaaggacaaggatgcttccctgtccaagctggcagtcgccaagtccagcctggacaacgtgattgcaagcctgctgtaaacggctggcagctcagcagctagcgggctgttggcaggagcacaggagccgtgccccaagtgtcctgcaagcatgccaaagcagtggggtgtgtgcggatggccaggtataggctggtgcgtgctggcaactcaacagcgcaaacagcggcggggtggctgcagaagtggtttgcacgcagtgtttgcctcggctgctgcaggcggctggtgatgccagctagtgtgcccaaggctgcgtagcagccgtgcacagctgtaaaagtattcagcggcatgtgcgcatgccctttgcagcactgtgtacagcaagcagttgcaggggctgagcgagttgcagctttgtgaaattgtgtgcagcttcaaacacaggtgctggctgctgccggggatggcaatagcagcctgggcatgtgtgaaagaagcatgcttgggttgcattatgctagtgcaacaagcatccatggacgcatatgcagtcctgtgtgaaggaacgaaagggtgctgctggttctaagccaacttcgttgcactacccttgcagctgctgcatcatgctgatgatcagcgcagcaaggggtttgcagatttcaaagttgagccagcagcatttgactcaggtgttgtaagtagtgtgctgattagcacagcaggtaaccatttaccgcc

SEQ ID NO: 13215 - DNA, 1010 bp, Oryza sativa
  ref <308>: DATABASE ACCESSION NUMBER: AK110563
  ref <309>: DATABASE ENTRY DATE: 2001-12-06
attcagagtaaaataaaaaacaaataaacgcgcgcacattgaaatataaattaatcttaagccaaagcaaaaaagaatcaaaaatgaaagtaatcgtgctattgacatcatgcattgttgcggccgtcatgttccagacgagccaagccatcctaccagctgccggtgtgatcgcgccagtcgtgccaccagtcatcccgccaatgctcgccggtgttccgttcggtggtctcggtttcggtctcggtcttggtctcggtttcccattcttgggcggtctcgctttcagccgattggctttgttgggtcttctcggacgcaagaagcgtgacgtcactccaattgccccgattaagccagccccgatccaatgcgtgattgccaccagcaacagcacgattgagtgttcgttgggagtcgagcgacgaattggctgccagttcgagtcgcgattgagccagttgccaaagatcaaggttaacttggtcgacttggccctcatggagcacatcgacggaaacatcgagttcttgaacttggtctcgactaagactagcagcaagttggcggctttcttggctaaggctggcgctccaactaccactttcactttcatccacccgtccactcttgagccgcatctccttgccgtctatgccgatgctactctcggtgtgccaggattcctcgttaaggaccgagcttgcttcaactcgctcgtcggaattgccaagagtgctaatgcgcgcgttaagttgctcatcgaataaatccgataattctttttttttattctacagcaatcaattaatttatatttcttcttctttcgtactcaatcttaactaatttgcgatatcttcaatttctatatttttagacaaaatatttaatttcaattcaatcataattgtgtaagaattttttaaatcaatcaatgtaatcatgataatttttaaatctatataaagaataatttaatttaatttaataaatcctgattttaaatt

SEQ ID NO: 13216 - DNA, 1376 bp, Oryza sativa
  ref <308>: DATABASE ACCESSION NUMBER: AK110564
  ref <309>: DATABASE ENTRY DATE: 2001-12-06
aagatcgctcttacctcgatccttaacttccgttcagacgtggtggacaatcgcgatgagatttactttagctgcgtttgcagcttcattcgtcggcagcgcatattcgcaacagccagatgctcaaggccgctacacgctagaggccgagggcattaaagcacaattcatcccttacgctgccacacttacgaacctctgggtaaaagacaagaacggcgtgcagcgtgatattgtcctgggttacgacaacacctcatattaccctgttgaccctgggcatccagtctacaatgccattcctggacgttatgtgaaccgcattggcaacggagaatactcaatcgacaacgtgacataccacacccagaagaacgatgggccgaacacacttcacagcggcaccaacaactggtccttcagaaactgggacgtgaccagtgtgaccaattcgtccatcaccttctccatcttggataagtcgaactcgtccttgggcatgataggcgacgtatcagcaagcgtcacgtacaccgtgtcaaagaacaagtggagcatcgtcatggatgccgagtccaaagaccaaaagacgcctattatgctgacacagcatacgtactttcagctcgacgccttcgcgcggcctgacaaccggactatctggaaccacaccatgtacatgccagaggcgaagcgtgtgatgttagctgatggcaatgcgttgcccacgggcgtgattgccaatgtcagcgccggagacatctctgacttctggtcagctccacatgagctgggcttcgcatcaggaaacgcaaacttcgagaacaactgcggaaacggctgccatgggtacaatggcaactgggcgttcaacgacagcaggaacaagagcgagacggtgctcacgctgagcagcgagtggagcggtatcaaggcggatctggtgacggaccaggacgctgtggtgctgtacacgtgcaactggaacgacggaaagacggagttcaagagcacgcagggtgtgaccgggcaggacaagttcattccccgggatggatgcattgcgattgaggcgcaggactacgttgacggcatcaaccatccagagtggggtaggctggggaagcagatcttcgccaaagggcagcagtatcactgggcgtcaagctggacgtttggcacagtctagacacggcgaggtgcagtgggcggatcggctaggagcaggacagaggatgatggagcggcatgcgcgttgcggaaagcatgctgtcgccagctgttgcgcgacgagatgattagctgtacatatctggagccccgcgtcctagtgaggtgcaggcgatgcgcaattcgtccaaacaagaccatgatgc

SEQ ID NO: 13217 - DNA, 1862 bp, Oryza sativa
  ref <308>: DATABASE ACCESSION NUMBER: AK110565
  ref <309>: DATABASE ENTRY DATE: 2001-12-06
gtgtgcactaatggagttgacgacgatctcgccagtgttcctgatctcacttcttggcgttccattgctgtacctgctatggagcaaggcaagcaagtccccctccggcgcgcctgctgcaccgccgcctccgccgggcccgacgccgttcccggtcatcggcaacatccccgacctcctccgtggcggcgagctgcaccgcgcgctcaccggcttagcggcgtcgtacggccccgtcatgtcgctgaggctcggcatggcgagcaccgtcgtgctctcgtccccggacgtggcgcacgaggcgctccacaagaaggacggcgccatctcctcccggtgggtgccggacaacgccaacgtgctcggccaccaggacgtctccatggcgtggctgccgagctccagcccgctgtggaagcacatgcgcaccttggcgagcaccctgctgttcacctcccggcgtctcggcgccagccgcggcatccgggagcgcaaggcccgggagctcgtcgactacctcggcgcgcgctcggggcgccccgtccgcgtcggcctcgccgtgttcggctccgtgctcaacttcatgtccaacgtcttcttctccgaggacgtcgtcgagctggggtcggagaccgggcaggagttccagcagctcatcgccgactccgtggcggagacggccaagcccaacatctccgacttcttcccattcctcagcgcgctcgacctcagccgtcgccgccgcgcggcggccaagaacctcaagaagttctacgatttcttcgacgatgtcattgaccggcggctgagcagcggcgagaaacccggcgacctgctcgactcgcttctggagctccacgccaagtcacagctcgagcgcccactgattcgagctctcatgacggatttgttcatcgctgggagccacacgacgacgaccacggtggagtgggcgatggccgagctgctccgcaacccgagcaagatggcgaaggcgcgcgccgagctcggggaggcgttcgggcgcggcgccgtcgaggaaggcgagctcgcgaggctcccctacctcaacgccgtgatcaaggagacgctgcggctgcacccgccggcgccgctgctgctgccgcaccgggtgtcgtcggactcggagccggccggcggcgtgacgctcggcggctactcggtgcccagcggcgcccgcgtgctgatcaacgcgtgggcgatcgggagggaccccgcggcgtggtcgccggagccggatgcgttctcgccggagaggttcttgggcagggaggcggactactgggggaggacgctcgagttcatcccgttcgggtccggccggagggcgtgccccgggataccgctggccgtggcggtggtgcccatggtggtggcggcgatggtgcactcgctggagtggaggctgccggaggggatggcgcctggcgacgtcgacgtcggcgaccggttcggcgccgtgcttgagctcgctacccctctttgggccgtgccggttaaggtttaggaaggcccaaggcctacaaaatttgatgggcctgaataccggcccatctatatgagtgggctggaatttaggcccatccgaacaaggccgttagggtatttcatttctgttcatctatcgtgtttatatttgttagtttcctttgttagtcgatcgtttatgtctgttcggtattttaggatggataatgatatcaaccaaggtgtaaaatgttcatgtaaacgagccggcctgccagcccactgcccacaacccatgagcccaactcctcccgaactgaaaatcattggttgttgactactactaataaacaaatgagtaccaagatttgtgc

SEQ ID NO: 13218 - DNA, 1410 bp, Oryza sativa
  ref <308>: DATABASE ACCESSION NUMBER: AK110566
  ref <309>: DATABASE ENTRY DATE: 2001-12-06
atcggcaactctaagaactcactcacttccagtcgtcgacaacatgaagggaattttcgccgccattttggcaactgccgccacgagcgtgcttgccgctccatctcctgttcaggatgcccaaatcactgctcgtgctgcatcggcgtgtgccagtgctgtcactcttactggcaatcccttcgcttctcgcaagatttatgccaacaagttctactcatcagaggtctcctcagccgctgctgcgatgactgactctgccttggctgctgctgccaccaaggtcgctgatgtcggaaccttcatgtggattgacacccgtgaaaagatcaaaatcgtcgaggacaccatcaaggatgttccttgcgaccagattgccgctttggtcatctacgatcttccaggtcgtgattgtgctgctaaggcctccaatggtgagcttcccgttggtagcttgagcacatacaagagcgagtacattgaccccatcgtcaccatcttcaagaagtatcctaacgtcgccattgccctggtcatcgagcccgattccctgcccaacttggtcaccaacagcaacctccagacctgcaaggactctgcctccggctaccgcgatggtgtcgcatatgctcttaagcagcttaatttgcctaatatcgccatgtacattgatgcaggccacggtggctggctcggctggaatgacaacctcaagcccggtgctaaggaactcgcaaccgtctacaaagctgccggtagccccaagcaagtccgtggtgttgccaccaacgtcgccggctggaacgcctgggacctttcaccaggtgaattctccaaagccaccgacgcccaatggaacaaggcacaaaacgagaagctctacgtcggcctcttcagccccgagctcaagtctgccggcatgcccagccaagccatcgtcgacacgggccgcaacggcgtcacaggcctgcgcaaggagtggggcaattggtgcaacatcaacggtgctggctttggcgtgcgtcctacctccaacactggatctagcctcgtcgattcttttgtttgggtcaagcctggtggtgagtcagatggtacaagcgactctagcgctacgcgttatgactcgttctgtggaaaagaggagagctttaagccatctcctgaggcgggtcagtggaaccaggcatactttgagatgctggttaagaacgctaagcctgctttttaagtgaatgagttagttagtggtgggttttgggtgaacacttgtatatagattatgatcaggccgaagtgaagggtaggatggtggtgaaaattgtgcaaaaatatcttcgcttcgttgttgatatgttttgacgagggggtgagtttgggatttagaatgaataaactctcgtttatgtc

SEQ ID NO: 13219 - DNA, 1602 bp, Oryza sativa
  ref <308>: DATABASE ACCESSION NUMBER: AK110567
  ref <309>: DATABASE ENTRY DATE: 2001-12-06
agcatccaacaacggttcactcatcaacaacaaccatgtacaggactctcgctctcgcttctctctcgctctttggcgctgtccgcgcccagcaggctggcacagtcaccgctgagactcaccccaagctgtcctggaagacatgcacaggcactggaggcactagctgcaccaccaagtctggttccatcactctcgactccaactggcgttggatccacgttaccagcggctacaccaactgctacgatggcaactcctggaacaccactgcttgccctgacggttctacttgcacaaagaactgcgctatcgacggtgctgactactctggtacctacggtatcaccaccagcagcaactctttgagcctcaagttcgtcaccaagaactccaacgccgccaacattggttcgcgtacctacctcatggagagcgacaccaagtaccagatgttcaacctgatcggcaaggagttcacctttgacgtcgatgtttccaagcttccttgcggtctcaacggtgctctctacttcgtcgagatggccgctgacggtggcatgggtaagggtaacaacaaggctggtgccaagtacggaaccggttactgcgatgctcagtgcccccacgacatcaagtacatcaacggtgttgccaacgttgagggctggaacccatctgatgctgatccgaacgctggatccggtaagctcggtgcctgctgccccgagatggacatctgggaggccaactccatctccaccgcctacaccccccacccatgcagggagaagggtctctacgcttgcgacagtgccactgagtgcggtgacggtgactcccgctacggaggtaactgtgacaaggatggctgtgatttcaacagctaccgcatgggtgtgaccgacttctacggccccggcatgaagctcgacaccaccaagaagatgaccgtcgtcacccaatttatcggctccggctccagcctctccgagatcaagcgcttctacgtccagaacggccaggtctacgccaacagcgactccgccattgacggtgttaccggaaactctctcactgacgccttctgcgaggcccagaagaccaccttcgaggaccagaacgagttcgccaagctcggcggcatgaacggcatgggtgcctcgcttgctcgcggccacgtcctcgtcatgtccctctgggacgaccacgcggttagcatgttgtggctcgactctacctaccccaccgactcgaccaagcttggtgccgctcgtggaacctgctccaccgactctggcaagcccgaggacgttgagaagaactctcctgacgcgactgttgtcttctctgacatcaggttcggacctattggctcgaccttcaagcagcccgcataagcgcttcgtgccaggtgctagaaagtgtgcgctgtgcgcgctgatgagagtacatggtgattcacgttagactagactagtttgttgtggtcgtggactcggtaccctctgcctgtggatactttcgctttcttcgaatttgtatatatttgtcggtggtagaaaatgtgcatatagagactatcaaattgctgttgactat

SEQ ID NO: 13220 - DNA, 1237 bp, Oryza sativa
  ref <308>: DATABASE ACCESSION NUMBER: AK110568
  ref <309>: DATABASE ENTRY DATE: 2001-12-06
aaccaagcccagtccgactaccacacactcgtcgtcccctcaattgcagtcaatatgttcgctgctcggcaagctttctcccaggcctcgcgccgcaccttttcctcgtcggcccgccagtcgtcaaaggtcaccgtcctcggcgctgccggtggaattggacaaccgttgtctctcctcttgaagcttaacccaagagttagcaagctttccctatacgatattcgccttgctcccggtgtcgctgctgatatcggccacatcaacaccaagagcgaggtcaccggccacgagcccactccctcaggtcttgccgaggccctcaagggtgctgagattgtcgtcatccctgctggtgtcccccgcaagcctggcatgacccgtgatgatctgttcaataccaacgcctccatcgtccgcgacctcgccaaggctgctgcagaccacgcccccgaggccaacatccttatcatctccaacccagttaactccaccgtccccatcaccgccgaggtcttcaagtccaagggtgtctacaaccccaagcgcctctttggtgtcaccacactcgacgttgtccgtgcctcgcgcttcatctcccagatcaagaacaccgaccctgccagcgaaaacatcactgtagtcggtggccactctggcgcaaccattgttcctctcctgtcccaggctggtttcaaccttgagggtgagaagctcgacgcctacgtcaaccgcgtccaattcggtggtgacgaggttgtcaaggctaaggatggtgctggctctgccactctctccatggccatggctggagctcgcttcaccgagtccctcctcaaggctgcccagggtcaaaagaacgtcatcgagcccacctttgtcgactctcctctctacaaagaccaaggctgcgagtactttgcctccaacgtcgagctcggccccaacggtgtcgagaagattcacccggtcggcaagattacggattacgagcagaagctcctcgatgtttgcatcagcgacctcgccaaaaacatcaagaagggtgtcgactttgccaagcaaaacccataaattaaaagtgtttgtgggcgttgagtgatggaagcggtgtacactagtgattgaccattgggcttggatcggactgggtacagggtgttacatcatttagcgatgtgtgtagatttatgagctatgctagcacatgttaaacttcaaaaaaaaaaaaaaaaag

SEQ ID NO: 13221 - DNA, 942 bp, Oryza sativa
  ref <308>: DATABASE ACCESSION NUMBER: AK110569
  ref <309>: DATABASE ENTRY DATE: 2001-12-06
actcgaacttgctgaactttgttaggattatattgttggatccatcatggcagacaagcaaatggccagtttgatcattaaggcaaatctcgagtgtgaaaagtgttgcaagaagatccagaaagtccttaacaaactcaaagacaaggagaagatcattaacatcgtttatgagaactcgaacaatagggtgatcatatcgggccatttcaagccagaggagctcgcccataagctaagatgcaaggcctgcggggtcatcaaagacattgaatttgggaagcttgcagaggcaaagaaggaggagaagaagccggatcaggccaagaaggaggagaagaagcagcctgaggaaaagaaacctgaggagaagaagaaatccgaggaggagaagaagaagggcgacgagaagaaaccggaggaaggcaagaaggaagagaagaaggaggagaagccaaaggtgaaggaggagaccaaggccacgccggcgccgtcgtcgacgacggtgaacctgcagttcaccaacatgtgcggcatctgctacccgtggccgtgcagcgaccccacccactggggcgccggcgtcgtccacccgcagtggccgcagtgcgaagccccggcggcggcgttgccagcgttcgtccctggccaccaccaccaccagctcccgccatggggcggcgttccggcgccgaagtggccatgcggaggcccctcgtactgcggtgggtgcggcacctgccgcggcggcgggtggccggcggcggcgccgatgcaggcgatgtgctgccctgggccgtcgtcgtgcagagggtgcaagggttgccggctcgttcaggagggcaagttcgtgtacgaggagtacccggcggcgagcgcatgtgccgtcatgtgatgtgatcatcttcccctcgccgcaatgtcatcgttgacattctctcg

SEQ ID NO: 13222 - DNA, 961 bp, Oryza sativa
  ref <308>: DATABASE ACCESSION NUMBER: AK110570
  ref <309>: DATABASE ENTRY DATE: 2001-12-06
aactcagatcgtcagtgtccaattacctctccaggctcgaacccaaacacgtaccccacggtatctgtctcaaacgcaatcaacatgcattccaagatcgctgccttcctcctcccgctcttcgcggtcgccaaccccgtccctgctggtggcaacgcagctgctcccgatccatcccagatcaccatcatcgactcttcctactctggtaacggctgccctcagggatccgtctccacctcgacctccccggacaagactgtcatcacctacggcttcgaccagttccaaacctacatcggccccggcatctccaccaaggacaactcccgcgcctgccagctccacctgaacctcaagtacccgggcggcttccagtacgccgtcgtgtccgccacgtaccacgggtgggcgcgcatggacaagggcgtgacgggcgacttcgtcacgagctactacttctcgcaggacgccggcaagacgtccaccacgcgcatgagcgccacgggcggcggcgacctcatcaacggccaggtgtacaccaagcaggacaacgtcgagaccacggccgtcgtctggtcgccctgcggcaccacgggcatcctcaacgtcaacaaccgcatcagcttgcgctctaccaactcgtcggctttcggcgagctctccaacgacgatgctaccgtcgcgttcacacagcaggtgcacgtctcgtggcagccttgcacgcccaagggtggctctggtacctcgcccggcgacaccattggcattggaaaccagcctggtgccggtatcgactttgagtaggtggacgatttgagaggggacgagtctagcatcgattgtttccttttgtctttgcagatattcattgcatggggacgggggcggagacgtgtatatacctaggaagctagttccgcgggtgtgtttgttgaggaattacgagtctgtgtttttc

SEQ ID NO: 13223 - DNA, 1248 bp, Oryza sativa
  ref <308>: DATABASE ACCESSION NUMBER: AK110571
  ref <309>: DATABASE ENTRY DATE: 2001-12-06
atcttgacttgtgatcacgtacatacacaatctgcgaaccactgcctcataattgcttctgcctgaacacgccgagcccaacaatcttgccctgcataatcgatacgtcctgcccagcgctctggttcagtactacaccgctccctcattcctcggcgcaagccgcacgctttctccgccttctcatctccaattgagacacaaaatccacattcaaatactaggatgcgagtcctccttgcgccgttgctcctcgctcccctcgctgcgctggccgcacccgatatcctcgcacctttcgagccagccatcaccggattccccacgtccaacaacaacgaaaccgatctgctcgcagaagatggaagctttgaactgctgaaacgccagggcggcaccgcctgcgcaacaaactacttcgcctgcaacaatctcggcgccccaggcctctgctgtccgcgcaccgccatctgctccgccgaccagcgcggccaagtcgtctgctgtccgcaaggcaatgcatgcaccggagccctaggcacgaacgcgcccatccaaaccgcatcgcagacatcgaccggcagcgtccccgccagcaccacaaacggcttcgtgcagtccaacagcgcgaatcccaccgcaggcagcacgctgcttgctcgtccgcttatacgagctgccagagcgatgctgcgagctgcacggctgctctagcgaacggcgcgcagggcgtcaccgtcagcgcgcccaatggtggcgcgaccatcaccgccgtcccgagtctggggctccagagcgcgcagagtatatgtcagagcctgagcagtcagggctgctacgggttgacggtagaggcgtgcgcgaggttcgacggcgcaggcaatgctgcgatgcgggagcgttgcgccggatacttcatgacggccggcgtggctttgggaattgccggccagctattaaggtagtagggaggcgatgtgggcggtttacatgcttgtttctgcgtcttgcgttttcatttctttgtggatagtatggggtggggctcctggaggacgggctggctggctcgggagacatgcgagcatggcgtgtacacatgtgcttcggcattcttcgtcttgtatacacacatgctgacatgcgatgatatgcattttcgggtgttttgacgtctttcctggcttgcgggactcttctgtctctagaagtggataattatgaatatcgaatgtgtgtcccggatac

SEQ ID NO: 13224 - DNA, 1007 bp, Oryza sativa
  ref <308>: DATABASE ACCESSION NUMBER: AK110572
  ref <309>: DATABASE ENTRY DATE: 2001-12-06
atctccatgacagcttagttagtttctctggtttgctatatagatttagacacagatggcgtgcttatccttgctctccggcgttcatcccctaccactactcctgctcattactctcttaggaccggtggcgctcgtgcgcggcgtcaccttccgcgtggtgaacaagtgcccgttcccggtgtggccggcggcggcgcccaacgccggccacccggtgctcgccggcggcggcttcctcctcccgccgggccagtccaggcgcgtcagcgcgccgcccacctggaacggccgcttctggggccgcaccggctgcaacttcacctccaccgccaccaaccaccacggcaacgccgccgcgtcctgcctcaccggcgactgcggcggccgcctcgcgtgcaacggcaccgccggcgcccctccggccaccctcgtcgaggtggacctccacgaggaccagagcaaggggagctcctacgacgtcagcctcgtcgacggctacaacctgccggtggccgtgtggacgaagccccccacccccggcgccgccgccgccgatcgcaagtgcgtcatccccggctgcgccaagaacgtcaacgcggtgtgcccgccggagctgcaggtgacggcggcggcggcggtggtggcgtgcaagagcgcgtgcgtggcgttcgggacggacgcgttctgctgccgcggcgcgcacggcacggcggagacgtgccgcggcagcgcgtactcgcgggtgttccgggacgcgtgcccggcgtacgtcagctacccgtacgacacggcggcggcgaggtgctacgcggaggtgtacgtgctcacattctgtccgtccagatggggcgcgggggcagatcgtgtggcccaggcttgacggatatgatgtgagacgtatcgagtagacgagtaacactccggcatgcgtgtatctaagtaggagtagtatgtactatatacggagtatgtatttatacgtgtactattacgtatttacattc

SEQ ID NO: 13225 - DNA, 912 bp, Oryza sativa
  ref <308>: DATABASE ACCESSION NUMBER: AK110573
  ref <309>: DATABASE ENTRY DATE: 2001-12-06
agtacttgtacttctcaataaccaccttcgtccagaaactagcccccagatagcagtgtctctattcagtgtcaaaatgccgaccacctacaccatcacgctcaagaacaagtgtggcatggaccatgactacttcctctttgtggaggcacctcaggtgtccgcgggcccgcaagtcttccagaatgtctacatctcctctccaaacgtgtccactgactcgggcactgcgaccttcacttgcttcgccgactactacgccgtttgtggtacgagccctaacaaagcgctcggtgccaaggtcaccgtcaccactgccgattcttccccagtgcagatctgccagggtcccaccaagctcggcactcactgcttcatgagcggcggtctcaagcccgacggatcgggcggtcgttctgccaactttatcgactccgcgcagacgatcgactgcaaccagcctggcgcgtaccgcgtcgactgcatcgacttcaaggcaaataatggctccaaccagtttgtcggtctcggagcccaggatcccaacgatcccacgaacatcgtgcccatcgccgttttcgatgccattcccggcacgcagaacttcctccagccgcacgccacatactatatctcctggggcaccttcacccctggccagatcatcgacgtcacgacggtcgcgccgccggcgaagatcgacttcaccggaaaggccaacccgaacgccaccgttgttcacaacagcgacggtacctggaccgtcactcagtagagagtttgaggttccaaggtttggtcttgtgtaatgctggacggaggaaggcagagtgagaagcagtaggctcgatccgtagacactgactttaaacgatttcacgacctgtgtcaatgccattagaatttattacg

SEQ ID NO: 13226 - DNA, 950 bp, Oryza sativa
  ref <308>: DATABASE ACCESSION NUMBER: AK110574
  ref <309>: DATABASE ENTRY DATE: 2001-12-06
atccagcttccacactcggtcttcaaagcacttctattaagatccacgtcatccacatcttcggatcatcagccttgtccattctttcaaaatgaagtggctccttgctctccttcccgttgccgctgccgtcccggccctctctcccatcgagctcggtgatgcgcccccagctggcaccgtcaagatcaacaaggtcggctatggcggtaccggatgccctcagggcaccatggccacgcagatctcggatgaccgcagcgttgtcaccttgatcttcgatgcctacattgcctccatcggccccggcatctcaatcaccgagaaccgcaagaactgccagctcaacgtcgagctcctctaccccggtggcttccagtactccatcctgtccgccgactaccgtggctatgctgccgtccagaagggtgttactggcactctcaagtctacttactacttctctggccagtctgctcagacctccaccgagtacagcttcatcggcccagtgaacggcgactacaccaagcacgacgaggcggatagcacatccattgtctggtccccttgcggagctgcgggtatgctcaacatcaactctcaagtccgccttactgccaccaactcctccgcctctggtctgctcaccaccgactcgaccgatctcaagttcaagcaagtcgtgtacgttgcatggcaaaagtgcaagtcgtcttaaataggagatgactaaagtgatgacccgcagtgctcgcaatgggacccgtggggccatctcgatcaaggagtggtatctcgggattcctgaaaacctagtatggagacgctgtggcgggaacggtggatactgatgaggatgcggcgtaggaaattcttggatgataaatattttttctacctttttttttggaattttgttgctagtgcaatgagatggacgcatctcc

SEQ ID NO: 13227 - DNA, 1097 bp, Oryza sativa
  ref <308>: DATABASE ACCESSION NUMBER: AK110575
  ref <309>: DATABASE ENTRY DATE: 2001-12-06
accatttaccaggacaatgcctttaacacacacacacaagacacaacacattcggtaattcagcgtgaacgtgagtacgtgaccaataagagcagatctcatgtagtagcagtgtagcaccagtagtacagttcacttccaccgttgctcctaccgtccggtggcatgatggcatcgcgtgccgccgtctcagcagcagcgtgccagtcatcgtgtgggcgcgaacgcgcgcgatgcgtctgagcgtctccgacgcagagccgccctagagaaaaagcgcgcccatccacggcgggatccagaggcgtcgcgaaaaataccaccagctcaccactggtacttggccttgacgaggacgtcctcgtagagctcggcggcgtggtcccagctgaggtcctgcgccatgccgcgcgcctggagccccctccagctctccttgtagttccggtacgtgttgaggcagtgcccgagcgcgtcgatcatccggttcgcctcggcgcggtcgaacgtccacccgagccccgtgtcggcgaacgggtcgaacggcgccaccgtgtcgcggagcccgcccacggcgtgcaccacgggcacggtgccgtacgccatggcgtacagctggttcagcccgcacggctcgaaccgcgacggcatcaggaggacgtcggcgcccgccgtgatccggtgcgccagctgcaccgagaaccccacccacccgcgcaccttgtcgttgtgctccgactcgaaccgccgcagcatctcctccaggtccggccgccccgtgcccagcatcaccacctgcacgtcctgcccggcgatccacggcatcgcgtcgccgatgatgtccacgcccttctggtggtcgagccgcccgatgaacccgatcagcggcacgtcgtcgcggacctgcaggcccagctgccgctgcagcgcctccttgcactgtttcttgccggtgtccagcgtctcgaacgtgtagttggcgtagccgtcggactgcaggtgctcgtccacctcggggttccattcggccatgtcgatgccgttcacgatgccctgcagcttccagtcgttgtggtttattatctcgtggaggcccc

SEQ ID NO: 13228 - DNA, 1893 bp, Oryza sativa
  ref <308>: DATABASE ACCESSION NUMBER: AK110576
  ref <309>: DATABASE ENTRY DATE: 2001-12-06
tacacattatctctaaacgcaccgcaagatctctgccatccttgtcccagccggccacgcaaccagagacacgcaactgccaccatttctgaattttggctgccaattggggctgcattgcacgcattgtgcacaacacacggtggattatcagtgctttcattgttgggcacgcactcattagttttcgccgacagcagtagcaaccatggctctggtgttcaccaagcagcggaccagcagactgcagctaccccgggcagctacttctcgcacagcgcgcagagcggtttgcatgcggtcgcacaaagttgaaattgaccaccaaggcaagacatatgtgctggacgttcctgagggcaggagcattttagaggtggccctggacaaggggatcgacttgcctcatgactgcaagctgggagtgtgcatgacgtgccccgcaaagctgatgtctggtgaggtcgaccagtcgggctccatgctcagcgatgacgtggctgagaagggctacgcactgctgtgcatggccctgccacagagcgacgtcaagatcatgacagtgtcagaggatgagctgctggatgagcagttgtgtgcttaaactggcagctggttcaaggcctgaatcataatccggaccaacacttgcttactcagacctaggtgccagaccaaaacgtgctagggtggcaggcaaccggctgcagggtttgggagcggttggggggggggggggctcattttggccgtaaatctgcagttgcaggctgactcggccagccatggcctcaagagagcacaagcagcttaacacggcagtgcagcagccgcagcagcagcaggtactcatgccagtgcttgcttttccggtcttgagaggttacttggcgtatgaacctgtgtgaagccagaatggctgacagcaggaggtgcacttttgagggaatttggcattttcactggtggctcttgagttactgcttgcgtgcagcagtggccgaagtgggtgctgcccagttgttgcctgtctactgtcaacatgacaaaggcttgctggcaatggtaagtggcaagcttgacatatttgacaaatgtcaagaatgccagtggcacttaccattatataatggtgcatacatgcaacactcaaataatatgtgtgctggcatgctggcacatgcggtgcacagcagtttcggcagctcaaccaacatgtgttcatgaccaccttttggtgggtgatggatcatccatgctttgcatgtgcttgccaccagtgtttcgaagcctagtgcctgccattggctacaccagttttgtctcgtcagagcaggtgctctgagtggtgtgcattttgcagcggcttttgaaagctgcagccactattgccaaccgtgttgttgtgtggttggacgtccagtcgacactcggtacctggcggtcggtccctggcttgacatcagattatcagcagccactccagtgcaagttcagctcacagcaggcagtactgcctgcaatagtggctgctgacttgggatccagtgcactggatccacatggcaacatgttgcaacatgtggtgtgcaccactagcctgatactggcctcacctgtgcaggcatgccttggccctagcggcgctgtttgcctcaggctgtgtaacagatagataggcacatgcaggtggtgtgtgtggctttacaagggacgaccttgcttggaacattgcggcacgtgcgcatgcatgtgcatcacatgcgaggtgagatcagcacatcatggtgtggttgccattgctgcaccagtgttcctctagcatgcacgagctgaacaagagttagaggcatcgccagcagcaacgcaatgtaacaaatcaggttcaaaaag

SEQ ID NO: 13229 - DNA, 1739 bp, Oryza sativa
  ref <308>: DATABASE ACCESSION NUMBER: AK110577
  ref <309>: DATABASE ENTRY DATE: 2001-12-06
aaacttggcgccaatttagcaattaacagaaaaaccaaccacgcatatggcagcagcagcagcaactctcgccacggaaaatgctagtagtatactaggccatggacctggacctcgccgtgcaagtctcccgccggccagtctccggcgaggacttcgccttcgccacctccgacaccgacgccgccttcctcgtcctcgcccacctccccgggtatgacaaggaggaggtggaggtggtcgtcggcgatggcgggagggaggtgggcgtggtcgtcggcgcgaggaaggatgacgcgttcgcggtggaggcggcggtggtcgggaggcgcctccgggtggcgcaccggcaggtggtggaggggttctgcagggtgttcgacgtgccgccaggcgtcgaggtggggcggatcaccgtcgggttcgaggaggacgacgagttgctcgtcgtcatcatgccgaaattccggccggcgccggcggtgagcggcggcgatgaggggcggcggctcgacgtcgagagcgcggactcggagtgtgggtcgtccgacgtcgaggacttcgatgtcgagtccgggccgagggagcggcaggacgacgacgtcgccgtcgagacggaggttgagctcgacgacgacgacgacgacgaggacgagctatccagcctcgagttggagtacgaggactggatcaacgtcgactcgtcggagtcggagccggagccggagccgccgcgcgacgtggcggtggagacgccggtggcagtggaggaggaggtggcggtggaggaggaggtggcggtggagacgccggtcgcggtcgaggagccgccgccgccgccgccgccgtcggtggtcgacatcgagtgcgacgtcgtgttcgagccggcgtaccgggagctgccggtggagacgccgatcgaggtggtcggcccgcctcacgccgagccggagcccccctccgacgtccccgacccgatcgacatcctctgcgtcgtcgaggagcccaagccgccggccaccgtggacgagcccgagcagccgaagccaccggccgccgtagaaccaccggtgcaagaaccaccagctgaagagacgccgacggcgacagagccagagccagagccaccggcggcggaggaaccacccgccgccgagccggagcaagagcctcaaccggagacgccgccagtagaatcagagacgccggcggaagaacaggcgccggtgcaagagccaccggcggcggacgagacaccagccgccggcgaaccggaggagcagccaaaaccacggtccagtgacagcgaggattacagcacgtcgggggaagaaggagacggcgcgaaccggggcggtggccgtcgccggcccagggggcaggggccgcggcggcggcggcgcaggaggcgcggcgggttcccgctggggatggtggtggggcccgcggtgatcctgctcgcgctcgccgcggcggcggccaggaggcggcggcagcagcgcggggcgggcgggcagtgaagtgactgacgccggtgttgctccgctcggtcgccggagttcggcgacgcgaacatgacgtaattgtgtgacgtgttaggcgtcttttgtgtgctttacgcgttcgtttcttggtggcgtattgttgtgctgtgtaaaacggatttttcgtgtgattgatagtatttcagcctgagcaacacaagtatatgcatgtgcccctattgggctgttcggtgt

SEQ ID NO: 13230 - DNA, 1309 bp, Oryza sativa
  ref <308>: DATABASE ACCESSION NUMBER: AK110578
  ref <309>: DATABASE ENTRY DATE: 2001-12-06
ttatcaagcacggttccgagcgagtaattgacgacgcccgtgcccatgtctccctactcaagatgctgcgacaattccactacatcgaccagaatggcaaagaccagggtatcaacgtacggaaccgtgccaaggaattggccgaactgctcagcgatgtcgaccggattcggactgagcggaagaaggctcgcgcaaacaggaacaagtttggcggcgtcgaaggtggcgccggcatgggcggcttctccggcagcggaggcttctcgggaggcagtggaggtagcagatatggcggcttcggcagtgaatccgcagactatggcggctacagaggggaggtctacggcgacggcggtggttttggaggcaaccagtctggcttcgcagacacacaacagcgacgtgagcgattcgacgagtacgacgaatatgacgagggtgagagcgtgagcccaacacccgcaaggaggaaggagcccgcagcaagtcgaaaggagcccaagaaggaggagccaaaggcgaaagcaccagagccggtggtggatctcctggcctgggatgatgagcctgcgccagcctcgacctcagccggaaagcagcctgccgccgcacccaaggacgactttggagacgatgatgacttcgacgacttccaatctgcggcgcctgcagcacccgcagccaagccagccgccgcggccttcaatatggcgcctccagcatctacgtctacgattacttcatcgactcagttcgccgcacctcaggctcagtctgcttcacaaaacaccaacctgagcaatctgttcgccacagtctcaccgccgcccgctgccaacaagatgagcagtcctccctctgtggtttcgcccatctcccagccacctcagccaaccggttatcaggcaacaggtccaaactatttcacatctgtaccccagcctcctgctcagtccggagcctctactccaggcgccatgtccgctggtgggcgcattggcggaggagctgctcctaagaaagctggcggcgacgcttttgcatccttgcttgctactgccgcaccgaagaaggcctccacgccagcacaaaaggtcataatgggtgatttggccaagcagaagacgtcccaaggactatggggagctcctgcttcttcttccgcctctagcacgcctgctgcccaaacgccacaatcgggctctaagcctggcggtgccttgggtgacttgcttggttgagcagtctcatagtatgtaatgtccatccatgtctggcgttcgggtgaaaaatgggggcgtactgc

SEQ ID NO: 13231 - DNA, 1486 bp, Oryza sativa
  ref <308>: DATABASE ACCESSION NUMBER: AK110579
  ref <309>: DATABASE ENTRY DATE: 2001-12-06
acatacttcctttcttcaattgtcgcgtttataccccactaccccaccatggcggacacagtcgcgatccaagacgagatcgcagtgctggagaagaagcttgtagaggtgcaagaccagctcaaagatgcgaagtcaagactgcaaaaggcgcaggaaactgccgccaacggagctgttgctagtgacatgtcgttcgacgacaagatgtcgctcatcaaggtcaacttgcaggaagtgctgaacccagagatcatggaggaggcattgaagaagaatggacacttgaaggtttactggggtactgctacgactggacgaccacactgcggatacttcgtaccaatcctcaagatcgctcaattcctcaccgccggctgccacgtcaaggtccttctcgctgatatccacggcttcctcgacaacctcaaagcacccatcgagcttgtcaagtaccgcgctgaatactaccgctacaccatcacctctctcctcaaggccgtcagggtccccatcgagaagcttgaattcgtcctcggatcgagctacgaattgggccccgactacatgatggacgtgctgaggctggcgtccataacaagcgagcgtgactcgaagaaggctggtgccgaagtcgttaagcagactgagaatgcaccactttctggtctgctctaccccctcatgcaggcactcgacgagcagtacctcgatgtcgacgtccaattcggtggtgtcgatcagcgcaagatctttgccctagccaaggaggctctgcctaagctcggttacaaggagcgcgcacacttgatgaacctcatggttcctggtctacaagggggaaagatgagctcatccgaccccgactccaagatcgacgtcctcgacggacccgatgccgttaagcggaaactgaagaaagcgcacgcggtccccaaggtcgccgaagacaacggtatcctctccttcgtcgaatacgtcctgcttccagcctcttacctgaagtacggtgaacctaaattcgtcgtcgagcgccgtgatgccgagcctctcgtctacaccgagattaccaagatgagggaagactacgtcgcggatgtcctctcgccccaagatctcaagcccgccgtcactgccgcgctcaacgagctcctggcacccgtacaagcagagttccaggctacgcccgcatggcaggagattgagcagaaggcatacctgccaccacctgcggaaaagaagaaggaaaagaagaagaaggacaagggtacattccaccctggcgcgaagaaggtcgaggctaagcctgatggacatgttgagggtcaggataaggcggaggtggatgttggtacgcagagtggggagaagacgattgagaacctgacgcttgaggagaagaagtagactttgattgcagattcatagatctagatcgatgttgggtcttgatgaatatacccaaatgccatgattcatacttcgc

SEQ ID NO: 13232 - DNA, 1232 bp, Oryza sativa
  ref <308>: DATABASE ACCESSION NUMBER: AK110580
  ref <309>: DATABASE ENTRY DATE: 2001-12-06
actggatcgcgccaccattctctttcgcctccggtggcagatcgacgatgggtatactggtcatctcggccgacctgaaatgctgccgctgcaaggagaagctctccaaaatcctctgtagcctgagagacaagtatggcatcgagaagacggagtacgaggacaaggacgacagggtgatcgtccgcggcaacttccccaccgacaagctccgcagcgtcatctggtgcaaggccggccgcaagctcatccgggacatcgccgtcgttgacgtatggccgccgccgaagaagccggagacagctggtggcactactcctgctcccgccgttgcgaatcctccgcccgccgcaacggtcgccgctacgccgcccaaagttgatggcgccggtaataagggggagaagcagccgaagacgacgacgccaccgccgccgccgccggtgccgctgccgtacccgtggccgccgtgctactaccccccgatgcagcattgccagacctcctccactacgtggacggggagctgcccgacgcagtgccactgctgccccaagccgccgccgccggagacgaagacgaaggcgtgcgagtactgctcgcgcgaccactgcctcggcggctgcaagatcaccccgccgccgccgccgccgagccgatgcggcggctgtgaccacgcggactgtggcggctggtgcggcggccagccgccgatcaactgcccgccgccgccgccgccgagccggtgcggcggctgtggccacggcgactgtggcggctggtgcggcggccacaggccgccgatcaactgcccggcgccgccgccgccgtgctgccagcagcagccgtggggcggaggctgtcagtacgacgagaacgcgtgctccgtcatgtgatttttgagcggtaattaatttgcctcggaaatcggaatgaataaattaacgcacgacgttgatgttaatccggcgttgtgtccgtggcgctctgtggtgtgtaaatctaagtgagttgaatatcattacaacacattcattattagtattgtggcagccaactgcctacaagaataatgtttgtgcttaaaaattaaaaccatgtagtttcttgtctatatttgacatgtgtaattagtttgttgtgtatgtttggcacgtatatgtaatttgttttgtctataattgacatatttcatatgtaattaaagtcgaatataattatctcttttctct

SEQ ID NO: 13233 - DNA, 897 bp, Oryza sativa
  ref <308>: DATABASE ACCESSION NUMBER: AK110581
  ref <309>: DATABASE ENTRY DATE: 2001-12-06
aagctctggttggtgacgccaatggcgttggacgagtcgttcaagaggccgggcaccatcccgttcaagtgggagctccagccaggcgtcccgaagcagcaaccacaccacggcggcggcggcgccgccgtcggaagtagcagtgcatcttcttctccggcgccggcgccggcggcagcatcgacgctgctgctcccgccgaggctcctcgcgcctcctcctgcagccgcggcgtcccatggcggctgcgacacgggggcgaacattctcgcttcgacgacgacgccgtcgccttcgtcgtcgtctcaccggcggtccatgtctgcgcggttcacggcatcgctggtgctgccgttcacgcggccgcggcggggacggtcagccaattcaaaggacgaggacgacatagccttcacggtgctctatggcgacaagattgtgtaaatattcatactccctttatcccaaaatgtttgacgccgttgacttttttaaaaatatttgactgttcgtcttatttaaaaaaatttaaataataattaattcttttcctatcatttgatttattgttaaatatacttttatatatgcatatagttttacatatttcacaaaagtttttgaataagacaaatggttaaacatactttaaaaagtcaacagcgtcaaacatttagggaagtaaggaatattttgggtctattttcaaaataaattttattaaaggtcgatttgtcagaatttcggctgttttgatgtatatatgtgctttacgtgtctaaattcatagaatagagagtactaaagtaagcactgagcactgaggcatcatttccttcatttcggtttcgaaaggaggttggaaagagacaattggagcattatgcatttaattac

SEQ ID NO: 13234 - DNA, 988 bp, Oryza sativa
  ref <308>: DATABASE ACCESSION NUMBER: AK110582
  ref <309>: DATABASE ENTRY DATE: 2001-12-06
cgcactggagcccaactgcaaggaaagccccggcggcctgcgcgacctgcagatgttgatctggatcgcccgcgcagccggcctgggcaagacctggaaggagctggcgcaacgcggcctcatcacgcccttcgagagccgccagctgcagcgcaatgaggggcagctcaagctcatccgcgcccggctgcatgccgtggccggccggcgcgaagaccgcctcgtgttcgaccagcagacggccgtggcgcagagcttcggcttcgagggcaccggcgcgcagcgcgcctccgaggtgctgatgcggcgctactactgggccgccaaggcggtcacgcaactgcaccagatcctgctgctcaacctcgaggagcagatcaccggctcgcagcagaacctcgtgcgcccgctggagggccagacggacttcctcgaccgcggccgcatgctcgaggttgccagcgacgacctctaccagcgcgacccgcacgccatcctgcgcaccttcctcgtctaccagcagacgcgcggcatcaagggcctgtcggctcgcacgctgcgggccctgtacaacgcccgcgggctgatggacgccgcctggcggcgcgacccggtcaaccgcgcgaccttcctggccatgctgcgccaccacgagggccagacgcattcgttccggctcatgaaccagacctcggtgctgggccgctacctgtgggtgttccgcgccatcgtcgggcagatgcagcacgacctgttccacgtctacaccgtggaccagcacatcctgatggtgctgcgcaacgtgcgtcgcttcttcgtgcccgagcatgcccacgagtacccgttctgctcgcagctcgccgcgcagtgggacaagcccgagctgctctacatcgccgccctcttccacgacgtggccaaggggcgcggcggcgaccattccgagctgggggccgtggaagtcaggcgcttttgccgccagcacagc

SEQ ID NO: 13235 - DNA, 2242 bp, Oryza sativa
  ref <308>: DATABASE ACCESSION NUMBER: AK110583
  ref <309>: DATABASE ENTRY DATE: 2001-12-06
tacctttcttctcgtgctccttttgtcttccttcttctttttgcgttcacgcggttagccccagggcatcacactcccttgcgatttcgttcagtctttcttcgatttgatatggattactagctgcctggttgcagccacaaaacaacatggacttgggaagttatcaaagaaaagagaaggacatttggcaggccatgagattcggatgctgtgcatcgaaggaggaggtggatgatggaagggaagcgcttcgagcgaatggaaactcacagatgcaaatcatctatgaccaaccacaagctgttccccaacctcgagctgagccagtccatcaccatcgtccatccacaagccaatctatgagccaccatgtctcccaatgggtaaacacaagccgtgactttgcaacccgtgcctcatcacgtgctagcttctctactctcactcgaccccggcgttcacattcgatccacaaggcacgacccagtatctcacggccaaccaatttccagcaccttgaaaacgggtttggactggatgggattcagtccatggttgatgaggcaccaatgccagtccgtcgcaatggtggctttcgtcgcctggagctatccatctaccttcccaatgggtgtggccgcctgtcacagctacctgactttgaggatgacgaggcatggggtgctaagaaagtggacttggagaagccagcaaacgccctcgtacgcgtaagagactcacgaacaaactcactctcctccaatccttcgacatcagattatcttatccaacgaaaacccgccaacactactgcttcgtctgtatcacactccaggcgttccagcgtgcagagccagaagagtactaccagtactggtacacatgaacgtcgcttgtctggtaccacaatggctaccatgcgaactccaactctatcagtatgggccgaggaaccaatgagctctcctgcatcagctgtcgagaagccaaccatccgtcgttcccgcacctccggtaccctttctccagctcgtgttctatctcgtctgccctctccctctcgctcgcgtgccaacactgcaccttcccgccctggctccctgcgccgtggcaaaactgatgttgatgaagccattcgtgagctcaacactattgttgaggagcgccgtgcctcggcataccgctctcaaacacaatctcccgcactcatcaaccgtcctccgccatcaccatctcatcacgtgccctatatcgcgccatcaatgcgcatgcatgtacgttccgaaacactttctgatatcggttctgccttctcggccccgatgcaatccaacaaagcactgcccgtcgccccagttcgacgacgtgcaaccaatcttaccctcgcgcctccctcacgggacagcactatggcgctgtgctccaaccctatcaccccacccgcaccccacacgcctactaagtccatggctcgtcttacgacctggctcaggcgctcaatctctgctaccactccaacatccccatctgcaccaaagtcgtatgatgcggaaccattctacaagtgcgatcctgttcctacgacacgtccctccacagccggttcccatacagcctgccacactcggcaagagtcccaagaaagcaacggcaccgcaactgtgactctcttctcatcatctcaatctacatcaagtctatcctctcgcgctcagtcacccgtcaactcacctcccaagaagatcaagcgtgttccagcacccctggttctggcgaaggagattcaaattgagccagcgctgaagagtggaaggagcctccgagaactcaagccaccggtcagcccgcacgcaaatctcctccgcggcatggagatctctgcaaaggatgttggacctatgggccaaaggaggagcatgctcatgcccagcccaagcgcagttggtgtggcgttctgaagttctcgcttaccaaggatagggaaaatagacggaaaatgagagcaaggctgggatgcggaaaatttccggttttttttttcgcttcttttggcaaccaagacatataccctccgcttgtcttacccctgccgccagtctcgcgtctaggagtggcacggatgtctttgttgcccttctcttctttagtgagcgcagactcactttgattatatacccttttgtagctatttattgtagaagtgtagagttaaggatttaatggaatggagagtttatcg

SEQ ID NO: 13236 - DNA, 1293 bp, Oryza sativa
  ref <308>: DATABASE ACCESSION NUMBER: AK110584
  ref <309>: DATABASE ENTRY DATE: 2001-12-06
acggagcaccgagatttctcgtggcgatcgacgaagaaacgaagcacgagagccgcgcgccacgaatttttttttagcggagaaaaaaaaatggttgtggaggaggccgtcgtcgcggccggcaatgagatgagcctgtccaacatggtgctcgggttctacgaggaggccgagctccagagctcgccgccgggagactgcgccgccgccgccggtgacgacgacgacggcagcgacgacgaggggtccggcggcgccgccaagtgcagggcgttctggaaggagcagcagtcgcaactctacgaagcgctggccaagatgagctcggcggagagcaggatccaagcggacgcggaggaggccatgaggcagatgcgcgcggcggcggcgggcgcctgctcctgcgcgagccgcggcgcggcggcggcggcggcaggcagcggaggctgccggagctgcacgctccggtttctcgccgagcggctgcgcgacgccgggtacaacagcgcgatctgcaggtccaaatggccgcgatcgccggaaattccttcaggggagcacagctacgtggacgtggtggcgccgaccaggagcggcaaggcggtgcgggtggtggtcgagcccagcttccgcggcgagttcgagatggcgcgcggcggcgcggggtacagggcgctggtggcgtcgctgccggaggcgttcgtcggccgcgccgatcggctgcgcggcgtggtgcgcgtcatgtgcgccgcggcgaagcagtgcgcgcgggagagcggcatgcacatggcgccctggaggaagcagcggtacatggaggccaagtggctcgccacgccggagcgggtcgcgccgcccggcaacgccggcggcgccggcgacgcggtggcggtcgggtcgccgtcgtcgccgctgtcgccggggatgacgaacaggcagatgcagcccaagttcagggcgtccatgctcacgctcgacttcggcggccggaccgccgtggaggtcgtgtgagctagcgatcgatgggtgagaagttgagaagattgttttgattttgaattttttgttttttttttggtatgtgcacgcgtggttttgaccttgttttgacttctgaagaacaaggcacggagcagctaggctctgaaattgtgaggattatgtaatgatgaggatatatagcttggccattttggtaaatattttatattgaagaaatttaatagggaaaaaagaggaaaggcaatgcatatttttccctgtggagctaataaaagaggaaaggccatttcc

SEQ ID NO: 13237 - DNA, 1274 bp, Oryza sativa
  ref <308>: DATABASE ACCESSION NUMBER: AK110585
  ref <309>: DATABASE ENTRY DATE: 2001-12-06
accttaggctctgtgctgtttgaatctgctgtttgggcaatacccagctgaggagcaagatggcagccacaatgaagcgtgcctgctttgctagcggtgttgctgcacccagccgtagcaggaccgtccgcgtgtgctgtgccaagcaggatgctcccagcaaggtgcagggcgctctcgcagctggtgttgccgctgtgctcctctctgtggcacccgcacatgctggtgtgattctggagcagccacagatcaagaaggtgctgcaggacaccactcctgctgtcccagcacctaagagggagatcatcctgccaggccagcgcagcaagtctgcccccgcagcagctgccgcctccaaagctgcccccgcccccagggtggctgagaccagcggcagcgacctggacccacgctcagtggcactgccaggcaccattgccctgattgccggtggtgcgtttgccctgtcaaagctggacgacggcttcggagagttcatggactccgcatcatgcaaggactccggctctgatggtgccggctatgagaccgacctgaagactggtggcgcccttgccatcaagaaggcgggaaccagcaaggccagcagcaaggcaggcacaaagaaggtcaaggcagcaaccaagagcacgagcagccccctggcctcattctttgacaagtaaacgctcccaagacgggttcaaacttgttccgctgtgcgaggcaaatgcagagcttgtgtggatgtgcactgcagctgcagcggctgtaatgctgcctgcttggcggcgaggccgctggactgcaggagagggcggaggtttgagccttcggccttttccgtttttgtcagcggcatgcgcgtcgctgctggggtgtggagagccgtttggctttccccactgtgcggtgcatgcaccctgctgcatttgtgctgcacggtagacgtgctgcggggggatttgagctgggacttcaggcaggctcaagcctcacgcgtttgccatgtgtgtggcctccgccagctgcttcaactggggttgctgtgtggattgctcgtggtgctgctcgtggtgcgtctgcagcagcaggcgccggccttctcataagtttgtccactacagcgcctgtctagttgtgatgcctgctgagcagtgtaagcgtgttgccagcacaccaaggtgtgctgtgctgcgtgtgctgtggtgatctgggggtgaagttgtgttgacgtgtacttcaaacacacctgtaagtgtaggtgccgt

SEQ ID NO: 13238 - DNA, 1210 bp, Oryza sativa
  ref <308>: DATABASE ACCESSION NUMBER: AK110586
  ref <309>: DATABASE ENTRY DATE: 2001-12-06
tgagtaggagggcgcggcggccgccgcaaaacccggggcgcgagcccgggcggagcggccgtcggtgcagatcttggtggtagtagcaaatattcaaatgagaactttgaaggccgaaaattttaagtaaaacagattctaaacaacgtgattaatgctcaagggtgctcgctataacaccaactccttgtacagcgtctccaaggctttcttcggagtcaatgaaaaagttatcaagcaaagaatgaagtcagtcggtaatatccagaagatcaccaaggcaatgaagatggttgccgcatccaaaatgagattggatcttatcagactcgaagccggtaagagtttcggtcttacaacctcacacaacatcttcgctaacgagagttatctccagaagaagcaattgagctttaatgttaagaaaagccttttggtccctatcacttcagatagaggtctctgtggtggtgtcaattcttccattgtgagagaagtcaagggaattgttgctcccaaccgtagcgcctacaaaatcttcgttattggagagaagggaaccactgccctccttagacctttccctgactgcctccactcttccgtcagtgaatgcctttacccaatgaactttacaattgcttcttcactcgctcatcaagtctgccaagctgccgaagaagaacaatgcgataatcttgtcttgatttacaacgaattcaagtccattattgcctctcaggttaagagactcgagatcttgaatagaaagaacttcttccaacaattcaagtacgtcgttagacacgacactgaagaacctgacagagacttctctaagcaatattactatgacctctatgttaccagtcaggtctatcacgctttactccagaacgctgcttctgaacaaactgctcgtatgaatgcaatggaaaatgccagcaagaacgccaaagaaatgattgagaaattgaacttgacttacaataaagcaagacaagcaagaattaccatggagctggtcgaaattatttccggtgccaacgccctctaaaagctttgatctgccttctctttattttcatatagagactttgctaaagtttatgggtatacataaattgattagagaatctttggtggaatagtttttaacaatctagtctaggagatcacgcctactaataaatttacatctaacatcaag

SEQ ID NO: 13239 - DNA, 1042 bp, Oryza sativa
  ref <308>: DATABASE ACCESSION NUMBER: AK110587
  ref <309>: DATABASE ENTRY DATE: 2001-12-06
caattttgctttgcttgcttctcgccgcgatcgcgcgccatggcggatccgttcccggcggcggcgcgcggcggcgagcagggtggtggcaccgcggggcagctggtgtcgacgccgtccaggttgaggacggcggtggcgtccatgctcaaccgcaccggccacgcgcgcttccgccgcgccgcccccgtcgtcgtgcaggaggaggaggatgaggcggcggcggcggcgagggatgcggtcgtgcggtgtgacgggctcagcgcgtcggccagctcgtcgttcccgtcgtcggtgacgggggtcaccggcgatgggagcgtgtccaacgcccgcgcggtgctcccggcggcaggcgacggcgacaagccgccaccaatgcagtctgcttcagattatgcttctgatggccgcctcaaacgcagcagcgacgacgacggcgagcgctgccactgctccaagaaaaaacggaaggcgtcgtggagggcgaggcggcgcatccgcgtgccggcgatcagctcacggaacgccgacatcccggcggacgactattcgtggcgcaagtacggccagaagcccatcaaaggctcgccttatccacgcgggtactacaagtgcagcacggtgcgcgggtgcccggcgcggaagcacgtggagcgcgaccccggcgagccggccatgctcatcgtcacctacgacggcgaccaccgccacggggaacccggccatcgacgtcccgatgaggcggcaacgacgacggagcacaggacgactgaccaaactactggaagattgctctagatagtagtgtctatgcatgtagactctataatctatatatagaaacaaactaatctaatcaattgaccgtttgaatattggttaatttcttagtgctctttcatgcacgtagtatttgccaattgccatgtacatcatatctagtttagactattgactgatgtgatatccatgtaattgatctgctacctccctcactctcttgattaagtatatgatggttgatatttccatggttttt

SEQ ID NO: 13240 - DNA, 1628 bp, Oryza sativa
  ref <308>: DATABASE ACCESSION NUMBER: AK110588
  ref <309>: DATABASE ENTRY DATE: 2001-12-06
aatcactgttgttctgctctctctaatatggtgcccggactactggagcccgagagcgtcactgttgccgaatcaccaccgtcgaaaaagctgaaaactgcggcagcacaaagcatccagatagacgacgaggacgtagcgacagcgcttccttcacatcatctaggtgtgaagcccgccgggaacgcctataccgcatctgagaatatcaaatcacgatgcggctcattcgccaggctgcccgatgagcttctgagccacatccttgagtcattcgatgctgatgctcttgtacgtcttgggagcacttgccgggccttatatgcatatacgcgtctagatgagctctggcgagctttgttcgttagtaacccaccatcagatttcacctggcgcggcacatggcgggcaacctacctcaacattccttcaacaaacataacctccataccctgccacaacctcttctccgacatcctctaccgaccctttcaatgcgctcacacatctctcactcccttcgtcactaatattccatcctccaacaccatcgcccgtctctctgatctgacccccgaagactatgcatccaactggaccgacaagcccttcattctcaccgaaccagtcaaaaaatggcctgtctacaacacgtggaccccttcctacctcctcagcaacttcccttccataaaattccgcgccgaagccgtcgactggcccatgtccacatacatctcgtacatgaacgcccaatccgacgagtcccccctctacgtcttcgaccgcgccttcgccgaaaagacctccatcgactcttccctctccgacccagccaccgccgcatactcctcccccgcagccttcggatccgacctcttcgcgttgctaggagaacaccgcccagacagtcgctggatgatcctcggccccgcgcgcagcggctcaacattccacaaagaccccaacgccacatccgcatggaatgccgtgctaacaggaagtaaatactggctcatgttcccctctggaccaaacatccccccgccaccaggcgtcatcgtttcagacgatcagagcgagattacatcgcccctctccatcgctgagtacctgctcacgttccatgctcttgcacgcgccacgccgggatgcaaagagggaatatgtcatgctggcgagatattgcatgttcccagtggctggtttcatcttgtcttgaacattgaggagagcctggcgctcacgcagaactttgtgccgaggaagaagttgcccgatgtccttgggttcctgagggatcagaggaatgaagtgagtgggttcagggaagaggtgtgcgatcgggcatatgaattgtttgtcgagagactgcaggaagaatgtccagatgtattggaggaggcgcttggggagctggagaagaaagggaagagtaagagggggaaatgggaggagttgacgaagggggatggagaggaggaagagagtgggggatttagttttgggttcggaggggatgacgatgacgctgatattccttgagaggaaaattatgggcgcccatgagttatgtgtaagtggtagatatatctgctcattgtcacgaaagaacgctacttgacatg

SEQ ID NO: 13241 - DNA, 1552 bp, Oryza sativa
  ref <308>: DATABASE ACCESSION NUMBER: AK110589
  ref <309>: DATABASE ENTRY DATE: 2001-12-06
cttcgagattaattaggaagctaagatcgccatggcttcctgctgcggcggtttcatggagaaggccaagccctacttcgccatgatctgccttcagttcggctacgccggcatgaacgtgatcaccaaggtctcactcaaccatggcatgagccactacgtactcgtcgtgtaccgccacgccttcgccaccatctccattgctcccttcgcgctgatcctcgagaggaaggtgaggcccaagatgacgtggtcgatcttcttccaaatcttcatcctggcgctactcggaccggtgatcgaccagaacttctactacgccggcctgaagttcaccggcccgaccttcgcctgcgccatgagcaacatcctgccggccatgaccttcgtcatggctgtcatcttcaggatggagaagctggagctgaagaaggtgaggtgccaggccaagatcgccgggacgctggtgacggtggccggcgcgatgctgatgacgctgtacaagggcccgctcatggagatggcgtggagccggcacgccggcaccggcgtggcggaggcccccgccgccgccgccgccgccatctccggcagggactggttcctcggctcgatgttcgtcatcgtcgcgacgctcgcgtgggcgtccctcttcatcctccagacgcacaccatcaagcagtactcggcgcagctgtcgctcaccaccctcatctgcctcgtcggcacgctccaggccgtcgtcgtcaccttcgccatggagcggcgccgcccctccgtctgggccatcggcttcgacatgaacctcctcgccgccgcctacgccggcatcgtgacgtcgagcatcgcgtactacgtgcagggcttggtgatccagaggacggggccggtgttcgcgtcggcgttcagcccgctgatgatgatcatcgtcgccgtcatgggctccttcatcctctccgagcagatctacctcggcggcgtcgtcggcgccgcgctcatcgtcgtcggcctctactccgtgctctggggcaagcacaaggagacccaggagaagcaggctgacaccaagctatcactgcccacttccaaaggcgccgccgccgctgcggaggcggaggagatcaccggcgccggagaagacgacggcgacggcgacgatgacgcggagcgcagcaagaaccaccgctcgagtggtggcgtgaggtcatcatcggactccaatggacatggagctagtgcggtttgatggacacctaactccccaataatttggttgcggccgtcgacgcgtcgacgcgacggcgaccgtcgccatcgccatgcgtgcgtcgacgtcgatctctccgctttaagatatccgaactgttcgtctacggcgcgtgcgctacgacgacgatggcactaagggctcgttaaatttggaaatggaggtttttgtttggtaggaaatttttgatgaacttttactgtgttaatttccctgcaaaatgtaagcgtttgtcacctcgtcagatgttcagaatggtggcatgcatatctctgcttttttttt

SEQ ID NO: 13242 - DNA, 1003 bp, Oryza sativa
  ref <308>: DATABASE ACCESSION NUMBER: AK110590
  ref <309>: DATABASE ENTRY DATE: 2001-12-06
tgatgttccttgagggtttcagtttccccagagctctgtctggtatgattgctgtcgtcgccattcagcgattcgtcttcaagctcatcatcactctggcattgactcgagaattcaaggccgacaccgccaacattgcctggtggaccggaaagtggtataccatgggatggcacaccatttctcagcctggtcgtgaattcctctgcaagatcactgaacttggtttcttcgctgccgatttcattctcggacacgtcctgcttttcttcatgctgccaatactgctcatcccctatgccgacaagttccactcagtcatgctcttctggctccgaccaagtcgtcaaattcgccctcccatctactcgctcaagcagaccaagctgcgcaagcgccgtgttatccgctacgccatcttgtactttgtcattctcatcgtgttcctctgcttgatcattggccccattgttgccgccaagttcattcagatccccaccagtcttgccaactctctacccatggagattttgcagcctactggttacaacaacaacgatacgaccacaagtacaactggccgatgtgtcaacggccaagagtgcccgcaatggcaaggcaacaatgccgactcgacaggaggaggtggtggagctgccgctactaccgcagccgcacgccgcttccgccgatacttggcatactaaaagtacaattcgttgatccttgtttactaccttcgcaccttgcattgtacaacacgggcgaagcatgaacgtgtttacttggtttgggtcccgtaatgactgtaatattcggctcgagcattttatcttgtctttttgattgggcgtttagcggcgggaatggaaacatccattgacctgctttctctctttttgaacacttgtgtctgctcttagagcattcttgactggcacatacactacaatgggggttgttttggttcatcatgggcaggcgaatacattagaaagtgaat

SEQ ID NO: 13243 - DNA, 872 bp, Oryza sativa
  ref <308>: DATABASE ACCESSION NUMBER: AK110591
  ref <309>: DATABASE ENTRY DATE: 2001-12-06
aaagtggccgtcttcgctcctgacaccttcaattcaccacctccacattcagcatcagcccatccggaacttctgaggcacacgacggtcaagatgcctgtttttgacctcaagaagaacctcgtcttctacggcgcataccaccgtgagcccaccaatgtcgccatccacatcgcctgcgttcccgttctcctaggaacaggaatcctcttaggcacaaacacaccttccctgaaaacaccggcccttctctcccacctcaacctccctctgaacctaggcaccatcgccgccgcaacctacacctcgctctacctcctcctctcgcccaacgccgccggcgtctccgtcagccccctcatcctcggcgccgccgcgctcgcaaatcgcctcagcagcacctacacgcgcaccaaagtgaacagcatcgcgttggctgtacacatcgcgagctggatcgcacaattcgtgggccacggcaagttcgaaggacgaaagcccgcactgctggataatctcgtacaagcgctgtttttggcgccgctgttcgtgtggtatgaggtgctgttcaagcttgggttctataagaagttacaggcggaggtacagagggggattgaaagtgaggtcgctaagttgaatgcgaagacagagtaagggagacttgagcggagatggtgcaaattgaaaagggagctgggacgtaactgaaggcttcggcgtagggcgcgccgtaaagatacatggcatcttgcgggatggtgtatgcgcttgtggtagatgggatcctgggcggatcgtgtttcgcatggtgttgaccgaagaagaattttgaattatcaaacgagctcaattaaataagttctgtactc

SEQ ID NO: 13244 - DNA, 2171 bp, Oryza sativa
  ref <308>: DATABASE ACCESSION NUMBER: AK110592
  ref <309>: DATABASE ENTRY DATE: 2001-12-06
tctccaccagcaccgcattctacgtgtgctttcacccaaaggccgtttgctgttccagagtgtgcagctactctgttaccttggttgtccaagagcaaacgttttcgataccagcccgcccaccagtcttgagtgccgttacccgttgggcacctcaccacgccctgcctcaggctgaccctcataacaactccaccaccgcccaggtgacgcgacaaacacgccccttcaaccacaccctcagcccaggacagcctccttaaggttgactctctgataagcatgacgacaatggacctccgcgtcggcaacaagtacagaattggccgcaagattggcagtggctcttttggtgacatctatctcggcaccaacatcatctctggtgaggagattgccatcaagctcgagagcgtcaaggccaagcaccctcagctcgagtatgaggcccgtgtctacaagtccctcgctggcggtgtcggcatcccatttgtccgctggttcggcaccgagtgcgactacaatgccatggttttggacctgctcggcccgtccctagaggatctcttcaacttctgcaaccgtaaattctctctcaagaccgtgctactccttgccgaccagcttatctctcgtatcgagtacatccatgcaaaatcgttcatccaccgtgacatcaagcccgacaacttcctaatgggcattggcaagcgcggcaaccaggtcaatgtcatcgattttggtctggccaagaagtaccgtgatcccaagacccacttccacattccatacagagagaacaagaacttgactggtaccgcccgctatgccagcatcaacactcacttgggtgtcgaacaatctcgccgtgatgacatggagtcccttggatacgtcatgttgtacttctgccgtggctcccttccctggcagggtcttaaggcggccaccaagaagcagaagtatgaccgcattatggagaagaagatgactactcccaccgaggtcctctgccgtggcttccccaacgagttcgccatctacctgaactacacccgttccctccgcttcgacgacaagcctgactactcgtacctccgcaagatcttccgcgatctcttcgtccgcgaaggcttccagtacgactacgtgttcgattggaccgtatataagtaccagaagaacgcccaggccatcgcccaggctgccaaccagggccagggtgaggaggacgacaagggccgtggacgccatgtcaccaccactgccgctgctaacgctggcactgctgcaggcaccaagcgcggaccggtcaatgcacgccaggagggcaccggaatgcagcttcgttcagccaataagcgtggtggggatcagtatgcttctggcggctactgatttatgatgcggctttcgattcgtcatctcaactctcttgcgtaaccggctcatttcgattcggcttcgcacaacgaatgggaaatgcggcaccgccgtcctggtaacattatggacggcagccgttcctactcgatcatcagctcacgggattttttgtcgattacctagtatcggacctggcaggactcgttggcgtcttgtcttcatcatggccatgggttatcgacgattattctgaatgtttggaggcttaactttcgtggtatttccttcctggagtatcaatttcgctggcagcatcttcatttgacatattgatacgcgccggtatcctttggacaaccaccaatgtttgatacacctttacaggaggcctccggacgatgactgatccttgtttggttttctcggctctcatctcgcattaatccccctttgcccctgtgtttttgtttcttcatctacgtctttccttcgtgcgtttcccccttccggacatgtctgccagcttgtggggaggttaagcttatcaggggatggttttatctaaattgcaaatgtaactcgaaagagtgtaaagctgggctggtagactggaagggtgctttgaaaatagctagtgccatggaagagcttctaatgagaggtcacttctggagaaattgagggtctggcttaccaccattgcgctcggagacagtatgactggttgtgcatggagtttcattttagcttgcgtgctttagtaatggatttccttctctccccct

SEQ ID NO: 13245 - DNA, 1195 bp, Oryza sativa
  ref <308>: DATABASE ACCESSION NUMBER: AK110593
  ref <309>: DATABASE ENTRY DATE: 2001-12-06
acacaacacaccatcatcatcttcatctcctacctcctctcctctcctctcctcttctccactacccaacttttgctcccaacacatctttgtttcgatcgaccgatcgatcagctctagctcagccgctactcctacgtcaaggagaagcgcctcgacgccggcgacgtcgtccacttcgagcgcgtccgcggcctcggcgccgccgaccgcctcttcatcggctgcaggcgccgcggcgagagcgcgcccgcgccgccgcccgccgttcgcgtcacgccgcagccgcctgccctcaacggcggcgagcagcagccgtggagcccaatgtgttacagcacgtcgggctcgtcctacgaccctaccagccctgccaattcatatgcctaccatcgctccgtagaccaagatcacagcgacatactacacgcaggagagtcgcagagagaagcagacgccaagagcagcagcgcggcgtcggcgccgccgccgtcgaggcggctcaggctgttcggcgttaacctcgactgcggcccggagccggaggcggatcaggcgacggcaatgtacggctacatgcaccaccagagcccctacgccgcagtgtctacagtgccaaattactggggcagctagttgatgagatgatgaggagatctgaggcctttgcttgcagaatcctaaccaccaacagtgaaactagttactactaccaccagcctactactactacactctgaaccaagtgacaggttcgattgaattgacctgttggaagggaaaaaagaagaaggaagtggggggagatcccttgtttcccgggcaatcttccttccatgaatcatcagagtgccccttttcctgggttttttttacattcttgtcttccagaaaccctacttacagtacgggggcccttgcagcaggtggggaggtttcaggaaacatcaggttgaaaaggagagggaggagagagatggtgacacaccatgagaaacaaacaggagagagagagagagaggaaaaattgacatgttttgcaagtatgtatgtgtcatctgtagtatgtgactgtgagtgggtccatgaacaaactgtgaagttgatgtatccttctcctgctgcctcccctgaacctgaagaaacaaagtaataccccaatggggattttgttctcttccccttttcttctacc

SEQ ID NO: 13246 - DNA, 879 bp, Oryza sativa
  ref <308>: DATABASE ACCESSION NUMBER: AK110594
  ref <309>: DATABASE ENTRY DATE: 2001-12-06
aaaatccatatgccgccggcgccaccatccattcccccaccgccaacatccctctcctcctcaatccatcgcgccgcccccagccacctcttcgcctttccccgtgtcgctcccccggccagggaaggacggtggcgagcggattcgccgcctcccgtcctcgggagtgacggcggcgcatgaatccagtggcctccgtactcgggagcggcctggcgtgagcgggagcaccggcaacacacggatccacccacctccgccctccggagcggcggcggcgggcttaggtaggcgggagcgagcggctacggcggcggcggctgcggcgacgacagctacagtggctgcaacgacggcgacgacagcggcgacgctagctgcgacgatgacgatgacgatgaccagcggcggccggcgacttgcaatcgagaggcgggcaggtggcgcgggccgcgggggcacgcggcacggggcaagggtgcagggcagcaggccagcggcgcgtcgggatctgggtgagggtaacatctcccttgtcgagttgggaaatcggtagaagagatgctggctttcgcggatccgtgcggttgatgtgttgctttcaccagatctggtggtttattggggtattctgttggtgcttgattgctgctgctgctggagtgatttgtagccgagataaagacgacgagtagaggattcagttttgcaggattcacaacctctctcgtagacagtttttcgtgtgaatcagtcttgaaatggagtagtgattagcaattttttttccattctcctattgatccttcctttgtgaaaattagagcagtaattagttctgattgtttctgacagtcataattagtacttaaaatttat

SEQ ID NO: 13247 - DNA, 890 bp, Oryza sativa
  ref <308>: DATABASE ACCESSION NUMBER: AK110595
  ref <309>: DATABASE ENTRY DATE: 2001-12-06
ccctggacgatccgcagcagaagtttctgctgcgactcatccagaacaacatcgccatctacagtcctcacaccgccgtcgacgccacccctggcggcctcaacgactggcttgccgacgccgtcacctcgtgggccgcggaatcaggaatcacttcgacccgcaccaccgccaaacccctctcgggccccgcccccgccggcttcgagggcgccggctacgggcgcgtgtgccgctacaacgagcccgtgccgctgaacggcgtcgtgcgcgccgccgcagcgcgcctgggtggccagcggtacgtgtcggtcgccgcgccccgcgtcgggctcgagacccaggccgagcgcgccacgcgcctggccgccgtcaaggtgtcgtcggtcgccgtctgcgctgggtccggtgccgacgtgttgcggggcgccgacgccgacgtcatcgtcacgggcgagatgagccaccacgccgcgctgcgtctcgccatgctcggcaagtatgtcgtcaccgtcttccacagcaactcggagcgcgcgttcctgcgcgaggtgctccgcgagaagttggccgcctccctcagtggattgtacgccggcccgccggtcgaggtttttgtaagcgaggccgatgccgacccttacgagatttgggacgtggagactctggtggtgtgagggcatgtctctgcgttggagactgcaaaggagcccggagacggcgaacagctccatgttttcgagatgaacggattgaacaggttcaaagacactggagcactggctgaacgatgatggagttgggccttgcaaggtgatctcgtgagtttcgttttcaattggggtataatgctcgtggctccctgtttcaaggcagtccaacacaagatg

SEQ ID NO: 13248 - DNA, 1272 bp, Oryza sativa
  ref <308>: DATABASE ACCESSION NUMBER: AK110596
  ref <309>: DATABASE ENTRY DATE: 2001-12-06
actcattccattccatcaaccccttcgctagtttagccaattaagctaatcagcccctcgaaacctcacaaaattaacaaccagtcccttctccgatccgttagccttcgtttttctctttagtgtgtgtgtgttgcgtttttgcaaatacacccctgagtattattattattgggtaaaattgatggatctcgcgacgacgccggcgcggcggcccatggaggccgggatggcgcggcggctgtggcacgtcgtcctcgccgtgtgccacatgctccggcgaggcctctgccggaagcgcctcatggtggacctccacgtcctcctcggccgcggcaagctcgccggcaaggcgctccgcggcctcctcgcccaccacgccgccgcggggcacggccaccacctcgcggcgtcgtcgtcgtcgtccgccgcgctggcgtcgttctacggccgccgcccgcgggaggtggagttcagctgcaccaccacgccgtcgtcgtacccgcactacgggctgttccccttcaagagccgcggcggcggcggtggccgccgcggcggcggaggcggcggcgagtatggcggcctcgacgcggcggcggtggcgcgggcgttcgagatgatgagcgccgaggtggaaggcacgccgtcgtcgtcggcggcggcggtgcagggcggcggcggcggcggctgggccaccgcgactccgtcgccgatggtggcgtggatcctggggcgaagccccgccggtgtccggccgctccgcgtcaccgactcgccgttccccgccgtgccggagaacggcggcggcggcggcggcgagcagcgcgtggacgacgccgagttcgaggacttcatcaacaagttctacgagcagctgcggatgcagccgtccgccgccacgccggactgccagctgcgccgccgcggcaggtagccggccggcggcggccgtgctccctagctagctcgatataccaccgctggcgttgctgcggcggcgccgtcgccggcgccgccaagctctagcatgcgcgcggcggcgacgtggcgtgagcttgtacgttcgattgtgttgttgcatgcatgcatggggcgatggcgatgcggatgcagcggaggattctacatacttggcagcgtatacgagcgttcgtacgtacatacgtgcgtacacgaattaaattgttattataccatgatattggtgtctggctacatggggagtatttttcatgcatttgtatcaaatttgagatcgttttcgtcgcc

SEQ ID NO: 13249 - DNA, 1311 bp, Oryza sativa
  ref <308>: DATABASE ACCESSION NUMBER: AK110597
  ref <309>: DATABASE ENTRY DATE: 2001-12-06
aatgcacaacggcggcggcggcggcggcagcagcaagtgatcttggcactgttcgttcttgtgattcttgtcctgtctcttccggcagcggcgagcgcgcggcgagcatggtcgacaaggcggctgtgtggctggtggtgatcgcgctcgccgcggcggcgaacggcgcgttcgccggccgcgtcctcgaggagcagcctgcggctgcgccggcgccggcggaggctcctgtggcgccggtcgacccgctgcccgcgccgaccgacccgcccgctgacacggtggtagcccccgcggccgtgccagccggtggcgctgccgcgacgggcaatgcgggggtgggcgcggctggtggtggtgccggcgcgggcgaccaccaccagctgacgttcttcatgcacgacatcctgggcgggtcgcagccgtcggcgcgcatcgtgacgggcgtggtggcgagcgcggcggcgaacgggcagctcccgttcgcgcggccgaacgacaacatcttcccgatccagggcgcgatgccgctgccgcagggcgccagcaacctcgtcaacggcaacaacgtcccctacgtcgccggcctcggcggcacgtcctccgccgccatcgtccagggcaacggcaacggcaacggtggcaacaagaacatccccttcgtcaacgccggcgacctgccgtccggcgccacgctccagaacctcctcttcggcaccaccaccgtcatcgacgacgagctcaccgagggccacgagctcggcgccgccgtcgtcggcagggcgcaggggttctacgtcgccagctcgcaggacggcaccagcaagacgctcgtgctcacggccatgttcgacggcggcggcgtcgaggcgcacggcgacacgctcagcttcttcggcgtccaccggatggcggcgccggagtcccacgtcgctgtcatcggcggcacgggcaagtacgagaacgccaaggggttcgccgtcatccagacgctgcaccccggcgacgagcacaccaccgacggcgtcgagactctcctccagttcagcattcacctcatctgagttgcttccagcttagtagtccattccaaacagtttggccttgcagcttatgctgcttctcagcttcatgaaaatgcttgtaatttcaagtactacgtgacattgtattctaccatgtactagtagttgctttgatcacatgattatactagtattatgtgaggtaacagaagtatctgtctgatgctatctaatagcgaaaattcgcaggacagaattggatgggttaacaaagtataattccatg

SEQ ID NO: 13250 - DNA, 1269 bp, Oryza sativa
  ref <308>: DATABASE ACCESSION NUMBER: AK110598
  ref <309>: DATABASE ENTRY DATE: 2001-12-06
ctcgacgccatctgcgccgcgctgagtcccgtcaaccatgccgcagcggtggcgctggccagcgtgcccgatgagatccgcggctacggccacgtcaaggagaagggcgtcgccgaggccaagatcgtgcgcgaacaacgcctgcaagcgtttcgcaacccgcaacccgaagagcggccggcgtctcagtcggtggccggccgaacgtcatgaggggcttgtccatggtcagtcccgcagggcctgcgctactggcggcagttcatcgaaacagaacccgtagccagaaagcgaagcgatgatctctgggaccttaccgctgccctcggacgccgacctcaggcggttggttcacttctcggccgatgatggccgaatctggctggccggacagcgcatgctactgatgcacgccgcaggcctggccaacttgcggtccgagttggtcaggactgttggcgtcgcaagcacccgccgagtcttcatgcgctccggcttcgcctcaggcgaacgcgatgcggcgctggcacgcgaggttcggccgcacgccagcctgctggacgcgtttgcggtggggcctcagctccacatgctcgaaggcgcggtaaaggtcacgccgcagcgcttcgaactggaccaggaggcgggccactacctcgggatctaccgctgggaccattcatgggaggtcgatgcgcacctgcgcgacttcggcatccagaccgagcccgtgtgctggatgctcctgggttatgcgtcgggctacacgggcgcgttcttcggccgcaagacgtactacaaggaggtcatgtgtcgaggctgcggcgcagaccattgcctgatcgagggacgcttctccgacgagtggccggaccatgcggacctcgccgaagactatcaacccgagtcgatgctgcagcatcttggtgatctgcgtacacaggtcgacaccttgcgcagccagatctgtgcggaggacgaaaacggtccgttggtcggcagttccgcgtctttccagaccgccgttggactgcttcacaaggcagccccgacacgtgtggccgtactgctcagcggcgagaccggggtcggcaaggaacgattcgcccgcgccatacatcgcatgagcccgcgcgccgacaagccgttcgttgccgtcaactgcgccgcattgccagccgagttgatcgaaagcgagctcttcggcgtcgacaagggcgcctacacgggcgccacgagttcgcgcgcgggtcaaaaaaaaagaaaaag

SEQ ID NO: 13251 - DNA, 853 bp, Oryza sativa
  ref <308>: DATABASE ACCESSION NUMBER: AK110599
  ref <309>: DATABASE ENTRY DATE: 2001-12-06
ctcggcgctcatcatctcgaacgcccgcgccaccgccgccgcgtcgaggccgccatactcgccgccgcctccgccgccgcggcggccaccgccgccgccgcggctcttgaaggggaacagcccgtagtgcgggtacgacgacggcgtggtggtgcagctgaactccacctcccgcgggcggcggccgtagaacgacgccagcgcggcggacgacgacgacgacgccgcgaggtggtggccgtgccccgcggcggcgtggtgggcgaggaggccgcggagcgccttgccggcgagcttgccgcggccgaggaggacgtggaggtccaccatgaggcgcttccggcagaggcctcgccggagcatgtggcacacggcgaggacgacgtgccacagccgccgcgccatcccggcctccatgggccgccgcgccggcgtcgtcgcgagatccatcaattttacccaataataataatactcaggggtgtatttgcaaaaacgcaacacacacacactaaagagaaaaacgaaggctaacggatcggagaagggactggttgttaattttgtgaggtttcgaggggctgattagcttaattggctaaactagcgaaggggttgatggaatggaatgagtaggattggggggggaggcagaggaggtatttaagggaaggaaaggcttcaagggacccacaaaaacacaacttaatttggaaggaagggttaagtctagtttaattatttactgatagtatgatgctactgttttttctgctgcttggacctgaggctgctgttagcttagctctgttcatattgtcatctttgaatactctgtctttgtttggttgac

SEQ ID NO: 13252 - DNA, 1151 bp, Oryza sativa
  ref <308>: DATABASE ACCESSION NUMBER: AK110600
  ref <309>: DATABASE ENTRY DATE: 2001-12-06
acgagctcctctttacccacacacagactctcctatccggcccctttcactcgtttcaagatgagggccgacctttggctccttactctgttcggcgtcgccaacggcagtgcattgattcctcgccaggacgatatcgaggcggccgccgattacaagcctgacgactccaaagattggaagcccgaagatgacaagaagccgccggtagagtggaagcccatcacgaagtatcccaaatttttcagccttgccattgacgagactcaaattgggtttgatggcagcccaattaccgcggctttaacatgcaacccccttgttacaccggtgaagattggattgcctcgcactgcagtagccgctggactaccttgctacttctcgaactatgctgtccggctctctgatggtaaagccatcgtgacaccgtatactaagtggttcgatccgaagctgcctcttttcttggtagatgatgacaccaaaacttacacggtcagcaaaaagccgtatgagctctacgtcaaccgcgtcagtggcctgctacagtacgcgccagtagggtacctgccgtcggatgcaatcgccacgagcttctacctgctcggagacaacccgctgcgcaacaacgacccttcctcggcctggctgagctggccttcgactcaaggtcgcacgccctctccttggttgctgtgcccgatctccggcactggacaatacgagatttacatcggcaatggtaacttcggcacgaacgaaccacctagtaatcctcttgctgacccactcggtgtgcccgggaacttgataccgaacattaaagttccaccaggaacacccggaggtgtatacaaggacggtcgcaaatgcttcgtcgtctcccttgctgcattgaacgccagtccatggcagtatggaggaggcagtggcccatggtaaatgttatacagagcagacaactggagttactacacatattagttgtcgctctctgtgggttggaagatgtatttcctggcaatgttcctcctgaaacccgacatgtattcctctctcgatgtatcttaggcgaaattgaacatgtagcactgtcttcgcgaacttcgccatacggctttgataataacaattatgctactcctttc

SEQ ID NO: 13253 - DNA, 2313 bp, Oryza sativa
  ref <308>: DATABASE ACCESSION NUMBER: AK110601
  ref <309>: DATABASE ENTRY DATE: 2001-12-06
ttataccgacgtgtgattttagtgccggacggcactatccacgcccttcgtggcggatcgtgagacagcgccggcgaggtgctaccactgccaacatgtcagccaccatcatgcagcagcagcagcagcagatgcagcagctgcgtaggagcagtaaaagcagcaggccgtccagcagcagcagcagacgtgcagctgtggcggtgcggtcgcaggcaccagcagcagcagcagcccctgcagtggcggatgcaccgctgatggtgcgtgcagcaaggggtgaaactgttgagcgtgcaccttgctggatgatgaggcaggccggcaggtaccagtccgcctaccgtgagctggcgaagcgccacccctccttcagagaacgcagcgagacgacagagctgatcgtggacatcagcttgcagccttggcgcagcttcaagcctgacggcgtgatcctgttcagcgacatcctgacccccctgccggggcttggtgtgccgtttgagattgatgacaacaaggggccactcatcgacaacccaatcaggagcacagaccagttgagccgccttcaccccctggacctctcccagctgcagtttgttggcgagtcactgcagcagctgcggcaagaagttggcaacacagcagcggtgttgggttttgttggcagcccctggaccctggccacctacatcatcgagggtgccagcagcagcctgtacaagaccatcaaggccatggcgtactgcaaccccaccctgctggatgccctgctgagccacctggctgaggccatggccgactacatccgctaccagatcgacagcggggcgcagtgcgtgcagatctttgacagctggggggggcagctgccaccacagcagtgggacaagtggtctggcccctacctgcgtcgcatgatcgagtcggtcaagtccacccacccctccacccccctcacgctgtacgccaacggcagcgggggcctgctggagcggctgggcgccaccggggctgacgtggtggggctggactggacggtggacatggcagacgcacgacagaggctgggcgcaaaggcggtgcagggcaatgtcgacccgacggtgctgttctgtggtgagtccgccatcgagtccgcagtgcgcgacgtgctggccaaggcgggcggccgcggccacatcctcaacctgggccacggcgtgctggtggggacgccagaggaggcggtggcacacatgttcaacctcagcaagcagataaaggcagcagagctggtggccgcttgaactgcgccgcagccctgaaccctgaacgttcttcctggcgctgcgctgaacatacgacagaacacctggggtttcgggcgggggtggagggcttatgagggtttttgctgtgtggatgggaggcagggtagatgaatgtgctgcgaatagtgtcagtactgggggcgatggagaggggtgccgggcagagtgctagccatgatggcattttcaagcagggtggctctggcggcagcaggcagctgtgtggcgggagcggcaaccgcagttgattgagtgattaattgattgataccagacatgccatacccatttcaggcatcggccccgctcccaactcccaagcagttgtttgtgcagcggctggcggcagccggtgtgccacagagctccatggctttgacggtgaggtgtgtactgacccacccgattgactaccagctgtacatggggcttgcatttctatcagtgttccgcagggtgaagtgtcctgcggaaggagtagaatctagatctggggtgacagagttctggcagtactggtgcattgcagtgtggctggctgatcagcagagggaagaggctttgatgacaggcagggaggcaggcacggtgtgtgtacacgtccacatgtgtgcatgcgtatgtgtgttttggaagttacacagcggcacttcaaccagcgtttggctaataccactggcaacaccagctgtgtgggcacgtgtgttgagcagggacgggagaggagagctttgcacggctactgtgcagtcgcatgcacacattgcgcatcaacttgctggcctgacagggagaccaggcaaagacatcagcgcgctgtgcagcgtgtgcaatgcagctggtatcagtgtgcgttgcatcagcatgtgcgttgaccagcatgacatagagcatcgatgcaccgtgccatcaaatgtcacctgcaaggcgtcactcagcaaaaagttggaaggcaggttgtgcctgccacgcacaacatgttgtaacaaccagagac

SEQ ID NO: 13254 - DNA, 1248 bp, Oryza sativa
  ref <308>: DATABASE ACCESSION NUMBER: AK110602
  ref <309>: DATABASE ENTRY DATE: 2001-12-06
aactgctttatagatccggagtcccctgaatgattcccgccaattgacttctctgcaatcatattcacaactgcttataagttaccaattgtctaagtaatcaaacaccatggaagtccgcactctctctcccgaagatgtcaagagtgttgctaccagcacagctcgtgtgatccccgccgacgagatcgatgcaacattcaagtcacaatacacagatctcatctctgcgcctctcggctctaaagtcctctccttcagcgacgaatggttcgcggccgccgagaacctcataacgcccactcccccaatccgcagaccaggtgtcttcacacacgggcgcatggtatgacggctgggaaacacgacgacacaacaccgagcccgcagactgggttgtattccggctgggtaccgcaagcggcaaggtcgctggcgtggaagtcgacacagccttcttcaacggcaaccacgcgcctgaggttgctgtcgagggcgcattcatcacagacgaggcggaagaggaggcggccaagaaggcagactacaaaggctgggagacgattctagcgaagcaggagtgtgggcccagccagcgccatggctggctgctagaccagatcaccgagaaggcgtacacgcatgtacgtctgctcatgtatcccgacggcggcattgcgcgattccgcctgtacggaaacgcagtgcccgtgttcccgcaggatacgagcgccgtcttcgagctgtcggcgacggtcatgggcggcgttgcgacgtcctgctcagaccagcactttggcacaaaggacaatctgctgctgcctggccgcggaaaggacatgggcgacggctgggagacgaagaggacgcgcggagagcatgtggactggacgattgtgcgacttggcgcagagggtgaaattgacaacattgtcattgacactgcacatttccggggcaactttccgcagaaggtacaggtatatgcaggcagctttgagaaggatcccagtcatgacgatgcggcgtgggtggaggtgctggcgccgcaaaagtcgggcccagatgcggagcacaagtacaaggcggagctgaagcaggtgcagggcaaggcgtatacacatgctaagctggtcattattcctgatggtggtgtcaagcgcttcagggtgtttggaaagagagtctagagattgggcctgaaatgaccacttaggtagatagaaagaaatatctacttgtaggtcg

SEQ ID NO: 13255 - DNA, 1209 bp, Oryza sativa
  ref <308>: DATABASE ACCESSION NUMBER: AK110603
  ref <309>: DATABASE ENTRY DATE: 2001-12-06
aagcgaaaaaccgagtttgtatactcgataaattaagtgactagatggtggacggcagtctgcaccacagccgcgacgctgcagccggatctgtggctgcagcggggggcagcccgcggctgtaccgcttgcgccgcgccgttgcgatgctgctggtgctggcggtgtttcagctgacgcaagggctggtgtccaaacgctccgaacccgcaaccgtcgcagacggcgacagcgcgttgcagtggttgagccctctgtcggactggttttggacgcacccgcacgcgtcgcgttgggtgctgatcgtcaccagcgctatggtcgacttcaccggcttcggactgttggcgtgcggcagcgccggccacagcacacgcgcgctcattggcgtcgctttcatctgtctcatgcggcagctgtgtgtgctgctgattgccataccgactccggcacacacgatgtttcgcgaaaccggcatcccctctctgctcgtcacgtaccagacacagaacgacttcttcttttccggacacaccgctatcagcgtatacggcatgatggagctgccgcgtgccacggcgttccgcaaatcgtcgtcgtcgcgcgcggtcgtgcgcgtcactctggtgatgcacgcagcgctgcaggtgttcacagtgctggtgctgcgcgcgcactactccatggactgtgtggcgggcgtgctctgcgcgatgggcgctgattacgtggcgttgtggtgggcgccggccgttgacgagtggtttgttcgcccaaaaaagctcggccctgagctcgtcgttcaggttaaacaccgcaccgaataggcggatgcgcgtgcgcgcgcgcgcatgtgaccgccaaacatttgcgttgtgtttgcgtgccctctgctccgctattatttcgtcaccgcccgtccaccgtctctgctccgccaactgcccccacaactgcccgctcctatttgcgtgccctcgcgctatcgcttcactcccgcgcccctgtccccgcccctgcccctcagtgcacgcgtcacctatgatcggcgcttaacgccgcctttgcgtttgcatcgccgcagcgctgagcggggcgccgccttcgttcgcctccgaaaggcacttattcgtgccgtgccataccgtaccgtagtgtcgttgctctgtctcgtgttcgaactgtcgcctgccccgtgccgctaccgtc

SEQ ID NO: 13256 - DNA, 912 bp, Oryza sativa
  ref <308>: DATABASE ACCESSION NUMBER: AK110604
  ref <309>: DATABASE ENTRY DATE: 2001-12-06
accgcaccaccaaaccaccgagttccttcgacactactctcatcaaaatggtctctttcaaggctctcctcttgactctggcagccactaccagtgtgctcgccgcccccttcgacttcctccgcgagcgcgatgaggccggcaatgccactgccactcttgagaggcgccagtccaccgccaactcagtcggaactcacaacggctacttttactcgtggtggaccgatggcggcggctctgccatatacaccatgggcgagggctccaagtacactgtgcagtggcgcaacactggcaacttcgtcggtgggaagggatggaacccaggaaccggccgcaccatcaactacggcggctacgtcaacttccaaggcaacggctacctcgccatctacggctggacccgcaacccgctcgtcgagtactacgtgatcgagaactacggcacgtacaaccccgccagcggcgcccaggtgcgcggaaccttctcgaccgatggcggccagtaccaggttgcgctttcgacccgctacaaccagccctccatcgacggcacgtcgaccttcaaccagtactggtctgtccgcactgcgaagcgtaccggcggtagcgtcaacatgcaggcgcacttcaacgagtgggctaagtatggcatgaacttgggtcagcattactaccagattgtcgctaccgagggttaccagagcagtggtaactctgagatctatgtgcagactcagtaaagcggcttcttttagaaactggtagcattggaatgattttggtctagccagtctcttgctgtgttgccgagctttgctgtacacccctagtgtactactttgctctcttttggttgtatatagcttttgtacagagacatagcaatggagatgccctgtcatcttg

SEQ ID NO: 13257 - DNA, 1264 bp, Oryza sativa
  ref <308>: DATABASE ACCESSION NUMBER: AK110605
  ref <309>: DATABASE ENTRY DATE: 2001-12-06
acatttgattttaataatcataaaagaaatatatatataaatcaataaaacgagagaataaatacaaatagaagatgtttgacccattcggcttgaacaaccatatcaactcgatgatgagctcgatgatgatggacccattcatgacaccagctcagcgtcaacgacagcaacaacagcaacaacagcaacagcaaggcggcgcaagtagcaatggaggtcaaatgcgcccattcgacccgttctcatcgcttgccgtgtcaccattcgatcaccatcaacgatcgaacccattcgcactcatgcaccagatgatgggcaacatggacagtatgttccgaccgcatttcggcgccgacccattctcgatggcgggtggcaacataatcaacgcgtcgcccaactcggaggtctactcgtcctcctctatgatcacgtactcgtcgggaggcgaaggcggccgtcccaaggtcttccagcagtccaagcagatgcgtcagggacccggcggcgtcaaggagacccgtgagatggtccgtgactctgagcgcggtattgagcagatggccatcggacaccatatcggcgagcggtcgcatgtcatcgagcgcaagaagactcgcggcggagagatcgaagaggtcgtcaatcttgagaatctcgacgacaacgatgttaacgacttcaacaaagagttcgaggagcgaatcggcgccaagtatcgttcgtcgcagcatcacggcggacatcacagagctcacaatcaccatcatctcaacaataatcacccgctgcctatcgacgactcgagtcagcgatcgaaaaaggataaaagcgtcgaaagtcgtaaaacaaagccgaaacattgattgaatcgcgacgatgagaaatgctgatcggacaattgaagaaaaaaggaacatcggaaaaatttaactttatgttttgtttcttatttttgtttaatgtaattcttaaaactattatttgttatagtatatttattctatattactattataaatcgacaaaaaaattcattattcgttattcggttctaagtatttgactatttgactcaatttttcattttttcaggatttatgtttctttttaacaaaaatatcaaaattgaagcactatttgaaactcttcaatttattccttaattgtaatataaatatatatatataatattggacgtgtttttttgctcgtaattctttaatatatttgactttcaataaaataaaaaagacaattt

SEQ ID NO: 13258 - DNA, 837 bp, Oryza sativa
  ref <308>: DATABASE ACCESSION NUMBER: AK110606
  ref <309>: DATABASE ENTRY DATE: 2001-12-06
gctgcagttgaagacttagtttgtagtttgtgcaggatgcagacggagaagaaggagtctgccggcgccgccggcgagaagccgccgagcttctgtgacaggctccagagagctttccacgcccgcccggcgttccggcctctccgccgcctcggcgtccgccacggccaggacgacgacggtggtggtggtgcgcctggaagtacagtagacatgcagcctgcgacgacgacgacgcacggcggcggcccaccgaggccggtgctgccaccggcggcaggccacgctccggcgcccgtcgtgctgccgccggcggtagtgaaaccggctgccaagcctgcgggcggcaacgctccggcgcctgtcgtgttgccgtcggcgccggctgcaaggccgccgccaccgtcgcgtcgccatgggcatgcacatgcgtcgacgaccgggagcgcacctgccgccgagaaggtggcggcaacgacgacgaggccgccaccggggattccggtgcccgtgccgccgccggctgctgctgctgccgctgatgtcaccaccgccgcggcggacgcgaaggagggcgatggtgacaaggagcagcaagggaaggggaagaccagggtgagctccagagtgcgcaaggccttctcctccaagtagagacacatcacaattcacacatccatggccaccgtagtgtgaagcagaagcaacccaataactaactactgaaaaatatgtaccttgaggactttgtgtgaacctaagtactctatccgttattgttttttaacgtatgacatcgctgaattttaatatatgtttgatcatccatcttatttt

SEQ ID NO: 13259 - DNA, 1169 bp, Oryza sativa
  ref <308>: DATABASE ACCESSION NUMBER: AK110607
  ref <309>: DATABASE ENTRY DATE: 2001-12-06
agcccatgtacagtgcgttccccattagcttgaacaggggcgtgaggcgggcgaccacggctgtgtcgccgccagcgaagatggagagcgtcgccttgcgggccccacggtcgccgccggagaccggcctttatcggccgtgacctcggcaatctccgtggcgagggtggggtcggaggtggtcatgtcgacgagcgcgccgcctggggcgaggccgacgagggcgcccgtggaggggtgagggaggtggagcagacgtcagaggggaagccgaccatgaggaagatgacatcggctgcgacggcggccgcgcacgggcttttcgcgagggtggcgccccggcagcgaggaggtgactggccatggactggcccatgacgttcgtgccggtggtggacgacggtagcaagtggaaggggttggcgactgcgaacgagggaccgggagggaccatcgccggggcggcggcagaggaggaggacggggagagaatcccgatctgagctcgccccctccccccgacgacctcgccgctctcccgccccgatctacggcaccggcatggcgcgatttgaggtgggcggtaagttggtggagggcgtggacctgcttcggtggcggcactgggcgtcgacctactccgtgctctacgcgctctggctggtggtcgtggtcctgacgctcgacttcaccgacgccctcgtcgtcctctgcgcgctctccgcctcccatgtcctcgccttcctcttcaccacatgatccgtcgatttccgggcgttcgtcgagtactccaaggcgagcctccccgcgcgtgcgccgctggggccgagctcgtggagccccttctcgctgctcatgctcccctcccggcagcggcgatatgcggcgtgaagagaggacgagagaggacggaaagagtggcgggggaggacgggaagggtgacggagtggcatggtttcaatttaaaaaagtttcagtggcatctatataatgacgtaaatagcagtgatatttttttatttgtcacatttaccgtggcatacatccaattaacttttttttttttgcacaattgaaactggcaaacatgggaggatgtgttagttgctgttttaatgctatctgatcatcctcttctgcaatgagaaaaaattgaagttcgcagtgc

SEQ ID NO: 13260 - DNA, 1198 bp, Oryza sativa
  ref <308>: DATABASE ACCESSION NUMBER: AK110608
  ref <309>: DATABASE ENTRY DATE: 2001-12-06
aacggcaaagtctcagtgtcttgcctgagcaagccccatagctggagggcagcaaccacaatcccttccatttggccacaggtgtgtgtgcatctagtgcgtgcccagctgcagtatgtgtggcttgcttggcagttgattgttagaccctagatgatgcatgcgccctaagagcaagctgaccaaaagctgctagaggattggggggtgacacctggctgcactgtacaacactatcttggtttgcacgtaaatctgttgtctgatcagagactttgccgcttactgctgtggcagcttaagcacttgctgtaggattcgtccacagtgcttggggaatggttgggacgttggttcactacctaccaggtggcaggagctactgattcctcatggacatgaaaggtgaacatcaaaggtggtgcaggaaggaagcggtgctggaagcatcaatgccgctgccactcctatgccagctatctgttatgaggagcagggatgcccggagcttacataattatgttgtttttctgccgccgttataacggcggcagacgtcgttctccgcgtggcaagagccgtttactgtacatgtgtggccttttttgacaactcaaatgactgttgtggttgcgtgaccagtgcttggcatgcagcagtgttgttgctgtagcattggtcggggtacacaagcagtgcctgctgtgctttcctgggcgctacggtcgtggcctctgcctttggcatgtcatgtttgttggcgacactggaaggtgcaacatgcacttgctctgctgtgtttgtgttggccacgacaagtgacctaggcagcgctggtagctagccacccatgggtagtgttgctgtgaactgctcccagtggcgcatgcttcaaagaatgcattgatcgccaactcagtcacttgcacacgcactgcggcaggctgctggtgctgtgtggccagcgccttgggtgtttgggggcaggcgaggggtggacaatttgcacgttttgctgtgcacacttagggaagggtcggggttggtgaatcaccaaagttggtgactcaccaaaccatggacagaaactgcttggcagcttgcccacgtgggtgcagtgcagtcatgaccaggaataatgttctgtggaaaagaaggatggtgttttgtgcattcaatggttgcagagtaagttgcg

SEQ ID NO: 13261 - DNA, 1606 bp, Oryza sativa
  ref <308>: DATABASE ACCESSION NUMBER: AK110609
  ref <309>: DATABASE ENTRY DATE: 2001-12-06
cggcgcgtgggacgctgagcggttcgggacgcccctgaaacaggttcatgaagacgtcatggcggcgctccggcacgtgggcgcctggcccgaagtggagagcatcaccctccgtgtcatgcatccaacatgggctcgtagccggtccatcgacagcgtgcaggctccgtgccgggctgagcacgtcatgcgtgcgtaccgcggcgtcgcggcctgcgcggtggcgcgctacatgcgcgagacagcagtgggcaaagaccatcatggagcgaggaacagtaccaccacgaagcgcgtgacggtgctcgacgcgtgggtcctgggcatgcgtgcaggagcggcggggtacgaacccgacggccttcatttcggaaccgccctgaacgacttgacgacggacgcgttcctgctggcgtctgtgtgtcctgggcaaccgcatccgacgctggatacgtcgtccggccacggtggcgacgtgtggtggtcgagcgacgctgctgagatcgagcggcgattcgattgcgacgcgtcgttcccgctgactgcggaggcggtgacggaccgcatccagcgcgggccgttgacgattggaccgtgggacgtagcgcacgggacagcgcaggaggtggggtgcatgtgtgaccgatccacagcgacgaacgcagtgcagtccgatcactgctcgctccgcctcatgaccaagccgagtatcaaagcgacggcagcggcgttgttctccgctctctgtccggccgcgtctggcggaaagccttctccaaaagtcgtgggcgcaggcaccagcggcaccttcttgcctgcccgtgccggtgaactgttgctcgaggtctgcgtagatcgcgatctcggtgtcgacgccctcaccagcctcggtttcggcaacgccacgctgtgggctccactgcgttccctttccaaccgttctgaggattatgccagccttggacgctgccacgaagcaacgtcaccaccttcgccgtggtgtgccgcgcagcatcagcggctttcgcagcgccgacgtgatctgttcgtgttgcgcgcggccctgggttgggatggcggtaggactggtggtggcattcgaccgttgcctttcgacgagttcgactgtattgatcgcgagttgtggcgcgccatgatgcttctcgcatgccacccgaaatggcgtgctgagcgatctcaaagtgcactggtgggcatcgctcgtgtgatacgccccctcgatgcaaaggaccccgtccgtggccacatggacacactccgggacgcaatcggacagttcaagttcagttcgtactagatgaccggcgtaagcatctccgatatcagtctgcgcaaagggcggctttgtggtgagcgtctcggtcagaaagtccttccatccatgtaccagcgcgagccaagcagggaggggcggtggtgagaccctgcgcggtacggcaatcagcctcggcctgacagtgcttgtcgccgctgaacgcatttcagattcctggttcgggttgacgtgccctcaataccccatcgggtccggtgacaactagcagacgaacccttcgtcggttgatcaccatagcggccttccttg

SEQ ID NO: 13262 - DNA, 1289 bp, Oryza sativa
  ref <308>: DATABASE ACCESSION NUMBER: AK110610
  ref <309>: DATABASE ENTRY DATE: 2001-12-06
actaattaatatttttaataatatacgaaatctttcgattctagacgaatttaaaacatagcaaaaaaagaaaatgtcggagacacttcgagtactagttactggctcagccggtcaaatcgcctactcgctgctatacgcgatcgcgaacggtgatgtgttcggaaagaaccaaccggtgatcttgcacctattcgatatctcgccaatgttgacggcgatgggaggcgttaagctcgagctcgaggactgctcgctgccgttgctcaaggacgtcgtggtcaccgacaaagaggaggtcgccttcaaggacatcgacgtcgcgatcatggctggagccatgccacgtaaagagggtatggagcgaaaggacttgctcgccgccaacgttcgcatcttcaaggctcaaggtgaggcgctcgacaagcacgccaagaagaccgtcaaggtcgttgtggtcggaaacccagccaacacgaactgtctcatcctctccaagtacgcgccctcaatcccacaagagaacttctcgtgcttgacgcgtctcgatcacaaccgcgccaagacccaagtcgcgctcaagacccatgtcacctcggataaggttaagaatgtgaccatctggggcaaccactcgtcgacccagttccctgacttggctcacgctaaggtcactttgccagatggctcagtgaagggcgcctatgaggccatcaatgacgagaactggatcaagaacgagttcatcccatgcgtgcagaagcgaggcgctgcgatcattgcggcccgaaagctctcgtcagccatgtcggcggcgaaggccatctgcgaccacatgcgagactggtggcacggaactcaaggagacgagtgggtctcaatgggcattgtctctgacggatcgtacggaatcgagaagggactcgtctacagctaccctgtgcgcattgccaacaagaagtggaccattgtgcaaggactcagcgtctctgactgggctcgtgatcttatggacaagaccgcgaaagaactcatcgatgagagaaatgacgctcttgaggctactagcaaatagattgaatattgactcaaccaattgatgatctcttttttgaatgttcatccttccttttctagatctagtagacttttttattactatattgtactgccaattttattcgtaaacttaaaaaaaaactttatattttagattaaatttttattttagtttttaatttttagttgtcttaaaaagatcctagtttaataaaacttgtcgttttctc

SEQ ID NO: 13263 - DNA, 1753 bp, Oryza sativa
  ref <308>: DATABASE ACCESSION NUMBER: AK110611
  ref <309>: DATABASE ENTRY DATE: 2001-12-06
atccagatgcgcttgcacttgcacttgcatgcagttcattgctctagctataggctatagctactatacactcatgagaatctgagattgggctgaaaattgatgagcatcgatctgaagaagacatatatatagctgatgatgatatagctttttctgcatatgcttgttttgatctgcagccaatcgatcgaggcatagagagtcaccaggcaatcaaattccaaccatccatcagctagatatatatacagcaaagatcacgatactcctagctagctagctagaagaattgatcggtcgatcggaggaaatagcaatggatcggcatgaggaggaggcaggagagtctccatgtgtgccgccggggttcaggtttcacccgacggaggaggagctggtgggctactacctcgccaggaaggtggcctcccagaagatcgatctcgacatcatccaggagctcgatctctacaggatcgagccatgggatctgcaagagcgttgcaagtacggtgggcatggcggcgatgagcagacggagtggtacttcttcagctacaaggaccgcaagtaccccagcgggacgaggaccaaccgcgccacggcggcgggcttctggaaggccaccggccgcgacaagccggtgctctcgtcgccgtcgacgagggtgatcgggatgaggaagacgctggtgttctacaagggtcgcgcccccaacggccggaagaccgactggatcatccacgagtaccgcctccaatcaaacgaacacgcccctactcaggaggaaggttgggtggtttgccgcgcgtttcagaagccgatgcccaaccagcagcagcacaggctgtcctacggctgcatccccggcagctacggcgccggagcctacgccgccgtccccgacaactacagcttgctgctgcaccacgacaaccctagcttcgccgggcggccattgatgagcgccgctgcctcagctctcttcgccaacaacaacaataacagcgtcgtcgaccacagcaacattctgagttcagagtccaagcttcacttctccgacatgatgccgcctctggagagccccaccatcgtcgacggcgagggctacgtctcgcaggctagcagctgcgtcgacgtcgatcagcaagccggcatcgtcgactggaacctgctcaccagcttgctgccgccgccggcgcatcagctcttccaccacctgccttccgcttctagctccaagaacagcaacaacatttcttcgtcaggcttcatcgatgaccgagactgatcgatcgatccagatcgattattatcaattgacaattcattcatcatatatatgcatgaattcttacaaatacgcacaattaaacgatcgagtgtactattaattagttgattactccgtctccatgatgtatacattaatttgaccactggccatcatcaggccatctgcatgcttactatctagcttatgtcagtacacggttgttagttcattcttaattaattagctactagtgtcagtgtgtgtatctatcggttgttcgtcttttgacctcattgctgagagaggtttgtaactgatgatgattaagttagctagcatttaattaggtgctatatatacacatatatatgcactatcactatatacatcatatatatgtatacatatatcgttgtctgcttaatgtgtacaccacctctctgcagtatatatagtattgatcaattaatttgt

SEQ ID NO: 13264 - DNA, 1246 bp, Oryza sativa
  ref <308>: DATABASE ACCESSION NUMBER: AK110612
  ref <309>: DATABASE ENTRY DATE: 2001-12-06
atcgaagccgccacggcggcgatgacgcctcccttccgcccgtcgccctccgccggctccatccctcgtggctgcggcggcgaccggtgcgcatccggccgcgacgcctggcccctccaccacgtccgccacgacggcgtcttctgccgcctctgctcctcctgtgtcctgctctatcaccccgccgccttctgctccgcctgcctcctcctcttccctcccgcctccgcctccgcctccgcctccgccgccaccgccgtccaggagccccgcctcgatcccatcctctccccgccgggacctaccgccgcttgctccagctgcggcctcttcgtcgcgcaccactcctgtgtcccagactctgcctccttcgtctgcccctcgtgcgccgccgccgccgagggcaagcccttctcctacacgcccgcggggggcggccggcgcgcgctggacgagcgcgccgcgcgagtcctcctcgtcgccgcgcggctggcccacgattcagtcgctcgcgccgccgccgcggcccgagaggatgcggagcgctgcgtccgggaagcggccgtggcgcggaagcgctcccgcgagatgcttgacgcggccttccgcgcgcttgaggcggaggccagagaagccaagaagcccgctgccgcaccgccgcccaagaagaagattccgaagagcagcgaggcaaacagagacaagctgctcaagttcaatgccatgcagcagccggcgctggcattcgccgcggctgcagctgctgcagccagctcaatgccattgtcaataccatcatccagggaggacaagaagccagtgaaacaggaggttcaaggtgagccaacattgaacagcatcaaaatggggagctaattgttcttcacagtgaatggtatgcagttcttgcaggttcagctgacagatcattgaaagatgatcatgccccactgtttgggaccttgcaatcttagatttggcatgtctattctgttttttttcttcttcttcttccatgccattatgcttcttgtgtagcaagtgattctattcccagaagcacaagttcaggtgtacagaggcttgcaatgtaattgaaaccccaatttggagcctcctcttcaccttaaattcctagtgttgatatgttagacgttgatcctttcatcaattgtagcatgtttgtatcatgtatcatgttcgttaattacttatttatagtgacagaatatgttgccattggatg

SEQ ID NO: 13265 - DNA, 1206 bp, Oryza sativa
  ref <308>: DATABASE ACCESSION NUMBER: AK110613
  ref <309>: DATABASE ENTRY DATE: 2001-12-06
cttggatgagatttggggtgacgtcctcgtagcgggcggtggatatgcgtcctccggcgatgtctccggcggactccctcgccgccggcaggagccgccgtgttggggctagcatgcctcggcccaagcgtgtccgcgtctacttcgtggacgccgacgccacggacaccgactcctccggggacgagcgctccaggccgcgcgtccgggaggtcatcgacatcgacgtcggggccgcctcgccggcgccggcgccgaagcacccgaggcggctggttccgacggcgacggcggcgctggcccggcggcgcgcggggatggcggcgagccggcggttccgcggcgtgcggcggcggccgtggggcaggttctcggcggagatccgcgacccgagcctgcagaagcggctgtggctcggcaccttcgacaccgccgaggaggccgccgccgtgtacgacgacgccgcgctccgcatcaagggctcccacgccgtcaccaacttcccctccgactccgacaccccctccgccaaggccaagcagatgaagctccaccctcgccgacacaccaccccggacaagaccccaagctcttccaccgccgccgccgccaaggcctccgtccccgatccgacgccggcgccaccggaggaggaccgcgccaacgacagctcgttcaacccgttcgcgtcgccgacctccgtgctccggtacgcggcagcggacgaggtgaccgcgccatccttcgagcacctcctcgtcgagctgggcgacctctcggcgccgccgccttccaccaaggcggcggagttcgactggctgccgtggtgggaaggggaggacttcgtgacggcggggctgacggcgagcaacgccgtcagcgtgaaatgacgccgctgcccccctccacccatttcgcgctctcggggcgggaaaagttggcgggagacggcgcatcagcagcaaccagcagcaatgttattactactagtattatattaattttattattattatttcgtggcagtaaaaaaaaacccagcggagtttgtactccctagtgaagtgagcagtagtagtaaatggtggtggcgtggggcccaaggcgggcgctcgctttgtgcgtgagctgccttgaatggcacgtctcccgcgtggaaacggaacagtgtaattgcgtggcagatatttattttttctttctttt

SEQ ID NO: 13266 - DNA, 1244 bp, Oryza sativa
  ref <308>: DATABASE ACCESSION NUMBER: AK110614
  ref <309>: DATABASE ENTRY DATE: 2001-12-06
tgctgttgcttcttctcgtcgtactgataagagtgaggtggtcactttcagagctcctggtaacaccgccgtgcaaatctacgattccaaagccaagacttcccgcgtggagtttggccctgctttgatcctgctgcagccctacgaagagttcaccatcctcaaactgtcggccggtaagcccaagcgcgagggcgccctcaagtgcctgtgcctgctgctgggacacgacttcatcacggaggactacgaggtggagaccagtgaccacgcgcgcctgcgtgtgcgtctgtcggccaacgtgcactttgacgtcaaccgcgaggacccgctgtcggtggcgcgcctgttcaacctgcccgactacatcggcgccacctgccgcaccatcggctcgcgcatccgcggcctgattgcggccaccacgttcgacaagttccaccgcggctccgcggcgctcatttccaaggccgtcttcggctcgcacgagacgtggcgctgccccgccaacgggctggtgctgaccaacatcgatgtgcaggctgtggagaccgtcgacgagaagacccgcgcctcgctgcaaaagtcggtgcagctggctatcgagatcaccaccaagtcgcaggaagccgacgcccgccaggaggctgagcgcagggaacagtccgccaagggcctgctcattctccagaccatccaggacgaggccaagcaagaggagtcccgcgaagagctcgttaggctgcgctccgagaaccgtgccatcgagatcgccgccgaggccaaggccgaagcgctggctcgcgccaaggccctggaactgaccgccaactgcgaggtcgacgtcgccaggctgcgcgccgccgcccaggccgaggaagccatcgctcgccacgatgaacagaagctgcgcaacgaaatcgagctcaagcacaagtccgatctctacgaactggaaatcgctcactccaagggtctggctgccatcgaagcctccaagttctcccgcatcatcaccgccatcggccaagaaaccatcaaggccatcgccaaggcaggccccgaaacccaagccaagctcctctctggtctcggtctgcaaagcgttcttatctccgatggacgctctcctatcaacttgttccaaactgctcaaggtatgcttcgtgctcccaaataaacaaaagagtttattctgcaaacagaaagcaaaaaaaaagaaaaaaaaaaaaaacaaacaaacc

SEQ ID NO: 13267 - DNA, 1278 bp, Oryza sativa
  ref <308>: DATABASE ACCESSION NUMBER: AK110615
  ref <309>: DATABASE ENTRY DATE: 2001-12-06
actcccccagcttgaacttagaggtgggttgcttagcctggttttacaagaatctaaaccagcaatggatggaggaggcgtcgatggctatgagatggagatggtgaggaacaggaaggtggtgctaaggaggtacgtgacggctgggtaccctacagtagatgatatggaggtggtatcctccaccatgatgccacgcgtgcctcttggaacaatggcaccagcggtgatggtgaagaacatctacctttcatgcgacccgtggatgcgcggtcgtatgactaagcacgacgatgctaccgcggagatagccgaagacttcgtgttaggagaggccatggttaatttcggtgtgagcaaggtggtcgactcaacgcacccggtgttcgctgctggcgacctcgtgtggggactgtgtggttgggaggagtacagcctcatcacccaaccggagacactgcacaagatcaaccatcctgatctaccactctcctactacaccggtgttctcggtgtgactggtctaacagcatatgccgcattctttgaggtcggcaagcccaagaaaggagagaccgtctttgtgtcggcggcatctggtgctgtcggccagattgttgggcagcttgcaaagattgccggctgctatgtggttggaagcgctggctccgacgagaaggtcacccttctcaagaccaagtttggctttcacgatgcattcaactacaagaaagagagcaatgatcttaccggtgctctccggcggtgcttcccagatggaatagacatctactttgacaatgtcggcggtgcgacgctggatgcggcgctggtcaacatgcggcgtggtggtcgagtggtggtgtgtgggatgatttcacagtacaacctgcaggagcccgagggggtgcacaacgtgatacagatcctatccaagaccatccgggtggagggatttgccgtattcaaccacttcggcttatacccgatgtttgaggatgagatggctaggtacctaaaggaaggtaaggtgaccgtcctgcaggatgttgtcgagggcatcgagaaggcatcggaggctctcattggtatgttttctgggaggaatgtgggcaagttgttggttgctgttgcagatgaatgactctagttaattaataataggcagttatagtactgttatagaataagatgcaggacaatatttccaattcagttcatatatagcaaatgttgtaaacccactttatactcataatcttatatatatcacagtgc

SEQ ID NO: 13268 - DNA, 1236 bp, Oryza sativa
  ref <308>: DATABASE ACCESSION NUMBER: AK110616
  ref <309>: DATABASE ENTRY DATE: 2001-12-06
tggtgattaacgcccggaatgcgggaagtggagcgtaagcaaaccgccgcctcccgaccgtagccccgggccaaacgagcaaaaagtatgtcttgcaaatcctgtacaacgggcggatgtggctcccgaagcggtgggtcatcatcggcagcgaacggcaccgccgtcgcaggttgcagcagcggtggatgcgggaccggaggttgtaataaactaaattcgttcgattggctgagcgacatggtactgccggtttctcagcgttttgatgtcgtcgaaattaaatttaaaggggggcgtaaggaatatttccgcaacgtccaccaactggatctgacaacaggtgactttgttgtggctgaaatggcatcaggttatcacctgggttccgtttcactgcagggcgaacttgttcggttgcagcttaagaaaaaaagccttcagatcaccgatgatatgaaggtaattcaccgggtggcaacgcctaaggatcttgagaagcacgaacagtctattgcccgcgatctgccttcgatgtaccgtgcccgcgaaattatccgcgacctgaatctgaatatgaagttgtctgacgttgaatttcagtcagataactcgaaagctacgttctactactcgtctgaagaacgcgtcgatttccgggaactgatcaagctcctggcggcggaatttaaagtgcgggttgaaatgcggcagattagtctgcgccaggaagccggccgtctgggcggtattggttcctgcggacgggagctttgctgctccacgtggctgaccgatttcaaaaacattacgacctcagcagcacgttaccagaacctgtcgctgaatccggccaagctgtccggacaatgcggccggctcaagtgctgcctgaactatgagctggatacgtacgtggatgccctgcgcgacatcccggccgttgacaagcccctggaaacaaccaaaggaagagcgtttttgcagaaaacggacattttccggaagattatgtggtttggctatagttcggaaagtacctggcatccgctgccgatcagccgggtgctcgatattctgacgctcaacgccaacggcatcattccggaatcgtttgatgtactaacccctgttgccgaaaagaaagagcctgctacaccagccgctctcaacagtgatctggacaagctcgacaaaaagtacgcaatcaaacaggccccggcggcgaagaaaaag

SEQ ID NO: 13269 - DNA, 1342 bp, Oryza sativa
  ref <308>: DATABASE ACCESSION NUMBER: AK110617
  ref <309>: DATABASE ENTRY DATE: 2001-12-06
aacaaacgctaaaaaagtaacagtttctgtactttattgttttctcgaacgctaccatgatgcagttcgtcaaagggctcatctctaagatgaagaccaagcggtcgccgcttgatgtctcggacttcgtcgccgcacgccccgcgccgtcagcaacgcaactgtgggagcgaatcgatgcgcggtacatgggcagcaccatggacccgaagcatctcgaggtgcacaaaaagcgcatgctcttcgacctcaaataccgctgcggcgccgaggggcggtgcatggagggcgacttccgctgccgctttccgtgctgctttcagatgcggccaagcatcaagggcgctgagattttcatggagcgtttaggtctggaggaaaaggtcgcgccaagaaatcacgacattgccacgatgttgagtaaggagcagctcgaagacgcgctgcttcttatggccgaacgcgtgaaggacatggaaaccaaaacggcgcccgccgcgatgagcgctgcgacgctcgacgaatacatgaatctagtgtgtctgcacgcgaccatcctgatgaactccaaccgcgatgcggaagccgtcgacttcttgttggagcgagcgccccgtgtgccgcgcgcggcgaaactcgagcttctctcgaccgcgaccaactgggcaacgctcaacgacatggaaatccgtttctacagcgtacatgttgtgcacttccccgaacttgacggcgccaaggctcgcgcgacaaaaccgccgctgctgaagaaagtcatcgacgcgtgcaagaacgacgacgaggctgaggatcacgtcgtgcatgccgtggtggggaaagaagtcaccggcatcatcgcgcgagcgcagaacgctcaggattacgaagacttctgtgaagatcccatggcgacaagcgtcgtgcgcgacagcgttgatcactacaggcatgtaattggagggtcgttctggaccaagtttttccacctcgccatgatgcctccgctcgatccgcgtgacaaccccccagagacggctcccgaggaaacgccgcggaacgtcctcgatgcgcttggtcgaagcatgctgctccaccacatcgcgaaatcgttcgacgcggacttcgcacagacggcggaggaagccaacgctaaggcgcgtaagatgcctcaagacatgacgaaagaagaacttgagcggcttcccaaggatcagcgtatcgccttgaagcgaatgcaagagcttttgatgatcgtcaaaaactactcgggaccgacaaaggctggaaccaagaagtgacagtgacagggcacacgacagagaccgtttttgtaatcgcacag

SEQ ID NO: 13270 - DNA, 1317 bp, Oryza sativa
  ref <308>: DATABASE ACCESSION NUMBER: AK110618
  ref <309>: DATABASE ENTRY DATE: 2001-12-06
ggcaaaatgcacggctctggtgtgtacgtgtggggcacaggaatggtttaccggggtgactggatgcagggagccatgcacggctgtggcacgcgcatatggaagcagccggatggcagcatggcagcagcggagggcacattttttcatgacgagtatgttggtgacatcatgccgtgtagtaaggaggatgcatttgacaatgcagtggaggctgacatggcagcattccaggccagtggcccagccggcaagctcagagccagtcacggcagcagagggcagcagcacatgacaggcagctgcaagcaagagcaggtacacaatcagcgcagccggcccagctgcatccacagccgggcaccaaagcggggccacacgccaggtggccaacgggcagcagcatggtggctgccccccagccaccaggtgtgcataatgatcaacggcaggaccagcggctgcaaagcttggtacagcggctagttgcagacaggatggcaggccaagacagcccaccatagcacctgagtggcacctgaagcagcaacaatgggtgagggcgtggcagtttgcttgttgcacaccagttttgctgcatgtggtgtaaaatacgtagctcactttggtggcttgtggtagatgctccaccagggcatgtgcttggcatagcctttggtcttcatgatgctttttttttgcaaagtccatcccactttttactttcctgtttgttgttgttgccatttttcacactgatcgtgtggtcagcatagccatgtgtgcaagtactagaacacagccaacctgtacgacagcaaagtcggtgttatgttccgattttacattgtgcccaacatctaatgtgtcgtgcatggctcaagaacaaggagcattggcacatgcagtacgtactgcacatgtatcaatgtgcacatgcgtggcatgttaaaaactcaaagggatggcatgtgccatgcagtcatggctgcatatggagtggttcagtggccaagctggttgcaatggctggcaaagcagctatgttgtgtccacgcagcatgtcgcttgggagggttgtgatgaggtgcagttccgatacatccaattcatagaacgtgcatgtgcacagtgtgggtgtattgtgcctgtcaagcgtcgtagaatgtgcacagtgagtgtacctgtcaacctgggagtgtattgtgcctgtcaagcttgacacgtcacagaatgtgtgtgtgtgagccagcgagggcatggtgcagtcaccagaatgtgcagtgtgggtgtgcctatcaacctccttcctgtgcg

SEQ ID NO: 13271 - DNA, 1054 bp, Oryza sativa
  ref <308>: DATABASE ACCESSION NUMBER: AK110619
  ref <309>: DATABASE ENTRY DATE: 2001-12-06
atcatgaggtgagatatgatctgatcatcctggtctgacgagcatatccatctatcctacaattaacaaattaatgtgcattattgagttaatcgtcattaattcatatagttgaggattttggatagatggctgcatgccagcagcagatttggcaagaagggaagcagcagcagcatctgcaccacggtggctatgatgatctttcttcagtgtacagaggcacggttgtgctgccacggcggcagggcggcctggcgccggagccgccgccgccgcggccgtcatcgtcgtcggggaggagcgcggcggctcaggcgacggcgatgacgatccacagcgaggctgagaggcggcggcgggagaggattaatgctcacctggctacactgaggaggatactccctgatgctaagcagatggacaaggccaccttgctagccagcgtggtgaaccaagtgaagcacctcaagacgagagccaccgaggccaccacgccgtcgacggcggcgaccatcccaccggaggccaacgaggtgaccgtccaatgctacgccggcggcgagcacaccgcggccgcgcgcacctacgtccgcgccaccgtcagctgcgacgaccggccgggcctcctcgccgacatcgccgccacgttccgccgcctccggctgcggccgctgagcgccgacatgagctgcctcggcggccggacgcggcacgccttcgtgctctgcagggaggaggaggaggaggaggatgctgcggcggaggctaggcctctcaaggaggccgtgaggcaggcgctggccaaggtggcgttgccggagacggtgtacggcggcggcggcaggagcaagaggcagaggctgatgatggagtcgcgttactcgacggcggtcgtgcacacgcacgttgatcctcaatattgctggtacaatagtcgttagtgacaggtaatatacggcggatcgaaaaatggatgtatgaaattcacacctgttatcattttttactcgtagatttactcatgagtaaaaattttatggagatgtgaatc

SEQ ID NO: 13272 - DNA, 1034 bp, Oryza sativa
  ref <308>: DATABASE ACCESSION NUMBER: AK110620
  ref <309>: DATABASE ENTRY DATE: 2001-12-06
atagcatgatcgagtgagtgggcgcgtgcgtgctgccgctagaattaagtagccaccagcagctgagaaggcgccggcgccgcactatagcagtgcccgcagacagttgccggccgcggctagctgagctcaagtcgagatctccagagatcgatggcccgtttcgtggatccgctggtggtgggacgggtgatcggggaggtggtggatttgttcgttccatccatctccatgaccgccgcctacggcgacagggacatcagcaacggctgcctcgtccgcccatccgccgccgactaccctcccctcgtccgcatctccggccgccgcaacgacctctacaccctgatcatgacggacccggacgcacctagccctagcgacccatccatgagggagtttctccactggatcgtggttaacataccggggggaacagatgcatctaaaggtgaggagatggtggagtacatggggccacggccgacggtggggatacacaggtacgtgctggtgctgtacgagcagaaggcgcgcttcgtggacggcgcgctgatgccgccggcggacaggcccaacttcaacacaagagcattcgcggcgtaccatcagctcggcctccccaccgccgtcgtccacttcaactcccagagggagcccgccaaccgccgccgctaatagtaatagcctactatctctatctatctatccataatgaagaaagcaagcacgcctgcggatgcggccggccggccctactatattattacaataatatagtttttgaataattaagctagctagctctcaactcaagtatacttactggaactcgactgcgttgcgtacgcatgtcctcatcatacgtacgaacgtgcgtgtccacgtactgtgtactagctagcgagtactctctccatatatatcttcctccaccgtcgtgtggtacgttttaacaacgtacatgcatgcatggataatgcaggctctatatatatatataatactactgtactgtactgtatgctttaatt

SEQ ID NO: 13273 - DNA, 2212 bp, Oryza sativa
  ref <308>: DATABASE ACCESSION NUMBER: AK110621
  ref <309>: DATABASE ENTRY DATE: 2001-12-06
ctcgtctcctcgcgccgccgccgccgccgcggacgccgccatgtcgaagcgagggaggggtgggtcggcggggaacaagttccggatgtcgctgggtctgccggtggcggcgacggtgaactgcgccgacaacaccggcgccaagaacctctacatcatctccgtgaagggcatcaaggggaggctcaaccggctgccgtcggcctgcgtcggcgacatggtcatggccaccgtcaagaaggggaagcccgacctccggaagaaggtcatgcccgccgtcatcgtccgccagcgcaagccgtggcgccgcaaggacggcgtctacatgtacttcgaagacaatgctggggtgattgtgaatcccaagggtgagatgaaaggttctgctatcactggacccattggtaaggagtgcgccgacctctggccaaggattgctagcgcagcaaatgccattgtctagagcttgtttggagtagtagttttcagttctgtgccggatgtgataatgtgctacacgaccgacctcttgattacaccaacacacgaccacccgaccaccaacacccacacgcacgtcctgcacctgcatgcctcgcgggccatcgctcttaccttgtctcgccgcccacctcacaccgctatcgctatctacacatcgatccctcgctgcgcaccgccgccgacttgcatgcgagtgaaacgccagcatccgcacccggcctcgactccggcgcaccacccgctctttcctcaccaagcgctcgaatttcgcatgcaataacaccaccagtccccccaacactccctgtttccaggcacctcgattgcgcggacgacgggctcgattgcgcctcactttggcttggcacagctttgcagctgaaggacgtggacggattgagttgagcgcacagctggggcatgaacaaagatgacgcgaccacaaattattagagcagacacactggatctgcaggacaagtcatcgcccaccgcccaagaccattcccttcagccgcaacacccagcaccactcgggatcggacctcctgcgccgcaccaacaagcctcgctccgccacgtcgaggaagagcgcgaatccgaggaggtgcgtctgcagaatgcctggagcaacgcaggcagcggcctgcgcgatgatcccggttccgatgacgagcgcacagttacaaacggcgccaacggccaaaatcggatgcagcaggatgagcaagctatcaggctgaatggtggtctttctggtgacggcgagggtgacgactccgacatgcaagacgccgatgtagaggaagatatggacgacgacatgatggacaaaatttcgagttcgccctcgatagacgacgaggacatcgattttgaatttgtttacgcattgcacacattcgtagctaccgtagaaggccaagcaaatgcgacaaagggtgataccatggtgttgcttgacgacagcaacagctactggtggctagtacgggttgtaaaagacagcagcatcggatacttaccagcagaacacatcgagactccgacagaacggttagctaggttgaacaagcacagaaacattgatctctcagcaacgatgcttggtgataccgcggagaaatctaagaaccccctcaagaaggcaatgcggagacgaaacgccaagacagttcaatttgcgccgcctacatatgtagaagcttcagattacgactactcatctgatgaagatggcggggagctcttcggtggacctgagccaaaacaagtacaacaacagcagcagcagcagcaacagcaacagcaacagcaacagcaaacagcacaaactgccgaaccagaagctcaggaaggtctcaaggtgcagccactgaaagtcggcggagcgaagaaggatgcaaaggggcaatctgaaggcgatgcgcgagcctctggtgaagatataagaaaggaggatgagaagcagagagcaagtgacgacaacgtcgagcgaccgttggatcccaaggtcaccaaaaacggcacgctacgtaatacagactcattcttcaaggatgagaataccgaaacacggaaaatcacacttacgcctaacttactccgagatgactcaagcacatcaacaactggatctcgtgaacgtggccctagcttggaaagcttggaaaagaatggttttgcagacaaggtcaaagatgacaag

SEQ ID NO: 13274 - DNA, 1350 bp, Oryza sativa
  ref <308>: DATABASE ACCESSION NUMBER: AK110622
  ref <309>: DATABASE ENTRY DATE: 2001-12-06
atcagcaagaccagcaaccactcgagactgtttatctcgtgtttacctacacaccacgagctactatacacacaccctctcgatctcatcaccggtattcaccttctctcccttcagtacgttctcaagagattagcctcttgcagctagccaccatgtctagggtgctggagcctctcgtcgtcgggaaggtgatcggagaggtcatcgacaacttcaaccccacggtgaagatgacggcgacctacagctccaacaagcaggtgttcaacggccacgagttattcccgtcggcggtcgtgtccaagccgcgagtcgaggttcagggcggcgacctgaggtctttcttcacactggttatgacagatccagacgtgccagggcctagtgatccgtacctgagggagcacctccactggatcgtcactgatattcctggcaccactgatgcttcctttgggagggaggtggtgagctacgagagcccgaagcccaacattggcatccacaggttcgtcctcgtgctgttcaagcagaagcgccgtcaggcggtgaccccgccatcctccagggactacttcagcacccgccgcttcgccgccgacaacgacctcggcctccccgtcgccgccgtctacttcaacgcgcagcgagagacggccgctcgccgccgctaattaaccaaactgccaaaaaccaaattaagcccctcttgcaggcatgcaatatgcctcctgcaatattaattgcagatgcagctagccttccaaactatatattgcaactaattaagaatggactactacatatataatctagggatcgattgagctagatcacctagtggcatatatatatcagccactattagcttagccatgtatgaaccaaataagaactcggtgcagcaagcgcgagccactgtttagttcgtcagtgtagttaattggtatatatgcctatatatccgtgtctgcaagagctaggtgagacacgtgagacgtactcgcctcgtacgtgttgcactatagcttgagtcaatctcaagctcctgcgtatatccagctgaagatcgcaatgttcgccggcggcgaaacagctggtgctgggagaggcgaaaggcgatgcataatgcattgtgttgactgggagcagtttaaattgacgtgtcgggcggcgaaggcaggaagaggaagtggccatggctctctagtactcactttgtcagttacaagctactatatttatcctgttatgtgcgtgtgtgagtggctgcagctagctatatatgcacttttgcagcttgcagtaacgtgtttgtacttttatggcatgatcctagtttgattt

SEQ ID NO: 13275 - DNA, 893 bp, Oryza sativa
  ref <308>: DATABASE ACCESSION NUMBER: AK110623
  ref <309>: DATABASE ENTRY DATE: 2001-12-06
atcgagtcgaaaccctactgtcgttatatacataccattagcttttgctccgtccacagctttacccagcccaaacaaccgccaaaatgaagaccttcactgtcgcctctatcatcgccttggcctctgttgccagcgctcagctcgacaacatcccccagtgcgctcttgcctgcttcgtcggtcccctcaccagcgacggctgcgcagccctcaccgactttgcctgccactgcaagaagggtgacgagctcctttccaaggtccagccctgcgtccagggtgcctgctctgctgccgatcagcaaaaggccatcgaagccgtcgagtctacttgcaaggccgctggtgttccaatcaccatccctggcagcggtgccgcctccagcgctgctccctccagcgccgcggctgcctcatctcaggctagctctgccgctgctccttcatcttccgcagctgccgcgacctctgtcatctcctctgtcgcttctgccgcctcctccgcagtctcatcggttatttcctctgccaagggatccgtcacccccgtgcccatgcccaccgtcaacagcagcatgccctctgcttccggctctgccaagccctcttccgtctccgagttcactggcgccgctgcccaggctacccaggctgttggtatcattggtgccgccgcccttgccatgctcgctttgtaaattactaccaacatgtcttcattgcactgacgtctgatacgagctcgagccgacatggctgcgggcgaggaatggtaatgggataacgatgacgggtcttcaagtttgggtttgcatgccttgtataccattgaaaacaaaataatacaactacttaatatctatgatttttcttgttcctttgatcccatg

SEQ ID NO: 13276 - DNA, 2038 bp, Oryza sativa
  ref <308>: DATABASE ACCESSION NUMBER: AK110624
  ref <309>: DATABASE ENTRY DATE: 2001-12-06
cccctttctcgcaagtgcacgtgtagtgctgagccactcacgtctgcaactttgctgttgctgcttttcgttgttcagcagctcggtgtcagtgaggcaacatggctgagggcaaggagcatctctccattgtcatttgcggacatgtcgattccggcaagtccaccaccaccggtcgcctgctctttgagctgggcggtatccccgagcgtgagctggagaagctgaaggaggaggctgctgccctgggcaagcagtccttcgcctttgccttctacatggaccggcagaaggaggagcgtgagcgtggtgtgaccattgcctgcaccaccaaggagttcttcacagacaagtggcactacacaatcattgatgcgccaggacacagggatttcatcaagaacatgatctctggtgctgctcaggctgatgtgtgcctgctgatggtgcccgctgatggtaacttcaccactgccattcagaagggtgaccacaaggccgctgagatccagggccagacccgccagcacgcccgcctgatcaacctgctgggtgtgaagcagctgatctgtggtgtgaacaagatggactctgatgtggctggctacaaggaggagcgctacgttgagatccgtgatgagatgaagcacatgctcacccgtgtcggctggaaggccgactttgtggagaagagcgtgcccatcatccccatctccggctggatgggcgacaacctgatcaagaagtcagagaacatgaagtggtggaacggcatggacgtcaccggcctgaacaaggagaaggtgcacatcgagacactgctgaatgccctgaacgacatggtcatcgtgcctgagcgcaagaccgacgcccccatgcgcgtgcccatcagcggtgcctacaagatcaagggtgtgggtgatgtgctggccggccgtgtggagcagggtgtggtgaagcccggtgatgaggtcatcttcctgcccacccacaccgcagccaacccatgcgtgggcaaggtgttcaccgtggagatgcaccacaagcgtgtggacaaggccggcccaggtgacaacgtcggcatgaacatcaagggcctggacaagggcaacatgccccgcaccggtgacgtgatgatcctgaagagcgaccagaccctgaagccatgccagaacttcactgcacagatccagaccctggacatcccaggtgaggtgaagaagggctacagccccatcggcttcgtgcgctgcggtcgcgctgcctgcaagatcacagagatcaagtggaaggtcggcaaggagactggtaacaagaagctggaggagccccacggcctgaaggccaacgagatggctgaggtggtgtttgagccatgccagcccctggtggtggactccttcaagagctgtgagggcctgtcccgcattgccttcctggacggcaacaccgctgtcatgcttggcaaggtcgtggctgtcacacacaagtgaagcgccagcgctggctcggcagcgagatgcaacagtgacgctggtacattgaactgtggctgcggactggtccaaggcgcatttggtgcggcacaagtgggaacactgcttatcatctggcggcggcgtgaagcaagtggcgtacttgaatgtctggctggttgggacggtgttgcgaaacacacatttgacctgttggagcattctgccggagatgcaaactggagcggccgagccctgtctggtttaggggcaagcacaagcagggcagcggcagctgtgctcgcagtgcatgctgctggtgctgctgtcagctttgcagcagcaaccgctgggtgcttggccttggttaaggcagctcagagcaggcagccaagtagcagccaagtgtgctacttcagcagcagctgggattggcgtagcagacactatgagggcgttgagggtctgttgggtgcctagtttgctggtggggtgcgggactggttatatgccccccgcgcttgtgcttcctggtggttcatgggcagttaactgttgagtgc

SEQ ID NO: 13277 - DNA, 1312 bp, Oryza sativa
  ref <308>: DATABASE ACCESSION NUMBER: AK110625
  ref <309>: DATABASE ENTRY DATE: 2001-12-06
aagcaagtagcagcagcagcttaggttgatcatatggatggtgcgatgcaagagagcagagagtattggcgcgacggcggcgatgtcgtcggagaggagctcttgagggagatcctcgatgagaccgccgcggtgcattccaattccaattccaattcaaattcaaattccaattcaaaggaggcggaggaggaggatgagagagaatattttgccgcagctgcagcggatgagcagctgcaggtggaggctccttgcgggcggcggcggcgggagtcgatggtgaacaagctcatctccacggtgtattctgggccaaccatcagcgacatcgagagcgctctctccttcaccgccgccggcgaccatcagctactcgccgacggtcacaatttcgctgcaagtagctgtagcccagtggttttctcgccggagaagacgttgagcaagacgatggagaacaagtacacactgaagatgaaaagctgtgggaataatggtgggctcgcagatgatgggtacaaatggagaaagtatggccagaaatccattaagaacagcccaaaccccaggagctactaccggtgcacgaatccgcggtgcaacgcgaagaagcaggtggagcgagctgtggacgaacccgacactctgatcgtcacctacgagggtctccacctgcactacacctactctcacttcctccactccacttcttcctcctcgtcgtctactaccacccaacaacaactgcagcctcagcctcagatgatgaccaactgcaagaagaagcccaagctgcacctgcacccgctgctgcacgacgacccacccccacccccaccgccgccggaaatgacgaccatgatgataatgcagagcttcagcatccagcaacaacaacatgatgatgatcagctgctgcagcctgctgcagatgatcacttgatggtgcaggctccccccgatgattgttacaatattaacggcagcagcagcagcggcttgatgatgagcttggacgacgacgagcaggccgccggcgccggcgggctactggaggacgtggtgcctctgctggtccgccgcccgccgccgcccatctgcaacaacaacaactactactactcgccggccaccacctgcacctctgacaacgagtacggctcgtcggcgtcggcgtcgccgtcctcctccgtctccgtctccagctggactactcccatgtctccctgcatcgacatggccatactctccaacatcttctagctatattcaaattaatgaaatttcatctagtattctctagctagct

SEQ ID NO: 13278 - DNA, 2189 bp, Oryza sativa
  ref <308>: DATABASE ACCESSION NUMBER: AK110626
  ref <309>: DATABASE ENTRY DATE: 2001-12-06
accatccttcttgtcgtcgcaagtgttgtcatgccggataaggtgctgctggtgggacccgtgcatgggcggctgttggagctcgtgtccaaaacgtcggctattcaggccaagcacggaccgtttgccgcgctcttcatcgtcggcgacctcttcgcctccacccccaccgacgacatcctcaagcagcagtccgacctgctcgcaggcactctttcgctgccgatcccaacgtacttctaccaggccctaggtagccttcctgccgatgtcgtgaagcggatcagcgaagtccgcgcgagcagctccaacgggctcgttgcactgacggagcagctgcactgggcagccggcaagagcggcgtgttcaccaccgcgcaagggctgcgcgttgcgttcgtagcgggcaactgggacgcaggtgcctttgcctccgatggcgggctgggcgactttgatgcgggagactggcacgagtccccaacacagagagaggaggacgagaagacgacctacatcaccccgagcacggtacgcaggttgctggcacatccgtcattccgtcttccgaagccgagtgtagaggaagtggggtctacgtcggtagcgaaggaaggcacgcttgcagcggcacgtgcgagtgcgtcggcggagcaagcacgggccgcacgccagggtgccgcgctcgagatgctgcagcagcggccagcgctcgatctgctgctcaccaacacctggcctgcgggcgtcacgctctttgccacgggcgctgatgctgatgcggggctgccggatccgactgcacgcacatggggctcgcccgtcatcgcgcggctggcagcacacgcgtgtgcgcgataccactttgcgctcgcgccatcacccgacagccccgacctgcccgtcggaatccaggaggccacgctcaacatgggtgcattttgggagcgtgcgccgtacacgacggatctggcgagctacttgcctgcgcccgtgcgcgcgccactgcgcagcgtaacgcgctttgtgagtctggcgacgtttggcaacagcggcaagcggcgctggtttgtggcgctcaacctgacgcctgccgacgagcagggcgctgtggtggtgccgcccaacgcaacgccgagcccgtatgcgatgcccaaggcagcaaagcaggcgaaacgcacacaacccgccgaggaggagcagaatttcaggtttggcgaagcggggcgaaagcgtgcgagggcagatggagatgcgccgccccccggctatgtgtgtcgcatctgcggtgttgaggggcacttcatccgcgcatgtccgtccaagaccaacgcccaaccagcagcatccgcggaggagggggcgggaaagatcgagctgccaatggggctgccatcgaagccgtcgttcgcgcagggcgggcgacaaatgatccccgtcggaccggccaactgctggttctgcctctccaacccctctgtcgaaaagcagctcatcgtgacgatcggctcggcctcatacctcgttcgacccaaagggcctttcatccacccatcggtcaacgagatcccgcacacgggcgcgcactttatcatcgtccctctcgctcacgttgcagatcttcttcccggctcccaccccgtgcacggtgggcagggtgatgatggcgaaaaagcgtcgattcggagcgaggtcgagtcgaccaaggctgcggttcgcgccgtgtgggcaagggagggacatgtgatgctcgaatggacactggtgcgcgtacgcaccagcccgcgcatgacgcacttccaaacccaacttctcgcgctcaaatcctccatttacgtcgcacagaagctcgacgacgctctcgaggcccaagccaacaccgccaagactgcggtactgcgatcccacgccgcaagggagtactttgaccagacgcattcagaggatagaggtgacgatgggtatttgcatatcaagctgcatgcgcaagaggagagagagtggctcgtcccgctctgcacgtctacgcgctttccggtgcaattcgtgcgggctacgcttgcggctgcgctggagctgccacagctcgctgactggaaggcgtgcacaggtgatgctgatgccgagcaggagcgacacgattccgccgctcttcgtgccatgctctcctgaaatgcagattgcttgac

SEQ ID NO: 13279 - DNA, 1006 bp, Oryza sativa
  ref <308>: DATABASE ACCESSION NUMBER: AK110627
  ref <309>: DATABASE ENTRY DATE: 2001-12-06
acacacctgcgcctcatctagacaggcagtcgatcgatcagtcagtcgccatcaatgccgccgcggcgggggatcgaggtccggcaggcggtcggcgacggagcagcgccgaggtggcgcatgtcgctgctggagaacacgttcagctcgttcctgcagtcgatcggcggcggcgtggcggcggacggggcggcggcgagggccgtgttcggggaggggtcgctgttcagccccttcctgttcggcaagttcttcgacccggccgacgccttcccgctgtgggagttcgagccggaggtgctgctcgccgcgctccgccgcggggccaggaccaccgtcgactgggccgagacggactccgagtactacctcagagctgacataccaggtgggaggaaatgcgacgtggaggtgagcggcgacgacgccatgagggtggtcgacgtcagcgggctgtggcgggcggcgccgccgccgcctccgccggacggccgggactggcgcgccgggcggtggtgggagcacggcttcgtccggcgcgtcgagctgccggaggacgcggactggaggaaagtggaggccttcttcgacgacggcgaggggttgctcgagatcaaggtgcccaagtccggcgacgcccaccaagcggcggccgccaccgcctgagaatcctaacctcgccggcgtcgccgcgcgattggagagagcaaattattcttcttctgagttctgacagtgacggtgaagatggcacaaaacttgataagaatttctcaaagatatggagggaccaaaaagtgagcaaagatcatctcacacatgttgcatatgcattaacgtccaatccatgtgcctgcagatgatttgtactagtactaatgtgttagcttaccgttaaaaatggatcattaattagcatcgtgcatatgcatcagcatcacagtcacagcatcgctgtcgaattggtcgacgataaaatgggtcatcgagatcataaattcgattc

SEQ ID NO: 13280 - DNA, 1004 bp, Oryza sativa
  ref <308>: DATABASE ACCESSION NUMBER: AK110628
  ref <309>: DATABASE ENTRY DATE: 2001-12-06
aaagccgccccaaaacccccttccccaagcatcgccggctcgccgccatcgccgccatggcacggcggctgctccgcctccgcgcccacgccgccggcttgtcccagcgcctcgccccccgcctcctcccctcgcgcccgtacatctccgacatgcgccgctccgccttctccgaccgcctcctccgctccctccgctccgaaatctcctcccgccgcgcgccctcgcccccgccctccgcggcgcccttcgccgtcgacgaccgcccgggcgagcagtggatccggctgcgccgcgcgttcggtggtgatgatgatgatgagaaggaggaggtcagggtggacgccaccatggtggacggcgccacggcgcccacacgctccggggaggtcgcgggtgcggggcccgacgacgccgccggcccgcagctcaggatgcacatcagcgtcaacgtcgaggtcaccaaggccgcgcggcgtgacctggcgctcaccttcgagtgctcggcgtggcccgatgaaatggaggtggagagggtctaccccgtccgccgcggcgggccggcggcggcgcagcagtacatgggccgccatttcagtgagttggatgacgagatgcaaagcacggtacatgattacttggagcatcgaggggtgaacgatgagcttgccgcattcctgcactcatacatggaaaacaaggagcagacagaactggtccggtggtttaagaatgtggagtgcttcataaaaaagtaggcgatatcttctagacacttatgagacaacattagttgatcttgctttgcaacaattacaaccagtgatcattttggcaccaaatgttcccaatgccacaagtatttgttgttattattgttgtgctagatacacgaaggttgtagttgtacactcccagttcaggacgaattggttcactagtttatcaaatggtttatactctactgtgcttctcatcttgaatatggtatactgtgacagttc

SEQ ID NO: 13281 - DNA, 922 bp, Oryza sativa
  ref <308>: DATABASE ACCESSION NUMBER: AK110629
  ref <309>: DATABASE ENTRY DATE: 2001-12-06
acacttagaaaaatcgcccggctccctcctctcccacgtccgcgcgccgccgcctccctcctcgccaccggcggcctccctcctcgacaacgacgacgaccgtgacgccgccgactgctccctccattccagatccgcgcgccgccggctccctcctcttccacgtccgcgcagccggctccctccacaacgacgtccgtgcgccgccgcatccctcctcgccaccggcggcctccctcctcgacgatgacgacaaccgcgacgcctccgacggctccctccgctccagatccgcgcgccgccggctcactcctctcccacgtccaggctgtcggctccctccacgacgacgtccgcgcgctgccgcatccctccgtcgctggccatgacgagcgacgacgacggctccagatccgcgcgttgccggctccctcctctcccacgtccgcgccactggctcccttcacgacaacgtccgcgcgccgccgcatccctccgctgccggccacgacgagcgacgacgacggctccagatccgtgcgccgccggcttccctcctcgccgcctctaccagccgcttcatctcctcgccccctccgccgccgcgccgacaacgacgatgacggtgacgatgacgacgacgacggcgccgacgacgacgggtggaggggagccctggccggcggtgccccgtggttttttttattttcctgggatgattttcgctggcgggccacgggcgcgcttgcgaaaatggtttaatttcacagtcgagatggtagcggcgatcctcttcccctcctgtgaaaatggttttgggccgcctggaaaaatctttttttctagtagtgatccattccatctgatgacaggaaaacaaagttaggtacttttctccatatatcgggtctattactgtgtg

SEQ ID NO: 13282 - DNA, 1061 bp, Oryza sativa
  ref <308>: DATABASE ACCESSION NUMBER: AK110630
  ref <309>: DATABASE ENTRY DATE: 2001-12-06
acagttcacagcctcagaggcccagatcacaaccacaccacgcacacgtacttgcagtgcagttgcagcgcgagcgaagcgagcggccatggcgttccggctcagcaacaacgtgatcggggcgctcaacctggtgacgctgctgctctccgctcccatcctcagcggcgggatctggatggccacccgcggcgacggcggcgagtgcgaccgccacctctcctcgccggccatcgcgctgggggcggtcctcatggccgtctccctcgcgggcctcgtcggcgcgtgctgccgcgtcacctggctactctgggtctacctcctcgccatgttcgccctcatcgtcgccctcctcggcttcaccgccttcgcctttgccgtcaccaaccgtggcgccggcgaggccgtctccggccgcgggtacagggagtaccgcctcggggactactccacgtggctgcggcgccacgtggggagcagcaagaactgggacaagatcaggagctgcctcgccggcgccgacgtttgcaggagcctgcaggacaggaacgagacgtgggcgcagttcgtcgccgacgacctctccccggtccagtccggctgctgcaagccgcccacgagctgcaacttcacgtacggcggcggcacgcggtggggcaagacggcgaggctgagctccgccgacccggactgcgacgagtggagcaacgacgccgacgaggtctgctacggctgccggtcgtgcaaggccggcgtggtggccgcgctcaagagggactggaagcgcgtggccatcgtcaacgtcgtcttcctcgccttcatcgtcgtcgtctactccgtcgggtgctgcgcgttcaagaacagccggcgcgacagtgtccaccgccgcagcggcgggtggaagcaggccggatacgcctagcggtttcaaaagtttgagtacgagcagtaacataactacttgttaattaggaatagtaatatagtagtagtattagtttctgatgcttctgctgacgctatatatgttcgtactagtcttctgacaccgtgtttagctc

SEQ ID NO: 13283 - DNA, 838 bp, Oryza sativa
  ref <308>: DATABASE ACCESSION NUMBER: AK110631
  ref <309>: DATABASE ENTRY DATE: 2001-12-06
gaaggtaaatggggatgtgtagcaagacaaggaagaaggggtcgtggagggcggaagaggacgcgctgctgacgaggctggtggcgcagcatggcccccaccggtggagcatcatcagcggcgccatcccggggcgctccggcaagtcgtgccggctgcggtggtgcaaccagctgagcccggccgtgcagcaccgccccttcaccccgcaagaggatgccctcctcgccgccgcccatgcccgccacgggaacaagtgggccaccatcgcccgcctcctccccggccgcaccgacaactccgtcaagaaccactggaactccaacctccggaggtgcctccgccgccaagccaaattcaaatccaaggaccctgatctgctgcccgatccaattaatattccacctgactgcatcgtcgtgctcaacgacgacgacgagcctgcagatcggccggtcacgccgcccgccatcatccaggcccaggcccaggagacactaccgtcgctgaccctgagccttagcctttccctgcccggcgccgctgctgctgctgctgaggttgaggtggcaccgccgccgcccagggcactggcagctgcttctgagatccaagacggcagcagcagatcatcatcggcatcgcgtgtcatgttgcaggtgatgcgacagatggtgagggaagaggtgcagcgccatactgcgcagctcgcctactccctcatggccctggcctcctgcagccgtaggcccccaaattaggagcattcattttcagactttgttcaaacatcgatcgatcatcaaataaaaatttctcaggaggagttgcatgcttg

SEQ ID NO: 13284 - DNA, 1241 bp, Oryza sativa
  ref <308>: DATABASE ACCESSION NUMBER: AK110632
  ref <309>: DATABASE ENTRY DATE: 2001-12-06
acacccaaatcacacacgccaacatgagcaagcagacctacaacgtcgtcgtcctccccggtgacggcatcggccccgaggtcgtcgagcaggccacgcgcgtgctcgagctcatctcgtccaagagcgactccttctccatcaacctcaagcccttcgactttggcggcgccgccatcgactcgaccggcaagccgctgccggacgacacgctcgaggcgtgcaagaccgcagatgccatcctcatgggctccgtcggtggtcccaagtggggcgtcggcaaggtgcgtccggagcagggtcttctggcgctgcgcaaggagctcgacctgtacgccaacatccgtccgtgcctcttcccctccgagtcgctgctctcgcactcgccgctcaagcccgaggtggccaagggcgtgtcgttcatcgtggtgcgcgagctcgtcaagggtctctactttggcgaccgccaggaggccaacctggacgacccttcgtccgacggtgcggcgtacgacaccatggtgtacaacaagttcgacgtggagcgcatcaccaagctcgcgtcgtacctcgcgctccagtcgtcgccacccgcgccgctgcactcgatcgacaaggccaacgtgctggccacgtcgcgtctgtggcgcaaggtggtgcaggataccgtagacacccagtttgcatcgcagggcattaccgtcgaccaccagctcgtcgactcggcctcgatggtcatggtctcgaaccctcgcaagctcaacggcatcgtgctcaccgagaacatgtttggcgacattctgtccgacgagtcgtccgtcatccccggtgcgctcggtctgctgccttcggcttcgctctcgggcctgccggatggcaagagcagatgcaacggtctgtacgagcccatccacggctcggcgcccgacattgccggccgcggcatcgccaaccccgtcggcaccatcctctccgccgccatgctgctccgctactcgctccaccagcccgagctcgcagacaaggtcgaggctgccgtcaggaaggtgctcgacgccaaggacattggcggccacgaactcaggaccgccgacctcggcggcaagcacggctccaaggacgttggtgacgccgtcatcgccgccctcgaagccctcctctagatcgacacacacacgtccacttcttctcgacgtgatccaaaaatcccttgacttaatctcaacgaccgcattctcagc

SEQ ID NO: 13285 - DNA, 919 bp, Oryza sativa
  ref <308>: DATABASE ACCESSION NUMBER: AK110633
  ref <309>: DATABASE ENTRY DATE: 2001-12-06
acaaacctctcgcgctctcgcgtcgcgtgcctcctgtctgccatgtgggcatcgccggggaggctgccggcgacgatggcggaggagggaggggacgacggggaggcggacgtggacgcgtcgtcgtacgggcgacggacgacgacggcgcgcggcgggggagcggcggcgatggcgtcgtcgtgctggggccggctcgggctcgcggcgctgtggcacaggctgcgtcagctcagcgtggcgcggcggaggcggcggcacggcggaggcggcggcggccgctccatcctcggcgccggggggctcaactacgacccgctcagctacgcgcagaacttcgacgacggctgcctcgagccggacttcacggtcaccgccaggttcgcgccaccgcgcagcgccggctcgccgaggctcccgcccgcagcgccggcggcggcctcggcatgacgagtcgtggcatgtggtatttaatcttacttacatggtttgtttttgccatagctgtagctttgttcgcccagtggtaaactgtcattacgtactccgcatgttttttcagatgaatgtacatacatgtcagaattcagatgaacggatcatggcttgtaacttgtattacctccgtcccaaaataagtgcagccatgagtttcagcgcccaactttgatcatccgtcttattcgaaatttttttataattagcaattttgtagttataagatgataaaacatgaatactactttactcgtgaattatgttttaaatttttttcaaaaatttttcaaataagacgagttgttaaagttagacgtggaaaaccatggctgcacttattttaggacggagggagtaagtagattattttgatatagtctagtatcagtttcgatgaaggaaaaggaaaatcttttcactg

SEQ ID NO: 13286 - DNA, 1232 bp, Oryza sativa
  ref <308>: DATABASE ACCESSION NUMBER: AK110634
  ref <309>: DATABASE ENTRY DATE: 2001-12-06
tgtcgcctccaaagaggtgtcgctgctcgagtcggccgacaaccatccaaacgtcattcgctacttctacaaggagcttacgccgagcttcctgttcattgcgctcgaactgtgtccggcaagtcttgccgaggtggtcgagcgaccggccgactatcgcgatctcagcaacctgctggaccccaagagggccttgcatcagatcacgtcgggtctgcgacatttgcattcgctttcgatcgtgcaccgcgatatcaagccgcagaacattctggtggcgacgtcgaccaatggcaagcatctcaagatgctgctctcggactttggactgtcgaagcgcctggacggcggggcgcagacgagcttctcgcagacggtcaacaatccgggcggtacggtcggctggcgagcgcccgaaatcctgcgcggcgacgtcaacctcgacgccggctccgagtccgagtcgtcgatgggcaacaaccccaaggcgagctcttcgagggaggagaagcagcgcctgacgcgcgctgtggacatctttgcgctcggatgtctggcgtactatgtactctcgaacggagaccatccgttcgggtcgcggttcgagcgcgagatgaacatcatccgcaagcgcgtcgacctctcgcgactcgacgggctgggcgaagaggggcacgaggcgcaggatctggtgctcaacatggtctcgcacgacccgaggcatcggccgtcggcagccgaggtgctgacgcatccgtacttctgggatccgaacaagcggctcaacttcttgcaggatgcgtcggaccgattcgagatcatggacaaggatccgcccacggcggcgctggtgctgctcgagtccaaggcgcgcaacgtgctcggcactgactggcatcgccgatgcgacaagatgttcctcgacaacctcggcaagttccgcaagtacgatccggcgtccgtgcaagacctgctgcgcgccatgcgcaacaagaagcaccattaccaggatttgcccccaacactcaaaaagattctggggagcttgccggatggctacctcaactactttacaaggaggttccccgaactcttcctgcacgtgtacaacacggtggtgcagcagccgctgatccggaccgaaccggtgttcagggagtacttccactgcgcggaaccggagcactagccactctcgtcacactaagtaatttgcactgtatttgtaccgg

SEQ ID NO: 13287 - DNA, 675 bp, Oryza sativa
  ref <308>: DATABASE ACCESSION NUMBER: AK110635
  ref <309>: DATABASE ENTRY DATE: 2001-12-06
acctaccacccgtagattaatcagtcaaaatgtccgcctccgacgacgagcagcacaacgccaccttcgagtccgccgatgccggctcctcgctgaccttccccatgcagtgctctgctctgcgtaagaacggtcacgtcgtcatcaagggccgcccttgcaagatcatcgacatgtccacctcgaagaccggcaagcacggtcacgccaaggtccaccttgtcgccaccgacatcttcacctcgaagaagtacgaggacatctcgccctcgacccacaacatggacgtccccaacgtcagccgtaacgagttccagctcgtcaacattgacgacggttacctcaacctcatgaccaacgacggcgacaccaaggacgacgtccgtgtccccgacggcgagctcggtgagcagatccaggccgccttcgacgacggcaaggacctcatggtcaccatcgtctccgccatgggcgaggagcactgcctctcgttcaaggatgctccccagggcaagtaaatcttgtcccccaaaattgtcatcgcgctgcctttgcgggcgatgcactcgtccgcgcgcacacacgtgtgagcgtgttcgacgaatcttgcatcgtcttgtttgtctacgcttgaccttttagcgtgcatgcgcaatcctacacacacttgtggcc

SEQ ID NO: 13288 - DNA, 776 bp, Oryza sativa
  ref <308>: DATABASE ACCESSION NUMBER: AK110636
  ref <309>: DATABASE ENTRY DATE: 2001-12-06
gagcaggcgcggcggcagactaggcgtgagtggccggcggcggagcaagagcggtggcggcgggagagggggagagagacggccagcgcgatggcgagctcggcggcggagagtagcggccagctgctaccgccggtgccccctctcctgccgctcctctcccccgccgtcgcgccgtgccgcctttggcatgaactgcccgatcgacagcagcgcgaatccgacgaagtagttgcacaccacgtacgtgtgcgagatgcccttcgccttcacggtgcgccagatgcccaccttgctgccgtagatggacgggacctgaccggctccaccgcggcgctggcgccgcgccccgggtccaggccgaactcggaggggatgaacctccggacgtggccgccgccgatctccttgatggcggtgatgagactggtctggtcagggacctggggcgactgcactgcggtgcggagatgacgacgtcggtgtcgcggactgcacgcagcaggctagcgtggtcgtagaggtcgccatggaggagggtgacgccggcgttgcggaagctttggagcagctgcgccttgacgagggcggtggtgagatgacccagccgcgcgcgggcggcgacgacatgccggccgatgtaccccgtgcccccgaccaccaggatcctgctcttcgtcgtctggtcgccaccggatgccattgataaatttgcctttgcgtattgtatgattgaaattgtatcaggaaacaagtaaaaaagaggtaaagcaaag

SEQ ID NO: 13289 - DNA, 702 bp, Oryza sativa
  ref <308>: DATABASE ACCESSION NUMBER: AK110637
  ref <309>: DATABASE ENTRY DATE: 2001-12-06
cctccatgctccttttcccccctaccacaacccaactctcattcttcctcccgcgtgtttgccaaagagtcgccatattcaccgacggccgccgccgccgcgcgctcgtctcgttcgcctctcctctgcgtcgccgccgccgtcccgacgattcaaggttcaagagtcgatggaagaccaaacagctgctgcagcaggtcttgattcaagagtgaaagccagcttggttcttggaacagaatcatttgcaatcagttcagagtccggtattctatcggagcagctggctgctatgaaggagaagagcatggagatcctgaagggctacatcaccaagcataatgctcccgctgatgtccctgatgaacccatcgagggattatctgatgatgaaggagacgcacctgctaagaacccaccaaagaaacctaagaagcagaagtgatcatccaattgtaatggaaaaggttgatctggaaaagatgtgatcgtcctatcgttggattcatgatgcttagaatttgtaagaaattagctgctcgtacaatagtttgctcaaaggctgaacacactgtatttctccagctagatgcagatctgcccattaacttgtatgagtaagatatatcaacttgaggggtacatgtaaactgcagcataagaaattctggcaattgcatatgctatcatgagtattcaatc

SEQ ID NO: 13290 - DNA, 1626 bp, Oryza sativa
  ref <308>: DATABASE ACCESSION NUMBER: AK110638
  ref <309>: DATABASE ENTRY DATE: 2001-12-06
accatctcccctctcccctcgcttccatccctacccatctagctcccacatttgaatcatgcgcgagctcatcacattcgcctgcggtcaagcgggtaaccagatcagctctgctttctggcagtgcatcctcaacgagcacggtctcgacggcgatggccgatacatcggcagcaatgaagacgagcagctcgccaaagtaggcgtcttcttcgagccctccggccaggagggcaagtatgtgcctcgctcgatccaggtcgaccttgagcccggcaccatggacacgatccgctctggcccactgggcaagctgttccgaccggacaactacatcaacggcgagtctggcgcgggcaacaacttctccaagggttactacacggagggcgccgagctgctggaccaggtgctcgacgtggcgcgcaaggaggccgaaaagaccgacatgctgcagggcttccagctcgtgcactcgctcggcggcggtacaggttcgggtctcggcaccaacctgctgacgaagctgcgcgaagagttcccggaccgcatgctggcgacgtggtcggttctgccgtcgcccaaggtgtcggacacggtggtggagccgtacaatgcgacgctgagtttccaccagctggtggagaactcggacatgacgttctgcctggataacgaggcgctgtacgacatctgccagcgcacgctgcgcaccaagaacccgacgtactcggacctcaactcgatcatctctttcgcgatgagcggatgctcgacgacgctgcgattcccgggtcagctcaactcggatctgcgcaagatgggtgtgaacctggtgccgttcccgcgactgcactttttcaccacgggttttgcgccgctggtggcgccgggtagcaaggcgtaccagtcgctcaagacgtccgagttgattgcgcaggggtatgatcccaagaacattatggctgccatcgacccccgtcacggaaagtaccttacggttgcggcaatcttccgaggcaacgtcaatgcgcgcgatgttgagaacgagatgtacaacctgcgcgagaagaaccccgccgggtttgtcgagtggatccccaacaatgtgttgacatcgctttgcgatattgcgccgcctcagctcaagatgtcggctacgtttattgccaacactacgtcgatccaggagctgtttaagcgcacgcacgatcagttcagtctcatgttccgtcgcaaggccttcttgcactggtacaccggcgagggcatggacgagatggagtttacagaggccgagtccaacctcatggacctgatcgccgaataccaacagtacgagtcggcaggtgtggacgaggtagacgaggagctgtacgaacaagaataccagggcgaggtagacggtcaacaagaatatgccgacgactcggtccagtacgccgacgagcaatgaccaaactcaaagtctcgtctcgtacctgaaacaccctactcgccttccaagtctcgtcaaaaaagaatcgtcccttaccctcctagcctccctgtcctgcctgtcctccctgtcctcactcttctccctctcgcctgtactacgatccttgaaaatcagcgtgaccattg

SEQ ID NO: 13291 - DNA, 690 bp, Oryza sativa
  ref <308>: DATABASE ACCESSION NUMBER: AK110639
  ref <309>: DATABASE ENTRY DATE: 2001-12-06
aagctggctattactagtagctttgcacacgaaatcgacacgaggagcgcggcacgcgagcatcaggtggtgccgtggtggtgggcatcggcgcggcggtgatgtgcaacgggcgggagtgcaagcgggagtccgcgttccgcgcggcgtcgctgctgcgggagcgcgacgccgccaagggcgagcagcagcagcggcagccttcggtggacgggcgcggccggcaggcgacggaggcggaggcggaggcggtgacgatgtcgagggcgagggcgagggcgagagcgagagcgtgggaggcggaggtgcggaggcggcacgcggcggagacggagatcatgaagacggagaagatcatgcacctgctgctctgggggcccaactgacggcgatccggcctgtctcgtgtctcctctgtgccccgggaagctaggttgcatcgtaccaaaccgtttgtgtgacggggctctaccgctctatggcttggcaacttgcatacttgtttatttgtttctgttacttggcaaagctgctcaattatttggttcgcttactccacaagctgcacgatcacgttgcttggcagattgcgatttgtgttagtgtttcttcctttgtttaggtgtttattacagagaaaattagctcatcttctcaaataaagaagagaaaggaagagaaagttcattt

SEQ ID NO: 13292 - DNA, 1012 bp, Oryza sativa
  ref <308>: DATABASE ACCESSION NUMBER: AK110640
  ref <309>: DATABASE ENTRY DATE: 2001-12-06
cgtgccggcgacgcatcattcaaatttctgccctatcaactttcgatggtaggataggggcctaccatggtggtgacgggtgacggagaattagggttcgattccggagagggagcctgagaaacggctaccacatccaaggaaggcagcaggcgcgcaaattacccaatcctgacacggggaggtagtgacaataaataacaataccgggcgctttagtgtctggtaattggaatgagtacaatctaaatcccttaacgaggatccattggagggcaagtctggtgccagcagccgcggtaattccagctccaatagcgtatatttaagttgttgcagttaaaaagctcgatcacctccacctcgcaaacagaaccagtactttaatttcaccttgcaaattcagttgaattcggctcgttcaggttcagtcgtttgatcatcatggctagtatggccaagtcgctcttgtgcatctcgctcgtcgccatcctgctcctcgtcgagactactgctccacatggacaagcttacgccatcgattgcggggcgaagtgcgggtaccggtgcagcaagtcggggcggccgaagatgtgcctgagagcatgcggcacctgctgccagtgctgcggctgcgtgccgccgggcacctccggcaacgagaacgtctgcccctgctacgccaacatgaccacccacaacggccgccacaagtgcccttgatcatctcgaccaatatatcaccgctcgatcaccgcgccgccgctttgctatccaaccgaccggtgatgatacatggcggcaaccttgtgatgatcctagctagctagatgtgctacctacttcgtgcctgcatgcatgtagcttgcatatgcatgctagttttgctatatcgcgtatttgctacttggaatatgtatgatgtgtgtgcatatatatgtggcgtgtcgtgatcgatcgatcgatcgaccgtgtacgagcaaataagtaatataatgaagtatttgctttt

SEQ ID NO: 13293 - DNA, 1458 bp, Oryza sativa
  ref <308>: DATABASE ACCESSION NUMBER: AK110641
  ref <309>: DATABASE ENTRY DATE: 2001-12-06
tatgactctcttaaggtagccaaatgcctcgtcatctaattagtgacgcgcatgaatggaacttcgtcgtcttcctctgctgcttccttctcctccaagcccccgctccgctccgacgacctcgccgcctccgcctacaggtgggcagatggcgccgtccaagcagtacagcgaaggcgggcagctccagctcatggacgccgagaggatcgaggaggaggaggagtgcttcgagtccatcgacaagctaatctcgcaagggataaactctggagatgtgaagaagctgcaggatgctggtatctacacttgcaatggcctcatgatgcatacaaagaagagcctgacaggaatcaagggattatctgaagcaaaggtagacaagatctgcgaagcagccgaaaaacttctgagtcagggcttcataacaggaagtgatctccttattaagcggaaatctgttgttcgaatcaccactgggagccaggcgcttgacaagctgcttggcggagggattgaaacactttgcatcacagaggcatttggagaatttcgatcagggaagacccagttggctcacactctatgcgtctccgctcagcttccaatccacatgcatggggggaacgggaaggttgcttacattgatactgagggaacattccggcctgaacgaattgtgccgattgctgagagatttgggatggatgccaatgctgttcttgataatatcatatatgctcgtgcatacacctatgagcaccagtacaaccttctccttggccttgccgctaagatggctgaagagcctttcaggcttctgattgtggattctgtgatcgcactattccgtgtcgatttcagtggcaggggtgaacttgcagagcgccagcaaaaattggcacagatgctctcccgccttactaaaatagctgaggagttcaatgttgcagtgtacatcaccaaccaagtgattgccgacccaggtggtggaatgttcataactgacctgaaaaaaccagcgggaggccacgtgctggcgcatgcagctaccatccggttgatgctgaggaaaggcaaaggagagcagcgtgtctgcaagatctttgatgcccctaacctgcctgagggagaagctgttttccaggtaacatcaggtggaataatggatgcgaaagactgaatgttcattgagggtgcttcctgtcttcaaattattcaggtttctcctagtaaattcctgcataggccatataggtttggtacattgactaaactactactgctactttgccactgtcgaggaaatatgcaacctcatttatccagacgattataccttaaaatgggtatttttctatgcttatgagatcaacagttgtactgaaacaaatacagtattgtcttaagtgaaaaatatataagaggtttacatgatggtaactttccccagaaact

SEQ ID NO: 13294 - DNA, 885 bp, Oryza sativa
  ref <308>: DATABASE ACCESSION NUMBER: AK110642
  ref <309>: DATABASE ENTRY DATE: 2001-12-06
aaatcacacacacacactctcttcactcttcgcttgacatgggtctattggacaaactcgcaagcaaagtcggcggcaactcgggtcgacccccctcgcagcagtacggcggtggaggtggctacggtcagcaacccccctaccagcatcagcagcagcagcactacgggggtggcgggtacaaccaaggtccgcctcagcagtcgtctggctatcctgctgctgcatctcctcagccgcagggtggagagaagcccaaggacgacgatcggccgttgccggacggatgggtgaagcagtgggactcgaactactcgcgctacttctacgtcgacacgcgcgccactccgccacggtccatctgggtccacccgaatgacgagaacaagtcgagcactccagctgcaggcgggtatgctcctccacccggtgggcctcccgacaaccgtggctacggccagcagccttatcctcaacagcaatacggtcagccgcagtacggtcaacagccatacggcggataccagcagcaacccatgtaccagcaacagcccatgatggccggtggtcccatgggcggcatgggcggtcgcaggttcggcggcggcggaggaggcggcatgggcatggccggaggtgccgcgctcggtctcggtgccggcatgctcggcggtgcattgatctcgaaccagatgaacgacgcttaccaggacggataccaggacggcgcccaggacgactttggcggaggcggcgacgactttggcggtggagacttctgatctccccactcagctgcgaggtggattctgttcgttggattctgtttgtatatctgcgcagtgtgtccatatgattattattcctccaaaaaaaaaaaaaaac

SEQ ID NO: 13295 - DNA, 1044 bp, Oryza sativa
  ref <308>: DATABASE ACCESSION NUMBER: AK110643
  ref <309>: DATABASE ENTRY DATE: 2001-12-06
atcatcactcatctcttctacacatctctttactactcttctctccactctactcaagctctctggtcctctcttcggaatcacaccctcaacttttacatctcaaaatgaagttctccgccgttctcatcgctgcttcgcttgccgtcgctgtctccgccgctcctacctcctacaggggctcgtacggtattgccaacggcaacgccaacggcaacgccaactctgccagctggtcgggtaacgacaacggcaacggcaacaagggttacggcaacggcaacggcaacggcaacctgaactactggggcacgaacctcggcaacgacaacggtaacggcaacaagggtgctctcaacggcaacgccaacggtaacctgaactcgggatacaacgccggtaacgagaacggcaacggcaacaagggtgtcggtaacggtaacggcaacggtaacgccaacactggtggttccctcaacagctggtacgatggcactaccggaagcggtaacggtaacggcaacaagggttacggcaacggtaacatcaacggtaacggcaacactgcctcgttctcgggtaacgacaacggcaacggcaacaccggcgccctcaacggcaacctcaacggcaacggcaacaccggtgtcggcagcggcaacggcaacggcaacggcaaccactgagtcgatcctcaccgcgacctggcgctgtctcgtgcaactccttctccatcctgcaggattcgtgatgcgccccctttgctccggttcactagtcatggattttctcgcagcaagcgtctcggtgacgcagctcggtcattaaaacgtcaccctctcggttcaaaccccaacatttctcactcccctttctgcttctaagttcattctagatgtctgatcgacgtgctcagccactgctatacgctggcttgggtctctcggacacttctccttatgggtcttcatttttctttgcatagctgttgaacacggtctgcgatgttctctctctggcctcgaattcaatcagcttctctcc

SEQ ID NO: 13296 - DNA, 878 bp, Oryza sativa
  ref <308>: DATABASE ACCESSION NUMBER: AK110644
  ref <309>: DATABASE ENTRY DATE: 2001-12-06
aaaaactcctttttctcaactttttcccctccctctctcctcaaccaccgatgcctttccccttcctctatcgcgcgacgggcggagctcgccatgggcgacaacggcggggccaagcggagctgccgcaccgacgctagggcccgggcggcggggcggccagatctgacgcctggcggcggcggcggtagcggggccaggcggagttacggctgcggcgccgggccccgggctgcggggtggccagatctgacgcctggcggcggggccaagcggagctgcggcgccgacgcgggggctcgggcgacgatggagacgggcggagtgtcggcgctgacgccggggcggccgagaatcacccctcgtctcctccctcggtcggcgcctctcctcctctcccagtccatggagtgacctcgccagcgacgacctcaagttggctgtggcgctttgacctgccgggacggcgacgacggtggcgccaacctcctcttctcctcccccgctatcgcctcctcctccagcccgtcggctgcctcgcccctctcccctctctcctctagcacgagtgtgggtcccaccgagacctgaggaactcgtagccaaacttggctactcggacctgagcaagctgcacggtttgacgatgtggcagggaatattcggtttttggtgtggaggctgaatgccacgtaagcccacggcgaatggcctaacggcgtggctgccatggctgatggctcattagttctagtagtacttgctacttggacggagcatttatctagctctcgtttctgacagcttgtatggcaacacactcctcatgccggaaaaagagaagagaagagaggcgcattgcctgacagattctgttc

SEQ ID NO: 13297 - DNA, 1125 bp, Oryza sativa
  ref <308>: DATABASE ACCESSION NUMBER: AK110645
  ref <309>: DATABASE ENTRY DATE: 2001-12-06
cgtctcgttcttcggcatcaaagccatcttgccgtttgagcgatatgcttggatcgtctatctgatcgtattcctcatcattctcggcatgacgggaccttccgcagacaacacaactcccacacaactgaagggtttggatcttagcggtaacgtgctgtccctcctcgccgtcgtctacggtagctcggcgtcctggtgcaccgccgcctcagactattacgtcctctaccctccaaacaccagccgcaccaaagtcttcatcctgacaacaatgggcatcgccctgcccacctctttcggcatggtgtctggctgtgtcgtctcttccgccctcaacaacgaacccacctggaacgcagcctacaccgaaaacggcggcagcggcctgggcttcctccttcaaacagccctctaccctctcggcttcgctaaattcctcctggtcctgctcgtcctcagcggcatcaactgcaacatcatcaacacctactccgccgccctgtcctgccagcaattcgcacgcccattcgctcgcatcccccgcgtgatctggaccgtcgcctgcttcggcgtcatccttgccatcgcccttgcaggccgcgaccacctgatcgactacctcgagaacttcctctccctgctgggctactggtgcacgtcttacttcgtcatcgtcgccacagagcacttcctcttccgcaaagccgacgtcgcgaaccgctacgacctcgagggctggaatgatcccgcgaaattgccatatggttacgctgcgattactgctttcttgctcggagtcgtcatgtggtgtatgggaatggttgaaacgtggttcgttggacccgtgggcaagttgatcgggagcagtggtggtgatgtggcgaacgagatgactttcgccatgaccctggtggcgtatgtgccgttgaggtatttggagttgaagtatgctggcaagtaagcaaaggaggaggaagagatgtatatcgattgctgctgtgcggaatcgttcgggtatgcaattgaactgcgactttatgtgtaatacaatacgacgatttgaatgagtatgagactcctgagtttcgatcaatgttgtttcgagatcaaaaaaaaaaaaag

SEQ ID NO: 13298 - DNA, 935 bp, Oryza sativa
  ref <308>: DATABASE ACCESSION NUMBER: AK110646
  ref <309>: DATABASE ENTRY DATE: 2001-12-06
tacaacgcatgaccttagcttgtggtctcacggctctacgtcggagccgagctgagctggcacgcccgctcgtggtctcgcaggcgcgcagcgagcttgtagaaaaaccgaaagaagcaccgcgcctgcgctcgggagccgtgaagccacgagccgaagcctcgcgttggaggagtcggagccccggtcgtcgcctcgtccggacccccgtgcaactgccccaaatccccatctcgtcatggtcgtcgtcgccaccaaatctgctgccaccgccatggtcgtcgtcgctgtcagatcaacgcagccgccatggtcgtcgtcgtggtcgtcgtcgtcgccagatccggcgccaccggtgctccctgccactgagctcgccccggagaggggaggggagcagtcggcgagctccccgccgccagatccggcgccaccgctactccccgccgccgagctcgtgccggagagaggaggggagcagccggcgagctcgcgctcgagaggggaggggagcagccggcgagcccgcgccggaggggaggggagcagccggcgagctcctcgccgccagatccgcctccactgctgctcctcgccgccgccagacccgtcgccaccgctgctccccgccgtcgacctcgcgccggagaggggaggggagaaaccggcgaggggaggggagaggagaagagaaccgagcgacacgatgcggctgtcggtggagaaaaatcgaagagagagagaggggaataaaaaagagagggatgggaagagactgacagtgggtcccaggttgtttaggggtgtacatatacttcttttggttactctagggttcaaaatataaagtttcaataggttttataatacaagggctgacatataaatagataggggctgatatgcaaaatacgttttggagtggtttccactgt

SEQ ID NO: 13299 - DNA, 1063 bp, Oryza sativa
  ref <308>: DATABASE ACCESSION NUMBER: AK110647
  ref <309>: DATABASE ENTRY DATE: 2001-12-06
gcaatctcggaaggatgaattgaagggcactatcaagctggtgttccagccagccgaagagggccacgccggggcgtaccacgtcctggaatcgggcctcctggacgacgtctccgtcatcttcggcctccacgtcatcccgaacctccccgtcggcgtcgtggcgtcccggccggggccgttcatgtcggcggcggcgcggtttgccgcgacgttcaccggcaagggcggccacgccggcgtcccccacgacgccgtggaccccgtcgtcgccgtctcctccgccgtcctcagtctccagcagctggtctcccgggagaccgaccctctcgaggctgctgtggtctctatcacaatactgaaaggaggtgatgcttacaatgtcattcctgaatctgcatcgctgggaggcaccttcaggagcatgactgatgaaggcctggcatatctgatgaagaggatcagagagatcatcgaagcccaggccggcgtgaaccgctgcgccgccgccgtcgacttcctggaggaggagctccggccgtacccggccaccgtgaacgacgacgggatgtacggccacgccaaggcggtggcggaggcgatgctcggcgaggccaacgtgagggtcgccgcccggagcatgggcggcgaggacttcgccttctacgcgcggcggtcgccgggggccttcttcttcatcggcgtcggcaacgagaccaccatggggcccgccgccgccgtccggccggtgcactcgccgcacttcgtcctcgacgagcgcgcgctgccggtcggggcggcgctccacgccgccgtcgcgatcgagtacctgaacaagcacgactgctcgtgaatctcgtgtgtgatccaattgaaatatacttcgtatcaagcaatcgatcgacctgtggtgaaaataattagaaaaagaaatgagtatttgtcatagcttgctggctagtgaatactatgtgtgtgatttattacggtatgtgatagtttgggcattttatattgaataaattttgctggcataaattaatcaatttgcaaccgagtacgt

SEQ ID NO: 13300 - DNA, 1255 bp, Oryza sativa
  ref <308>: DATABASE ACCESSION NUMBER: AK110648
  ref <309>: DATABASE ENTRY DATE: 2001-12-06
gagctcaccgcacccgtcgcaccgcaccgcaccgcaccgaaccgcgcgcggcaggaggagaccaccgtcctttcctctccgcctcggcctcgctccctccggccccgaccgacggcgacccccgcgaccgccgcttcctccccgcccccgccgccgatctccgctccggctgctccaggcggcgaccttctccccctcgcgccactggggggatccaccccggagtactgagcatctgttccagggaaggggagcggcggcggcggttttggtttggcgttggtgagttgattttgatggtacaatgagcaggccaaacacacgaaataagagcaagaggccgcgggctgatgactgcgagagcccgtctgctgttttcaagaagatacattccactggagcaatcacaaaaggcgatattaaacaactttatatggtgtggaaacctgtttgtcatggttgccatgggaactccaaggactcacccaattgtttctgcgggttgatccctgctgctaatggggtgaggaaatctggcctgtggcagagaacaaacgagatcattcgcgcccttggtcctaacccgtcgacggatcttcgtgactccactgagacgcctgctggattgactaacctgggcgctacctgttatgcaaacagcatactgcagtgcctttacatgaacacctccttccgcttgggcattttctctctagagcccgacatcttgaagatgcaccctgtgctggatcagcttgctcggttattcgctcagctacagtccagcaaaatggctttcattgattcggcaccttttataaaaaccttggaattagataatggtgtccagcaggacagccatgaattcctcacattatttttgtctttgctcgagggttcactaagtcattccaaggttccaggggctagaaccattgtgcagcatttgttccgtggaagtgtgtcccatgttactcggtgctcatcatgtggaagggattccgaagcatcttcaaagatggaagacttttacgaactggagcttaacattaaaggtttaaataatctagaacaaagtttggatgactatttgagtactgaggcactggatggagagaaccagtacttctgtgagtcatgtcagaaaagggtagatgccactcgttgcataaaacttcgctcacttcctcctgttgttaattttcagctgaaacgctatgtattcctcccaaaggtgtagcttgctttatattcc

SEQ ID NO: 13301 - DNA, 538 bp, Oryza sativa
  ref <308>: DATABASE ACCESSION NUMBER: AK110649
  ref <309>: DATABASE ENTRY DATE: 2001-12-06
accaacattgatagcccgatctccaacgctgttgttctccacctctctctcttcccttcatcggcggatacgctcctcttccctttctccacccctccctcatcttcgcccgctcaagctctctcccctcttcaccgccgagatcgagccaccgccgcctctccttctacagttgccgtgatcgagcgaggaacctagcttcgaggagagcgaggccggggttggcggccgggcggggcaggggctggcggctggtggcggcaggctgcacgtagggcgggggatggcgaccggcggcgtggccgtgcggagggctgcgcggcaagcggtggcctgcggctctgccggaggggaagcaggaggcggcagtggggcgcatggatatgtgatgttttcttctttttttttttttagaatttgtgattctagatctaagatgtatttgatttgcgtgtgatatgaatatgtgatgtatttgtgatgtaattccttttgaatttgtgatgtatttggagatgatcgatttgaggatttggac

SEQ ID NO: 13302 - DNA, 904 bp, Oryza sativa
  ref <308>: DATABASE ACCESSION NUMBER: AK110650
  ref <309>: DATABASE ENTRY DATE: 2001-12-06
ctcctcctcctcctcttccacctccaccctaccactctccaccacccacccgcccgtccgcctccctccgctccgctgctgcagccagccaacccagccttgctgcctcgcgggcgaacaaaaacccccagaattctccgcgtcgatctcgccccgccgcgtcccggctcgacgcgggccggcgccgtgagggtggggatcgcatgtgaagcgcattggagcggatagctcgtctctatttgggggaattttttttagttttttgtttggggtttccaatcctttttcttcggcggagccgcgagcgtaggtgcgtctatctgctccgtctccggtggttgttttgattttatccgatttcgaggggggttcttgtgggcggtgtgattaggcggggtgatctcggctcgatcgatcggaacatcatctgcaggggaagcggttggcctccccccctacgccctttgaggatttttttacccttggtgtgatgagatagatgtgtgctgttttggggattttggtaggtcgatcggatcatcggatgcgctatgccagcatattcttgtcgtgtttcctgatctgagcactaagcctcaggcagtgatgagagttcggtggagctcgttagtttagtcgatcgtgctgctcaccctagagcttttcccccttttgtttaatggagaaaaactcataagcatactgtttctgttgttagcttagctgtctattgggatttcttttggagagtttagatgcagcaacaagtagagtgctaggataggctattatttatcatttgtttatctgtggctgtgatcaatatggagcatcttcaccactacctgactgtaaataagtaattgatagtgttgactaattggaaacgtcactatcaattgat

SEQ ID NO: 13303 - DNA, 857 bp, Oryza sativa
  ref <308>: DATABASE ACCESSION NUMBER: AK110651
  ref <309>: DATABASE ENTRY DATE: 2001-12-06
aaacgcagagtgagagcacctcatctcgcccccatcttccttcttcctccttgccggccgagagaacttcatcgtcgccgccgtgtttctgtgaatctccgggaacgcacatctctttttggaggcccggagcgcggccggcgtcgtcgcgtcacccaagcttccagtgttcccgacgttccaggccgagatactgggtggtgctgctcattctagttcatcttccatcttcctcccagatgtaacaccgtcaagaatcaccccaagccgagctccaggcgtggagaacgctcgccttctttcctcagccccgatctagacccgttggctttgttcccccctgtccgatctagtcgttctcgggtcgtcatcgtgtttgttgtgttgccgggcatctccaacgccgtcgctgcttcctggacctctccgacccctttcagctgcacggtgagacactgcatacccctgaacaccccatgcatgcacccatatagcccattccgagctgtagctcgacatgcatgcgcataccaagaaccaccgccgctgttgcttgtttttcgcgagctacagaccacctctttcatcagcgcggacacctacgtgttcgcatggacctcctctacagtttctctgttgaactcgaccccatccgagcctccgttcgccgccggcaggctctagactgagcccagcccatggctgccgccccgtgagctcgagccagggacctcatcggtgaattagctagacttgagggttctttcccaaaaaaaaaacagaccaagatacataacactgtagccttgaccgctctgtaatatccaggaagttcttaatggaaaactgttttcaac

SEQ ID NO: 13304 - DNA, 1376 bp, Oryza sativa
  ref <308>: DATABASE ACCESSION NUMBER: AK110652
  ref <309>: DATABASE ENTRY DATE: 2001-12-06
acccccctcgccgcgccacgtacgccgcatcgcatgcgcgcgctttccctcgccagagcaagtagcccgccgcctcttcttcttcacctccgacgagcccttgcacccgcgtcgtcgtcttctccggcgccggtgctgttgctgcgtcctgcggtttcttgttcttctttgtttgttagcgacagggcggcggcggctcgccggagcagcggcagcagcaggagaagcatggcgtcgcagcagttcccgccgcagaatcaggagacgcagccggggaaggagcacgccatggatccccgccccgaggccatcatccagagctacaagccagccaacaagctgaaggacaaggtggcgatcgtgaccggcggcgactccggcatcgggcgggcggtgtgcctgtgcttcgcgctggagggcgcgacggtggcgttcacgtacgtgaaggggcaggaggagaaggacgcggaggagacgctccgcgcgctgcgcgacatcagggcgcgcaccggcgccaaggaccccatggcgatccccgccgacctcgggtacgacgacaactgccgcaaggtggtcgacgaggtcgccggcgcgtacggcggcgccatcgacatcctcgtcaacaacgccgccgagcagtacgagcgcccctccatcaccgacatcaccgaggacgacctggaacgcgtgttccgcaccaacatcttctcctacttcttcatgtcgaagcacgccgtgaagcggatgcgcgatcgccgcggcggcgccggcgccggcgggtgcagcatcatcaacacgtcgtcgatcaacgcgtacaaggggaacaagacgctgctggactacacggcgaccaagggcgccatcgtggcgttcacgagggcgctggcgctgcagctggcggaggaggggatccgggtgaacggcgtcgcgccggggccgatctggacgccgctgatcccggcgtcgttcgcggaggagaaggtgaggcagttcggctcccaggtgcccatgggccgcgccggccagccgtcggaggtggcgcccagcttcgtcttcctcgccagcgacgacgcctcctacatgtccggccagatgctgcacgtcaacggcggcgtcatcgtcaacggctagtttttcacttgtcccatctcgccgccggcgggcgagctcgccgtcgccggccgccgtgtctgtcttggcttttgctgtgggcatgtgcccacgtgtttgcagtgcgagtccaccacgtgtcagtcagtagtagcttgtgatcctgtgatactgtgatgagtagagttgcagttgttgtctgtgtactaagcttgcagctcaatctgcaaggaagaagatgaataaaaacgtcccatctcatcgct

SEQ ID NO: 13305 - DNA, 903 bp, Oryza sativa
  ref <308>: DATABASE ACCESSION NUMBER: AK110653
  ref <309>: DATABASE ENTRY DATE: 2001-12-06
aggctcgtgcccgtcgcatcaacgcgtgtgcgagcgcgcggggcggctcggcgggtgattttcccttcctccctcggcggcagggcagcgccgtggatggcccgcgggtcgttaccacccaaaagcataatacgtagatgcatcataggtactggggtgccaccgcggccgccaccaccacgtagccgcagcggtccacgcaaacacgcgacgtcgcgcatttaatcgcgcgcgcgccgcacccacgcgtgcggtgctgcacggccccggatccgcgcggacggcgccgtggcggaacgccaccctcacgtgacggacgacgtagacccaccacccagccgtgaggctctcgtacgtcctgtggccggacgaacgggtggggtggcgcgcacgcgccggtggtgggcgtttgaccggacggttggcaccgtgacattgcgcggattggccgggcgtggaggtacaccggtacgtacgagtacgatctttcaccaggtttcgccgagcgtcgtagatagtagggtggtggcgcggtctcggccggccggttcgagagatgcgcgtcaccgtcctggggctggccggatgtgaagcttcgacaaggaggcggcgcgggccgatcgcctcaaggatggcagcgcactgtgggcacacatgtacacgcgcctggaccggcaggggtaccacggaactcgagaggtaccggccgccttggctggatttgtttgaaaacctggtgctcgagggctaaagatggtccaagacattattgcaaatattggttcgagtatttttcacgggggagggagtcgattttgtatttttcaaatttgtaggaacccgaatgaatgatgtaaacttgatgtcatgcagcgtcacattgcttggagattcgtgctcgcc

SEQ ID NO: 13306 - DNA, 963 bp, Oryza sativa
  ref <308>: DATABASE ACCESSION NUMBER: AK110654
  ref <309>: DATABASE ENTRY DATE: 2001-12-06
acatctcctccctctttaacccacttccttacaacaaacaacccaccctcctccaactgcgacactaccaccaaccaaacgcacaaaaggactcgaccaaaatgcccaaaatcgtcctcgccggcgcaaccggcttcattggctccgaaatcctcgagcagtgtctaaccgcccgctccatcactcacgtctactgcctgacccgccgcccgctcgccgaaaaatacagcacccaccccaaagtcacccaagtcctgcacgacaacttcgacgacctgcccgacgtgctgttcgagcgcttccgcggctggggcgtcggcggctgcatctgggcgctgggcgcccccgtcaacacccacgccaacctcgaggaagcgcagaaaaccggcatctcctaccctgtgcaagcggcggagaagtttgcgcggatatgcgcgccgaactacatggagacgcagacgggtagttacatctaccctttcagattcattttcatgagcttctggggcgcggaggagaaccagttccgcagcttgtggatttggggggacaccagacgtatcaagggcgcggcggagaaggggctgtttgaggcgatggatgcgagcgaggtggtggatggcaagaagtgtttggatgttatctcgttccgcgtcgggggtgttttggctaagggagatgcggtcacgagcatgatttctatgggtaccgtgcctagtattacggtggatcgcctggcggcgaaggcgattcataagtgtgttgtgggcgatgtggataataggagggtgttggagaatgcggaggttctgggcgaggattgggcgatgggcaactcgattcagtcgatttaagggcggtgactgctatttgtcttgcagggggaggcttcgctcgactaatgggtttggtacaatttcatggtttctttctttctttcaagttacttatggttgctctccg

SEQ ID NO: 13307 - DNA, 1159 bp, Oryza sativa
  ref <308>: DATABASE ACCESSION NUMBER: AK110655
  ref <309>: DATABASE ENTRY DATE: 2001-12-06
accaaccacctcttcaagaccctcatcacccttcttgactttttgttcccgttcgtggacaaaagacgtatcgacacacatatcgcccaacatggctgccaaggtcggaattcctaaggacgtcgctgccgtcgccgccccccaggttggtggtgttcgcctcttcggcaagtgggacccccaggaggtcgaggtcaaggacatctccctgaccgactacattgccctccgcaatgccgtctacaccccccacaccgctggccgctaccagaagaaggccttcaagaaggcccagacccccatcgtcgagcgcctggtcaactcgctcatgatgcacggccgcaacaacggcaagaagctcatggccgtccgcatcgtcgcccacgcctttgagatcatcaacctgctcaccgacgccaaccccatccagatcctcgtcgacgccatcatcaacactggtccccgtgaggactcgacccgtatcggctcggctggtaccgtccgtcgccaggccgtcgacgtgtcgcctctccgccgtgtcaacaccgccatcaccctgctcaccaccggtacccgcgagtcggccttccgcaacgtcaagtcgatcgccgagtgcctcgccgacgagctgatcaacgccgccaagggttcgtccaactcgtacgccatcaagaagcgtgacgagatggagcgtgttgcccgctccaaccgttaaagcggttgttggttcgtcgtgcgcatgcgtcgtcggcagtcgccatgctctcgggtccaggctcgagggtggctgccgcaggcgagtggacacaacagctgcgcgcgtctctttgtgcggccgctaccatttcgggttccctcttgtactttttcttcaagcggtgccaaagattcgcgggctagctgcacgattctccccatctgctggtgcaaggtgtcgagcggcttgttgatccgtggagctccgacattctttcatcagtatcttctcccccttttccccttttgcctctcctgtcctgcatcatcggatgggtgatccacgatcgaaaaggtcgattggtacgcccataccgacgaccaaggacgaagtatctcgtcgaaagacgaggctcgtctccgcatctcattcctccccctgcaattcatgtttgacgtccac

SEQ ID NO: 13308 - DNA, 599 bp, Oryza sativa
  ref <308>: DATABASE ACCESSION NUMBER: AK110656
  ref <309>: DATABASE ENTRY DATE: 2001-12-06
ctttgccatgctggccatcaacggcgccatgtcgtacccgacgctgcctcggatcagcaagtcgctgaggaactggctgccggacccgtacatgcgcatctatgtggccaacatgcaccgcagcaagcatgggtcggacaccgagtcgtttgaccgacgcggccagtttcggcagagccagctggaggccgagctgagcgaatgctcgagccgctacggcaaggatgcgctgtcgtacggcgatgtgttggccatgttccgagaacgtcgagacgtgtttgacctgtttggaatgacggccttcttgctcgagtggagcgccacctacatgctcatctggccggcggatggctacatgcgaaaggacgacatcttgggcgtctacgacggatcgctgtttgttgtgctcgcccatcgttacaagaatgggctgggtggaggtgcctttgattccaagacaggcggtgtctttgacatcaagaacggctgaagcggtgcatgacccgctcgaatggcattccgatctgtctgatgtttccactgccacgactgtatgcaatctagcatgatgccgtcctatcaagccgatcgtgcttcat

SEQ ID NO: 13309 - DNA, 917 bp, Oryza sativa
  ref <308>: DATABASE ACCESSION NUMBER: AK110657
  ref <309>: DATABASE ENTRY DATE: 2001-12-06
tactttgaagaaattagagtgctcaaagcaagccatcgctctggatacattagcatgggataacatcataggattccggtcctattgtgttggccttcgggatcggagtaatgattaatagggacagtcgggggcattcgtatttcatagtcagaggtgaaattcttggatttatgaaagacgaacaactgcgaaagcatttgccaaggatgttttcattaatggagcccacctgtcaatgactatatctcttctcttcccttcctttccgcttcatcagatcggtgctacctcatcttttgccttccgctccacgtcgggccaccgttggggagaagcgcgaacgtcagggggagtggcgacgagccggcccatggcaacgagctcgccaggtcagcaacgggcaagacgacataccgaagacggttcagcttcgtcctcctcgacatctccatgccctagcttgcgcctgctgcatgtgcttgagtagcgggtatagcggtagggcaccgcgatctcctggctgccgacggcggccgggtcgttcccctcgacgacgacgacgcacacacatgaagccagcgatgcacccggcggtggagaactgcaccgggccgaggaacttcccttcaggcaccaaatggcgtagggacgacgacaacgagatgacagctttctcttttctcttttattttttatatgtctttatctcaagatctgagctaatcaagttgtattttttttccatttaatttttaagtatttatcttagaatttgagctaatcaagttatttgagttagcttgattattttgcttcatggcttttttctgattgtgtgccattctatacgaaacaaattatgccgaacatcctactttcaatggaagtgttatactccctccgtttcataatgt

SEQ ID NO: 13310 - DNA, 1155 bp, Oryza sativa
  ref <308>: DATABASE ACCESSION NUMBER: AK110658
  ref <309>: DATABASE ENTRY DATE: 2001-12-06
cagaagcttccgccgccgccgccaaccgagccgctccgatcctccccccctcgactcggccgcgggcgtacgtagagggggaccgaccagatggtggcggcgtcgcgcctcctcgcgcgggcgtcgaggcaatgcgtcgccgcggtggcggcgtcggccgcgaggcggcggcggtgcccggcggcggcgctgtcgctgcccgtggtgaccgcggcgaaggcggcggctgcggagccgtggctcggggtcccatatatgttgaatcagcccttgagatactcaaccaccatttttcaacgttttggattttcatccacttccccggaactaagtgataaggaggaaaaccaacgcaaggaccaggagaattccacaaatgtgtcaaatgaaggcactgaagacgttgatttgtcaaaggaggatctggtgcagctagttcttgagaaggatggattgttgaagtcaaaagatgaagaaatcaatgatatgaaggacaaggttttgcgaagttatgcagaaatggaaaatgtcatagctaggacaaagcgtgaatctgagaactcaaaaaagtatgctgtgcagaatttctccaagagcctgttagatgtcgctgacaatttgactagagcatcatctgttgttaaggaaagcttctcaaaaatagatacatctaaagattctactggagctgttccactactaaaaacactgttggagggtgtggacatgacagataaacaacttggtgaggtttttaagaagtttggagttgaaaagtttgatcctttgaatgagaaatttgatcctagtagacattgtgcaatctttcaaattcctgacccctcgaaaccttcaggaactgtagcttctgttgtaaaggtgggctacatgctacatgaccgtgttctgcgccctgcagaagtcggtgttacagagggaggccccacgaccacggaggaggcagcagaaaattctgagcagaaatcgagtgaggtttaagtttgctgctgttacttcacttaacgagatagttggaacgatgtcccattttggtcctggagatgaggatgagccatgtaagataagaggagcgttattttttgttctaaccagcacaagctattgcactgtaagcaatgacaattgtgtttttgc

SEQ ID NO: 13311 - DNA, 1077 bp, Oryza sativa
  ref <308>: DATABASE ACCESSION NUMBER: AK110659
  ref <309>: DATABASE ENTRY DATE: 2001-12-06
cttcgccttcctcccgccgatcaccaggctcgtgttccggaggcggtggaacaagctggtgtcgctgcggcggcggcaggaggagctcttcgccccgctcatacgcgccaggagggaggccggcgccggcggtgactgctacgttgactccctcgtgaagctcaccatcccggaggacggcgggagggggctcaccgacgtcgagatcgtcagcctctgctccgagttcatgagcgccggcaccgacaccacggccaccgcgctgcagtgggtactggccaacctcgtcaagaacccggcgatgcaggacaagctcagggaggagatcaccgccgccgccgtcgacggcgaggtgagggaggaggatctccaggcgatgccatacctcaaggcggtggtgctggaaggtctccggcgacatcccccggaccacttcctgctcccccacaccgtggaggaggagacgacgctggacgggtaccgcgtgccggcgaacacgccggtgaacttcgcggtgggggagatcggcctcgacagcgaggtctggacctcgccggaggtgttccggcccgagcggttcctcgccggcggcgagggcgaggacgtggacctcaccggcagcaaggagatcaagatgatgccgttcggcgccggccggaggatctgccccggcatggcgctggcgctgctccacctcgagtacttcgtcgccaacctcgtcagggagttcgagtggcgcgaggtcgccggcgacgaggtcgacctcacccagaagctccagttcaccgtcgtcatgaagcggccgctcaaggccaccgccgtgccgctgcgcggcgaccgatcagccgccgccgccgtcacgggttcagcttgatcgagctaggacctcaacgacgacgatggcgacggcggccgaatggtcatggcttctcttgctcatgctaataagtagttagctattgtataatggtgattagattaagttcctctggttcttttgggaatttgtaaactaaactaatgatgtactagtgtgtatgtacaaatttgtgattagtaatttcgtaaagttagtac

SEQ ID NO: 13312 - DNA, 936 bp, Oryza sativa
  ref <308>: DATABASE ACCESSION NUMBER: AK110660
  ref <309>: DATABASE ENTRY DATE: 2001-12-06
catcgctgcccgtgatggcggtgctatgtggccaaatccgggctcggggccccagatccagcttctgctccacccaacaccagctacgccgccacacgggttggcaaacagcaaacctccgtcgttgccatgcacgctggtgctccggtcgagtcgtcctcaaggcgtgttaaccctccgcctggcaacccctgtgcatctccatgcgcccaaggagaggccccatcgtcgccaccactggccagccgagcggccgttcgcgaggagaggcaagggccgccaccgtcacctgcgtaggcttccaccatcgtcgcccgtgccgacctcctcgacaccagctgtcgcggcatcccactgtcgctagccatcatggccttccacgcaggaacccgcgtgggactcccgccgttgatgctccatcgtgccagcaactccaaccagatctggttcagaggcggcggatccacctgacggaagactagatccggctacggcagcattgaatctgtggcctacacgctgcgtcatcttcccagcgatccatgcgccaagccaccttcgtcacgctgaaggcgaggcgccgccagggttcggccccgctgccgccatcccgacttgccgcacggttctctgacagcggcgaggagagggagaggggagagcggcggcggcgggtggtaggattcgccacccaggcgtggacgacacggagggtgctgcttggatttgagtttttttttttttcatacatcatgttgaacgaaagagcagaagcattgccactcatttacagcatcacatacatttccgtcatccactgaatattcttctaattcacattcatagaaggaaaagggactgctgcagtgaacagttctttctaagatatgttgattttctctcagagaattatatggcaaagtcataaatttctcc

SEQ ID NO: 13313 - DNA, 981 bp, Oryza sativa
  ref <308>: DATABASE ACCESSION NUMBER: AK110661
  ref <309>: DATABASE ENTRY DATE: 2001-12-06
tcaaacaacatatagccgcgtctcctcatctaatccaacgccaccgtgatcatcgatggcatacgagacgtcgtctgaccaccagcttgcggcggcggcggagtttctagccgcgctgcaggtgcacctcgccggcgccgaggcgtcgtcgccgacgtgggggggccggtgcgcgtacgacgaggacttcatgatgtacgagttcaaggtccggcggtgccctcgctcgcgggcgcacgagtggacgtcgtgcccgtacgcccacccgggcgaggccgcgcggcgccgcgacccgagccacgtcacctacaccggcgagccgtgcccggacttccgcgtcgccgcccgcgccgcatgcccgcgcggctccgggtgcccgttcgcgcacgggaccttcgagacgtggctgcacccgtcgcgctaccgcacgcggccgtgccgctccggcatgctgtgcgctcgcccggtatgcttcttcgcccacaacgacaaggagctgcggatcgtgggcgacgacgctgccgccgccacgccctcgccgaggtccccgttcacgacgtcggaggactcacctccgccgtctccgatggacatgaagcagattgtccttgcaatgcaacagatggatgcgaggaaggcgacgcgatcggtcgctccaaaaacggacatgttacagcaggagctggaagaggacgctccggaactgggatgggtgtctgacctgttgatgtgaaacttgcattttgagatgtacaaattatttatataatttattttcaacagaaatgtattctgtattctatattctgtaacgtaatttcaagtatatatataggcttggtcctcgtgtaagagaactacatgatgtagactttttattcgaaatctgtgtatctttgtgcctatatattttcgctcaagtaagagcttcgtatgtatctccaattgaattttctgaaataataatgagcttttcgctgt

SEQ ID NO: 13314 - DNA, 881 bp, Oryza sativa
  ref <308>: DATABASE ACCESSION NUMBER: AK110662
  ref <309>: DATABASE ENTRY DATE: 2001-12-06
atctagacgcgccgcttgcccattgccatcgccacaacaccatggtcgcccaatctgcacccaacgcagccaatgcagcagccaaggggaatgcagcctcggcatccagccagctggccaacatctcaaagatgctcggatcccacgtcaccttcactgtgggcgacaagcagtcgcaaacgctttccggcaagctgtgggcgtacgatcccagcctcggcgtcgttggcctagagtgcgaaccgaccaccttgccgtcgcacctccaatcggccccggccgccgcagcctcggtcgcccaagcctcgcagacatctcgcaatcgcttcgcacaggcctcctccgccgtcggattcaccattgtcaaagtgtccgagatcaagaagatcgagtttcaacattccacagatgcggctaacggcgctgcatcgcaagcgcaaaccctcacgcccatccacccggtctcgctcaaggctgcccaattgagagaggcagacgcggtcaagcagagcctcaccaaggttgcacgcaccggcaaagacgtctcccagctcggtcagcaggtctttgatgccctgagcaaaacattgccgtgtcgatggcacaactcgcacatcgttgttatggaggaggtcgtcatatccggccccggctacgatgctgcttccacaaacgttcccggctttacccaagaccagctgcagtcctacatagatggaaccaacacctctccggcaccagacggcgcacaatccaaagccaacagctggcaacgcgtcacaaaagtgctccagggagaaaggcgcaagatgaacgcagcagcggcgtagattgctgccctacgcaacgcatccgcgagtccaatgaccatttctttctcc

SEQ ID NO: 13315 - DNA, 1253 bp, Oryza sativa
  ref <308>: DATABASE ACCESSION NUMBER: AK110663
  ref <309>: DATABASE ENTRY DATE: 2001-12-06
agcttaaacctctctctctctctctctctgttgtgtcagtgtgtgtgcgtggcttcgaagagcaagaagctagagcttggcgagcgttgacaatggcggagcataaggcggcgaagagcaagtccaagtcaaagagcggcggccatggccatgacgcggcggcggcgtccaagaagtcgaaaagcggcaaggccaaggcgaacaacgccgcggcggcggcgccggcgacgtcgctggacgcgctgttcaggccgtgcggcgacgtgaaggggctccggttcggcgcccagctcgtcacccgcgcgctcaccgtgcgccgcgccgcgccgctcgagctcccgcacctcctccgcgtcgccgacgagaggcagcgggaggcgccgctggcgttcgcgccgacgacgacggcgtacatcccgaccaacttcgccatcctggcgcaccacgcgtggcacaccctcacgctgggcctcggcaccaggaactccaaggccgcggtgttcgtcttcgagtccgccgccatgaaggccgccgccgacgccgcgtggccgcaggtcgtcccgctcggcgacgccgggaggcgcctcatccgcgcggcgcccggcgcgccggagatggcgaggttcaagttccgcaagggctgcgtcaccttctacgtctacgccgcgcgcaccgccggcgcccgcggcttcgcccgcgccgacgagctcagggccgtcgtcgaggccgtcgccaagctcaaggacttcctggaccacaccgccatgctcgcgctgccggggcagaggagcatcgacgtcgccgccgccgccgacgccgcggcggcggcgccggtgggcgtcgtgcattaatgcattgatgcatttcggctgcttttgtgacgaactgtgaatagagcttttatttttctttttctttttcttttggtgtgtaataattaattaattgattgatttcttgatgtgagttttttggttgagatgttgagcaaattcctttgattatgccttgtcaattgctgcattggcatgagcagatgtcaagtaattatactagcttgtaataagctgataaatttagaagttttcaggtagaaaactggaaactgatctttgcatttttttttaaattttgactcctttttgtttagttttcatgctgtgatgacttgtgtatttgagctgtataattttgtcagagctctgttcttgaatctgatttactccctctggacggaggtagtattttgtatt

SEQ ID NO: 13316 - DNA, 712 bp, Oryza sativa
  ref <308>: DATABASE ACCESSION NUMBER: AK110664
  ref <309>: DATABASE ENTRY DATE: 2001-12-06
accatcagcaactaattaaaacccatgagcctgccaattcgttcagattaacccagcatcacatatcccatcgatcgttgagtcatcacatatcgttgagcttcggtcgtcgatcaatcggccggcatcaatggcagtgctcaggaacgtcatcaccggcgttggccggcgtctggtgctcctcgtcctgacgctgttggtgttggcggcgctggatgatcaggcgccgcccatgatcatggcctccgctgccagggttttgctacaacaatatccaccgacttatgggcctccgcgctgttatccgccgtactgtgcaccgcgtcacgctcgccgatgatgtagttagttatatctgtcttaaaaaaattaacttccctgaatgaatctggataaaatatttgtctgatccattcctttttcttggacggaaggattatgcgtaagagttgtgatgagtactcctatttatttgattagtaatgtttgtgttaatttcttccataaactacaatatattgtacacctagagaaggcttctgctcctgttgctcctcctgcctggacagagctgtataatattgcttgccatttggatgcatgccttgcgatctactccgagctagagccgcgtatgaactgtctctactagctgtgtacgttgtcctactatacggccagtccatgaatatatcctgctttcagatttgat

SEQ ID NO: 13317 - DNA, 2375 bp, Oryza sativa
  ref <308>: DATABASE ACCESSION NUMBER: AK110665
  ref <309>: DATABASE ENTRY DATE: 2001-12-06
atccaccttggcccttacaacactgtgctagagacggcactggaagtcacagtcgccgggaccctcggcaactttcggctagcggcacccgatacgacgccatcggatcctacaaggacggtgcacacaacagcaatggatccagcggcgtcgacatcctcgcgcgaggacggcgacacctcagaatcccatcatgcgcaagatgacgacttcaccctgcgcgcggtgctcgcagggctgttaatcggctgcctgctcgccttcaccaatctctatctgggcctgcagtccggctggatcagcatcatgtcgctgcaaagctcgctgctgggctttgcgctgttccgcgtgattccgcggcagatcaacctggtcggacgccgcttcgtgctgatgtcgagcccgttcacgccgcaggagaatgtgctggtgcagacgacggcggcagcggtgggcgtgatgccgctctcggcgggactggtgggcgtcatcccggcactcaagaagctcacctgggacaaggacggcagtggacccatcgacctcgactttctgcagctgcttggatggtgctttgcgctggcgtactttggcgtcttcttcgcatcgccgctgcgcgaacccatgatcgtgcgcgagaagctcaccttcccctcgggcacggctacggcgcagctcatcggtgtgctccacaacaagcctctgctcacgcagcgcgcaagcacggccagaggcttccgacgccgtagtcatgccctggacgaagccgaagcgggagaagaagatgacgagcgcaccgctctgctgagctcgcagcatcgcccagcaagctcggaccgggatcaaaacgaagctgaagcaagcgacagagacaatgctggtgtcgatgcgatctccgggtccaagggatggaaggcgctcgcctgggccttttcgggatcggccggcttcacggtgctgtcgtactacatcccggtgctgtacgccatgccgctgttcgactttttgccgccgcacaacctggctgccatgtgggggttctggttcacgccctcgctcaactacatcgggcaaggcatcatcataggcctgtcgacaacggtgagcatgacggcgggcgcattggtgggctgggccgtgctgagtccgttggcgtactaccagggctgggcaccgggccacccgctggattccgagacgggcagtaagggctggatcctgtggatcagcctggcgatcatgtgctcggagagcatcgtagggctggcggcattagtcgcgagcaatggcctgcgcgatctcaagagctggacagcaagggaggacgatcgtgcgggtggccgcgacaaaggagacgaggacgtggaccacgagcctgcgcaccggcggacaccgacgtcgtgggtggtcgttgggctgattggatcgacggtggtcgccgttgtgttgatctacgtcgcctttggtgctgagggcatctcgccgtgggcgacattgttaggcatcgccatggcgtcgctgttcgccatcttgggaatccgggcgctgggcgagacggacctgaatccggtgtctgggatcggcaagatctcgcagctcatctttgcgctggtgcagccgggcaacgtggtggccaacctgatcgcgggcggcatctcggaagccggagcgatgcaggcgggagatctgatgcaggactacaagacgggccatcttgtgggcgcctcgccgcgttcgcaattcaagggacagctgattggcagcacgctaggcatcgtgatcagcagctttgcgtacaagctctatacggacgcctacgagatccctggaccgcagttcccggcaccgacggcagcggtgtggctcaacctggcgaggctggtgaatcgaggccaccttccggacaaggtgaagctgttcatgatcgtgtttggcgccgtctttgccgtgtcgggcctgatcaagacgctggcgcggaccaaggcgctgcacgaccaaggcacggtggggaacagcacggcaggcaagatcgccaaactggtgccgagcgggatcgcgtttgcggtgggcatgctcaacacgcccaacttttcgttggcgcgactggtgggcgggctgatcgcgcactggtactacgcccgcaaccgccaccgagtagatgcggccaagacgcctgcggcgctggcggggatcggcattattatcgtagcgagcgggttcgtgctgggcgagggtgcggcgagcatcgtgacgctgctgctcaagcagaacggagcgcaggcgtggacgtgtgccggctgccgcggtggatgcggaggtggctgctcttagaaatgtcgcttggaagctggatcgatttataccattcctctctg

SEQ ID NO: 13318 - DNA, 881 bp, Oryza sativa
  ref <308>: DATABASE ACCESSION NUMBER: AK110666
  ref <309>: DATABASE ENTRY DATE: 2001-12-06
ttagggtttcaagttttgtcaaaatttttgtaaggagtgctgttgttgcactttgtaaacacagagagaagtaataaagtcgtcatccactttaagagttcttcgatttgtgtttcaccgggtttcggccgtctaaccggcaactcaccggtggtcagaccggcggcattgcggcggtcagaccggcgggagcgaggcggtcagactggcggcggcgacaggtgtggaaagcgactttggcagtcagaccggagattcaacaccggtcagaccggcggcatccactcggtcagaccggtagatcaatctcggtcagaccgacttccgtcgatttcgaggtttttgtgattcgatcctacagcttccttcacatgcttcattccgacgactacagcaaggaagcaaagcagcaggatgaagggatctggcgaaggcagatgattcacatacaaaaatgatggtggcgagatggcggcggcttcgacttctcgggatagctacagcgagaacaacggcagtagcttctcgagacagctgcggcggctgcccgcacggcaacaacgcggcggcggctgctcgcgacggctgcggcgacaacgcctgcagcagctttgtctggcgacggcttcgtgcacgcgtgcagtcgaatggaatcccctcgttcttcctgcgtggaagacggattacagtagcaaactgaaatcgtggatgcgcccggaccttagccgaccaattatctatctatctatcgatctatgcttatacttatactaattggacactttctacgagctctcacgttatagaaaaaactatccgtctattaaaggaatcatgtaatcatagccgtacatcttatatccaatctggtttaacactgt

SEQ ID NO: 13319 - DNA, 1168 bp, Oryza sativa
  ref <308>: DATABASE ACCESSION NUMBER: AK110667
  ref <309>: DATABASE ENTRY DATE: 2001-12-06
cttcatctctctctctctccccctctctctcttcttccgccgccgccgccgccgctgctctctcgcttcgtttgtctccaccggcgccgacgccagctgcgtgctgaagtaagcggatggacctcactcgccggcgccgccggaggcaacctgccccgggcgctcccctgccatcagatgcaatcaacgacagtggtgctaatccggagtataatcttgacgaacccaccatggaggaaaagctggccaccctgaatctgctcaacggaggaggcgacgggacagcaggtgaagctacccaggagcagccactccccgtggtgatgccgccgagcgcggactcggttcacgtcttgctcaagcaggctctgcgggctgatgaccacgcatccttgctcaattgcttgtacaataaagaccacaaggtcattgttaattcaatatcacttcttacaccagcagacgctgtgaagcttctcaagttcttcatattgcttatgcaatcgaggggtgcagtgctggtttccttgctcccatggctgcaaagtttgctcagtcaacacatgagtagcatagtttctcaggagtcttctctgcttctgctcaactcactctatcatctaattgatgcaagaacatcgaccttcaaatcatcgctgcagttgtctacctgtctagattatcttttcagtgagattgacgatgatggatccggagaggaagaaggatccccgccgataatttatgaggacaaggatactgatgatgaagagtctgaagttgatgatatggaaaccagtggggagggtgaagatctggggggtgttactgatgcttctgagcattcagatggaagtgaggtcatgagcgactgatgaatcgatacctgatgagctcttgatcttcgtgatgagagttggagttgtgagttaaccccatgatgggcagaagaagtcgataggatagtttctgaacacttttcacattgattttttctgatgagttgcgagttgccttcaattctttgtgagcatgttgttggaattaatgggtaactcagtcttgcctgcacttgtgaaacacatatactctttaccatgaaaatacccttttagatacatacatctagttttgacagtgaaagaaggcaagcatgaaaacttacagc

SEQ ID NO: 13320 - DNA, 711 bp, Oryza sativa
  ref <308>: DATABASE ACCESSION NUMBER: AK110668
  ref <309>: DATABASE ENTRY DATE: 2001-12-06
tcccgtctccacctcctcccacccctctctcccctccgctccgggctccggcggagggggcgagctccgccgtcggcggccatgggcgcgtggttccgcgtggggcggatcgccgccgccgctcgagtcctctggagaggtcccacgccggcctcggccccgtctgaagtgcgtgagcggctggcagtggagaccgtcaagctgttttctcctgggatgaaccagcaagataggtccttctggagctacctcattggctacaactgtggcgccctgatcatccttggcaatgctaatagagaacttgatcagagggcaaaggctcttgctgaggaacgggaagctctttgatggtggttgctaatgttcttcgattacccttgcgacggtgaaaatgtatggttatcacctttctttcactgattcgaacatgttctgtttccatgcatggaggaccatccgggtgcttgatctgctcttcccctcggtgcaaaatgaaatctgtagtgcaaattgatggattaaaatatgtgaagtgttaaatgctgcccgattcatgtgagattgaatgttactgacttggtatgcgaacttcaggaaatcatgtctttttgtggttcttttttcatttactggacatgttaggaagaacagctgtgaccgtgcacattatcctatatgttcatactatgaattggtgaagtgaaactt

SEQ ID NO: 13321 - DNA, 953 bp, Oryza sativa
  ref <308>: DATABASE ACCESSION NUMBER: AK110669
  ref <309>: DATABASE ENTRY DATE: 2001-12-06
tacgcagctcaaggacgcggcacgtttagcttaggacagtcaaacagcagcaatggtgacggcggcgaggctactccccctaatcctcttcctcactgcgatggccgtgggctgcagcgcgtgggagatgaacatccggttgccgacggagagactggcctacggcggcggcgaggctgtggtggcgccgatcatacacgcgctacggccgctgctgggctccggccggcagctggcggcgcgcgccggcgtggcctgcgacagctggaggctgggcgtggaggcgcacaacgtgatcgactggaggacggtgccagccgagtgcgagggctacatcggccactacatgctaggcgaacactaccgccgcgacttcgccgtcgtcgtcgacgaggccgtcgcctacgccgagaccctcaagctcgccggcaatggcaaggagatctgggtgttcgacatcgacgagacctctctctccaacctcccctactacgccaagcacggcttcggtgtcgacgtcgatgacgggcggcgcaaggcggcaagccgcggcagcgacgggcggtaggccgcggctgcgaggggcgacgtgcggtgctgaggggcggcacgcctcggcgacgagcaacacaaggtggcacgggcggcgcgcgcagcatgccagggggaagatagaagagaaacgggcaacgcttgatggtggcggcgtttgataccgcctgggctagtaggctgatgagatgagagatgggctgatcggccagactgccaaacactgtttttatatagggtatttagagcatatcccagcagctcatccatattcaatcctccatatgcctgtttagattatcatcaaaaaggattcctcctttatatttctctccactccaacagatcacccatattacatcctctatatctcatcctcttatattttaatagtatatttc

SEQ ID NO: 13322 - DNA, 826 bp, Oryza sativa
  ref <308>: DATABASE ACCESSION NUMBER: AK110670
  ref <309>: DATABASE ENTRY DATE: 2001-12-06
agagagacaaacaccgaaacagacagacacgaatctcaacgcagcagcgccaccagcctcccgtcctgcctccgacgccggcgctgcggccgccgccggtgacccgcccctcgccgcggccggctgccacgaccgaccagatggccgccgcgccgtcgaggtgcctcctcgtcaccggcccgccgccgcgagtctgttagatggcctactgttgggaggtacaaagtagatatagcttctctggagtctctagcattgccggagctgcaggtcaaggacgacactgatcttttcattattgatgaagtgggtaaaatggagctgtttagttcggcattcttccctgctgtaatgagagttattgaatcgaacattccagtgctagccacaattcctgtaccaagattgggccgagacattcccggagttgcgaggttgaggaatcatcctggagcagttatttacaccttaaatactggtaatagggatgccatgagagaaggtgtctacaatcatttgagcagtctgttgcagaaaaggtgatttgctgccccctgtgtgctgctttttgtattttttataatgcataaaactgcatttttcttaatgcgaaagaagagtgctcctttagtgactgccccataaacttgtagccttgtaacagaatgtttggtcaaataagaaagtattgtagtacctcaatatttttttcaagttcaccgaccttggaaaggtgagcagacagtcatattgttgtactcactggatacatctaaatatatagcatttgttagttcttcgaccatgtattcaaattcattcagtt

SEQ ID NO: 13323 - DNA, 426 bp, Oryza sativa
  ref <308>: DATABASE ACCESSION NUMBER: AK110671
  ref <309>: DATABASE ENTRY DATE: 2001-12-06
atttttgttcaccaccaccaccaaatccaccgccggctcagctccttgctgcctccgccgccagctgcaacggtccccctcctcactccctccgccttcgccactggctcgcttgccctctcccggctaggctcctccctctcgcggtgacgcgccgcaacgacaacgacggtgccgcctatgggtagggggaggagacgcgcgacggcggcaacgacaactgcggcgacgacgatgacgccgatgcgacgaggacggcgcctgtgtgagggcggggacggaaggaggagagctgccggctggagggggaggccggcggcggcgcccgtgtgcggctttttgttattcgttgaatgtgtttttgcaggcgggtaaatcaccgcctgtaaagaggagatgtcgcctgcgtcgcaggcgattgcatcc

SEQ ID NO: 13324 - DNA, 997 bp, Oryza sativa
  ref <308>: DATABASE ACCESSION NUMBER: AK110672
  ref <309>: DATABASE ENTRY DATE: 2001-12-06
cttcacaaaaacctcctcctgtgattagtaaacaaaacaaaccaagagagaccatcatctgctagcttagaactcctatatatacattttctctgaatctctctgcacccaaaagcctccttcttcttcacttgtccttgtttctcccaaatcaagaagcacacacgtacgagagagagagagcaagaaaaggggaggaggaagagatcatcagatcgatcagcgtgtggccaggagaaagagaaagaggaagaggaagaggaagaggagaagaggagatggcaatggagccgctgccactcggattcggagacggcctggacgccacgctgctctcctccctctgggccttccaggatgatctgcagccgcaagaggtaattaattgatttggcaaacatcgtctttgatctccagccgtcttgtttctctccggtgaacccaaacggaagaaagatttctgagcaccgcatttcttggccggccatggccgccgccgcccggccggccggcggcgaaatgcgtgtatgagtttgctgttcttggagtcgtagcggatgggggcgaatcatcgatgtgttgtcttgtccctctcatcctttctctctctctctctctctctctctctctgcgtgtttgtcgtggtcaagacgggttaggcaagcttggggactcgcgacgccatggctgacgtgctggaattcttctccttttccatcactagttttgcttcttcttctttcttctttcttctttcttgtggaaaattcactccaagaagaagactcacttcttgtaacttgtctttggttcggttcacagaagtactagtagaatacaatttcaggtttggtttggttcactttttttctttttcaacaaaagtttggcactgtagtgagatgctgtacaatgatgttgtttttttttcttttcctccggtccctatgaggagagagaaacagagagagagagagagagagtgatttgtttttgt

SEQ ID NO: 13325 - DNA, 1110 bp, Oryza sativa
  ref <308>: DATABASE ACCESSION NUMBER: AK110673
  ref <309>: DATABASE ENTRY DATE: 2001-12-06
acgcaaaagtttcggggtttcgtttctctacctttcccgtttcgtcttttcaaaatgtccaaggtccctgctgctctcaaccccaccgaggaggacatctcgctcctcctcgccgcccagacgcacatcggcaccaagaacgccgacaagcagatggccccctacatctacaagcgtcgtgccgacggtatccacctgctcaacatcggcaagacctgggagaagatcgttctcgccgcccgtgttctcgccgccatcgagaaccccgccgacatctgcgtcatctcgggccgtcagtacggtcaccgtgccgtgctcaagttcgccgcccagactggcgccactgccatcgctggccgcttcacgcccggttcgttcaccaactacatcacccgttcgttcaaggagccccgtgtgatcgttgtcaccgacccccgcgtcgaccaccaggccatccgcgaggcttcgtacgtcaacatcccctgcatctcgttcgtcgactcggactcgccgctcaagttcgtcgatgttgccatccccggtaacgtccgcggccgccactcggtcggtctgctctggtggctcctctgccgcaccgtcctgcgcctcaagggtggtgacctcagcgtgatgcccgacatgttcttctaccgcgaccccgaggaggtcgagcgcgagcagcaggaggccgctgccgccgctcaggccgccaaggagaccgccgagcccgccgccgagaacaccgaggtccaggccgacgttcccctcgccgttgccgccaacctcgccaccgagaccggcaacgtcgactggtccgccgagggcgctcaggactgggccgctgacggcgctgccgagcagcccaccagctcttgggagtaaatgcgcacccgcgccacagtaggacacagctcccgatacccattcgtgggtttgaaaggggcgaagaacacccaaaaaagcctcgaaagaggagagctccatgctccccgcacctttctagcgttgtcttgcctctgatgtgtcggctcccgcacggagaatatccccaaaagatatgcaccagagtccaatagtccgcgaatttttcaatcctatcattcctccccc

SEQ ID NO: 13326 - DNA, 816 bp, Oryza sativa
  ref <308>: DATABASE ACCESSION NUMBER: AK110674
  ref <309>: DATABASE ENTRY DATE: 2001-12-06
ctctttactctccttcccacccctctatgtcctctctctctttgcctctttcctctcctctccacctcagtccccaccgatcgagcaccgctgcccccgccaccgacggcgcgggaggcggcgcggcggctgctggcagaggcacggcggcggctccgcgagtgaacgactatgacgaggcgcgacgccgacgacgagacgcggcagcgggcgctacgacgacgacgaggaggcgccgccgccccggatccaggagcggcgagcccgggcggcggcggcgggcgcgacgacgaccgggcggcgccggcgcggatccgaccggagcggcgagctcgggcagcggcggcgtggttctcgcggcatcgggcgcggcaacgacgacgacgatcggcaccgacacgggataatccggctagggttaggtttttttttactttttcgttttttttttccgtgcggttcgcattatttgattatcccgtgcggtccacttaacccgatcgcacgggaaaatgattatcaacccgaccgcacgggaaaatgattgtcctgtgcggttgagctaccgcacgtaaaaattttcattttttcagacgactgtctccggacaggcaaaatccccgctcggaaaaatgaatttgaccgtccggaaaaatagttcatgtagtagtggttgttttcactaaacactggccaaagaaaagtgtcgtgatgtttaaaacaaactttaattttcaagttcctcattacgtggacgctaatgtaatagcacatgacctcattcgagaaaatagaggaacattgtaaattgagatc

SEQ ID NO: 13327 - DNA, 875 bp, Oryza sativa
  ref <308>: DATABASE ACCESSION NUMBER: AK110675
  ref <309>: DATABASE ENTRY DATE: 2001-12-06
atcaccccatctatttcttgtcggcgctcgccgcagagccgaagctagaggacttcctcggcatcatctccttctcggagcaacagcagcatcatggcaagggcagcaccggtgccacttgctacgcaagctccggcagcagcgtcggctacatgtaccctcctagctcctcctcgctccacttcgctgactccgtcatggtagccacctcctcacagctcgtcatccacgatggcgtcagcagtgatatggtgagtgccactacagccaacggcaacggcggcattgtgctggccatgatcaagaactgactccggagcttgctggccacatcgccgcaacatcagagtgcagtggaggtggtggcggtgcatggcgtgtatgctccggcggaggcgctctctctccttgaacatggcggggcacgcgcagagcggcactggtggcatggcgctgaaagtctgtccacgtcagcgcatggagcgatggcggctggttgaaaggagaacaagcaaggtagtgaggcagtgacagtgtcggcgccgtggtcgccgtcggctcggagtcaggcagtagcggcgcggtggtggatgccggtatggctgcagcggcgaggaaatccgtcacctttaaattatctaaacggtcgtgaggaacttcctgctacgctcattctcggcataccgtgcgaccgcaccgtcaactacgctgagcgcctgtccaccatgggcaagccaatggagctcactgcaagagtgagcgttggaagaagactgaaagaggggagaagaagatacgggcaaaaatgtcattttgtgtggtttctttcttatcaattgggtggatattatattttaaaaaaaaaaaaaaaaaag

SEQ ID NO: 13328 - DNA, 737 bp, Oryza sativa
  ref <308>: DATABASE ACCESSION NUMBER: AK110676
  ref <309>: DATABASE ENTRY DATE: 2001-12-06
agcttacaatgttattcctcagtctgtggagtttggtggcaccatgaggagcatgactgatgagggtttagcatatctaatgaagaggatcaaagagatagtggaagggcaggcggcggtgaaccggtgcggcggcggcgtggacttcatggaggagtcgatgcggccgtacccggcggtggtgaacgacgaggggatgtacgcgcacgcgcgggcgtcggcggagcggctgctgggcgccggcggcgtccgcgtggcaccgcagctgatgggcgccgaggacttcgggttctacgcggcgcggatgcccagcgccttcttcaccatcggcgtcggcaacgccaccaccagcagcgcccgggcggcgcacaccacgcactccccgcacttcgtcatcgacgaggccgcactccccgtcggcgccgcggtccacgccgccgtcgccatcgactacctctccaagcacgcgtcgtccatgtgaagaattaaggatcagtgtgtgcttgtgcatgcatgtgcgtgaggcaaagaagtatcgtttggtggtcataggtacagtatgtgtagaggatacgtagcatgcgtacacattctcgccatacatagggcatgtgctatattttagtgcaaaaattctattgtttctcaaaatataggttaaatgagatataaaatacctcgttaagtttacgaaggacctcaatatagaggagacgacaaccgcggatttccagaat

SEQ ID NO: 13329 - DNA, 911 bp, Oryza sativa
  ref <308>: DATABASE ACCESSION NUMBER: AK110677
  ref <309>: DATABASE ENTRY DATE: 2001-12-06
tggtcttcaacgaggaatgcctagtaagcgcgagtcatcagctcgcgttgactacgtccctgccctttgtacacaccgcccgtcgctcctaccgattggtggccgattcccgatccatccccttctctcgttctcatcctccccgccgccagccaccaccaccacccgccagccgccagctcgctgcccgccaccgccaagcgccgccgccgccagccagccaccaccgccaagcgccgccgccacgccaccgaaggagcggcgccgccgccgcatccggccactcctcagccaccgtccaccgaaggaactcaacgccgccaaccccatggccatcggtgccgccgggctacgaatcctcaactatctcaatctgtcccacaacgcgccggaatgcagagcctaacggccgtcgatttctccgacaacgatctctccggcgaggtcccagcgaccggccagttcgcctacttcaacgccacgtcattcgccggtaacccaggcctctgcagcgccttcctctccccatgccgctcccacggcgtcgccacgacgtcgaccttcggctccctctcgtcggcgtcgaagctgctcctcgtgctcggcctcctcctttgatattttcatgtaacaatttatcgtactatcattatgcatgcttgctgttggctgttgctgagggctagaggcagtttttgtatggtttggctcgcgagcttaacgagctttaccgagccgagctggctcactatccaccctaagagcaagtttagtagtacagcccactacttattataagttaatgttaaagctaacatatataatgttagctgtaaggttagctttatttttttcatcctctctctttatctctctataaatttaatgtatatttcttggagcttgtgtgt

SEQ ID NO: 13330 - DNA, 989 bp, Oryza sativa
  ref <308>: DATABASE ACCESSION NUMBER: AK110678
  ref <309>: DATABASE ENTRY DATE: 2001-12-06
ctctctctctctcccgtgctgctctcccttctcctctcctcaattaccacgccgcagccgcagccccccaaccctagctagtacggcgggcgacctgagggggtagctgcctacctctatacctgctatctccgttcgatccgggtcgggctcgtgctgctgggggcgggggcaatcaatcggcgagctcggtgatccatggccgtggctgtggggtggctgtgagggtgcccccggcggcgctcccctccgcgcctgccggcgagggggctcggactgaagggatctaggcgagctgaaaattgaagtgcaggcaaggagataagagcagcgtccaaattgtgagtacttcattagcaggaggtagtggttgtgcttgcttggctcctttgcaatttggctttggcgaggtagcaatggctgcggcagtggcaatgcgagggagtagcagtgatggaggtggctatgataaggtttccgggatggactccggtaaatatgtgcgctacacgcctgagcaggtggaggcgcttgagcgggtgtacgccgattgccccaagccaacctcctcccgcaggcagcaactgctgcgtgagtgccccatacttgctaacattgagcccaagcagatcaaggtctggttccagaacagaaggtgccgggataagcagcggaaggagtcttcacggcttcaggctgtcaacaggaaattgacggcaatgaacaagctacttatggaagagaatgagcgactccagaagcaggtctcccaattggttcatgagaatgcccacatgcgacagcagctgcagaatactccgctggcaaatgatacaagctgtgaatcaaatgtgactacccctcaaaaccctttaagggatgcaagtaacccctctgggctcctttcaattgcagaggagaccttgacagagttcctctcaaaggctactggtacagctattgattgggtccagatgcctgggatgaag

SEQ ID NO: 13331 - DNA, 1255 bp, Oryza sativa
  ref <308>: DATABASE ACCESSION NUMBER: AK110679
  ref <309>: DATABASE ENTRY DATE: 2001-12-06
atatcagaaaataccaaaatacagcgtattagattttctacatggtatcagagccgtagacaaacgtcgatcgatcctcggttccagctaggttccatccgcgctgccccagggagatgagatcaatttctccctggggcaccgcaccgcattagctagctagcctctccaatcatttacagattagtttaccgcatatcattagatgcgttttctaataattagttttagatctattagctagccacagaaaaccatatgatcgtcaggagcaatgcggcaggtgttacaggagcagacaacgtcaacaagcatcataccatccggcctcatccatggatcgatctgcatcgccgctgccgactcgtctacatagatggacacctcgcgtcctctgacagattaatctgcaagacgcttcatcgacgacatcgaccgtgtcctctacgacggcaacgaccgcgtcaccgacaacggcatcgatcacgtcatgtacgactacaacgactgcatcaacccggcatcactattgtggtgaccgctatacggcgcagaaggaccaaccaaagtggtggcctcattgccaacgacgtcctctgacatatgcaagaggtccctaatggcatcctctgacatctacaaggtgcaagatgctaacaattacagtttttgtcttcacaccatggcgtaaatttttttttttttcgcctttggctatatgcggctacaccgacaaccacagttacttcatgatcggctacattgacgaacgtctacaacaaaaatcattgacgaaaactccagtccaagcgtccgtgtcatcgctatcgtccatgacactcccgctatgactgcgggagggaatagaggagagtcaagggacgacacagaaggggacgcaggcaccaggtggaggaccgtccatcagagatgcagtcgatgatggtgagtcaaagaaagatgaagaaatagaagatttcaaatccagtcgcaatcgttcgcttcgctcccgttacgactgagggggaatgttagaagtataatatggtagttagagataagagtcaaatacaaattatagagataagatatatcctagagatagaatcctagagataagatagagtcctagagatagaatcctaaagataaatctactcttatttgtattgtactccaagtctctatcccctatgtactcctatatataccccatgagagggtcgatccaatatatcagaaaataccaaaatac

SEQ ID NO: 13332 - DNA, 843 bp, Oryza sativa
  ref <308>: DATABASE ACCESSION NUMBER: AK110680
  ref <309>: DATABASE ENTRY DATE: 2001-12-06
atttcccctctctctctctctccttctgggcagtggacgccgcctacgagttcgagggggcgaggctgccccagtggcgagttgggggcggcagcatcctccgcttgcgccctggggccccgcaagccgccgacgcccccatcctccgtgcggcgggggccagcgcaggtcaggggaaccacgcggcgccggcgatgtcctcctcatcgtcctcccccttggcatcgccctccgcggtggcgccgtcgccgccgccaggctggtttcggcagatcgcggaacggccgcctccactctcccgccctgctgatcgaggtgccggcgaggatcagccgccgcccgacccacttcgcccctcggatccgccccgccgtcgcccgctccgactgccgctccaccctgccgtcgtccgctccggccgccgcccatgccgctccgccagtttggagagcgagagaagagggagggagaggatagagagggatagagaaatgggaggatggcgtgtgggtcctcatgggcccaccattttttattgtttgtgtgtgactgacatgtgggtcccacagttttttatctagttaatgccacataagcgccacgtcaatgacacgttggacaaaaacctaatcaaaaggagccacgtaggcgccacctcagcaaaaaccggacacaatactaccgagggacctaatttaaacggtttcgtaagttgggggacccgttgtatccggttttgcggtcaagggacgaaaattggactaggcgacaaatagagggacccaaagtgaacttattccttaattaatttagcccattaatacattcattagcttctgttcc

SEQ ID NO: 13333 - DNA, 1100 bp, Oryza sativa
  ref <308>: DATABASE ACCESSION NUMBER: AK110681
  ref <309>: DATABASE ENTRY DATE: 2001-12-06
attcttcgaacaacctctgccgtatacctatccgctttggggtatatgccgtcgcctgttcgtgccagcacctccatccgtcgactttcgcagaccgctcgccagctgtccaacagtctccacaccatggcttccgcccaggactacaagacgcgcgccgtgggttcgcccaacacgctcgactaccgcgtcttcctcgagaacgccaagacgggcctgcccgcgtcgccgttccacgatgtgccgctgttcgccgacgagagcaagacggtgctcaacatgattgtcgagatcccgcgctggaccaacgccaaggtggagatcagcaaggaggagaacttcaacgccttcaagcaggacaccaagaagggcaagctgcgctttgtgcgcaactgcttcccgcacaagggctacatctggaactacggcgccttcccgcagacatgggaggacccgcaccacacgcatccggacaccaaggccaagggcgacaacgacccgctcgacgtgtgcgagatcggcgagcaggtgggctacaccggccagatcaagcaggtcaaggtgctcggcgtcatggcgctcctcgacgagggcgagaccgactggaaggtgattgtcatcgacatcaacgacccgctcgcccccaagctcaacgacattgaggacgtcgagcgccacctgcccggcctcatccgcgccaccaacgagtggttccgcatctacaagatccccgacggcaagcccgagaaccagttcgccttctctggcgaggccaagaaccgcaagtacgccaccgagatcgtgcacgagtgcaacgaggcctggaagcgcctcatctcgggccaggccgacgctggcgacatcagcctcaccaactcgtccgtccagggctccaagggtttcgtgggtgccaacgacgccgccgtcacctcggtgcccaaggccaacccgcagccgcccgcgcccatcgacgccagcatcgacaagtggttcttcatctcgtcgtcgtccaactagacgcgtccattcccccccatccactttcttccttgagtcgatctcctgtttgagagagaaataacaagcttctgaatgccatc

SEQ ID NO: 13334 - DNA, 571 bp, Oryza sativa
  ref <308>: DATABASE ACCESSION NUMBER: AK110682
  ref <309>: DATABASE ENTRY DATE: 2001-12-06
acgtgcggccgccggcgaacaagctgtcgctgggccagctcgtccgtctctgggagaagaagtccggcaacaccctccagaaacgctacgtctccgacctgcagcttgccaaccaagtccaagaggcaccgttcccggtgaactttcagctggcgatggtgcactcgacgctggtggccggggtgtgcgagcagacgatcaacccggacgtcggagcggaggcgacggagctgtacccggagatggacttcctcaccgtcgacagctacctcgacgccctcctcttgcatgcatgaagaactacgtagtacagtacgtaccatgcatgtgcagggtgttggtgtttttagttgcgctatatgtgccatcgccatcatcaccagctaatatatgtataatacacgtaccagcatgcagggtttactcgtacgtaccatagcaatgttgtatgtactacgtacgcataatgcgcatgggtggcacgtcgcatcagccttaattaaatggatttggtaaatcacaatcgaaaaaattgcgaccgaagtcttataataaattaatttctggcctt

SEQ ID NO: 13335 - DNA, 1372 bp, Oryza sativa
  ref <308>: DATABASE ACCESSION NUMBER: AK110683
  ref <309>: DATABASE ENTRY DATE: 2001-12-06
ttgcatccctatagttgttgtgccgggccaacccaccgtgcctagggtgcagcccaggcatggcccggttgttggatctggctagtacgggcacgaccccagtcgggtcatgccatgtttgggctgggccaaaatggcgtgccttgggccgggccatgggcctcgggccatatggccatctatacttaaaacttgtttactgctgtagatctgcaatacgtagcgaaccaaaacttttgtgttgttcttttctttttcaaatttggtcgaaattgcttcaattttaaaaacttggtaagacttgtatggaactatggatgcagatggtcgctgatagccgggaggctgccggggcgaacagacaatgaaatcaagaactactggaacagcaccctcagcaagcgggtcgccatgcaacggaccgccgccgccaccagcatgccggcggcggccaccaccagcagcaatgccgacgccgccggcgctgctgcacgacgccggcgatcgccggagccccgcacggtcgtcgtcagcccaatccggaccaaggcgctgcggtgcaacaacaacagcagcagcgggatagtggtggtgcagcaggcaggcgcctgcagccacggcggccgtccgccggagagcggcgcgccgggagacgcggcggctgataaggtggccacgccgcaggcggtgcagcagcagcagcagcaagagctggccggagcggaggatgacgacgacctgccggtgccggccgtctgtatcgaccttgacttggacgacatcgagctgggaggactcgacggcttcctgatcagcccgtggcgcggcggcggccacgacgacggtaacgccgccgccggagcggtgccgaatctgccgatgccgattggctatgagctcggcggcgccggtggcggtggcgaggctggagctgttgacctggaggcgttgctggggcagctggaagcagaggaagacgacgacggtgaccaccaccaccaccaccaccaccaccaccaccagtaggaggaggaggtgccttcttcgcttggggacgaagacgacgactacttggagttcgcgccatggctcctctgatagcggcatccatccatggatcattgtggaatcgaatcagtcgagctgagagttgagagttgagaaagatcgatgattgctttgctggtcgtgtgttcctgcgagtcggatcatcggcacgaagagagatctcatcgattaagtaggcgcggaaggcgtacgttgaagcttagctgctgaagaattactgacgtagtcagatgaccatttccttatatattgtacagattataatggagcagattaaataaatctaaacacaccgcatttgatc

SEQ ID NO: 13336 - DNA, 1104 bp, Oryza sativa
  ref <308>: DATABASE ACCESSION NUMBER: AK110684
  ref <309>: DATABASE ENTRY DATE: 2001-12-06
tcttcttctgcccacgagaccggaagtatccgaacgggtcgcggacgaacagggcgacgagcaccgggtactggaaggccaccggcaaggatcgcaagatcgcctgcgccggcgaggtcttcggcctccgcaagacgctcgtcttctacaagggtcgcgctcccggcggcgagcgcaccgactgggtcatgcacgagtaccgcctctgccaggacctcgcccatggcgtctccaacttcatcggggcgtacgcgctgtgccgcgtgatcaagaggcacgaggcgggcctccatggcgagccgccggcggcgaaggcgaaaggaatgatcagcaaggtgtcgagcagctcgtcccttgtcaccgtcgaacaccagctcagcagccggggcaacgcctcgccgtcgttcacgcccaccaacaatggcagcccgctcgtcgacgagatgttcgtcggcggcggcggcggcgacccgttccagctgcttccgagctgcgtcccgtaccatggcggcgacgcgtgcgggttcgacttgccgccgctgtgcatgcctcagactcaggacccgttcttctccgacgccggcttcacgcaggcagcgcctcctctctacggcgacgtcatgggaagcgtgtcggagcacgagctcaagtgggacaccctgggcggctactccggcggcggcggtggggagctctggaacgcggcggcggcgccgctgctgtgcaggcaggccagcgacggcgacgacctcacggcgtggttcacggccgccgacgacaacatgtccgtcttctgaacgagtcaaccatgacacgtgtgctcccgggttagttacacatggcggtatatttttgagccattcctaactggggccccacgtgtcagccactacagacatatgtcatctattatatatgcataaatatgcctataatctgtatggatacagaggtgatgagctttcttttagttactggctgtaatacatcttctctgtagcatcatacagcagagctgggttatgtatcctcttcagttaatgtacttgtaacactgatctgtaagctaaaaggtagtgttgctggtagatcaatcttcatctc

SEQ ID NO: 13337 - DNA, 664 bp, Oryza sativa
  ref <308>: DATABASE ACCESSION NUMBER: AK110685
  ref <309>: DATABASE ENTRY DATE: 2001-12-06
actcttcctcttcttcgctctccactccgtcgtccaccatggcaacctccgccgttgatccggccgcaggtggcggcggcggcggaaaaatggtctgaatcgacccgccgaagaagatcttatagagtggcggtgaaactgttcccatgcgccactgcgtgagtgcaggtacgccacatctcaaatcggattgctccgatgagggtcacctccgggagctatcactattcgagatctgctgccgtggagttggcttgttcaaagcgaagtgtattctgaccgctagtgtagataaggtaattagatggatactctgttcagacctggaagtgtcaaggttctttctcccactgatcatttccatgactactatgccaaagctatagacatctgccttttctgtgatctgcgatgtcagccattctggagctaaatatccaggtgtgcctctcattctgttgcaggtgacgatggtgcaatcctggtgcagtgcaggtcggtgacgatctcctagttgatgttgttgatccctgaccggcggcgacctgtggactatccggcatgatgtgttaaaacttttttgtagtaattctgtggtgatttggatatcttgcaacaatttgctctccaatatatctgatagatgtgtcgctctcaaaaaaag

SEQ ID NO: 13338 - DNA, 948 bp, Oryza sativa
  ref <308>: DATABASE ACCESSION NUMBER: AK110686
  ref <309>: DATABASE ENTRY DATE: 2001-12-06
ctccgcaacacccacgcgcgattcctacggatcgcgatccacaatcagcgggaaaaaaaaaagctcgcgccgccccccctcgccacgactcatcctcctcgtcgcgaatcccctccgccggtccgcctcctcaatccacgcggcaccacaccatcggcgccgccctgcaccgcctgccgtcgtgccccaccatcggcgccgccctgcaccgcctgcggcacctacctccgccagtctcctcgcctcccgcccccctcgctctccccaaaacgccaccgcctccatccatggaaacagaggatacaggagcggaaaccctagcccctcgtcgtcgtcgtcgtcctcctcctcctcgccgtgcctccctgacctgccgccgcttccaccaccctcaagcaccaccgccgtcgaatgagatcccctcctccctccatcgcgccgattcccgtccccaccacgtcgtcatctcaggcaccgaccaccgttgttcttccgccagcagatcgccgcctccccgcgtcatatcaagggcatcgtgtcaagggtgacgcctctccgtcatctcgtccattcccattctgcttcgtcatcgtgaggtggtcacacgatgacccatcaaatccgtttcccgtccccacatcgtcgtcttaagtgccgggcgccgccgttcctccatgaccgctggcccgtagcgacaccagaaaaccccacttgagtcgtcgattcgtcgtcggcatcttctggcagcgatggtcgacctcgtggtccgttcttgatcctcaggttcgcctcgctcctcacctattccccattccctggacccgcaccacctgcggcgatgtgcgaatttgattgatgctgcctagaattgcccatgtatttaaaacagcagagcagaacatttcctttcttgtatttacgagaatagtgttaatagtgtaccttgcc

SEQ ID NO: 13339 - DNA, 1099 bp, Oryza sativa
  ref <308>: DATABASE ACCESSION NUMBER: AK110687
  ref <309>: DATABASE ENTRY DATE: 2001-12-06
ttatagtttgtttgatggtacgtgctactcggataaccgtagtaattctagagctaatacgtgcaacaaaccccgacttccgggaggggcgcatttattagataaaaggctgacgcgggctccgcccgctgatccgatgattcatgataactcgacggatcgcacggccctcgtgccggcgacgcatcattcaaatttctgccctatcaactttcgatggtaggataggggcctaccatggtggtgacgggtgacggagaattagggttcgattccggagagggagcctgagaaacggctaccacatccaaggaaggcagcaggcgcgcaaattacccaatcctgacacggggaggtagtgacaataaataacaataccgggcgctttagtgtctggtaattggaatgagtacaatctaaatcccttaacgaggatccattggagggcaagtctggtgccagcagccgcggtaattccagctccaatagcgtaggacagttcagagaatttctgaagaagcacaggtgagagaggtagagcgatgagaggaagccagagccacgagctggagaccgacgtcccggcgtccgagctgtggaagatctacggcacgctccgcgccgccgagctgctgcccgagctgctcccccacatcctcgccaaggtcgagctcgtcaccggcgacggcggcgtcggcaccatcgtgcgactgacttttcctccaggaattcctggattgcagagctacaaggagaaattcatcaaagttgacaacaagaattacgttaaggaggcagaggcggtggaaggcgacatcctgaagctgggcttcctctcgtacatgatccggttcgagatcattcggaaaggggccaacacttcggttataagatcgactatcgagtatgagatcggtgatgagcatccagagctccaagccatggttagtaccgcatcattggctgcgaccgctgaaaaatttgcagagtatatcaagacgcagaaagtagctcaggccaacacctgagattatctcaagctaacaaatgtatcgagagtaataaatggacgcacagtttcgttgtcgcgcttgcttgt

SEQ ID NO: 13340 - DNA, 1543 bp, Oryza sativa
  ref <308>: DATABASE ACCESSION NUMBER: AK110688
  ref <309>: DATABASE ENTRY DATE: 2001-12-06
ccgatccggcgcgcctcgccgtcaacccacgcggcggcgcggcggcgagttcgccgaagccatgccgagctcgccgaaggtcttctcctcggcgaccacctcccgccgcgccacgctccgccgcatcctctccaccccggccttctccgccgcctgcctcctcttcggcctcgcgggcttcctcgccgccgcgctctccttctcctggtcgccggggagcgcgccgcgcgcccgctgcccggactcctcccgcccgctctccgtctccgtcgcgtgggaccgccggcccggggatgcgtccgccggggccgtggcggcggcgggcgccgccgtggatctcccggcgtcgcacgccaccgggtcgcgcgggaggcacaaggtgatggccttcgtcgggatcttcaccgggttcggctccgtcgggcggcgacgcgcgctgcggcggacgtggctccccgcggatcggcagggtctccttcgattggaggaagcaactggtctggcattcagatttgtgattggaaaaagtaatgacaagtctaagatggcagctttagaaagagaggttcaagaatacgatgatttcgtgcttttagatctggaggaggagtatagcaagcttccgtacaaaacgttagcttactttaaggctgcgtatgcattgtatgactctgacttctatgttaaagctgatgatgatatctacttgagaccagatagactttcattgcttttggctaaggagcgttcacatacacaaacatacattggatgcatgaagaaggggcctgtttttactgacccaaagctgaaatggtatgagccacaatcctttttgctcggatcagaatacttccttcatgcatatgggcccatttacgctttatcagccgatgtggtggcaagcttggttgccttgaggaacaacagtttccgtatgttcagcaatgaggatgttactattggatcctggatgcttgctatgaacgtcaaccatgagaacacacatgcactttgttcacctgagtgcacagagtcttcaattgctgtttgggatattccaaaatgttcagggctatgccacccggaggtaaagatgctggagcttcatcgaaggaaggaatgtacaggtggtccatctgcggtgtctgaatctgacgaccgataaattatcgtccctacacggactacagtccaggcaacatgatgacagaatggttgaccactgacgcctcgaatggattgcccgagcattcactgacttcaccaggcacaatcattgcctggggcgcgccgtccaggcagccaacaccgccgatttcaggcgtcagatacacgggatcacagagctcttgttccacattcttgtcacattctcatttgcttatgacttcagaacttggtagtatattcttgccaggaatgctcatcatgtgcccttgtgaagcagttttgttgtatagtagtagaatgcatcacaaattaacacacagtttctatgcttcgtacttttgaatatatttttttaaccttcgctatacgt

SEQ ID NO: 13341 - DNA, 1319 bp, Oryza sativa
  ref <308>: DATABASE ACCESSION NUMBER: AK110689
  ref <309>: DATABASE ENTRY DATE: 2001-12-06
cattggggcgtgaaagcgtcgtcagaaattcatcggggcttgcagatgcagcagtgtttgtagcgagcaagaggaagaagatacgacggtctcttctactgctactctagcttcttccttgcaagttgcatctacagttccaggaggagataaaagatttatttttttcctttcagtgctttcacagcttcattttgcaaggaggaatctggagctgaacactaacaagtctaccaccacacacacaaactgagactgattcactatgctgaggcagccatccagcagatgccacagatcaaagaagcttcttaggccaaagcacatcctccaggtcgtcctgctagtcgccgtcagtgtctggctggtgtaccagctcacacgcaaccggcgacgtgcagtggccgtggagggcggcggcgctgccatggacggtgaggtgacgcggcgccggctgggcaggaagggcttcattgtcttcgccggcgacgcgtctgatggtgatggcgttcgtcggagcatcggtggccggagcaatgttgccaccgaggccgaaatggaacggggcgtcacgtctgatcaggtgggcgatggtgatcgaggcggtgagggagacgtcgagaccggtgaagaagaagaagaagaagacgacgacggcgacggttacattgccgacgatggccttcccggcgacgaagacgacgacggcggagatctccgtcaccttcaggcagatgaaatggatgtcatcagctttggtcctcacacgaactcttctgactccatagctgctggtccactggtgaatggcgttgcagatgatatgaacagaactgcagtgattaacacatcggtaaatgattctggtgtaagcttgaatcctcctgtgaccgggtcattgcgatacaatcacagaaaagcaactggcaatattgaggcacttggaggcttggagcccacgattacgaacgacatggaagaagactgaaaatggcagacggaatgctctccggtgacagcatgagattatttcgtccggtttgatcttcaggacaactcgctgcatctttcaagctgatataatctgtttatcatgttaccctgcttgttactataaagccgtgtatccatctaggcaatctttttaagcgatgctcatgttattttccagtaacttcttttttattttcctgtagcaatagcttccggtaacaatttctcaacatttcccaactatgcaatctgttgatcaagcaaagaagtacatccagctttgacagcgactgaaccgtgaaaattcataagcataaataagcatc

SEQ ID NO: 13342 - DNA, 1009 bp, Oryza sativa
  ref <308>: DATABASE ACCESSION NUMBER: AK110690
  ref <309>: DATABASE ENTRY DATE: 2001-12-06
aaccctcacccctttccccaaaccctagccgccaccattcctctgcctcctctcctctcgctccgctctctctcctgcccaagcgacggccgccgccgcgtgccgtcccctcatcctcttcttcccgcagttggcgacctcccccgcgcactccctactgcgagctgttgctgtcgccgcgccgtcgtcctgccatcgccatcctctcgctcccgcaccgcatccgccaacgaggaggccgggactgtcggatccggtgactccggcctcctcgccggcagatccggccgccctgaagcgaggggaagccaggagccgccttctactcttctacctctatgcccggcactgcccctctctccctctccctctccctctccatcctgttcatttccggatcaacggatgcctgcgattaggcggccacggacgtgcgtgtgggacgtcgaggagacggggaatcactggatccaggaggtcggtgaaccgatttggagagggagctgcatgatctgtggcattggtgtcccgtttcggacagcggcggtctccagtacggcgggtgctgctggatctgccgcatggagggctcctcgtcagctccatcctacctcttcttctgcctttttggaaggagcttgtagtgaagctttgttgagcttacgcaaagcagagaagggcatcggcgcggggttcctagaggatgctgccacctccatccccttgcgtcacggccgtgctgccctactggtcctctggcacagcatctaaggtcatctgccaccacaaccagatgttatgtggggcattcagtatcagcgccggaaccgacgccaacagccagagcaggcgccgtgatgttggatcaagttgttaggattagtttcagtgattaagtttgttaggaagattaagttgttagttcctggttagtagctgtttggttttccattgtaagcctatataggccattcggtttaagtgattaatcaagaaagaagttaatccc

SEQ ID NO: 13343 - DNA, 1905 bp, Oryza sativa
  ref <308>: DATABASE ACCESSION NUMBER: AK110691
  ref <309>: DATABASE ENTRY DATE: 2001-12-06
atcctgctcactttccgctacaccacgtccccgtgactcttctgcgacgacagaaagtctcctctcactccccttccactctctccaccacactcgcgcctactctcgagcgttgacccgatcacactcatacgccactccccactctcacaccccgacagaccgcaatcatggtcaaggacaccaaattctacgacaccctcggctgcgcgcccgacgctaccgagtctcagctcaagaccgcataccgcaagggcgccctcaagcaccaccccgacaagaacgcacactcgcccgaatccgaggagaagttcaaggagatctcacacgcatacgaagtcctctcagacccccaaaagcgccaaatctacgaccagtatggtgaggagggtctcgagcagggtggtggaatgggcggcggcggaggcatggctgccgaggacttgttcgcacagttcttcggcggcggcggtggaggcggaggcttcggtggcatgggcggcatgttcggcggtcgcgagcccggccccaagaaggctcgcaccatccaccacgttcacaaggtctctctcgaggacatctaccgcggcaaggtttccaagcttgccctgcagaagagcgtcatctgctccaagtgtgatggccgcggtggtaaggagggtgctgtgaagacttgccagggctgccagggccagggtatgaagaccatgatgcgccagatgggtcccatgatccagcgattccagaccgtctgccccgactgcaacggtgagggggagcaggtccgcgagaaggacaagtgcaagcagtgctccggaaagaagaccatcatcgagcgcaaggtgctccacgtccacgtcgacaagggtgtgcaaagcggcaccaagatcgacttcagaggcgagggtgaccagatgcctggcgttgagcccggtgatgtgcagttcgagatcgagcagaagcctcaccctcgcttccagcgcaagggtgacgacctctactaccacgccgagatcgaccttcttactgcgctcgccggcggtgccatctacgttgagcaccttgacgagcgctggttgaccgtcgagatcctgcccggcgaggttatcgcaccaggcgaggtcaaggtcatccgcggccagggtatgccctcataccgccaccacgaccacggcaacctttacatccagttcgacgtcaagttccccacatccatccaaggccctgccgacaaggacggccagtccacctccatgtccgcacaacagatcaaggccctcgaatccgtccttcctcctcgcaagccccaatcgatccctcctcccgatgctatgaccgaggacttccagctcgagcgcgtagaccccatggagggctcccgctccaagggcgcccacagcatggacgaggacgatgacgagatgggcggcggtggcgagcgcgtgcagtgcgcgtcgcagtaagccagccagagagcggtcctggtcggcgcggttccccgtatagaaaggaggagtggctacgaagtcgacgaaaaatccgaaggcggaagcgcgttgaagaagatgataccagataccctccgttttcttcggggaaaactccagaagtatagcgggtttgcgggagcattagtagcaaggtctattcccttaattgcttttgtttcagcagatcaccggagctcctcacagcgggcaagaacgcccctgcgggttcactcgtctttcggctggctgttcttccctcgaagatatatctcacgtcttatatgttgaacgatgcatggcgaaagcatggggtccggaatttgtttttgctgttgttgctcggtgttgttgtatacgacaaagatagatcctgggttgcgtttgtttggcagtaatcatattcttttctttcctg

SEQ ID NO: 13344 - DNA, 1015 bp, Oryza sativa
  ref <308>: DATABASE ACCESSION NUMBER: AK110692
  ref <309>: DATABASE ENTRY DATE: 2001-12-06
accagatacccgcaacgtccgcgtcaggcaagcgggctgctcgatatctctctgcaatcatggcgagcaaggccgccatcaaaaggctcacaaaggaggcgcagctgatggacaagggccctccgccgctcgtctacgcccgtccgcgcgaagacaacatcctcgagtggcactacatcctacgaggccctcccgacacgccgtacgccggcggcgaataccacggacagctgctcttcccgcccgagttccccttcaagccgccgggcatcaagatgcagacgccgagtggccggtttgcgcccaacaccaagatctgcacctcgatgagcgactaccatccgcacacgtggcagccgggctggaacacgtcgacgatcctcatcggactgctctcgttcatgtgctcggacgagatgaccacaggctcggtaacggcgtcgagtgcggatcgcaaaaagctcgccgagcagtcgcacgcattcaatctcacgcagaagaagttctgccagatcttccccgagtacgctggccaacagatcaaggatctgcccaacatgggcgacaacaagcaatcgagcacctcggccggcgccggtgcagcctcgggcgacgccaacaagtctgaaaaggtgggatccgattcgcctgaggcgccaccgctaccaaagcagggcttgaggaatcgatctgcagcgatacctgcgtcgagcggtgcgggggcagccgaagagtacgacgccagtcctaacggacgccgagccgaagacgcaaggccaccacgtaacaaccggcgcagagacctgtttggcttgcgcagctcgctggtcttgctcgccgtgctggcatacctgtttgtgagccgcgtgatgaacgccagcgccaacggcatcatctgacgccgttcccgtacagaccgtagatcatacttttcacaccctcgagctggctttacagtggtttcgcatcgtataccatccctgctcgtatcgatcgaatcgcattgcatcgcatc

SEQ ID NO: 13345 - DNA, 812 bp, Oryza sativa
  ref <308>: DATABASE ACCESSION NUMBER: AK110693
  ref <309>: DATABASE ENTRY DATE: 2001-12-06
aaacccaaaaagcccaccaacctctgcgtccccgtcgccggcgaccaccaccatgtgcgccgccgccgccgcagccgccaccgcggggatcatctcaccgcctacacctagtctcctctgggcgaacaccagggccaccttcgtctccttcccgcggcgatcgcctcccacgacctccctcctctcggcctcctccgccccggcccccgccccgccgtcggccaaccccaagtaccacaacgcgaaggtgaacgcgggcgacgaggaggtggacggggaggagctgcttcagcggttcaggcgggaggtggcccgtgcgggagtcatggaggagatcaggtggcggcggaggcacgaggacgcccgggacaagcgcaagcgcaaggcccgctccgccgcccggaggtttcgccggaggcatttcaagggtccgtacccatttggtgacgagcaggaaccaaaggaggggatcatggaggatgataagcatgacaattgggagcttcctggaggagagctcccttcttacagatgaaccgataaatgacattgatgttcttttggagctcgcttcttacagatgaacttaaaaatggcactgatgttttctgtctgacgaagggtttcgattcttcaacttcagttcctctttcttcttcagcagtagagtgaacttacccaacacaaccctagttgatctgtgaccaatatttagtgaacttgcatttctaggtgtaaggtatagttgttatgtggcaaaatacctagtctgaaccgattcctctgttgtgtgttaattgccaatttgcttc

SEQ ID NO: 13346 - DNA, 1023 bp, Oryza sativa
  ref <308>: DATABASE ACCESSION NUMBER: AK110694
  ref <309>: DATABASE ENTRY DATE: 2001-12-06
ctgccctccactgcggaaattgcggagcattccaacccaacccgacccgatccatggccgccgccgccgccggcgactggaccgtcgtccgccgccgcggccgccgccgaggtgacgcggcgggggacgccgcctcgcaaccggacgctccaccgcctctccccgtcaccccgatcccctggtccccctccgacccctccctggaccccgcgcacgtctcccgcctcgtcgagcgcgcccgcgccgccatctcccgcgtcgtcgcctcccgcctctacgggcgcctcctcctcccgggatccccgctgcggcgccgcctcgccctcctcgcccccacgcggctgtcgcttctcggtgtcggcagcttcgagaactccccctcatcccgcctccagctcgcgctcgccgcgctcctccgccgcgacctgctcctcctcccggaatcctccgcccacgccgacctcttcgaccccgtcctctccgcggccgagtgcgccgcggcggcggcgctgggcttcaccgtgccaggcgtcaacgacgggtgccgccgccgcgccgacgagcccaccctcttctacatgccacactgcgaggcgtcactctacgatgccctcctcgccgccaactgggagccaccctcgcagctccgccatgtctgcgtgctcggcaacagcttccgcaactacgcgatccaggcggaggagaacagatcgggccctgccgccagggccaagcacgtcctcgcggcggagcggttcgcgtgggaggagcgggtcagcgagaagggcggcgtggatgacgacgacgacgacctgttcaaccgcgcgttcaacgaaacgagctggcatttcttcgaggtggatgacgccgccgacttggctgccgccgtcgcctccaccggaggacggagataagttccgaagtactcttcttaatttcagtactcgtgactgtaattgtaagagcattgtttgtccaattggatgcttttggtgatcaatactcgatatttacatcttaatt

SEQ ID NO: 13347 - DNA, 952 bp, Oryza sativa
  ref <308>: DATABASE ACCESSION NUMBER: AK110695
  ref <309>: DATABASE ENTRY DATE: 2001-12-06
aagggcggcggctgcatcccgagcaagaggcaccgcgccgccgcggcggcggcagcgccagcgtcgcactcgcaccagcgcgagaggacctcgatcccggcgccggcggcggcgccgcggccggtgcgcatctacgtcgtgttctactccatgtacgggcacgtccggctcctggcgcgggcggtggcgcgcggggtgggctccgtcccgggcgcgcgggcgatcctcttccgcgtcccggagacgctgccccccgccgtgcttgcgcggatggaggccgacgacggcggcggcggcggcgacggcgaggacgtcatccccgtcgtggaccccgacgggctccccgacgccgacgggttcctcttcggcttccctgccaggttcggcgccatgcctgcgcagatgcaggccttcttcgactccaccgtgccgctctgccgccaccagcgcctcgccggcaagccagccggcctcttcgtcagcaccggcacccaggccggcggccaagaaaccaccgcctggacggcgatcacgcagctggcgcaccacgggatgctgttcgtgccgatcgggtacaccttcggggaggggatgttggagatgggcgagctccgcggcgggtcgccgtacggcgcgggcgtcttctccggcgacggctccaggccgccgtccgagctcgagctggccctcgccgagcaccacggcaagtacatggccacacttgtcaagaaaatggtgcacggtgcctcgtgatccgaatgctctaccaaatatggaatctctcgatcgagaatccttgcaattagactgagatttcaagccgatatcctccagaaattcagtggcattgtgcgaattgtgacctgactatcttgcattgccctgcctgttctagcatgatcagacccaaatgtgatattgggattatggaacagaaaaggatgcagacggt

SEQ ID NO: 13348 - DNA, 885 bp, Oryza sativa
  ref <308>: DATABASE ACCESSION NUMBER: AK110696
  ref <309>: DATABASE ENTRY DATE: 2001-12-06
accttttgattgggatttgctcttgaatctgcttccaaaccatcgattcatcatccatctcttccagtcttccttcgcattctcctggaaaaaaatcagaaaagaaaaaggaaaaatctcttgtactctcctcgattctgcaatttttgtttggctgtcccaacaaaaatcccccaattctccccaagaacaggagcacacgaccctgttcctgtcccctagatctgcgtggaggcggcgagaaaacctcaatccggcacaaggggcttgtggttgataccccggagcgccgtctaattccaatcttggtagctgccggcggtgcttccggtggtagacgaggagatggtgccgtgggaagggtatgtgagcgacgagacgatggggacgttcgcgcccatcgcgctgtactgggtgtacgccggcggctaccagctggtgctgcaccggcggccgctggagcggtacaggctccacacgcgggcggaggaggaggagaagaacctcgtcgccctccccgccgtcgtccgcggcgtgctcctgcagcagctcgtgcaggccatcgtcgccatgatcctcttcatgggctggatccctataagccgtaggcgtcgctctggcctggcatccagcaccaccaaaactgcaagctgttcctgctgcaaaataagttaacgcctgttgagtactgcccgattcaggtccctggcatcatgagagcctggaggttatattttgtgtcatatatacaacacctattgtatgtataggtgtgcacctttttttttgtttttgttgtaattaagccctaggccatgtacatattaccatgtgatgttacagattgggagaaactgacttctatagcctacctcccatttccct

SEQ ID NO: 13349 - DNA, 802 bp, Oryza sativa
  ref <308>: DATABASE ACCESSION NUMBER: AK110697
  ref <309>: DATABASE ENTRY DATE: 2001-12-06
agatctctctctccttcctagcaagctcgatttcttagaccatcaaagattaggatcgaattctcaataagctaatcattcatggcggcagaagcaggagcactgatgggtgctgatcgccgggaaccggaggccggcggtggcgccgccgcgttgggtgcggtcggcatagccaccgtctccgtagccaccactctggccgcagtgttccagccgccgccgggtggcctcctcgccgacaccttctaccgcctcgcgctctccgggaccttccttggcgggatgaccctggtcggcgcttcggtctgggtggccgacaacccggctgcccgccgtgccgccggcaagaagctgttatacaccgccatcccgccgctcctcgccgccatgggtttatcggtggtggcgctgctctggtaagtatggttctcgaacaggctccggtccggccgcaccgctgcccgcatatccatgatcggagcaaacaataataattgccggcgtctctctctagcttgctggtcgatcgtgtttgtgtgattgaaaatgaatatcatattcttcttccatttggtttgctcgtttgctgcgtcgtggttgtgtcttgtcgtcgtagcatgttctgttgttgcaagtagttagagagtccactgttctgttcttatttactctgtctcgtgtgcttcgattgatgaccggcttaatcgaccagtgttctatggagtgttcatcatatctctcgatttcaatttcaagtatatatggtgcttcattttttttaatgagatgataaagttatggt

SEQ ID NO: 13350 - DNA, 1010 bp, Oryza sativa
  ref <308>: DATABASE ACCESSION NUMBER: AK110698
  ref <309>: DATABASE ENTRY DATE: 2001-12-06
actgcaatcagcttttactaatttaatgacagcaagcaaagaaacagtttctgaagcagtctcaaagctaaagagtcggctgaatattgagagtaaggttagaaccttgacaaagaaggagcagctagtgttgtcactggagatgcagtaccctgaagatgttggtgttttagcagcattcttctttaactatgtcaagctcaaccccggtgaagcactctatattggtgctaatgaaccacatgcatatctttcgggagagtgcgtcgaatgtatggccacatctgacaatgtagttcgtgctggtctgacccctaaatacagagacgtccaaactctttgctcgatgctgacatacaagcagaactacccggagattctgcgaggagttccagtgcaagcatatgtaacgcgctacatacccccatctgaggagtttgaagtcgatcgctgcctgctgccctccggtgaatcggtcaccatgtcaccggtgcctggcccatccatcttccttgtcatgacaggggaaggcaagattgagggagattccatgcttgatgaaggaaaggcaaaggaaggcgatgttttcttcgtgccggcgcacaccgaggtcaggatccttgcttctggtcctgggagcatgcagctttacagggctggggtgaacagcagattcttcagctgacttcaataacaccgcaaatcttcagggattaaaggttattgcgagagtaattggtaggaaaacgggtgtcttactgtcgtcctttcattttatcataaggtagctagttaagccatcatagtgtataggcaaatggagataaagtctctctctttcatacccttaatcctgtttatttttttccccaatatgtaatttacatttttcagtacgctggaagcaaatgaaatctgtagatgagcttctagtttcgattattcattcatcatgtacatgcgaaaattgaagtttgctttggatatagaataactaatatgattccttc

SEQ ID NO: 13351 - DNA, 860 bp, Oryza sativa
  ref <308>: DATABASE ACCESSION NUMBER: AK110699
  ref <309>: DATABASE ENTRY DATE: 2001-12-06
aagtatgttcatatacaaccaggtaatttgctgagcagctgactgaatgttcttctaattttgttaattgggaagacatcatagagtggaattatactggtgttctctacttcttttgcttcttacagatgggaggcatagatgaagctgcacttgatcgcctttcactggtgacagaaatgaccaaacatatacgtgtcagggcctcaggtggaaggtccactgcatctgaactagggcacttttcacctgtctttgtttggttgctgagggacttttacttggatttgacagaagacaacagaaaaattactccaagagattacctcgaactggctttgaggcctgtacaaggtggaggaagggatgtatcttctaagaatgcgatacgggagtccatccgtgcactttttccggatcgagaatgcattacacttgtgcgacctgtgaataatgagaaagatcttcagcgccttgatcaacttccggtatgtattatcattacttcctttgaactgctatcaactagcataactttttttgtcaaagtttatagctgcatacttgtgcaactttgctgcacatgttggactcttgactgctgattggatttcaatatttgaaaaaaaaaggatggtagttatgatataatctcatagataatagcataatcacatctctgaaaaatgatgatgacataatcatggtacctgccagaaacatcggccttttggccaatatgtgcacatggcaatggcacgtgtctttattgttgtaaatactggcgctttcacaacatggactgtgatataccttgttggaatttaactgtagggccttcccctacaatgctttccctc

SEQ ID NO: 13352 - DNA, 1055 bp, Oryza sativa
  ref <308>: DATABASE ACCESSION NUMBER: AK110700
  ref <309>: DATABASE ENTRY DATE: 2001-12-06
aacttactcagagagtcgcagatcgagagagctaacgatttctcatctcgcggtggccatggcgggtagcagctacggcgacgttcatgagtctgcaagaaagttggtgggcaaggtggcgctgatcaccggcggcgcgagcggcatcggggagtgcacggcgcggctgttcgtgaagcacggggcgcaagtcgtggtcgccgacatccaggacgaggcgggggcgcgactgtgcgccgagctcgggagcgccaccgccagctacgtgcggtgcgacgtgacgagcgaggacgacgtcgcggccgcggtggaccacgccgtggcgaggtacgggaagctggacgtcatgttcaacaacgccgggatcggcggcgcggcgtgccacagcatcctggagagcaccaaggccgactttgaccgcgtgctggccgtgaacctgacgggcccgttcctgggcacgaagcacgcggcgcgggtgatggtggccgcggggcgcggcgggtgcatcatcgggacggcgagcctcgcgtcggcggtggccggcacggcgtcgcacgcgtacacgtgcgccaagcgcgcgctggtggggctgacggagaacgcggcggcggagctgggccgccacgggatccgcgtcaactgcgtgtcgcccgccgcggcggcgacgccgctggccacggggtacgtgggcctggagggggaggcgttcgaggccgccatggaggccgtggccaacctcaagggcgtgcgcctccgcgtggaggacatcgccgccgccgtgctgttcctcgccagcgacgacgcgcgctacgtcagcggccacaacctgctcatcgacggcggctgctccatcgtcaacccgtcctttggcatcttcaaggactgagacgatcgatcggctggccatgcattgacaaagatcgatcgacgctgtcacgttaggcttgtgtcacgatcgacgctgtcacagtttatgtttgacttatgttcttaatttttttaaaaaataaattttaaaaggatggacgattaaaattgaacacgaaaatttatat

SEQ ID NO: 13353 - DNA, 603 bp, Oryza sativa
  ref <308>: DATABASE ACCESSION NUMBER: AK110701
  ref <309>: DATABASE ENTRY DATE: 2001-12-06
gtgcattttccctgccatctgttttatcacggcattttggccaccatctctttcttccattcttgcggcagcacaaggagcaactctcgagggcgccccgcggcacggggcgacacttgataacgctcagtggagcgctgcggtgtaaggggatatgttactatttatggtgagtgacatgtaaaccccaccactctcgagcccatatgttagccaccaagtcagtggaaagttatatcagataatctcgctctgggcatagcacagatagtgtaaagggtgtcgcaggggcggcgtccgagtgtccaacagtttggcggtgaggtagtgatgtcctgctacatcaacattgatttagatatattcgtgggttcttgctttttttctgtattcgttcaaatctgacgaccgacgaggtagtgacagccgactgcgcccctctggactatactctcaaattcttagcatgcatgtgttgttatttttgatgtattagttcagatatgatgttccttacccattgtatggcttttgatttgggtgtctgcaaggtggcatttgtgttcttatcatttgtaaataaatagtggataaaattaattt

SEQ ID NO: 13354 - DNA, 1104 bp, Oryza sativa
  ref <308>: DATABASE ACCESSION NUMBER: AK110702
  ref <309>: DATABASE ENTRY DATE: 2001-12-06
acaaccacactacaactcaacttgtccttaaacaacctatcttcagcgaaaataaggagaaatggggggcaagtctgcaaccaaggccgcgtacttcgacaagctcaagggcttgctcgaggagtaccgctccatcttcatctgcggtgttgacaatgtctcctcccagcagatgcacgagatccgtgccgctctccgtggtgaggccgtcgtcctgatgggtaagaacaccatggtccgtcgtgccctgaagggtttcgtcgccgagaaccccgagtgggagcgtcttctgccccacgtcaagggtaacgttggtttcatcttcaccaacggtgatctctccgagatcaaggagaagatcctggccaaccgtgtcgccgcccccgcccgtgctggtgccttcgctcccgccgatgtctgggttcccgccggtaacactggtatggagcctggtaagacctctttcttccaggctctcggtgtccccaccaagattgctcgtggtaccatcgaaattgtctctgacctcaagctcattgaggccggtaacaaggtcggtgcttccgaggctgctctgctgaacttgctgaacatctctcccttcacctacggtatgaccatcagccaggtctacgaccagggtcagatcttcagcgccgatgtccttgacattggtgaggaccagctcctcaagaccttcagccaggctatccagaccatcgccgctctgtccctggccaccaacatccccaccattcccgccaccatccactccatcgtcaacgcctacaagaaggttcttgctgtcgctgtcgagactgagatcagctggcccgagattgaggagctcaaggaccgcatcgccaaccccgatgcttacgcctctgctgctcccgccgctgccgccgctaccggtggtgacgcccccgctgccgctgcccccgctgaggctgaggaggagtccgacgaggacatgggcttcggtcttttcgactaaacggctcgtcctaggacggatacgactgccatgttttagatactttgatttaacctggacctgaaaatggccgggtaatgaaattatgacgacttggcagcggcttc

SEQ ID NO: 13355 - DNA, 496 bp, Oryza sativa
  ref <308>: DATABASE ACCESSION NUMBER: AK110703
  ref <309>: DATABASE ENTRY DATE: 2001-12-06
aattaaatgttgcaatatattatatgccctgtcatcatatagagatttccaatcgtgtaggctttaggtcttttatcctcatgtgatcaatatttaatttgtgtgaagtggaggtgaaaagtttattaggtgaaatgatatttctagattttttttaacaagagtaaattagccagtaacagctgtgcccctctctacaaccagttcaaatttctgtgtttatcactgtaacgctggacactttaaatgtcatttgcaagttgcaactgacgcttccgatgcttcaacaggctgaattcaagaggattgtgtcacctttaaaactccagacaaggtgtcttgctgcatttcctgatcagcaagggtttctggtaatgccttgttttctctttggtctaaatgtgggttccgttcgatgtttcttcctaataattttagctcccatgtacatcctaattgcaatctcagtagttaactaatgcctaaattctgtact

SEQ ID NO: 13356 - DNA, 694 bp, Oryza sativa
  ref <308>: DATABASE ACCESSION NUMBER: AK110704
  ref <309>: DATABASE ENTRY DATE: 2001-12-06
tgaaatgcattgagatcggaaagaacaccaacggcgaaagcactctgctgggccgacactgacactgagagacgaaagctaggggagcaaatgggattagagaccccagtagtcctagccgtaaacgatggatactaggtgctgtgcgactcgacccgtgcagtgctgtagctaacgcgttaagtatcccgcctggggagtacgttcgcaagaatgaaactcaaaggaataaattcaagttactgcaactaccaaaagtttcataacaataaatcccattccaacacgatactactcagaaagaaactgttgcacgctagtgcattaatatcccaacgaagattctctattccacactattccaccatgcctcttgtcgcacccggaatcaactccgacatgggcgataagtccgagtgggtaaataagctgatgggtaagaagatcagcgatgcaggaagtgatgaagtgtcctttgcaaagaaggacctccctgaaagccatcgtgtggtaaaacccggtgacatgcaaacgatggatcatcgtcccgaaagactaaatgtgcatgttgacgaggatggaactgttcgagatgtcacttacggctaaatcatattgaaattggcagttatagagtcaaggcaaacaattaagtcctagagcactctcaatatcaatgaaatttactataatg

SEQ ID NO: 13357 - DNA, 1305 bp, Oryza sativa
  ref <308>: DATABASE ACCESSION NUMBER: AK110705
  ref <309>: DATABASE ENTRY DATE: 2001-12-06
acgtacttttgccttggggagtctctttctcttttaacaaatgtctggaactttggattaagaattggtggaataccaggcaatcccaaactctcttaactgctattcaagagaaaagagttctagaaagattcatggaattagaagacctttttatcttggacgaaatgataaaagagaaaccgaatacacatgtacaaaacccccctataggaatacgcaaggaaataatacaattggccaaaatagataatgagggtcatctccatatcattttgcatttctcgacaaatataatctgtttggctattctaagtggttctttttttctgggtaaagaggaacttgttattttgaattcttgggttcaggaattcttctataacttaaatgactcagtaaaagctttttttattcttttagttactgatttttttgttggatttcactccacccgcggttgggaactactaattcgttgggtctataacgatcttggatgggttcctaacgagctaattttcactatttttgtttgtagttttcctgtgattctagatacatgtttgaaattttgggtctttttttgtttaaaccgcctatctccttcgcttgtagtcatttatcattcaattagtgaagcataaactcatttgatctcctgatattaatcaaaattagcatcctttttcctttagaaagaaagcctttttccattttagcaaaattctttttttctatttctacctgctcaaggtattcatcattccagtacaactgttgcagtagaatgacaacagattcgtgtatagggaactagattagcttagctacctatctaatttattgtagaaattccgggatctgcgattggacatggaaaatagaaatactttttcttgggtaaaggaacagatgactcgatcgatttctgtatcgatcatgatatacgtaataactcggacatctatttcaaatgcatatcccatttttgcgcagcaaggttatgaaaacccacgagaagcaactggacgaattgtatgtgccaattgccatttagcgaataagcctgtggatattgaagttccccaagcagtgcttcccgatactgtatttgaagcagttcttcgaattccttatgatatgcaactgaaacaagttcttgctaatgggaaaaagggagggttgaatgtgggtgctgttcttattttgcccgagggattcgaattagcgccgcccgaccgtatttctcctgagttgaaagaaaagataggaaatctctcttttcagagttatcgtcccaat

SEQ ID NO: 13358 - DNA, 856 bp, Oryza sativa
  ref <308>: DATABASE ACCESSION NUMBER: AK110706
  ref <309>: DATABASE ENTRY DATE: 2001-12-06
cttttctctctctccccccaccttccttctctttccttctttttccccttttccttccttcccgtcgaccacgttgatgccgacggtggctgacacatgacgcgcggtggtgcagcaacgcggggaggcggaaggcggtgcggggaggcggcgctcgctgaggtgctctccctctccctttgcggcgacgaggcgacggcggcggagctcggagcgggatggcgatggcggcggcggagctcggggtggggatggcaaaggcggcggctctccacaacgacgacttggcgaggcgacgacgacggcgaggaagatgcagccacgacagcacatgggcagggatggcactggaggcacatggcggccacggcgacggagtcgagggagaggcgcgggaagccgcaaggggtggccctctgctcctcgccggccttgcctggtcctccgccgccttgtcgccgtggctccgctggttccgggaggcaggggcgagagagaggagggagggagtgaggtggagcgcggggactcggttccaggcgatggtggaagggggacggcaggggaggcagggcaaaagaggcgctcgcgcctccggtccatttcggcggagggcggcgatggaagcagccgaggcagcgttgaagagtttggggacagagagaatgcgagatgtgggaagaaaaatatggttgtgggtcccacaatcccacagttggagagccagttttggctggccaagtttagccacctagggagcccctttggccaaccaaatagcttcgagagtaggatagccagtatgttggagctcgtttttttttttcaaaatttctaaattttagtttggggagtg

SEQ ID NO: 13359 - DNA, 1092 bp, Oryza sativa
  ref <308>: DATABASE ACCESSION NUMBER: AK110707
  ref <309>: DATABASE ENTRY DATE: 2001-12-06
agtagtactcgtagtgtattgccaatccatcgatgaaatcccttccttccatctgcaccgtccatccccacgcacacacccccacgccaccgccgccgccggtcgccggagggagccggccatctccgatgaccaccaccaccacctccggggcgcccacgcccccacgcttcaagcgatccccccacaggaagaagcggcagccccgtacccgccgcgtcgccgccggagagaccatcgccgcggggaaaccaccgcacccggcgtgtacggcggtgtcgttgcagtcgccgtttgggcccgcattgccgcgcgatttcttcgaggtggacgcgcttgacctcgccccacgcctcctcggcaagctgctgcgccgcgacgaagtcgtcctccgcatcaccgaggtggaggcttacaggccaaatgactccgcgtgccacggccggttcggcatcacggcgaggactgctcctgtgtttggatcaggagggcatgcgtatgtttacctgtgctatggactgcacatgatgctcaatgtcgtcgctgacaaggagggagttggagctgctgttctgattcggtcatgtgctcccgttagtgggctggcaactattcagcagcgtcgaggccagcagactgataagccacttctactcactggaccaggaaaggttggtcaagctctggggctttccactgactggtccaaccatcctctgtacacacctggtgggttggaggtactagacgggccagaaccggagaacattttggttggcccccgtgtaggcatcgaatacgcatcgccggagcatgttgctgcaccatggaggttcgccgtcgcagggacgccatggattagtgcccccaagaacactctcagaccaaggtgagggcttggaggctggactgctggaggccttggaggctggagcttagtaccaaagtaaatggatgtttgatgtttttgtcttttgctagaggtgaagggtagctgctgcttgtccacattatagtgcgccatgtttgatgttcagaaactcttagtttcatcgacacggcagtgtcggatagagatgcaactatgaagtc

SEQ ID NO: 13360 - DNA, 943 bp, Oryza sativa
  ref <308>: DATABASE ACCESSION NUMBER: AK110708
  ref <309>: DATABASE ENTRY DATE: 2001-12-06
ggaagcccagaggcatcagccaagccacacgtctcgaagcttcttgtaacaggagctagggttaggtctccgagcctccgaccttccgattcctctccgccggcagccatgtcaggtcgcgaggtccgcgagtacacgaatctcagcgaccccaaagataggaagtgggggaaggggaaggacaagattgatgatgaggacatcaccttccagcgcatggtcgcaaagatgcaggaggttgctggtgaacggggaggttaccttcatgggcgaggagcattggacagtgatgatttactgtacctaaaagaacaaatggaagctgaggaagacgcagagcgtcttcttcgccgtactgagaagcgtgcatttgctgcttttaagaaagcagcaattttagctgattctacacctgctgttcctgcggctcttcgagtcgagcctaaacctaaaagcgatatcaggcaacaagatctcttgaagaatattgtcgggatcaaaccgaaacggacaaaagttagcagcccttcacaaccagcagagaacgataaacctaagcagagcccagaagattctgtcaacaaagtgtcctccccgcagagccaatcaggatccaggaaggaatcatctcagcgggacggggcagtcagttttgagaagcctttgttgaaaccagttgaaccgagagagtccaagccacagaatgcaactggaagcttgctcggtttagcttacgagagttcagatgaagaatgatcattggtttagatggaaagcagaactagtgtgtagattgtatattaggcattttgtactgcttgctagagcatgttttgtacctggatttgttaaaagctgcttaaagctgtttttttttcttttttacaatttttcctatgtaaacaaacggttgaaattggacggaactcatggtttaaagttt

SEQ ID NO: 13361 - DNA, 832 bp, Oryza sativa
  ref <308>: DATABASE ACCESSION NUMBER: AK110709
  ref <309>: DATABASE ENTRY DATE: 2001-12-06
aaccatctcattctcattctcttctctctctagttctcatggggatcacgccgtcgtgcataccgctggctccggtggcgggcggctcgtcgtcgacggcgtgcaagatcatccacgtcgatggcacggtgacgcggctcgcgcggccggtgagggcgtcggaactgatggtggactacccggggcagttcgtgtgcgactccggccgcctcgccgtcggctgccgggtgcccggcgtggcggcggacgagctcctcgagccgcggcgcgcctacttcctgctgcccatggacatgctctactccgtgctcaccgacgaggagatggccgcgctctccagcttccacgccgccaccgcggcctcctcgtcgtggaagaggatcgccaccggcggcggtcgccgccgcgatgggagccacggtggccggatcagcgagccgacggatcacgaaggcgacgacggaagcgacgatggcgccaggttctttccggtgctcagcctgcagctccacgccgcgccggacgccgccgccgccgccgccgccggagtcaagccgagcgccggcggcggcggcgtgaggcggcaccggtcgtggcatccgaggctggaggccatcgacgaggtgccgtgcaccggcggttgatcgccggagacgtaagcggattgcttttgctagtgttaggcagctagcttgagctggctctcgagtgtacattagctagctctagctatttttttcccttatctttttcttcttcttttttccttttattttttttcttctgtaaagttcaatttttttggcctataattgtttgggattttgtcacc

SEQ ID NO: 13362 - DNA, 997 bp, Oryza sativa
  ref <308>: DATABASE ACCESSION NUMBER: AK110710
  ref <309>: DATABASE ENTRY DATE: 2001-12-06
caaaagcaagccaaatttgagagattttatctcgtcgtcttccttcacatcgacattacacaaaggaggaggagaaaaaacagaaagaaagaaaaaaatggaagaaaaattggaacgaagaagaggaagacacgagtgacacgccatgaattctagcaccgaattgtacacatgtgcgacgagctgcggcgacgacgagccgacgggacggtgagagccatggcgtgcaacggcgagctagtagaagccctgcaccggccaccggcggtcgggatcggggagccacgacgagcgcttcttcttcttgtccttcttgtccttgctgccgccgccgtcctcgccgtcgacctcggcctccttctcgccgtcggagctcttggagtcgccgtcggaggagctgcacccggcggccacgccgccgccgcctcctccgccgccggacttgttcctggaccgcacgtactcgatgagcctccacgccgccggcttcggctgctgcgaccgcggcggggacgggggctccttggccggcttctgcgccttccgctccgccgcctgcagcttcggcgtccccgtcggcgtcggcgtctgcggctgcggcagcttctccgcgggcggcgccggggcgtcgctcttcatcagcgggtccgcgtcgtcggggagccgcgccgactgcgacagccgctcgtactccggcagcggcaccgtctcctccgacgacgccccgccctccttcccgctgccgacgcagtccatgagcagcagctgctggtggctgcccccgcccgccctccgcctctgccgccgcgccctgaacctcgatcccctgccgcttccgccgccgtagcgcttctcctcctccagctgctgctgctgctgctgctcctcctcgtcatcttccgtgtgaaccaggacgtccatatttatctcggctactggcgccacaaaccatgcaccgtctctctctcccgatctcgcgatctcgcgttgggagtat

SEQ ID NO: 13363 - DNA, 1086 bp, Oryza sativa
  ref <308>: DATABASE ACCESSION NUMBER: AK110711
  ref <309>: DATABASE ENTRY DATE: 2001-12-06
aaaccctgccgagcaagaggaggcgtgcggcgggcgcagcgtgctccgtgcttgccgcgagctggcgcagacggcagcgcagcggcgcggtgagcgcggcacaggctgcaacgctgctggttgcagggaggccagaggcagtcaggaagcgcctcggccttggccgctcggcaagcagggaaggacggtggcaaggtgcctggttcctacttggatttggccatttgggagcctcagaggctttgatggttgcttgacaaggatgaaatggcctcccgttcaaagttatctggtattcagaggcaggtattggcattgtacagaggattcctgcggacagcaaggctcaagtctccagaggagcgccacagaattgagtctgttgtctcagcagagttccgtgagaatgcaagaaacattgatcggaagaactttgtgtacattgaatacttgctgagaagagggaagaaacagcttgagcagctcaaggaccctgatattactggactatcaacccttgaaattaataaggtatataaacctttgaatttgaaataatctattccttgttctccatgaaccacactggtcttattaattagttctttgatccttcccttttaaagtaaatgttataactgacttacaattgcctatatataaatgttgaaccatgaaagaactgccaatgagttcggctggtcagcatgcaacccggtttcgatccccagtgtccaaggggacccctcagttaaaaaatcatctagttcaaaataaaagaaaatgtagcaagaattagatattgcaaccatgtggtttatgtagaaattactgagggttgagactaggagctcccaaatttcactttgattaactgtaacattttgcatattgcaagatcttatgcgtatgttacttgcagttgtattttctatcacatggctctctattagcctgtaaaaggtcatgagcggtgtactggctactgctgtttgctaaaatatcataaactcataatgtattatctagacttgttcttggtagtaccagactgataatataatgcggttaatcttactgcgcctt

SEQ ID NO: 13364 - DNA, 938 bp, Oryza sativa
  ref <308>: DATABASE ACCESSION NUMBER: AK110712
  ref <309>: DATABASE ENTRY DATE: 2001-12-06
ctcggcgcggccacagccgcagaaccacacctaggccgctcgaagacccacgtagcttccatccaagcttaccgccatggccgcgcgcgcgccgctccccgtaccgcacgcggccgccaccagcccgcgaccggctgcggcgtcgagcctcctccgcgcgaggggcccgtgcgcctccctcctctacccgcgccgcctccgcttctccgttgcgccggtggccgccgccaagcccgaggccgtcgggagggccggggaggcagctgcggcgccggtggaagggctcgcgaaatccctgcagggggtggaggtgttcgatctgagcggaaaggcggtgcccgttgttgatctgtggaaggacaggaaggccatcgttgcgttcgcccgccattttggatgcgtgctgtgccgtaagagggccgatcttctcgcggctaagcaggatgcaatggaggctgcaggggttgctcttgttttaatcggaccaggtactgttgaacaggcaaaggcattttatgaccaaaccaaattcaaaggagaagtatacgctgatccaagtcactcatcatataatgcccttgaatttgcatttgggctgttctcaacgtttactccatcggccggtttgaagattatacagttgtacatggaaggatacaggcaggattgggaactgtcgttcgagaagaccaccagaacgaaaggtggatggtatcaagggggcctacttgttgcaggactaggcatcgacaatattttgtatatccacaaggacaaagaagcaggagatgaccctgacatggatgatgtcttgaaagcttgctgttcctagatcactagtatcctatatcatttctgttaacctccagaccttgaagacacatgtaaatattttgccaagttaaagtatgttatgtaaaaaaaaaaaaaaaaaaaag

SEQ ID NO: 13365 - DNA, 1051 bp, Oryza sativa
  ref <308>: DATABASE ACCESSION NUMBER: AK110713
  ref <309>: DATABASE ENTRY DATE: 2001-12-06
atcttcgtccccatcgcgcgatcgcctccaccccaacggccaaaaacccaaacacgacgccgcgtcgccgccgagccgagcaagagcaccatgaatccgccgccgcagaagccggagcgccgcggcaactcgctgactgatctgaacgacgacgtcctctccgaaatcttcttccgcatcccgccgggcgaccccggggtcctcgtccgcctctccgtcgtctgcaagtcgtggcgccgcctcctcaccgaccgcgacttcctccgcggctaccgcgccttccaccgagcgcctccgatcctgggcttcttctgcgcagagtttgggcgcaccacattcgtccccaccaccgccttccgcccgatcattcccagcgccgactggctactctgcgactcccgccatggccgcgccctcttcgacgcctacgggttacccgtgcggctcctcgtgtcggaccccatgaccggcgcggagcggctgctggacgcgccggagcgctggaggaacatccactggagcgcgacgcagtggagcacagcggtgctctgcgccgcgcacgtctgcgactgttaggaataaacgcgttgtcatggccgtgcctgcgttttgccgcggcgcggcagtggcgcatggcgtcgtgagtccaggagtcgtgcgtgtgtgcagcattgtggtggtgctgtacacgttgtgtgtgtgtgttcgatgtatgtgagtccagaggccaagtcctggcggttgagcgcatgcaggagcacgccatgcgagaaggatggaggcccgttcatgtggaggagtatgtggctcacgaacgcgtgaaaccaggtcgtccaggctgccatgcgtacgtgcgcgtgaagctcgctaagtgggtgcgtgggcgctgcgtcgccgtgggtataaaactggctgtgtaggctcgtatttaagtagtgccgtgtgaactttcagtgtgtaataaagccaagatacaggagcgataggctccgcggcgttcgtcgccgaaactccactgttcatcttcaacctccagccattcttgtgtgtg

SEQ ID NO: 13366 - DNA, 1285 bp, Oryza sativa
  ref <308>: DATABASE ACCESSION NUMBER: AK110714
  ref <309>: DATABASE ENTRY DATE: 2001-12-06
ttcgctcccatcccataactcccgtactgcgctagcctaccgccgcctcccggagccgctcaccgcctcctcgcacgcgcccgccggacagccaggcgccgccgccagctccgagcgcgtgcccgccggagccgcgccccctaccccgccgcctcctcgcgcgcgcccgacgctcgccctaccccgccgggttcgccatcggccggcgccttctccaccgccgctgccgcctcctcgggcacgtcctctggagagctggggttgccgtcggccggttcctcctcctcgcgtgcgcccgccggggagccgtgatgggttacggccctacgcagcacatactccagaggatggaggataatatgatgtgcccaatcaaggaccaagaaaccatgctattgatctagtctacgatcgaatgccacaatatatgtcaggcatataacacaggggagtgcagagatcctgttattttcactcaatctgggttataggattgaaattcaagtatacaagattacaagattgcatataattgaaggattggagtgatcaatgtctagaattcaagcgtgcaagacctgctgagccgtgtcaccattgcgttgcatctgatctaagttggcgttcttggtttaaattgttgaccggtgtcaatgctaatcttttaccaactttttacgcaggggcacttcttggatgctttgatcttatgttcgtttagtgcctctcgatggctctacaagttagccatgttattgtaaagcacagtaactgcttgaatcagcccacaccacaagacaacgagatgctacatatatcaggtgcaaatgcagcaaagaatgcgggacaagcttgtggtatatgcatatgtagctgttgagctaatcatatttcactcaaaccggttcaagtagtcttccaaatttctctctatgctgaaacattctgctttatggttgagctcacatattttggtgacagcagaattctgttattctgaagcataaattttatgtcatgtgttcaacgagtccaatgataggaccataggaggctacataaactgaataaattgaatggcatcatagttaactatctccggatggcgctccatccatgcgttcatgtcgttgtgcaagtacttatcattgagtttcttagcaatcatgtcaacatttagctatgctggcaaccatggttgtgtacttgtgttagcctgtaatgtaaagattcatttccttttcatctgaatcaacatgatcaactcttgggtagattctttgtc

SEQ ID NO: 13367 - DNA, 767 bp, Oryza sativa
  ref <308>: DATABASE ACCESSION NUMBER: AK110715
  ref <309>: DATABASE ENTRY DATE: 2001-12-06
tcatatggataaaggcccaattaaggcttacactggcagcaaaattgaatctttttttgtcaagtctgctatcagccctgatggaactcacattcttggtggttcgagtgatggcaacgtgtacttatggcaggtggatcagcctgaaagaggtcctataattttggaaggccatgaaggtgaagctacttcagttgactggtgtgcatcagaggtcgggaagatcgcaacgtcatctgacgattccaaggttcgcgtatggaatactgagagaagggtgttcccaaacacaagttccccaacggtcatccgcaagagaataaccgcaccaaacactggaagccggtctgctagccatgagctagctactacctcaagagatgtaggagtagcagcctgcaccagtgcagatggtgaattgccaactggttcacgctctccccttcagcccagagtactggagtttggcacaccggagtcagcgaagaagagagcctttaggttgtttcaggaggactcattggacataaggaaaagcccagaggctcaaatgaacagcccttcttcggttctaagccccccacattcactgaagaggagaacaattcgggactactttgctagtagctcatcttgtgagcacaccaagcatgtccatgaccttgcactcttggctcactcgtcaactgtgaagaacctcaaaaatgctcaatatagctacaggtgcctgaaaaaataactttaaagttttgaacatcgatttcact

SEQ ID NO: 13368 - DNA, 1446 bp, Oryza sativa
  ref <308>: DATABASE ACCESSION NUMBER: AK110716
  ref <309>: DATABASE ENTRY DATE: 2001-12-06
attccactccactccacccgcccacgatcaccgatggcttcttccacctctctcctcctccccaccgccgccgccgccgctcgccgcagcccctccggccaccgcgcccccccttccgccgtgctgtcccccccgcgccgcctcgccaccctccgctgcctgggctatgcgcggcggcgagcgcaggcccggcacgtcgtcgtgtgcgcctcggctgcctccgcggggtcgctcgacgccctcatcttcgactgcgacggcgtcatcctcgagtcggagcacctccaccggcaggcgtacaacgacgccttcgcgcatttcggggtgagctgcgagcccgcctccgccgccgccaccgacgcgccgctgtactgggacgaggccttctacgacgacctccagaaccggatcggcggcgggaagcccaagatgcggtggtactttggggagaatgggtggcctacttcaaagatctttgaaacaccaccttcaagcgactctgataaggagaagctagttgacatcattcaggactggaaaacagaaagatacaaagaaatactaaaatctggaacagtgaagccaagacctggtgttttgcgactgatggatgaagtaaagggtgcgggtatcaagctagctgtttgctctgctgcgactaaaagttcggtgattatgtgtcttgaaaacctcatcggacttgaacggtttaatggccttgattgcttccttgctggtgatgatgttaaactaaagaagcctgatccatcaatatatattacagcagcagagaaattaggtgtgcaaagccagaactgccttgtagtggaggacagtgttattggactacaagcagcaaaaggagcaggaatgtcatgtataataacatatactccttcgactgctaaccaagatttctcggatgcaattgccacctatcctgatctcagtaatgtggggcttgaggacctcaagttgttgctccaaaaatctcttgttactggatagcgaagtgcttttgtccaaaaaataattgacaaatttatgtatgcattgttatccacaaagttcacgtctagattcaagctagaatatatcttgtttcagcctcttggtgtcttcaagatcaaccaaatgttggacagcgaagatgctgatacattctttgagaatttctgtacagtgttgtaagaaggaaaagccaaccaatcaccccaaaaaaaaaaaaactttcagctggagttacaggtggaacatgcagctggtgaatccaagcagtcatattgttgactggtttgcgtttggcacggaaataagtataatttgactctttgatattctgtagaagtgcagatagtgttgtacatatggaaactctgggtacattgttggaaaactgctggaaaccgttgtcaagaagggaaatacatgatcatctgttgcaac

SEQ ID NO: 13369 - DNA, 813 bp, Oryza sativa
  ref <308>: DATABASE ACCESSION NUMBER: AK110717
  ref <309>: DATABASE ENTRY DATE: 2001-12-06
tcttccccttccttcctcctcctcggctcggcgcgacgagtcctcgccatggcgagtcgccggtcgcgtcggctcggctcgctcgtgcccttcgccgccgcggtggtcctcctcctcctcatcgcttccgccgccgccgccgccgcgggatcccccgatcgggccggccccgcgcggccgccgctggtgctcccgctcacgctcgcctaccccaacgccacccgcctccccgcctcctcggccaggcgcggcctcggcgatggacacaaccccaacgcccgcatgcgcctccacgatgatctcctcaccaacgggtcggtacagttcgttttttgccctccgctctctctctctcgataatttcccccaaatttttttttcttgggggggttgcgtggttggatctgaggctggatgtcgccgcgtgttgttcgtgctggtttaggtattacacgacgaggctgtacatcgggacgccttcgcaggagttcgcgctgatcgtggactccgggagcaccgtcacctacgttccctgcgccacctgcgagcagtgcggcaaccaccaggtcggcctggattcgtcaaattctctgcttacctgtttgaattgtgtgtgacgatcggtttaattaggattggtgatggtcgcgtgtatggatattggattcccatatgtcaaactgtcgcttgaccattcaggttggacaattgactccagtgcaaatgatacatttttgtcgggcttgggtgtgtgcatagacatttattgttccaaaattcaaagtcttggaaaatacacgtttccatttggat

SEQ ID NO: 13370 - DNA, 1197 bp, Oryza sativa
  ref <308>: DATABASE ACCESSION NUMBER: AK110718
  ref <309>: DATABASE ENTRY DATE: 2001-12-06
atcttccctcactttgcccccagtccgcgtaccccacgcgtccccgctcttctaggctccgccagaggagaggcctccccaaatcccacaatcccgctcccaatcccaatccccaccaccacctcgcatcgcacgcgcaaggcgcagatccccatccgcgggggggagggagggggaagccatggcggagttccaggagatggcggcggaggtgccgccgtcgctgaaggcgatcacgctgacccacgtccggtaccgccgcggggacacgctcggcctcttcctcgcctgggtctccctcgtcccggtcttcatcagcctgggcgggttcgtctcccacttcctcttccgccgggagctccagggcatctgcttcgccgcgggcctcctcgcctcccagctcctcaacgagctcatcaagcactccgtcgcgcagtcgcgcccggtctactgcgagctgctcgaggcctgcgactcccacggctggccctccagccactcgcagtacaccttcttcttcgccacctacctctcgctcctcacgctccgccgctccccgtcgagccgggtggtcgcctccctggcctggccgctcgccttcctcaccatgctgtccagggtgtacctcggctaccacaccgtcgcgcaggtatttgccggcgcggtagtaggccttgtgtttggtgcaatctggtattggattgtcaacaccatgcttgttgaatattttccaatgattgaggagagtgcaatagcgaggtggttgtatatgaaggatacttcacacattccagatgtgctcaagtttgaatatgataacgcaagggctgccaggaggaaagttgctactgattgagcaagttcttttcggacacgcttgctgtagttcaggggataattgtgtggcaagatacctgtcacttatagctgcatctttgttagaagaaatgtccattggaattttggcccgtgttcttgttggccatacgcaatttttgttttcttctttctctcattttttgttgacagtttggtgacaaactgatatttatttacatgtgtagaaaaacgaccatagtgaacataactgaatccacctgtcattcagtgtttcttctgcttatttacaactgaagtatattatcacaagttgttgagaagtgaagattactggcggcacaccttttattttgggtt

SEQ ID NO: 13371 - DNA, 834 bp, Oryza sativa
  ref <308>: DATABASE ACCESSION NUMBER: AK110719
  ref <309>: DATABASE ENTRY DATE: 2001-12-06
gatgcaagtcgtagcagaaatttaacctggaatttgagggttgatatcattcaaggcatagcggagggactttcttacctccatgaggagtcagaaacaaggattatccacagagatatcaaagccagtaatattttattggatgataagtttaagcccaagataacagattttggccttgcaagagcttttggagaggatagaactcatctcaccacgggtgtagctggaacactaggatacatggctcctgaatatttggcacatggccatcttacagagaaggctgatgtctacagctatggtattctggttcttgagcttgtaacaggacaaagatgtagcggctcaattggttcacatggaggtcacttcttgttaacaaaggtatggaaccactacaagaacaaagcagtagaaatgatcgctgaccgcagcatctacgaggataccatcagggatgaggtcatgcatgtcgtgcagattgggctgtcatgcacccaagcaaacgctggcgacaggcctacaatgacgaaggttgtggagttgctgagaagccacaggcatgatgtggagattatcttgagtgatcctccatttttggatgtcgaggcctttgaggatatcaaacaaggcgaacagtctcggttgctgtccgcacgttcggctcattcagtatcaggttcatctcggtcctatctaagtggaagataagctaagcttctttttttttttttaaaaaaaatatcataggaatatatatcaagacggtctacagttttgtgtgatgtacatgtgaaagttgtcaatgttggtagcagagatacattcttc

SEQ ID NO: 13372 - DNA, 1158 bp, Oryza sativa
  ref <308>: DATABASE ACCESSION NUMBER: AK110720
  ref <309>: DATABASE ENTRY DATE: 2001-12-06
gatcaaacatgtccccaaccattcccgagaagcagtgggcccaggtcatcgagaagaccggcggtccagtcgagtacaaggagatcccggtccagaagccaggcccagatgaggtcctcgtcaatatcaaatactccggtgtctgccacactgaccttcacgccttgaaaggcgactggccgctccctaccaaacttccccttgtgggtggccacgagggtgctggagtcgtggtggcgaggggtggccttgtccaagatattgaagttggcgaccacgctggtgtgaagtggatcaatggcagctgcttggtctgcgacttttgccaacagtctgatgagcccctctgcccgaaagcactcctctccggctacaccgtcgacggttcattccagcagtatgctatcgcaaaggctgctcacgtcgctcgcttggacaaggacaccccgctcgacgcggttgccccagtgctctgtgccggtatcaccgtctacaagggcctgaaggagtctggtgccagccctggccagagcgtcgccatcgtcggcgctggtggtggccttggctcccttgctcaacagtacgcgaaggccatgggactcagggtcattgccattgacactggcgatgagaagaagaagatgtgccttgagcagctcggcgcatccgcatttgtcgactttgccactagtaagaatgttgtcaaggaagtccaggaggctacacaggatggattaggtccgcatgctgtgattcttgtcgctgttactgagaagcctttccagcaggctgcagagtacgtccgcccacgcggaaccgtcgtttgcatcggtctccccgccggcgcctacctgcgcgctcccgtcttcgagtcggtcatcaagatggtcaccatcaagggctcctacgtcggcaaccgcagggacaccactgaggcgctcggattcttccgccgcggcctgatcaaggctcccttcaaggtcgtcgggctctccgagctccagaaggtgtacgacttgatgcacgaaggcaagattgcgggccgctatgtcttggacacgtcaaagtagatggatgattgtcggaaaagaaacaagtgtgtgaaggggtgaaggtgctatattggtggatagcttggtaactaatggtgtccttctt

SEQ ID NO: 13373 - DNA, 1177 bp, Oryza sativa
  ref <308>: DATABASE ACCESSION NUMBER: AK110721
  ref <309>: DATABASE ENTRY DATE: 2001-12-06
gtgcagctccagcgagggcgagctcacaatcgtacccgtgttctccgagctcagcgaatttctgctcagggtctccgcatcgccgccattgcctgtcccaagctccatcttgggcgaaggcggtgttgtcacggcagccagggacagcgagtggccgccgcggaggagcagatggtcgatgtcgacgcggccggcgccgccgcagctgatggaggcatacccagcgcctcctcctccatgcgccagcaagctcaagctctggcttcccgccgtttccccgagcgccgcttcttgcccgtgccgcggccttcacccgagcacgtcgggcgcgccgcctccaatgccggcgcggcttggtcttgaactttggaggatggcgtgggcctggatctcgacgccgacaatctccccgcgccgtcacatgcatcgccgcttcttctccaccggagtcttccctatgaagcgttgtggagcaccatcgccacctggtcgaggatgaggtcaagctcaagcttcgccatctgctgccacctcgtcaaacttgagctccttatccccaagctcctctgcctctatcgaactcggcgtccccaagcgccgccgcttggtcgaactccgccgcggcctttcatcgacctcgagctccgcatccctggagcgcgccacctcgtcaagctctgcctccgacacggttctccccgagcaccgttgcctctctaagcggaaccaccgtcgctgctccgcgcctctctcttgagctcgtccacacagatgggaatgcgagctcgacctcgccggtgctcgctggtgggggacgacgggagaggggagaccgagctcactggctctcgtgggtggggggcacgagggagagagagatcaacctcacgcggtgcttgcgggtgcgacgggggagaggaagctcgagctcatcgctagtgccaatatcacggaggggagaagagagaaaaggggagagagacaaagaaggggagggggatgaggtggcgtgtgccatgtgggtccaatttctttttttttttttttttttttttttgcctaagtagaccaccacatcagcatcacttagcaaaaaccaccctgatttgaaccaaggggtgtaaattaaacggtactgaaagttagatatcgcttttaaagtttgagggtgcgtttt

SEQ ID NO: 13374 - DNA, 1079 bp, Oryza sativa
  ref <308>: DATABASE ACCESSION NUMBER: AK110722
  ref <309>: DATABASE ENTRY DATE: 2001-12-06
tatgaatcttcaacaatttcttcttcttcttctttattttgagaaattacgatgaaattcaaaagaaacttgaaaattgtgctcactatttttaagtggcactatgcttgcatatgagttggtgtgtttgcacttagcatcatggtagtatgcagttgttacagtgatgtgaatgaaggtgtattggatgcagggcgcggcgagccatgacgccgcggcggcggcagcggcggcggcggtgctgggcggcgggcacggcgtgccgcggtggccgcggatggtgttcctggtgggcgccatgacgtgcctggcgatcagcgcgacggcgcacctgctggcgtgccactccaggcgcgccagcgtggtgttctggcagctcgactacgccggcatctccgccatgatcgtcgcctccttcgtcccgccggtgtactacgccttcctgtgccgccgcccggcgcgcgtcacctacctctccgccatctcggcgctgggcgcgctcgtcgtcggcgcgctgctctcgccgccctgctcgtcgccgcggttccggcgtctccgcgccgcgctgttcctcgccatggggctctccggcgtcgtcccggcgctgcacgcgctgtggctcaactggggccacgccgcctgctacctggcgctctcgctcgaggtcgccatggggctcgcctacgccgccggcgcctggttctacgtcagccgcgtgccggagaagtggcgcccgggcgtcttcgacgtcgtcggccacagccaccagatcttccacgtgctcgtgctcgtcggggccgtcacgcactacgtcgccgtcgacgtgctgctcaactggcgggagacggtggccgccgcgtgcagcgcgacgtcgtaggcgactctcctctcctaggcattttgctcattgcgttttgatgattcaaacaatattcaaatttagaagaatggagcagtgttagatgagattcaggatcagggtgtgtgaccttgtgtcattcgatcgatcgaacatctatatgtgatgaattgaggacgatgaagaaattgatttacagtacaaaaaaggtcgtgcctcc

SEQ ID NO: 13375 - DNA, 860 bp, Oryza sativa
  ref <308>: DATABASE ACCESSION NUMBER: AK110723
  ref <309>: DATABASE ENTRY DATE: 2001-12-06
agcaaccaaccaatccatcgattctatcttcttctaccttatctattctaccatattaccacatctctctcaaagcatgactgctgcacgagctcggtgcggcacaccccggggtgtggatggcggaggacacggtcgcaagcgacgagctccggcgtggccgccggcgacgagctcccaacgtggcatggctgtggacggcggaggatgcaacctccgacaacgagctccggcgcatggctatggacggcggaagatgcagcctccagtgacgagcttcggtgtggccgccggcgacgagctccgacgtggtgcagcgcgtggacagcggaggacgtggccaccggcgacgagcccggcgtggcgcgtggcggcagaggatgctaccgccagcaacaagcctggtgtggggcgtggtagcgaaggacgcggctaccggcgacgagctccgacgtggggcgtggatgacgaaggacacggctgccggcgacgacctctgacataaggcgtcgacgacagaggacgcggccgccggcgacaacctccgacatggggcgtggagggtggggctgccggcaacgacgcctcggtgctcagctcctgatacctagtaggaattacctgatatctggtaggtatcatctgatacctcgcaagtatcactcgatacgtgggagaaatcgtctgatacctgataggtatcacatgatacctcacgagtatcacccaatacatggtagaaatcgtctgatatctgataggtatcacatgatatatcacgagtatcatccgatacgtggtagaaatcatttgatactttatatgtatcacttgataccggttaagtttcaagacacgat

SEQ ID NO: 13376 - DNA, 1076 bp, Oryza sativa
  ref <308>: DATABASE ACCESSION NUMBER: AK110724
  ref <309>: DATABASE ENTRY DATE: 2001-12-06
ctggttgatcctgccagtagtcatatgcttgtctcaaagattaagccatgcatgtgcaagtatgaactaattcgaactgtgaaactgcgaatggctcattaaatcagttatagtttgtttgatggtacgtgctactcggataaccgtagtaattctagagctaatacgtgcaacaaaccccgacttccgggaggggcgcatttattagataaaaggctgacgcgggctccgcccgctgatccgatgataacccgcgcccaacccacacttcttctcgggcgctcgcgctcccggtcccggcggcgatggcggccgcggcggttgggggtggcgagcagagcacgccggagttctggcccgaggggagtggcattctgccgatggatgaacggcctcctccacccgcgcttcgtcttccccgaggccgccgcgatggcgggctctcgggctggctccgctcaaggtcaaggagagaataccaatgctttaggattatgacttgcttactattctcaagtaagcagtattatgaaatttacttgtttggtggaattcccgtttcgtggaaatatcaggagccaatggagttgctatcccagatgttcgtcttacgccgtatatgatgatatcaacattgtattgcatatgacggcagtgcatgatgaagaagagtctctggtcaatcttgtccacccctttagttgtgtattttccacagatgagaagggtatttcacatagctcgagagctaagaatccaacgtccaggacactcgcagtgcaggggggacatggatcaggattaggccttcattttccttggacctttgaacagtcgtcagttcagcttctgcttccccgccaaaattcgtgcatcgagacagttcctggtaagttcctttctgcgcacctttttttctaatgttgcaccgttgggagttcgaggggattaagatattgcaaatgtaaacctaggtcaagtcgtcaaaacactatggtcgggatcttgtagggtgatgtgtatgaaacgttaaaatagtggtctggtctaatcgcatcgcattgccggttggttgc

SEQ ID NO: 13377 - DNA, 1138 bp, Oryza sativa
  ref <308>: DATABASE ACCESSION NUMBER: AK110725
  ref <309>: DATABASE ENTRY DATE: 2001-12-06
atcccaacttaaactgagtgacgccgcgccaatatgcagccgcgctgtacgctcatccacgccgtcgccgtcgtcgcggcggcggcggcggccgcgctgctgcttcctccgctcgccgccggccagccgtggccaacgtgcgacaccagcgccggcacgtacaaggccgggagcgcctacgagtccaacctccgtgacctcgccgccgcgctccgcgcggacgccgccgcctcgccgtcggcgctcttcgccacgggcaaccgcggcggcgcgcccgacgccgtctacggcctcctcctctgccgcggcgacctcagcgtctccgactgcttcgactgcggcacccgcgccctcgtgtacaaccagtgctacgcccgattctccaacaagggcgacttcctcgccgccaccgacaacgccggcggcgagacgctgctcatcagcggcaccaacatcaccggaggcgccggcgtcgtggcggcgtacggccgcgcggtgaccgagctgctcgcggccaccgtgcggtacgcggtggaggagaacccggcgaggctgttcgccacggggcagcgcgtgggggacgacgcccgcgacccggggttccgcaacatctactccatggcgcagtgctcgccggacctgccgccggcgtcgtgccgcaggtgcctcgacggcgtcttggcgcggtggtggcaggtgttcccgctcaacggcgagggcgcgagggtcgccggagcgaggtgctacctgaggtctgagctgggcgtcggcccgttctacaccggagctcccatggtggtgctgcgggcggacaaggtctagccagcgccgtcgccattggcacccgatggaagctgcggtagctacagcctacagttctacgcaccaaaatggtggaggtgcaccctacctatggccgacaaagtgcaagcaaatctctacacgtatacctatactattattaggacattccgacaaaatgtccacgttcacccgagaaattttagtgaataaatctggacatcgatccagttaaaaccaaatttacaacggttcaataactaaaataatcgacatgcagctcttcgccaacttcaggtagaggttcacaaataaaattcagtagttgtgggagctt

SEQ ID NO: 13378 - DNA, 891 bp, Oryza sativa
  ref <308>: DATABASE ACCESSION NUMBER: AK110726
  ref <309>: DATABASE ENTRY DATE: 2001-12-06
atgtgcagctaagtgaaccccaattccacttgggacctggggagagctcaagtggtgatttcagccgcagtggtgaggtgtgggaagctggcattgtcggtgatttatacatgccacaggaaaaggtcacttccacttccacactgctctccccctccccttcctcccgctccggcgaaggcgagcgcgcggatcggcgtgatggcggcggcggcgccctctcccccacccgtcgcggcgctggagcagatgagcaggaccaaaatgttcggcggccacaacctccgcttccgccaccacagcgccacgctcggctgccccatgaccttctccgtcttcctcccgccgtcgccggcatccgacctccccgtaagtgctcctccgcctcgtctcctcctccgcctcgagatctgatgaggggtttcgcatgctaccgcgtggttgtgcgcaggtgctgtactggctctccggcctcacgtgcaacgacgagaacttcgtcaccaaggccggcgcgcagcgcgccgccgccgcccacggcatcgccctcgtcgcccccgacacctccccacgtatgtgagacctgatccccctcccgtcgcgtacaatttctagggtttatgcgttccggagtggaattcaggagacttgtttggggggaattttgattgtttggcgagaatttgctggattacgctttgagctactggaggaccccttgagagagattttgtatcagattgctgttagtttgtatcaatgctgctgctatgtttcttcgaattcgctcattgtctattaggaaagccgaaagggaccagagtatattgatgcattcattgtgcattgtattttacacagtagggattcagagcctccatggaggcggcgcat

SEQ ID NO: 13379 - DNA, 1024 bp, Oryza sativa
  ref <308>: DATABASE ACCESSION NUMBER: AK110727
  ref <309>: DATABASE ENTRY DATE: 2001-12-06
acagttttacagaagcaaagcaacgggttcccaaaggtccatacttacagtacgttcaacgtacaactgatccaagcaaatgaaacaggtttgatgatgcactgatgcgagaaactaaacggttggatcggagtcggagacgaggcgatcatggacaagcggcggcggcggcgatgagcttagtagtcggtggtggggagctgctcgtgggtgtgggagatgagtgggccaacccagtacacccactgggactcccaggaccagctgacgagggccgggccgaaggagacggccgggttcatggaggcgccgtcgaacgcgccgccgacgaggatgttcgcgccgacgatgaagccgatggcgatgggggcgatggtgccgaggctgcccttcttggggtcaacggcggtggcgtacacggtgtagacgaggccgaaggtcatgacgatctccagcaccagggcctcccacacggagacgccggtcaggccgaaggtgccggtggcgagcccgccggtggagaagcggaggaggaagcacgccacggtggagcccaggagctgggcgatccagtagaggaggccgcggaacagggtgatgttgccgccgacgaaggcgccgaaggtcacggccgggttcacgtggccgccggagatgttggcgccgacggacaccgccacgaacagggcgaaggcgtgggccaccgccgccgcgatcagcccggcgggggtcgtcgctccgccgccggtcagcttgcctgcgtacgcgcatgacagttaggtacacgtaagaagaattcagagatcgaaatgttcttggcacaagcacatggtctgtgactgccacatcattgactgaaacagaactactgagatcccttcgtccacgtaatcagtaagggcaaaccggtcatttgggcccaatcatgcaacctaaaagccataccactttttatttcacgaacttttgactttttctcaaaagaaaattttctttcaacttaattatcatagcacggcgtctg

SEQ ID NO: 13380 - DNA, 854 bp, Oryza sativa
  ref <308>: DATABASE ACCESSION NUMBER: AK110728
  ref <309>: DATABASE ENTRY DATE: 2001-12-06
agcagaagctcatactgaatattcatatatggtcccgtgccctcgcgccgaacaagcctgcagaaaaccccaaatcgccctccaacggaatcatcgctgaactgatgaaatcaacccaaacgcacagcgaattccaccccaaaccaccacagatgcggaccaaaccgctgaaatcaactcaagtcaactcaaatcaccccgaaccaacagatctagacagtgcaagaaaaaaacggcggctcctgcttctgctcctcctcctcgcggcggcggcctgtgccgtgcggctccgccactccccggggtccggcggcgctgctcgaggcccccctcggcaaggtcgccgcggtggaggcgtgccccgctcgagcctttcccctcctcctccgccgctgcacgaggccagcgtcgcgcttccacctcgccgccaccgccgccgctgtgatggctcggcggcggaggggaggatcaggagcggcggccgcattcgagaagtgaggcagaagaagaggaggatgaggaaaagtagataagtcagcggacggaccgctcgagggtaagtgaggaataaatttgttccgcactacccgtgtccatgcgcttggggttccgcccactgtgggctcagtttccttccatagtaccttcattcaattaagctacacagaataggattcttgtactgtggggaggagtgtctttgggacaatttttgggctaggatccggcaaccggtgcttgcgctctgagaggccttagccgccctcctcttgtgcagccgatcaattcatctctagctgctggtggcactgcaccgcagcctcatgcaccagctatagtactacatgcgttcc

SEQ ID NO: 13381 - DNA, 1248 bp, Oryza sativa
  ref <308>: DATABASE ACCESSION NUMBER: AK110729
  ref <309>: DATABASE ENTRY DATE: 2001-12-06
tactggatggacccgtcgtgcccgccgttcccgcagccggaggcgccaccgctgccgctgcagctgcagctgcagccgggtctgcccaggctggagctgccgacgctggacctggagcgcgtcggcggcgaggaccgggcggcgctggtggcggcctgccgggatctgggcgcgttccgcgtggtgaaccacggcgtccccggcgagctccggcggcggctgctggagctggggaagcagctgctgggtcgcgacaccttcgagctgaagaaggcgcggccgggctacttctggggcacggctgcgctgaagtcgctccgcgtcaaggaggtcaactggctggagggactccatgtcgatctcgtccccggctcgtcgtcgtcgtcgtcgcaggtcggcgatggcgatgatgatgatgatgatggctggatgcggatcagggcgctgatggcggagtacggcgaccacatggcgcgcatcgcccgcaagctgttcgacgccctggccgccgagctgggcctggatcatcaccaggcggcgtcctaccccgccgagcgccagggcttcctccgcctgtaccgctacccgccctgcccttcctccgcctcctgcctcgggatggagccccacaccgacagctccgtgctctccatcatcctcggccaggaccacgtcggcggcctgcaggtgatccgcgacggcgcgtggcgcgacgtcgcccccgcgcccggcgagctcctcgtcaacctgggcgacatgatgacggccatcagcggcggctcgtaccagagcgtgcgccacagggtgctcgcgagccgcccctccacggagagggtgtcgtgctgctacttcgccttcccgcaggaggacgccgtcgtcgaggcccccagcggcatcggcggcggcgtctacaggcccttctcctacagggaattccgcgagcaggtgcaggccgacatcaaggccgtcggcaccaaggtcggcctcagccgcttctatgcgacggctaccaggtagtaacaaggtagaagatgtgctgctgcattgtgtaggatattgtagtacaaggtccatggtaccaattggtatttgcaatgattttctggctaattgcttgtctgaataaaaggagtatacatggcatgataataaattttctagccaacattacatgtaaagataaaagggagaaatgattgaaatcaatactcaatactatattttaagatcatcgcatcattttacatt

SEQ ID NO: 13382 - DNA, 1060 bp, Oryza sativa
  ref <308>: DATABASE ACCESSION NUMBER: AK110730
  ref <309>: DATABASE ENTRY DATE: 2001-12-06
acgaacaattgttggcaaaggcgatggaactcttctcggggttgaacatggccgatgcccctgtcgcgcttacgccgcgcgaggccgcgtctggcgtcctcggatcggtgtctatgacatgctggatcttcctactggtcccccaactgatcgaaaactatcgcaatgggaatgcagaagctatttcactgcttttcgtcttcgtctggtttgccggcgacgtcgcgaacctgctgggtggcctactcgccggcctggtgcctgtcattctctctatagcagtctacttctgcattgcagacggcatcctcattggacaatgcttatactacaagattaagaatacgcgcgcaagttcccacccccgccgccgctcttcaaccgagactcccgatccaacgacaccactgcttggccgtcgattcagtgactcgcttgcttcgggacaggggcgccgtcgctcctctggctctttgcgcggatatcaggctgccggacggcgtgagagccaggtcgaggacccattggcgaagatcgtggaggagaacgagtacggacgaaaggcctgggtgaagaacactctcagcgttttggggatcttccttgtcggtgcggcggggtggacggttgcttggcgaactggaatgtgggcgccggcgccccaggagattcctcacgccccagatgaggctactgggggtcagatcctgggctatgcaagtgcggtgctttatcttggcgcgagactgcctcagatctacaagaactattgtgacaaatcatgcgaaggcttgtcgcttcttttcttcattctctcccttttgggcaatctgacctatggtgccgggattatcgcgcactcaacggagcgggaatacatcataacgaacattccttggctgattggttccctgggaactatggttgaagatgtgactatctttgctcaattccgtatttacgccgcacaacccccattggccgtttcatagcctttatcccgatgttcttacacttacgccatgaggcacctaaaattgaatgactgcttcctttattt

SEQ ID NO: 13383 - DNA, 1487 bp, Oryza sativa
  ref <308>: DATABASE ACCESSION NUMBER: AK110731
  ref <309>: DATABASE ENTRY DATE: 2001-12-06
aacgcgatttggtcgattttgaacttttcatttttgtcttctattttattctttcgtttgattatttgaggttattagaccactttggacttgttcagggttcgccaacccactgatgcacctacaccactgaacataccaccaccatctttccccagatcaaacaccaaagcgactcggacggacatggcgggagtcgatctggagaaatgcaagcgtattgtacaatacttctgggatcccgaacctaagaatgacactgtaccagaggctccgatctggtgcctgggccaggagtacacccccacccccaaggatgtctcaaagagcacagatgtgagtcgaggggaaagacctgggacaaactcggacgccgcggtcggcagttcatggccagaggcatttttggatgacttcgaatcgaggatatggatgacataccgatcaaactttactcccatcccccgcaacaagacaccagaagcaacctcgtcgatgacgctaggtgtccgtctacgcagtcaactgatggattcacagggatttacatctgatactggttgggggtgtatgattagatctggacagagtctactggcgaacacattatctatgatacagctgggccgagattggcgaaggggatcctcacccgaggaagaatcgaaattacttgctatgtttgctgatcacccggatagcccattctccgtacatcgatttgttcaacgtggagcagagtcatgtgggaaatatcctggagaatggttcgggccatcagcgacagctcgctgtattcaattgctatcacacgaatgcgaatctcccaaactgagagtctacatcacaaacaatacgtccgatgtgtacgaagatgaagttgcccgactcggccgtgacgagaatggtcaaccagtaccggttctcgtgttacttggactgaggctgggtatcgagcaagttacctcggtgtactgggatggacttcgggctgctctgcagtatccgcaatcagttggaatagctggtggacgtccatcggcatctcactatttcgtaggcgttcaagattcccatttgttcttcttggacccccattccacgcgtccagccctacctgtgccgcaatcatccaaggtatactcccgggaggatcttgatacctgccatacccgtcgattgcgacgaatacacatcaaagacatggatcccagtatgttgatcggattcctcattcgagacgaatcagactggaaagattggaagcagcgcgtgcaatcaacaccaggaaaaccgatcattcatatacttgcatctggagcgccgacggaggagggaatggagaggatggaggcgttggatgaagttgaagcactggatgattctgaagcagagtgagcgggtcaaataatagcagaaagacgaggaaccactgtcaaatgtacagatctagagaatggaatctagcatggggaaaaaaaaagaat

SEQ ID NO: 13384 - DNA, 1351 bp, Oryza sativa
  ref <308>: DATABASE ACCESSION NUMBER: AK110732
  ref <309>: DATABASE ENTRY DATE: 2001-12-06
ggctgggtggttttcaatcgctacagacagtcgctcctattcggttcgctcgaatttctcgatcattccaacatgaagtactctattcccagccttgccgttctggcgaccaccgtcagcgctgcggctgtcgatctcaccaagagggatactcccctctccgtcaagttgacgcacgttgaggacagcaaggtcaaggttgctttgacaaacaacgccgagactggctacaaccttctcatcaaggagtctttcctcgacgatgcacctgctgacaagctgaccgtcaccaccaagtcttctcgtgctcctttcaccggcattttccagcgcatgctctacactgacctgtctgaggatgtcttccgtccgatccaggccggtgagaccatcgaggttgaggttgagcttgcggaaatttacgagcttgctgagaccgccacctacgatgtatctacgtcgggctctttcctctacgccgaactcaactcgaccacgctggccgaggatgctctcatgtacaccagcgagtctatccccgtcgacatcgactcggaaaaggctgccaacgtcgtgaatgctgtcgacaacatctccaagcgcaccgttgtgcagagcgactgcaccagctctcgccgcactgcgatcaccaacgccctcagcagctgccgcagccttgcgtctaatgcagccactgctgctacctccggtagtgccacgaggttcaacactttcttcaagagcacatcgtcttccgtccgcagcaccgttgccgcccgtcttcgcgccgtcgccaacgactgcggctcgaccagcagcggtgtgacccggacttactgcaccgacgtctacggcgcctgctcttctggcgtccttgcttacactcttcctgcctacaactacattgcttactgccctctcttcttcaaccagctgcctgccctctccaggtcttgctacgctcaggaccaggccaccactgtcctccacgagtctacccaagctcccgctgtctacagcccgggtactcaggacaacggctacggctactctgccgccactcgtctctccagctcccaggctcttgccaacgctgactcctacgccctttttgccaactctgtttacaacaactgctgaacgtatcgccatcgtgctgcacgccttgctgtcgggagtcggattcgatagagtttcgggctaaaagttggggagtgcctgtgctgcgacaggaagtcattgttgatattgcatgtgagggatttgaatgtgcatggtgctgtttggtgatctatcacaatcattatcagaaacgaatgaatttacgctttttgatgtcggcaaaaaaaag

SEQ ID NO: 13385 - DNA, 1139 bp, Oryza sativa
  ref <308>: DATABASE ACCESSION NUMBER: AK110733
  ref <309>: DATABASE ENTRY DATE: 2001-12-06
attctccatagcttggccaccgtagtaaagccggcgagctaattctagttctagccagctacacgagatcatcgctgtgacgggcggggcattgagagggcgcgtgtgccggccggggtcgatgcatggcatgtgttaacatgtacaacccggagcatcaccaccaccagtcgtcgtcgttcatggcgccgaggatatccttttccagcgacttcgcgctcgagccgccgccgccggcgcagcagcagccggcggtgcgggcgcctggggacgccgacttcgagttctccgtcggcagccacccgatgatggccgccgaccagctgatctccaagggccgcctcctgccgctccgggaggccccgcacggccacggcggcgccgacgccggcggccggccactcacgctccgcgacgagctgcgcacggacagccgccatggccgcgtcccccgcgcgcccaacattcggtggaaggagttcctcggcctcaagaaggcgcccaagaaggcccccaccgccgacgctgccgccggcgccacatcgtcgtcggccgacacccagatggatcttggaggtcaagggagcacgagagactgaagcaacaaacgcaatgaagtgtattactgatcaatgagtactacgtagtagtgaaactgaagtagccatggttggccagatcggatgcatggtggcgatgcgcctttcagcttgctgtctgccatcactcatattcactcttgctgatgatcttagcagctcattctaatggagaactctgcagggcaaatggccatttccttttacctctttgctgcatcttttttgggtgtaaaagggaattttgatctctagtttttgggtaatggtcgtcgtcgggtagatgggtggttccagtgtagtcaaattaactccgctgcgcctctgatgttttgtattggaagggccagtaaaaatgtatttttccccacatggtgtggtcctagcttagcttttgtacgtgttgtttagctgttcccatgcttgtctgcttccgccacctccgctctctcccccactttccctatgtacaaaaatgcttgtaatctagtagtagctagcaattcaagctttcagttcaatgaagcccatttcaacgtt

SEQ ID NO: 13386 - DNA, 1375 bp, Oryza sativa
  ref <308>: DATABASE ACCESSION NUMBER: AK110734
  ref <309>: DATABASE ENTRY DATE: 2001-12-06
ctttcaggagaattgcctaattgcttgctcactgaatatcctatactgacaaccttgaaggtctcaaacaacaaacttggtggccccatatttggtggtacgaatcatttgtcgatcaaacatgcattataccttgatggcaacaaatttgaaggaacactgccgcgatatctaacagcagatttcgatgctcatggaacattggatttgcatgacaataatttatcaggtaaactcgatttttcacaatggaacctttccactttatgcaccttgagtcttgcgggcaatagtctaatcggtgaaatccatccaagcatttgcaatttgacaagaattatgcttttggatctatctcataacaacctttcaggggctataccagactgtatgaccgcattagagcttgatttttttatcgtctctcataattctttgtccggacatatagtacctttttctttcttcaatagctctactgtcatggctttggatctcagtcacaaccaattcaacggaaacattgaatgggtacaacatctaggtgaaagtaagtacctttcactgggcagcaacaagtttgaagggcagatatctcccagcctttgtcagctccagtctttaaggatacttgatttctcacacaacagtctatcagggccattgccatcatgtattggaaacctctcatttggacaaaatccagttggtatccctttatggtcgctaatctgtgagaatcactttaggtacccaattttcgattacatcggatgctatgaagaaagaggcttcagcttccgtactaaaggcaacatttacgtatacaaacacaatttcatcaattggatgtctggcatcgacttatctgcaaacatgttgtctggacaaattcccagggagttgggaaatctgggacatatcaaggccctcaatctgtcctacaatttctttgccggaccaatcccagcaacctttgcaagcatgagttcagttgaaagcttagacctatcccacaacaagctgagtggagcaataccatggcagttaactcgtttgtcatcactgtccgtgttctcagtgatgtacaacaacttatcaggatgtataccaaactctggtcagttcggctcatttgatatggatagctaccaaggaaacaacctcctacacccagcgtcagaagggagcgagtgtgctcccagttcaggtcattcgctaccggatgatggagatggaaagggaaatgatccaatcctttacgcggtcactgctgcctcgttcgtagtgacattttggattactttcgcattcacaagcttccgaatgtagagcttcagattttttaatacttactttgtcctattttaagcgc

SEQ ID NO: 13387 - DNA, 1062 bp, Oryza sativa
  ref <308>: DATABASE ACCESSION NUMBER: AK110735
  ref <309>: DATABASE ENTRY DATE: 2001-12-06
ctaaggatggtcaaaccagagagcccgctttgttggcttacaccttgggtgttagacaattgattgttgctgtcaacaagatggactccgtcaagtgggacaagaacagattcgaggaaatcatcaaggaaacctctaacttcgtcaagaaggttggttacaaccctaagactgtgccattcgttcctatctctggatggaacggtgacaacatgattgaggcttctaccaactgtccttggtacaagggatgggagaaggagaccaaggctggtaagtccaccggtaagactttgttggaggccattgacgccattgagccacctcaaagaccaaccgacaagccattgagattgccattgcaagatgtctacaagattggtggtattggaacggtgccagtcggtagagttgaaaccggtatcattaaggccggtatggttgttacctttgccccagctggtgttaccaccgaagtcaagtccgtggaaatgcaccacgaacaattggttgaaggtgttccaggtgacaatgttggtttcaacgttaagaacgtttccgttaaggaaattagaagaggtaacgtttgtggtgactccaagaacgacccaccaaagggttgtgactctttcaccgctcaagttattgtgttgaaccaccctggtcaaatctctgctggttactctccagttttggactgtcacaccgcccacattgcttgtaaattcgacaccttgttggagaagattgacagaagaaccggtaagaagatggaggacaaccccaagtttgtcaagtccggtgacgcttctatcgtcaagatggtgccatccaagccaatgtgtgttgaggctttcaccgactacccaccattgggaagattcgccgtcagagacatgagacaaaccgttgctgtcggtgtcatcaagtctgttgagaagtctgacaaggccggtaaggtcaccaaggctgctcaaaaggctgctaagaaataagctatatagttcttttctgaatacacctgagttttacaaaaaaaaaaaaaaaaaaaaaaaaaaaaag

SEQ ID NO: 13388 - DNA, 1038 bp, Oryza sativa
  ref <308>: DATABASE ACCESSION NUMBER: AK110736
  ref <309>: DATABASE ENTRY DATE: 2001-12-06
attctttctttctttccaccctcgccgatcatcgccgttatctccccggtccgctcctcgcgttactctctgggtgaagttctcgagctccagatggcgcccttgatctggcatgtcaaggagaagcagaagtagccaccacgggcaaggagtggtagcaccagaaacatcccgagcagcaaggagcagcagctcgcgcggagcaggtcccaccatcacgatggtgggtggagtagggagctagcagtagcgagcatcgacttctccctcgatctcaccccagcaagagctcaagccgtgaggttgacggctccttcctggcggcgcgtggggcaagcagagctcgaccttggagcagcttagagaaaggaggggccgtcgagggttggcttctgcttctccatggctcgatcaggtgggcttcccaaagcttttggaaggttctcgcccaatcgattggagacgagggagcagcaaatggctgccacggtgctcaccagcctcgccaccacgtcctgtggtgttgtccaacggtggacaccgcacaggccgtcccttcttcctcctaccacagggcaatgctcctcgctgaccacatcctccaccgctgctgcagcagatccctccctcttctccgctggcggtgatgtcagggtgaggctgcccgcccaattcttcctcataccacaggcagcgctccctacggaccgacgcctgactagcgcgtttccaccgccgcaacggatccctctccctcctccggcggtggcgatgccataacaagaccatcggggccaaacctgagttgtgtagttgcgccgagcatgaaggagaaactagattgactagggaaaaggagagagggggaagagcgttgataagtgggttctgtggttttttaatttttttttcttgtcacttacatgtggtccacacttatagtttgtatctagactattgcgtcagtacagatggaccaagtcaatgtgatatgttagcaagcgatcccggactagttggatcggctggtgtttgatc

SEQ ID NO: 13389 - DNA, 1577 bp, Oryza sativa
  ref <308>: DATABASE ACCESSION NUMBER: AK110737
  ref <309>: DATABASE ENTRY DATE: 2001-12-06
ccctttcctctcccccctcctctccattcccatggcgtccatggcgtcgtcgtgctgagttcgtcagagctacctgctcctgctcctgctcggtcctcactgcgctgtctctgagtagatttgcttgcgttcttttgagatggaagtgttcgacgaggcggcggtggtggtggctgcgccgcctcctccgcagccggaatgcggggcggcggcggcggtggtgggcggcgagcccgggtggtcctcgccgtccccggccgcgtcgccggagttcgagttctggatggtggggaagaacccctcctcgttccagtcccccgctctgctcaccgccgacgagctcttctccgacggcattgtgctcccgctccgcaccctccagcaggtgccctccggtgaaggcgacggcgaaggtgaggagggcgagggcgagggcgatgccgccgccgtggagtcctctgatttgccggaggcggcggcgcagcgggtcgcggagtccgggggccccgcgccgacgccggacctcccggcggtgacgttcaagtggaaggacatcttcaaggcgaccggcggcggggagtccaaggaccggaagaaggtggagcgccgcgtcagcagcgtcggcggcaacggcgagctcatcaacatcaacatatggcccttctcccggagccgctcggccggccactccgccgccggcgccggcaccgcggcggcgggagcggccttgagccgcaacaagtcaaatcccaatgccaatgtcaacgccaacgccagcaataacgccgccgccgcagccgcagccgcagccaccgcaccggccgccgcgacggcgccagggcccgcgcccgcgcgcaaggtgagcagcgcgccgtgctcccggagcaactcccgcggagagacctccgccgccgcgccgccgccgtctattgccaccgccgcatgtgcagccgccgccgccgcagcaaccgccccggcgccagcacccgccacctccatgctgaggaggctggtgcccggtcatggacgaacaggcgccctcaccgtcaccggcatccgcctcggccgcgccagccccgtctggcagctcaggcgcaacaagctgcagcagcaaggcgccgcggccgagcagaagcagagcagcgacacccccacccccaccaccgccgccaccaagaagaaggccactgccaccacaaccacagcagcaacccccaccacccaagacgtcgacggcgaggacaaggccgcggcgagcgcgaccacgccagcggcggcggcggcaaccgcggttgccggaacaacgcgtcgtgctcggaagccggcggcgaggaaagcaacccgccgcaggggctgttcggcctccggaccttcttctccaagaaggtgtactgattgcgattcgtccacgtttatttttgtacatagcattcgagctatagcttactccatagctgctggctcattcaattcacatctcctcctcctcccctttcacttcgattcagcaagagtagcttttagcttttctttcttcttctccattgtacttctactaatctactgctccttctact

SEQ ID NO: 13390 - DNA, 589 bp, Oryza sativa
  ref <308>: DATABASE ACCESSION NUMBER: AK110738
  ref <309>: DATABASE ENTRY DATE: 2001-12-06
cattgctactgatatcgacaagaatttgattgccatgagaaaggaacaattcaagaattcaccaaatgttgaattcagagttgttgctccaaacgatttgagcatccttgctgaaccatgtgacatttttgctccagctgctttgggtggtatcatcaactctactactattccaatgctcaactgtaagattctctgtggtgctgctaacaatcaacttttggatcctgttgaacacgatcacatgatcaagaatcgtggtatcatttatgttccagattacttgaacaaccgtatgggtattgtcaattgtgccaatgaatgctttggttatgtcaagaatgacccagcaattttgaaacacttcggtagagattgggataatgctgtttatgttattgcttcccgtattttgcaaacctccagagatgccaatattccaactggtcttgctgctaacaagttggctgatgaattcagtgaaattgaaaatccaatcattggtcaccgtggttggtctattgttaagagcttgattgaagacaagtgggaaaatggtcaactctaaattaaattttggattttattt

SEQ ID NO: 13391 - DNA, 895 bp, Oryza sativa
  ref <308>: DATABASE ACCESSION NUMBER: AK110739
  ref <309>: DATABASE ENTRY DATE: 2001-12-06
acagcaaaatgctaggagtataagtaatcttctgcatcgcctcgataatccttacttcaccgagagaaaagaagcagacggcagcaatgcaagctcgacgtgctccggcaacactcctcctccgccgcctcctttccctgtgcgccatggcggcggtgctactgctctcgccgtcgccggcggccgtggcgtcagccgagccaacgacagcagacgacattatccccgccctctccggcgacgacagatgttggtggcccgccgatgcaccgacggcggcggcggcacccgccggagggggaacgggatacgacgacgccatcgctgccgttgctgacgatgcagtcgtcgtcgtcgctgcgccggcggcggcgacggcgcacaggttcaggccacgctacgactccgcggtcagcccgggcgcgaagcgggagctcgagcacgaggctcgctgcgggccgcgcgtccccgtgcggcggggcttcccgtggccggagtggaagcccaactgccgccgcgaacatggcgtcgccggtgccggcggcttggggcggcgtccctgggacgagccgtagcgaacagtagagacgatcatccaactcgcgccatcgccatgcagcagcgttgtgccaagaaacggccatcggagcaataaaaattagagagaagggccaaattacaaaacttcaggcaaaccaaaaagtatcagtaattttcagaaatttatatgaccacgtcgttagttttctctgttatcacactggcaacatactgcatgataaacgataattagttatgaaaagaaaaatactgagtcgatggcgtcctctcgtctgcgatgtgtcatgtataaattgttatgaaaaattatataatataaaaataattagatggt

SEQ ID NO: 13392 - DNA, 1012 bp, Oryza sativa
  ref <308>: DATABASE ACCESSION NUMBER: AK110740
  ref <309>: DATABASE ENTRY DATE: 2001-12-06
cggaacctccgattcgcctctccaaaatccaaagcaaagctaacccactctgcgagtgcgccaccgcgacccacccccactccggcgagccaatggacgtcctgaagcgcgagctacagcggaagcgccagctgctcgacgccgacttcggcggccgcaagctcctccgccgcgccgagatcgagcgccgcgagatggagcggatccgggaggccgagcgccggctcctcctccagaagcagctccggtcctcctcctcccaccaccgcgccgcgtcgcgctccacgaccacgccgggggctcccgacggcgacgagtcgtcgcggaccgagcaccgcggcgacggggaggagaaggagggcgcgccgctcctccccagggaggaggtcatccggcgcctgcgcgtgctgcgccagccggccacgctcttcggcgaggacgacgccgcgcgcctccgccgcctccacgccgtgctcgaggaccccgcggcgctcgccgacgtcgaagcggcggagatcggggagggccagaccaacgacttcctccgcgacatccaggcgctgcgggcgaaggccgttgcggcgtcggcgtcggcggcggcgaagcccaaggctggcgctgcaactgcagagagcgggggcgagacgagggaggaggtgccgttcgaggagctctgcgacgaggacaagatcatgaccttcttcaagaggctgatgagcgagtggagccaggagatggacgagatgcccgaggcggagaggcggacggcgaaagggaaggctgcggtggccacctgcaagcagtgcgcgcgctatctcgagccgctgttcaagctgtgcaagaagaaggtatgtgacagtattaattcacgcacacacttaagaatctgatgttctttggtgctgtaatcgaatttattgaatgcctccgatgctttcaaaacccaaagttagtggagtgagtctgtaagatgtgctaaaagaacagtatgaagcattacaattttacaacc

SEQ ID NO: 13393 - DNA, 1458 bp, Oryza sativa
  ref <308>: DATABASE ACCESSION NUMBER: AK110741
  ref <309>: DATABASE ENTRY DATE: 2001-12-06
accatgtctgccttgtttgccgcctctagatgtgcatcactccgtgtcatgcgccctcagtgctcgcacattgctgctgcctccttactgctctctagatggtactcttcaaaattccctcctcataccgtgattaacatgcccgcattgtcacccaccatgactcagggaaacatcgcgtcgtggagtaagaaagaaggtgatcagcttgctcctggcgaggccattgctgaaatcgaaaccgataaggccaccatggactttgagtttcaagaagatggttatttggccaagattttgatgggtgacggctctcacgatattcctgttggaaagccaattgctgtgtacgttgaagaatccaacgacgtggctgctttcgagaactttaccgccgaagatgccggtgaaggtgaggccaagccagcggaatccaaggaggaaccaaagcaagagtccaaggaagaatccaaagacacctctaaggaatccaaggcagctcctgccaagtcggagtccaagtcttcttcgaccccaaagcctagtggacgtatcattgcctctccattggccaagaccattgcccttgaaaagggtatttctcttaagaatgtgaaaggttccggtcctaatggtagaattgtggctaaggaccttgaaaatatcaaggaatctgccgctgctgcccctgctgctgctgctgccgctgctccagttggcgcttcatacactgacactcctctcacaaacatgcgtaagaccattgcttcaagattacttcaatccactcagcaatctccttcctacatcgtatcgtcagagatgtctgtttccaaacttttgaagttgcgtcaatctcttaatgcttccgctgaggacagatacagattgtcggtcaacgacttgttgatcaaggccatcgctaaggcatcattgagagttcctgaagtcaactccgcttggttgggtgaacaaggtgtcatcagaacctacaactatgttgatgtttctgtcgctgttgctaccccaactggtttgatcactcctatcgtcaaaaatgctgacaccaagggattggctactatctctgccgagatcaaagacttgggtaagagagccaaggctaacaaattggctcccgaggaattccagggcggtaccgttaccctttccaacttgggaatgaatcacgccgtcaccagcttcacctccatcataaacccaccttcatgtgccattttcgctgttggtaccgtcaccaagaaggctgttccatccgacgtcaacgaacaaggattcatctttgacgatgtcatgaacattaccggaacctttgaccacagacttgtcgatggtgctcttggaggtgaattcatgaaggctttgaaaaagattgttgagaatccattggaaatgctagtatagagaagtagattacaacaataatactaagtcgag

SEQ ID NO: 13394 - DNA, 1494 bp, Oryza sativa
  ref <308>: DATABASE ACCESSION NUMBER: AK110742
  ref <309>: DATABASE ENTRY DATE: 2001-12-06
attcaatccaagctccccacgcgcaccacctgttcgacgaaatgcccctgcgtgctcggccgccaatggaggacgccgccggcagggacaggctcagcgacctccccgatgaaatcctccaccgcatcatgtccttcctgaacgcgcgccaggccgtgcagacgtgcgtgctgtcgcggcggtggcgcaacctctggcacaccgtgccgtgcatcaacgccgacttcgttgagtttgattccatcggataccaagggcccgtggtgccgttcaagaggtttgttaaccggctgctggagttccgtgatcctgcctccgtgatagacacattcttgctcaaatacgccatgccggacagattggatggatacaaggcttctaatgaagaagctaacaggtggattggccatgctttgcagaagcaggccaggattctagaggttgccgtgttcttcttcccattggatcttgatcactcagtgtttacttcattctacctgagaagaattgagttctcccatgtgtacttacgcaaaggtttcttcgagcaaattgagacgggctgtctattactggaagatctcttattacatcaatgcttcatttgggatggtgagatctcctcccagacactgaaggttttgaccgtcgatgcaactgaattatacacggtgaaggagatgtctatttctactccaaatcttacttctctgaccttgtctggtcttgagtatcccaaagctgtactaaaaaacatgccattactagtgactgcatcagtatcggttacatttgatgcattaaacttcgacggttattatgatgctaatgacctccgccagtatctctggggcctttctgctgttagaaatctggagttccattatgagggtgcagagctgatgattgcaaacaattcgcaatggtgtccggaatttgtcgatgttgtcaacctgactcttggtgaatggtgcctggatgcaaacttccatgcactaattgtattccttcagaactcaccgaggctagtgaagctaactctgaaactcgcgaaggatcgttggacaacaccacaaagaatcattggtgagcttgaagaaagatcatttacatgtgagcaccttaagattgttgaagtgatatgcttggagaatgatccccaggtcatcggtgttgaagatttctttgttcgtagtggtatgacatccgttcagtttcatatcaaacactggagaaaagacgaggagtataagttacctgcttttattcaatactaactgagtgcccatgcgttgcaacggaaacatttttctagttctatacaaacaagagatatgtcaccttttaatagtttcatggttcatactgcatttttttctcatggtgctaaaagtttagtacccagagaaaaataacaatattttgtgctatattcagcttgacacatgtatggttcattcattccatctgcaattagataataccataaaaaac

SEQ ID NO: 13395 - DNA, 1434 bp, Oryza sativa
  ref <308>: DATABASE ACCESSION NUMBER: AK110743
  ref <309>: DATABASE ENTRY DATE: 2001-12-06
atgtcaaataatgaaatttctcggttctctctctctcccactctcgccgtcgctctccgccattctccaccgcccacccacaccggaggtcgcccaccaccggggcctcacctcctcctcctccccctcgtcatcaagcagagggggtgatcggggtcgccgcgatggatcctttggaatctgaaggtggctcacagaaatccaacaataagcccaaatattctaagtttacgcaacaggagcttccagcatgcaagccactactaactcctggaattgtggttgctaccttcttgctgattggtatcatatttgtcccaattgggctcgcgtctctatctgcatcgcaagagatcgtcgaactggtggatcgatatgacacaaattgtgtgtccacgcttgacaaggttgggttcattcagaacaccgatactgacaagacatgcacaagaacactgactgtgcctaaacatatgaagagcccaatccagatatattaccagatcggcgacttctatcaaaaccatcgacggtatgtgaaaagtcgaagtgataaacaattgcggtataaatgctgtgcacttgacaaaggattgtgatcctgaaggtaatactgttgatggtgctccaattattccatgtggccttattgcttggagcttgttcaatgatacatatacaatttcggtgaacaagaaggccattgaagtgaataaaaaggatatagcttggaagagtgacaagaccgataaatttggcagtgatatttacccaagtaattttcagaagggcagtctaataggcggtgctaaactaaatgagagcatacctttaagtgagcaagaagacctcattgtttggatgagaaccgctgccctcccaactttcagaaagctttatggcagaatcgagacagatattatggcaaatgatcaattaacagtggttatacagaataactataacacatatagttttggagggtctaaagcgttggtcctttcaactacttcttggattggaggcaaaaacaacttcattggtgttgcatatctgactatcggaggcctatgcattttccttgcagtgggcttcgtagtgcttctctacatggttaaaccaaggactcttggagacccctcgtacttgtcatggaatagagatactccagaccgtccaaactaatagattggaatctcttttctgatatataaatttaataaaggatcatttcaatgggtaaaatgtgaaattcctttacctgaatctatggatgatgttatgattcctatctaacgtgtttgtgatagcccgataggtccataggcatgagaatacatgagacagtgtactctgttgactccaattttacttgacaagaacaggagttgttcaacttatttctgactataaattaacccagagttcaactat

SEQ ID NO: 13396 - DNA, 814 bp, Oryza sativa
  ref <308>: DATABASE ACCESSION NUMBER: AK110744
  ref <309>: DATABASE ENTRY DATE: 2001-12-06
ctccaccgcatatccatcccccaccagttgtagcagtagctagctccaagagcttcttgtccatgaattgttgatctcgatcgatcgatctctgctgcctgctagctaatgaataaacaatagctaggctatatatatatatatatatatatatatatatatatatatatcgatcgaccatgtcgtcgtggatgcagcacaggcggcggtcgtggacggcgcggttgctgtcctccgcgtcgctcccgccggtgcgcctgctcgtcttcttcgccatcgtcatcttcttcctctccgtctcctcctacgtcgactacaaggccatcgagcgccgtgcggagatcggcctccgcgtcttcgccgccccgctcgccgccgtcaccatcttcctcctctttctcgtcctccagcatcgacgccgctactggacgctgcgccgccaagtacaccgccaccatgcatatgctgatcaggccgaggctgcagggagcgggtcgccgtgggttgtggcgctgctgctgctgctgttgctgctcatgctctccttccaatcctctgtccattccatctggttcaggcctctctgggattctgctgattactagtagtaactagctacctacttctacggttctactccaccttgcagctataatttactcatctacctacctagcatatactatatattatctatctatacatacaggaattaatccatccatatgtaatacgctgtctcttatttgatctctagctcgtatatactccatctgttacacaatgtatgcatgtatgatacaacttatgttcc

SEQ ID NO: 13397 - DNA, 2441 bp, Oryza sativa
  ref <308>: DATABASE ACCESSION NUMBER: AK110745
  ref <309>: DATABASE ENTRY DATE: 2001-12-06
acatcactgcaattatacccggcgtttgccatcccacaaccaccttactcaccgtcacacatctctcccgtgactccgcaaaccacctacacctctcaattaccgtttaatccccgcacaccaccgccatcatgtctgagaccttcgagttccaggccgagatctctcagctcctctccctcatcatcaacaccgtctactccaacaaggagatcttcctgagagagctcatctccaacggttccgatgcgcttgacaagatccgctacgaggccctctccgaccctagcaagctcgactcgaacaaggacctccgtctcgacatcattcctgatgaggccaacaagaccctcaccatcaaggacaccggtattggcatgaccaaggccgaccttgtcaacaacctcggtaccattgcccgctctggtaccaagcagttcatggaggccctcaccgctggcgccgacatttccatgatcggtcagttcggtgttggtttctactccgcatacctcgttgccgacagggtcactgtcgtctccaagcacaacgacgacgagcagtacgtctgggagtctagcgccggtggcactttctccatcaagcacgacaccgagggcgagcagatcggccgcggcaccaagatcatcctccacctcaaggacgagcagaccgactacctcaaggaggccaagctgaaggaggtcgtcaagaagcactccgagttcatctcctaccccatctaccttcacgtcctgaaggagaccgagaaggaggtccccgatgaggaggctgaggagagcaaggacgagggcgacaacaagcccaaggtcgaggaggtcgacgaggaggacgagaagaaggagggtgagaaggagaccaagaaggtcaaggagagcaagatcgaggaggaggagctcaacaagaccaagcccatctggactcgcaaccccgccgacatctcccaggaggagtacggtgcgttctacaagtcgctctccaacgactgggaggaccaccttgccgtcaagcacttctccgttgagggtcagctcgagttccgcgcggttctcttcgttcccaagcgcgctcccttcgacctcttcgaggccaagaagaccaagaacaacatcaagctctacgtccgccgcgtcttcatcaccgacgatgccaccgacctcgttcccgagtggctctctttcgtcaagggtgttgtcgactctgaggaccttcccctcaacctgtctcgtgagactctccagcagaacaagatcatgaaggtcatcaagaagaacattgtcaagaagaccctcgagctcttcactgaaatcgccgaggacaaggagcagttcgacaagttctatactgtcttctccaagaacatcaagcttggtgtccacgaggacagccagaaccgcaacaccctcgccaagctcctccgctacaactccaccaagtctggcgaggacctcacctccctccaggactacgttacccgcatgcctgagcaccagaagaacatgtactacatcactggcgagaacatcaaggccgtcgagaagtctcccttcctcgacgccctcaaggccaagaacttcgaggtcctctacctcgttgaccccatcgatgagtacgccttcactcagctcaaggagttcgacggcaagaagcttgtcgacatcaccaaggacttcgagcttgaggagtccgacgaggagaagaagcagcgcgaggaggaggagaagtcctacgagggtcttaccaagtccctcaagaacgtcctcggcgacaaggttgagaaggtcgttgtctcccacaagctcgtcaactccccttgcgccatccgcactggccagttcggttggtccgccaacatggagcgtatcatgaaggcccaggccctccgtgacacctccatgtcctcttacatgtcttccatgaagaccttcgagatctctcccaagagcgccatcatcaaggagctcaagaccaaggtcgagaacgacggcgagaacgaccgcaccgtcaagagcatcaccacccttctctacgagacctctctcctcgtctctggcttcaccatcgacgagcccgccgcctacgccgagcgcatccacaagctcgtctccctcggcctgaacgtcgacgaggaggcctccaccgccgaggaggcttccaccgacgcccccgccgaggccgccaccggcgagagcgccatggaggaggtcgactaagcgtgtcgcctctgaatgaaacagtctactcgactaatatcatgcattatggctggagaagcaatgggcgttcttgatacaaaactcattgagtggtctttctaattttctacttttcacgcgcttgtactctacgtagccacctagaccgcatcacggtgtggttctagaagggacatgatacgaatttaagaagttccgacgtac

SEQ ID NO: 13398 - DNA, 1167 bp, Oryza sativa
  ref <308>: DATABASE ACCESSION NUMBER: AK110746
  ref <309>: DATABASE ENTRY DATE: 2001-12-06
atcatcaacagaaaaacaaaaagaaaacatgccaactgaaagaagagttctcggtcaaacccaacacactgaacaaattcctcttggaggacaacaaatcaacacaatgcaaacaacaggaacaacattgcctgcaactggccttgctactggcactaccaccctggcacgtgacactggcttcgttcaatcctccacattaccatccagtggctacgttcaatcctccaccttgccatcaagcggctttgtccaatcctcaacattgccatcaagtggctttgttcaatcttccactttgccagctagcggcttcgccagcgcaactgagaggttgtccacaaccagtgcatcaatgcctctcaagactgcatcctctggctttgttggtaccactggtgttgtaaaccaacaatcccttggtactgcttcagtcaccagcaatcgcattgtagagcagccagtccttgagaacgttgttgaaagaaccttcattgagaagagaaacttgcagaacatcactgaaatccatgaacagccagtctacgaaatccatgagaagccagtcattgagaacatcactgctcctgcagaagtcaagagattcggtggccaagtcctccatgaagaaatcagacaagaccaaggcttcgcacttcctgcaaagaacgttgctgttcatcgtaccagagaagaatacgttgctcaagtgaacgaggcaccaaagatcaacgtctaacaccaaaaggtcgtcaacatcattgagcagccagtcatcactgaaatcgtcaacaagccaattgttgaaatcagtgaaaccaacattgaaagagttatccatgagagaccaatcgtcactgtggtcagagaacaaccaattactgaaaatgttcaaagtgccaccttcccatccactggatttgctaccactgaaaccattgcaacaacagcaacagttccaagagcattgaacgtcaccacaaccgataccttgattgaggaaagaaccactggaaaaggaggtatcttgccaggaaccacttcctctgccaccacaaccaccaatgcaactggaagaaagagcatcttctaagctgaaccagaagtgatcagcagacgaagaaatttgtgaatactgtacataaacaacatccagttgtccttttt

SEQ ID NO: 13399 - DNA, 798 bp, Oryza sativa
  ref <308>: DATABASE ACCESSION NUMBER: AK110747
  ref <309>: DATABASE ENTRY DATE: 2001-12-06
taattcttgatgcccgtctacctggctcttgtaaatgagggagatcatttattcttttgtttggccagaaaaatcaccagccaaattcattatgaaagaaaggagagtgtagggtacaaagttactgcaacaaggttgttgttacggcttatttgatttttttacttcagcaactggaggttgaaagatcaggaacgttcatagtaccatctaactggaggagtggtattaatatgaccaaatctcccgcagagatctccacccaaaggtgaatttatttaaccctatgacttttccatggttagtgtctccaatggccactcaactacagttgatgctattgtgacactgcaagcaagattatttggcaggatgcgcaggtgtaaatcagactgcaatgtcgcttaagcgcaggaccgtcgtagcaactgcagctagatcatactccctccatcccataaaaaaccaacctaatacttgatgttgacacatcatagtattacgaatctagacatatcgctatccagatacgtagtattaggatgtgtcaacgtccagtactagattggttttttatgggtacgcgatttagaattttgttgtccttctatcattcggtataggcgacggttgcagacttgcagatcacaacaccctccgtcagaccatcactcagtaagtatgcaggtagtttcttttagctttaggtgtaggagtgcaggacattgtatagcttacacgtaattttacatgtacaaacactcgttggtatcatgacaaatctggaaattttgccgt

SEQ ID NO: 13400 - DNA, 1218 bp, Oryza sativa
  ref <308>: DATABASE ACCESSION NUMBER: AK110748
  ref <309>: DATABASE ENTRY DATE: 2001-12-06
ttgaagaaattagagtgctcaaagcaagccatcgctctggatacattagcatgggataacatcataggattccggtcctattgtgttggccttcgggatcggaaataatccaaggtcagccacacccttaatacatacagtatgtaaaatctgagtttgtggccgctccgctagcaaggcctcatccatgtggattctggagagcccgctgctccgggacgccggcgccgccgtgctcaccggagccaccgccctcgccgtgcttcgtttctgggaagaggtcggcaaccgcgccctcttggaccagaaactctgcaggaaactcgtgcatattactgttggcttagtatacttccttatgtggcctttgttcagtgcggatgatgtctatgctccatttcttgcttcccttgtcattgcattcaacatcataaaggttaccttgattggacttggtattgtcaaagatgatggcgtcattaactccatgaccaggaacggagaccgcagagagcttcttaaaggtccactgtactacgcttgtgctataacactcgctactgtaattttctggaggacatctcccatttcaatcgcagtgatttgcaacttgtgtgccggagatggtgtagctgacatagctggaaggcgattcggacatgtaaagcttccttacaaccctgataagtcttatgctggatccattgcaatgttcttagctggtttccttgcatcaatcctgtacatgtgctacttccacctctttggatttgtcgaggagagctggagcatggtgatcgcctttggtgtgacatcgcttgctgctgcaattgtggagtcactccctatcagcacacgcctggacgacaatctgactgtgccactcgcctctgtcctcgttggtgtccttgttttctattatactggggccagaaacctgtgttgtatgagcgctgacagcagtgacatttctgcacttgtgcagaatcagatggtcttggacaggttctagtgactactgactagtaagtagctgccctgcagagctgaaaagaaactgatttactaatatcagatttgattaatgtaacaaggatcgatacaagctacaagcatcatagttgtatcttgtaatcaagaaaaacaaaagctatctgatatactagtaaggcaaaagttgagtagaggaaaaacataccagagagctgtctacactcc

SEQ ID NO: 13401 - DNA, 1374 bp, Oryza sativa
  ref <308>: DATABASE ACCESSION NUMBER: AK110749
  ref <309>: DATABASE ENTRY DATE: 2001-12-06
tttagctgggcgacgaagaggggcatgggttaagattggaatggcggtacgaatcagccaggacttgaatatgatgggggaaccctcctcaaatctatccagtttagagcaagatgaacggagaaatcttttctggtcactttatcttctcgatcgtttcgtttgctgctctttcgaccgacctcccgcgattaaagactcggactgtcttctcaatcttccattcaaccacagtacgactaaaccaaagtcagcgttgacgatgcatggccttctttctagggaatcttttaataaatctcaagggtccggtttatttggaattagtgtcggcctggcatccgtcttaggtcgtgcagtaaaatgcatgatgacgacaaggcctgactcgcaggcaccgtggcataaagattccgaattttcgaccatccatgcagatctcgaatacctcaaggagctcgctattgataatgcacctgttttagctgagccagggcagcctcgatcacagaatgatatggaagatactgatcgcgaacaaaccgcccacatggtactatcacacaccatataccaccttacacactgtatcctcagccatccattcctgctcgctctaaaaacacagaactaccaacatcctgaaataccctcttcatggctggaagagacgcgtgcgacatgccttgtacatgcagggtctttgatcacggttctcgttgaagccaaggcagcgggttatatgccggtgccatccgtatacagctactgcattctatttgcaagcactatacatgcactctatctttacagcgagagcccagaaataagtacaggatctgcagagtacctgaggacggctctagactacttgagtgaaatttccgagctttggtgtaacgcgcagatgatggcaaatgcactgaaatccttcgtcattcaatgctcacgatacagcgacattcttctatgccacaagccacgccttcacgaacttactcaaaccgaaacaaccatattgacagctgttgtggactactggacaatgatggatccgcgcaatccagtatttgatttggctccgttcaatgcggataacttccccgatttttcagacaaggaatttggatatctgacaccgccgaccacatctggacttgttggagatgttatggtatctgaggatagtctggggtatagtacgcccgggcataaggaagccccatctattgatccagatatcatacttcactatcctgcgccaatgatgtcgcctattcaatctgttgacggaggttctcctcattgggactgggataatgaacttgatagtctgacagaaaggaaataaatggattgtctttattgtgctcc

SEQ ID NO: 13402 - DNA, 837 bp, Oryza sativa
  ref <308>: DATABASE ACCESSION NUMBER: AK110750
  ref <309>: DATABASE ENTRY DATE: 2001-12-06
caactggtggagaacaaggcgggagagaagatgacaccggagcagttgatatggttgtactcgatcatgctttcagcaactgtggtgaaacttgccctctacatatactgcagaagctcagggaatagcattgtccaggcatatgcaaaggaccattacttcgatgtcgtaaccaatgttgttggtttagtggctgctgtgcttggagataagttcttctggtggattgacccagtaggggctgtgctacttgctgtgtataccattgtgaattggtctggaactgtatacgaaaatgcagttacactggtgggtcagtgtgccccttcagatatgctgcagaaactgacatacctcgccatgaagcacgatccacgtgtgaggcgggttgacacggttcgagcttacagctttggagctctctactttgtcgaggttgacatcgagctatctgaggatatgcgcttgggtgaggcgcactccattggtgaatcgctgcaggacaagatcgagaagcttccagaagttgagcgtgcttttgttcatgtggattttgagagcactcataagccggagcacagggttcggagcagattgccctctactgagccttgagcccttgacagctccagttttactcttgtgcagtgtactgaaattccggtactgtagtacagtcttccactggtttggtttgtcgctgaggcagcagaaggcttatggttacacgtacacggtgacggtaggtcggtagctggcttttgggtagaggaatctgtatgtctgagtgaaataatactggattcgccatttggtgcgtttccttttttgtttcac

SEQ ID NO: 13403 - DNA, 976 bp, Oryza sativa
  ref <308>: DATABASE ACCESSION NUMBER: AK110751
  ref <309>: DATABASE ENTRY DATE: 2001-12-06
tgaatcactgaaactgagccaacctcttaacagcaactcaatagcagttcatatgcctcggttttgcagcctactccagctcaataaatctgctcaggaacttgcagcccatattggtgaggttgttgttaataaatgcttctgcacacggaggaatcccataagcatatcagctgcagctatctatcttgcgtgtcagcttgaagacaagcggaaaactcaggcagagatctgtaaggtaacaggccttacagaggttactctgcgtaaagtgtataaagaactgttggagaattgggatgatttgctaccccctaactatacaccagctacaccaccagagaaagctttcccaatgaccaccatttattcatcgcgctcatcgtctggtaaagatctttatcaagataagcagttagacagtgctaagctaaagagctcagaagctgcagagcctgatcacatggtcattgtaaaagaggaggaagacaagaaaattggtccatttagtcgaccgagtgcaaaaaccgagacccatgacttgaatcaagcaatttggacgccaaatgtctcttcaacaccattctcttcatcaccgaaattggatcatgacaagacggaaacaagcgtccgtgggataaaccttaacgaggcatcctgcacaatggatactgacagaccagacatgcctgtgaagtcaccctttgctgagaggtggctaaatgaatcaaaggtgatcccttctcccagtaggcagcctgcaccatggcagcttaagcaaggagcaccatcagctgggtcctcgtatcatagtatgccgtacggtctggaccttctgtcacgtggaaaaagaaatactggagatggtggtgataaggaggggaggtgaatgttgtggctgtacacgtaaattcactagtgacaatgatggaaaatgtaaggggaactgctctgtgaatatagatgtttcctagtt

SEQ ID NO: 13404 - DNA, 1618 bp, Oryza sativa
  ref <308>: DATABASE ACCESSION NUMBER: AK110752
  ref <309>: DATABASE ENTRY DATE: 2001-12-06
aaatacaccttccaaatccaacgccgaccaaagcacgcggcgaggcaaatcgacgaacacatggcggccatggccatggaccacgaccacgaccacgcctcgtcgccggcgccgcccgcgaggctccccgcgccgccgtaccaccactccccttctgctgctgctgctgcggcggtggaggaggtcgcgacgccgccgcggaagtccgcggcgggggcgggggcgcagaggtcgtcgcccatgccgtcgccgctgcagctgtcggggtgctcgctgcaggagctcctcctgatgtccccgccgcccgggtcggcgcgccgcaactggtcgcggcatcgcggggctgggttggacgagagcctggagatggtggcggcgccggcggcggggacgccgccgaggcggaggcggcgcgtggccgcggagcagtgcgcggcgcccgcggtggcgtcgccgaggaacgggcggagggcgaggcggaggctggagaaggagatcgaggtggaggacgacgccgcgcggagggcacgcaggaggaagtccacccgggcggcggcgaccaaggccgcgcctgcggccgcggacaaggtggcaacggcggcggcggataaggaggatacgagcatggcgttggtgctggctagcaccgatgcgatacgaggtgctgatgccctcgagcagtctgggtgggaagatctctgggaaaggatcgtcgacttggtgatgtggaagaatgtggcgaaatcggcactctggtttgggttgggatccatgttcttcttctcctgctccttttcaagggagatcaccttcagcccaatctcggcgctttgtcacttgggtgtgatggtcttgggcttagccttcttcaaagattccattcctcagagcaggcagcaggtagaggggggaaggagcttcagattgactgaagatgatgtgcttcgtgctgcacgagccgtgttgccagttgcaaactccatgatatcaactgcacaagtgatcttctctggtgaaccatcgatgactctcaaagtattacctgctcttctgtttggtgctaaatacggtagtctggttacagtatggagacttctggccacagggtttttcaccagctttacactcccaaagctttatagctgctattcaagccaaattcataagagagttgaaattttgagagatcgggctctagaagcatggaagtcttgtccccgcaagaaactcgttgcgggtacagcagtgacaatgtgctggaacatgttcagtgtgaagacccgcatcattgcagctttcatttcggtagtaatcctgcggtataatcagaagtatcgcaaggctgtggtgaatgcaggagctgaaagctgtcaagatgaacaagagcagaaaatggagatagaagaatcataaatatgatcatttctctgtaatgatctgctgttccatgtctagtggttctactatttcttttctttctcccgtaagagaggttggaacatgtcaggtctctcgaatgcttctattatagtgaagcaatcagcgccagcgcagtgctgttgtatgtatgctggtaaataaatttcaagtatctgctatgtttgcgcggcttaatctc

SEQ ID NO: 13405 - DNA, 1037 bp, Oryza sativa
  ref <308>: DATABASE ACCESSION NUMBER: AK110753
  ref <309>: DATABASE ENTRY DATE: 2001-12-06
ctactatagcatattcagttggttatatggtctggtcggttcatgcgcacatcttgtgatggtaaattcatcgtggacaagatcccatattgaaaatatttggaggataccagagcgtactaggagggtataccctccatgtgatacttctgccctgcagatgcttccactggaaagatcaactacacctcctattcttatatcagttgcacagtttcggccagaaaaggcccatggacttcagcttgaggcatttgcaattgctcttaagaagctaagtccagaatttcctaagccaaagcttcaatttgttggaagctgtcggaataaagaggatctggaaagattgcaaaagcttaaagacagatccactgaactacacatagatgagcttgtggagttccacaaggatatctcttacagggacttggtacagcttctaggtggtgctgttgctgggctccattcaatgacagatgagcattttgggataagtgttgttgaatacatggctgctggtgctattccaattgcccataaatcggcaggaccaatgatggacattgtgctagatgaggatggccaacagacaggatttctagcctccgagaaggaagaatatgccgaggcaattgtcaaggtcttgcggatgccggaggcagagaggcatgagatggcaacagcagcacgaaaacgcgctcaaagattttctgagcataggttccatgaagatttcaccgatgcagttcgcccaattttgtcagcaacatgagcttgacaagctaaggagtctcctcttaactgtctgaaacactaacaagtttcacatgatatggtgactatgaagctaactggccaattactgggtcttgcatgcggcatccgtttaaagtgcgagttttgcttgagtttccttttctctgtattacttacatagaggtgcatcatgtacagtacagactacaaaccacaaaaatgatagattgatgactttgtttggctttatctaccgtttggatttgcttagttgtcctgtc

SEQ ID NO: 13406 - DNA, 1358 bp, Oryza sativa
  ref <308>: DATABASE ACCESSION NUMBER: AK110754
  ref <309>: DATABASE ENTRY DATE: 2001-12-06
cagatatataattttggagaaaaatatttaaaatttgaggaaaaattaggcacgtgtattaggagggagagggagagagagtatgcaagcagcagcgcaagcaacacatgcagtgcaggcaagcaacgcggcacgggagcaacgtgggcgagcggcagtgcgggggcgagcgttgaccaataagtgaaacattaagttatatatggtgaaaaaaaatcagcaattgaaacatttaagtattttatgaaacatggtgaagatacacgttgaaacatgtcgctgtcacatataaaacaacaagtattaacggattaaaacatatatttttcttttatcaaaatataatcatgcgatatcttgttgtaaagatttaattacaacgaatacaatggtgtggtcggatcattgatcgaataagtaatttaaaagaaaaatcattttgaagcttgctaaaatacatgcatgtatgcatgcatgaggtggagagagagtagtagcaggtagtttcaggatttttgtgaaacacaccgaagacacatattgaaacatatcactatcacgtatgaaacattttattctaacggtttgaaacacatgtttttcttttgacgtaatataatcatgtggtatcttattgtaaagatttaatttcaacgaatacaacggtgttatcggatcgtagatcggataagtaatttaagagaaaaaaatatctaaagagaggaggaaagaatgaaaagaaacagctaggcacatacgttacagtgacagggttcgttctcacatgcgctcgttgcctggctagacgttcgatttttggtgtgatgccggacgtccgagccgtagagctctcccaatattccttctctcccttcatattccccccatatatatataaccacctttttgataaatttcaaactattttttctcttaacttacttctataatctaagatccgtttggtccattaaatttgttgtaattaaatctttgaaacaagaccacacatggttatattttgataaaaaaatatttagtttttcttaatgtattattttaagtgttgcatatggttttatttggatgtttcagcaagtattttatggtgtttcaatagttagaatctaatgttttcatacatgatgtaaaaatgtttcactatattatcaagtgttacaaatatattgtatgttttagatattatttttccgattgtttcattgttgggactcaatgttttactgttttatatagtggctaaatgtttcatatagtagttattggtcttgcagtcaatatttgaaatgctgcatctctctaaaatattttgtaaagtgaaataaaatatttttatc

SEQ ID NO: 13407 - DNA, 870 bp, Oryza sativa
  ref <308>: DATABASE ACCESSION NUMBER: AK110755
  ref <309>: DATABASE ENTRY DATE: 2001-12-06
gacaccaaccgacatccaacacccagttcgcaggaagtgcattcaccccatttccagcactcaaaatggcccgccgtcccgcacgttgctaccggtactgcaagaacaagccgtaccctaagtcccgtttcaaccgtggtgttcccgaccccaagattcgcatcttcgaccttggtcgcaagaaggcttccgtcgatgacttccccatgtgtgttcacctcgtctccaacgagtacgagcagctgtcctccgaggctcttgaggccgcccgtatctgtgccaacaagtacctcgtgaagatcgctggtaaggaaggtttccacctgcgtgtccgtgtccaccccttccacgtcgtccgtatcaacaagatgttgtcgtgcgctggtgccgatcgtctgcagaccggtatgcgtggtgccttcggtaagccccagggtctcgtcgcccgtgtgaacattggccagattcttctgtccgtccgcacccgtgactccaaccgtgccgccgccatcgaggctctccgccgctccatgtacaagttccccggtcgccaaaagatcattgtctccaagaactggggtttcacccccgttcgccgcgaggagtacgtccagctccgccaggagggcaagctccgccaggacggtgcctacgttcagttcctccgtggccacggtctgatcgaggagaacatgaagcgcttccccgaggcctacgagaacgtttctcaggcttagatggttattggatgaatccagaatacgaattcagaacgaaaaaattacatggatgttctattaactgtctccttcctgtttaacaaagcttgatatctcgtctgcaatcttaatggagttcttccatgggtat

SEQ ID NO: 13408 - DNA, 924 bp, Oryza sativa
  ref <308>: DATABASE ACCESSION NUMBER: AK110756
  ref <309>: DATABASE ENTRY DATE: 2001-12-06
ggcttttcgacttgagaccagaaccgccctcgttacgctctgtctccctcgctgcggtctaccaggttcacatctaggtcctgtgccattctccctacagcttcagaggacgcaccagatccgacgcagaaagcacaatgggctacggcagctctaagcccgaggctgaggccgggtcgaaacacatcttctcgagcaactctcccgtccaattctcttcgaacctcgttgacgctctccagtccaactccgagacggactcctcccgcgccaaatccctcgaactccagatccaagcgcgtgtatccgaagaacttcaacgtatccgcgaacgcgaacagaagaccctgggcgagatcgaacaacgtctggcagaaaccaaagacgccgccgcaaccgccaccgctaccaccacctacacaccaaacgtcagccacacgcccggttctctgaacctggatgcaccccggatcccctttgcgggccgggaatatacccctgttcccgctgcgccggaggaccgtcccatcaaccgtgacgtaacgcggagctcggtgcagactgagatcgacgacttgcggagtaagcttgacggccggaagaagcttgcgccgctggatgagggtgttgagaaggcgaaggcggatgtcgtgggttgcttgcggttgaatgaccgacggcctcttgactgctggaaggaggttgaagggttcaagcgagaggttgctagacttgaggagggctttgtggaccggatcgttggttagatgagatatatcctatatcttttctttttactggtttcttgtctgtgttaccaattaaccggctccttttcatcttcctcctgggcagaaaccagcctaactgtgtgcatgtatgtatagtcatctatctatccaattaactggattagcaaggttc

SEQ ID NO: 13409 - DNA, 1109 bp, Oryza sativa
  ref <308>: DATABASE ACCESSION NUMBER: AK110757
  ref <309>: DATABASE ENTRY DATE: 2001-12-06
ttgcattgctctgccagggttctaattctgaaaggccaatttggttatttagttggtccaggtggttcactaatcaagcatatgaataacacaacaagaacaaaaatgaaaattttagaagagactgctgttccagcttgtgcctcacaatacgaactagttctgcagatcactggagagccaatgaatgttagagacgctttatctcttgtttgtgagaaactacgtaatcattgcttctcttctgagaaaacaacctacggcaatggtcatgttccctcatcggctattgatgaattaactacaagcagccagaatgaaattgactcggtacaaaactctatcagcgccttcgacttgggatgtttgggctccccacaaattcagaaacctaccattgggtgtggcactgagatcaacaacccaattaatgaggtggagaaaccagctaatggaaatggcactggaattaacaatttgaatactgggatgcagaatgaaaatggaattgacgtttcaaatcatggagctacatctctggaggaaaaaaaaacttttgagaggaatcaagaccgccaccataactaggatcacatatgaggttgctgtttgcggagataatggaaacgacttcactatgattagagagatgtctggtgcagacgttactgcccactacccgcttccagagacgagtgacggtatgatcgtgatatctggaacgccagatgaggcgcaatcggctctggccatgttccttgaccttgtcaaagaggggcagtgatcatcatcagatcttcatgcattagccctgattctgctaacatagatcactgttgggatggatctgctaacattttgctgacaccacgagatgttcttgaggttaactgataacattttatgtgtaactatgtccagtaacgacaccacgagactagggttcatcacgggacaccacgaggcagacgcattcctctgtttgctgaatgtagcagcagagcaggcgcgtgatttatttatgtttctttttctttttacttaatccttttgtgctcttgctgctgggggaggccttaattgagatggatatctgcctatttttttgc

SEQ ID NO: 13410 - DNA, 1187 bp, Oryza sativa
  ref <308>: DATABASE ACCESSION NUMBER: AK110758
  ref <309>: DATABASE ENTRY DATE: 2001-12-06
ggctccaagctgcctagcaacaaaggtcttaattaggagctctctccattaggatcctcgagcttcaggaagctatctccaacaaaacatacacattcagatcaacttcagtgatggctgcagaatcagagacgccgcgaataacagagcttcatgtgaggatggactgcaatggctgcgagcacaagatcaggaagactctgcgtgccattgatggtgtgagcgaggtgtacgtagatgcagcgagccagaaggtgacggttgtcgggatcgccgacccggagaggatcgtcaaggcgatcaggaagaccaagagggtccccaccatcttctcccacaccgacccggcggcgccgccgccgccgccggccgaaggcgaggccgcgccaccgccagccgacgcgccaccgccggaggaagcaccggccgcagagccggcaccatcagaagcggcgccgccgccgccggcggaagccgaccaggcggcggctcccccggccaccgacgctaccgtcatacacatggtgcacgactacccgtacacccacgaccaccaccacggccacggccaccacctgttcggccgggaccactggccggcgagccaccatcccgccggcggcatggtcaactacggcggcggcgcgccgtactacgccgcgcacagctacagccacagggcgagcccgtacgtctcggagtacggctacgtcggctctccggctcaccatgagggcagattctacagcagccatgattactactaccctgcagctgctggtggcagagggaagggagatggaagccagatcacctccgtgttcagcgatgagaaccctaatgcatgcaccatatcctaatcaacatgcttttgcctgtcaagaagtaattaaggtggggtattatatagtattgatgattagtgttaattaagattactgtaacatgagatttatgtaaaatagtattaattaagaggggtgtaagtaagataaggaaaaaaggggagcaataagatgcttaacttgtagtagtgggagatgattttccttggcaatcaccactattttttttttaccgccgtccactacacctcaagagaatccaacaaagctgtggtcctgtgtatatgatgtgtacttgaaaaaaaagtggcagagacgtcacagtatttccaggccaaatct

SEQ ID NO: 13411 - DNA, 912 bp, Oryza sativa
  ref <308>: DATABASE ACCESSION NUMBER: AK110759
  ref <309>: DATABASE ENTRY DATE: 2001-12-06
cccatgacaatgtttgtccccgaagctgagctccctgcatgggtggtgtgctacattccagcaaccatgtccttgctgaatattctcccagcacccaaatccttcccatttattgttccctaccttctgtttgagaataccatgtcagtgacaaaattcaatgccatgatttctggcttgttccagctcgggagcgcctacgagtgggttgtgaccaagaaatcgggccgttcttctgagggcgatctcgtttctcttgttgagaagcagcctaagcaacagagagttgggtctgcacccaaccttgattccctagcgaaggagtcccatccgaaaaaggattcgaaaaagaaaaaacacaataggatataccagaaggagctggcactctccttccttctattaacagcagcagctcgaagcctgctctcggtgcaaggcatacatttctacttccttctgttccaaggggtctcattcttggttgtcggcctcgacttgatcggcgagcaagtcgagtgatagaatacatgtggtataatcggtttctttttttctttggagggggatatgcaatcaaagagaagttctggtaaagggaaaacgatacagtattgatgcaaagacaagaagctctggtcccattgatggggggttacaattcatcggagactctgaattgttgggggtgtagatatatggcttttggagtcggcctgcaatgatggtctttgatgtctcaattcttttgtaagaattctcagtggttagaatgggttgtttctacttacttgacagtttaccttcaaatggagatactgttattttaaatgtactttggccgatcactatggatgcatactgtggtactcaatagtacaccttttgatgaaagatagtaatgagaaaccc

SEQ ID NO: 13412 - DNA, 1390 bp, Oryza sativa
  ref <308>: DATABASE ACCESSION NUMBER: AK110760
  ref <309>: DATABASE ENTRY DATE: 2001-12-06
atctcctgtctgcaatcatcgctaccgccggtcaaaagtctgcaaatcaggatgatggcctcgaccacttcacgtgctgcacgccagctgcgattcgggcgtcagctgtgccctaccgcgcgcacgtccaccgccagcagctcgacgatgctctcacgcacctttgccagcacggcgcttgcacgcaaggacggcgacgagccgcagggccatttgcccggccatccatcgtcggtgttcctcacctcgctcaacgacagcttcttcgaccgtgtcaagcccaagcagctttcgggcaactcgaacgcccagcgccagggacgaatctcgttcatgatgacatcctacggcgaagagggtgctgttatcggtagtgccgcggggctcgataccaaggacgaggtgtttgcacagtacagagagtccggtgtactgctgtggcgcgagttctccatggaccattacatgtcgcaggtgtttggggccgaagatgatctgtgcggcggcaggcagatgcccatccactttggaagcacccagcaccacttccacaccatcagcagcccgcttgccacccaaattccgcaggcggcaggtgcgggttatgcgctcaagaggaccaagggcagggagaacaacgtggtggtctgctacttcggcgaaggcgctgcgagcgaaggtgatttccacgcgggtatgaaccttgccagcaccaccaaaagccccgtgatcttctttgtgcgcaacaatgggtatgcgatttcgacgcctgcagccgagcagttccgaggtgatggtattgcgtctcgcggaccggggtacgggatgctcaccatccgtgtcgacggtaacgatgcccttgcagtgcgttcggccgtacaagccgccaaggccaaggcgatcacggagcagcgaccggtgctgattgaagccatgacgtaccgcgtgggccaccattcgacctcggacgactcgtcggcctaccgcagcaagcaggcagtagaaagctggaagcagatggacaatccgctccaccgcatgcgcaacttcctcaccgaccgtggctggtggaacgatgcactcgaggagcagaccaaggccgaacatcgcaagaccgtcatcgaggcaatgggccgcgcagagaagaagaaacgcccccaactcagcagcctcttcgaaggcacctaccgtggcgagttgccgggaaatctgagggaacaacgcgccgaactcgccgagctgttgcagaaatacggcgcgctcccgggttggtccaaggagctcgccaagcacgccaatgctggcaaggacatggagcagtaccgcgagaacaagctctagctggctgtcagaatgaactttgctgtgaatcaagacctgctcacaattg

SEQ ID NO: 13413 - DNA, 433 bp, Oryza sativa
  ref <308>: DATABASE ACCESSION NUMBER: AK110761
  ref <309>: DATABASE ENTRY DATE: 2001-12-06
ctagcatgcgtaaggtggcggtggtggtggaggatggctggatctcgccatccccctctctcccaggggacctcccccctccagcgcggagttgggtggcggctgccggcgcggaggtcagcgcggtgaggcaacggcacagaggcgggcacggctaggcggcggagtggaggccgggtgaggcggtggagaagaccggcggtactggaggtgcctttttttttattttaatattgagacaaaggtgccgaccaataggtgccggttgggaaaccggcacctatagggtttctgtactagtgaatattaagtttgtagttgccttcaagattgaagatctaccacagtatattttggcatgccatatgcaattatttgaaatttctgcctcatggaatatgacatatgcttcacgtgatgcatttgatggttt

SEQ ID NO: 13414 - DNA, 1508 bp, Oryza sativa
  ref <308>: DATABASE ACCESSION NUMBER: AK110762
  ref <309>: DATABASE ENTRY DATE: 2001-12-06
tcttggtgaaataatatcagctctccttgccaccgctgatcgttctgattccaacaattccaggctttgtgcttctgcatatgaaacactaaatgagattgtcagatgcagccatatctcagagaacttgaacatgatcgtgcagttattacaagagatcttgaagagattgaaccagacttttgagattcagatcacatcctctgacgacaaggaaaagcaaagtgaccttcaagccttgctctgtggtgttgctcaagtaatccttcaaaagttcagtagctgtcatgaaaaatcagcaattcttcattttgctgaccaaatgatggtgttatttctccgagtcttttcatgcaatagttctaatgtgcatgaagaagccatgcttgctattggtgctcttgcttatgctactggaccagaatttgtgaaatacatgccagaattccacaagtacctagaaatgggcttacaaaattttggggcttatcaagtctgttgtgtttctgtgggtgtggttggtgacatctgccatgccttagatgacaaggtgctcccttactgtgatggtatcatgtccactcttctcaaagatctctcaagcccagagcttcaccgttccgtcaaacctccaatactgtcttgcataggagatattgctcttacaatgggcgaacattttgagaaatatgtcccatacactatgcctatgctgcaaggagctgcagagctttgctttcgcatggacgctccggatgatgatagcatagagtatcaaaatgagctcagccgaagcatttttgaggcctactcaggcatacttcagggcttcaagaattcaaagtcagagctaatggtgccttatgctggaaatattttccaattcgttgaattggtcttgaaagacaaccttttaaggaatgagagtgtgaccaaagctggggttgccatggttggggacctagcagacgcattagggcccaacataaaattgctgttcaaggactccaaattccactcggagctcctcggccaatgttgccagtctgatgatgaacagctaagggaaactgcatcctgggtccagggggtgatcacacgcgtcctggtttcatgagggaagacttctcaagtaaaactgctggtttcatgagggaagacttctcaagtaaaactgctggtcgtgtactatcaggttatttttcttttccaatgctaggtgaattgttttagaagtgcgttacacatttgtcccgttgtgttgcaaatagaaaacttttacaaaaggcgagaggttacataacttacattacacaagatgatttttctactggcagccgtttgccattcttcagaaataggccggtgtccctgggtctctgttgcgttttattcagttgtccatgtggatcgattgtaatcgcgacaatgctatttggtttgttgctctctgaaatggtaaagtcctgttggcatcatcgctcattgcgatgatgatagcgtcagtt

SEQ ID NO: 13415 - DNA, 1462 bp, Oryza sativa
  ref <308>: DATABASE ACCESSION NUMBER: AK110763
  ref <309>: DATABASE ENTRY DATE: 2001-12-06
atgacaagtcacccaaaggcccgcaaacacactagcatggcgcctggggccattctccgagtgacggcgcttctccgcttcatcctcctcgtcgccggcgccgcgacggcgacggcgaccgcggcaaggttctcccgcctgttcagcttcggggactcgctcaccgacaccggcaacctggtgctcctccccgccggccgcgatgtcccggagcgccgcctcccgtacggccagaccttcttccaccgcgccaccggccgcgcctccgacggcaggatcgccatcgacttcatcgcggaggcgctggagctgccgcgcctgaagccgtacctcgccggcgagggcgccgacggcttccgccacggcgcgaacttcgccgtgggcggcgcgacggcgcgggacgccgggttcttccagcgccgggggctcaggtccgtgccggtctccctcgccaccgagatgggctggttcaaggaactcctgccgcttcttgcctccccctgtcctcaagagcaaaggaagatcacggcgagctcgctgttcttcgtcggcgagatgggcggcaacgactacctcaacgccatcttccagaaccggactctcgacgaggccaagaccttcgttcccggcatcatcgatgccatccgttcatctctcgccgagttgatcggggttggagcaaagacggtgttggtccaggggatgctgccgatcggctgtgagccgcgggtgctcgagctcttcaagctcaagcacggccgctccaccgccggcgacgacagcgactacgacgccgcgaccggctgcctgaagagcttcaacgagctcgccgagcagcacaaccgcgcgctcaccgccgccctggacgagctccgccgcgcccaccctggcaccgccatcgtctacgccgacctctaccgcgccgtcaccgacatcgccgtctcgccgcgcagatacgggttcggcggcgagccgctgttcgcgtgctgcggcggcggcgggggccgtacaacgtgaggctggcggcgaggtgcggcgacgaggggacggcggcgtgcggcgagccgtcggagtacgtttcgtgggacgggatacactacacggaggcggccaacagggtgatcgcgcgtggcatcgtggaagggcggtacaccgtgccaccgatatccttgtccgtatcttcgagcgattgaaaaaaacatgcccgaaatttggagggattttacgggttttttaaaaaagtgccacgaaggtacgagcgtacggctctaagggaataattaatgattgtgcatccattagtcaattatgtgtgtgatgatgatgtcaatgcaaaggggaaaagaacattgttgtgtgatgggctgatggcaatgtttttgtttcctttgtataaaatgtactccctccttccgtattataagtaattaggaaggcaacccgcgcggatgcgcgggaatct

SEQ ID NO: 13416 - DNA, 814 bp, Oryza sativa
  ref <308>: DATABASE ACCESSION NUMBER: AK110764
  ref <309>: DATABASE ENTRY DATE: 2001-12-06
atcgatcaatggacctaggacaattcgtttcaaccaaggtagtatcttccatattcacaatggcatcatcaccatcgcttgcactctccttcctcgtcctccttgtcctagccactttcacaacaaccaccgtcttagctacgaacaacctaccaccatcttcggcaccggctctatcgccggcctcctccgccgcggcaaaggagttcctccgtgcgacctgcacttcgaagtcagaactaccggaactctgcttcgacattctcctcccgtacgccagctccttcaatggcagccaaggaaaagttgctcgagctagcgcggccatcgctatcgagcgacaccggggcctcctcgacgagctccgcggcttgaagcccggccccggcgacgtgggcgccgagcgccgcatgcttgtgatgctgctgtccgactgtgtgcgggacttcgacgcgacttacatgttcgccgacgagacgttggctaggatcgacttcctcgtgtccggcagaggaagcgaggagcagcgtgcctcggataagttgagagcgaatgtgtggcttacctccgcgatggatagtggcgtgtcatgcacggactggtttaacgaggaaggaagccatggccgccccgcctcgtcgcccgtggggaagaaggtgattgctggctgcgcgaccgctactcagtacatgtcgattgccctggaacttctcgtgaattgcatcactacctaatccatgtctttatcatatctgtcatatatatcaagttgaaataataaaaaaaattgtgaggagtaaaaatattacatgtg

SEQ ID NO: 13417 - DNA, 1261 bp, Oryza sativa
  ref <308>: DATABASE ACCESSION NUMBER: AK110765
  ref <309>: DATABASE ENTRY DATE: 2001-12-06
ggatcaccacatccaccaccgatcaacactcgcatcgcaaacacattccaacatgccttcctcgaagcccaggatcctcatccccggtggtgccggctacatcggctcgcacgtcgccctcgtcaccctgctcacccgcaagtaccgcgtgactgtgctggacaactaccacaatgcattccccgccgcctgcaagcgtctcgaacagatcgccatcgacgagctccccgcgggtgcttcgcagcaggacaaggacgactgcaaggtggacgtcttcaagggcgacctccgcagcaaggacgacatccgcaaggtgtttgacgcctacaagggcgacgacaagatctggggcgtcatcctctgcgccgcgctcaaggccgtcggcgagagctccgagatccccatcgactactacgacgtcaacgtcggcggcctcgtcaacctgctcaaggttatgcacgacaacggctgcaaccgtctcgtgtacagctcctcggccaccgtgtacggtacgccccccaaggtgcccatccccgagtcgacgcgcctcgctcccgagtcggtctacggccgcacaaagtggatgagcgagatcatcatccgcgacgtgtgcgacgcctaccccgagttccgcgccatcggcctgcgctacttcaaccccgccggcgcgcacaagtcgggcaagatcggcgaggacccgcgcggcaagccgggcaaccttctgcctctgctcgcccagatggccgtgggcaagtaccgcgagggtggcctcaaggtgtttggcaacgactaccccaccccggacggcacgtgcgtgcgcgactacatccacatcgaggacctcgccggcggtcacgtcaacgccgtcgaggcgctcgagcgcgacgacatctttgccgccgacaagaccgagacgcacggcaagtaccgcgccttcaacctgggcaagggcgtcggcatgtcggtgctcaacatggtcgacgccatgaggaaggtctcgggctacgaattccctcacaccatcgtcgaccgccgcacgggcgacgtgcccgacctcaccgccgaccccagcctcgccgaaaaggagctcggcttcaaggcgacgcgctcgctcgacgacatggcgcaggacctctggcgatggcagagcaacaacccgcagggctacggcgagcagtagactgtctcacaccctagcttgggcggttttgcctcgaatgcagacatgtaaataaatcaacagagcacactgtcgtttctg

SEQ ID NO: 13418 - DNA, 1466 bp, Oryza sativa
  ref <308>: DATABASE ACCESSION NUMBER: AK110766
  ref <309>: DATABASE ENTRY DATE: 2001-12-06
ttaaattaatttgccatggaagggaaactttttaaggttagaataaaatggttggaagacttgataattaaacaggcagtaccaatattccaagccacgtactactaaatacaaatcctattaagaaagttaagcacctccaatcctgcatgaatatatttgtgccattgctatttgaccagtcaggttgggttatgacatatgagaaccttcactgtcagtgcagctcagatctccatacatatacatgctttgtttatgctagctctacggaactttagtcactggactttgaaagtgaaacatacgccatggatggacagcatggtcagatatagacgacaccaaccgttcatgtgacggtcttagcattctgtctagttaccttactaatttgctctgcaaaatttaaatctttaacctcattagctgtcttcagaatcttccttgtatcatgtccaccattgccatcacctactggctactgatcttgtaccagtcacacttggcaccaacttgttatgcgctactcaaactaagcggttctttaattactagctcaaagatagtatgttgctatcttaaaccttttggtactagccatgcacgcatgcacttgcatgttactactacagagctagttaaactaatcctgcatgtgctgtttgttttgtccagatcgttgacgtcggagtcgtccatgactcggagcaccagcaggaagctgcggtcttggctgagcacgctgcacggcgaccgcgacgcgcaggcgcggcgcgagcagcgcaaggggtggacggtgacgatccacgacctgtcgggctccccggtggccatggcgtccatggtgaccccgttcgtgccgtcgccggcgggctcggggcgcgtctcgcgcgccaaccctggcgcctggctcatcctgcagcccaccggcgccgggccggcgagctggaagccgtgggcgcggctggaggcgtggcgggagcgcggtcccgtcgacgcgctcggctaccggctcgagctggtgttcgactcgggccccaccgagtgcgccgtccccatcgccgagtcgtccatcagcaccaagcgcggcggccagttcgtcatcgacccggccacgttccccgtgggcgccgccggcgccgcgtggccgttcgccggcggcttcgtgatgggctccacggcggagggcgaggggagggccagccggcccaccgtgcaggtcggcgtgcagcacgccacgtgcatgggcgacgtggcgctgttcgtcgcgctcgccgccgccgtcgacctctgcatggacgcctgcaagctcttctcgcagaggctcaggaaggagctgtgccatgatcaagaggactagcagggagacgaaacggaatcaagtgcatgtacttgggggtttggcttgtgaagttgtgatgcatgcgatcactttcatgattgtgataaaattagttaactat

SEQ ID NO: 13419 - DNA, 973 bp, Oryza sativa
  ref <308>: DATABASE ACCESSION NUMBER: AK110767
  ref <309>: DATABASE ENTRY DATE: 2001-12-06
gtctccgttgcccacgaggcgattccccccgcggcctagctccttcgctgccccgatcgatcgctgacgctgaaccccgccggccgcatgggcatggcggcggcgggcgggtacgggcgcgtgctgtggctgcacggctccggccagacgggcgaggagagccgcgcccaggtcgccccatacttcgccgcgccggagctcgcctccgtccgcttctccttccccaccgcgcccacctcctccatcccttgctacggtggcgaggtgatcacggcttggttcgccatcccggaagttcctattactgctagaactgccagagatgaaaaggaagtgctcaaagctgtggagcgtgtgcacgaaatgttagacggagaagtagctgctgggacgagtccttcaaatatattcgtttgtgggttaagccaaggaggtgctctagccatagcaagtgttctactctacccaatgactttaggtggctgtgttgtgttcagtggatcacttcctctaagcaaaacatttgctgagagtataccatctgaagctagaaagacaccagttttgtggtttcatggcatggctgacggggtggtactgtttgaagctgggcatgctgggtgtgcatttttacaagaaattggcatgcactgcgaattcaaggcttatcctgcacttgggcatacattggtggatgaagagctccagtattttcgacaatggatcaaggatcgtttatctcaaggaactggagttccagtgccatccttatctgacaagatggatctccagtagctgcttgtttttttagaaccaaagggcaggaatcctaggccccaatttttatagctccttcttgttcttgatgtggatattctagtccaatttatggctaccattcattgttggtacattggtgctacatttgatgtactgcgaaatgcctttttatgttgtggaattatgatctgat

SEQ ID NO: 13420 - DNA, 1175 bp, Oryza sativa
  ref <308>: DATABASE ACCESSION NUMBER: AK110768
  ref <309>: DATABASE ENTRY DATE: 2001-12-06
agcgagcgtgggacgggggctagcgacggcagcagtgggcgagggccgaagcaggggctagatcttcgacggcgccggcggcggacgggggccaaagcggcggtggccggtgcctcctccaaccgcatccacagcctcctccgtccctccccgtggcgtcgttgccggcggtggcggtgcggcggcccgcgagcggcggagacccgggagtagcactagagcggcgactgcggcgtgcgggcgagggccggagcagcggcggcggcagagatcgagaccgccgtggaggttggccgtcggaaggaagaaaacgggccactagaacggctgcgtcctcgccatcctcggcctcgccaccctcggccctgccaccgcactatccaccgatgcgctccacgccccctctgccagccacgacacacccacctcttccgctctcccgccgcgcccacgaacgggtaagggccgcctgtgtctcgcgtcggcatcccctcgaagatggcggcatccggtggtggcttcttctgcacctgcagcggcggcgttgaaggtgggaggagcagcgcggacgggggaggcggcggcgccgccgatggatgcggtcggcgtgccaagccggccgacaacgacgcgaccccacgggagttgggaggcatctgcatcaagcattctcttgctggttcccgagtcaatcggcaaggggcgacagatgaggactgagctagcaagcagcagcaacagacagtgcatgtgtgtactaacatcaagcggcaagccaacaagcaaagggctgaccgaccgagcaaagatgcagataggcaagcagagcagcatattcgcacggacggtggcgcggccacggaggaggggacgcgagggacgggagcctcgccggcccttgagcaccccccccatcgccgacgctctagctcccgtccctgcaaccgtgcgaataagggtgggcagaaaaaaaaaaccgaaccgaaaagatcgagacgagaccgagaaatttagtcatcaattcggtcatagatagtgaaagaccgattttgttcggtcaatttagttagtctcctcggataaccgaatagaccaaaaagactgaattatcaaaaaatgtctaaatacaacctaataagagtctttactcataagtgcttacgaattttttttgt

SEQ ID NO: 13421 - DNA, 1404 bp, Oryza sativa
  ref <308>: DATABASE ACCESSION NUMBER: AK110769
  ref <309>: DATABASE ENTRY DATE: 2001-12-06
ttgattgtattgatgcttctaacagtgaggatgatctgaagggagaaaaaaatggtatgaattggtgatctttgatgactgatgattctgcagtttcagctattgtcgctgactgtgaatattgcttaaaagtcagccagttcagttgaaatggtgttgtatgagcttctcctaaaaggagaagttaactcaataagaggctcaggttaatggcaactcttggataaaagcctcttttaacacaccatgagtaacagcagctggttaaatctgactcactgattagaaaccaaattttgcagcagaaagctggttaattgtcaggcaatgcagtaatccgtgctttgccaattgtgatattgagctcaatttgatcggattggttatatatttatattgatacttctcaattctcacagtgaggatgatatgaatgaaaactttgctagtaagaattggtaatcttggactgatgattctgcagtttcagctattgttgactgtaaatactgatgtagaagtgttagccagttcaactgaaatggtgctatatgagtttctcatgcaaggtgaagctaactcaacgagaggctcaggataatggcaaatcttggataaacctgagtaacagcagctggctaatttgactggcgctaaccagaaaccaaattttggagcagaatcacttgatgcaaatgttggcagagccatcatgtttgtaaacagcaagagcaagctacaacagagctcagaataacagtaacaaacagcactgcctccatttggggcatgcacaagttctctattgacagagccatgtcagatatatacaagctggctttgatatgcttgaagataggacgcatgtaaccactaaataagttctacaacacgaccaggaggtttgtgtctccacaacggttcaggcatttccaagagcttgagtctaagcatggaaatggagaacttgggggcatagcttaatcagaacagagcattggctgaaggccgtcgacgaagcagcgttgcgagtcattttatgtgggaatcataaatactgaagatgacatccggaacaatcagaggcagcttgtttatgtacatgaacagccttctgaggttctctcttgacactgtctccaagtcaaccacatcttggtcctcaacatagatccataagtcaccagggtcagtcttcttcaagttgtcacggcagaatggacaagactgtgatcttgaattcctgcaataacacaatccttttgttcaagcattgttttttgaacagatatgtatggtagctgtatggcaactccagagtacaaggacgtgatccaagttttgctaacccaaaagatatgcatcggttgtaagaagccaagaataaagataaatcatatagat

SEQ ID NO: 13422 - DNA, 1683 bp, Oryza sativa
  ref <308>: DATABASE ACCESSION NUMBER: AK110770
  ref <309>: DATABASE ENTRY DATE: 2001-12-06
ggcaaggaagaagcaagtaattcaggagtaagagaaaaataccgcctggttgagttaaatttactttggaatagcaacttgaaaagtagaagcagtgacgtagaaataagtgttcttgagggtcttcaaccccatccaaatctcagacatctcaggataataaattatagaggctctacatcaccaacatggctagctacggatttacataccaaatacttggagtccctctacctacatgattgctccggatgggaaatgcttcctcctcttggacagcttccttatctaaggagacttcatttcactggtatgggttccatcctaagcataggtcctgaactctatggaagtggctctttaatgggtttcccttgtttagaagagttgcattttgagaacatgctagagtggcgatcatggtgtggggttgagaaagaatgcttctttcctaaattgctgacattgaccatcatggactgtcccagcttgcagatgctacctgttgagcaatggtctgaccaagtcaactacaaatggttcccttgccttgaaatgcttgacatccaaaactgtcctagcctggatcaattgcctcctcttccacattcttcaacgttgtcaaggataagtttgaaaaatgcagggataatctctctcatggagttgaatgatgaagagattgtaatttctggcatatctgatttggtgctggaaagacaattatttctgccatttcataacttgaggagcctcaagagtttcggcataccaggttgtgataatttcatggtactaccattgaaaggccagggaaagcatgatatttctgaggtatcgacgactatggatgattctggatcctcactgtctaacatcagtgaactcaagatatgcggttctgggatatctgaggatgtactacatgaaattttatcaaatgttggcattcttgactgcttgtcaataaaggactgcccccaggttacttcccttgagctgaacccaatggtaagactggattacctgattatagaagattgcctagagctcacgacattgaaatgtatgaaaactctcatccatctaacagaactgactgtgctaagaagtcctaagttcatggagggatggaaaaatctcgtcgaagaggcagagggatcacatctcagaattactgcctcactgaaaagactgcatattgatgatttatcattccttaccatgccaatttgtaggacacttgggtatcttcaatatttgatgattgacacggatcagcaaaccatatgcctaactccagagcaggagcaagcatttggtacactgacttcattgaaaacactcgtgttcagtgaatgctcatatctccgctcattgcctgcaacgctgcaccagatttcctccctgaagagcctgcatttatcatcgtgtgagagcatagactccctaccacacctgggattgccaggatcactagaaaggttgttcatcgctggatgtgacctgttgagagacaagtgcgtagaaggtgggattgaccagcacaaaatcgcacatgtcagggaaacaattttggcatagcattgatttctccaatgacctctaacaaatgtagtgagtagtgactactggtttgatatgtttactttcagtaataaagcaactctataattttttttc

SEQ ID NO: 13423 - DNA, 852 bp, Oryza sativa
  ref <308>: DATABASE ACCESSION NUMBER: AK110771
  ref <309>: DATABASE ENTRY DATE: 2001-12-06
acatggcaaatcaagaaacaatgagatgggagagatcttgacgacaacctaatcaaagtgttaatcagccttcttccacttgcacatgcaccacaacatccgggacacccaccaccgccaccgccaccgcgtcgcccttgtcccccgccgccgccgccgcgccgcccggctcgccggcgacgacggcggcgcggcagaacgggcacgtcgagttcgcccggaaccaccggtcgatgcactcgacgtggaaccggtggccgcaccgtggcaggaggcggcccctctccccgtccctcacctcccccaggcacaccgcgcactccaccgccgccgccgcctcgcagccggcgacgtgcacgaacaccggcagcgccgagatgtccagctccccgagcgccgccttgccgccgccggcgccggcgccggaggagacggcggacaccggcagcatgtcctgcgggcgcgcggacacggtgagcctgtagaggcgctagaagcacacggcgagcacggccacgacgccgaccgccgccgccgccgcgtacgcgcggaacctgaggtcgccgcccagggacatctgcggcgagtccatttcggagctcgagctcgacaggtgtacgtacgatcgatcaatggcgatgatgctagctagctagctgtttgttttagctagttgctcgatcgatcgacgacaatggcgcgcagttcgtggctaagctagctagcacctgtatttaagatgccccggcctcatgactattttgtcctaaaatatattatcgtgagtagtagcgtcgtaatgtaatggctggattaatgcagatactatagcaacaagcatattcgatcggc

SEQ ID NO: 13424 - DNA, 1704 bp, Oryza sativa
  ref <308>: DATABASE ACCESSION NUMBER: AK110772
  ref <309>: DATABASE ENTRY DATE: 2001-12-06
taagttattttttgttgatgttgagagaccagaagacccacttttcacaggttctccagtacaatggcaaaatggagccaacgctaaagttgcaatatttgaaaatgggagtcaaatcacacagggtggtctttctaaactacaaatcgagattttaccagtccatgatgatttcttcactgagcgaggaccagcaaatttcaccaaagaggaattcaacaagcagatatacatgtgcaaagggaaagagtcagtattgaaaactgtcaatttaacaaatggtgaggccaatcttggttccttcttctttacagagagttcccatgggaaaaggttaagattggcagcaagagtaaaatatcaggatcttgcagtcagggttcaggaagcaaccagctattcttttgttgtcaaagaccgtcgtagtaaattaaataaaaagagcaattctccatctaaggaagaagggattcattgtttgaagaaaatttccctaaaaggaaaacgttgcaatgaccttgcgggcaaatatattactaaggtgaagcatttgatgcgctgttaccacagagatccagctggtctccaaaagcttactggcatgaagaatgaagattggaataccatgattagtcatgcaaccacgtctgatcctggggatgagatccattcttacagagttgagaaaaatactataatcttcttcaatgatttctttgctctagtcggtatgtcggttgatggctcctatgctccttaccacgccaacaatcttaatcagctacagcagcgtaaaatgaacaagtggaaggagtctgcgtatcagaaatttgaggaactggagaagttggggtgtcttattcctgatcatgtcatgatcaatggccaacctgttcccgtgtctccaaaaaatgatgccagtcattccatacaagccaacccaacatgctttaatcaccagattgcacttgaaggtcagggacatcgatttcaacagcagaatggattttcagcagtacacgtatttactccatacaatgttgctggaacttccacacaactaaaagagccgttgcaacagtatccttatgaacaaaaatctggtcgggagggtccttctatgcagcataatggaacttcttactctctgactgaggaaaacatcttgaacggtctaggctctggcttagtacaatcaactatcctatctcaaaatactgcagtagtcccaggtgcagatccacggcacagtggatatgccagcacctctacagctgacgctgctggtacttcttgtcctgtaacagatggagttggtccatgggactatccgattttcagtgatctgtatccaaatgtagaaccgtcaggactaatctatgggcatgtggtggaggcagaccaggcctttctcccagatagccacgaactggcaaatgccgacaaccaatttactggaggtaatgatgatagtgctccatttgactgaaatcaccgcaacaagttattgtctactctcaaccatactaaagtgttcagtacttccagtgtgattataagtgtgtagtagttcgtaaatatagtagggacatattatgtcagctattctttaatttgttccgctcacgttaaatttgctgcctgcacatttggcatagtttgtttgtactactgaatactgagatcaaatattgatattgatgc

SEQ ID NO: 13425 - DNA, 1773 bp, Oryza sativa
  ref <308>: DATABASE ACCESSION NUMBER: AK110773
  ref <309>: DATABASE ENTRY DATE: 2001-12-06
gtcgcccgtcctagaacaggatgtggttttcacctaaaggaccaaaggaggaaagcgcaacaacgccccgcaggcgtcgccgttgccggcccgaaggctaggctttcacccattgctttcctcctcccccgcgtcaacgagtgctcgtcagaatcaacagccaccaccagctaatcctcttcaacgcgtggccaccgcgccgacgcctcgccgccggtcggccatcagaaaggatctcaaacttcggctcgctccggctccatccacgcgggcgggttggaaagggaaagggtgagagagaaggatgaatcctctctcccccacactggcccgtccaacgtggtcatcttgcagcggcaagccgccaccgcaagaggactgacgcctggagaaaagatcgccgcagccttcaactcccacctcatggcgttaccgccgtcgccgcctcaaccaagctgcccttgaggggccacttggtcgcatcgccaccgcctctgaccacccgacctcccaatgcggtaggctcgccgccgcaccgtgccgtgctcgccgtgcacctcgccggtcgccgcctctggaggactcgccacgacggcctccatgccgtcgtccgcgccggcctctcagcgaagccaccgcgcccacgctggcctcacagcctccaagcctccgccaacggcccgttccttccgctggcctcacctccctccgtgccggccgcgccagcctccacagccgccgtctgcgcctcctcgccagcctacgttgccgccgggcgtgtcccctctcaccgcacgtgcctcctcgcgcgcgccatgccgccctccgccgccgccagccgtgccggccacttgctgccttctcccgcgcctcccgccgccagccagctgctaccatctccgtcgctgcgagctccgccggtcagagacgtgcttggcgatgacgtcagcctcctctgccagtcgacgcaccgccccgcgagttccgccgccaccggagtcgccagctcccgatccggccacggggaggccagatcagccgccgagggggccgaatccgcctccggcgtggccggattcgccctgtggacctcttcggacgccgtcttccgcctgacgctcgccactccacctcccacgccgagggggaggatcgtcgccggctggttttccccgccgccgccttcctggccggccgcgcggtttccggcggcgggctccggcggcggcgagggcggctagagcgggcggggaaggtggcggcgcgggcggctagggtttcgccccgagccacccgcgtgagagcgacgcggaggctggcttatacatagggataaacaatcaacagctgtatgtggaaatgccacgttggatccatccaagccaccaccaacttgctgcgagctcggtttatcatcgcaatcaaagcctgggtagacggtgtccgggctgataccggggaacgcctctggattaaccgaaatcgcacggtacgcgccgatgaacagggcttgccggcgaaagcgagtcacgaccatggacaccgtcctcttcgaatcgaaatacacccagtgcacgctgtacttgctgctcctgcggccgccgccgtgcgagtgcgagacctagctgcggctacggtggacaaccatcagcctgccgccattgccgaccaggtgcaggtcgtgcggcgtacggtagaaattggggtcgggcatcaggttcctgttggaaatatagtcattaatcggtatattttaatctaagaaaatgaaac

SEQ ID NO: 13426 - DNA, 1579 bp, Oryza sativa
  ref <308>: DATABASE ACCESSION NUMBER: AK110774
  ref <309>: DATABASE ENTRY DATE: 2001-12-06
caatgcattgcacataagttcacactcagataaactaatggagatgaaagcagaggcgctactgacgctacggaaataagaagaagtcattcaactatgccaggaaacagttgtgttagctgaaaagaattccagtgcatctgaaactacggaatggtcagggaggctctggcggacatatctcatttgcaagacttacttcctttcaggcaaacttgaagatgctctcgagttgctaaataagcaccagcaagtgacaaatgtcaaagagagtgaagggagaacatctcaggaatgtttctcatctttgtctactaccattagggaacttctttcccataaggctgctgggaatgaagcatttcaagctcgtcgatactcagaggctgtagaacaatattcagcagcattggcacgtaatagtgattcacgccccttttcagctgtctgtttttgcaatcgtgctgcttcataccaagcactcggtcaagttactgatgctatagcagattgttcactagccatggttcttgatgcaacttatctgaaggcaatttcaagaagagccaccttatacgaaatgatcagggattatggacaagctgctaatgatttacggaagctcatatcacttattgaaaagcaagctaataactctggattgtcaccaaaagttttgaacaagcatagcgatctgaagcaggcgcgcacccgacttttatctgtagaggatgaagcaaaaagagatactcccttgaatttgtatttaatcttgggaattgaaccatcttcatctccagcagatattaagaaggcataccggaaggctgcactgaggcatcacccagataaggctgcacaattgctagtaaggaatgaaaagcctgatgatgggttttggagggatgtcgccaaggaggttcatgcagatgctgaccatctatttaaagcaattggggaggcttataatgttctttcagactctgacaagcgccaagaatatgatatcgaagagaatttaagaaatgctacaaaaagagtctccaagggagggaggatgcacaggtcccctgaacagcggtacaccaaacagtatgataggggttttaaccctcgtccagcagcgtcttcttggtcctttcgtttggagagggtggatcatggagctgcaaggattggttggttgggatgatcagttttgacacttcggatgttgtagcttgaacagcagacaatgcattgtttgggagtgggacatcaaccaatcttggttgacatgatatggtctcgagcctgcctgaacactaacaccaacatcaaatgctaacatgaaggatataaatgtcaggctccctatacgtggaaggatatagttttgtccggtgcaagatatattctttgaagatagtaggacgaaagacactgtcgcgtgtgccgaggttgagggttttgttttcttgttgaccggcaatttggatgatgtaccatatgctgagtgcctctcaatgggcaacaaagaaaacatgatgtataagtttatgcagattgcctgttgttgaatgcgtttttgttcttcgct

SEQ ID NO: 13427 - DNA, 1701 bp, Oryza sativa
  ref <308>: DATABASE ACCESSION NUMBER: AK110775
  ref <309>: DATABASE ENTRY DATE: 2001-12-06
aaaaaccctagatcgatccctccatgggcgtcggcggcatcccgatgggtgtcggcggcgggttccggtgagcagggagctgcagctgtgtcctggagggcggagcgcagtgggtccagctagctgagcggagcgcggcgggtcttggcgggcggagcggctacggcagcgtcccggtgggcgtccggctgcggcggggtctcggcgagcaggtcctagcggacggagcggctgcgtttgcgtcctgaagtcgaagcgtggcaggtcctggaggacggaggacgaggggcccaaccggctacagcgatgtctcgacgagcaagttgctacggcaaagcttagcgaacagggctgacatcgagctgtgaattcatcgagcagaatggaaacgagtgaagttgtagccccgaatagattccgacgtttccggagggtccgttttcgcaggagaagaatttgaagagttccaaggccagcaagttgaagaaaaaggatccagaaggagaagacgtttggcttataccccagttgagctgcctgtgggagtggagctgaagccatcgctagaccgttattccgctgctgttttcttttcttttgtaagtgtgtaacgttattattatgatggatttgtatattaaattgtcagtttgtgtacctcggctgattcctggacgaggattttatgcacaaataagttcggaaattactagtgaatttccgggcgtgacacattggccatccttcaggtttagtcattagctcagatgcatgcaagggcttggaaaatgcagtgagaagtgtctaccccatagctgagcatagggagtgttttaggcacctttggaagaacttcaaaaagaagttccatggagcagtatatgcggagaacatgtagccagctgctaagagttatacaatggctggattcaacaagcattatgatgccatcaagatgcaatcaccacaggcaatccaattcctcaatgacaaccaccctatgttgtggagtagagcgaaattctcagaattgtccaaggtggactatatcaacaataacttgtcagaatccttcaataattggataaaggacttgaaagatgtgcagattgtagacatgatcgataagattaggcaaaagatagtgtccaagttctgtcatagagcagaaattgcaagtaagatggaaggagtcatactgccaagtgtgactaaagatctcaataaacagagcatagggctaaagaaacataaagttagtagggtcacactaactacagctgaagtgactatccctgataaccaaggtatggaactaaggtatgcagtagacttagatagccaaacatgtagctgcagagtatggcaaatgtgtggcaaaccttgtacacatgctattgctttcattacttcaatcagaggtgcatcaatgcacacatatgtggataagtacttctctgtagagaagttgcagctagcatactctgtagtgtttaggcccataatagggaaacaccaatgggaatttgtggatcctggctttaagttacaaaaacctagactaaggaggaagcgtggaaggccaaggaaaaacagaatcaaagcttcagatgaatctggacaaaatacaaagcacaaatgcaaagaatgtggaggatttggtcatagagataaaaactgccagggaggagaggttgcaac

SEQ ID NO: 13428 - DNA, 878 bp, Oryza sativa
  ref <308>: DATABASE ACCESSION NUMBER: AK110776
  ref <309>: DATABASE ENTRY DATE: 2001-12-06
taatgtacaaatcacaatagatggtttcctttactacaagatacaagacccatacaaggcttcttacgaaattgaagatccagcgtacgctattatgaaccttgcgcaaacaacaatgcgtgcagaaattggtagaataacgcttgataagaccttctccgaaagacaaagcttgaacgcaagtatcgttagcgctattagtagagcttgcgaaggttggggtgttagcgttgagagatacgaaatcaaagatatcagagtaccaacacaaatcagaaacgctatggatttggaagcagaagcagagagaaagaagagaaaggtaatccttgattctgaggcagagagacagagccaagaaaacatcgctttgggtagaaagagagctgttgagttgatatcagaagcagatatggtagaacaaaagaactcagcaatgggtgaggcttttgcaatcatacaaaaagcatctgcttcagcgcaagcaatacatatgattgcaagtgctatcaattctccaggaggcgaaaaggcagtcacgtacaagcttgcagaagagtacattaagcaattcggcaagcttgctcaacaaaccaccacagtcatcataccagcaaatgttaatgatgcctcttccgtcgtgacgcaagcagtcaccatcttcgacaaactaagcaacaagggcaatgcaaactccactccttccttctcaaagcaagaagctctggagcagctggtttctcacttgtacaaggacccatcgatgctggagcagataaaaaagcaacaaggagcagctggagaacaaacacctcaaatctcagcaccgtctgaacaaacacctcagcaatagaataaaacccgagctgtaccttctc

SEQ ID NO: 13429 - DNA, 1256 bp, Oryza sativa
  ref <308>: DATABASE ACCESSION NUMBER: AK110777
  ref <309>: DATABASE ENTRY DATE: 2001-12-06
aggaagaaggggaaaaaaagaaagactgcgaaaaccctcgtagaagaaaacccaccggcggccgatggcgtcgccggcgaaggcgcagcggcggccggagggggcctcggtgctggagaccctccccgcgctcccgctcgcgatcatcatcgccaaggccggcccccgctgcgccgccgcgctcgcctgcgccagctccaccctccgcgccgccgcctccggcgaggccctctggcgccacttctgctccgacgacttcgccctcgacgcccccctcgctcccggcgacctccctctcccttctttcaaggatgcttacaaagcttggttccaatcttttgggatgtaccctttgccacttgttaagagggtgaagatcttctggagctcattcagggcatggctatgcgagtatttcccggaagggctgaggactctaggggaaggcgtttcggaagccgagatagccgtcgcggaatgtaacctgggccttgtgcttcctatgcccactaagctactgtaccgtttctgcaacggccagctgcacattggccgcggcgaggaggtctcgtacggcgttatgggaggctatgattatgttcaccagaggtataccgtgcgcttgctaccgctcgcgcaccatgctgttcagaaaaactcaaactacattgtagttgcgacgagttgttttggggagaagatatttcttcttgattgtgcgagtggccgtctttatgtcggcaccaagtattggaatgaagaaagagaaatcatggcatgcgtgccaaaagcgacaataaggctcgctgtggatgatgatcatggcatgcctcaagatggatttctgctgtggttggaagagcaccttagtcgcctacaggatggcttgatcaaggtgcagagttgtaaattcccaatgctggcaaggcatatcagtttgtatccagtacaactcccttactgttcgtcggcaagtatgcatggtatcaaggttagtaaattggcttttctgttagtttattgccatgcttaatatgctgattgcattgcgagggtaattgaatctattttgaagcacatagctagcctactgaaagtttttttgctgttttatatttaaagattagattttgctgttttatgtttaatgatgagcgtcatcgatgtatgatgatgggggctctgacccctgttcttctcccataaaagcattttgaaatctaaaagtttggctggtactgagtgcagagctcgtt

SEQ ID NO: 13430 - DNA, 1410 bp, Oryza sativa
  ref <308>: DATABASE ACCESSION NUMBER: AK110778
  ref <309>: DATABASE ENTRY DATE: 2001-12-06
tgagaatcaaggagatagagagggtgataagccactttagcagcagttcccgtgtacccacgagtgcactgcagaaaattagggcaatggaaatgaccctatctaaagctcaaagagcctacccacattgttctcatatgacagcaaagttacgtgcaatgacacatcaaagcgaagagttggtcagagcccatcgaagcgaaacttcattccttgagcaggttgcagtgaggacattaccaaaaagccatcactgcctagcaatgcgacttacctcagaatacttcctgttagatccgaaggaacgtgaatttcctcaaagatacacaatgcagatgggtgacctttaccattatgcaatattctcagacaatgtgctagcgagtgcagtggttgtcaactctacaatttctgcatctaaggatcccaaaaggataatgtttcatattgtgactgatgcactgaattttcctgcaatgatgatgtggtttctgacaaacccaccaaatccagccacaattcaaatcaagagcttagataatttgaaatggctgccagctgatttcagtttcagatttaagcagaagggcatccgagatccaagatacacttctgcgcttaaccacttgcgcttttatttgccagaagtattcccttctctgaacaaacttgtactcttggaccatgacattgtagtccaaagagacttgagtggattatggcagatagatttgaatggtaaagtaaatggtgctgttgagacgtgcacttctggtgatggttatcatcggttggagaaccttgttaatttctctgatccaagtatcatcaacaaatttgatgcaaaggcttgcatacatgcatttgggatgaacatctttgaccttaaggaatggcgcaggcaggggctgactactgcttataataagtggtttcaagctggcaaaaggcggagactatggaaagcagggagcttgccactgggccagattgtcttctacaatcaaacagtgcctcttgaccaccggtggcatgttcttgggcttggtcatgacagaagcataggaagagatgcaattgagagggccgccgtgatccactacagcggaaaactcaaaccctggctggagatctccattcccaagtacagagattattggaacaatttccttgactatgacaacccatacttgcagcagtgcaacattcacatgtagaagcagtagaagctagaagattcacacaatggcccatgaatacacggtttttgcaatacgtacgtagtaagctaatcttattcattctttttgtagatttagcaagcatcttgttctatactcagttgtacccgcacattgttagccacttgttaaaaaaaatgtgcaaaaggaagaaaaggcatggttaaat

SEQ ID NO: 13431 - DNA, 1475 bp, Oryza sativa
  ref <308>: DATABASE ACCESSION NUMBER: AK110779
  ref <309>: DATABASE ENTRY DATE: 2001-12-06
tttgtggttgtattcaaccagtttcaacattcatgactgctgttgcacttcattagcttatgcctaagctcccttttgctgcatgatttgattgcatataatcattctgcattgtttctgcagcttctgaactttgggaaacttgtcagacagcagggttgattcaggtcatcttcttgcttggaatgtgctcatcaccaaatgtcgattcttgtacagtattagaagttctgatccaagcatgacgggttcttgaaagttgaaactacacaaaggctttggagacatgggatgtgctgcttccaggttagaagatgaggaggctgtcaagatgtgccgggacaggagggacttcatcaagcaggcgctggagcagcggaaccgcttcgcgtcgtctcactttgcctacattgagtccttgaggcgcgtctcgatggcgctccagtggttcgttgctggggatgatcaccatgagctcatatttgaccccttcatttctcccttgaagcaacagaagccagagctgcttggcctcccttatggttcatatgagaagaggacaattcatgtctcaaagtacctgaggtcaggaccaaacccatcggtatcagttgaagagcaaccgagacccgtggaaacaatccgtattgagtcacattaccccacagataactttggtggcatggacaggttcttcgcagcgcaatcctcgccaatgaggccatcttcttactacacaccaccttatgacaggccaaattatccacctccatcaccccaggagccagtgaggaactcttattacatgtcctatgacaggccaagctatccagctgcatcaccccaggagccaacaaggacttcttattacgcgtcgtatgataggccaagctacccacctccgtcgcctcaggagcaggaatcatcacagtgggacttcttctggaacccattctcatcgctggacagctttgcgtatccgcgacctcggagtagctatgacaatgtggtcaccgacgatgaattggcacgattacagcgtgtaagagaggaggaaggaatcccggaacttgaagaagaagatgatgagtgtcaacaacatgaacaggtgcaccagaaagaggaacaagtggatgacgatgacaatgatgattctgatgatgacgacgatgatgacgatgacgatgacgatgatggcgacgatgaatgtgatcattcagatgagagatgtatgccttctaatgggggtgcttgccctgtgaagactgaggtcaatggcaagcaggaaacaaagggctttgaatccaaaggagttcagtgtgaaccgcgtaacaaagtagaacttgagatcaaggcgcataagaaagaactgatgaggaacaaagtagcaaatgcagaagaaacacctggtttcacagtgtatctgaaccgcagaccagcaagtctggctgaagccatgaaggatattgacagtc

SEQ ID NO: 13432 - DNA, 508 bp, Oryza sativa
  ref <308>: DATABASE ACCESSION NUMBER: AK110780
  ref <309>: DATABASE ENTRY DATE: 2001-12-06
attcgggagaaaggaagaaggtgccgaatctgctcgaatccggcagcgagcggcaaagggccaagagctggggcctcgttgccacttcacctcgaatacccccatcgagaggattgatgtagaggccagattgcgcgcggtttgtagagaagctggtcaccccggtcatgggggagggtggtgcagcactacatcaggtggccatacgtggggcgtacaggaggagccaggaggactgtgccggcgagggagagagacacgcggggcgaagatcgcaggacagctgcggcggcggcgcgaggaggaagatgaccggcggcgatgcccctgctttgcttggcacaccagccgtgcggctgcgccttaatgggccgggccgggccgggcggaacatttgggccgccctagtgggggagaggagtgaagtggattgaaacacacatgaaacttcatgctaaatataacgcccatatgggttttatctctactattataaaaggaaattgct

SEQ ID NO: 13433 - DNA, 1118 bp, Oryza sativa
  ref <308>: DATABASE ACCESSION NUMBER: AK110781
  ref <309>: DATABASE ENTRY DATE: 2001-12-06
gttgctttgctgctgtttgcttccccaaccagctccacctctgcaccaccacatccaccaccaccacacccaccgccgcctccgctcgtgcttctcgcagccccagcttgccgcccggctgccacgctcagcccacagaagccctcccccgtccccgaccccatcccacgcgacaccatggccgagattcgacgaaagcttgttattgtcggcgatggcgcctgtggaaagacgtgtctgctcatcgtcttttccaagggcactttccccgaggtctacgtccccaccgtcttcgagaactatgtcgccgacgttgaggtggacggcaagcacgtagagcttgccctctgggataccgctggccaggaagattacgaccgtctccgccctctctcctaccccgactcgcacgttatcctcatctgcttcgccgtcgactcgcccgactcgcttgacaatgtccaggaaaagtggatctccgaggttctccacttctgccagggccttcccatcatcctcgttggatgcaagaaggacttgcgctttgaccagaagacgattgaggagctgcacaagacgtcgcagaagcccgtcacacccgagcaggccgaggatgtccgcaagaagatcggtgcccagaagtaccttgagtgctcagccaagacaaacgagggtgtccgagaagtgttcgagcacgccacccgcgctgctctgctgaccaggaaagagaagaagaccaagaagtgcttgatcttgtaagcacccaatagctcaaataaggtgattctccgcccagcccgcgccttgttgagctccgacaagaaacaagacaagcggctattgggtgtgtaatagtcgtttattcgagaaagagggcaagacgtgcaaatggccactgcgtgagcagacgactcggagacttctccgggctgcttccggcccatctctctctttctctcaatctctctctctctctctcatggcacctacacgaggcgtttactgtgctggatcttttgtgtgtttggaccgtacatcatcttggggtagttcatgatgagggttatcttctcagagcgtgtggaatcgagattgagcaaatggtaggatttttttct

SEQ ID NO: 13434 - DNA, 1458 bp, Oryza sativa
  ref <308>: DATABASE ACCESSION NUMBER: AK110782
  ref <309>: DATABASE ENTRY DATE: 2001-12-06
caacaggtgtagtaagaaaaatactgcgtaaagaaaaggggggatatgaaatatccatagtcgatgcatcggatggacgccaagtgattgatcttatacctcccggtccagaacttcttgtttcagagggggaatcgatcaagcttgatcaaccattaacaagtaatcctaatgtgggagggtttggtcagggggatgcagaaatagtgcttcaggatccattacgcgttcaaggccttttgttcttcttcgcatccgttattttggcacaagtttttttggttctcaaaaagaaacagtttgaaaaggttcaattgtacgaaatgaatttctaggtcccgggatttcttaccatcaagttggtaaaaagccgcgatttattggcgattgctagaattctctatgatccattttggaaatcttttttttgtttagactattttttgtttgcgagatgtcttgtctgcaattccttatttctatcatctcatgcaaaacgaggagaatgcaaggcaagggcgagaacaataaaaggaacaaatccttttaggagggattgctggtcttcttaatcctctattgggcacaagaaaaaggcttttttgcctttttcttgtgtcgattcttcttgtatcgaaatatgaatcttttttcttcctattcggcaaagattactatttcttctttatttgggtctgtctcttgaacctcttttgcttaggttcaggcgatgtagtggacaaaaagagggaaagaaaatatggcgtgggacaaattttttgtgaccaaatagaattgcttgacttgttcaattaagttcaatttagaacttacagaaattttgcaaaaaaaacggatactcttccattgaaggctgttttttatttttaggctagttgagtagttttaattaaggttttattagtttattactctaaattaaatcaatgatttacaagagacttcctccggggaataaaatattggatcctcgattgatcctttctttctcctcgcttcataaaagtgaattaatttcattggcgagggggttataaatcaactgatggattacttcactaacattattaacaaacaaaattaacaaacaaaacgaataaatagagggattctgaccatcagagcaaaggctttctctttgttatttttacaaatcaaaataggaaacccgtttgtaggttatggaatagattaaaaaagtcgggttataagagtaagaattccgcgggtcctttccgctctaatcagataaaagggggtaaggacccgctaagttcctattttttcatgtttacaacctggtccctccaattactatagtggataaaaaaaaaggataaggaactacaggaaaaagaaagaagaaaaaaaaaaaaaaaataagaaagcaggaaaagaaaagaacaaaaggtgaaaaaaaagactgaagaaaaaaag

SEQ ID NO: 13435 - DNA, 1949 bp, Oryza sativa
  ref <308>: DATABASE ACCESSION NUMBER: AK110783
  ref <309>: DATABASE ENTRY DATE: 2001-12-06
acctcgatcatatcatccataatccttcaagctcttgttggctttgcttaattgcagctgccactagctttgttaggatcaatcacatccatctacgtgtgtagagcgtcgtgacagagagttttgtgatggagcagcttcccaagcgcccggcgaactacgtgccactgagccctgtggggttcctgccgcgcgccaatgccgtctacggcgaccgcacctccgtcatctacggccgcgtccgcttcacctggagccagacctacgcccgctgccgccgcctcgcctcctccctcctctccctcggcgtccgcaaccacgacgtcgtgtcggttttggcgccgaacgtgccggcaatgtacgagatgcacttcgcggtgccgatggccggggcggtgctcaacaccatcaacacgcggctcgacgcgagggcggtggcgggcatcctgcggcactccgaggccaaggtgttcttcgtcgactaccagtacgtgcgcctcgccagcgacgcgctccagatcgtcgccgacgaggggaggcacgtcccgctcgtcgccgtcatcgacgacattgacgtgcccaccggcgtccgcctcggcgagctcgagtacgaggggctggtcgcccgtggcgaccccgccgccgagctgcccagcctcgccgacgagtgggacgccgtcacgctcaactacacgtcgggcaccacgtcggcgcccaagggcgtggtgtacagccaccgcggcgcgtacctgagcaccatgagcttgctcatgtcgtgggtcgtcggcgacgagccggtgtacctgtggacgctgcccatgttccactgcaacgggtggaccttcacctggggcatggcagcgcgcggcggcgtcaacgtctgcatccgcgacgcgcgcgccgcggacatctaccgcgccatcgcgcgccacggcgtcacccacctgtgctgcgcgccggtggtgttcaacatcctgctcgagggcggcgaggcggcggcgaagcagctcgcggccccggtccacgtgctcaccggcggggcgccaccgccggccgccctcctcgagcgcgtcgagcggatcggcttccgcgtgacgcacgcgtacgggctcaccgaggccaccggcccggcgctggcgtgcgagtggcgcgcgcagtgggaccgcctgccgctgccggagcgcgcgcggctcaagtcccggcagggcgtcagcgtcctgtccctcgccgacgccgacgtcaaggacgccaagacgatggcgagagtgccgcgcgacggcaagaccgtcggcgagatcgtgctccgcggcagcagcatcatgaagggctacctcaacaacccggaggcgaacagcgacgccttcaagggcgagtggttcctgaccggcgacgtcggcgtcgtgcacgccgacggctacatcgagatcaaggacaggtccaaggacgtgatcatcagcggcggcgagaacatctgcagcaaggaggtggaggaggtgctgttccagcaccccgccgtcgccgacgcggcggtggtcgccatgccgcacccgcactggggcgagacgccgtgcgcgttcgtcgtggcgagggacaaggcggccggggtgtgcgaggacgacgtcgtcgcgttctgccgcaagcacatggcgcggttcatggtgcccaagaaggtggtcgtctacgacgccatcccgaggaacggcaacggcaaggtcgagaagaacttgctccgggaggcggccaagaagctggcgccggcggccgtgccggcgcagaagacgaaggtgaagacgacgacgacgacggtcggcggccgccgcggcgagcacccggtggcgcatgtcatggccgtgtcaaggctttagggcaatcaccaaaatgtcaccaatctttatcggtgaaccggtgatatcaccttttgcacgtaggaatttggcactacgcctgcc

SEQ ID NO: 13436 - DNA, 796 bp, Oryza sativa
  ref <308>: DATABASE ACCESSION NUMBER: AK110784
  ref <309>: DATABASE ENTRY DATE: 2001-12-06
aaaaccagacacacactcgcgcacacacacaaacactggcacgctgatcacccagaacaaacgcaacactctcttcagctaccaagcgtagccggcgagctctacctcgttggcatggggaaccacctggcgtcgtgcacgatggcgagggtgccgggggcggcgaggggggcgaaggtggtgctgccggacggcgcggtgagggcggtgaaggtgccggcgaaggcggcggagctgatgctcgaggcgccgggccacttcctcgcggacgcgcgcgcgctgcgggcggggggaaggatcgcggcgctcggcgccgacgaggacctcgagctcgggggcctgtacgccgcgttccccatgaagcgactgggcgcgcccgccgcgccggcggacatggcgcgcctggcggccgcggtgtccagggatcaggccgccgcgcggaggtcgtccgccacggccaaggtggcggccgtcgtggtggcgccgcagcacgacgccgcgatggccgaggaggaggaagacgccgcgcggccgaggctggacgagatggccgtgggcgacgcggcggccgaggcggagatcagcgagctcaagcagcggatcagcggcggccgccggtcgaggcggccgacgttggagaccatacacgaggagagctacgctccagcagcaagatgctagtgatagtttaattcagtagccaacaagtaacacaactgggatggcaaaaggccatttctcgtaatattttttccttcttttgaacgctatgtaaaatatttctttctttggcgcc

SEQ ID NO: 13437 - DNA, 1506 bp, Oryza sativa
  ref <308>: DATABASE ACCESSION NUMBER: AK110785
  ref <309>: DATABASE ENTRY DATE: 2001-12-06
attctcctcctcctctcgaggccggccgagatatcaatggaagtcgaataccacgaggagtacgtgcggaactcgagaggggtgcagctcttcacctgcggctggctgcccgccaaaacgtcgcccaaggccctcgtcttcctctgccacggctatgccatggagtgcagcggctacatgagagagtgtgggatgcggctggcggcggcggggtacggggtgttcggcatggactacgaggggcacggcaagtcgatgggcgcccgctgctacatccgcagcttccgccgtctcgtcgacgactgccaccgcttcttcaagtccatctgcggtaaacaacaaaatctctaccctttcttcattacttccctcttcaacctctctgcttactttacattcagctacacaatttcagtacactatcaagccaggctctgtctgtgtgtagctatgcaatgtttcaacttagctgccgtttactgtacgtccgttttagcattagtgatgacatgataattcaggcaccaactagcttttaatccttgtcgttgcccgcttaggctaaatacctgaatccaacatatggtagctagccagctacttgtcatttgtcccccacctaatgatgaagggggacgtacgtacggagtttggcacgcattgaatcgatcttggttcatcatcggcaatggagggctcgatcggtaggccattgagcattaatcatatatatatgatcgtcatcggtgatggtactatagtagggtacccactgttcagcgatcaccactacccggcaatcaccagtgcttggtcggtcctgtggcaacattaattattatcggtttgtttggattgaagccaattttactctactaaaatcttagtaatttcaatagcgtcatttgcatgtttggtttggtatcaatttttttcacgctagttcagattttatactactaaaattggtagtattaaaatttggcccatgtggctggttactcgagaggcgtccgttcctggttgctgttgtatactgaagcctgatatatcgcagtaagctacattctccgttttatattataggccgttttgattattttaaaatcgaacttcttaaaaatttgatcaagttaataacaacgtttatagcaccaaattagttttatattaaatctaacattgaatatattttgatagtttctttgttttatgttaaaaatattgctatatctttttcataaatttagttaaaaataaagaaatttgatttagaaaaatatcaaaacgacttataatataaattataaaactaaggtagtgatttcacagtataacatattagtgctacagttacatgcctatgcattctttcgtgctgaatagctgaatgatttgtgatatttattggatggtaaacgaatgaattagctgttataaagtttcaaaatacgcttaaaacagcgttctgaaaaattcatatgtacaaagtttttgcaaaacaag

SEQ ID NO: 13438 - DNA, 1360 bp, Oryza sativa
  ref <308>: DATABASE ACCESSION NUMBER: AK110786
  ref <309>: DATABASE ENTRY DATE: 2001-12-06
attttttcttgcataccccccatgctactactgcacgtctacattcccgcggatcagctgacgcctgactagcttccccaaggcgcactgctcctgctccccgcagcgtctccttcgccgcggcgccgcgccagcatctccgcgagcgcgcgcgagtgcggccactcggggttacctcgcggaacatggcctcagcgcgcgccagcgaatcgtccgccgtgtcctccgccaccttcccgggtacgtccgacaacctgtccgcggcactgccgccgtccgtggcacgcgtgatcggcttcctcgtgtccgcgaactccagctccgcgagaggcgacggcttgtgcgtctggtagtactccctgtcctcctccctcactttccgccccgccgcctcctcgccccctggcgtcgcctcctcgcgcgagtcagctggccgggacgacgacgaccgccgccgcttctgcgtgaacgacgagcctcccgccgggtcggcgagctcttgggacccaagcttgtcagacatagcgaacggcgggacgcgctccttggtggattccgacggcgttgctgccgccgtcgacgggttctttccgtggtcgccgcctccggtggcctcctcggcgccggagaacttgggaggacggtcggggtagtcgtcactcggcgggtcgccggaatgcacggatggatcgcctgcgccacccgcttccgtcgaggtggacaggaggcggcgtcgccctggtacgacgacgaggctgcggagattggtagatggtggtcttgaggcaatgaggcgtactgctcgcgcggtggccatgctggtggctggtcgatcgtgctagctgctgaggattttcgatggctcgacgatgccgtgttcgctctcgtcggagggtggtcttatatatggaacggcgtgcgagcggagagagttcgccggagaaggagaggaggtgggggagggagaggtggacgcgtggagggatcgagagcatcgagaatgaggtggaagacacgagtcgagcacggagcgacccttttcctctctggaaagtgcgggaagactgaagagcagcgagagttttggacttttggcggcggttggggccggggccagactgccaggtgaaatcagcccactaagatttcggccttccggatgattcggcccgctcagaggctacttaggagtactactattacatttgggcgttaggacagggaaattgttttgtcatgtactctttccgtcatatcagtcgttttaggtttcttattattaccttttaaaattttgttcaattttagtaaaaaattacaacaattataataataaatcagtctctttaaatgtggcatt

SEQ ID NO: 13439 - DNA, 1269 bp, Oryza sativa
  ref <308>: DATABASE ACCESSION NUMBER: AK110787
  ref <309>: DATABASE ENTRY DATE: 2001-12-06
tactttgtggtggtgataacatggcagcgtcgccgctgccgaggtgggctccgacgccgagcccgacgaggccactgagaacgccaggaaccccgagcgccggcgccggcgccgcctcgtcgtcatcgtcatcgtcatcgtcgtggcgcagctgtgtgccgttactcaccaccttcagttccgtcttcggatcatcagctgcgcggcgcggtggtggtctctccggcggggagccaccgccggcgctgccccacgccggtcgccatgacatcgtcggcggcattgcgcctctcgacggcgtggaagccgccgtcgaacggcgccggaaggacgagatgatgatgagcgccacgacggcgtgtagccgtggggtgttcctgacgtgggacgatctgtccgtgacggcgccggcagctgccgccggctgcggcggccacggccgccgcgccgtgatactcgacgggctcagcggctacgcgcgccccggcgaggtgctggctctcatggggccttccggctgtggcaagactaccctgcttgacgccttagctgggaggctgagccccaacatgaaaatgagaggagacatcctgatcaatggcctgcgagagaaactttcgtttggaacatccgcctacgtgacccaagaaaacgtgctgatggcgacgctcacggtgacggaggccgtccactactcggcgcagctgcagctgccggactcgatgccggcggaagacaagcgggcccgcgccgaccgcgccatccgccagatggggctcggcgcggtcgccggcgtccggatcggcggccgggtgtgcaagggcatcagcggcgggcagcggaagcgggtgagcatctgcgccgagctgctggcgtcgcccgcgctgctgttcctcgacgagccgacgagcgggctcgacagcgcggcgtcgtaccacgtcatgagccgcatcgccggcttcgccaggagggacgggatgacggtcgtcgccgccgtgcaccagcccagcacggagatgttcgagctcttccatggcctctgcctcctggccactgggaggacggtgtattttggagcagcttcagatgcaatcgaggtaacagtttgacatgtgcgactaacagtaataccgacatcaaggacctcatgagctagggatgcaagtagtcaatccctaaaaaaaatctgcttactaattcacttatcgtatggttatataaagtttgaaagaaaaaataactagaagtgagataagcggataagcgagc

SEQ ID NO: 13440 - DNA, 1073 bp, Oryza sativa
  ref <308>: DATABASE ACCESSION NUMBER: AK110788
  ref <309>: DATABASE ENTRY DATE: 2001-12-06
agctatagccctccttttattcccatcactccattcattgttcttgttcttgttcttgctcttgctcttctctctagcttttgctttactagttagttggccattgtttgcactcgatcttggtggtggtatgagctgagctcttctctagctcatcttcttggtggatcttgtggtgttcgtcttcttggtggatcttgctgctggtatagctatagttcaagattaatggcgactccttaccatgtccagtctccaagaagcatcctactgaagatgattgccacgaagcagcagccgccggcgctgccgccgccgccgccgccgaagctgatcctgcagccgaggcagcggacgtcgccggcgatgtggtgcgcggcgatcgtgtgcttcgccttcagcctcctcctgatcgccgccggcgcggtgatcctcgtcgtgttcctggcggtgaggccccgggcgccgtcgttcgacgccgcgggcgccaccctgaacgccgtctacgtcggctcgacctcgccggcgccgtacgtgaacggcgacatgacggtggcggcgaacgtgtccaaccccaaccagaagatggacgtggtgttccggtcggccgccgtggagctcttcttcggcggccggcggatggcggcgcaggcgctgccggcgccgttcgtgcagcggcgggggcagtcgcagatcatcagcgtgcacatggtgtccagccaggtggcgctgccgccggagctcgccgtggcgatggtgaaccaggtgaggagcaacagggtggtgtacaccatcaggggcacgttcaaggtccaggccaagctctggttctggcactacacctactcgatgtcggcgctctgtgacctggagctcactgctcctccctgtggtgttcttgttgctaggagatgcatcacaaggtgactgatgatgatgatgatgatgatgatttagggattcagatttcttcttcaacttctttctttctttcttttcttttttaattttaaatttcttgtatgaaaacctggaatgttttcatcatgaaattgagcaaggcaaggcaaatt

SEQ ID NO: 13441 - DNA, 1553 bp, Oryza sativa
  ref <308>: DATABASE ACCESSION NUMBER: AK110789
  ref <309>: DATABASE ENTRY DATE: 2001-12-06
acgaagctctccaatgccgccgctgccccgcccaccgccgacaccgacctcggccgcaccagctccgtgccctcgccagatcgccgccgtcgtgctgaaccacccttcgtccgccctcacgccggcctcgacgcgctccctctcggcgtccctcctcgccgtcgcgccgtcgctcccgacccccgtggccgactccgtcctcaagctcctctggcaccacgcgccgcgcgcgctcctcttcttccactcgctcctccacctcccgccgcgcgcgcacgccgtgggtccctccacgctcgacctcgcgctcgacctctccgcgcgcctccgccgcccgcgccagctcaccaactccatcctcggcctcttcccgcgccaccgcctcgccttcaccccgcgcaccttccccatcctcttcgagcgcctcgccgtgtcgcagcgccgccccgacctcgccgtccgcctcttcctctcgctccaccgctcccaccgcgtcgcgcaggacctccccctgttcaactccctcctcgacgctctgtccaagtcgcgccacgccggcaaggccgcctccctcgtccgcgctcttgagcagcgcttcacccccgacgtggtgacgtacaacacgctcgccgacggatggtgccgcgtcaaggacacctcccgcgcgctcgacgtgctgcggctgatggtcgagtccggtattgcccccacgaagaccacctataacatcatccttaaaggcttcttccgtgctggacagctacggcacgcatgggacttcttcctccagatgaagaagagggggagtaaagacgagagctgtaagcccgacgtcgtctcgtacactaccatggttcatgggctgggtgttgccgggcagctggagaaagctcgcaaggtgtttgatgaaatggctaaagaagggtgtgctccatcggttgctacctacaatgcgcttattcaggtgatctgcaagaagggcaatgtggaggatgcagtaacggtgtttgatggtatgcgtgttaagggctatgtccctaacgtggttacatacactgtgttgatccgaggcctctgccatgctgggaagattgaccgaggtttgaagctgttggagaggatgaagaatggaggctgcgaacccatcgttcagacatacaatgttcttataaggtatttatttgaggaaggggagatggaaaagggtttggatttgtttgagaagatgagtaaaggagaggagtgcctgcccaaccaagacacatacaacatcataataagtgctatgtttatgcgcaagagggctgaggacatggtactggctgcaaggatggtggaagaaatggtggatagaggttatctgcctagaaggttcatgttcaaccgtgtgttgaacgggttgatgctgacagggaatcaggagctttcacggaaactcttgagaatgcaagagaaatatagacgtttgcaacgagaaataagactgtaattgacatttgatgttctcgaaacatttgagattatgttcatcctgaggcttagttacagaagtg

SEQ ID NO: 13442 - DNA, 1180 bp, Oryza sativa
  ref <308>: DATABASE ACCESSION NUMBER: AK110790
  ref <309>: DATABASE ENTRY DATE: 2001-12-06
acgatgaaggcgtcgggaacagggtcgacggtgatccagtggccggcgttcttcacctggaggcccctgacgtggtcgtcgacgagcagcatggtcatgccgccggggtcggagtgggacgcgacgccgagcgtcagctccggctgcgggcagcgcgggtagaagttgaccctcaagcacgcgccctcgccgccgaccccgccgaacgccgcctgcagcctcccgtcgtccagcccgagccccctcgacagtagcctcatcaccctcctgcacagccgcaccacctcctccgcgtactcctccgtcgcctcccgcaggccgccgccgcccgcggggacggacgacgtcggccacttgtcgtggctcttgagcgccgccgggaggaggtggaggaagtagtagtcgccccagtcgaggggcccgcccttggccgtgccgaggcggctgccgtacccctcgtacgtcgccggcgagttggcgtacgcctcgcgggcctccgcgggccgcgcgaagaacccgcgccacgccgcgcgcgcccggcgcagcagctcggggcgcacgccgtggttcaccgcctggaagaaaccccactcccggcaagccgccgccacggcgcgggcggtctcctccccgtccggcattgacatgtccaccaccgggatattgttcaggccgccgccgccgtccagcgacgacggccgctcggacggcgccttgacgtaccgctcggggatcgtcgcgccgcacgagtccgacacggcctgcacgcgcaccaccggctccggccagccggcgccgccgttgaagcagctgctcatcgtcggagctgactggctagctagtacttagctagtagctagcacgtcatgcactcgcacatgcacacgcacacgcacacgttttgctgtgctatatgtgcaccgtgatgagatgaacggtgctagctcacttagcccttaatttataaaagcgagaggataaggaggaaggagagacaatttgcctgctggcctttgcggatcattattgaagtgttgaataacaaaattaaaattgagctactagtgctaggtcatgaaagcaacataggaaataaaacacgtgctccaagaacatacactagattaaagtgactgtatctcaagtcattaacaacccagtatggctttttttgaaccgt

SEQ ID NO: 13443 - DNA, 1915 bp, Oryza sativa
  ref <308>: DATABASE ACCESSION NUMBER: AK110791
  ref <309>: DATABASE ENTRY DATE: 2001-12-06
gctcagttccggccgttcaccgccgcctccatctccctcctcgaagcgcctccgccgccgccgccgccgccgaggagaggtgtgtgtcggcgagcccctcacctgactccaaccgccgccttcgatggggcgcgtgaggcctctccaccacgcggcgaggaggctgctgctgctgttcccgcggccgagggccttctcctccgccgccgctgccgcgccctcgcgcgagccgctccacgtctgcgtcgtcggcagcgggcccgccgggttctacacggccgacaagatgcttaagggccatgaaggagcacaggtcgatattattgataggctgccgacaccttttgggttagttcgatctggagtggctccagatcatccagaaacaaagattgtggtaaatcaattttctcgtgtagctgcaaatgaccgctgtcaattctatgggaatgtaacactaggaagggatgtatctctatcagagcttcggaagacatatgatgttgttgttcttgcttatggtgcagaaagtgataggtcacttggtattcctggggaggatctgaggggaatacattcggctcgagagtttgtgtggtggtataatggacatccagacatgtgcaacttggcacctgacttgcaaagcacagattctgctgttgttctaggccagggaaatgttgctcttgatgttgcccgtattcttcttcgttgtacatctgagttggctgctacagatattgctgattatgctttggatgctctccgtggcagcacaataaagaaggtatacttggttgggagaaggggcccagtacaggcagcatgcacagctaaagaactacgtgaaattttaggtttgaaaaacgtccatgtcttcatcaaggaggctgatcttgtgaccttgcctgcagatgaggaggagattaggaatagtagaattaaaagaagggtgtacgagctactatctaaagctgcaattgcgcataaaggaaagaataataatggccaaaaggagcttcactttgtgttttttaggagacctaccagatttctcccatcagaagatggtgtgacagttggtgccgtgcaacttgaaaagacttgtttaaaagatgatggtgtggctggaaagcaggtcgcagttggaactggtgagtttgaagatctaaaatgtgggttggtcttgaaaagtattggatacaaatccttgccagtggaaggtttgccctttgacaaatacagaggaattgtcccaaatttgaagggcagggttttgagtagtgaatctgagaatgccacagtggaaccagggctgtatgtggtgggatggttaaagagagggccaactggcatagttgccacaaatctccattgtgccgaagaaacagtggcgagcatccttgaagatgacaagaaggggttgttcatgggaccttctgattcaaaaaagcaaggcaggaggggactccttgagattctagaacaaaagaacatccgctttgttccttttgatggctgggaaaagattgattctaaggaaaagatggcaggtgagctgaagaacaaacctagagagaagataacaacctggaatgaaatcctgatggcttcaaactagggatgaaagtgagggcagtcaattttgttctctagcatgtcttgtagaattacattaaagccaattctgctcttatagataccaggaataaagtttcaactgactttggcatagtacacggaaaagctagaatggaaagctgtaacaagtgaagtattgcaacaatgtgcaaaagtggtacttcttatcatacaaatggtttctcactgtcctgtggtatccatttttgaaacctggagacaattcgttgccaactttggagaaaatattattcctgacaatatgcataac

SEQ ID NO: 13444 - DNA, 1559 bp, Oryza sativa
  ref <308>: DATABASE ACCESSION NUMBER: AK110792
  ref <309>: DATABASE ENTRY DATE: 2001-12-06
atatcacgtagttcggtcgtttccaaatccttgaaatcggtgctatagactgttcctcttcacacagccaaacacagtatcacatcggcatcatgtcaaaatttgagacgagattgtttgtcaatggagaattcatggaagcagaacatgccgagacattctcgctttcgaaccccgccactggagagaccgtagcagagattccaatcgctggcgaggttgacatcgacaatgctgtgaaggccgcagagcgtgctcagcctgcatggtcccgtgtgcctgcgcgcaggcgagcagcaatcatccgaaagttcgccgccttgatggaccagaacaagcacaagttgagcgagctcgactctatttgcatgggaaagcctcttcatgggggtcttgaggatatccaggaagcagttgatatctcgaactactttgcaggccttgtagaaattgccggcggagagacttcactcaactccccggaagtgctcagcatttctatgcgacaaccatatggtgtcgttgcttcgatcattccgtggaacttcccgtccatgatttggtgccacgatgttgtgcctgctgcaggtgcaggaaatgctgtcatactaaagacatccgaaaagtctcctctcagtggtatcttcctagcgaagcttgcgttcgaggctggatttcctgcagggatcatcaatgttgtgtctgggcctggaagcacaggtgctcttctatcatcacacatgaagattaggaggatcagtttcaccagatctacaggagctggccgtgctattatgcaagcagcggcgaagtcgaacctcaaagctgtatcgctggagctcggcggaaaatcgcccctcattgtgttcgatgacgcagatttggagaagactgccgctgctgccgtcggctccattactatcaactctggtcagatttgtaccgcgtcctctcgcctatatgttcagaagggcgtgtctgagaccttcaagctgaagctaaaacaaaagatggaagctcttaagcttggaaatccgctccagtctgggacggagatgggccctcaggcagacaaaaagcaggctgaggctatcgcaaagttccttgaaattggcaaccaggaaggtgtcgcattgaccggcggtaagccggcaaaagataagggcgataatttcattcagcccaccgtcttcactggtctttccgatagcagtaggctcaacatagacgaaatctttggaccagtcctcgtacttcacgagttcgaaaccgaagaagaggttattcgtcgtgccaatgccactgaatatggattgtatgcttccgttttctcaaagaacattgatactgcgcttcgcgttgcacgagcacttgaggcaggcaatgttggtgtcaacacaacttcacctttcggggcttacgaattggcgtttgggggctttaagggctccggagttgggcgccagaagggttcacgctcggtgcttgattggacggaagaaaagtctgtttacatcaaccatgaatagctttggtagacaatttgcagcatcagttcc

SEQ ID NO: 13445 - DNA, 1330 bp, Oryza sativa
  ref <308>: DATABASE ACCESSION NUMBER: AK110793
  ref <309>: DATABASE ENTRY DATE: 2001-12-06
ggaaaagcctccaggcgagggcggcgaaaccctaggctaggctagtcctctcccggaggccggagaagctacccgccggcggcgcgcccctccaccctcgccgtcgcccatggccctccttctgcgcgtggccaagaaaagccgggcgaccgcggcgatggctctcgtcggcggccgcggggtcgccagctcggccgtggacagcgcggcgggtcgtgcgctggccaccctcgaccacgtccccaaggtcatcaagttcgccgccctccctccggcggccgtcgatcgtcaagacgcaggcgccaagccgggggtggagaaggcgcgccgggacgtgcggcggtggcgcgcgaccaggtgcccggagcgcaacctctagggctcggcctcaagcctggtctggcccagatcctggctccgtcaggcaagctcaagctcggcgccggtggcggtgggttgccctactcgtcgtcggccatctccagcggcggcggcggagaagtgcagccttcccgcgtcgccgccgacaactgcaggtgtggctcgccgcacctatgggacaaggggcgggtggccgtgccaggcgccgccggaggcgttgaaggagatggaggacgccttccgcgcgcagatgaagataacagaggatgcaatcaaagcgcacacagccgagtgtctgtcgagcaagaagctgctcaaggccccccgacctctgtaccaagtcttccttgtctgtgtttttgttctggctgcagtctccattctggtgattggattctttgactacgcgctcacagttggggagatgactgtggtcaacttcctcaatggaaaagagttcaaggctgtcaaaaccgacttcatggatgaagccgaagccacacttctcgatctcgcccaacaggagagggttcgagaggtgaggaaccggtacgtgcaggaggcatggaccgaatcaatgggctgcctgatcagggccctcaccctcaagtcctaccgggactcctggttccgcacaaaggaggaggactccaacaacagcaccacggttgctactccaagcgccaagtagagatccacatatatcacatcattgcctgagtactagctagtgtctagagtattagtatctttacttgtggagtttagtacctgttatcttcattccctagcagtaacaatttccatgattagtactagtaatatgtaatgttgcaagatggatgagactatgcagcaccattggttgtaacccacaccaatgcttcctaggagtatgtaatgatcatcctgctagctctatggcaatctactacagtactctttatgg

SEQ ID NO: 13446 - DNA, 1537 bp, Oryza sativa
  ref <308>: DATABASE ACCESSION NUMBER: AK110794
  ref <309>: DATABASE ENTRY DATE: 2001-12-06
attgcattaaaaaaaccgatcaaaaagggcgagcgaagtaagtgatcgaaaaactttgttctttgttcgtcctatctataagaggagagcatatgaaaaatgtaacccattctttcgtttttttagctcactggccatccgctgggagtttcgggcttgataccgatattttagcaacaaatctaataaatctaactgtagtggttggtgtattgatttattttggaaagggagtgtgtgcgagttgtctatttcaagaatagattggatctatccggctgcactttagaatattttttagtatttttcggataaataagaaaagggtgcacgatctcgacgaattacttctgaataaatgcagaaatcatatgaaagaaccatagcatttcgcgacctattggtaaatcaaatcaactttgattctctatagaccaataatatgagaccattaacacggttaaagctaaactgcttgaagtctaggcaaaagggggtactctttctacaactatattagtattagtaccaaatgctttaaacaggaaatagctaatgtagaatttatctgatatagaacactcatatcgataaaatggtttgaactatttactagaaggggcaccctgcccttttttatccaatgccgaatcgacgacctatgtataaaaaaggagaaagtttttggatttgaagaaaaaagtaggaattctatccattttcattttccatttttctatttagtttttcttaatgaaattgaaaattttaactaaagggcaaatacaaataaaaaaacaactttgctgcccacgatagatttttatctaggcggaagagtcctcttaatatttatctagtcttatatgggtttcggtatattgaaatataaacagaaaagagagggtagaggataggctcattacattaaaaaaaatatggaagtagccatagcaaaaaaagaaaaaagggagcgtgagagccaaatgaatcgaaagattcatgtttggttcgggaagagaccataaaagttgtaaacttaatagcaaggtaatctactttcattaaaagatttattagataatcgaaaacagaggatcttgagtactattcgaaattcggaagaattgcgtagaggaaccattgagcagctcgaaaaagctcgaattcgattacagaaagtcgaactagaagcggatgagtatcgaatgaatggatactctgagatagaacgagaaaaagcaaatttgattaatgccacttctattagtttggaacaattagaaaagtctaaaaacgaaaccctttattttgaaaaacaaagggcgatgaatcaggtccgacaacgggttttccaacaagccgtacaaggagctctaggaactctgaatagttgtttgaataccgagttacatttccgtacgattcgtgctaatattagcattctcggggccatggaatggaagagttaaattaattaggccttgaacttctactttcctttagaatttaggcattatttttccccttgcttccg

SEQ ID NO: 13447 - DNA, 2405 bp, Oryza sativa
  ref <308>: DATABASE ACCESSION NUMBER: AK110795
  ref <309>: DATABASE ENTRY DATE: 2001-12-06
cttcatgttcatctacttcgtggcagtggaattgaattcctctacatcgagcagtgctgaagtcctcgtgtttcaacgcggacacgtaccggcttatatgatggagggcggcaaagattcacaggatgccgaacgaggtgaaaagacggaagcgaatgcagatgcaggtgatgccgacgtcaacgccgtcgaacctcaaaaagacatcttcacgtggcgtgacgtaacatacgacatccacatcaaatcagaggaacgtcgtctgcttgatcacgtatccggattcgtcaagccaggcacactcactgccctcatgggtgtgagcggtgctggtaaaaccacactcctcgatgtactcgcgcaacgaactacgatgggtgtagtcaccggtgacatgtttgtcaacggaaagccactagacccaagctttcaacgctcaacgggttacgttcaacaacaagatttgcacctagagaccgcgaccgttcgagaaagtcttagattcagtgccatgctgcgacagccaaagactgtcagcaagcaggaaaagtacgactatgtcgaagaggtcatcaagatgctcaacatggaagactttgcgaacgctgttgttggtgtacctggaacaggtctgaatgtggaacaacgtaagctacttacgatcggagtggagcttgcagcgaagccaaagcttcttctatttctagacgaacctacaagcggccttgatagtcagagttcctgggctatctgcgctttcctgaggaaactcgccgatgcaggccaagccgttctttgcacgatccatcaaccgtctgccatcctgttccaagagttcgatcgcttgctcttcctagcacgcggaggcaggactgtctacttcggagagatcggcgcaaactctcgcaagctgctcgattactttgagaagaacggcgcccgaaaatgtgacgacgaggaaaatcccgcggaatacatgcttgagatcgtcaacgccggaaagaatgacaatggagaagattggcacgacgtctggaaacgaagcgatatgcgtcagattgtcgaacaggacatagatcgcatccacgaagaaaagcaacatgagaaggtcgctggttcggatgaccctacagcgacgtcggaattcgccgtcccgttcactcgacaagtcgtggaggtgactcgccgtgtcttccaacaatactggcgcatgccctcgtacgtgggagcaaagtttggtcttggaatcgctgccggattattcattggtttcactttctacaaggccaaaacctcccaagctggcttgcagaacgttcttttctccgccttcatgcttaccactatttttaccactctcgttcaacagatccaaccattgttcatcacgcaaagagagctttacgaagttcgggagcgtccgagcaaagcatattcctggaaggcatttatgattgccaacattcttgtggagataccgtaccagatcttcactggtatcttgatctgggcgtgtttctactaccctgtcgtgggtgtggaccaatctggctctcgacaaggactcatgttgctcttctgtgtcgaactcctcatctatgcgagctccttcgcccagatgaccatcgccgccctgcccgatgcccagactgcctccggagtcgtcacccttctcaccttcatgagcattcttttcaacggtgttctccaagctccatcggcactgccccgcttctggatcttcatgtaccgcgtctcacctttcacatattgggtcggtggcattgcttctaccctgctacacgggcgccaagtcgtctgcaccgagtcagaagtctcacgtttcgatcctccatccggccagacatgccaacagtacctctcaaggtacctccaggccgctcctggtacgctgcagaatccgcaggccactgccgactgcaggtactgctccatccgtgacggtgaccagttcctggccggctcaaacatctactacggcgagaggtggcgcaactttggcctcatctgggctttcattttgtttaacattgctgttgccgtgttgacgtattgggctttcagggttgctaaatggggtaaggggagcaagaaggggtcgaagagcaaggccgagaagacgacggagaaggtggcgcagaagccggcgcagcaaggagccgctccgccgaaccgcgaagctggacctgttgatccagcgacctaatttgctttcgtgggacattccttcaaatctacaatcttataatgtttcttttacttgtttggccattggatgcatttcacggttctcatttgtttgggcgaagaagtcccactgcaggcacggtaggccatatgcaactacaatgtgagtttaatcataatacactcttatacttgtt

SEQ ID NO: 13448 - DNA, 1620 bp, Oryza sativa
  ref <308>: DATABASE ACCESSION NUMBER: AK110796
  ref <309>: DATABASE ENTRY DATE: 2001-12-06
attcagtcctcttctcctgtcctcacacttgagaaaccactgccaattgtcaaacaatgaaatttagcatgagaggacagccaaagggtatcccatggctggtattggccatgctgattgcaactttcgcaatgctcacggagggagctaccagcttgtcgccaccttctctctccctaacaccaacgtatgctcctgttattaaggtgatagggaaggtgtactgctatagatgcttcaatgaggcacacccagaagaatcccatgggaaggagcacctgaaaggagcaatggtcaaggttacttgtcaggctaatgaccaggcactggtgggtttcggctatacccaagacaatggcaagtacagcgtgagcatcacaggcttaccactcagcagcacatatggggccgactcatgtaaggttgagctccattcagcaccaggaggatctgactgcaacgtgccaatcgagctaaacttgtctgggcttagcgtttactcgaagtccaatgaggaagtggtgctccaagccaaccaagtaatggcattcgcgtcacagaagacatttgggttttgttcgaaacctcacattcaaccaccaatttttccatacaattcaccaccaccgtccccttaccagtatccctcacctcctttcaactacaagtccccgccgttgccaaatcagttttcaccccctccattcaacaagtttccacctccatctcaccagtatccatcacctccgcagagttcctaccattcaccaccaccctatcagtatacacctccaaacagctaccaagctccaccaacatcttacaatcacccgccacccccatatggatacaattctccgatcccaccaaccaacaagtatttaccacccccatactacttcaactccccaccgccacaataccagcattcgccacctgcaaacagctatgtatcgccaccactagctcaccaatatcccccacctccatacaagtcaccaccaatacctccttactacttcaactctccaccagcaaaccattattcaccacctccatacaactttggatcttctcccccaacctaccagtactctccaccattgcttccgaaaactccaaaatatttacctcctaaagttcctcttgagatgtctccaccggcacatgcaacatctccacagcctctggtccactatagccctccgccaccactgcagcatgctggcatatcatcgacaacaccatctgtgaactcctatcaatccccgccaccagtaaatcagctgtcataagcatcagcgatgaggctcctgaagtgatcaggcgtctgcagaataaacgggagacttgaagtctacctcgagaagaagcagtgggttaattcgagttccaggcatccatctcagtatctaggattgttacgacagtaactagtattgtttcagcttatatctcattgcctagagctaatttcagcagggtaatcataagtccagtaagcattgccagtgtctctagttttcaactgaattcaatgtatgttgttggttcctagcagcccatataaagcttttcttatgagcacttattacataagaaaatcaatcatatgagagg

SEQ ID NO: 13449 - DNA, 1277 bp, Oryza sativa
  ref <308>: DATABASE ACCESSION NUMBER: AK110797
  ref <309>: DATABASE ENTRY DATE: 2001-12-06
atccaaatcaacagtaatgttctacagttagtgagatgtagagagagatatggctagctaatccatgagagaggtctagatagagagagggagagatgatcagttcttcagaagaggctactactagctatctagcttcatgtttaactcttcttggtttgtgtttttgtgtgcttgttggagttgttaggaggaagagaggggtgagaggtgaggctgacagaagagagtgagcacacatggtgactttcttgcatgctgaatggactcatgcttgaagctatgtgtgctcacttctctctctgtcagccatttgatctctctttctctctttctccctcatgtgttatactgttctctcatatctatcttctttgaggtagtaatatacttgagcaaattaagctgcttaattatttgtgtatgatgatcagctgctgatccggcctcatttcttgcatatatgaccacaaccacatacatgcttgttcattttttttcacaaagaaagagaacagtttaatttaatttcttggggtttttggatcagttaattcgtcttgagaggggaagagatctctatgggttttggaggtctgacagaagagagtgagcacacacggtgctttcttagcatgcaagagccatgctgggagctgtgcgtgctcactctctatctgtcagccgttcaccatgcccaatatgattaatctccttctctcagttgacagtaatttctttgccagatctcctgttaaattttctgcctagctagctattatgcacatgcttattatgatgagcctgccaatatcatctccacggcaaaacacaaactagctatgatttgattcattatatttcttttcgctgtttaattaattatatgcaggcatacactagctagtttccagctagtacaaagacgagacgaggtcgttctgacgattttcatagtcgtcagaagaaggtgtgcattggtttaatttttgttcttggctgtcagactagatcatctctgaatgatcaagagccggatcaaataattattgtgagcaccgaaatcgatcatgcgtactctctctgtgaagtatttctgagaaataatatgagtgtagctagtatatatactcttgaagggtgtctaattaattggggtctctagctagctccttctctgaatctgtccatgaattgaatctactatgtatgtgctggtgcttactgttatttcatgtactacatataattgataaatcaatttaggctttcagttt

SEQ ID NO: 13450 - DNA, 1145 bp, Oryza sativa
  ref <308>: DATABASE ACCESSION NUMBER: AK110798
  ref <309>: DATABASE ENTRY DATE: 2001-12-06
aaagaagctaattaacccaagcaactagctatctagcttagcctcgctaaaccaacaccatcgtaaaaatctctttgatagttgacatcgaggcagtgattaattaagtagctagctagttacaggcacaaggagagaaacaccaatggcatcaatggcgccatcggcaatggtgctcatcgtcctcctcgtcctggtggttctcccgtcgagcactctgtgctcacgggcggggccttcttccaagcacggccatggcggtggccacgccaagcgcgtgccgccaccggcgtcggtaccgccgccgccgccgccgccaccagcgccggcggcgctggtgcgtgccacctgcaactccacctcctactacgacctctgcgtcgccgagctgtccgccgacccgtcgagcgccacggccgacgtgcgcggactgtcgtccatcgccgtctccgccgccgccgccaacgcatccggggcggcgcaggcggcctcggcgctggcgaacgcgaccgacgcggggacgacggcgggcgtcgccggcgacggcggcggcgcagtcgtacagaggctgctcgccacctgcgcggccaagtacggcgacgcccgcgacgcgctcgccgcggccaagggctcgatcgcgcagcaggactacgacatggcgtccgtgcacgtcagcgccgccgcggagtacccgcaggtgtgcaggacgctgttcgggcggcagagccccggagactacccgccggagctcgccgcggcagaggtggcgctcaggcagctctgctccgtcgcgctcgacatcatcgcgctcctcagctcatccagcaactagcagctctgcttgttaccgagctcaagttcacccaaccagctaactactcgcaattcgtataggtacaaatggtgcaaatatagtactgtataatactactgcatagaatacatatacgtgtaatgacacgtatttatctttttttttttgcaaggggcacgtatatcaattaattgtgtgtcccaattaattagagtcgaatccacttgatatgttcttttgttaatttgtattatcactccatagaggagttgctgtagtagtgcaaaaggtacatgcggccgccggcagtatgcatgtatttcaaaaaaag

SEQ ID NO: 13451 - DNA, 1884 bp, Oryza sativa
  ref <308>: DATABASE ACCESSION NUMBER: AK110799
  ref <309>: DATABASE ENTRY DATE: 2001-12-06
aacatatacactcgacgataacgcgccatcgtcccgacctagcttcgccttttgatgcttctgcttcgccagcctgctctgttggtatccgcagctcgacctttgctctccgctcttcctcgcacgtttacgcccaaggctaccttcacgtcatccatcttcaaaatgtcggagcaacgcgtccgtgtcggcagcgccaaggaggtggcgcagggcaagatgaaggagttcacgtttgccggtgagggcgacgacgctgtcaaagtgctcgtgtccaacgtcaagggccagctgcacgcgacgtcgtccaagtgcacccactacggtgctccgctggccaacggtgtgctgacaggcgacggccgcattatctgcccctggaacggcgcttgcttccacgccaagaatggcgagatcgaggacgcacctgcgctcgacagcctgctcagcctcaagctcgaggtcgagggcgacgatctctttgtcacggccgacccggagaagctcaagggcaagcccggcgtagcccccagctgcaagggtggtgtgaagagcatcgccaagggcaagggtgtcgtcgtggtcggtggcggtgccggagccatcaactgcgtcgaggagctgcgaaagagcggcttccaaggcgccatcaccattgtgtcgaacgagcaggccatcatcgaccgtaccaagcttagcaaggcgctcattgccgatgccgacaaggtgacttggcgcagcaaggcgcacctcgacaacgtgctcggcgtccagctcgagaacgccaccgtcaccgccgtcgatgccaaagccaagtcggtgacgctcgacaacggccgcaagctcgagtacgagaacctggtgctggctaccggtggcacgcccaagcgcattcctatccctggcgctgacctgcccaacgtgctggtgctcaggcagatcagcgacaccaaggcgatcaacgaggcggttggcaacgaggacggcgaggcgtccaacaagaagaacgtcgtcgtgatcggatcgagcttcatcggcatggaggcggcgatcgcactgaccaagcgcgccaacgtctcggtggtcggcatggaaaaggtgccgttcgagcgagtgcttggcgagcaggtgggtggcggtctcatgaaggctcagatcaagaacggcctcaagttctacatggaggctggcgtctcgcgcatcgacggcgagagcggctcgggccccaaggcggtggtgatcaagaacagcgagggcaaggaggagtcgctgcccgccgacgtggtcattctcggcgttggtgctgcgcctgtcaccgacttcctcaaggagtcgggcttccagctcgagaaggacggcggcatcgcagtcgactcgaagctgcgtgttgagggtcaccgcgacatctttgcgattggcgatatcgcggcagcacctacgcgcgcctcgccgcacagccgcattgagcactggaacgtcgcctccaaccagggccgcgcagtcgccaagacgctcgccggcactgaaaccgattacgacaaggtggccatcttctggtcggcgctcggctcacagctgcgctactgcggcagtggcggtccgcaattcgacacggtccacgtcaacggcaagcccgaggagctcaagttttccgcttactacgccaagggcgacgaggtggtggctgtggccaccatgggtgtcgacccgctcatggtgcagtgcagcgagctgctgcgcatcggcgccatgccttcgctctcggacatcaagaacggcaaggacccgctctcgcttgacctctcggctaagatgtagactcatcacaccggctagttgttcatactccgcatcggcttagttcaatgcaaggcgatccacatg

SEQ ID NO: 13452 - DNA, 1546 bp, Oryza sativa
  ref <308>: DATABASE ACCESSION NUMBER: AK110800
  ref <309>: DATABASE ENTRY DATE: 2001-12-06
gcaggcaattccagttggtagggaagggcgggcaaggtgcggacggcgtgctcgccggggtcatagaggacagtgcggcaagtctggtcggcggcgaccaccatgttatgattgcctccaaggagcaagaattccatctgctgtttcccaggcaacttggagaatggagggtagaaggtcatggctgggcaaggcaggctcgcatactccgccgcgtcggtgcctgacgccacgaatggcaccggggatggacgtggcaggaagaagcgctccatgtctatgttgcgcagtgtgtagttgctgcggcggggagcaaactcctccaacaccagataaacaaaccgacgaatactcatcgccccccaaattaaggaatcttactaaagattgattggattgccctagctcttcttctcccccaccacgaacaactgttgggagatctatctagatcggtgtctcccgcatatttgggttagggttagagatagaccaccggttgcatttatttgtgttcgttttggactaaaacttcccatcggagcgaataaaaaaaaatatatcccatcggaggcaggaaggagcctagcgaagccaaacgatctttctcgttgcaaatctcaccttagtagagagggagggagggagccgccgaaccgctactccggccgcgagcgaatcggagagtcgccggcggcggaaagacgacgggaaggggatggcgcggaggaagatggagtagaggggtgcggcgcggcggagttggctgcctacgaacccagctctggtgtggcggcagataaggaaggggatgagtgctgttagaaataatcttgttgtactaggtgatcatgtttattttgttgcatggcatcacatttagttgtaggagtagactaattaagttgtcagctgcacacattagtggttgtggcattatagagctaatctcccgtgaagcacaaaatgtggtggagtgcttaaagtagattgccagccaagtagtgcgtgcgtgcagattaggattagtctcaggattatgtggtgaattagtcttgcatgtattagttagttgcaggttagttggttggtgtgagcaacgacgtcggcgaggactcagtagtggagatgcggactgagtcaagcagttgcgatacttgtggagttgtgaccaagtaaaccggacgtgggcgtcgtgtgtagcttgagaatcggaacaaccagcttcgtgtgtgtatatgcgattagtagtatgcgagggttataaatagctgctcattgtaatcatttgtttaagtgtgaataaaattagcaagagaaaaggcactagttgcgtgcttgtgccacaaaatactcaatgtgctgtgttcttctttcttgtgctcttcacgtgtaagtgtgatttgtgtccactgtgttcgcgtgagttcccttgattcctaacaagtgcggcggcgtccggggagcacggcgggtgggaagggaggaagggggacggcatgtgatttagccagggctattttggctatggataatatttccaagt

SEQ ID NO: 13453 - DNA, 1279 bp, Oryza sativa
  ref <308>: DATABASE ACCESSION NUMBER: AK110801
  ref <309>: DATABASE ENTRY DATE: 2001-12-06
tcacaaataatatcctcagcacagcccagcaagtttggttacggaaactgggaggagcaaagcctgttgtcaatcaggggggtagtgggataattactgcaggacgagcaaaacgtacgagtgctcaaccagcccaacctggtgaaagatttaaacagctgaaagaagaggagagcaagagaaaaggcaacaaagcgcttgctgcaggagattcagatctttcagcctcaacatcagaggatgaagagtcggatgatgagactactgaagagggaggacctgaggaaagatacaattccagtagcaacaagaaacttccaaattactccggaaagaagggcaaaagatcaaagaggaagcgcatggttcagtaggtgtgacagaacctgattggatttcatttttgtcattactggttaattcagttggccagtacggttgtgtagttgatctcggacacaattttgatgatcagttgggaaggctaatcttcaggtgcaggacagacacgaaacattccagtggtacaggtgttttgctggcacacagcaagatgaaaatagttcagtacactacaataggtttgagaggataggcatggcttgagtatgtgctacaacataagagtagtacacaaattattcttgtgctactctgcaatgtgggtaccaaactcacgcaggaattgcataattcatgctctacatgcatttatttccctcttgtaacctaataacattctttgcggagtatattgcagaagttagaacaatccagtcgcctagaaaaggtgaggaaaaaaaaatacattgctgaacttacgtctactttaaatctttgagccaatttctgtgattctgagcaattatactaataaggccaaatcctaataattcgatgaagaggtgtttggtttggttggagacaatatatcattagctcaactgcagcttgtcgaatctgctggctacaattattgtgcctgagatgtctgtgccatactttgtttgcacttttcacatttgaggcaaactttgtgtgcacgattgatcaattccacaccgttgctttggcacgcattttttttaattttgacaacaggcaactttcattaatcattacccagcttggtaacaagcccaaaacgaacatagtctgatacagaaaggaacaaacaaaaactagaagtttggcacgcaattttcacgcagaatttgagttctgtgtcgcaaatccttcgtgtaacctacgtatatatgcagaaggaaaaaaaagttac

SEQ ID NO: 13454 - DNA, 1821 bp, Oryza sativa
  ref <308>: DATABASE ACCESSION NUMBER: AK110802
  ref <309>: DATABASE ENTRY DATE: 2001-12-06
atcatccgtcaaggctttctccttccccttcaaggcggcctcttcccctaccacctctcccttcacacacccttacctctctcttctcttcaagatggctggtggtgctgttgccgatgtcggctacaccccggctggccctgtggcccgccctgcgagcgtgaagcagtcgctccctgcgatcctcgtcgctgccgcctccgcctttggtggtgtgctgttcggctacgacaccggtaccatctccggtctcatcgtgatgaagaacttcaaggagacgttcggtcaattcgacgctggcaaaggagaatatgccctcaccaccaacgacgagtcgctcgtcgtgtcgatcctttcggctggtacctttgtgggtgccttggccggtgcgcccatctcggatatccttggtcgacgatggggtatgcaggtcgctctgcttgttttcaccgtgggtgtggtgatgcagatggccaccacggacctgggtgtctttatcggcggtcgtgtcgttgccggtctcggtgtgggtatcctgtcgaccattgtgcccatgtaccagtccgagactgctcctcgctggatccgtggtgccgttgtctccggttaccagtgggccatcaccatcggtctgctttgcgcctcgctcgccaacaacggcacgcagaaccgcagcgactcgggcgcgtggcgcatccccgtcggtatccagcttgcctttgccattcttctttgcggtttcttcctgattcttcctgaatcgcctcgttggctcgtcaagaagggcaaccacgagcaggcttccaagtcgctcgctcgcctcaactcgaccgatgtcgacgaccccatcgtccgctccgagctctcggtcatccagaccaacctggacatcgagcttactcactcgaccggttcctacctcgactgcttcaagaacaacgaccgaaagtacctccttcgcgcgatgacgggcatcttcatccaggccttccagcagctcaccggtatcaacttcatcttctactacggcaccaagttcttcaaatcggcgcttcccggcaccaaccccttcgtcttctcggtcatctccaacgtcgtcaacgtcgtcaccacggtcccgggcatgtacatgatggagcgcctcggccgccgtaacctgctcatctggggtgccgtctggatgtgcatctgcgagctgatcgtggccgtcgtcggtaccgccgtgcccgtccagaacctggctggaggcaagaccgccgtcgcctttgtctgcatctacattgccggtttcgcctcgacctggggccctgccgcttgggtcgtctgcggagagatcttccccctggccatccgtgccaaggccctgtcgctctgcaccgcctccaactggctctggaactttggtatcggctatgccaccccttacctcgtcgacgtcggacctggtaaggccggtctcggtcccaaggtgttcttcatctggaccggtacgtgtgcctgctgcgccgtcttcgcctacctgttcatctacgagacccgtctgctgtcgctcgaggaggtcgacgagatgtacgcccagaccaccgccatcaagtcgtccgccgccaacgccgagatccgcgctcgtcgctcggacctcgagggtgccgtcgcccccgtcaaggaggacgagctcgccacccacgacgagaagaagtactaaagtgcttctcccacgcacctgtcatgattccacgctggatctttggcgcacgcgcgcctctgatcgcatgatcttgtgatgctagcatgcctcatctacaaatcaaactagtcacggat

SEQ ID NO: 13455 - DNA, 803 bp, Oryza sativa
  ref <308>: DATABASE ACCESSION NUMBER: AK110803
  ref <309>: DATABASE ENTRY DATE: 2001-12-06
attaaaaaaagtatttaagcaaagcttcgagtgctagaagaaaaaaaaataaatcgatagaatgagaggattgatcattttggcaattgttatttcggctgttgtgtgccaaaagccaacaccatgcaccaccccaaaacaatgggaggccagatacttcgaatatgacaacaccaagaacgaggagacccgagcccgtatctcatacgacgctcaatatcaacgagaacgagtgattgaggagtacattttgggaaccgctgacaactactacgatatcctctacttgcactcgcaaaagatccaatacgtctatgacttgaaggctaagacctgcaccaaacaaaccatcgaccgaaaatggagagacttcggtattccacaaaacgccaccagcttgggagagtcgtacattggctcgagcgccattccaaacgctggcgttttgaccaccatctggaccgacaaattcactgatgataagggcaaccaatacaactacttgggagtctggacctatgaaggctgcttgccagttcaccttgtcatctcatcgcaatctggcggtgttgaccgacatgttaacttctttgacatcactcctggtattgagaacccgaatgttttcactccacgacctgagtgcttgaatctatagatcgtagagcgtttgtatagatattcttagataatagcttacttttttcatttcatagtctatgtagaaccattagacttaaagttttaaagtctagaatatattaattcatactttaaattttcaataaaagtttatatttttt

SEQ ID NO: 13456 - DNA, 1195 bp, Oryza sativa
  ref <308>: DATABASE ACCESSION NUMBER: AK110804
  ref <309>: DATABASE ENTRY DATE: 2001-12-06
atcagccatggctgttgcactcgcgctcttggctgccatgtcggcgctctcgtcgtgcacaagtccggccaccgcagagctcacacggcacgagcacccggtggccgccggcgcgccgctgcgcctcctcgtcgtcggcgactggggccggaagggcggctacaaccagacaagagttgcagaacagatggggaaggttgcggaggagacggagatcgacttcgtcgtgtcaaccggcgacaacttcttggagaacggcctcgccggcgtcgacgacatggcgttccatgactccttcatggatgtctacacggctcagagcttgcacaagccatggtaccttgttcttggaaaccatgactacaggggaaatgtgctagcacagattgacccagctctgaggaagatcgacagcaggttcatctgcatgagatccttcattgtcagtgcaggaattgtcgatttcttctttgtcgacacgaccccgtttcagctccagtactggactgatcctggagaagatcactatgactggaggggagtcgcgcctcgggatgcgtacatcgccaatctcctcgaggatgttgatgctgcaatgaagaaatcaactgcaacatggaagatagctgtaggacatcataccatgaggagtgtgagtgcccatggagacacccaggagctccttgagcttctccttcctgtcctcaaggaaaacggtgtcgatttctacatcaatgggcatgatcactgcctggagcacatcagcagcagaaacagtccaattcagtacttcactagtggaggcggatcaaaggcatggagaggcatttttcaacaaaacgaagacaagctccagttcttctatgatggacaagggttcctgtcacttgagctcagtgagaaccgagctcgattcgccttctacgacgttttcggtgaagctttgtaccactggagcttcagcaaagctaatctgcagaaggttcagtcctctgctagtgtaactgaagaatgagagaagctggagccttcagaatacattcccacacagctgagtagatgtctacctgcataattctacttgtacaattatgtcacattgtgctcatcaatactggatttgctatgaattagcaagtgtttgattctactagagaaagatcacagaatgaagcaggtgtttttgcacgaagcc

SEQ ID NO: 13457 - DNA, 1368 bp, Oryza sativa
  ref <308>: DATABASE ACCESSION NUMBER: AK110805
  ref <309>: DATABASE ENTRY DATE: 2001-12-06
tatgctttggaacacaagggggaccgagctttgacttcaactcaaggagagttggcacatgcacttcgattcttggcatctgtggtgtcacaaagctttatagcttttggtgatattcttgagttacataaaaaattccttgaactgtccggtggtattaatagggtgtttgaactcgaagagcttctacagacatctcaaagcaatgctgccatgccctctaatcctattattgcggcatcggaagaaattatttccttccatcatgtggatatcgtaacgccatctcaaaagctattggctacccagttatcttgtgatgtatctcaaggaaaaagccttcttgtgactggcccaaatggcagtggcaagagctccatttttagggtgctccgaggtttgtggcccatcgcttcagggaggcttaccatgccgtctgatggcatctttcatgttccgcaacgtccgtatacttgtctaggaaccttgagggatcagatcatatatcccctctctcatgaggaggcagagttgaaggttctttcattatacaaatcaggtgacaaggcaataacttctgggtcactggatgatcacctgaagacaattctagagaatgttcgattggtctatcttctagaaagagaagggtgggatgctactcctaactgggaagatattctatccttgggagaacagcaggggctaggcatggcttgtttgttcttccactgtccaaaatttggtatcctagacgagtgcaccaatgccacaagtgtcgatgttgaggagcatttgtacaagatagcaactagtatgggcataactgtcatcacctcgtcacaaaggcctgctctgatacccttccattcgttggagctgaaactcatcgatggtgaaggaaagtgggaactatgtacaatcaaccaataattgatgtggccaacttgaatttttgacgagttttcatcaagtgcctattcaccagtggctgcctttacaagccatgaagaaaataccaattcacattaggagacttgcatactttcacgcagcatatgcgcttatacgagattcttttttccttggttagaggtttgagatatagcaaaacaacatacaggagttgtagagtggaaaggtagatattgacttgtagcccctaagaagatagatagcgtagtacataatttgtccttccagcctaattgattggcttgtagcaattgtaacacggagcacgaagtgtgcccttgcaaatgttagctcttttatatagaaaaaatatcttttattttgttatttcggtgttatgttttttttgttccatgtcagttcagctatatactagtttgaagtttgaacttt

SEQ ID NO: 13458 - DNA, 1821 bp, Oryza sativa
  ref <308>: DATABASE ACCESSION NUMBER: AK110806
  ref <309>: DATABASE ENTRY DATE: 2001-12-06
tattacaagtgactttgccaggtcatggataaggtcatgcattgtgaaatagtagccaagacctccagcatgccgttgctgaaagaatgatcttgcaactagttcagagatgtatttatggcctaatgattccatccgatctgagtgtgttgcctgtagatatccatgggcaacccacatcctcacaatattttccttatcaaacatgtgtcctctgggaaacagtgcacaatagagaaaacatggttttatctcagctggtaagtgaacatagctcaccttcaatacatcaagaacccagttcttcccctcggtcaagttccaaatatcggaggtaaggatttcattccatgtttcctcgttggtttcagaagaaagtaggcctccaatcacccttatcgtcagaggaacaccgctgcatttctcaactatacctctaccaatggtctcaagagttccagagagcttgagagaatggcatccttgcctaatgcagtggcagaacaatgcccaacttgctgcaagattcaggccatccaaattaacttgtggcaacctgctcatgatctgtgcaacgttttgattccttgtggttgtcacaatacagcttcctctacctccatggtctagaggctgccgcaattcatcccactggagcaaatttataatccatatatcatcaaggacgatcaaaaatctctttcctgaaacaatatgctgtagcttattctgaagcgcttccagctcagtcagaccacaagcttctctggtaatagattcaataatggctttcgttgtccttgtcacatcataaacttctgatacccaagcccaagctcttatctgaaagtggtctttcacctgttcatcgttgtagatgagctttgctagtgtagttttccccatgcctcccattgccactatggagaacacctgtaagttgttgtcagtaccattgtcattattcagaaggctgtcaagtaacttatttttctctccatctcttccaaaggtccctgtctcactagctagagaactcgaagcacgcatattgctggtggtgcttactctgattctcccatcaccctctcgcagcgagaggctttcacgaaaaccgttaatggatttaagtctatttctgaccttgctgattttgtcaagcatatctgtatctagggattcttcatgatcatgcactggagaatttacagtatcaagtacctcaaacttccttttgagatcagcatgttcatgggtgttcgtctctgcttcaggctggactgtcttgtaggacaactcatcgatgatatcctccaaatcgtatgcgacttgcctgagctcatatagccacatattcacatgcagatcttctatctccctccgatccgcatcagctagcacagctcgaattctacaaagtatgaccttcatctcatcgaattcagatgcagtagctggtaattttttaggatcacaagaagagcaagatggtacttggactgaagtatatactttggccaaaaagccagcaagagtggacaggatcgaggacgccatggccgatgaaggatgctccggtgagccaaaatatgtacaaatattttgtgttctggaatcggtggtttggttggctgatgagtgatgagcaagtatgcaacctccgtttacaatacatgatacctgcttggggatacgtcagattgcaataaaactaggggtatatgtcactatcgctgctatatttttcttgaatgcttgtatagaaggagaagaggacaacagtctatatatctattatattatttgtgttataaataaagt

SEQ ID NO: 13459 - DNA, 1400 bp, Oryza sativa
  ref <308>: DATABASE ACCESSION NUMBER: AK110807
  ref <309>: DATABASE ENTRY DATE: 2001-12-06
cagatagacacttctggaaatgctcatgaaaacattggaagtgaacaaactctgcaacaagattgtgtcctgcaagaatccaatgatgtagctgatatgtgcaagcgtcccaaggtgaatgatcaggatggacattctcttattaatattccaattgctgttgctgaatatcctatgatgcatcaagtttgtgagcgtccagtaagtgtgagtgcatgtgatgaccctatctgttcatttgattcccaggattcacccacaactgttgcagtgtcagctggcaaacctaccagagaacaatgtggtgctgaatcaactgagttgagtactgtaaaacagttcctggacaatgggcttatcgctgagggaggcagcatgaacttcataagtaatcatgagcacttagaatctgacaatgcaacttcagtgtgcaaagatgaacaattgcaagttcaacaagatcagttggccatggtactttgtaataatcccaacacagaattggttgcaggagaattacatgggggggcagcatcatcaacccttgaaaatgaggatagctgtggtaatacgtcttactgttctgacactgtattaaagaacagcgaacctgatacagatgatcaacctgaaacatgtgatcgtagtgttgttcttgtaacaccaaagtcgagctgtgaccagatgatttctagcagtgacagaagttgcagtctgaccttggactgccctgtctccactgatgctgccttttcaagcgaaaagctgtctatggctcatgatttgatgggcagagagttgcaggcagtccataattcaaaggctgaggttgtggccagtttgactgatgtcaagggtgctaagctcaatagcattcataccacacagttacctcatgaatctccaagcagtgatttcatcatttcagaaggtgcgcaatctgcttcaacaactgcaattcccagaaaaaatggaacatccatgcacacagagtcaaattcaattgatattttacttggagttctagccgatgaatctaaggtctcttctggaaaggatgaggttggcaaagcttccttgacattgatgacactggctggcaatgaccaatctgcagatgatgtaactcaggatgaagttgcagagatcactgatccgtcgcatggcttctgctcatcagacatagtgtctagaagcattggaagttcaaacagaacaaatatcatatgttatgccagacgcaaacacaaaagaaagagcggatctgagttcaatattaatagtccccaaagcttggggagctttgtccgctctccatgtgaaagcttgagaccaaggactagacctgcgattgttgaagacatgacaaacgaaacaaaaactgcagaagcttcaactgc

SEQ ID NO: 13460 - DNA, 1818 bp, Oryza sativa
  ref <308>: DATABASE ACCESSION NUMBER: AK110808
  ref <309>: DATABASE ENTRY DATE: 2001-12-06
gtcaccgctgcagctaatcatcaagtcggagggtaaagtggccctctcggcttccagcagcgcgtctcgatcgaaccaataccacccaccacgctctctctcccgaaatcacgacaactctctctttcgtctggaacctcgagtcaaccgcatcccgactcaccatgtttaaacgttcgttcgccgcgacgaaggaccgcgcaggcaaggcgaggaaggtgtcgaagcgttcattccgcgacgatgccaagcagaggatgcgcgaagcgttgaacgaggccacaacgcccgagacgtctccgtcgatcggaggcgcttcacccaagctgaacagcgccatcgttacgatcgttgtcggcaaggaccagcgtctgttcgccgcccacgaggacgtgctgtctcgatcgccatggttcgccaatgcatgtcgagaccagttcttctcggcaccgggccaacgccgcatcagcctaccagacgaagagccagagatcttcagtgccgtcctcgagtatctctacaagagcgactattctccacgtctcctgcacgacaggaagcgcaacacatggtcgctcgaggacctgcaagatccgataatgactccccgttcggaacgcccggacgatccaaagaagttcgtcggcttcaatgagtccgcaacaatttatcaccatggcgtgggtgactacatccttcgggacacagtcatctactgctctgcgcttcgcctcggcctaccagacctccagcgtcttgctcttcgcaagcaaggccttcagactggtattgacgtggcgactatcctgcgcagcgcacgattcgcatatgcgaacacaccagccagtgactcccgccttagagcccactacctagcactcatcatccgcagtcgcaagaccttcaaacgcagcggcacgatgcagatggagatggagaagggtgacacgcagttcttcttcgatttgttcgtggccatgtgcaatcacattgatgatatctcggaggagatcggccacgtccactcacccaatatcaccaagtgattgcaacatgcccaacccacagaaccaatgaaaatcaacaaaaacacaatggatcttgctgacttgtacttgtcgactatttgcattcccgttcagactgccaggaggacttcgtatgctgccacgagctagcgacaagccctcacatctgttttccggcgtttgggcttctcgctactctcggctgtatgattttcttcacagactgcaccggatcgagcttgcaacaagcatcaaagctcttcctgtttccctgttcttgcgcggcgaacatcattcggagaagaacacgatctcttgcgtcaaatccccctccgttcaaccgctgccacgtcttcaagggaagctctctgatgacagactgctacccgacgaccgcccagcaacttcaccagtcttagccgcggctgccttcgcgcaacacatttcctatggacctgtcatgtacgaaaatctgcttctatctcagactgccgaacccccaaccttaccgctgcctctatgcttcaaagctggacgaagcgatggttgttgtgtgcgctggtaactttgtcgcgtttcgctcactggtttgggagagcgcgatggagctgcaatttgtgccacaatacttttctgaccctttggccttgacgttttggggagatactggaggcgcttgcggaggaatgcaagtgcggatggatgatgtgtctaggtggttgtaggtagttgtgcctctctgtctacctttcggtgggcgatgaggtggaaataaagaccgtcggcctat

SEQ ID NO: 13461 - DNA, 1781 bp, Oryza sativa
  ref <308>: DATABASE ACCESSION NUMBER: AK110809
  ref <309>: DATABASE ENTRY DATE: 2001-12-06
gatttagggccagaggatgctcaaagcttactcagatatctcaagaacacacaaagcgaggatcctgcttttttctatgctgtgcagcttaacagtaatggacacacagccaatattttctgggctgatgctaaaactaggatggcttactaccattttggtgatgttgttaggcttggtacactgtgcagaaacagcaagtatatacctattgccatattttcaggcgtcaatcatcatttgcagcctgttgtctttggctgtgcactaattgttgatgattctgaagcatcgtttgcatggttatttgaaaaatggcttgaagcaatgcctgtgggccctcctgtctcgttggtattagagtttaaccaagaaatggctgccgcagctaccaaaatactacctgatactcattgtacgttctgtgagaagcatattttgggcactgtcagggaagagctaggaagtttgtatccagaaccagaactagaccatttcattactgatctgagaaagtgcattgactgctgcagattagaagaatcatttgaatcatgttgggattctgtcatcagaaaatatggcttcagaaataatgaactattacagtctctatatgaaattcgcagacaatgggcccctgcatacacaaggaaggtattctgtgccagaaatctactgccacaaagctgtcagaatcttgaaaatgttatcgagaagcacttctcatccaagacccagttatgggtggccgttcagcaacttggacaagctgtttgtaatttttatgaaaaggaaactcaggcagattatctgacaacatttcaaatggcaacagttaggactgcatcacctcttgaaaagcaagcaagttcaatattcaccaggtcaatatttgaaaaatttcaggatcagtttgccgagtcctttgggtaccatgcagatagacttgaggatgacatgctacacaagtatcgtgtcacagtaagtgaaggggatgaggaggcacatactgtttctttcaatccagaaaaaaagacagtgggttgtagttgctgcctgtttgagagctgcggcatcttgtgtcggcatgctcttcgtgttttcattattgaaggtgtgcgtgctctgccaaaggcttatatcttgaaacgctggacaaagcatgcaaaaagtattgccactgtagatgattacattgatctaagaggatgtcgtgacgatccttcaaccacaatgtacaatgatctccattgtgacgcaatcaaatgtgcaaaagagggttcggcatcctctgagctctatagtgttgctaaagaggcattgcacaaagctcttgatgaggtcgtgactttaaggaaaatcagagaccagcaaaatctacaaagctgtaaaaggccgatcaagaagtctgctaagggaaaagattcagatcattctactatcataagctcaacaaggtcagcatccaaaaattctctcttggagattgatgatattacatgaccatatatcatgagtaataaggaaataatgcaattttacctgttctgacttgtacaatagtagctcattcgatctcataagtaccacttaaattgtagctcattcgatctgataactaccacttagattgtagctgattttagttgtttcttttttctgcttgtagtgcatatatgactgtaaggggtctagtgaacccttgaggcaccaatattagaaaaaggttgtggatttttttttataactgtactgtaaaatggagctcttttttgtat

SEQ ID NO: 13462 - DNA, 1366 bp, Oryza sativa
  ref <308>: DATABASE ACCESSION NUMBER: AK110810
  ref <309>: DATABASE ENTRY DATE: 2001-12-06
taggtgattactactccattcttgcttagctcaagagtgtcgcaacagcttgtggacacaaacatgccaaccatgccggccgtcgtgtccgccgccggcgccgccgcgccgtgctccaacgtcgtcgaggacctcgtcggcttcctccgcgtcctcagcgacggcaccatcctccggtcgccggggccggtgttctgcccttccaccttccccgacgagcacccctccgtggaatggaaggaggccgtctacgacaagcccaagaacctccatgtccgcatgtacaagccgtcgccggcgagcggcggcgtcggcgccggcggtggcgggaagctaccggtgctcgtctacttccacggcggcgggttctgcctcggctcgtgcacgtgggccaacgtccactccttctgcctccgcctcgccgcggacgccggcgccgtcgtgctctccgccgggtaccgcctcgcccccgagcaccgcctccccgccgcggtcgacgacgcggcgggcttcctccactggctccgggaacgcgccgtcgacggcgacggcgacggcgacggatggtggctcgccgaggccgccgacttcggcctcgtgttcgtcaccggggactcggccggcggcaccatagcgcaccacctcgccgtgcgcgccggctcggcggcggcggcggcgcccgacgacccggtcgcgatccgaggctacgtcctgctaatgccgttcttcggcggcgtcagccggacgccgtcggaggcggggtgcccggcggaggtgttcctcaacctggacctgttcgaccggttctggcggctgtcgctgccgccgggcgccacgagggaccacccgatggcgaacccgttcggcccggacagccccgccatggacggcgtcgagctccccccggtcctcgtcgtcgccggcggcctcgacatgctgcgcgaccgcgccgtcgactacgccgagcggctgtccgccatgggcaagccggtggagctcgccgagttcgccggcgagcaccacgggttcttcacgctcggccccggctccgacgccgccggcgagctgatcgccgccgtggcgcgcttcgtcgacgtggcagcgccgccaccgaagtagggtagtgcatcgagattcgtgcagtccatgttttttttttcactctccttttggtcgagggcgacatgtgcaggagagacgggtgtttgtcacgtgtcaatgatgtgatgtgatgtgtgttgtcatgagacatcagcggagtaaaatgaaccggatgtccaagtgtgatttgcatgcagtatctttgcttttagccagtcctgtaaaatatcggtgatttatatctttgccaaaaaaaattttgggt

SEQ ID NO: 13463 - DNA, 1471 bp, Oryza sativa
  ref <308>: DATABASE ACCESSION NUMBER: AK110811
  ref <309>: DATABASE ENTRY DATE: 2001-12-06
tggcctggactcaaaccatcccaatgaacagagtttcaaaagagaaagaagtatagcccttcaggctgtcacagcacttgtgtctaagagctccacctccatcacaccatgactgcaaggttggcactgctcgccagccttcttctcctgctccaactggtgccgccatcctctgccgtggtgttggagctccacggtaacgtctaccctattggccatttcttcatcaccatgaacatcggcgacccggcaaaatcctacttcctggacatcgacaccggcagcaccctcacctggctgcagtgcgacgccccctgcacgaattgcaacattgtaccacacgtgctgtacaagccaaccccaaagaagctggtgacctgtgccgactcactctgcactgacctgtacactgatctgggcaagcccaagagatgtggatcccagaagcaatgtgactatgtgattcagtacgtcgacagttcatccatgggcgtgctcgtcatcgacaggttctccctctcagcaagcaacggcaccaatcctactaccatagccttcggctgtgggtacgaccaggggaagaagaatcgcaatgtgcccataccggtagacagcatcctcgggctcagtagaggcaaggttacgctgctctcgcagctcaagtcccagggggtgatcaccaaacatgtcttgggccattgcatcagctcaaaaggtgggggtttcctcttctttggggatgcccaggtgccaacttcaggtgtaacctggacccccatgaacagagaacataagtactactctcctgggcatggaaccttgcacttcgattcaaatagcaaggcgataagcgcggcaccaatggcagtgatatttgacagtggtgccacatacacctactttgctgcgcagccataccaagcgactctctcagtggtgaaatccactctcaacagcgaatgtaagtttcttaccgaggtgacagaaaaagatcgggctcttactgtatgctggaaagggaaggataaaatcgtaactatcgatgaagtcaagaagtgcttcagatcactgtctctggaattcgccgatggcgataagaaggccactttggagatcccacctgagcactacctcattatctctcaagagggccatgtgtgcttgggcatccttgatggatcgaaggagcatctgtcgttagctggaacaaacttaattggaggaattacaatgctggatcagatggtcatatatgacagcgagagatcgctgctcggatgggtcaattatcagtgcgatagaattccccgttctgagtctgcgatcacttcgcgtctctgaatgaactgaaaaccagaatacagggaggatagatggaaacagaaagggacattcatatcttagaaaagaaatgaatgataaggcatgtatgcttctgcccataaataatgaaatgaagtaatattttagc

SEQ ID NO: 13464 - DNA, 2252 bp, Oryza sativa
  ref <308>: DATABASE ACCESSION NUMBER: AK110812
  ref <309>: DATABASE ENTRY DATE: 2001-12-06
attggtcatcacagggttgacaaaaattatggcactcttggtagcatagtgagaaagtcaactagtctacgtgtactggatttgtcttacatttgcatgagtaatgtcagtcaggcttcagatgttctctgcaagttgtcacatcttcgatatcttgatctctcttttactggtatcaaagatctcccggaggcatttggtaatctataccatctccaggtacttgatctgcggggttgtataattgagaagctgccaaagaacatgaacaatttgatcaatctaaggcatttatatgctgattcacaaaccaccgcactgatctatgctgtaggccagctgacaaaacttcaggagttacaggaattcagagttaggttggaggatggttacaagataaatgagttaagggacatgaaagacctgaggaaattgtacattacaaatcttgagaaagtctcaagttggcaagaggctacagatgcaaagctggtggagaaaaagtcccttgactatctgcaattgaaatgggtgtaccaggtacctgaaagtaggtctacctctcagttgaacaaggatattctcgatggcctacaccctcacttccagttgaaaaggttgaaaattctgaactatatgggaattgattttccttactgggtgcagcgtctcacagacctcgttgctgttaacataattaactgccgatggttgagtgttctgccaccattgggagagctcccacgtctcaagaaactatctctttttggtctatcctctataactcatattaatgatcaagtatacggaaccaatgatgtgatctttccatatttagaggagctgcacttctcagaattgtttagctgggagcaatggtccgaggcagaatataaactgcttattcctcacctacggaaacttggtataaatgcctgcagcaaattaagtctattgccgattgaaactttgagttcatcagtcaaagagcttcatctttcttcatgcacatcatatatcagtatgctgcccgcttatttgaaaagactgacgtccctcaccaaattgagcatacaggactgctctgccacattactaatcccgtgccattccttgacattactggagcacttgcagctggaaagctgtttcgatgtacattttgaagggggcatgcagtactttaccaaactgaagaagctagaagtacatcgctgctttgatgtcactcagaacatatatgaacaaacatcactagtggagagatattctctgatggggggtcttcagtccctcatccatcttgttatcgacgacagattcatgtattacagatactaccatatgctgaacactctttgttcaattcgaactatgaagttttgtgcctttgatctttccgagttcaccacggaagacgaggaatggctccagcaactacagtccctacaggagatccagtttgcttcatgtcgcaatctcttacgccttccttctaacctgaataatatgtgtaacctgaagaaggtcgttctgaacgattgctgcaagctccagtcactgccgctgaatggcttgccagataacctaaaagaattccatgtctcaggaggttctgaagtactggagcaacaatgtcagaaaacagatggggatgaatggcagaaaatttctcatgtgccatacgttcggataaatggcagaactatccagatgatttcacatgttcttggaagttagcaacacatgtataacaaggttactctaggttaagttatgtgtaggcattttgtgggatatcattgttggtacttcatcggtaggaattaggagtttctgaaaacttcaaaggtatggtttcaaaaaaccaaattcacattaactgctccggcttctgtcacatatctggatatacaagccactagattgtcagcgatctgctcaaagagggaaatgaaccaatcaaaaactaggaagtagccattttttaaaaaaaatgaagagtgctctgattattttctgatgttttcacgtttcaacagaagccaatttttcatcgttttccagtgcagactaagattggtattcggagcgatgcagaattgcagataccatcagacgcactatgactgtatactaatatactgtactactgaattcgcacatcacactgagcgttgtgtgttgtctggtagattgctagtctctggtatgagatgcacactacatatatagttacgagttatgacttc

SEQ ID NO: 13465 - DNA, 1457 bp, Oryza sativa
  ref <308>: DATABASE ACCESSION NUMBER: AK110813
  ref <309>: DATABASE ENTRY DATE: 2001-12-06
ctcatttccacccccacttccgcagcttcgccttcccgcctcactctcccaaaaaacccaccgccatggcgccgcatttcgtactgggccccggcgtaccgcagcagctgctcatccagtcggcggccgccggcgacctccccgccttcaagaagtttgctcgtatgctggacggcgggaaggggcggctcaaggaggcggtggaggccgtgaagaaccgcggcgctggggctctgcaccaagccgcccgctacgggaggaccgcgatgtgcgcgtacatggtcgaggagctccaggtggacatcgacgccgccgatgagttaggacattgcgagatagtaaaggtcttactggtgaaaggtgctaatgttgattcatcttctgaccatgggacaccactgcatgttgctgcctcaaaaagtcaggatggttgtatgaagattttgttggaccaccatgcagattgtaacaagacattctctacagtttgtacacctctcattgctgcgatgatgggtcgctcactgaaatgttgtaagcttttgattgaggctggtgctgatgttaagggtgttggtacttttacccccttaatagttgctgcaactgaaggcttaactgatttctataagtgcttactggagggtggtgctgatcctgatgtgcctgataaatttgggtttctgcccatagaaattgctgcacgtcagaacaggaggaaagatgtggagatcctacttccagtaacttctcgtattccatctgtgcatgattggagtgttgatgggatgattacttatgtaaacaaacaggtggaggttgaccctttcttcaaaataagaccagctgatctgaagttggaaggaaatagggcatacatgagaaaagactatcttactgccgcaaaactctacaatatggcgatcgagcacgaccctgaagatatgaccttgtactctaacacgagcgtttgctggcttaagatgggtaaaggaatgaatgctttggaaactgcccaagtttgcaggatattgcgccctgattggcccaagggctgctacagggaagggaccgctcacatgttcatgaaggactatgaaaaggcctgcaatgcatttcttgatggtttcaaactggacccagcgaatattgagattgaaaatgcgctacgggaggctttgaaatcattgaaggcgtctcgtgctgcttgaattgcctatctgttcgagagagaactaacttttgtacatgagtaacacttgtgtttgcaaagccgtcagccatgccactagttgctgaaggttttcaccaggttcatgtattctgtgactcccatcagaccaccagctagtatcaattacaccgtataattatatcttagtactttttttacttgcggagaatagtattatcgctgattatgaacaaactattatcactgattatgatacaaatct

SEQ ID NO: 13466 - DNA, 1583 bp, Oryza sativa
  ref <308>: DATABASE ACCESSION NUMBER: AK110814
  ref <309>: DATABASE ENTRY DATE: 2001-12-06
cttcaacctctccaccggcgccctcgcccgcgccaagctcctgctcttccaggaccacatggtgctcgactccgtcgacggcctcctcctgctgcagcgggaccacgacaccgccatccgcctcctccaccccttcaccggcgacatcgccgacctcccgcccctcgagaccctccggccgcagatgggtaacaccacaaactccgttctgtggaattacaacgaagagaagcacaggataggtttcctcagagatgtctgcgcttctgtcagtgttaacgacactggcagcatcactgtcatgctggccttccacctgttcaaccgggtagctttcgccgcctccggcgacctgcaatggactctgtccaaatgttactttgggcgcccctgctggaggacattgtcataccaagggaagctgtttatggtgaaggctaagcacgatataaccggcaattcagacattctccagattgatccacccaatgatcaggatgctgaaggctctcctttgccagagaaggagctggcaccgaagctggttgcaacaattcctaaggacaagctgttcggcccttgttttctggcagaatgcgactcggagatactgataattggccatgacagtagacccacatcattagactcacagaccatgctgctgccttttgcctacaacgacattggaaattacactcacacttcagtgtataggatttctgaccttacctcaggaagatttagtccggtggcgagcattggtgaccatgccttgttcattggtccacggactatctgtgtctcctctaaggcacttcctaccattttctgtggtgatactggtggttatatatttcacactcctccaacggaattgttctttacgcaataccacctcagcagtcgtacctggtcacctctgattgatggaagcattggaaattcacctccacctaggccgtatagcctcattcaccatatcttaacatgttgctatcgtaaatattggaataaggggctgattttttacagggagacaacaccttcgtggcgtgttaagcgaaattgccgagttggtggctaaaagacttgcaatacggagtttggaacacaaatcctttgtggcgtgtaaagcgaaattgccgagatggagcctgaaggactattgtggagttaaagtatacgatcctattttgtcgctgtcaaaaaccccaaaaccctcaactatatatctgaactttctgaatccatttcgggattacgctacgatggagaaatctttaaattggagctcaggcagtgtttggcaaatatctaagggaaatgatttcccacccctctttaaatcttaaccattcattctccctcatccatttaatcctaacccttcattcaattcctaatcccaatcccacctctcattccccattatccaaacacaccctcaattcatgaatatgaggagaagtcggcttgaacatcgtgaagatggagaatttgtaatctctttggtgaagatggagaatgtgtaatttcttatctaagagatgatataacacgtcagcaagaatttgctgcat

SEQ ID NO: 13467 - DNA, 1232 bp, Oryza sativa
  ref <308>: DATABASE ACCESSION NUMBER: AK110815
  ref <309>: DATABASE ENTRY DATE: 2001-12-06
atctcctctctttttttttgttgtcgcatccatcttttgcacaacctttcacaatggctcaaggtgaagttaaccagggcgagaagtccgtcctcggcatgcccggcttcgttgtcgacttcctgatgggtggtgtttccgccgctgtctccaagaccgctgctgcccccattgagcgtatcaagctcctgatccagaaccaggacgagatgctcaaggctgtcgtctttcccacaagtacaacggtctcgccgactgcttcaagcgtactgccgctgatgagggtatcgtctctctgtggcgtggtaacaccgccaacgtcatccgttacttccctacccaggccctgaacttcgctttccgcgacacctacaagtccatgttcgcctacaagaaggagcgtgatggatacgccaagtggatgatgggtaacctggcctccggtggtgctgccggtgccacttccctgcttttcgtctactccctggactacgcccgtacccgtctggccaacgacgctaagtccaccaagggtggcggtgaccgtcagttcaacggtctcgttgacgtctaccgcaagaccctcgcctccgacggtattgccggtctctaccgtggtttcggtccctccgtcgtcggtatcgtcgtctaccgtggtctgtacttcggtatgtacgactctatcaagcccgttctcctggtcggtcctcttgagggctctttcctcgcttccttcctgctcggctggactgttaccactgctgctggtgttgcttcctaccctctggacactatccgtcgtcgtatgatgatgacctccggtgaggccgtcaagtactcctcctccatggatgctgcccgccagatcatcgccaaggagggtaccaagtccctgttcaagggtgccggtgccaacatcctccgtggtgttgccggtgctggtgtcctgtccatctacgatcaggtccagctgatcctcttcggcaagaagttcaaatagataactcgcccctagcgaattatctaacacctgtagctatactggggatggggatgataccctgcccggtatgaccgggtgatggggaagcagaggatgtgggaagtgcaaaagatagatgcgtcaagaaatgggttcggggggatcttgaagcatagaatggtgtgattcttccctttttgtacccgatgtactttactgcctgcaaactctttttcttttcttttattat

SEQ ID NO: 13468 - DNA, 1481 bp, Oryza sativa
  ref <308>: DATABASE ACCESSION NUMBER: AK110816
  ref <309>: DATABASE ENTRY DATE: 2001-12-06
ctagccacaggccacaacctatagctcctccaatcccgagctagaagacacagaagcccatcttgccatccatagtcatcttctcaaacaatcaaacccataagagctgatcaaatggggtagaaattttggagtaaatctgctggggaggggacgagagtgaggcggaagggttctgctcaggcgacagaggacggcatacgggcgccgcgatttcagctgcagctctactgactccgtcgcgctcaagtgccatcacacaaagtatgggaaatcgtactgaagataatagcaaggaaggtggctctcgtgaaaagtatatcacttggagtgatgatgccactcagttcatgcttgagtggtatatatcgctccgcaaggacaaacctaccaccttcaagtggaggaaacaacaccaccagcagtgtgctactgctttgaatgacaagcttggacttagagtcaacagaagccaagtccatcggcatttcaggctatgcaaggaaaaatggagttggatctgtgcagccttaggaaaaagtggctatggttttgatgcaacatcatgcaaatttaacattgacccatcggagaaggaagcaaacaaacttggtacaactaaatacaactacttgactaagcctatcaaattcttccatctctttgaagaattatttgtgggctgttcaaaagctgatggctctcttgcgatggaccagtttactgctaatactagtagtgatagtgatggcagtggtagcatcaaggagttggaagaatatacatttccactgcaagatggtggcaatgattccgacacaatacctcgctatagtccgacaactgatgccacttcttcagggcagaagcgtaagtttgtgaaatcacctaccaagaagattgtgaagcataaaacgagccgccacaaagcagaggaggatgagctgatagctagtatccttaggcttgctaactctcttgcatctgcacagtctgttgcatctgttgaagtgccctctgtaggagatccaaatgcaagtatttggaagcgcatagaagacctcaccatcccagcaagtgacaaaattgaacttgcaatctttctcaccaagccagaacaagaatgctttcgttcttatctgcgagttgcaagtgatgaaagtttccaagcttgggttatagattactttgggcgcaaatgtgctaccgatggtggctatgtcactctgtgaatcatttgccaggtggtgacattttggttagggagcaatgcattttgataaacccatgttactgttatatacttatgatatatgctgccactaccatataggggatggcagtgtgaagtataaagtaggggttagtgcaaacccatgatgtaatatatggcactactatgtgggtgattacgaagtactactatgtagggatatgtgcaaaccaaaatgctgtaatgcatgatgtgttattgctgcact

SEQ ID NO: 13469 - DNA, 2008 bp, Oryza sativa
  ref <308>: DATABASE ACCESSION NUMBER: AK110817
  ref <309>: DATABASE ENTRY DATE: 2001-12-06
taaagtgtatcactggtttgtctggtgtaatggatggtttggtggttcatgggtatcttgtgaagtacggttttggggcacagtgtgcagtttgcaatgcactgatatcattctatgcaaaatccaacaggattgaagacgcactcatggtgtttgatgaaatgcctcaacgtgacatcatttcttggaattctataattggtggatgtgcttccaatggtctatatgataaagctgttgagttgtttgtaagaatgtggttagaaggacaggagctggactctactacactgctaagtgttatgccggcttgtgtacagtcgcactattcatttataggaggagtggttcatgggtattctgtgagaactggattgattagtgagacatctcttggtaatgctcttcttgatatgtattcaaattgctcagattggcgtagcactaataagatattcaggaatatggaacagaaaaatgtggtgtcatggacagcaatgatcacaagttataccagggctgggcattttgacaaagtggctgggttatttcaggaaatgggattagaaggtatcagaccagatgtcttcgcaatcaccagtgctcttgatgcatttgctggcaacgaatcactgaaacatgggaaatctgtccatggatatgccatcagaaatggaattgaggaagttcttccagttgctaatgcactgatggaaatgtatgtgaaatgtgggtatatggaagaggcaagatttattttcgatcatgtgacaaaaaaggatacaatctcatggaatacactaataggaggttactccaggagcaatcttgccaatgaagccttcaccttattcaatgaaatgctactccaactccgacctaatgcggtaaccatggcctgcatccttccagctgcagcaagcctttcatcgctggagcgaggcagggagatgcatgcctacgcagtacggagagggtacttggaagataattttgtagccaatgcactcgtcgacatgtatgttaaatgtggtgcattactgctagcacgccgtttgtttgacatgttaaccaacaagaaccttatctcatggaccatcatgatagctggatatggcatgcatggtcgcggtagagatgccattgccctctttgagcagatgaagggaagtggcattcagcctgatgccggttctttcagtgccattctgtatgcttgtagccattcaggcctaagagatgagggatggagattcttcaatgcaatgcggaatgagcacagaatagagcctaaactgaagcactacgcctgcatggtcgatctactatgccacactgggaatctgaaggaagcttatgagttcatagagacaatgccgatcgaaccggattcgagcatctgggtctcattgcttcgtggatgtcgaattcacaggaatgtcaagcttgcagagaaggtagcagagatggtctttgagctggaacctgagaacacagggtactatgttcttcttgccaacatctatgctgaagctgagagatgggaggctgtcaggaagctcaagaacaaggttggtggccgtgggctccgtgagaacactggctgcagctggattgaagtgagaggaaaggcccatatcttcttcgcggaaaaccgaaatcatccacaaggaatgaggattgcagagttcctggatgatgttgccaggaggatgcaggaagaaggccatgatcctaagaaaaaatatgctctgatgggcgctgacgatgctgttcatgatgaggcgctctgtgggcatagttcaaagctcgccgtggcattcggtgttctgaatctgtcacaagggcggccaatccgtgtgaccaagaattcaagagtttgcagccattgccatgaggctgccaagttcatctccaaggtgtgtggtagagagataattttgagggattcaaatagatttcaccattttgaagaaggtaggtgttcttgcagaggttattggtgagc

SEQ ID NO: 13470 - DNA, 1750 bp, Oryza sativa
  ref <308>: DATABASE ACCESSION NUMBER: AK110818
  ref <309>: DATABASE ENTRY DATE: 2001-12-06
ccaataaccaaaggttacttgtctacgactttgtgcctaataacacccttcattatcatcttcacggacaggggaggcctgttctagattggtcggctagggttaaaattgctgcaggtgctgctcgtggaatagcgtatctacatgaagattgccatccaaggataatccaccgagacatcaagtcctcaaacattttgttggataataacttcgaggcacatgtggctgattttggtcttgcgaggttggctttggacgctgtaactcatgtaactacccgtgtaatggggacatttgggtacatggctccagagtatgcatcaagtgggaaattgactgagagatctgatgtgttctcttttggtgttgttctcttagagcttatcactggtagataacctgttgatgcatcaaggccattgggtgatgagagccttgttgagtgggctagaccattgcttactcaagctattgagacaggtaatttggaagagttggtcgaccccaggcttgagaggaacttcaatgaagctgaaatgttccgtatgattgaagctgcagcagcctgtgttcgatactccgcatcaaggaggcccagaatgagccaggtggtgcgagctcttgatagcttagccgatattgatcttacaaatggcgttcagccagggcagagcgagcttttcaatgtggcgaacacagcagaggttaggatgttccagcggatggtgctgggcaaccacgatgacagctccgacatgagccaatacggttggagcagcagtcgccagtagaggtactctactcatagcctcaagctccaggatcctgtagcgtgcagtagttgctttctttgctcagtattgactagtctattcttcttcactcactaatccgggttgaattgggtatggagtgtccagtgtaatccttactatgttagggctaagcaaagcgaactgaattgattgtttgattgttattcgcagaagaatagggtggcgaattgagtgctcccgtaacgtgtagatcgatcatgtatgtacacatgaactcattcttcttgtttgacaaaattatggtgttggtcaaagcacaaaagcacacacgagatcatttaagcttctagatgttctctttctctgaatttttgatgttgacgccaagaggaggacgacgacgttagggcatcagcaatgtatccttcccaagtagtaaataaggtgggaccaaccaaaagcaggtaattgttattcaagatctcacaatgtataggaggtaataagataggtcccacatgtatataaaaatctaaaagtatacggtagtatggatagagaagaaagattcaatacatagctgagagaatcaatgattttttattccttactagcaggtcatagcgctattgcttggtatttgttgcttactacctccacaatgtttactacctggtattaaggctgtatttattgcttactacctagtttttgagcacattatggatgccctatggtctcatgtggcgtctcaactgaaccacccacaagaaacgaaacgtcgtcgtggtggtggctaacaagttacatcattttagaatggaataatgctgcctgtaagtgtaacaattaacgccgaatgtcttgcctgaccaaaaacaagtgttcctgatttccaggccatcaaatttgactatcacacgagttctttttaggtgatcacatcacaaagaaagagccattggtgaacc

SEQ ID NO: 13471 - DNA, 1697 bp, Oryza sativa
  ref <308>: DATABASE ACCESSION NUMBER: AK110819
  ref <309>: DATABASE ENTRY DATE: 2001-12-06
ttgcaaaggttggaattcagcatctattttcatttatgaatctgatgaggaaatccagtgccttcttgactggttaagagactatgacccaagggagaaggaactgaaagactctatcttgcagtggcaaagacatttctgtcatcagagcagttctcctctcgttgatcctccaatttctggtccaaagggtgaacagcttatggagcttccaaataccaaggctgcagtaattttggaacaaaagtatggtctgcaattggaccaggacacaagtgatctaccgaaaaagcgaggaaagaagataaagttaagttctgaagatagaacacatcgctgcgactgtttggaacctgtatggccttctcgataccattgtttaacatgtcatgagacttatctcatatctacagagtttgaggggcataatgatggaaaatgcagtaaaatccaccagtctcctgatgaaagcagagaaaatgatgagccaaaagtgaaggttaccaaatctgatacgaaggaaaaagattcccttgaatgtagctctgtcattgaaccgtccagtgacagaaaattgatgcaatgcccatatgactttgaagaaatttgcagaaagttcatcacaaatgattcgaacaaggagacagtaaagcagattggacttaatgggtccaatggagttccatcatttgtgccttcacctgcattttttcttgaacctgcaattgtacaaagtcaaaacagaaaagatgatgaactcaaggattggacctcctctttagaggaatgcaatgcaatgtctgctcaaaagctagttcaagaggtttccaaatctggtcaaagttgtcctggcaatgtgggtgatgagaaggtgcaaaaatctaaaaagcccacccctgataatacttctggtgaggaagcacattctacaacaggcaagccaacacgattgctagctgttaatggggggttggttccagagtcatccttgaggcctcttataggacgaaactctcacatacttaagcagcaaaagataaacttgcttgacattgaagcagccttgcctgaggaggcactgagagcctcaaagtgtcagcaaataagaaggcgttcatggcgtgcatttgtcaaagatgcagaatcaatatcccagatggttttggcggctaacttgttggagggcatgataaaagctgagttcttgaagaacgattggtggtactggtcttccttcacagcagctatgaagacatcaactgtatcctcactcgcgctcagggtctacactctagatgattgtatcatctacagtaaggatcaagttccaagcgttgagccagctgacaatacaaggtctggaaacagaggtgggaggaggaggagagagcttgaatccttagcatcataatgtaggactctccgttgtagactccaaagttagaagcctctcgggcagcaaaagaatattatcctgctgtcaagtagatcgatgatagatgatacaaagtcttctgttatgtcgtcgcttaaggagggtagcgtggtagacatcgttccggtacccctgcaagagttcaaccctgactgtgttttcttttacctcgtatctaccagcctaccgtttttcgacttctgttgtggttttaggttccagaaggaagaattggtactccatgtgcgagcattcgatcttg

SEQ ID NO: 13472 - DNA, 1464 bp, Oryza sativa
  ref <308>: DATABASE ACCESSION NUMBER: AK110820
  ref <309>: DATABASE ENTRY DATE: 2001-12-06
aagacccaagtcactctctccgctccagtctccactctccaacggtcacattctctcttctcctcccttccccgaattcccaactcgatccacgtcgctctcgctcgccacagacacgggcgcgcggcgatcggagaagcctcggacattcgagatctcccgctgaccctgtgggcgggcggtggggggtagccagccatggtggaggagggggcgaggcggcgggtggtggtggaggtctgcaacgcgcggaacctcatgcccaaggacgggcaggggacggcgagcgcctacgccgtcgtcgacttcgacggccagcgccgccgcacggccaccaggccgcgggatctcaacccgcagtggggggagcgcctcgagttcctcgtccacgaccccgacgccatgcgcgccgagacgctcgagctcaacctctacaacgacaagaaggccatcgccgccaccgggggaggcggccgccgcgggggcacgttcctcggcaaggtcaaggtggccggcgcctccttctccaaggccggggacgaggtgctcgtctattacccgctcgagaagcggagcgttttctcgcagatcaagggggagatcgggctcaagatttggttcgtcgatgagccgccgccgccgccgccacccgccgcccctgcggatggaaaggccgatgctgccgcggagaagaaggaggctgccgagggtggcaaggaggagaaggagaaggcgccagccgctgccgctgcctctgcggccgaggagaagaaaccggaggcgccggccgaggagaagaaagcagaggaggccaagaaagaagagaagaaatcagctgaggccgacaagaaggaagagaaggatgacaagaagaagtcgccggagaaggggaagaaggacggcgagaagcccaaagaggaaggcaaggctaaggacgagaccaagaaggaggttgcgccggtgccgccttcgccgtcgaaggcgccgccaccctcaccgtcgaagatggagctcgcggccgccggagtcgccggggacctcgagattcgtccccagagcgccgccgagcggagcatggcggcctctgcgggcaacgcgtcgtacgatctggtggaccgcgtgccttacctgttcgtccggcttctcaaggccaagcaccacggcggcggagacaagcagccgctgtacgctcagctgtccatcggcacgcacgccgtgaagacgcgcgcggcgacggccgctggcgagtgggatcaggtgttcgccttccacaaggatagcctcacggccacctcactagaggtcaccgtccatgaagaagccaagaagccggcggcggagggagaagccactccgccggacaccaacctcgggtacgtctcgttcgatcttcacgaggtcccaaagcggtcgcctccggacagcgcgctggcgccgcagtggtacaccctcgagggccacgcc

SEQ ID NO: 13473 - DNA, 1730 bp, Oryza sativa
  ref <308>: DATABASE ACCESSION NUMBER: AK110821
  ref <309>: DATABASE ENTRY DATE: 2001-12-06
ctcgttcaacgggttcaatggcaccctccccgccgcgctctccaacctcacccagctcgtcgcgctcaacctctccaacaactccctctccggccgcgtcccggacctcggcctcccggcgctccagttcttgaatctgtccaacaaccatctcgacggccccgtgcccacctcgttgctgaggttcaacgacaccgcgttcgccgggaacaacgtgacgcggccggcgtcggcgtcgccagcggggacgccgccctcggggtctcctgcggcggccggcgcgccggcgaagaggcgggtgcggctcagccaggcggccatcctcgccattgtcgtcggcgggtgcgtcgcggtgtccgcggtcatcgccgtcttcctgattgcgttctgcaacaggagcggcggcggcggcgacgaggaggtgagccgcgtcgtgtccggcaagagcggggagaagaaggggagggagtcgccggagtccaaggcggtgataggcaaggccggggacgggaaccggatcgtgttcttcgagggcccggcattggcgttcgatttggaggacctgctccgcgcttccgccgaggttcttgggaagggcgcgttcggcacggcgtaccgggcggtgctggaggacgccaccacggtggtggtgaagaggctcaaggaggtgagcgccgggcgccgcgacttcgagcagcagatggagctcgtcggccggattcggcatgccaatgtggcggagctccgggcatactactactccaaggacgagaagctgcttgtctacgatttctatagccggggaagcgtatccaacatgcttcacggaaagagaggggaggacagaacacctttgaactgggaaaccagggtaaggatagccctgggagcagcaagagggattgcacacattcacactgagaacaatgggaaatttgttcacggcaacatcaaggcctcaaatgtcttcctgaacaaccagcaatatggctgtgtctccgacctcggcttggcatcgctgatgaacccaatcaccgcaaggtcccgttctctgggatattgtgcaccagaggtcacagattcgaggaaagcatcgcaatgttcagatgtctacagctttggtgtcttcatacttgagctcctgaccgggagatcacctgttcagatcactggtgggggcaattaggttgttcaccttgtcagatgggtgcaatctgttgtccgggaggagtggactgccgaggtgtttgacgtcgagctgatgaggtaccccaacatcgaggaggagatggtggagatgctccagatcgccatggcatgcgtctcaaggaccccagaacggcggcctaagatgtcggacgtggtgaggatgcttgaagatgtgcggaggaccgataccgggacgcggacctcgacggaggcatccactccggtggtggatgttcagaacaaggcagagagctcatctgccgctcactgaacctcactcgttggaagctgccccctagtttatcatgttgtttgtcttaccaggtagggaactaggggaatgaatcctgtgttttgacagtactgcttgcctgcatgatgatgattcttttgtcgtaagagattacatgttacaaaattgtaacgccttgtggacagagcttgcttattcagcatttgctcactgctgatctgtaagcaaagaacagcacctgctctctgaattattcttggatagtatt

SEQ ID NO: 13474 - DNA, 2129 bp, Oryza sativa
  ref <308>: DATABASE ACCESSION NUMBER: AK110822
  ref <309>: DATABASE ENTRY DATE: 2001-12-06
cttcaccgtcgcttaccactctcctctagccgccggcgcctccgccgcggccgtggccgccgtcggtcacttccattggcgaccacccctcgcgcatggtttcttccgcctctaccgccgctctcctccccctcccccgaacactctgacgacgcccaaagcgccacccgactcacctcctccgctgcggcggcaggtggagcgagactacgacgtggacggcaccgacggcggtggtccggcgcgacgcgcgacgtgctcctcccacagcatgctcctcgatgagctcgcgtgcgcgggcgggggatgcgcacgaggcgttcgacgaaatgctcgcgtcggacaacttcatggtcatggtcaagctgcacgtacgggtggatgttgcagttcgacctcgcctcgcctcgcctgcaagctcatcctggagatcgggggggggggggagcacgggttggaggccggcattgccatgaactcaatgctcatcacggggtttgccggctgtggcgcatgcagtgaaggtcgccgaggcatggggcatcctcagactgaatgctgaataagtgatgtacacttgcacgtccagtgttaaatgcatattgccgccatggccgtgacggatcgggctagttgtcctcccaatgttatcacctacaactctgttcagagcaggtttcaacagtagtagaaccagcggttggaagcacagtatgctcgcctacaatacatataccttaatggcctctgcaagaaaggtagtgcaaaggaagtacttgatcagttggatgttatgctaagtgaaaggattggatccctcggcttttacatcgagtgttcttccgaattgccttctccatgactgagggtttcatatgccttgtgcttgttagcgagggtctgcaactctgcatacaacactctgatgagcgggctgttagatatgggcaaatggctgttctgaagctcttgaccaagtacatgatcgacaaaagtatcgtccaatcgcaaagacattcaacatttttattcatagtctttggctctttgcattagggagaaagtcttccataaccaagagcctggtccatggtcaaggttttactaatgttgtggcatacattatcctcattgattggctttgctgccttagaaaacttaatgagttgaagtacctaatttcgtgcacgacagcgcaggatattgctccagaatccagatgaagtcactcagatacattattggttgatgagattatgcagagatggaaaatttgacaaggatacttatatttttatgaaatcacttaaagtggatttccaatggatcttctggcttgtttagagtggtgaataatatagagattcaccgtgtatttgaaggaaatggtgtactctctgattgccatatgttcgactttataatcaagtcattctatagggctggtttttgtcacaaacgagacatttttaaacttaaccttatactggatacattgccaaacaaataacctaatacttgtggattgccgaaggtagcaggttcatgattgcagatttgctggcaagattacaacttatgtctagatcgcagtcagtcaacgttgtgaaagattgaccactaatatgcataaaggttgccacttttccagctgctcatgtctttctatggaaagaagcatcgagtcccaaaaccaaagtgatgtgtcaatatcaagcaagccatgggaattcagctcctcgcgccgcctcccagttgcccgcattgataatcatgggcctatggtcaggttggatttggactccctgttggttgtccataccaagcatggaccgccaatagacttatgcctgctataatattttgtcccctataacaaattagcagctgccgaaatttacagcataatttcaaagtcgatttgctacgtcccacatgatgcctgcacttcatcttttggatcttcggcgactgccttgttgttgtctatccaaatacttatacagtatgcaacttcttcaaaaagtgcagccaaggtaatttttctgtccctaacaccacaatattgctactcttgtttgctggacaccctaccaaacggaaagtcagattatatctggtgatatcgg

SEQ ID NO: 13475 - DNA, 1580 bp, Oryza sativa
  ref <308>: DATABASE ACCESSION NUMBER: AK110823
  ref <309>: DATABASE ENTRY DATE: 2001-12-06
tggtccgagagccgcatcgtccagccctgcgtcgacgccatcgtcgagaagatcctcacgcccccctccaaggttacgtggtcgtacacgtacacgaggcctgggtacgcaaagaaggcccaccagtcagtgcccaaggactggtggacggaggacgtgtcggagctggacatcgacgtcttccgctccctcctctccaccgtctgcgccgcccgcctcctcccgccgccgctcatcggcgaggccctccacgtctacgcctgcaagcacctgcctgacccgctcaaccacgccgccgccgccgccaccgccaacggccagagctctgagctggagacggcggcggcgaagcagcgtcgcgtgctggagaccatcgtcaccatgatccccggcgacgccggcgcggtcaccggccgcttcctgctccggctgctccgcgtggcgagctacgtcggcgcgtcgccgtcgacgcgcgcgcagctggtccggcaggccggggcgcagctcgacgaggcgagggcggtggacctgctcgtcccgatgccgtcgtcgtcggacccgccggcgtacgacgtcggcgccgcggaggccgtgctcgagcacttcctggcgctgttccagcggccggcgccgcccgacgagcggcggcggatgagcgccgccatggagaaggtggccaggacgttcgacgagtacctccgcgccgtcgcgctccacgccgacttccccgtcggcaagttcgtcgacctcgccgagtgcttgccggacatcgcccgcaacgaccacgacggcctctaccacgccattgacacctatctcaaggagcacccggagctgagcaaggcggacaagaagcggctatgccggatgatcgactgccggaagctgtcgccggacgtgcgggcgcaggcgatctccaacgaccggatgccgctgcgcaccatcgtgcagctgctcttcgtcgagcaggagagggccatgggcggcggcggcgcaagcggcagcaacagcgccgtcgcgcccgacgccatcgcaatgctcgccgcaagaaaggagaaggaggacgagccgccggcgccggccgctgaccacaagtcggacgtgcaccggccacgcggcgaccacggcgaacgcgcccgggcggacggcgcggcgatgacgaggtcgctctcggcgtccaccaccaagacggccggcgctgccgcgccgaggacggcggagagtagggggagcaggatgaggaacaagtaaatcaatggtggtcgcccatgaatggatgacattcttgtttcttctgatcccttgcttgaaatttgttgatacttgtgattcttgatttttttttcttttggtattctttttctattttcttcttcattttgatttcagtgcatcccatttttggtgggagatgtgagggccatattgttgaaagagggaagagaatgaggggtagattttgtaattaaatggatgggggataataagaggctataatcatacgacctagcatagctcaccaatcaagaaaaatgtccatcttcatcattcattccacatatgtatctactgttaccttc

SEQ ID NO: 13476 - DNA, 1531 bp, Oryza sativa
  ref <308>: DATABASE ACCESSION NUMBER: AK110824
  ref <309>: DATABASE ENTRY DATE: 2001-12-06
tcggacgcgcggcgccgccgacgcggcgcgcgccaggtgtttgctccgtggtctcgcccagcaagccaggtgttgctgctgttgacgtgccggccgcgacgattcctgacgcggcggcgaccggcgtcggcgtcgccgagcgcatttcggtgtcgtcgctgctggaggttgtggcggacgacttgctcaagcttaacaacaacctcaaatcgcttgttggtgcagaaaatccagttttagtttctgcggctgaacaaatatttggtgccggtggaaaaagattaagaccggcactagtttttctggtatccagagcaactgctgaattggctggtttattggaactaactacagaacaccaacgtttggcagagatcatagagatgatccacactgcaagtttaatacatgacgacgtcatagatgatagtgggatgcgaagagggaaggaaactattcatcagctatatggaacacgggtggctgtacttgctggtgattttatgtttgcacaatcttcttggtttcttgcaaaccttgaaaatattgaagttataaagctcatcagtcaggtaatcaaggattttgccagtggtgaaataaaacaagcatcaacactttttgactgtgacatcacccttgatgattacctgctcaagagctactacaagactgcttctctgattgcagcaagcacaaggtcagctgccatatttagtggtgtcagcactgctatatgtgaacaaatgtatgaatacggaaggaatctcggtctctccttccaggtagtcgatgacattcttgacttcacccaatcagctgaacaacttgggaaacctgcaggaagtgacctggcaaagggtaatctaacagccccggtcattttcgctttgcaagatgaaccacagctcagggagatcattgattccgagttcagtgaaacaaattccttggctactgcaatagaactagttcatagaagtggtggaataaagagggctcatgagcttgcaagagagaagggtgaaatagctatccaaagtctgcagtgtcttccaaggagtgagttcagaagcactcttgagaacatggtgaaatataatctagaaaggattgattaggcagctttacttatttcacaatcggatacagaacctcctttgtgagcttacagtagctccccaaaaaggcaaactttttaaggttttgggccctgtttggatcagtggattgccaatggaaaataagggaaaatgacattattttcttacaaaatgatcctgtggaattctcacgaaacagaccatttggttatgtgagatgaatgatgcaggacaaaatcatcggaaagcagcgaccttgccaggttcctcccaccttgcgcctacatgtatcctagcattttatttttgcacgtcttgtaaataaaagaagtatattgacattagcattctttagttttgcaattttcacatgcatatagaaaacacgttgtgtgtacttgtatgggcacctcacctgacaggctctc

SEQ ID NO: 13477 - DNA, 2380 bp, Oryza sativa
  ref <308>: DATABASE ACCESSION NUMBER: AK110825
  ref <309>: DATABASE ENTRY DATE: 2001-12-06
acaacaccaaaccataagaacatactcctcgaaatcaaacatggactcgagatcaccttttcttcctactctgcacttgattcttgtactggtagtggtactccccattttcgccgatgcgtccagcagactctacattgtttacatgggggagaagaagcatgacgatccatctgtggtcaccgcatcgcaccatgatgctcttacttcggtttttgggagtaaggatgaagccatgaaatctatagtctacagctacaagcacggattctctggattcgctgcaatgctcaccgaatcccaagctgaagaacttgcaaaattacctggagttgtcagtgtaaaacctaacacttatcataaagcacacacgacccggagctgggattttcttggacttaattactatgaacaatcaaatctcctgaagaaggcaaactatggtgaagatgtcattgttggcgtcatcgattcagggatatggcctacatcacgaagctttgatgtaacggctatggccctgtgccagcacgatggaaggggaagtgccagactggcgcggagttcaacaccacgagttgcaaccggaagatcatcggtgcgcgctggtactccggcgacatcccggacgactttctcaaaggtgagtacatgtcaccaagggatcttagcggacacggcacgcacactgcctcgacgatcgtcggcgggcaggtgtggaacgtgagccaccggcagagcggcctggccgcgggcatggcccgcggaggtgcgccgcgggcgaggctggcggtctacaaggcttgctggggtgacagcaactccacgtgtggcgacgcgtccgtcctcgcggccatcgacgacgccataaacgacggcgtggacgtgctgtcgctgtcgctgggagggtacggtgaggtcgccgggacgctgcacgccgtggcgagggggatcaccgtggtgttcgccggcgggaacgagggccccgtgccacagtccgtgtcgaacgccgtgccgtgggtcatcacggtggccgctagcaccatcgatcgctcgtttccaaccgtgatatcgctcgggaacaaagagaagcttgtgggacaatctcttaactacaattcaacgatgaacagcagcaactttcatatgctcgtcgatgggaaaagatgcgacgagttgtcactggcatcggtcaacatcaccggcaagatcgtcctgtgctcggcgccgttggaggcagcgaactcgtcaccaaacaacgcgttcatcgccacactagccgccgtcgtgaagagacgcgcgaagggtctcatctacgcgcagtacagcgccaacgtcttggatggcttggaagacttctgccacctgtatctgccggctggtcgactacgaaatcgcaagcagaatcgcctcctacgcgaaaagcacaaggaaatctgtcgtgaagatatctcgggtggtgagcgtggttgggaatggggtactcgcaccgaggatcgccatgttctcgtcgagaggcccgagcaatgagtttcctgccatcctcaagcctgacatatctgcacctggagtcagcatcctggctgctgtgggcgactcatacaaattcatgtctgggacgtccatggcatgcccgcatgtctcggcggtggcggcgctgctcaagtcagttcacccggactggtcgccggccatgatcaagtctgccattgtcaccacagcatcggtgaccgatcgttttggcatgccaatccaagctgagggagcacctaggaagatcgccgaccccttcgactttggtggtggccagatcgacccagacaagtccattgaccctgggcttgtctatgacattgacccgaaagaatacactaagtttttcaactgcaccctcactcttggccctaaggatgactgtgagtcctatgtgggtcagctctatcagctcaaccttccgtccatcgtcgtaccagaccttaaggactctgttacggtttggcgcactgtaaccaacgtcggaggggaagaaggaacttataaggcatcgattgaggctccagctggtgtgaggatatctgttgaaccttcaattatcacattcaccaaaggtggtagtagaaatgcaacattcaaggtgacattcacagcaaggcagagagtacagtctggctacacgtttggaagcttgacatggctagatggtgtcacacactcggtgaggattccaatagtggttcgcaccataatccaagactttgtttcagatacttcgtaaatagtttcggaaaaaaataaatacgattgtgcaatattactttatactattattttcattcaaatgtaacgggaccaatgtgagccaataccatttatacaaaat

SEQ ID NO: 13478 - DNA, 1481 bp, Oryza sativa
  ref <308>: DATABASE ACCESSION NUMBER: AK110826
  ref <309>: DATABASE ENTRY DATE: 2001-12-06
aataaactgaatacagattgatacactcacctagaacacaaaacacaaaaaaaaagggaagagtaccaaaactctcaaagatttgtgcaagcaagcacgacatatttgaaacaatctcagacaatccaaatgtgcatccaggtagtagtatctctcagaaacaagaaaaaggaaacaaaacaaatgtcttcagagttcagagttcagaaaacgctgaactcgcggaagcagaagcgcagaggcgtcagttttcatcaggcgccgccggagctgaaacatcagcagcagcttcttccttgctcttctcctcctcatcatcatcagctgatgatggtggtgatggtgttgatgatgccgcggcggcaacctgaaccgagtcaggatccacgccttctcctcttccgctacctcctgcgcgccgccgccgccgccttcttgggcagcttctggttccgctgctgctgcttcagcttcttctccggttgtctcttgctcggacgccacaggcgagggatcaaccgcagtgatttgctccactgctgctgctgtttcctctgcttcttctcccgctgcgtgttgctcgggcgacacaggcgagggctcaaccacagtgacttgctcctcttctgcttctgctgctgcagctgtttcctcttcttcttcttcttcttcttcttcttctccgacggctgcgccttgctcgggcgccgcaggcgaggtctcaaccgccatgacttgctcctcttctgctgctgctgctgctgtttccttttcttcttcttcttctccggctgcgacttgctcggacgtcgcaggcgagggctcaaccacctcggctttctcctcttctgctgctgctgctgctattccagattcagcagcggcagccggagattcagtttccacggccttggttgcctctgcacttggagctggagccgcctctgatccctcgctctctgcatcctgcgagaagaagaagaagaaatctcaagctcaagctcaagctcaagcttgctactgacgcacaacgaaacgggcagaaaccgagctgttgcttacctccttgagcaagtcgctgagagacctccggcgaccggcttcagccggctcgccctccacggctgccaccaccaccgccgccgccgccgccgccggagcctcgtcgacgttcttctccttctcctcagcggccggcggcgacggcgccacggcggcgtcctccttgacgagcggcgcctcgccgcccttcaccttgaggtcaccgggcttcgtcgcgcacgcccccattgctcccaagaaccaaccaccacaccaccagctagctcaccggagacgagggagacgactagactaatgacaactccgacgatgcgaggacgagatgataatcacggagctttaggcgtgcatatgtactccagcgaatgtgctttagctggtgctatcatcgagaaatgcagagttttttttctcctttt

SEQ ID NO: 13479 - DNA, 1470 bp, Oryza sativa
  ref <308>: DATABASE ACCESSION NUMBER: AK110827
  ref <309>: DATABASE ENTRY DATE: 2001-12-06
cattccccaaatcctccgcggcggcggcgcctcctcctcccatgccttccgagcactagcgcggcagatccgatccgagccccctccgccctatctccgatggactccaaggctgccggctcgtcggagatcgagcgggcgtggcacctcctcaccgtggtcatccgcctcggccggcccgccgccgcctccgacgtcgcgcgcttcgcgaccgccgacgacgtcgagcggctgtgccgcatccccgggtcgccgcttcggctctccgggggcgtcgtggcggcttccgagacggccttcgtggcgttcctgaggtacgtggggttggatgttccgccgccgagggtgagcccgagggcgcccgatgatgtgatgaggtggttgcggaggcgggtgcccgttacgtacgagcgcaagcggaaggcgtcagatgcggggcgcttcgtcgcgaggaagcgtctcctggcggctcccgatgcagatttgccggaacacgagctgcggcagtcgcagcaactgatcgtgcaaagctgtgctccagttgctactggagaggtacatcaggaggctacccaagaattgcaagacaggcttcctagtctcaacatatttactgctcagcgttcctttgaagtttcaattggctctaatgtattttcagacattgaaattagcatgccttctcttccgtccaagattgaccagtttataggaggcaatgatggcagtgttcttgtgagcatggcttctgcactagtgccaaaggaggtgacagacatgtctggctgtatcaatatcttccatgctacagttgacagagagagtactaggattggtgaacctgaaggatcagcttcactttgttgttctagagtagaggaccgtgaggaactagaaaaggagtccaccctccttactatggcagttggcttagctgtgggaaagaaaaatgggattgagcaggatctgaatcttagacctagcagtcctagaaattgtagcacaaaggcaacagatgatatggaaacgttcgatgtgatttcgaaagaagctgaagctctacaatattgcagcccaaatgctcaatacccacagaagatcctaacttgtggtcaggacagtgatgctctagtagttaatgctcatgtggcaattcatgagaataagatagaagacattacattccagcctcctgaaggcaccaaaacagaagctattgtacatgaaatggtccatgaaactatgggaagtttgtgtcaaccttcttcaaacacaaaggttgaacatgcagtgttgccactacaagccccaacttatggttgcattagcaatgagaacttgaacattgctgctgaaaacagagcaagcacacatcaaaatcatgtggagccatcaacacagaacgaagtggctgtcagattatctaagaaagagcaagatagaaagattatgaagcaaagggataagggc

SEQ ID NO: 13480 - DNA, 1662 bp, Oryza sativa
  ref <308>: DATABASE ACCESSION NUMBER: AK110828
  ref <309>: DATABASE ENTRY DATE: 2001-12-06
aaggagagggccaagctcgccaggctgcggcagaagggccgccccggcgagctcgacccgccggacgccgtgctggacgggatgtcccaggacgagctgcagcagctgctcgcgtccatcgacgccacgctgctggctacggccaagaggcgggaggcgctcgggttgctgcccggcgccgacgacgacgcggacggcggcggccggcggcgcgacgccgacgtcgccggaaccaactccgtcggcgtacacggctaccagcaccaggaggtgcatgcaccggcgacatgtgaccccttccatccgtacaacgccggcgtgacgctgatgcagccagggtacaacaacgcccagtacatgggcggccatggcgccgtggacatgagcggctaccagctgcagatgcagatgccgggcaatggcagcaacaaccacagccggctcgcgtggggaggcttccagccatgcaacgccaccttcgtccagcccgtgtacggcaacctccaatgctggtacaacaatgtcgtcgacggcaacggcgagccctgcgacgccatcgtgccatcagctggtgacccctacatggacatcgccggcaacgacgtctacggcaaccagatgcagccggcaccggcggccaacggcgggtggcacgatccgggcacgtggggctacgacggcggcgagccgtgcaaagccatcgtgccatcatttggtgacccctacatgggcattggcgtctacggcaaccaaatgcagccggcgccggcgccggcggccaacggctgctggcacaatccggccggcacatggggcaacgacggcgagccgtgcaacgccatcgtgccatcagctggtcacccctacatcgacatcgagtgcgacatcgacggcaactacatcgacacaaccgtgttcgattaccaaaccaccagcaccagcgacaacttcatggacgcgcccgtccagttcatcgccacgggcagtgacgagagcatcgtcacgaacgtggccggctgcgacgagacggagttctccattgacgatctcctccagtgctccgacgcctcccagcattcttccggcctcgaggagctgcattatctcagtgatctggccgatggcttcgactttggatgcaacttcgacgtgctattggactgagtgatctgcagtaaggtctagagtagccgtcgcaatacggtgaaacccggcaattttggacgctggatggccgccggattcaactgatgttgccaccgccgccgccaagttcccgagcaattttcctggccaacaggcgagggacatggggctatctatctataggtttgatgcaaggaaaagaccttgttgttttggaaacccggcagttcagctcggagaagacctagcagttctgtcagaccggcagctctgcttggagaagatccagcaattttgtagctctgcttcgatgacccgataatattgtaggttagattggattgatccagcagttttagtagtctggagaagatccggcaattttgtaaactctgcttggttgatccatcagatatgtagccacctggcaattttgtacctctgccttgatgtaatcctggcaattttgtaatgtacaaaataccacatgctaattttattgttaatttaactcgt

SEQ ID NO: 13481 - DNA, 1499 bp, Oryza sativa
  ref <308>: DATABASE ACCESSION NUMBER: AK110829
  ref <309>: DATABASE ENTRY DATE: 2001-12-06
aaagggaagggtagagagaggaaatcccacagctccgaatctccgatccatggatgcggcgatggaggacgcggcggcccaatccgagagggaatgggacggcggcggcggcggcggcggcgccgacgcggtgctgggcctcgccggcgccggcgcctcgttgtcgctgtgctaccacgaggcgtttggtcctcacgatgagctcatcctcctcgaggccgccgacgacctcctccccgatctcctacaaggccgggtgactgtgaggggacgccctgaagaagaagctgttctctgcacaccctctgcaacatatgccatgaagtttgtgggcaactccaattctgtatttctgatacctcctggtgaatcagctgctccaaccttaagacccaatggcgccgatggtgatgataatgttgccagtgccactgatgctgtagcttctatcatcaaagtggcatcaggtaacattgaattggtccggacagctccacggcttgataaacttcggaaacttctcaatgagagaccctatgtgcttgatgaagatcttggcagtgatttgcaacaaaaggggctctacacatggcaggacctttgtgaacttgttcaggccagtgacggtgagctgacagaacaactgagttccatatcagctgttgagattgatgggttctggaggatggtcgatgacagttctgcgaacacgattctggacatgatccttcacaattccgttttgcatgactggtcactaaattcaatgcctgaaaatgatgtgctagatgtcatggaatctgatggttttatgcgcaagattgtaacccattgcctcaacagatttggaacaaaggttgacaaggaagcaagaggttgctggagccttgatgagaggagggtgtgcttgcagtttgctcggagagcgcttggtgcagggaagatgaagcttgagaacttcatgggtaaatgggagagaagcattccttcaggaatgcgcgctgatcttcagatgcttgaaggggaagtgctgtgtgaaaagcttggcgcggagacctgggtgcatgctttcagtgttgctgatctgccattggcaccagctgataggtttgctgcactattccaagagcggccaaagtgggaatggaaagacctgcagccttacatcagggatctgcgtgtacctggtgtctcttctgaaggactgcttatcaagtacaccagaaaaacgcaaccaagcgcagatgcagagcctatttttactgcaagataatcaatcctgcgtgctaaaagccatgtttcgatgctgggcccttcctggtggtgatgctactgaatatctgaaacatggttttgatctgaatattgttttttttttgtggggattgatctgaatattgttgacaccccaagatttgctgtggtttagttttaaggcatgctcggtggcactacatatcttgttacatacagattgtcatactgatcgtcttgcagac

SEQ ID NO: 13482 - DNA, 1499 bp, Oryza sativa
  ref <308>: DATABASE ACCESSION NUMBER: AK110830
  ref <309>: DATABASE ENTRY DATE: 2001-12-06
tcttcccagcaattcaccgccgtgtcctccctttcccctcgctgacccttctgcgccattttccagtgaaccaactttgcgagcgacctgattctcatccgaaacatgtgaagatttcatcaagaccgtgtccatcatagcatgatgatgatgatgcgcattcgccattgaatcgccaccatctacagacgccaccttctccaccacacccggaacagcagaatcatctttgctgccagcgagaggagcagcggttgcctcatccaacagacgaacaccaccatcacaaccgcggccgcgggcgactggagcagcagcgtcccttccgcaacctgggggaaactggcgaatagcggagaccgccctccgcttgggcggcggcggcggcggcggcgaacgcgcggcccgctcctccaatcctctcttggtccccaactcgccgccatgtctcttctcctctctcgccaccacctggccagcatcccgctcgacgccgcgcgtggccaaaccaccggcgacggccaccgcatttctcgccggcaccgcgtccgctgttctcaccggcgccaccaccgcgccctcgccttccgctccaccatgagtcgttcccttctccccgcgcccccgcactctactggtcccctcgcctcgccaacccgcagcgacgtcgggacgacgacgacgaggaggaggagagcgagccgggcgagcgtcgccgccccactccgcccatccgcttcgccgcggctgccaccgcgcgccgctgctcaacatctcccagcgatccagccctgcaatcaccaccaccaccaagcacaaaaccgaaccaaattagccgttacacatccacacgccaacacggcgagcccaagcagagaacaaacagaggcgcggcgcggcgcggccggcggaccggccgaagcgtacgccctcacctcctcctcgtccaggcaccggcggccacggcggcgaggccgaggcggcgagaagagagcgcgcggcgagcaagcagctggggtttctgggcaacgccccacttttctccccttctcgtgattgatacggcgaggccacgtggcggccgtacgcgaggccagccgcagccgcaccggaaggcttgactcgcttgactcgggtccgagcccggcgacaggcgacagctggttcggctcggtggcggtgcacgcgcacgcagctcgaacggaggctgggtcgcagcgcggcgcgggtggcgtgagccaacggtttcttgcaaccgcgttgttgacgcatgagtaatttttaagaaccccgctatgcatccgatgttctttgtcacatcataataattattaagaccggaccggtcattaaaccagcgatgctctcaattcaatgatttattggttcaactggttaaagtgttgaaccactggtttgaagcggttcaatctaatgtaaatatattgtttatcccttcaaaacacaaggtatatcgtaatctagtggttggttggttt

SEQ ID NO: 13483 - DNA, 1489 bp, Oryza sativa
  ref <308>: DATABASE ACCESSION NUMBER: AK110831
  ref <309>: DATABASE ENTRY DATE: 2001-12-06
gctcagcttcagctctgtgactgcgacgcgaacccatggccgccatggacgagcctcctcagctattcctctgcccgatctccatggagctcatggaggatccggtgacggtgtccaccggcgtgacgtacgaccgccggagcatcgaggagtggctcttcgtctacggccggaccacctgcccggccaccatgcagcctctctccaacttcgacctcactcccaaccacactctcaagcgcgtcatctcgtcgtggctcgatcgcggctcgtcgtcgtcgtcgtcttcgtcgccgtcgacgtcgacgctgtcgagcccgatccacgagctggcgacgccgctgtcgcgcgcgctggagcaggagcggttgctggctgcgctggccgagctggaggagacgccgttcaaggtgaccaagctgaagagcatgagggcccgcatggcgggcgacgtggcaatgcagggggagttcgtcgcctcgggcggggtgcgcgtggtggggcgcgtgatggcgcaggcgctggcggagagcggcggcgacttctcggcgttcgccgcgtgcgaggaggctgccgcggtgctcgccgcgctcccgctctcggacgaggcgtcggtgcgggtcgtccttgcgccggagtgcatcaggcccgtcatggcgctgctccagcgcggcggcgccgaggcgaggctgcacgccatggacatcctcaccaagatctccagctccggatcaggcggcgactggaccgccggcgtcgacatcgacgacgtgatcaagtccctcctcgagctcctctccgacgaggcctccacgaggctcagctcgcgcgcgctcgacgtgctcctcgacgtcgtggagcgggcgcggggcgcccgcgccaaggccgtcgaggtcggcgccgtgcacgtcctcgtcgagctcctcgccgacgccgacgaccgccgcgtcaccgagcgggtactgctgctgctgaagcggctgtgcaagtgccccgaggggcggctcgccttcgcggagcacgacctgtcggtggcggccgtggcgaggacgatgctgcgcgtgtcggagctgtccacgcagctcgccgtcaaggtgctgtggctcgtgtccgtggtggcgccgtcggagaaggtcctcgaggacatgatgctgaccggcgccgtcgcgaagctcctggggctgctccacgtcgagagctcgccgtcgacgaagcagaagacggtgaggatggttaggatccacggggtagtctggaggcagtacgcgtgcttccctaccgacttcagggactacctcaggctgctcgattgattctttctcccctctctttctgattaccgtggctaagctgtaacaacaaagcagatggaaattgtgtttttttttctggtccctcgaaaaaaagaatgtgtattttttacagaaaaaaatcggaaatgtgttttctcatcacgtacaaaaaaaagggaacgtaatgcatttcaagt

SEQ ID NO: 13484 - DNA, 1383 bp, Oryza sativa
  ref <308>: DATABASE ACCESSION NUMBER: AK110832
  ref <309>: DATABASE ENTRY DATE: 2001-12-06
atgcacagcacagcccaagcgaaccagcagtccagtccagcacgggcgcacgctcaaggacacccagtgtacgacgagagatggcctctgctcgccgctggctctgcctgatactcgccgccgcggcggcggcggcggcgtcgggtgctccagctccggaggacgacccgggcatgccgatggcggcgcggcaccggtgctggatggcgagggtggggcgcacgtacgcggacgccgcggagaaggcgcgccgcttcgaggtgttccgcgccaacgcggagcggatcgacgccgccaaccgcgccggtgacctcacctacaccctggggctcaccccgttcgccgacctcaccgccgacgagttccgcgccaggcacctcatgcccgacgctgacgtcgacgagccggcgaccgcgagggtgttgttcgagcaggaggagaaggcggcgaagcagcatctccctccctcacgcccgcctgcggtgtggggcagcaaggactggcgtgacctcggcgccgtcacccctgtccaggatcaaggcaagaataattgcaacagctgctgggcgttcgcggtggtggcggcgacggaggggctgatcaagatcgagaccggcaacgtgacgccgttgtcggcgcagcaggtgctggactgcaccggcggggacaacacgtgcaagggaggccacatccacgaggccctgcgctacatcgccaccgccagcgccggcggccggctgagcacggacaagagctaccggccgtacgacggggagaagggcacctgcgccgccggctccggctccgcgtcgtcctcgtccgtcgccgtcgtcatccgcggcgtgcagaaggtgacgccgcacgacaaggacgcgctgcgcgccgccgtggagaggcagcccgtggcggcggacatggactcgagcgacccagagttcaggggattcaagggaggacgcgtgtaccgcggcagcgctggctgcgggaagaagcggaaccacgcggtggcggtggtcgggtacgggacggcgagcgacggcacgccgtactggctgctcaagaactcgtgggccaccgactggggggagaacggctacatgcgcatcgccgtcgacgccgactgcggcgtctccagccgccccgcctaccccttcgtctaataactaaggataccgtgcgtcgatcgctgtcgcgtttccttcctcgtttcgtactaagttaccgtaatttcgtccattatattcgtatacatgcttgaaattcggaagcatgtatataagagtatatcgtagagtcaataacccatttgtactaagcaagtgtatgtatatgcatgcgttgtatccttcttttttccttgaatacatatcacagacattcatg

SEQ ID NO: 13485 - DNA, 1241 bp, Oryza sativa
  ref <308>: DATABASE ACCESSION NUMBER: AK110833
  ref <309>: DATABASE ENTRY DATE: 2001-12-06
tgggcccgcacggcggcggcggcggcggcggcggagggggcggagggcatgggcatcagctgcaggacgggagcgtggacttgctggcgcggcacagcagctcgccggccggattcttctccaacctcatggccagcaacggctttccaggctcaaaaggcgggggaggcagcggagccgaagcccaccaccacccttccatggccggcagcggcagcggcagcagcagcggcgggaggaagatgaagtcccagctgagcttcacggccgggccgccgcacctctcgcacatcgcggaggacggcgccttccccgaccgcgccggcgccgaggcctccgtgccccgcaccttctccgccggcggcagcagcggcggcggcgggttctccatcgtcgggccgtgggaggagtccagggacatcatctccaccctcggcgggtacgagtcccagttcggcggcatggcgagcacgtcggcgctggagatggccggcatggacaggtacctgcagctgcagcatgaccaggtgccgttcaaagtgcgggccaagcgcggctgcgcgacgcaccccaggagcatcgcggagagggtacgtacgcaatatcatgatcaaaacgcctctatatttgcttttgctttctcttcagatcttgacacatgagcatgtacgtcggtgtgatcgatgcgcgtccgtaggaacggaggacgagaattagcgagaagctcaggaagctgcaggagctggtgcccaacatggacaagcaaacaagcacagcggacatgttggaccttgcagttgagcacatcaagggtctgcagagccagctgcaggctctgaagcatgagcaggagaagtgcacttgctgcagcaggccttgattgatgaagcagtgagacggcgaaactgaaaggtatctatccttagtttggaaccctgattacggatgatactttcatatttccttgagagtaacgcatgcgtggatgcatgaaccaattaatgtcagtgacacaatccaaatcgaccgtgagcattttgtcgaaatgtgtaaattgttagataggacatggcaagggacatgtatatgcatgcctgcatgcatgagtgagtgcatggagctagctactccgaaatagcggggtgcagccattgtgatcccttaattaattctcgatccactgatgattaattagcttgtaattctgtctttaaaccttttttttaatgacgaggggagag

SEQ ID NO: 13486 - DNA, 1703 bp, Oryza sativa
  ref <308>: DATABASE ACCESSION NUMBER: AK110834
  ref <309>: DATABASE ENTRY DATE: 2001-12-06
taattatcgcgggaatttagcagatttcggttagaatcatgtataattattgtgtaaatcgtgtgtttcctaatgggctctaattgcaatcgaaatgaactggaatttgggacgaattccaaccgattatgatttctagttgaggaactcatttgatcattggcaggtttactattcttctgctgttcaaattggatcagagattaaaaaccaaatcaaaatcaatggcaggatcatccaggcccctgaatccccccccccaagttgacagagccacagcagtgaagctaaaggctccagatgattgcatcgtcttctacctctcgccatcctttggcctagaacgaagggaagtacttgctgaggccatacggcagagagtagaactcctcgctcctcgggtcatgcctgtaagacttgaacttctcccaccaatggaagcccctgtccttccacaccgggccgtcccagtaggtgtgcgtgcagtccaggaggtaggcgaggatggcggccaccgtcgcaggcgaggagaagatcacgttgacgatgacattgaactgcaaaaggaaagatgttgtatcatcagaattcagaaacattcagaaaagtaaaacggccatgatcttgatgcaatcagagaacagagattcagagctgggttggttcacgtacagcgggtgagtgggtgtgaactggcccgaagacgtagaacacctcgtactccctgaagtactgtgggatggacaggcccaagaacagggagatgctgaggatgaacttggttctcagtgtgttgaggttgcagtactggaggaagcagagccctgcagcagctgtctcatgcagaaaccaagtgtaagtcttccggaatattaattttccataatgaattcattccagcctctacatcatagatcatgcattcggccatgaatgatctcttgaatttattagtgatggtatcatgaaggctcacctgaataagcgaagagaacgcagtacagtgcagagaagattggcaatgggattgatgcaatgattgccccaaatttccctgttgattttccggcatctcattgtatcagaatcagataatgtggagttgctaacaatgcaatggtgaacactgctgatagattctgaatgatgggaaatcataccgaacagcgagaagaagatcatgaacaaggctgagatctttataacccttctgcttccgactcgcgtcaaggccaacagacctgcattctcacttctcaagcaatacaaggacaagttatttccatccttctaagtggaagtctaggtaaggttctaagagagctgagtgctttacactgaagctactgatcctgtcaatgtaccacacatcccgtccagaatggtagatatgccctgaaattgcccaggttgcagtgcagtgagcgttcgttctgcagaaaaactcagtgagaattactgaaagtttctgttattttcagtacctgccagccaactccacgagcgaaaactgaaggcgggcagaacgttgcccctgcatatctcgtcaccgccatcaacgtgcccgtagactgaaatcgaccagaattcctcgtcagacttacaagtagaaacttctcaccaaatccccagtgttttgaagacatgtttgtgacaaatcaatgattaggaactcaactaatgtagacatctatctggtaatg

SEQ ID NO: 13487 - DNA, 2099 bp, Oryza sativa
  ref <308>: DATABASE ACCESSION NUMBER: AK110835
  ref <309>: DATABASE ENTRY DATE: 2001-12-06
ggaccgccggtctctcctccctctcgtcccacgctctcgacccccgccaccgcctccccctcgcaccgccgccgtcgtgtccccgtccccgtcgagtcgccgtgtccgacgccttcgcctccctctcccgccgccggtccgccgttcgctgccgtcgccgtctccatcttatctccgcgtccgcctcgcgccaccgccgcctccgccgttaccgaccgcctccattgccgtcaccgagcgcacaacctccaccgtcaccgagccgccgctgccaccgtcgctgtcgaccactctctccggctgccggctgccggctgccggcgtccggatccgtcggggggctgtcagatccgtgtcccctgaccacatggaagggtcgctctcgggtggagcagatcaacgctgggcacgaaggtgcgagcgcggatggagcagttcgagcagccgccgccatcctcctcgtccctcgaagccacaggtaatagacgagacaagccgctcttccaggccaacaaggagaagaagggtgctattcaacgagtggttcaagcacaaagctaaaccagctgcagtgaaggagacaatgcaagctatgggtgtcagttgtcacaggccttatgacccacaacatcaagagtcacctctaggtacctcctgccatgttgcaagctttttatcaggagttgatcagtgactactttcttaatgggcatgattctttacactatgaaagcatgaagtgactattttggcattggagatcggcagcggtcttgcaaatcttatgctgaggtgagctccaagcatggtgccagatcaggacggtgaactccggcatgatgtgtgagccgatatgatggctaggctgtggcgacccgtagaaatgttctctaagcacttcacttcggctaacagcccatgttacaagttctatcgtccatgagcaatcaagcaacatcagatatggagagaatcggaagcatgggcagagatatgcgtatcatgagcttttttatgatgactcaaacaacatctgctatgctaaggttcacacagttggatggagaagattttcctctcccacccgagattgttgcccgctgcaatggacacgatgggaaacatctaactttagtcacacggaatagcaaaccagtgaatgtcaggctcgaaaaaagaggccaatcattctacatctcgaaaggctggaaaaaatttgttgaacttactgacttacgtgttggacagtgtgttagatttagtgtctcttctccatcaacacttgatctcctcatacttgacaaacatggaacaagtcttgccatacctccatcaaaaagagatctgaaattaaagtcaaaaaggtctacacaccaggacagcaaaggccatccatctaacactgatccaggaccatcacgtattatcaaccgcagggtgaccaaatcagcaaacaacaaacccaagtttgcagatctttgcttctgtgccgagaatgttaccttatcaactgctctgaaaaggcacatgaaaacccttgcatagtgcatcgaacatccaagtaaactctatgttgtcaccatgaatgaaacgttcatgaaacaagacagagtgtacttttcaaaaaggtaccctatagaccatctggagcagctcatgactggcagaacagaagatattgaagtgcagacattagtaggcccttcagtgaacatggttcttcacacatcaacagaccatcgttgcaacctaaaaaaaggatggacagatttcgccctcagcaatggcatcaagttgaacacagtgtgcattttccatttttacaagacaacccatctaggagtgattgtcgatatcttctgaagataccctaatgctatctgatatcatgcttttgttaatagcaagcgtccctacctccatacagtctactatttatatattatagtgccaatgttatggccatcagctctgaaccatataaatacactgtgtgcactctacttatcagtctattatggcacttacatatgtacacactggaagggacaccagtcaacctccttaactatgtatgaaccattcacttctttatctgt

SEQ ID NO: 13488 - DNA, 2555 bp, Oryza sativa
  ref <308>: DATABASE ACCESSION NUMBER: AK110836
  ref <309>: DATABASE ENTRY DATE: 2001-12-06
attctttagccaacgctcgatgccatctcaccgggacaagagctcgccgccggcgacaagctcgtgtccagcaatggcaggttcgccctcggcttcttccaaaccgacagtaacaagtcctcctccaatagcactccgaacatttacctaggcatctggttcaacaccgtccccaaattcacccctgtatgggttgccaacggcgaaaaccctgtcgcggatctcgcgtcgtgcaagctcctagtttccagcgatggcaacctcgccatcgttgcaacgacccatgccaagaactcctccatggtctggtccagcaaagccaacatcccaaccaacaccacccatgctgttctcctggacgatggaaaccttgtcctgcgtagcactagcacaaccaatgcatcatccaccattctctggcaaagctttgatcacccgacagacactgttctgcagggtggaaagatcggctggaacaacgccaccggtgtgaaccgccgtcttgtctccaggaagaacaccgttgatcaagctcctggcatgtattccttcgagttgctcggacacaacggccctacctccatggtctccacgttcaactcctcgaatccgtattggtccagcggagactggaacggccggtacttcagcaacataccggagacggtaggacagacatggctatcactgaattttacaagcaatgagcaagagaagtatatcgagtatgcaattgcagatcccacggtgctatcacgtaccatactggatgtctccggccagctgaaggcgcttgtgtggttcgaggggtcgcgggattggcaaaccatcttcacggcacccaaatcgcagtgcgatgtctacgctttctgtggacctttcacggtctgcaacgacatcacattcccctcctgcacctgcatgaagggcttctcagtacaatcacctgaagattgggagctagatgaccgaacaggtggatgtgtgagaaatactccgctgctctgcaacagcaataaaactgcagcaggcacggcagataagttctatcctatgacttctgttcagcttcctgataaagcccagagcataggagcagctactagtgcagatgaatgtgcagctgcctgcctcagtagctgctcatgtactgcgtattcctacggtgaaggtggctgctctgtttggcatgacaagctgctcaatgtacgacaacaaggtaatggtgttctctaccttcgcctttctgcaaaagaagtactggaaagtaggagaaacaatagatggggggtgatccttggtgcttcaattggtgccagcactgctgctttgggtttgatctttctgctgatgatttggatcagaaaagggaagagatataacctcacaatggataatgttcagggaggcatgggaatcattgcatttagatacgttgatctccagcatgcaactaaaaatttttcggagaagttgggggccggcagttttggttctgtatttaaggggtcgctaagtgactcgactatcatagcagtgaaaaggcttgatggtgctcgccaaggagagaagcaattcagagctgaagtgagttccatagggataatccagcatgtaaacttggttaaactgattgggttttgctgcgaaggtgacaggaggttacttgtttatgaacacatgccaaagagttctcttgatgcccatctcttcccaagcagtggtgcagttttgagttggactattaggtaccaaatagccctcggagttgcaagaggactagcttatttgcattctagttgccgagactgcattatacactgtgatatcaaaccagagaacatacttcttgattcatctttcactcctaaagttgcagactttggaatggcaaagtttctcggaagggatttcagtcatgtcgtaactacaatgagaggaaccataggatatcttgctcctgagtggataagcggaacagctatcacatcaaaagtggacgtttacagctatggaatggttttgttagaaatcatttcaggaagcaggaactccagtaaacaatcttcgcgtgatggcgtgcatgaagcttgtttccccgtgcaagttgcacgcaatcttctgaacagagacattgacagtctggtggatgcaaacttgcatggtgaagtgaaactggagcaggttgaaagagtttgcaaagtcgcatgttggtgtattcaagacaatgagtttgatcgacccacaatgagtgaggtactacagtttctcgagggtctatctgaagttgagacacctccaatgccaagattgcttcatactcttgcaggaggtttagattcgaaaataatgtaatcactagttttgatcgttgttcgttcacctaggtagttctacacgtcacatttctcatctgccgtttatatcgtaagcttccttgccgcttcattatgccacccttgtaatgattgtaaccattattcccactcccagcagattgttaaacttacgtgttacatcctaataaatcagggggaaacttgacctttggtctg

SEQ ID NO: 13489 - DNA, 1526 bp, Oryza sativa
  ref <308>: DATABASE ACCESSION NUMBER: AK110837
  ref <309>: DATABASE ENTRY DATE: 2001-12-06
attgctgcctctctccctactcctatcgctgttcatgttgttgctcctcctgctgctgctactgctgctgcagctgctgctgccaccgctgttgctgcccctcctcctcctcctcctcctcctgctgctgctgctgctgtctctctcccttgtcctctgtctgaattgcccagcaggtccaagcagcctttccgtgccattttcagtgtcttgagctgtatcccactcccgagccaaattgttcaagccattttccatcctccattcatggcctgatccagtgttgttgctctggccagccagattttgtaattccactatatcaagagttacatcagctctctgcctgtctgtcaccacatttgtgcttgggcctgccagaaaattggagctgagctcaatggtgctccttgacatttcctggtgaggcacttggcctggtggattgaaaggcgggagaggtggagcacggaaagatggcagggatccatcccttgagactgctgctgaaggaggcggcgctgctgcacttgccgtagtggacgaggtctgtgtagaaagccgaaccgtgggcggtgatggaaccattggcggcggcagagcgcgcgagctggcggacgctggtggggagaaggtcggtgaaggcggtgatggaaccattggcggtggcagagcgcgcgagctggcggacgctggtggggagaaggtcggtgaaggagaaaatcctggcaacgacgaactggaacagctcttccataccgtcgacgagctggtcggtgagagctccagaagcggtggtggtgttggtggcgacgaggtggatggagccgagaccttcgtcgagggcggtgacaaggagggcgagcgggccgcccctcgccgccgccgtgtaggagcggacgtggcgtcgcgggtatgcggcggggccgacgaggagcgcgtaccccttccccgccgtgccgaggtagctgctgctggtgaaatcatcgtcggcgacgtgcttgtgatcggcgtggagtggaggaagacgaaggttggcgacgaggagccgtcgcgtggcctcgcaatgttgcggcggcgccgacaaggagagtgtacgccctccccgccgcgccgcggcgggtggggttggtttgctcgcgttcttcgtcggaagggacgaacagtaccccgcagatttgggaggaattggatttgattttggtaagacggtagaaataatggtgagaggtttatgaatttttgggggacacgccggtggcacgggaagtgtgtgcacgcagcaattcctttgcctcgttcccgcttcccgctggctgacagacagctctgtttattgctgtgtgtacgctgtagaagttacaccgttcttgcaacaaattgaaaaacaaaagatgcatttatgagcagggagtagggaataaacccactaccaccggtatttgttacggaaactactagtacgactagtcctgttcttctgttctgggaggagctaaggcaaaccatggttttctctgtgttct

SEQ ID NO: 13490 - DNA, 2537 bp, Oryza sativa
  ref <308>: DATABASE ACCESSION NUMBER: AK110838
  ref <309>: DATABASE ENTRY DATE: 2001-12-06
actaattaatatttttaataatatacgaaatagacaaaaatagatcgacttaaatagaacgtctaaaaataagtaataaagtatatgatgtcaagacgggaaagtgtccaaatggccgctataaatgattggccaacacaacttgcaattctaaaagtaatgttcaacagtgagaacttgaacgcgaagtatttagacgacgaaaacgacgaagttaagatcgaaagccaaaacgactacgagtttgctcagcagatcgcaacgagttccacaaatagcattttgagactcatattgcgaaattcgagagacgaaataatcggcaagcttaatctcaacgtagacctaagcaagagtggtctaggagagagcctgaacatgtctggagtgacatcatcaagcatcgactcaatgcgctctagtattgaacgaatatcgccaccgcagccaccaccatcgacaaatcagacatcatcgtcgtcttctgtggcttcttctcggcttctcgcctcgacactttcgacagctacaatgccactaaccgtagtcgcatcgtcacagccgccgccattcacagtggcgcaactcgcgtggctagagaactatttggccaagttcaagagcgatttggtcaaggagatgagtgcagagagacagcagccacgcgccgagagcgatctaattagcttcgagccggatagcaaggcgagtctagagagcaaagttcagcagctcttctcggccattttcgaggcgtgcatgctcaagaggagcctcaagtcggcctatctcgaggaggagctacaatccaccggggcgtttatggccgagttcatcaaggaccagaacatgcccgacggtagtaaatgcgatccgggcgtgaagttccaaaagacctggctcatcaagaacgccggcaagctcgagtggtgcgataacaagttcccggtcaagttggtctgcatagcgggcaatatcttaaccgaggacgacgtcgattgcgtcgatgtgcccgagactggtgttgagcagaccgctagtattagcgtctctcttgttgctccgcctattgagggaacctatttcagtgagtgggttctctgctgtcatggattcaagtttggtccgcgtatttggtgcactattcaggtgacaggcaacacgtcaaacgtggagagaaaagacctctcgctagccgaaagcatgtactcggagcgaagcgccaaactcacgccacatcgccaactatcgcagcaattctcacagcatcatcatacggcaagcatctcgaccgaagacgtcgatgacgagtttgtagtgataccagactgcttcgacctggacaagaaatggacccagaaacgccacctacaactccaagagaaacagcaacaagctgccatcgagagacaggaggatcaagtgacgccggtcaaaacctcagtcactgacttcggattccaaatcgacgacgacattagcttgtcttctaaagcccagacaaacgcgagtcaagacctcatcatgttggctagcgacccggctcttgaaagcgctactaaagctctaaaagactcgaattcgaacccaaactcgacttcttcgacaggcaacaaaagcagcctggagagctcaatcgagggcattgggtcggacccgaacgattgtgaggtgattaaacgcggcgacgagttcgttctgagccgactcatcggcgagaagctcacagtgtccgagacacgagatcctaatatcgatgacgacgacgattcgagtgaacaagtcgccgtcgcctctgagattactacttctgataactgcgacgacgactcttcggcttccaataaccttgtaaatagcaacatcacaaacgcttttggagcgatgaaggacgccttgtcgaatttgggacgaccttcatatgtcggaagtatgccaatggcgtcaagtgatgcggcgtcatttttgtcgccgacgtccaaagatctcgatgcaaaaatgaaagaactcatttcgatgggctttgctaaccgacagctcaatctcaaaatgcttaagaagtacaacatggacttggagaaagtggttcaaagcattctcgagattcacgataacgactgggctttgaatcgataaaaatcgaaatcgaatcgaatatttcgccgcgtctattttatcctatatatgtgtataaataaattaaattaatttttttccagacaatatcaagcccattataattaactttttttgttttgaatatttgaataaagtcaatttaatcttcttttttcttttccttgcctagaatggacctgattttttaaattattttagtcttatttatgctttttatttctataattctatttaaaaaatgatcgtcttttttattttatatttattctatctctctctatatatatgagtaaaacattgactttaaataataataagattcaatcgaaaatttaaataaatatgtttttttttgtgtgtaaattatatttaacttgaaataaactatttgaatattt

SEQ ID NO: 13491 - DNA, 1545 bp, Oryza sativa
  ref <308>: DATABASE ACCESSION NUMBER: AK110839
  ref <309>: DATABASE ENTRY DATE: 2001-12-06
aatgtcgcgagcaccccaagaaacgtaggatcatccaagcaaacccgccaccacctgccggccggccatgggcggcggcggcggcggcacgccgcgcagcagcatcggccacatccttcccggcgccggcttcgtcgccgtcggcgtgtggcacctgttcaaccacgtcaagctcttctcccagcgcccggacacctacgtcgcgccggcgtggttccccgtgccgggcgcgcgctacctggagctcgccctcatcatcgccggcagcggcgtggagttcgccatggagatgttcgtcggccactcgacgctcctccccttcgccgccgacgggtcctcccttccgaccgcctccacaaccacgagcacgccatcatctgcctctccctcgccgtctacgcggccgccgcgctccacctcgaccgcgcccgcgccccggcccgcggcacgctcggcctcctcctcgtggcggcggtgttcgcgcaggagctcctcgtcttccacttccactccaccgaccacgccggcgtcgagggccagttccactggctcctgcaggtggtcgtcgccgcgtgcctcgccacgtcgctgctcggcgtcggctacccgcggagcttcgccgtcggcctcgccaggtcggcgtgcgtcgccttccacgggctgtggctcgccgtcataggcgccatggtgtgggtgcccagcctcgtgcccaggggctgcgagctggtgcgcgaggacggccgcgacaccgtgcgctgccgcagcaaggagagcctccaccgcgccaaagcgctcgccaacctgcagttcgggtggtacctctcgttcatgacggtgttcgtcgtcgcactctacctgtacgtgagcaacaggtaccccgccgcagaggaggcggcgtacgcgccactgcagaaagccggcgccggagacggtgacgacgacggcgatgacgacgcgcacaagggtggcggcgccggcgtgcatgggttcgctgcgttggagatagaggtttgattggcaaaattgtaggacagaggtttctgtgtgaagaggattttgatcgctcgggggatatcccttcgttttttacatgtcacttaaatggttatgaaaaaaatttaaaaaaattgagaagatgtattaacatgtgatatatcactctataaatattcaagtaaaaattcttctacatctcgcaacgaaaaaaaaaataaatttgactctgaatatacgttaagtagctccggtttaatttgttttcttcgttacaagatgtagaagttaaatttttacttgcatgtttgtggagtgttatattacatgttaatacacattctcaattttttttcaaatatttcataaccatttaagtaacatataaagaacgaggggatatcccctcgagggattaaaatagtttcccgtttctgtgtacagttgcttgtattgatcgatcaaagtgcaatgaatttcgtttgaagaatggtgaagctcctataaaaattcatgattggtttggaatttggaaacatattgtacataaac

SEQ ID NO: 13492 - DNA, 1719 bp, Oryza sativa
  ref <308>: DATABASE ACCESSION NUMBER: AK110840
  ref <309>: DATABASE ENTRY DATE: 2001-12-06
aaagtgagagactcctctggatcgatcgatccctccaggcatcggcgccgtcgaccgcgaccaccctgccgccgagcgccattacctcaccaccaagcgccgctgcagatcgccgccgccgccagggtgcgcaagctcgccgcccccgagcaccgccccaaccgccgagagctgccgccgccgcggctgactcgacgccccaccgcccccaccgccgagcgccaccacccccgccgccccagctcgacggccccaccgcctacaccgcggggcgctgccgatggtctgcaaagagggagttgccagatgaaggcccaggacatggtgagcagatcatcatgcagcaagaacaaagtgtttggtagtctacctgttgatagtatcccagaaatagatccaagttacaggcttttcttggaacatctgagggaagatgggaacggctatgtacttgatgcgccgagaggggaccatggctcgcctgtttttctaagatatgcacaagatcatgcatccaatggatatgctaatgccaaatccggcacaaatatcacaaaaagttcattgcgtagaagccattgtaatcaaaacagcgagggaccaggtgtaacatcagacaaggctggcagtgcaaatgcggggcattgtttttcactaggtacatcatttgcgatggagacgtcagaaatcgatgagtcatatgctacatttctgagacttctgaagatcaagaatggtctcatggttattgagccagaaccaggcgttaccattgtatatgggcaagcagaggagacaccggttggatatgatgaattgagaatagccacttccacaaatggaagagattctttgatgactgcatttgaaaacatgggtgaagagaatgctatgaatactgatggagatgggcttgggaagatcaataattctgcatctgaacgtgaaatggatggccttgctttagagaacatgggtggtcaggatctagtctgcatagatgagcatggacttccaccttgtactgaactttctgatttgaatgtatgtggagatgaacaaggagaacctcttgctcttagttgtggcattccctctacatttgatgaaaaacttaatgatgttttaagtaagccgtatgacctaaatgaatataaagagcttttgagaaaagctacagatcggaagcttgtgagtagacagagacacttgcgaaatgcatccaagccctatgccacaagggcagttgggttgtcatttcttgatcactacccagatctagccatacaaatagattctgctgactctgatgagagaaaactttgcctcctgcgaaaattcttcttctggttggagaacctgtgccacgagggggcctacatgccatggatcgacaagccactagcttgcaatccgatcgacgcagacgactacgaaacggatgacccgacggccattgagattatccaagacggagactgagtcagtcggcatttgtctccattgccaggtcccagtttggagctgaaggaacatgagcttccattcctccagttggtctctgttgtgcgaacccacctttgctttctgctcagccctgcgacttcactgcactacctgcctggttgtaattttttcttttacctgtaaaaccctcctgaaatgccagtttgggtttcagagattgcaatcttgagtggcctggtttggctgtgctgc

SEQ ID NO: 13493 - DNA, 1565 bp, Oryza sativa
  ref <308>: DATABASE ACCESSION NUMBER: AK110841
  ref <309>: DATABASE ENTRY DATE: 2001-12-06
gtcgggtagctgagcaaaggtgccagtgtgctttgctttttaactctgcacctttctctttagcttctcctcgcaaatcgcaatccccatctctccttcgtctttagctcatctcttgattgatccacctcgttgttctttgattgattggtgctttctttgagaggcattggtggtggagatcgatcaagaatcgtggtttgcttgtgcttttctgagttctttgcaatggatggtggattgtagtttggtgttgcgaatcttgggtttgcagagcatgtcggagtcgagcagggcgttcggagtgaatgcgtcgtcgtcgtcgtccggcggcggcggcggcggcgaggcggtggctggaacgacggggaagaatggtggcggggggagcgtggcgttccaccggctgttcgcgttcgcggacggcacggacgcggcgctgatgctgctcgggacgctgggcgcggtggcgaacggcgccgcgctgccgttcatgaccgtgctgttcggcggcctcatcgacgccttcggcggcgccgcgggcggcgacgtcgtggcgcgcgtctccgaggtgtcgctccagttcatctacctcgccgtcgcctcggccgccgcgtcgttcatccaggtggcgtgctggatgatcaccggcgagcggcaggcggcgcggatacggagtctgtacctgaggacgatactccggcaggaggtcgccttcttcgacaagcacaccaacaccggcgaggtggtgggcaggatgtccggcgacacggtgctgatccaggacgccatgggggagaaggtgggcaagttcgtccagctcctcgtcacgttcctgggcggcttcggcgtggcgttcgcgcaggggtggctcctcaccctcgtcatgctcgccaccatcccgccgctcgtcctctccggcgccgtcatgtccaatgtcgtcgccaggatggcgtcgctcggccaggccgcctacgccgacgcctccgtcgtcgtcgagcagaccatcggctccatcagaacagtaaaaacattccgtcgaacacctcagctaccatccatttctccgcgccgccatggccctgaacacccggctcaacacaggttgcgtcgttcaccggcgagaagcaggcggtggcgaagtacagtaggtcactgaagagagcgtacagctccggcgtcagggaggggctcgccgccggcgtgggcatgggcacggtgatggtgctcctcttctgtggctactcattggggatttggtacggtgccaagctgattctggagaagggatacaccggagctcaggtcatgaatgtcatcttcgccgtgctcaccggctcgctgtaagtttcgccgccccgcgagcttcttgatcaattcttcagaaagaatactaagtttgtagcaaatttaagagcatgaaagtttttagtattgaaacaaaatgaatatcatgaaagaagtatgattgacaaatagtcttgtcaaggatattaagagtatggaagtttttaggattgaaaaaaaaatgaatatcatgacaagtatgattgacaaatagtctt

SEQ ID NO: 13494 - DNA, 1540 bp, Oryza sativa
  ref <308>: DATABASE ACCESSION NUMBER: AK110842
  ref <309>: DATABASE ENTRY DATE: 2001-12-06
agacgctcgccgatcgatcgagcagcggaggagcacagtagtgtgtagctatggcggtgaccggcggcgggaggccggcggtgaggcagcaggcggcgagggggaagcagatgcagaggacgttcaacaacgtcaagatcacgctcatctgcggcttcatcacgctcctcgtcctccgtggcaccgtcggcatcaacctcctcacctacggcgtcggcggcggcggcggctccgacgccgtggcggccgccgaggaggccagggtcgtcgaggacatcgagcgcatcctccgcgagatccgctccgacaccgacgacgacgacgacgacgaagaagaagagccactcggcgtcgacgcgtcgacgacaacgacgaccaactcgacgacgacgacggccacggcggcgaggaggaggagctcgaaccacacctacacgctggggcccaaggtgacgcggtggaacgccaagcggcggcaatggctgtcccggaacccggggttcccgtcccgcgacgcgcgcggcaagcccaggatcctcctcgtcaccgggtcgcagccggcgccgtgcgacgacgcggcgggcgaccactacctgctcaaggcgaccaagaacaagatcgactactgccgcatccacggcatcgagatcgtccacagcatggcgcacctcgaccgcgagctcgccggctactgggccaagctgccgctcctccgccgcctcatgctctcccacccggaggtggagtgggtgtggtggatggacagcgacgcgctcttcaccgacatggcgttcgagctcccgctcgcccgctacgacaccagcaacctcgtcatacatggctacccggagctcctcttcgccaagcgctcctggatcgccctcaacaccggcagcttcctcctccgtaactgccaatggtcactcgagctgctcgacgcgtgggcgcccatgggaccaaaaggccgcgtccgcgacgaggccgggaaggttctgacggcaagcttgacggggcggccggcgttcgaggcggacgaccagtcggcgctgatccacatactgctgacgcaaaaggagaggtggatggagaaggtgtacgtggaggacaagtacttcctccatggattctgggcggggctcgtggacaagtacgaggagatgatggagaggcaccacccgggcctcggcgacgagcggtggccgttcgtcacccacttcgtcgggtgcaagccgtgcggcggctacggtgactacccgcgggagcgctgcctgggcggcatggagcgcgcgttcaacttcgccgacaaccaggtgctccggctgtacggattccggcaccggtcgctggcgagcgcccgggtccggcgggtggcgaaccggacggataacccgctggtcaacaaggaggccgcgctcaagatggacgccaagatcgagagctgaattttttttatctgaattaagcttggagataatcaaatgtgtgatcgatgctacagattttgttttatgtgtttgttgaatcaaatacagttcgtttc

SEQ ID NO: 13495 - DNA, 1672 bp, Oryza sativa
  ref <308>: DATABASE ACCESSION NUMBER: AK110843
  ref <309>: DATABASE ENTRY DATE: 2001-12-06
aggagggcgcggcggccgccgcaaaacccggggcgcgagcccgggcggagcggccgtcggtgcagatcttggtggtagtagcaaatattcaaatgagaactttgaaggccgaagacggcgagagagcgtccgtagcccaaggcgatggcgaacaagcggcagcgggaagcgcggaagcgcttccgcgaggcgaacccgggcctcttccccgccaacccgacccctcccgccgacggcaccaagaagaagaagaacaacaagaagagcatgttcaagaagacgagtaaggcgggtgggggaggcgcggggaggtcgaagcacccgctccgggtccccgggatgcggcccggggagcggtgcttcatctgcaaggccgcggaccacgtcgccaaggtctgccccgagaagtccctctgggagaagaacaaggtatctgcctaccaccattcgtctcaaaatccctgccttttgcaagctcttggggataatttttgctcggcccaatgtcttttgctatagaagccatggacctaagaacgtcaattaaggtgaccttaggtttagatcagcatttgtactttctgactttctgttattattgggggttaaaaccaacgaaatcagtatgggttttctgtttattgttctgtttatgccttgttctgtttaatgttgcggggtgttatttacgttatgcaatacctagcagtgggcactgggcagtgcgtgtattggttgttctgtatttttttgttttatcacacgttgtatctatctctaggtgaatggcaaaacggtgacttctggaggccatcctgataagtgttttactgcttccattccaacctttaatcagtggattctggctgtcacagttatatattttcagtcagtagtatttttttttttcagtacttagttgcctcaaagtctgaccagttcatttgtggttttcaagctaaaatttaatatttatattttcttctttcagatttgcttgctctgcaggcaacgaggtcatagcctgaagaattgccctgacaaaaatgatgaaaatttgaagaaattctgttataattgtggtgaatctgggcactcactttccaagtgccccaaacccattgaaaatgggggtacaaagttcgcaagctgttttgtctgcaaacagcagggacatttgagcaagaattgtcctgaaaacaaacacggcatttatccaaagggaggttgctgtaagatatgtggtgaagttacacacctggccaagcattgtccaaacagagggaggcaagacttgatatcttctggggatgatgctttcaatacggaggagcatcacctggaagacaatgctgttctccggggtggagatgaccttgatgacgattttattgaagaagaagaaacaagacacaccaaggcaaagaaggctaaacaatctagttcaaaatctaccacagagacaggcgatggtgacaagaataccaacactaaggcaaaagtaaaacaagctccgaaagttgtaaaattctttggttaaactatgtaacctttgtagcttaccagtaatgatacagaagaagatccttccgaacaattttgtctattgggggatcacggttttgtaacgtacaacgggaatttaatatgatctactgttcaatgttttgag

SEQ ID NO: 13496 - DNA, 1464 bp, Oryza sativa
  ref <308>: DATABASE ACCESSION NUMBER: AK110844
  ref <309>: DATABASE ENTRY DATE: 2001-12-06
agtttcagtttcagagagaggagtcagtggctgtatgctgccatggctctcaaggtggctagatagacagacatgttgcccatcaacttaagaagcaactagctgctgctgctgctaagggagagctataggcttagctgtggtaggctatagatattactattaggtagctactagcctataggcagacatggggagacctccatgctgcgacaatggcgtcggcgtcaagaaagggccatggacgccagaggaggacatcatcctcgtctcctacatccagcagcatggccccgggaactggcgctccgtgcccgagaacaccggattgatgaggtgcagcaagagctgcaggctgcggtggacgaactacttgagaccggggatcaagcgtggcaacttcacccctcatgaggaggggatcatcatccacctccaggcattgcttggcaacaagtgggcagcaatagcctcctacctcccccaaagaacagacaacgacatcaagaactactggaacacacacctcaagaagaaggtgaagaggctgcaacaacaacaacaatcacaccctgatcatcatcaccaccattccttccaaaccaccccttcttcctccaatgcagcagcagtagcaacaaccagcccaaactactacaaccctaacaacagcaacagcaacagcagcaattacctccataacaacaaccacaatcttgaatccatgcaatccatggccactgcacctagcaatgaggccaccaccatccccaagctcttccagttccagacatggatgaagccatcaccagcaacaacatcatcagcagcaacagctgctgcaggtagctgctacaagcaggccatggccatgcaggagctccaagaggagcaagagggctctgctgctgctgctgcaatggcttcttccattgatggcgtctccaaggaccaggattatcacatgtgtgctgtgatcagtggtgatgacaagtcgtcgtcgtcggagatgatgacggctgcggcaatggccggccatggcgaggcggccacgacgaccttctcgctgctcgagaactggctgctcgacgacatgccggggcaggcggccatgagcgccgccatggatgggttcttggagatctctgctggatactgctgtgcagaccctatcatgttctgaactttctgaacttctgatgatcatctcagccttaatttcccatatgagtctctctttgctataggtttcttaatttcactgagttaatttgcacttgtactagctgtttgatgctctctctctctcgatgatcttgtgtttccggtaataaaccgttggtttaatttcctcaagaaaaagcaatccacctggaaataatctggttggtttggagaaatattgtcagttctcaaggatgtaataaaaggattaaagctgccataattcgttgcctgatatgc

SEQ ID NO: 13497 - DNA, 2070 bp, Oryza sativa
  ref <308>: DATABASE ACCESSION NUMBER: AK110845
  ref <309>: DATABASE ENTRY DATE: 2001-12-06
aaaaccgatcgtccagaaacccagaaggcacgcagcggcagcagcagcccacggcaaccctagatcagccagccatgtcccgcgccgttgacgcccagcaggagcccacggaagggcgccgcttctactcgccggatcgccccgagggcctcgccttccccacctcgtaccgcgcgctctacgacctgcccacctcgccggagtgcctcttcgaggaggacaagttccggcagacccgcacctggggcgagaacctcacgttctacaccggcgtcagctacctcgccggcgccacgtccggcgcgctcgtgggcctccgccgcgccgccgccgaggccgagcgcggggagtccgccaagctgcgcatcaaccgcgccctcaaccagagcggctccgtcggccgcgccttcggcaaccggttcggcatcgtcgcgatgctcttcgccgggaccgagagcttcgtccgcgaccagcgcgacggcgccgacgactgggtcaacaccgtcgccgcgggggccagcgccggggcgctctaccgcatcgcgtccggcccaaggtcgatgatcgtcgccggcatcctcggcggagtcctgtccggcgcagctgtcgcgggtaagccgatgcttcagagattcgcgccgaagctatccgccagattggattatttacgctgagtaaaatttcaggctgaattactactcaacatggtgtgcgcctggagaagtttttattcgtagtatctagctagcaactctgatctcaattaatagtttgtaactgttcatatttggtgtcctgcaaattaatggacaaaaaaatgctaatcttttcgttgagaatcatatttatactaatactatatacactttaaaaaataaaacatagtggtgacggtaactccatccctaaccgaccaatcgttagatcttgatatgggtcggttcatatacatcacgcacttcaatcttggcagacacgccgattcttcaactaatcgttagatctcggtatcggatgcatatccttcccacgaagctgagtgcaatttatttgccaggttgaactactactcaatgtggagttcctgcctctcccacgaagctgagtgcaatttgtttatcaggttgaattactactcaatgtgatctcaggaaaagtttttattcctagtatctataggaaagtgatcttaatctcgagcttaatcgtccatggccaatgccggattcatagttcatatatttttcatatttgtgttgttattcgtgaagtttgatttcactatatgtttgcaccttgtgaaacctgttaacgctaaattttagcgatatgttaaacaagccctctcggcaagatcatttggaaatcccgcgcgccggcgagatacaagttattcatgtttcttgccgtccgcaatgcttgtttaacaactgacaacctgtagcggcgaggttggaagctcgcgccaatttgtcacctatgctccaatgatggccagtcatactaacacatcttccagggttgccccttctcaacccttctcgcaacaggtttgggtacagattcggactcgtttgagtctctcctgttctccatcgtcttcggactttcccagttggtggcttactgcctagcactccgtttccaaggtcgaccgtgggacgttcgacgccggagtcatcctcgtaacttggtagatctagaaagagcgcaacatgtgggtattcgatggaacaacctcgtcggtcccttagttgtgtgcaatcatgtgtgatgagtgggaaacttgaaaatcaaaggctctttagtttgttgagtattgccacaacaccagtttcagagagatttcaacctattgtaatttcttaatgttgtaaaggcgatgtaccgacgcactgtatttgcgctccctctagagagggtatgttcgtaaagttttctcccttctccttaatatacatcagtcggcatcttcatcgacccaacgataaacaacatcaatctctttatatatttgtaaggtttcaaaaacatgagtcggatcgtgtggttgttgtgtatgcttcactg

SEQ ID NO: 13498 - DNA, 1452 bp, Oryza sativa
  ref <308>: DATABASE ACCESSION NUMBER: AK110846
  ref <309>: DATABASE ENTRY DATE: 2001-12-06
catctcaagtctcaagcttaattaagctcgtaatctcatataacctctttttggacgaagcttgccactcgatcgtgttaaccactcgagcttgagcgagcgagctagctttgctctgacgagaaaaatggcgtcctttcacatcgccacggcgctctcggcgactctgctgctctccttgctcgtcctgggccgctccgacgccaccctgccgccgccggccacgccggtgccgccgtccacggcgtgcaatgggacgacggaccccacgttctgccggtccgtgctcccgtcgaacggcaccagcaacctctacacctacggccggttctccgtcgccaagtcgctggcgaacgccaacaagttcctttcccttgtcaaccgctacctctccggcggtcggctcgccgccggcgcggtggcggcgctgcaggactgccagctgctgtccgggctcaacatcgacttcctgtccgccgccggcgccacgctcaacaggacgtccagcacgctgctcgacccgcaggcggaggacgtgcagacgctgctgtcggcgatcctgaccaaccagcagacgtgcgccgacggcctccaggccgccgcctcggcgtggtccgtgcgcaacggcctcgccgtgccgatgagcaacagcaccaagctgtacagcgtctcgctctcgctcttcaccagggcgtgggtgcgccccagcaccaagaagccgaggacggcgacgccgaagccgcctcgccacggcggccgcggcaggggcctgttcgacgccaccgacgacgagatggtgcggaggatggcgctcgacggcgccgcggcggccgtgtccacgttcggcgccgtgacggtcgaccagagcggcgccggcaacttcacgaccgtctcggacgccgtggcggcggcgccgacgaacctcgacggcaccaagggctacttcgtgatacacgtcaccgccggcgtgtacgcggagaatgtggtggtgcccaagaacaagaagtacgtgatgatggtcggcgacggcatcgggcagacggtgatcaccggcaaccggagcgtcgtcgacggctggacgaccttcaactccgccacgttcggtgagttaatttgtcaacgcaatttcttctcgtagaagttttaggtaattaagttggtacatgtcggtgttcggtactagggttttaattccatactgcaatttggccagctggttcgataattaatgaagtgggaactaggagcaagtagagtagtgtagcggtagattaataagcgggtcgcaagtcaaaagtgtgttgacactttacatcagtgcaaacgtacctcaccctcaccgcccggccggaatacgatcattgacgaggcatcccatgagttattaaaatccttagctgttaggctcataatgcatagtagatgtttctgaatcctataaaaacttatctg

SEQ ID NO: 13499 - DNA, 1520 bp, Oryza sativa
  ref <308>: DATABASE ACCESSION NUMBER: AK110847
  ref <309>: DATABASE ENTRY DATE: 2001-12-06
gtgttcctcgtcgtcggcgacgaggacaactgcggcggcggcggcggcggcggcggcgatggccgtgtaattccttctagggccgtctcaaatcgtccctcggacctactcgattttcgtggctttcgcgaccagcctctcgtgtcgtggtgatgagagagaggggcgaaatggaaggccgtgagggctctaggttggacaattcgctcatgaggaagcgccggagcagcagcacggcgaggcggcggccgaggccggagagcaatcatgtcgtggatgtggagcagcagcagcagcagcagcagcagcagcagcgagacggctactcctcgtcttcttcgtcggcgattggctcggatgaggatgccaactccgatggggaggagcaccagaggcgagagatccatctgaatgccccttccccggatcgtgccgcgaggcgtgcggcgatggagggcggcgctatgtcctccaatcctaacccgagaagctcgcacaagaccaaggggagcaaccagctgcattccgagggctcgggtggtggtggtggtggtagctccaggaagggcgagagcggccatggtgcggttgtttcggcagggaatcgtgagtcgtcgaccggtgataaaacaaggaagttgaagctcaagatcggcggaatccgccgtagcgtgccggcgaaaccaagccctgatatgtcgcattccaggtctttgcctgtgaagcctccgcggccaggagattcgcagcaacggcaaaagcattctagtcaggctgaaggagtaaaagattccagtaggttggcatcttcccgagacaagaaaaccaaaaaggagaagtcaattgatgacgcgctaactccagaacaaccagccaaagttcacagggaaccatcttcagatcctgtccggaagagtaggaggattgctaagaaatccatcttggacagtgaattagatgaggactatgatacaaatattcttgatgattttggaacttctgaaggtgtggaagtccatactcgtgagcctgcaaaaaaaacaggaagtagctctaagaagaatgctgcaaagaaagctaaaactaagagcacatcatacgagatcgataatgattttgttacctccagatcaaaaagggatggcaataaaaggtctagggaatctactgatgctgataatagtgaagaggaacctacatttgacagtgagcttgatgcacaaaacaggaagcagaaagcagtcactgaatcacctgctaatgtaagaagcgagcctctgacaacacgtcgccgtgcccttcaatcatggatggatggaaacagcaacagtgctattgagttccctgatggtttgccaccagctccttcaagaggcaagaaggataagctttctgatgcggaaatgcttgccaagaaggcagaggctgctcagcggcgcaagatgcaagtcgagaaggctactaaagaaagcgaggctgaagctataaggaaaattttgggcctggattctgagaagaag

SEQ ID NO: 13500 - DNA, 1997 bp, Oryza sativa
  ref <308>: DATABASE ACCESSION NUMBER: AK110848
  ref <309>: DATABASE ENTRY DATE: 2001-12-06
aatgccctcgccgccgccgccgccaccgccgccaccaaccccctgacccaccgccgccatgatgccgaggatgtccaagccagcgcccgcctcctccgcgtccaagccgaggaggagggcctccccttccccgtccccctcccccgggacggcgcccaagaccgccaagaatgctgtcgctggtgctggtggtggcggccagcgtcgccgtagcccgctcaccgatctcaactccggtgacgcctccgccgcgcggggcgggtgcttcaggttcctcgtgtcgtccgcgtcgtccgggtccaggtcgaggacccccgtggcgtcccccaaggtgaagaagccccgcccggagatcgggcggcgaggccgggtggtggcggccgcggatcaggagtcgaggacccgggtggtggagaagatgatgacgagggggagggcggagacggagacggcgaggaagcatgcgccgccgccgagggggctgccgcttcttggcgaggccctgacgccgcagaggaaggcggacgcgggggccacgccggcggtgtccggggcgacgccgccgatccacgcgtcgatctcgcccgaggtgctggcgtgcgggtccgccacgccggcgtgcttcgcggcggggcaccacgtcgtgcctggggtcgccgaccgccgcaagtgccggcccaggggcatcctggccatcgccggggaaggggcgagcgaggagctcgaccccgacccgtccagggcgtcgatccactggctgtcctcaccgtcgggggaggtgcccggaacgtgctcgacgaaatgcaccaacgaggcatccgtcaactggctaccgtcgccgcgcgaggagcgcggcgtggatcttctcggcgatgagatctttgtcccgaggtgctctttggaggatgcgttctggcaaatctcccccaaatccacggggctgttgagctcacctgtgctcaatggtctattggaccttggcacgccggcatcggaattgtccgagacgacaccgtcatcaggatttcttcccctgcagaagacgccaagcaccggtgacagccttagtcccttctcactcattgtgaagagggcatcacaatcactgtcctctagaggactgaagtccttgtgttcccagcaaggaccaggcagctgcagctatggctcggcagctgatccgacagcgatctccggtgagtcatggagcagcaagtgctcagggctgacgaggacttgcagtcgccctttgacgaaaatggatccggtggtcgaatgtctcgagatgatggctctgtccccaaggcccggggatgccgattattgcggaaatggtgccttgcctgcaccattgcctgaccttagcttccagtttgcaggtgctccaatgtctctggaatccatagacttgacctcttttaagagatcaccttgtggcatagaattgaagggggagaagagtgcaagttttcagaaaccggtccttgcggacccccggatctcttggcgagaagggctggttagcaggatgtttgacatgggtgatctggactgctgcaagtggtggtctgatgatgaggatgggccagtttttcaaggcaatgaagaggctttgcgcgataccgagcttcagtcagtcatcccttcttgcctgcaggaatgtggcgaccaaacggctgcagcatgtggctttggatcggttgagttcagttgtagtggtggtggtggtgaaatgtgtaatgacagtaagccttcttcaaacccagtttcagttgcagagtcaatgagagcagaaggattcgagctcgtgtcgtccgacgactcggattggactctcttctacaagaatggcttgtttgagtcatgagtttgtctgaattggagtggggtttccctgtccagagatgttgtgtactaattgtagcatgagaagaaccactgcgaacacaggagtttgtgtttgcctcccggccttgtacttttaattttcttttacc

SEQ ID NO: 13501 - DNA, 1724 bp, Oryza sativa
  ref <308>: DATABASE ACCESSION NUMBER: AK110849
  ref <309>: DATABASE ENTRY DATE: 2001-12-06
cttgattctatggagtcggttggtgttgaacctgacatttatacatataacacacttgttgatggttattgtaaacatggaaggattgacgacgcgttgactctattcagagatatgttgcacaagagagtgacacttacaagtgtttcatacaacatcattctccatgggttatttcaagctaggaggacaattgttgcaaaggaaatgttccatgagatgattgaaagtggaatggccgtgagcattcacacatatgctactgttcttggaggactttgtagaaataactgcaccgatgaagctaacatgctgttggagaaattgttttctatgaatgttaagtttgatatccttactttcaatattgtgattagagcaatgttcaaagttggcagaaggcaagaagctaaggaattgtttgctgctatctctacctatgggttggtgcctactatacttacctatagggtgatgataacaaatcttataaaagaggaatcattcgaagatgctgacaatcttttttcatcaatggagaagagtagctgtactcctgactctcgcatattaaatgagatcattagaatgttactcaataaaggtgaggttgccaaggctggaaattatttgtctaaaattgataagaagggtatcttgcctgaagctacaaccacttccttgttaatttatctattttcagtgaatgggaaatatcgagaatacataaaattgctccctgaaaagtatcgttttctaagggagcaagctgcagttgataattgtatctgaatttaaatcctcagaaggtaaacttgaattgtcttttctatttttagagctcttcttttagtacagtaaattaatgttacctgcataaatattcaatctttcattgcgtaaataattttgcgttccttttggtaacaacttggctccagtaattatgcgcactctttgacagcagtatcttgtcctaccattgtatttagtattagtatttgtttgtcctgccgcaaggaaagaaatggtcattcccttgcagagagcttaactatgaattaaatttctttcaatggccttgcaggatgtgtgtgttagatgtgtattagataggttgtatttatggttttatgtcttttggctttccatgttcctgtcttttggttttccctgtatttgtatatatatttgggctattgctctctgatgaatgttcataacatggtatcagagcaggtttagacttctcatcttcttagaattttctctctcgacttctccatgattttctttgaggattatcagcctcttcatcttgaagccatgatgttcctcttgatctagtatggtgtcgctgagaatcgtccatctctgctccccaacgtcgtcaatttcttcagaacagtgtagagggctggcggttgtcctcatcaccggctgtcgtcgcttctcgtcgctggccgccgtcgctcctcgtcgcgggcctctggccgccgtcgctcgtcgtcgcgggcctccagccaccgccgccgctcgtcgcgggcctccggccaccgtcgcccctcgtcgcgggcctccggccgccgtcacccctggtcgcgggcgcctccacctgggttgtagggcgccgtcacctgggtcgccaccttccccggcgttgcctgggtcgctcggtgcctgtttcctcgatccggatctggatcgggaggtataaaaaaaag

SEQ ID NO: 13502 - DNA, 1874 bp, Oryza sativa
  ref <308>: DATABASE ACCESSION NUMBER: AK110850
  ref <309>: DATABASE ENTRY DATE: 2001-12-06
aatcagacaagccatgagccattagagaatttaggaagagaaatgaaatgagcaagaatggattggtaatttggtacccgtttctggaagagcgcgaactcgtcggagctgagcgagccgtcgctgttggcgtcgaggaggcgcatgagctcctcggcgtcatggccgccggcgccgaggtcctccatgatctcggttagctcctccatgctgatcctcccgtcgccgttcttgtcgagcagctggaacgctcgctcgacattgccggcggtggcggcggaggcggcggcggttgtttgaccaccgtcgccggctggctcgtcgcggaggtgctgagctgccacctccgccgccgccagcatgatggccttgagcctcttggcctcctcaggatcggtgaggccgcccttgtagagcgcgtgcgacgcctggccgccgacggcggccatgtccatctccctggtgcgcacctggatctccatcagcggcctcttcttcccctccggccccggctcgctcatgtcgacggcgacgtgcaagctccggtacccgttccccttgggacgcgtgatgtagtccttggtcctcgccggcacgtccttccacatggccttgatcacctcgtgcgtccgcaggcatgccctgtcgccgccgtcgccgtcgccgccgccgccgccggggcgagggtccaggatgacgcgcatgccgaggatgtcgttcacgtcctccggccgccggccgtccttcaccagcttcttcatggtgctgaaccggctcttgtaccggcccatgacgtcgacgccggtgacggtgcagcggagctcgtcgtcggcggtgagcgcgcggaggagctcctccttggacgcggcgatgacgcgcttgcagtcgtcttcttggctgctcagccactggtcgatgtgggcgtaggcctgcgggtacaggcgctggaaggagaggtcctcgagctccagcgacagctcgccggcgccgacggcgtgcgccagcagcgcgaacaccttgagcacctcaagcgaggtggtccgctgctggtgcttggggaggacgtcgaggtgcttcatggcgtcgagcttgacggcgagctccaggatgacggcgcggatgtcgtagctggagaggcaccgcttccgcagcgcgctcgcggcctcctcgtcggcgacgtcgacctccgacggcgcgcgcttcaccttgaggctctcttccaccagaccggcggcgctggcaccgagctgcgcctcgacgtcggccatggcgagtgccccggtatccagagctcccctcaccatgccagccgagatgacctccgcgtccatctggaggtcggcgagggaggcggcgaccacgagcgcacgggagacggactggccgccgccgccatcgccgccgccgtcgcggagcgcgggaagcgccagcttgagcgcgcggaagagaagccgcgacgacgacgaggtcgccacgtcctcccccatccgctccgtcagtccattgaacacgccaagaagctccgccatcagccgcccgccgcttcccgccggagccagccggcgcgtcgacggacgacgaacctcgccggcggcaccatggtcatgcccaactccaggtgcgtcaatggcgacggcgacggcgaccgtctcattgacaccggcgttcgccatcttgttgatcaccactcaccagcggctagctagcaagcaacaaccaaacacaatacccttgcttagttgcttacatgacccaatgttgtgaatgatatgacatactataaaacagatcatgtgatcaatgtgcaagatttgaaaagaatattgtacatgccgttgcacatgcacggggaagaaagaaatattgtcacactc

SEQ ID NO: 13503 - DNA, 1021 bp, Oryza sativa
  ref <308>: DATABASE ACCESSION NUMBER: AK110851
  ref <309>: DATABASE ENTRY DATE: 2001-12-06
gagagagagagaattcatgggcgagagctgctacgtcaggaggctctcggacctgctccaggagcagcaggagcccttcctcctcgccggcggagcttccctcgccgacgcatgcaggcgccgcctgctcgccttctgccaccgccgcgccgccgtcagcaacaagagccgcgcattggggggcttgggcgccgccgtcttctgtggcgccgccgtcaggagggctctcctcgccggctgcttctcctgcggcgcccgccagagcttccgccggctgcgccacgccggcgccggcgacattgctgctggctgcgacgtcgacgacgacgaggaggaggaatgtgcgaggcagctcagcccgatgtccgtactcgacctcgatattaactccgacgacgaatcgtcctccatgctcggcgtcggccaccgtaagccctgatctctgctgcttcgccatttcaagaattcaattctgactctgttttctccatacaggtgagaaggacgacgagtcgccgtcgacttcagggaagagctcgccgccgccgccaccggagcagaatccgctcgacgccgccgccgctccatgcttcaccttctacgaggccggcaagaattgcaaagcggagacaggagacgaagaagagtacgagacgacgaggtccaagctggaggagcagatgatcatctcctcctgggagaggatctccggcgacatctcgaggatccccgcgctggtggagctcgacctcaccggctcactgcagcaatggaggcggctcagggaggaggaagcatcgcaggtaggggcaagcatagaggccatgatcttcgaggagatgagagtggaggctgtgcgtgacatgatgcttgttgcctgaatctttgacacctcctgaatgtaaataaattccaattgggcacaacatcttgttgatgattccaactgtaaaacgaaaagaaaaaaaacaactggatagggttctttgatgtgtaacacaaatgagtttttcttttctgt

SEQ ID NO: 13504 - DNA, 1788 bp, Oryza sativa
  ref <308>: DATABASE ACCESSION NUMBER: AK110852
  ref <309>: DATABASE ENTRY DATE: 2001-12-06
gagcgagctcacaagtccacagagacacacctcaccagcttgatcaagagctagccaagccaaatggagctcctgccatggcttctcggcttcgtggtcaagtacccggagatcatggcgtccgccgcttgcttcttgctgctcttctgcaggtttaggaggaggagcaagcggattccgacgaactggccggtggtcggcgcgctcccggcgatcgtggcgaacgccgggcgcgtccacgactgggtgacggagttccttcgcgcggcggcgatgtcgcacgtcgtcgagggaccgtggggctcgccgggggacgtgctcatcaccgccgacccggcgaacgtggcgcacatgttcacggcgaacttcggcaactaccccaagggggaggagttcgccgccatgttcgacgtgctcggcggcggcatcttcaacgccgacggcgagtcgtggtcgttccagcggcggaaggcgcacgcgctgctgtcggacgcgcggttccgcgccgccgtggcggcgagcacgtcgcggaagctcggcggcgggctcgtgccgctgctcgacggggtcgccgcgtcgggcgccgccgtggacctgcaggacgtgttcatgcgcctcacgttcgacctcacggcgatgttcgtgttcggcgtcgaccccggctgcctcgccgccgacttccccaccgtccccttcgccgcggccatggacgacgccgaggaggtgctcttctaccgccacgttgcgcccgtgccatggctaaggctccagagctacctcaagatcgggcactacaagaagatggccaaggctcgggaggtgctcgacgcgtccatcgccgagctcatcgctctccggcgagagcgcaaggcggccgacgccaacgccaccggcgacgccgacctgctcacggcgtacctggcatgccaggacgagatcggcatggacggcgccgcgtttgacgcgttcctgcgcgacacgacgctgaacctcatggtcgccggccgcgacacgacgagctcggccctgacatggttcttctggctgctctccaaccaccccggcgtcgaggccaggatcctcgccgagctccgcgcgcacccgccgtcacccaccggcgccgagctgaagcggctggtctacctgcacgcggcgctgtcggagtcgctccggctgtacccgccggtgccgttcgagcacaaggcggcggcgaggccggacacgctgccgagcggcgccgccgtggggccgacgcggcgggtgatcgtgtcgctctactccatggggaggatggaggcggtgtgggggaagggctgcgaggagttcaggccggagcggtggctgacgccggcggggaggttccggcacgagcgctcgtgcaagttcgccgcgttcaacgtcggcccgcgcacgtgcctcggccgcgacctcgcgttcgcgcagatgaaggccgtcgtcgccgccgtcgtgccgcggttccgtgtcgccgccgccgcggcgccgccgcggcccaagctgtccatcatcctccacatgagggatggactgaaggtgaaggtgcacaggagacaagaggattgaaccaacttcctttggacactttggaacgaaccatacagttcgaggtttcgtattgatatagcagaaaaacattgtttggtttcatattgatatagcagaaaaaatattgtttagatatgggtgctctgcaatctacaagagctattagggcatacatgcactgatgatactgtgctccattgattaattaattcgtgtatgctaatt

SEQ ID NO: 13505 - DNA, 1457 bp, Oryza sativa
  ref <308>: DATABASE ACCESSION NUMBER: AK110853
  ref <309>: DATABASE ENTRY DATE: 2001-12-06
atccacatctggatgttggtggaggcggcagtgggcaagagagagagagtgagagatggcactatccactagagaaagagggaggccgcccccatctcttatgctcgacgacttggtaggcacggaagcggaatccgcggcgcgaactcaccgcccatggccaacaacgtcatgaggcgccatggtggtcctccatgctcgacaagctcggtaagggaggcaatggcggccagcctcttggaagacggatggtttaggtgaaggagaggggtgcggatgaaacgacaatggcagtggcagaggcccttcctattccccttgccaccgccatttcccccatttccgcggtgcgagctagctctgctaggtcgccaccgtcgaggccctcaattttcccatctccgctgcacgagctagctccgcttgggttgcccccatcacctccttcacaccggctagctccgcttgggccctccccttccactgccagccagagcgagttggttgctgaggtgagcgccccgtgcatcgacggccaacagttgtagcaaaaagaaaggggaaaagagaacttccggtcgttgccgctgcttcttcaaatcgatgagacaacgtcggcccggagaaagaggcaccagcggtgaggttggccagacgacggagtggaggctcagggccggagtcgatgacagcgaccacgagtttcccaccctctcccttatctccacctcgagctgcacttgacggcaaccaggagctccccgtcattgtcattgcttcttcaaatcaactagacaacgttggctatcggggaggccacctcatcgttgcttcttcatatccagcagaccccacctcatttctggctcgggccgaggtggtgctggccatgcagatcgatgtgacgaggcggggtagcgctagcaacggggacgagatggagccgcagcgaggccgcctcgaggttcgaggcagagcagtagcgacacggcctcgagctcttcaccatcgcctccgcttccctcttctcacgtcatgatagccgccgaggaggccgtggggtggcaagtgagtggatccaagaagtggcgcccaacccctgggtggagttcaccaagagctggagaaagaagatgaacgatggaggaagaagagaagaaggataacagtggaggaagaagcgaaaagaagggaaaaaatgagaaaatgaaaattttggttctttccattcttaaatataaggcgcaactatcattaaaatatgatatcgtttttaagtaaccattaaaatattatgtaaaacatgataacatttggatataaaatactctcccaattccaaaatataaggtacacatatcactaacacaaagaccaagaaattttctggtttggatcactcaataaatttaatgcatgtaaccgataggattagagatattgagagtggagtattt

SEQ ID NO: 13506 - DNA, 1443 bp, Oryza sativa
  ref <308>: DATABASE ACCESSION NUMBER: AK110854
  ref <309>: DATABASE ENTRY DATE: 2001-12-06
tgaacagtataaggcaggcacctgatgcccttggtctactttggaggggccgatacatccaaaaataaatatgcgtgtacagtgtactcgtactaaagaaattaaggcacgtgacgacagtgcatgcgaccgatcaaagacaaaccaaatcataatggaatgtgccccaatttgaccggacgaggttgaaatctttagaagatgacagacaatccactcgcgcccgtgcacttgttattcattactcgcaactcgcaagcaaactgcccgcatcgtgcgcatcgcaattaaacgactgaacgagatagcgagaaatcagaaccttgaaatcgtacgcgaagacttgttacccgcctcacaatcttcagacgagagcgttcgataataacacgactccctgaaaaagattatattccctgggtttgtggcttttattaccagtgaaaggactagccgtagaaatcgttgaatcgaagaaaccactcaaatcaaagcgggcgggccatgatcgatggcgactcttgattgtggttttcttgccttccattttgcatacattcaattttcaacggtggtggcagcggcacgagatgtaaagttgtagttgataaatctctcctcttgggggaatgacatgaaagtcagcgaatcgaaccagtcatatctattagcagcgagtacgtatttgctgcttatgcaacttattcctcagtacaggcatcaccttttagatgtccaaccgattgttcaaatgtagtagaagaaacagttactgataagtacaatacatgctgtcaattttatctccaccgagatgcaatgaaaacggcatccaggaacaaatgcaattatgcaaagtggccgtgcaggcgtgcaccgttcttcaaatacatgacattgtcaaaaccggcgcagggaccagggtgcatctcttagatctctgcatatccaatgatattatacaatgctctcgtcaaactcggagaagaagtctcaactcgctcggcgagtacctcacagtgtaattaacaaacagtaagatccagtaagatgagcgaacgaaagggacgggagtaacactgcacgtacgaggacggccaatgaaagatttaactagagcagataatagtgcggtgcacggattaggctgacgaatcggcgtaaaatacaagccaaatgcagcgtattctctggtcggatgctagcggctgtcccagctgggggaggtggcggccgcgcgcgtacgtgccggagcacgccggcctacacacgcgcgcgggatcgagacggacgaaacggtgaaccattcgcttttgtgaggctcgaatctgccaagtccccagatgaaatcgacgtaggcatcattgacttatctttttgtcattagcatgtcgtgtgggataagtattttatatacctagttaccatggtacaaatcatttt

SEQ ID NO: 13507 - DNA, 2217 bp, Oryza sativa
  ref <308>: DATABASE ACCESSION NUMBER: AK110855
  ref <309>: DATABASE ENTRY DATE: 2001-12-06
aatttcaaccgagcagacacgcaacgccagcggcggcggcgaccggcggtggcggtggcggcggcggcggcggccggcgggacttcgcttcttttgtctcctcctcgacgaattgtctccggtattccggcagcgatttttccattcaggtaatcctcaattccttttgcttgctgccttccgccagatttttcctcttcctcgtatgcaatcccagttagagttcgatcgcagtaattaaccccgtgactagaaatcttccagcatcagaatatgtaattagttttattagagaagaatccgtgattagttcggtgcgtgtaaaggtagtctgcaacattgattgatttcgcccgccaaccgttcgacgaaatgacagagccgaagaggtactgttctcctacattaataaccatataaccttgtagatgtacaaatagttggtgtcttacctcagatggtcaatataacgatcgtgttgaagggactgagccatctgcatgatttatttcttttaaggaaaaagtagttatgcctttttctatattcattatttcaaaataatgacaccacatatgtaaagttcggatggcctagaacgtgtgagggtatttgcccaaactaatgaactgcagtgtgactttttttgttagctcagcatatacaaaatatgaaacctgtaaagaataagtttgaaaaagctgcaattttaatgacaactatcatcttgctacaacattagcgacacatttcacttagctacaacaataacgaatggaattatcagagaattgcaactccattagaccctgaggtttttgactaggcagcccacttgtcatactaagcgtgcttggaggccgtgaaatatgctgcaattgagaactacatagctctcagacataattatctttttcatgcatacaatgctgtctgctttgttgcttaaattagaacaaccacatatcagtgataacatatcacttctttatttagctcatacatgcctcattattaatattagtttactaaatgttgctgggttgaccaagagtcactaccaaactattctgccaatgtataaaattgctctctcacaaggttgtttcctgttgtggcctccccatatcactagaattgtaattccgaaacagataccaaaccccaatgctgtgaagagaaagagtagaacatctatggaattcttctcagcagtgtgtgacatcatgtttggttcagttggataaccgcattgtttagacaacggaggtccacacaacccaatattccccacaaaagagtcattggaaaatgtggagaagtgtaatgattgtggtatttttccatccaacatattataagacaaattcaatattgaaaggaagttcaatgatgccagctcctgcgggatctcaccagaaagcttattcgaggagaggtctaatgtctcaaggttgtctaatttgccaaattgagtgggaattggtcctgtaaggacgttatgagacatgttgagcccatgaagtaacacaagttcttcaatgccggcagggatgttaccatggaatttattgtttgagacatcgatgagtacaagtgacgttaaaatcttggaaaatgtcatgtgactgcctttgtatgtgactgcaacagtaaacttgtacctctcccggggatagagatgttccatgactgaagttccattatcagagctggacatcatagacctaagcatcttaaaccactcttctggcaacgtgccactgaagttgtttgaggctatgtcggcaatccgcaaacttgtaaattgacagttattcccgtatctagtatatgaaggatccagtacctgcccaatgaacttgttagactggaggaccaggactcgaagcacaggaagtttactcatccaacaagggaaggaatcactaatctgattgtttccaatgtcaaggatctccagattcctgcaagcaactagagatctgggtagctgtccttgaatcagattgtcgctaaaatccaatgcacttaatgcacaaccttctttgatattatcaggcaactcgccatcaagcttatttccttttagatttaagacttgtagtgcacctacatcctccatcagacatgatggtattgatccagtcaagttgttataagagagatcaataatttgtaaactcttaattgcatcacaaatcgttggtggaatgt

SEQ ID NO: 13508 - DNA, 1457 bp, Oryza sativa
  ref <308>: DATABASE ACCESSION NUMBER: AK110856
  ref <309>: DATABASE ENTRY DATE: 2001-12-06
ttcagtgggtgaaagggaggggaaaggaagtgcgaaaagatttggggggagacgtggctagtctatgtaggagtactcgctagcagaggcgcggaggacgagggtggttttgtttgtggccgaggaggatcccccgcggcgcaaccttaaatgccggagattttcacctgcgctgctgcggcagcaacaacaacgagacggaacggaagcggagagtgtgggagacgacgaagaaaagaaaataaaacccggcgcgtgcttgcgttgcgttgcgcgacgcacgcattcaattgacgaggggggcttttgcttgcaagtacagcgcgcgcgcgcaacggcgacggtgacgcccgggtactagcgtcgtgcagtcgtgctgctgccactactcgagtagtcgagtggccgggatacgcaagcgggggagagatagaactatcactggtatatgtcctttcatggggagtactttgtaccaaagcaaactagccgaagagtaacttcgggccatcagatcaagcattcaagtgagtaattcagatgaagtatttattactgtatgataagcaccactagtagtactaattgttgggtacccatcgcaagtgtatcataactttgtggccgtgacctcatgtcgcatttgggcctactcctaccgtcctacgcaagtgtacatctagcaacctcctcggccgatcctaaaatacaagcatttctagctaaatttagattgaaatgtttaaattttgggtacagttagtaactctttttaagctatattgctcttagcaaaattaactccatcataatatttatgggaatgctaggtacaggaaatccattcctcgtgtttgggacgggatctctcacttcctcgcgccgctatgacaaagaacgacctgaagatggctagattccacgacgagattgttgcacggtggtggctagattttgcagcggctgtttgtggtgcgttggtgcagtgcgggttcttcacacacaggggcggtgatggtatggactggactggtcgagctgatggctgtgacgaagccttaacattgatagatagggggcaatttggtctcctatagccacacaatgcaaaaggacgggatgggtctcgtttagaagaaacagaggaggaagatgtgaaggaaagaggaagaatataggaaatggaggggaaatggaaaaggaaggtagatttggcatcgcctgcgtttttcgccatcgtctcacggtgagagaatcgcagccggtaaccatctccgctcctctccctcccctctaagcttcatatatgatacccgacgggtaccaagtctggtactagtagttatctgcctggtatcattaggtatcggctggtatccatatgtatcaattgatgtactatatctgatactgataagtatcagagtctaattccttattggtatcatttggtttag

SEQ ID NO: 13509 - DNA, 1579 bp, Oryza sativa
  ref <308>: DATABASE ACCESSION NUMBER: AK110857
  ref <309>: DATABASE ENTRY DATE: 2001-12-06
aagcagtctctttggcgctggccactacttgcactttcccctgagcgtcgcgccgaccgaaataccgcaatcatgagtttcaaaggcttctcgaagagcatcacccgtgctccccagcaattccgctccaagtttaacatgggcgagaacaccaaggatgctgtctacattgacgcagcgcgccggttccaagaactcgaaacggagaccaagaagcttcacgacgagtcgaaaaagtacttcgaggcgatcaatggcatgctgcagcaccaaatcgacttcagccaagccatgtcggaaatctacaaacccatctccggtcgcatgtccgatcccgacagtatcaagccggaaggcaacccggagggaatcgaggcttgcgaggaatacgaaaatgtcgtaaaggagctgcaggagacgcttgcgcctgagctcgatatgatcgagacaagggtgatccgaccagccaacgaactgctcgatatcatcaaggtcatccgcaagacagccgtgaagcgcgagcacaagaagctcgactacgatcgacaccgcaccacgctgaagaagctgcaagacaagaaggagcgcacaccaaaggacgagaaagcactatggaaggccgagggtgatgttgagcaagcaacccaggattttgagtactttaacgacctcctcaaggatgagctgcccaagctcttcaagctcgaacaggagttcatccaaccgctcttccagtccttctactacatgcagctcaatattttctacacactacacgaacgcatgcaacggtgcgacattggctacttcaatctcaacctcgacatcgaagatgccttccacgagaagcgaggcgatatccaggaacaagcggaggccttgagcatctgccgctacaagaccacggggcgaccgaggccggttaggtacggacaggctcgcccagccatcgagggcggcaagccacaagggctcctcacgcaaggcaccggctcaagtgacaccaagtcggagcgcccagcatccaagtttggcacgctgcaagtcaaccaccaagagtctgacgaggcagcaccgccgccttactcgcctgggaaacaaggcgcggggcttgcggccatcgcagcatccaagccaaagcctccgccgccgaagcccaagcccagccgcctcactgccgcgcctgcagcagagaccgtcactgcgctgtacgacttcgcggcgcaggcagacggcgacttgagcttctctacaggagacgtcatcgagatcgtcacacggacgcagaacgaaaacgagtggtggacaggaaaactcaacgggaagcagggccagtttccagggaactacgttagcctgagctgagaatgaagaagtagaatcagttgaagggccatttgttcgctagagtcggtcgacgcggaggacgcgtcatgctgctgggctccagagggtatcccacctagctgggcagctttttatttctgtcatatacacaattcctcggaggctgtctgttttggtgtaggcatgtctggtttccttcccaggctctcaatacccaatggcaaacatgcac

SEQ ID NO: 13510 - DNA, 866 bp, Oryza sativa
  ref <308>: DATABASE ACCESSION NUMBER: AK110858
  ref <309>: DATABASE ENTRY DATE: 2001-12-06
gtgagctgtagtaactagcaacagcaaagccaaagcccctctcgtcaacgacctcgtcgcgcccgaggcacccaattcgcgccggccatggcggtggcgacgctgtcgtcgaggtcgaggcgcgcgtgcgcggaggcggcgtccgtgctcctcgtcctcctcgtcatcgcgccgtcggtggcagccgggggcgacaccaacggcgtgtacgagccgtgcgcggacgcggcggtgcagcgcggggacgggttcaccttcggcgtggccttcgcggcgcgcggcgacttcttctccggcggcgtgcagctctccccctgcgacggaaggctgtcgctggcgtccaagggcgccaagctcgcggtgttccgccccgaggtcgacgagatttcgctcctcaccgtcaacacctccgccgccggtggcttcgacccgatggtgtatacacacgaggaaccctaactgactgcacggttgcgtatatcaggaacccgaagtttggcataaacgcataaagaactagtcctctagtttcttcttttttatctaattttatatagacacaattccttttcaataaagaatttatgctgtcagtttcgtcatgcaataggttttagttagaatcaaacaccctaattgcctagtgagaaacagagaaacgaagaacttgccggtgaattgtcaatttgtcatgaacattggcaatcacgacctgcttggggaggatgaagacaaaagttggggggagctggattatgtgtcccatatggattgatacagcaccattttttggactctttgtaggagctctagtaacacagatggaaatggtcccatgaacatgcttctctgtttttctgtgggcc

SEQ ID NO: 13511 - DNA, 1468 bp, Oryza sativa
  ref <308>: DATABASE ACCESSION NUMBER: AK110859
  ref <309>: DATABASE ENTRY DATE: 2001-12-06
attgcctcgtcctcgtagcgccgtcagccgtgttgcaggcgacggcaaactggtaagccgatgcggagccctagacctggagcgtgacctcgtcgatggcggcgtgctgagatcggcgttcgcggcggagggggggacctcgtcggtgtggtatgcttgtcgcgcggcggcgcggccgtagctctcgtcgttgggcgcctggtaagacgcacgacccaatctctcacgcaccagcaccactgtcgtggaggatttggattctggagcaaagatccaatctcccatcgcagggggaaggaaaaagaaggtgcaggaggggaatgtgatgtcgttgcagaccgtgaaaggtccacagaaagcgtagacatcgcactgcgatttgggtgccgtgaagatggtttgccaatcccgcgacccctcgaaccacacaagcgccttcagctggccggagacatccagtatgtgatagccatgtctgtcctaccgtctccggtatgttgctgaagtaccggccgttccagtctccgctggaccaatacggattcgaggagttgaacgtggagaccatggaggtagggccgttgtgtccgagcaactcgaaggaatacatgccaggagcttgatcaacggtgttcttcctggagacaagacggcggttcacaccggtggcgttgttccagccgatctttccaccctgcagaacagtgtctgtcgggtgatcaaagctttgccagagaatggtggatgatgcattggttgtgctagtgctacgcaggacaaggtttccatcgtccaggagaacagcatgggtggtgttggttgggatgttggctttgctggaccagaccatggaggagttcttggcatgggtcgttgcaacgatggcgaggttgccatcgctggaaactaggagcttgcacgacgcgagatccgcgacagggttttcgccgttggcaacccatacaggggtgaatttggggacggtgttgaaccagatgcctaggtaaatgttcggagtgctattggaggaggacttgttactgtcggtttggaagaagccgagggcgaacctgccattgctggacacgagcttgtcgccggcggcgagctcttgtcccggtgagatggcatcgagcgttggctaaagaatgggagggacatagggagtagccatggtaactgagtcttttataacatccaagatccaacttgacgttattgtttgtaaatagctagtccttaagttctttatgacatccaaattgatgttcatagtatgaatcttgtacatttaatgtactgcaacttgtactcctacttgatactgcaactggattatattaaacgcgacagttccatcagccatcacaggagaaaaggcagtgatactgcaacttgtacatgattgcaactggattgtaaaaggacaagtcagtcgttagtggcaagtagagagattctttttctc

SEQ ID NO: 13512 - DNA, 1629 bp, Oryza sativa
  ref <308>: DATABASE ACCESSION NUMBER: AK110860
  ref <309>: DATABASE ENTRY DATE: 2001-12-06
tgctctgcggccgacggccccacctgccattctccccgctacgccagccgcctagcaaagcagccaccgcctcgcaagctcccacacaccacaaccaactcctcccctcccagaacggcaaaacccccagaaacgccaaaccctctcgccacgaaaccctagggagagccgcggcggcggcggccatggcgaccggcgacgacaagcccccctccctcgacgccgacatcgacatggcgaccggcgacgacaagccgaagccgaagccgaagcccgagcccaaggcggaggattcgaagctcaaggcggatgattcgattcccatgtccaagcccgaggagcccaagcctgaggctgccgcgccgatggaggactcgatggaggtggatggggtgggtccgagcgccagcgccagcgcggaaggggtgggagctgaggaggtggaggatgaggaggactacgtgctgcgggagattgacgtctactttacgcccaagcccttcgacgaggacaccatggtaatggctgctcgcagactcccttccgtaattgtgctgtaggggtggcaaatttgctaagttgttacttgttagtagtagtaaggaattgagctaatttaaccagttccaacctattgacccttttcctcttcacatgtacatgtccttgtagccaataattcagattatttggcctggcctgcacaaactgttctgctcatttttttttgtttaaagtgttctctatgccttttttgtttggttaatggaaaataaaaacttctctagtaaagttgtgttttgcatatagaaaattgactgattaaattaacatatataaaacgttaatagctccactacataagggcttttttccatgtttcaatctgataaaaaattgaacaggaaaatattttgtttttccttctggttgaattgagatacactgcaagtttgttggagtcttttggcagatgctatttttatcatatttattgacactaaactttatcatataattcacagctttacgtaatgcaatatccactgaggccgtgttggcgcccatatgagctaaatgaaatatgtaaggaggtacatgcccaattaactgtcctcttttgatgatttatacctaatttggaatttatactgtactatttaattgtactccaatactttattaaagggattatgactgtcaggttcgtgtaaagccattgagttcaaaagttgaagtagacttggatatcaatacagagtgtgaaaattatgacccagaggttcctctgccttctagactaactgaacaggtgatcatttcctttttgttttcactgaattaatcacatcaaggttttcctttgctgtgtacagagcaaactcttatgtatggccagcatatttctacaatccgcatggtgttcttattagttttggaataactcgatttcatatttttgctgttaaatgtttacgttcatctctgaagtacatatttcatagtattgccatttgagtgatcttttgcagtatagttaatcttcctgtctatttcaaattttttggataaaaatttatcaatttctgatatcatcttgatctaattattattaatttatccattggc

SEQ ID NO: 13513 - DNA, 1443 bp, Oryza sativa
  ref <308>: DATABASE ACCESSION NUMBER: AK110861
  ref <309>: DATABASE ENTRY DATE: 2001-12-06
atcacaaacccaccaagctcccatcgatcgcctccgtgatcacaagaagaaaattccccgagatccgccaagacctcgctcgccgccgcctcgccgctggcgccgccatgatggacccggagatgatgcgggtggcgcaggagcagatgagacggatgccccccgccgcgctcgccgcgatgcagcagcagctcatgtccaacccgagcctcctccgcttcgccacggagggcatcaagaccctgacacccgacgacctccgccgcgccggggagcagatgagccggacgagcgccgaggaggtgctcggcatgtcccggaggctcgccgccgccagcccggaggagctcgccgcgacgatgaagaacgcccaggccgagcagcagcgcgcgtcgtcctacgcggcggtgtccggcgccagggcgctcaaggaccagggcaacgcgctcttcaggctcgcccgccacgccgacgccgccgccaagtacgcgctcgccgtcgacaacctgcggagcgtcccgtcgtcggcgtcgcggtcgctgcgggcggtgtgcggcgtcaacctgatggcgtgccacctcaagaccgggaggctcgccgagtgcgtggagctaggctccgaggtgctcggcctcgacccgggcaacgtcaaggcgcactaccggagagggcaggcgtacagggagctcgggaggatggaggcggccgtggccgacctgaggagagcgcacgagctctcccccgaggaggacgccatcgccgacgctctgcgagacgccgaagagaagctcggggctcccagaggcctcgtcattgaagaaatcgtcgaagaagaagaagaagcacaaggttcagagatactaccaaccagtggggcaacttcgtcttcaacctctggacacagtgttccatcgccatcgccatcgccgtctgctgctgctgcggctgagatgatgaactccatgggggacccggcgatggggaagatggtcgcgtccgtggtgcagggcatggatccggagacggtgtcgatcatcgggaagcagttcggggtggacctgtccagggacgacgctgccaggttgcaggacgccatgaagaagctgtctccggagaacctggagaaggtgatgggttgggtgaaccgggcacggcgcgcggcggaggccgcgaggaaggccaaggagctcctcctgggcagcaggagaggctggctggtgctcgccattgtcgtgctcgtcctcgcgttcgtccttcatcacctgctcgggttcatcggagcgtgatgcgatggtggccgatggcctggcactgcatgcttagtgctagtagatgtagatttgagtggctgtaatttttcttattcttttctcgacgtaatagtcgagtatgaaatattcgtcgagttcttgtgtttatggagctgaaggaatcgactattag

SEQ ID NO: 13514 - DNA, 1960 bp, Oryza sativa
  ref <308>: DATABASE ACCESSION NUMBER: AK110862
  ref <309>: DATABASE ENTRY DATE: 2001-12-06
tgtcttctggtttttcttctgcctcagcgagatcccgtcgcgcccccccccgccattccaagtccggccggtctgaggccgaggagacggcgacagcggaggcccggaggcgggaagctgaccggcgagaagccgcggaccgcctccgggaagccgaggaggctgcccaggaggccgtccgggttcgccaggctgagaaggccgctcgggaggaggccagactccgccgggccggggagtccgtccgggaggcagaggcggcgcgcgcacgccaggcggcctgccaaacccccgacccgactccgcccgaggggacgacaacttccgaggccacccacgacgaggccgcgggcgtgccgctcgggcccgacccctcgggcgacacttgggacgagccagcttcgagggacgcccccgagtccggcacgtcttccgctgccccactgagcgtggagcccttcctacaggccttggccgccgcgaacagcacggtgctggacgggttaagtgcccagatggaggccctgcaggcggagcgggcggagctcgacacggcgtgggcgcgcgtcgaggaggggcggcgctcggtggaggccatggtggaggctggccgcaaggcgcaccaccggcacacctcacagctcgaggcccgtcgtagggagctggtggagatcgctagggaggtggaggaggagcgggagactgccctcatcgccaccgccgtgctcgacgaggcgcgggacgacctccgcctccaatacgggagccgggcggcggagctagaggagaagctcgacgccgcccggggagtccttgatgccgccgctgcacgggaacggcgggcggcggagaaagaggcggcgtcccgccagcgcgaagaggcccttgaggttcgcgccacggcgctggaggagcgtgcccgcgccctggacgtgaaggagagagacctggcggaccgcgaggccgccgtcgccacccgggaggcaacactggcgtcgcacgaggccgcctgcgccgaagaggagtccgcactccgcctccacgaggacgcgctcaccgaacgggagcgagctctcgaggaggccgaggccgcggcgcagcggctggcggacagcctgttcctccgcgaggcagcgcgggaggagcaggcacgccgcaaactggaaggcgcccgcgccgagagggccgcactggatcagcgggccgctgagctcgaggcgcgggcgaaggagctggacgcgagagcgcacagcggcggggcggccgcgggccacggcgacctagccgcccgcctcgcagccgccgaacacaccatcgccaagctgcagggcgcgctggactcgtccgccggggaggtcgaggccctccgcttggcgagtgaggtagggcccggcatgcttcgggacgccgtctcccgtctagaccgcgccgggcggcaggcgggtctctggggcgggcggcacgcgaagtacgccgccaaccaggggggcctcgcccagtgcctctcagagatggccggggccctccagcggctccccgaggagctcgaggagacgatcaagtcatcctcgagggacctcgcccggggggcggtggagctcgtactggcaagctaccaggccagggaccctgacttctccccgtgggcagcgctggaagagttccctcccggaaccgaggatggcgcgcgcgcgcgggtccgggacgccgccgactacatcgtccacagcttcgagggtacggcccctcggctcgcgttcgcgctcgactccgacgaggagggcggtgacgacggtgcggacgacagcggcgacgaggccgacggcccgggggcgccggagtgagcccccaggcccccgccaatcttaataacttctccttcttcttccgaggccttcgggcccccttcttgtatagactgatttaatctgtaatcaaataaagaggaaatttctacgtc

SEQ ID NO: 13515 - DNA, 875 bp, Oryza sativa
  ref <308>: DATABASE ACCESSION NUMBER: AK110863
  ref <309>: DATABASE ENTRY DATE: 2001-12-06
acttcctctcctagctccgacgatcgccggagaccaccactagtaagcttcgaggccgagatgaatagtgcggcggagacagagaccgagggaggcggcggcgccgcggccgtggagccgcaggtggtggtggtggagcgcgtggtgacggtggagtacctggagccgtccatgtcgcggggcctgctcggcatgttcccggactcctccgccttcgacttcgactactcccagagcggcatctggtccccgctgaacaaggtgccccgcgcgtcgtcgtcgccgccgccgccgccgcgctccggcggaggcggggccgagggctcgagggactttctcatcgccaacccgaagcgcagggcgagggccgccatcgggggcaggtcgtcgaggtcgcggcggcggcggctgaggctgcggcgggaggacggctcattcctgaacctccacgagacgggctgcgcgaggctggacttctcgccgccgccaccatcgtcgcctctcccggccaaggaggaagggtggaggcgggtgctcaaggcggcgatcaggaagttcaaatcgcggcagcgccgatcccggccggctcccctgctccagatgatgctgccaacgctatgatcgatcgatcgaccgagcaatcgatctcgtggttcgctcgttcagttcgatgttgcatgaatcaatcaccacgcgttctttcagtcggatttgaatcgccggccgcccgcgacacgccccttcttcgtgtagtataatttagaagttactgaatttatccgtataccacatgtaatttgtaagttgtgctttgtaacgacgctctcgctacagattcaaatttgaatatataaattcaatcgactttttaggcg

SEQ ID NO: 13516 - DNA, 1972 bp, Oryza sativa
  ref <308>: DATABASE ACCESSION NUMBER: AK110864
  ref <309>: DATABASE ENTRY DATE: 2001-12-06
acttgccacctcgcccggtcgccctgtcccgggggcgacgcgggcggcgaacaagccacgccgcccgcccttctcctcccctccccagcctcgccgccgcccgagccgccgccggcaaagccgggcggctgcaaggacggcggcggcggggctctctctccctcgctcgcggctaagacggtcgggacgtcggcacggcacgagctcagggcatggcgtcggcgccgaccagatccggtgccgtggcatccagatccggtgcggtggtggccggatccggtcccccagtgacgggaggcggcgtcctggcagctcggcggcgaggtttggtggtgggtttgggcggcggcgacctggcgcgaccaggcggcggcgacctggcgggagacgctgccggagctgcctccagtaccgagcacggaggcgtggccagacgacggatgcggcggtggaggtgccgcgagagccggtggtgacgccggcgatgcgggaggaggcaacgacgcctctagccagatctggctggcggtggttgcggctgccaacggcggcaatgacggcggtggcggctgtggcggcatcgactgcggcggctggctggcgaggcagcggccgtggtggtcgaggcgtcgtggaggcggtcgcgcggcctcgtgggtggcgaggcctgccatgcaggtgtcgtggaggccggcgacgtgtggctgtcgtggaggccagcgtcgtccggcagcgggagggcgtcatggagaccggcggcggtgtggagtcgcggtcggcgacatggagctcgcgggcggcgacagcgggtgctggtggctgtaggctgcgacagcggacagcttgtggtgatggccgtggcgatcgtggacgtggctgcggcggaggaggtgaggatggtgatggcgaggtggctgggcgttcggcagcagcggctgcggtggcggagaccacggtcaccggaggcatggcggcttcggacggctagccgagggcgtggcagacggttgcatctggccagcgtggcatcgtttggaggaggggtcggagaccggcttggcgcagaggcgcagccgatggcagcggaggccggcctcctctctctctcctgtgaacctagccatttcctctcacaaatccgctcgattcaaacggctaattccaaaattgattggaggaattaatcctctttccttcgtctttgatttcccccttttttcccccttgattcgtgccctcaatcgccctgaacggccgcgcgattcccggccaccttccatggccgtcggccacccatcccgccgccattccaccctcttccgtggccggctcgctcccctctgctataaaatggagcccgctccttgctttctctcgttgtttgcctcatcccgagtctccccgtggccgcaccacctctccctgtcgcccccgtctctctcccgtgccgtcggccacctccagccgcctctgctgtcgcgcctgtgcgctggccggccgcgccgtcgccaccctcggccttgtaggtgcatcccctcccccggcatcgcctccgtttcgcgcggagaccaccggaggcacgtccccgctggcaaccagtggcgttgatggacaatggatctactattgattcggttgatatgacgatgagcccatgaaaggggctctatgagggcaccggtagcaacggcgatcttgaaagaagtaaataccttatcgatgaaacaaccgaggacattgtaggtctagattcagcacgaacgattccctagcatcacagacgacatcattcttgcttttatgttgatgtagacgagcgatgctccaatatacgcacgagcagcatattgattcatgtcagtgtagacgatgttcgctccggtagcagtgacagtagggcacaacgtgaggaagagaatatattacccgtgcattgcaattggattttaattaattaaagaaaattattatt

SEQ ID NO: 13517 - DNA, 1385 bp, Oryza sativa
  ref <308>: DATABASE ACCESSION NUMBER: AK110865
  ref <309>: DATABASE ENTRY DATE: 2001-12-06
cattctgttcgacaaattgttcagctcggacgttcctggcttgttcattctgcttgccctgcattgcacagtacagcaaccatacgattccgtaacttcgtaagataaaaccaacgaaaaatctcaacaaacagggatattacatcgcgaggtagcgcagattgcaaccaacctgatcggtatctccggtgttctcgggaaattccagtaagatatcgttctcggcggcgatcaccttactcagcctctgcttctgctccgtgctcgccggcgcgccggacaacttccgcaccaactgcagcggcagagcaaccgtgtcctcattaactccagttcgttccggtccatgtctcgcgcagttggcgagcgacatgacacggcatgtgttgggtggtagtagatgggtttagttggagggatcaatgatcaatctaaacctaccgtgggatcgacgacgccgtgggcgccgtccttggccgccgcggcgaagtcccggccgaacttgtccgccaggatggcccgcgcgtcgagcagctccggcaggtcgccgcaccgcgccgacgcgaacatgagccccgccgccgcctccttgatctcctcgccgcactctctgtatacaccaacccaaagatgacaaaagcttgctgatgagaggcgatgaaaacgaagaaacaaggcaaggaattaatcaaccgaggagtcaagaacacggctgtgtgctcttgcatacatacttgggcttatctagctgcgtggcctgctcgatgaggattttgcagtagagctctacgatgtccagcacctccagcatgttgtcctcgtcgatgacttgctctgcctgcagaaacagaacacggcggctactgttagcggaggagtctctgcgcgtgtcaggcaaggcaaaagcatggcatggacatacacggaggagagcgcggtcgaggtggccgatggagaggagctgcgcgacatcgccgcgggcaatggagcggcgcccgaggcggggccggcgggcgacggcgacgcgcgcggcagcgagcttgatcagggacttgagcttggcggtctgcttcgaagaggcgctcttgccgccgaagaggcccatcgcccccgccgcgacgcgctgtgacggcggtgttcgatcgggtggtgagtgtggaggcggcgggggtgtagcctcctacccctctcttataccgcccgctctggaatcttggattggtgctctgtggcgagcagcggcgcgtggcgagagcgcgaaggagaagaagattgaaggccaagttgcttgcttgttttggtctccgtccattcgatggaaaaacgttgggccgattttggtctttttaccgtgccaacacatcaagataaattggtaaggatgg

SEQ ID NO: 13518 - DNA, 1587 bp, Oryza sativa
  ref <308>: DATABASE ACCESSION NUMBER: AK110866
  ref <309>: DATABASE ENTRY DATE: 2001-12-06
atcgcacaccaaaatctctcctctcctctccaactcgcccgctgcttcgtcttctggaaggttcgagaaaacctagggcacgcagcggatggccgcggcggtggaggcggaggggcgcgggggcgagcctgtgacgccggggacgccggcgccggaccttagccaggcgacggacgaccggcggctgctgcggtcgcggtacctcgccgtgaagagccgcatcagcgatgacaaggatgacatggcgagggcggattcggtgaagttccgtgcagtcttcacgcaggtggaggatctccacaggcttgttcagaggcctagggagcagatcgccgatgcggaagccttgcttggcatcgccaccagtctggtggcatcagtaaggacgcattcagctctggggatcacgccctctgatttcgtttccggaatgctgaagaagtttggagagaagaggagggatgatgatgaggctgcctcgttgcgctggctcgatgtaggcctctacacttctcggattttcatggccgtgcctggatgctccacaatggttggtccaatgaatacagaagtgttgccacggagggttcgtgtgtgtagaaagaggacggctaagcctcgtggaagtgaatgccctgaacagctcccagattcatcaaatgcagcaaagacggatactgacaggaacatgtctgtcatatttgatgtcctgagaaagaagaaaaatgctaggctggaaaaccttgttttaaacaggaagtcttttgcccaaacggtggagaatatctttgccttgtcattcctagtgaaagatggcagggtggaaatcagtgtcaatgatgaggaccatcatcttgtctatccaagaaatgcccctgctgctagtgccataacctcaggaaaagtagtatacaatcattttgtattcagattcgatttcaaggattggaagctcatgaaagacatggtcgtcgacggcgaggagctgatgcagcacaggcctccggctccacaagtcggcacgcacggctccagcaccaccaccaccaccaccaccaccggaggagcgaatgaaggccctgagaccgagacgcctgcagcccctgcacacagcacggcgatcaggaagctctgcaggaaccgaggcctggtcatgcacgacatgaaggaggaggcggccaccatggaggagaagaggtcggccatggacgcgcaggtgtctcagctggcgtcgaagcgcaggcgcctcttccaggacgacgacgatgacgacggcgacttggagtagagggcagtggccatggtggtagtggtagtggtaggaggggggggggcgtgtagaggaggagggaaagccttttatgtaggtagagaagccaatcagcttagcttagcattggggtgtcttgttaggaaatgatgaaacggcttagcggcattgcacggcccgtgtcagtttttggatcgttgggcgtgtggcgctgaatgttttaaggtcttttggttatttaggccagtgtgtatgaactggacgacgctattttacagataaattgaagtcaagttataaaggtagtgtttggcagt

SEQ ID NO: 13519 - DNA, 1852 bp, Oryza sativa
  ref <308>: DATABASE ACCESSION NUMBER: AK110867
  ref <309>: DATABASE ENTRY DATE: 2001-12-06
atcactcatcagcactgcactaaaagcagtgtaaaagctagctagccctagctgctgtaagattaatcagcttaattagcagctataactagctagttaattaattagcttaattagttagctttagctagccatggacgactacttcttcctccagtcgctgctgctctgcgtcgccgccgtggcgctgctgcagctggcgaaggtggccgccaccatgaggcggcggccgaggacgccgccggggccatggaggctgccggtgatcggcagcatgcaccacctcgtgaacgcgctgccgcaccgcgcgatgcgtgacctggccggcgtgcacggcccgctgatgatgctgcggctcggcgagacgccggtggtggtggcgtcgtcgaggggggcggcgcgcgcggtgctcaagacccacgacgccaacttcgccaccaggcccaggctcctcgccggcgagatcgtcggctacggctgggccgacatcctcttctccccctccggcgactactggcgcaagctccgccagctctgcgccgccgagatcctcagccccaagcgcgtcctctccttccgccacatcagggaggacgaggtgacggcgcgggtggaggagatccgcgccgcggcggcgccgtcgacgccggtgaacctgagcgtgctgttccacagcacgaccaacgacatcgtggcgcgcgcggcgttcgggaggaagcggaagagcgcgccggagttcatggccgccatcaaggccggcgtcgggctgtcgagcggcttcaaaatccccgacctcttcccgacgtggaccaccgcgctcgccgcggtcaccggcatgaagcgcagcctccgcggcatccacaagacggtcgacgccatcctgcaggagatcatcgacgagaggcggtgcgtccgcggcgacaagatcaacaacggcggtgccgccgatgatcagaacgccgacgagaacctcgtcgacgtgctcatcgccttgcaggagaagggcggcttcggtggaaaggcggcttcggcttccacctcgacgacaacaaaatcaaggccatcattttggacatgttcgccggcgggacggggacgtcggcgtcggcgttggagtgggcgatgtcagagctgatgcggaacccggcggtgatgaagaagttgcaggggcagatccgagaggcgttccacaggaaggcggtggtgacggaggccgacctgcaggcaagcaacctgaggtacctgaagctagtgatcaaggaggcgctcaggctgcacccaccggcaccgttgctggtgccgcgggagagcatcgacacgtgtgagctagatgggtacacgatcccagccaaatcacgtgtcatcgttaacgtgtgggctatcggtcgagaccctaagtactagtactaggaggatgctgaggagtttaagccagagcagttcgacgacgatgctatcgattttatgggtggcagctacgagttcatcccatttggttctggtaggaggatgtgccctggcttcaactatggcctcgccagtatggagctcgtgctcgttgccatgctctaccacttcgattggtcgctcctggtgggtgtcaaggaggttgacatggaggaggcgccgggcctcggcgtgcgccgccgctcgccgctgctgctctgcgccaccccgtttgttccggccgccgtctccgccgattattagttagtacgtagcttgtcgctaccttgcaatggcgctcatcacgtctctcaactcatacgatttgcctagtatgatctctaaataaatctcgcgctctgtaaattgatcagcagtacctgcgtactatacagtgtcgatttac

SEQ ID NO: 13520 - DNA, 1492 bp, Oryza sativa
  ref <308>: DATABASE ACCESSION NUMBER: AK110868
  ref <309>: DATABASE ENTRY DATE: 2001-12-06
gaaaccagtccgcctcggtctcttcttcttcttcttcccaatttgcatccctacttccacgggaagcatcaccgaatcggcgagcgagagcgactcctccgatcctcatcgctccctccgccttgccgccggcgccgcgcccccgccggaatcctcattcgcttcgcctcgcttctcttctccgagatctggaggaactagctagtaccaattaagattcaccatggagccagatgcttctccaacaagtaccacttcttgttccaagcaatccaagctaccattggcattgttaactctggaatgcaacagcaacaaatgtttcctgttcgatccatccaccaagcagacccgtggagcaaccgacatggccgccttcttcctggacgccgcgacattggcgttcgagaaccgcgggtggctgctcatggtccagaactaccgccatagcccccggcgagagaaaacactgcgaaccgtcttcctgtccacgccggcaacggccggcgggtggacctgccggtgttccgctccgtcgccggtggcctcttcgtcttccacatcaactcccatggggagccactggtggtggcctgcgtcgagacggcctccgattatcccaccatcctgccccggcgacgtgtactggacaacctacaagaacacgaacacctcccccccgcagcaagctcgccacgggcggcgccgcgccgcgttcacattcatcgtggacgcggcgttgcgcgggaagcaggtggtctgcgccgactaccgtgggaggatctccgtgttcgacatgacggagacggcctggaggacgccggtgccctcgccggggtggaactggcaagaggatcacttcctcgtcaccgcctctggcgaaggcggtggcgaggaagaggaagaagaggaggtcatcctagtctcatgtcgccgtcacgatgatcagttctgcgagttcaagttcttcaagctggatatagcaatggcgccgtcgccattggacgccggcgatctggatgggttcagctggttcctctgccgtggtagatcctcccgtttaagggaggagaaaggtgggaggaaagtgtacacgttctgccctgaccggctgtggggtgagagcagaacgatcgatcttggaaacggaaagaagaggaagatggctcctttcaatccacgaggtttgatagagaaatccatcacaaatgtatatgcacacaatctggttgatggtgttgttgaggagcttctcccggcatcgattgtgactgaggcacgccattgggttcactctgctgtcttcagtgaaccatttgcctgattctagaatttgggttaattggacctgatgatgctaaattttcaaacatggcatttcagtgtaagcctagtgacattgtcggaggaacttcactgctttcatcttttgacattttcttctgggtaatcacatgataaaacatggttccattcacaggcccttgcaaat

SEQ ID NO: 13521 - DNA, 2144 bp, Oryza sativa
  ref <308>: DATABASE ACCESSION NUMBER: AK110869
  ref <309>: DATABASE ENTRY DATE: 2001-12-06
actcagatcgaactcccaaaacctcttctgcggcggccgctttcgttagtcatcgccggccttccaaatgccgtcctccccgtggatccccaccgccggcgctccgccgccgcgggcagcgccggccgtggtctactcctggctgtcggagcgccaccctgtcaaggaggcaggagcaggagcaggcgcttccaacgcgcaggagtccaggccccgcgtttctccggcggagaactctgaagtggaaacccgagagcatgaagagaaggtcaacaaatatcaggctgtccttgcagctcgtttgaaggccaaatacttttctggcaaggcttttggtaaaggtaccagtgcactccaatcttatgacaatagtatggcatggcatattatggtttacagaagatttgcttgtttgttcaggcagtcagatatctgcctggttagattatctttttttttttttaaaaaaaactttgatatctaatagatcatttcctgcatgttagcttagaagaaagctcaactgtatggttcaacaattgacatggaatcttcaaatggtctgagtcatgatccactaaatcaacaaacacaattagtctgtgtcatgttttggccttgagatgcaacctgtcattactaaaagatatttatattattgaatccaagatatgctaagttgactatcctaacaatcatctcgaagaaatgcattaatatgccttccttactttgtaaggatagccagtgaccagatgtggtagtagagtttgcctttttgttttcttactaatgaattaacttcaagtgatagtttttttccccgtattgacaatgattttttttttaacgtttcaccatttggtggacagaaaatgtgtttgaagaaatgactatccagtctgagaccattctgttaagcaggtgcccgttttcaagtttatttgcagatccagcaaaattttgccgggagaagagctgtactaaagaggacatttatccatctttgacaaatgcctcctttgccaagcataaccatttatctctagttcgtgaagactcgtcgaagtaattagcggacagtttgtctgcagaaaactcttaacacctgccaagtggcacctgtctatcaataccacctaatggatgagggttgggtagttacattattaactacatatgttatccttaaactaaatgaactgaaacatgtaaaatatcaacaggcctaatttaacttgagagtttagtttcttcttgtaggcctgttgagcatatagatagctatgaacttaactctatgcaaaacaatgctcatattgagattattcctctagggggatgtctccaacattttacctgtcaccatagtactcacatgcatgatctttgcatatttttttattgttccttttctacagagtgctgttattttgtagggtactagtatcttgaactttctatattccgtttgtagtaccaacattccagggcctccattgccgattattccggtgcatctgtcaacatacatggcaagcttcatctgcaagtccccctggaatcatggtggacagatgtatgaccaaacacacctgaactgcatctgcagccattcttatcttcgtgcaactgtacctgctaacctgcaccaggtaaaatagctcctatgagcgacggtttgttgaggtgctcttgtactttccagttgtttcctcatatttgcaaaagagatctccattgccaccaccgtgagacattgcatggtgcactggtgcttcttccaccgtgcgccgcacaagggcaggggccatgcccttttaaccactgtttgcttgggtcctgcgatgtgagcgtccaactatggtggggcctttctccctcaggttcacacgtagtaccctggactggacatcctttggctgataccgcacttgcaatggcaaatgcatcaccggtctctagatttgttttttttagttctgatctggtgcacagctgccgttcctatcttcagcaacacaatttgcaatagaaatgtacctccttttcttttcctttactgtggaaaatgagttaatatatgtacgacatcctatgttaatatttgatattgggattctgtgagatcctgcacatctttg

SEQ ID NO: 13522 - DNA, 1618 bp, Oryza sativa
  ref <308>: DATABASE ACCESSION NUMBER: AK110870
  ref <309>: DATABASE ENTRY DATE: 2001-12-06
agtgcacaaaattcaatcccccgtttctctcatccccagatctgacgatggccgatgtcaccggcggccactcctcccctccggcggcggcggcggagaccttgcccgacgacgtcctcgccgagatcctcctccgcctcccgccccacccttccttcctctcctcggcgtccctcgtctccaagcgctggctccgccacacccgcaaccctagcttcctccgccgcttccgcgagttccaccgcaccgcccccgtgctcggcttcttcctcaactcctcgcatggcgccctcttcttccccaccgacgcgcccctctgccgcatcgccgaccaggtcgcctccctccgcaggaacacgggcgatggcttgtggtggctcgtcggctgccgccacggccgcgtcctcctccgcagctgcgactgggccaacctgctcgtctgggaccccatgaccgaggggttcgtctgcttccccgcccccatccagatggtccaagccgacgccgaccgcgacgccgccgtgttctgcgctgcctccgccggcgacgaggaccgccgctccggcgccttcaacgtcgccgtcgtgttcgtcagcggcgaccacgtgttcggctgcatgttctcctcggcgatcggcgcctggggcgacgtgatctcgacgccggtgactttacctctgctgatgatctacgacgagcccgctgcccttgctggggaagccctgtactggattgttaatggcagcagcttgctcgagttcaattgcggcagccaaagtctagctctgatctcgcggccatcggatatgcccgcaacccacaggtggaacatccgtcctgtgagtttggaggacgatttgcttggcctcgcctttttcaacgatttctgcctgcatctgtgggtgcgggaggttgccgatgatggcgcgacgaactgggttccacgcaagtccgttgagatggacaagctcctttcgctgccagtggcgacggaggacagtcggcgccgtatcgtgcctgcttggatatgtgggttctctggggatggaaatgtggtgtttattgggacccctgctggcattttcttggttgagcttgacacgttgaagttcaagaaggtgactgatggttccctactcatcaagactgttcatccctatgagagcttttattatgttccaaatgaaaaaggaggaaaacaggagagtgctatagtggggaaccaggtttctgaggcaggtggcaagtgagatcttccgcgccaagttcagatggagactgtgctcaggacagttggaaggatgaacacaaaggaggatgtcactatatgttgggagaattcaccaggtcttttctagttttaagttctgtttagctgatcatcactttctggatgctatttctcggtacatgttggttgtagtcttgtgctttgaaactcaacttttgttgtaaaccagcggttggtatacatggtaggatggcaccatgtgaacaacctggctgatgcttgacctgtttgctgctgaaaggtggtgtgggcgttatgaaccttgtagtctgtttgactgtttccttcagtggtcggtttgaagacaaataaaaaacaggttttcat

SEQ ID NO: 13523 - DNA, 1456 bp, Oryza sativa
  ref <308>: DATABASE ACCESSION NUMBER: AK110871
  ref <309>: DATABASE ENTRY DATE: 2001-12-06
ttctattcatggtgataagacaatgaatgagagaagagaaagcttgagaaggtttctcacaggagaagtgtctgttgttgtttgtactggggtattgggacgtggaatggatctcctgaaagttcgtcaggtgatattatttgacatgccaaattccattgatgaatatgttcaccaagttggaagagcatctcgaatgggtgtggagggtatggctattgtctttgttaatgaggaggacaggaatcttttcagagagcttgttcagattctgaagactgcaggtgctccaattcccagggaacttgcaaattcaaaatacacaaccggtataccccttggtggtggtaagaagagaaagctgaagtctaggtgacattcttgaccagggtaaatatcagagtggcggtcaatctttcttaaggatggaaaaattgtatgcctacctggaatgttagctatgtttttatcttcatgggaatgcaaatgcatcttatcatctctggtggataagttggatatgtctagaattcaatcttgtcaaatttccaggcttttcctgagccaacacgatttctcagggcaagtacatgaagtcatgaaatcagcgtacgtggcaaatgtaaaagaatctatggcacatgtaaatgtcagcaaattcaggaaattctggaaccatggtctagagtggtgacttcgttatgccgtcgtttcatccaagcctttcagatgacaaagctaccctctccctctccatgtgagggtgaagctggactgctcctgctcagcaactcctcgatcatttgcagcgcaatcttttcctcatcatccattgtcacttgcgaagctgttgctgttgatgtgggctgagctgcaggttcagttggttctacctctttgttgagctccaccgtcatcacccagttggagtcagcacgggcccctgcgcgcttttgccacacgccaatgtgggacttctcggggtcgaggcggaggcaggttaaggacggagatggcgccttgcagcacttgcggagcttagcactgagaatctgtgacaggttgcccgcggaggagttcctgctaccgccattgctacgggcgtcctggtctgcggccgtggcgagatcaccggtggagttcctctgcacggggaagttggtcttggcgttgcggccactcatcagcacagcagcctcatcgtaggctcgcgcagcctcctcggccgtctcaaaggcttgcagtcccatttcatggcaagagtacttcgtacaccgtatcaacattgaagtatctgaacagtctgcctgcaataattggcggctcgtcatatttcactaatcaactgtcctttgctgctacagatgtgttctgtaaaagtgattcagattgatggaagttcgttgcccctgtcgactgattaattaatgagaggaacagaaatatattatcgatc

SEQ ID NO: 13524 - DNA, 1746 bp, Oryza sativa
  ref <308>: DATABASE ACCESSION NUMBER: AK110872
  ref <309>: DATABASE ENTRY DATE: 2001-12-06
acagatgctacagcattgccgacaagtgtggtgctcagtgagttaccacggtagaacagaaccatgatgtacttacctcatgtatttcttgatctcatggatatctcaatacctctttgtgaggtgtcctctgacgtgtagttcaacataattatttaattgctcttattttaatcagagagatcgttcttatactgcttctcaagttatttggagtgtttcctaaccttgcagagaagcacattttttttctggcacattattactcatccacgactggaagtaggaaggtaagagagaacatacggggcttgcaggctgaaatttactggtaatggcgtttctggtcctacctggatgcactgggtctgctctgctgaggttgctatttggatctgaagaactcaatgtaagtacaaacatatgttggtgcatccagtgttgaactttgggtagctatgttttcccatatattttagcttcgatacacaaaaattaaatcatgtagattcgtctggagagatgccttcatatattatgatgtcattggctgttacaaaaattagtggtcatagttttttttttttggagaacatattatgctccatgaccaaaggggcaagcctatacactatttacctgaactttgcagttacaagcctattattaactgatcatataattgagaaccaaaatgcagccatgaccaccacaaacgtcaggaggtgtgttctgatcccctcgtcgacgttggtacgccggcgtgcttcgctgcggctggctgtcttcttcttagctccgccgttgcctttgccgttgccgctgccgtagccgttgccatagttcccgttcatcccctgatcgtcatcagcattctcaccgtcggcgctcctcttcgacttcttggatggaggcattacgacggcctgaggtggtggtgaatcgacggtggtctcggtcgcggttgctgcctctgttgctgccggtggcgcgtccgtctgctcctgcaccggcactggaatacggcaaaatttgcaaggagccagtgttggtttacgattcacgaatgccagaaaatgttttcgatgctagtaagatgattttttttttttttaccttggcaagacaggacagggggagcgtagaggaggcatccaggcagcggcagcgccagcgggagcgtggggagcgccgcggcgaggctggccagcacgcgcacgccggcgccaccgccgttcgacggcagcagcagcgagcacaggcagcggtggccggcgtcgagcgcctggttcagcgacgagcagcaggcgccgctgatgttccctcctgcgatgccgatgccggcgccggcgccggcgaccgcgtcctgcaggcacggcgccaggtccagcccctcgaacatgccgcagcacgacgtggggatcgcctgcgccctcgccattgctgctcctcctcctccaccgaggaggaccagcagatggagaagagcagcggctgcgtgtaatctgcagcgcaagtgatgatgatgcggcagattaactggagatgtcatgttaattagctggctaatgatttgatccgtgtaatatgctggtttactgatgcattttcatcatggttaagataagagaaggtttatatagggcagtaacagcattggtcaaacgaagacctgtattaatgttagctcattttatttgatgtttatggagaaacgatgcatctttttgcagttgactcatgctt

SEQ ID NO: 13525 - DNA, 1614 bp, Oryza sativa
  ref <308>: DATABASE ACCESSION NUMBER: AK110873
  ref <309>: DATABASE ENTRY DATE: 2001-12-06
actgcatcttccccgaagggcgcgaggcggcgagcctcacgccctctcccgagtcccgagtgaggacacgccggcggaggccgatggccctagccgctctacctctacctctacgggctcctgaaccgtgtcggcgttcacgaggcaggcggtgcctaggtgatgcaggcgagctccccctcctctcctccgctggttgcttctgcgggccgtctctttgcccaggtgcggacagatgaaggcgtcgatttgatcatctgaagtggccgggaatccgcaatcatgcggtggcatgcagccgtcctattcgatgacaatgcagtggtatctttctgatggagtaactcggaattaaggttatcctttgcattgtcaaggacaaggaagaatctcttgttctgtatggtcctggagagatcatgttccgaactagcttggagtgtttccagacccatttcagaatcaaaaggatgctgttctgctgcaaaagaacaaaatattttcttgatgaaatcctctgagtcagacctttgagagagagagacccatcctctctgattgaaggccttcttgacattagggtggttatagattacttgagcaagtgctgttttgcctaccccagcctcgcctacgatacatacaactttcacagttgcagttccccgtgtctcttcctgcattctggatgctggaaaatgttcagcttgtgcttcatttggaaatatgatgctcattaattggtccttctctttctcacgaccatggaacactacttgtatttctggaagaaaccctaccatatcctctttagaatcattcaattttaacaagtcaaaaaaatttccagacttactggcaatcttgtcgagccttgccaggagagtcttcagtctgtatatgtcatcatcaacaaaacccagattcttcatcatgtatgccagaaaaccgctaaccttgttctgttggctcttttgtattctcttgatctcaaagtcatccagcagctcttccgcctcagaagcaattttcttgatcaactccagccagccggtgaaattatcatcgacgacgggccttcgctccgcgacatcaagcactgcttgcagatgaacaagggaagcctccacgttaaacacccgcaacgtcaccatgcagctcatggcgctcctccaggatggaacgcgccttgcccacgaagttggcgatcacagctcctgcgaaccatccgccgatggtcaatccgcctccaaccatgtcgaggtcgcccctccaactccaaggcttcaactagtagcacggaacaggaaagagagttcagaattgcatcctagtagaagaggactggcagatgttctcataagctaatagaatctgagtgcgaatgggtcatggccagctaattggtgtgttcagtcattgacctaaatgtgggcatgtgtgcgaatgggtcatagccagctaatggaatctgagtgggagcattcttaatgctacagtagtcgaccttcgttgttagtggcataaggtacatttgttttttctcaatagggattaaatacacattcagacaatgaattaagatgaatctgacttttctttttttttccccgc

SEQ ID NO: 13526 - DNA, 1526 bp, Oryza sativa
  ref <308>: DATABASE ACCESSION NUMBER: AK110874
  ref <309>: DATABASE ENTRY DATE: 2001-12-06
aaggtttgttgttgttgagcagtagcggcgtgacggcggcccacagctcgtggtcgtcgtccagcgccgccatgtggtgtggagtgagcaccacctccgcatctatgcttcctccgccctcccgccccgggtacagcgacgccttgccgtccatcttgttggccttgccgctccgcgccgccagcgccttcccccacccaaagtcgcagccgtacatgtcgaaccgcggcgagctccccatcatcacccccgacgggtcgaagtacctcgccgtgtatattatcggcttcacctcccacgccgccacccgcgccctgatgtccgcgtccgtgtgcgccgccaccgcccgccccaccgccgccgccgcccacccgtgcccgcgctccaccagctccgacgcctgcaccttctccgtgctgatggcgtagatgctgttgccgaagtactccctgggcagcgccggctggaggcgcccgcggttgttgatggccgcgcggcacatggtctgttgctccgccggcagccgcctggcgcgggtgatgcacctccacagcagcgagctcagcgcctggaacctcgtcagcgcggccgcgcccgccgtgtccccggccgccaggagctcttggcgagcccgctccttgagcgccaccagcgactccgatgagaagtgtagcatccgctcgcacagcagcggcggctgcagcctctcgatcagctccgacaggtcggcgtacggcagcacgaccggggctccgtctccgggagagggagaccaacggttgaacaagggtgggggcgaggtgggcgcggcgaggcagctagcgcgcgcaatctcgacccacgcattgaggaagtcccagaatgcggttccatcggagagcgcgtggttgtagacgaaggagaggaagacgccgtcaacgaggtgggtgacctggacgacgaagagggggagatggtggccgtcgtagttgacggcgtccccgagcgggaagaaggagtggaggaggggcgggacgtgggcgtcgggagggaggaggtcggcgacagtgacggcatcggcgacggcgtggacgatctggacgccctggccgtcgcagtcgatggagacggagcagccgccttcaggttccgggtggttgtgggtgacgaagcggccggcgacggggtagtaggtgttgagcgtggtggagagggcggcggcgaggtggtcgacgactaggaggcaaggcggcggcggggggaagacgaggcctttctggatgtaatcggcggagagcatggagaggtcccaggaggtgagggggatgctctcccgcggccgaggcgctgccggcttcacggtgcgcctcgacaccacgcgcaccaccgccgccgccgacgacatcctcctgcacctgctgcttaatttgcgatattactggattggattggattattactacgtgtatatcccattcatttatactagtactagtctacaaggcaatgtaagctgtgggttggtggcccaacaatattttactcac

SEQ ID NO: 13527 - DNA, 1498 bp, Oryza sativa
  ref <308>: DATABASE ACCESSION NUMBER: AK110875
  ref <309>: DATABASE ENTRY DATE: 2001-12-06
acttcctcgccgacgccgccacccacccacaaccaccgccgcctccgctccagatcccccgccgggcagagtcttactcctcctcctccccgccgccgactcttactcctccgcccactcaccacgcgcgctgcccgcttgcctcctctgcccatccaccccagccgtcgacgccgccgtcacccacccgcaaccgccgtggacgccaccgttgccgacgcctactacttcgcccactagccacgcgtgctgcccacctgcctcctcctaccaccagccgccgccgacgactaatcctccagatcgccacagtcgccgtggctgccgccgttcgcgtgctcctcctacccatcagcccattgccccgcgtcgcttcgtctcctcaccccgctgcttctcgacaccgccaccgcaggatttgggagctacaacgcaacgacgagctaccaccgcaccgatcgccaactctgaatgattgttagtttacctctgaatgaaaaaaatccatgtgttgtttctgccttggggattctgtcttgttctcctgtattgcgttgccttggggattcacgtgtattgcgttgccttggggattcagtcttgttttcctgcccaagatttatgatgacttccattgtgaaagattttcttattattcgtgcaggaatttctgaagccgaagatcgccgagccagcgacgatctcctccgcggcagccgctgaccggctccgcccgcctgccgaaacgaacgtcatgtgtgtggtgtggctaaatgtgtttgatacaatcaggtgcgacagctggtgaagactacgacggcggtggcggtggttcttcgacggtctgggctggcgttgtggcagctgacacaggcggcgcgggcgagaaaacggctcaaaaacgatctttgcggcaaaccagtccaggcctgcggtcgctgccgatgtcgagccaccaatctcacacagaatctatgccgtgatctccgccgccgatgccggatatctgcccgccgtcggttcggacaccccgcattcgcgcgcggcgccaccgacgcccggcatcctctcacacgcaacgctggccgccgcctaacccaacagtagtcgccgctccaactgcatcacagcagccgccgggcgccgtagattccgacacccctccttcgcgtgcgacgacgccgactccctgcaatgggcaagcacgatggatcagcattttgttctttttctgaggtgtcatcctgcatgtgcaggaaagtgaagagcatgcaagcctagatgagtacatggagaactggtttggactggatcaatactaatgtgcgtgcaacaactactgcgacagcacgggcaaaggtcttcagactgaagtttcaatgtagcttcatcaaatttttgaaagctttcagctcttgtgattgaggcaggtatctctgccctccttgtttgaggattgagtatatgagaaactgaagtgaaggaggatttgtgcatg

SEQ ID NO: 13528 - DNA, 1514 bp, Oryza sativa
  ref <308>: DATABASE ACCESSION NUMBER: AK110876
  ref <309>: DATABASE ENTRY DATE: 2001-12-06
aacaagaacttgatatgatgacagaaacggtggttgtgaacgcggggcttggcgtcggccatctggccccaatggtggagcttgccaatctcttcccgcggcacggcctcgccgtcaccgtcgtcctcattgagccgccggcaaagccgcccagcttcgccgccgcggtctcccggtccatggcttccaaccctcgcatcaccttccacgtgatgccctcgccttcctgccacagcaacgtgcccgagctcatccgcgccatgaatgcgccactgcgcgagtacctacgctcgtcggtgccctctgctcgcgcggtcgtcttcgacatgttctgcgcctgcgcgctcgacgtcgccgccgagctcgggctaccggcctacttcttccagtgcggcggcgccagccacctcgccgtcggcttgcacctcccgcacgtgcaggccgagataaacgccagcttcggggagatcggcgacgagcccctcctgttccccagcgtcccgccgttcaaacccagtgacctccccaaggcagcactcgaccgcaacgacgagatgtacagatggattctgggcgtgttcgagcggctcccggaatcccgcggcatcctcgtcaacacgttccagtggctggagacgaaggcgctgcgcgcgctcggggacggcgcgtgcgtcgtcggccgccccacgccgccggtgtgctgcgtcgggccactggtctcgcgaagcggggaggacaagaagcacgggtgcctctcatggctggacgcgcagccggagaagagcgtcgtgttcctctgcttcgggagcatgggctcgttccccaaggagcagctcgcggagatcgccattgggctggagaggtccggacagaggttcctgtgggtggtgcggcgtccgcacgccggcgaggcttcgctctcaggtttgctcgccgggtgtcacggcacgcacggcgagctggacatcgacgagctcatgccggaggggttcttggagaggaccaagggcagggggctcgccgccgggtcgtgggcgccgcaggcggacgtgctgcggcacagggcgaccggcgcgttcgtgactcactgcgggtggaactcggtgctggaggggatcgccgccggcgtgccactgctgtgctggccgctctacgcggagcagaggctgaacaaggtgttcatcatggaggaggtcggggtcggcgctgtgatggcggggtacgacggcgaggtggtcagagccgaggaggtggaggcgaaggttaggtggatgctggagtcgaatgaagcgtcgccgatccgtgagcgagtggcgctggcgaaggagcgggccgaagaggcgacgaggaaatctggctcgtcgcatcaatcatttgtcaagtttctgatagactttggcgtgaccaagtgaccggtcatgaatcttgtttattggtgacaatgtaaaacgggataagtcaattaagaattatagttattataaaatttaaaaataagtttatttgattttttt

SEQ ID NO: 13529 - DNA, 833 bp, Oryza sativa
  ref <308>: DATABASE ACCESSION NUMBER: AK110877
  ref <309>: DATABASE ENTRY DATE: 2001-12-06
aagtcctcagcattctctccctcacttctcctctccctcacctctctctccctcagatccctcacagcgacaggcggcgggggaaccagcgactggcgacgagcaggggcagcgggatccacacgcgacggagaggcgcggggtcggcggcggcaccagcgagacgcaggtcggggcagcaaacggcgacggcgacggtgatactcggggccgcttggctccctcccagatccggccgaggggagaggggggaggacctgtggcggcagcggtggttcgcctccctcccagatccagctagagggagtctgggggagggcggcagcggttcccctccctcccagatccgcccccaccccggcgggggcagcggcgcccctgcagtagatcggcccttcctctccctctccctaaccctagatcggccggaggtgggtaggggcacgggtgggggtggcggcaatcttttttttgtttgtcgagacgattttcgcaggcggttcgttaccagtcaccgtgtcggtttgcaagtgtccaaatctgttgctcttcttccgctattgctacgacccagattgcagagaattacattgttatcggtatgaattataactttatcttgcgaattgaccagaaacaactggtatttgctgttgtatatatgatctatttaactgtgctatttgaccaaattcactttaagaaaaatttgacgataaatagaaggatctgaccaccgagtatattgattagaaagatattgtacttttaatttagtattttgttaacttagttcaaatatttgaaatttataagcactatgtccatatatt

SEQ ID NO: 13530 - DNA, 1921 bp, Oryza sativa
  ref <308>: DATABASE ACCESSION NUMBER: AK110878
  ref <309>: DATABASE ENTRY DATE: 2001-12-06
cggtggcgctgtacgcgcgtgggggtggctgcggcgcgaaggcggccgcagcgcggcgctcggggcgcggcggtggtgggcggaggcgcgccgcggtcgtgctgctgctcgcgctggcgtacgtggcggggctgctcgtgttcgtgcttgcgggaggcggtggtgttggagttggagggcgcgtggaggtggggcgagaggtgggggtgatgacggtggcctcgctccggaggcggcgcgccgcggcggcggcggcgccgcagcccgggtcggtgtaccgcagccacctcgtgttcgagcggctctggccggacatccgcgacgacgccagctccgcctccgccgccgcctcgtcgctctcctccacttcttggcgtcgcagcatgttgatgacatcgcactatcagaatcctggggagctatggatgccttgtgtcaacaggaagctgattcgaccagagttgccaccttcaaatggttatctcatgatcgaagcgaatggtggtctgaatcaacagcgtctttcgatctgtgatgcagttgctgtggccagtttgcttaatgcaactcttgtgatcccagcatttcattttaatagtgtttggcgtgatcatagcaaatttggtgacatctttgacgaagaccattttattgagacactcaaagaacatgttagagttgtgaaggaattacctgtagatgttttgacgcgcttcgatcataatatcagcagcataccaaatatgagaactaaggcctattcatctccaaatcactatatgcagaaggtgcttccgaaattgctggagttaggggctgtgcgaattgccccattctcaaatagactggcacaatcagttccatcaaatctccaggccttgagatgttttgttaactaccaagcgttgagatttgctgagccaataagagttctcgcagaggatatggttgaaaggatggtaaaacggagtactttgactggtgggaagtttgtatcagtacatcttcgcttcgaagaggatatggtagctttttcatgctgtacatatgatggtggcttgaaggagaaaactgaaatggaaaatgctcgtgaaagaagctggagaggaaagtttcatcggcatggtcgagtgatcaatcctgaggcaaacagaagagatggaaaatgtcctcttactcctctagaggttggtatgatgctgcggggcatgggatttgacaataccacctccctctatgttgcttctggtaaaatatacaatgctgaaaaatacatggcaccgcttcgacagatgttccctcttttggcaacaaaggatactcttgctttgcctgaagagcttgctgagtttgaggggcactcatctcgattagcggcattagattactcggtctgtcttccgagtgaggtctttgtgacaactcaaggtgggaacttccctcactttctgatggggcacaggcgctacctgtttggcgggaatgcaaggacaataaagccagacaaacggaagctggttttatctttcgatgatccgaatatcagatggaatcggttcaagcgccacatgcaggatatactacaccatagtgacatgaggggcactgcattgaggaaacccaatgattccatatacaccttcccaatgcctgaatgtatgtgccagcaagatgggatgatgtaggccttgtatgattcatgcacatacgtcgaggaggaggaaatatgcaattttgtacactctgtaatgatctgtaggtagccaccaccaccgtacagaagcaatctttggccgggaatttgttgatttctgtctgtagattgtagagagaggagaggtgaaaattggttctggttgtagatatgatgaaacacatgctgttgacaagggacagcctgccctgtaaatgtatatgcagt

SEQ ID NO: 13531 - DNA, 1616 bp, Oryza sativa
  ref <308>: DATABASE ACCESSION NUMBER: AK110879
  ref <309>: DATABASE ENTRY DATE: 2001-12-06
gacgcgacaatgacaacgggagccatccatgatccatccaactacccaccaaacaactctcgtcggctccaccggcagcagcgagcggtaatcactcgctctcaccatgccgctcctcctccgctgctcgccggcggcgtcaccgcctctgctcccgcgccgccgcagcggctccctcctctccgctgcgccgccggggcgccggccgctgctccccgccgccgcaggccgcgtcgtgctgggttgcgggctggtgacgctggactacctcgccacggtggacgcgtacccgcggcccgacgacaagatccgcagcggcgagctgcaggtgtctggaggtggcaacgccgggaacgcgctgacaggagccgcccgcctgggcctcaacacgaggctcatctccaaggtggcaaacgatgaaattggaggaaccgttctttcggagcttaaggaagctgggattgatatatctcatgttatagtaaggcttggtttacaaatatataatttctgcatctttgttcatcaagcgctgcaatgcaagtaatcatgtgtacatcgagaaggtagtaaggtacaataaattggtaaccaaaatgtcaaggattaacaaaagaaagatgcacagtgaaagatattggggtactatcaatgcactggactttcttccatgttatcttatacctcattgttttgatgattctgctttgcagatttctgatggtggaaacacaacatttgtatatgtcattattgataagcaaacaaaaactcgtacgtgtataatcacatcagggtaccctccaatgatacctagtgacttgagaatgtcaagtttgtcagctgcactgcaagacgtaagcttactatacttagatggatattcagatgagatggccttggcagttgctaagcagaaatgtacaggctgatcagatgaagattcctattttggttgatgccgaaccagaaagaacaagggaagaattgggaggtttgctcagcctagcaagttacatagtctgtaatgggaaatttccagagaaatggacatcagtcccatctattccctctgcactactagaaatccttctgcaatatcctcgtgcatgcttcgcagttgtaacccttggagaaaatggatgcatgatgcttgagaggggcaaagatggtgaaaattatgaaactgagccagtagatatagagaatgtcgctgagtccttaaggctgaaagtagataaagatgatatcctgccaacttgtgtatcatctaagttcatgagacttactgcaagagggtctgggaatatatttgcaaggctgctcataggaacagcagaaagtattccagcttcagagcttgttgatacaactggttgtggtgatgcattcataggagcagtacttcatggactatccacagagatgcctccagaaaagatgctgccttttgcttgccaagtggcaggcatcaaatgtagagcaatcggcgcacgatctggcctaccatggcaatccgatccacgcctgactaagtacctgtgttagaccttgtcgaaattgcgagggacaaaaaaaagattgtcattgaataaatgatccatgtttctactttc

SEQ ID NO: 13532 - DNA, 2068 bp, Oryza sativa
  ref <308>: DATABASE ACCESSION NUMBER: AK110880
  ref <309>: DATABASE ENTRY DATE: 2001-12-06
aatcccaatcaaaccagcaaaccaaccaagaatttcagtttcaaccagccactgtacttcagccagccatggcggcctcctccttctccacgtcgttctcttcgtcttcgtcccacgaaggagacgcgggctcgtcgtacatagagtgcttcaagtactcgaggcgcgccacgctccgctccgtcgttggccgccccgacggcggcgccgggctggtcggggagcgcgcggtggtcggcggatgggtgaggtcgtccgccgtcgtcagggcgaggcgcgctgctgctggccccgcgtcgccgtcgaggaagcccgaggtggaggccaccgggctgacgtgcacggaggtgctcatgtccagggtgccactcatccgctgcatcgccaggctcatggccggtgggatcaccgccgccgcctcggcgggcggatccgctcgccggccggccgtcggcacggcgctggtgcgcatcaacgacggctcctgcgtggctgatctccagatagttgtggactctgcactgttgcctcttgatcaaatcaccgctactggagcttgtgttcttgtggaaggcaagatagagcaggtggaagggacattgccgcagtatgttgtgcagatgaaggtggagaagattctgcacattggtcctgtggattcagagaagtaccctaggtcgaatgctcattcatctccggatcttgtcaggggctacccgcatctcgctgctcgtacagcgacggttgcatcaactgctcgtgtacggagtgaattggtccatgctgtccacgcatttttccaatccaacggattcttccatgtgaatacacccacgataacaacaacaacagcaaccagtgcaggaaaccgcggcaaaatgttacgattaacccgccttttcagcaaatcagacaatggcaataggatcacacctgaagctgtcagggctgccatcaaggagaagacgaaacaagttgaagcactaaagagaagcgaaagcaacaaagaagccctcgaagctgcagagcaggatcttcagagggcaaatgctctttcaaggcagctcgagcaaggagcaagtgcagagtcctcccaagatgagttctttcaccgcccagcctacctgacaccttgccatacacttcatctcgagacatacgcctgtgcactcagcagcgtctacacattcagcccggtgttccaggctgagagtgagagcttggattcagacaggtctctggctgagaggtggacagtcgatgtcgagctcgctttcgccgagcttgaggatgcaatctcctgcgccgaggattgtgtgaagtcactctgcagcacggtgtcgaaagattgttcagatgagctgaagtttctgtcgtccaatcaggcaggtgatgccactagtagcgttattgaagctgcagtgtcaagcccctggcaaaagattaagtacactgaagctgtcaatactcttcttcaggtcacggataaaacttttgaatcgaaacttgagttgggcatgccactgtctcgtgtgcatctgagttatctggctgatgatttatacaagaagccagtaatcatatatgattacccgaaacagctaaagccattttatgcacgcctgaaggaagacctgaagacagtctctgcctttgacttagttgtgccaaaggttggcatcgtagcatgtggagctcagaaggaggaaaggatggataatttaacctcaaggattgaggagtcagggctgcaggttgagcagctggaatggtatttggacacacgcagacatggcactgtaaagcactctggtttcagcatagacttggagagcctcatcttatttgtcaccggcctcaaggatgtccgagacgccatccccttccatcgaaccaaaggtcatgcaaaatgttaggcagcagatcggtcatatggaatccaagttagtagaagtttgccagcttctgctaatcgctgtaaatatatccggcacggtcatgtggtattctacaaagaagaaaaatgatctgtactgaaagtaagaaatatatataaacaaaattgatc

SEQ ID NO: 13533 - DNA, 2047 bp, Oryza sativa
  ref <308>: DATABASE ACCESSION NUMBER: AK110881
  ref <309>: DATABASE ENTRY DATE: 2001-12-06
agtgcaaagcacaaagcgcgcacacacacacacctcgccgattgctcacgaaaccgatcatttccaagcctctgatccgtcgcaaaatcccaatccttgagctcgatcgtcagctttgtgcgcggtgatgaggacgtggcggctcgccgtgctggcgtgcctgtgcgccgccgcggcggcggcgccggcggaggcgaagacgcaccaccacacgtggaacatcacgtaccagtacaagtcgccggactgcttcaggaagctcgccgtgaccatcaacggcgagtcccccgggccgaccatccgcgccgcccagggcgacaccctcgtcgtcaccgtccacaacatgctcgacaccgagaacaccgccatccactggcacggcatccgccagattggcagcccgtgggctgacggcaccgccggcgtcacgcagtgccccatcctccccggcgagaccttcacctacagattcgtcgttgacaggcctggaacgtacatgtaccacgcgcactacggcatgcagcgcgtggcggggctggacggcatgctcgtcgtgtcggtgcccgacggcgtcgccgagcccttcgcctacgacggcgagcacaccgtcctcctcatggactggtggcaccagagcgtgtacgagcaagccgtcggcctcgcctccgtccccatggtgttcgtcggcgagccccagtcgcttctgatcaacggcagaggcgtgttcaactgctcgccgccggcggccagcaatggcggtggcgcggcgtgcaatgcgtttggcggcgagtgcgggtggccgacgctgttcaccgcctcgccggggaagacgtaccgcctccgcatcggcagcctgacgtcgctggcgtcgctgagcttcgagatcgaggggcacacgatgacggtggtggaggccgacgggtactacgtcacgccggtggtggtcaagaacctcttcatctactccggcgagacctactccgtgctcgtcaccgccgaccaggacccgtcccggagctactgggcggcgtcgcacgtcgtcagccgcgaccccaccaagacggcgccgggcagggccgtcgtcaggtacgcctccgccgccgtggatcacccgcgcacgccgccgccgaccgggccacggtggaacgacacggcgagcagggtggcgcagagcaggtcgttcgccgcgctgccggggcacgtcgagccgccgccggcgaggcccgaccgcgttctcctcctcctcaacacgcagagcaagatcgacaaccacaccaagtgggccatcaacggcgtctccctcagcttcccggcgacgccgtacctcgtcgccatgaagcacggcctccgcggcgagttcgaccagcggccgccgccggacagctacgaccacgggagcctcaacctctcctccccgccggcgagcctcgccgtgcgccacgccgcgtaccgcctcgccctgggctcggtggtcgacgtggtgctgcagaacacggcgatcccgccgccgaacgggcggagcgagacgcacccgtggcacctccacgggcacgacttctgggtgctcggctacggcgagggcaagttcgtgccggaggtggacgggccgggtctgaacgcggcgagcgcgaggggcggcgccgtgatgaagaacacggtggcgctgcacccgatggggtggacggcggtgaggttcagggcgagcaacccgggcgtgtggctgttccactgccacctggaggcccacgtgtacatgggcatgggcgtggtgttcgaggagggcgtcgacgtgctgccgcggctgccggcgtccatcatggggtgcggccgcaccaagggccatcactactaaaaacttgtgttatccaaaaaaaaaaaaactactaaaaacttgttgttcttatacttcatggtgacgaacgtccaacagcttagtcatcatgtgtcaaaacattactataagggttgggatttgggaagtttgttttcattaattttgtaaacatagtgaccacattggtcaattgttttaatattgaataagagc

SEQ ID NO: 13534 - DNA, 1832 bp, Oryza sativa
  ref <308>: DATABASE ACCESSION NUMBER: AK110882
  ref <309>: DATABASE ENTRY DATE: 2001-12-06
gtgggtgggagagctcgagctccgaagatggcaacaatggcggccggcgtcgcactgcacctgcacctacaaggtgacgcggccggccgccggataagcggcgaagctgcccaagttcttctccttgggctgcttctgcttctactggtgagttcagagttcagactccaacttgggtcagatctcgtttccatgactcccatgtacccatgtattctgaatttctgatcctagctcaaaattgtttttttctctttttgtcatttcctgttttgatgaaacatgcgcatcattcaagtattataaatttataattggtgccagccgcaaatttgcggaggttggtacgaataggattgtttttttgtcctcatgtatttgtacttttgtagtcctgttgaatccactagagactgctgcttattgctgaactgccacatattgctgctaggaactcacaaattttcaggagttctactcgataaacttatcagcacattgcacatccagctttgcctctgagtgcttccagggatgaaggtgaaggcaattagagtccacaagattggtggtccagaggtgctaacttgggaagaggtggagattggggagcccagcgagggggagatccggatcaagaacaaggctatcggtgtcaactatgtcgatatttattaccgtactgggttgcatcaagaacctctcccgtttgttcctggcaaggaagcagtaggagtagtgtctgctgttggacctggggtaacaggtatcgaagttggcgatgtagtcggctatgctgatactccaatgggcacttacactgaagaacagattataccggcaacactggccattcctattccaccttcagtggaccacattactgcagcatctgttttactcaagggaatgactacatatgtccttgtgaaacaagcctttaagattcaggcaggccatactgtcctagtccatgctgctgcaggaggagttggctctctcctttgtcagtgggcgaatgcccttggtgccaccgttatcgggaccgtttcgacacaagagaaagcaatccaagcagccgaagacgggtgccatcatgtgatcatctacaccgaggaggatttcgtagcccaagttgctgaaatcacatcgaggaagggtgttcatgttgtttatgatgctgtcggtaaagacaccttcaagggatcaatggagtgtctgatgccgcgtggatgcatgatctcttatgggcaatgttcagggaggcctgaccctgtaccagtgagtgatctggcgtccaagtccctgatcttgggcaggccagggatgaggcactacaccgccacccgcgacgagctgctgcacgccgccggcgaggtcttcgccggcgtggcggctggcgttctgcgcgtccgcgtcaaccatgtctacccgctgcatgaggcggctcgcgcgcacgcggatctcgaggcacggagaacctctggatctgtggtgttgttgcctgccatgccagcagctgacagctgatgagagtatcctgtggcattgatgttgttagaataggtgtcgaatatactagttctatttggttacagttggacttggaattgtaataggtgttagggggtggagttagagtcaaactctgtaacccggcatctctcttaaatagagcggggggcaccacaatgtaaccatggcgactacaatgtagcgtagacacgcagggagatgatggcggcgtggccatggactcgtagcggctaggagctatattggttggggaggagcgcccataatcagagccccggggatgtaggtttcggctg

SEQ ID NO: 13535 - DNA, 1758 bp, Oryza sativa
  ref <308>: DATABASE ACCESSION NUMBER: AK110883
  ref <309>: DATABASE ENTRY DATE: 2001-12-06
atcgtctctcgaagcgcgaagccgttctatcgaaactcgaaagcagcgagagctcttggcgcgacccatcgatttcgccaagaaatcccccaatctctccgcgaactgttcgacggaatgcaccagggagcggcgggacctggcccatccggcggtggcggcgaccgtctcagcgccctcccggacgcggtgctgttccggatcgtgtcgcacctgaaggcgcgggaggcggtgcgcacgagcgggctctccaggcggtggcgccacgtgtgggcgtccgcgccgcgcgtcgacgtccgctacccgtgcgcctgcgacggccgcgccgtcgaccagaagagcttccgcgacttcgtcaccatcctgctcctcaggcgccgcccgctcgcccccttcaaggcgctccggctgagctggagccacgacgaggacgacgtgagcgcgtggatcgctcacgccgtcaggcgcggggccgaagaaatcgatctctccgcgaggcgtcaccatggctacccggtgccggattacaaacacttcatttctcccaagatcaagatcttgaagctgacgcatctcgggacgacgaggttcacggccgacaacaccctcgacctgctctgctctggctgcacttctttggaagaactggagctcaaggatatcaaatcactctgggggggaattcaatcagactcgctgaagcgcttgtcgatcatcaactgccatgtgacatccgatggcttcctggttgaagctcccaatcttatatcgctctgctgcatcagacctgcccgagctgttccttggttcagccacatggtgtcgctggtggaagccactgtcgtgcttgatgattctcgcttgagtgatgactatcagcagccagtgttggaggatgacaacgatgggtctgattatgatgataatttctttgcacctaaagctgagggccctgatgataagagagacaatgaagctgataatgactctggtgataagagaaatagggacggtagtaaatctgatcttgatgatcatgatggtgaatatgatcatgaggatggttctgagtctggtgataaagaggttgatgatcttgaaggtggcgatgatcgaactgtgacctatggtgagattgcagatgagtcttccagttatggtattcccattcccagtgatgaatatggcggaaactatgggaaccatgattatactattttcggtggtgatcatatgcttgaccacttgtcagatgttagaactttgggtctgttaggccatcaaggagaggacatccacagaagcagagggggcatcaacccaacgggaggatcatttgcttgcaacaacctgaagaaggttaagatcacatgccgtaaagatgatgtaatggtccatatgctggcaaaattcctccaacgtaacggcatatcgcttcagaagatttttgttcgtcgcacttccagcactcataatggcgaggaaggcacgggcaaggactccagtgcaaaacggaaggcgcaagacgaagctgcgaggcgagcagtgaaacagctgaggagggcacgaaacagtagaagcccagagtgagggaaaggtgtttaaaatgctgaaaaccggtatggatgttgaggaatccagtgctgagtttacattgcagttaacagtaggattgtctactgaatgtgtaactatatgcacagtgttagtacagttacctggatatatgaaaaattttgcattcgttggtgttgcatg

SEQ ID NO: 13536 - DNA, 1846 bp, Oryza sativa
  ref <308>: DATABASE ACCESSION NUMBER: AK110884
  ref <309>: DATABASE ENTRY DATE: 2001-12-06
actctcgctcgctagcttgggcggcggcgaggatgcggaaggacgcggccgctggcggcggcggcggcggcggcattgcggccgggccggcgcccgcgctcctctgcttcgacctcaagccgttcctcgccgcgctcaccgtgctcacgctcgccgtgcgcaccgtggcgtcgagcggcaatgcgagtgtctcctccgaccctggtgggccgcccgcctcgctgccggaggtggggaacaagaagccggtggcggcggcggcggcggccgatcccaacaggcgggagttccgcgcggtgggcagcgcggcggcgctgttcgtccagatgggcgcgtaccgcggcgggccgtacaccttcgccgtcatcggcctcgcgtcgaagccgacgcacgtgtatggcaagccgtggttccgctgcgagtgggtgccgaacgccaatggctcggcggcggcggcggcggcgcggccgatgcgcgccgcgaacacgtaccacatgctcccggactggggctacggccgggtgtacaccgtcgtggtggtgaactgcacgttcgcgcgggtgcccaacgccgacaacgccggcgggaagctcgtgctgaacgcctactacggcgcctccccggcgcggtacgagcggatcgtggcgatggaggaggcgccgggcgcgtacgacgcggccgagttccggccgccgcacaggtacgactacctctactgcggctcgtcgctgtacgggaacctcagcgcggcgcgcgtgcgggagtggatggcgtaccacgcgcgcttcttcggcctgcgctcccacttcgtcttccacgacgccggcggcgtgagccccgccgtgcgcgccgcgctggagccgtgggtgcgcgccggccgcgccacgctgcaggacgtgcgcgcccaggccgagtacgacggctggtactacaaccagttcctcgtcgtcaacgactgcctgcaccggtacaggcacgccgccaggtggaccttcttcttcgacgtcgacgagtacatcttcttgcccgacgggcgctcgctcgaggccgtcctcgccgagctcgagccctacacgcagttcaccatcgagcagaaccccatgtcgagcaggttatgtgcacggaaccccgacgaaccggagacggactactcaaatgaatggggatttgagaagttggttttccggaattcaatcactggggtaaggcgtgaccggaagtatgcaattcaggccaagaatgcatatgctactggagttcatatgtcggagaatgttatcgggaacaccacgcacaaaacggagcacctcatccgatactaccactaccacaataccatcaatgtgattggcgaggtatgccgcgagtttgtgcccattccacccaatggtggattaatctggtccgagaagacgccctggtactacgatgacagcatgaagcgcatagccgacacagtgcgggaattcgagaggaagaccattggtgatgtgcgagtgtgaatgtgccatgatcgaccaccagagaatgaacagatgtatagtattgctgctgtccactcgtgaggattagcaacggcatgatgtgatcagctgaacagataacctatgatttggacccctctgagctgacagagatgtgaattaaaagtgaagctgcaaccccaaacgaatggatgtttatgcgccactacaattcagtttctgcaaaggtgaagattttgtaaacagacatctcatcactgtaaatctcattgttttatttatgatatataaagtgtattccattcactcaaagatacaatcgcataagaaatttatatgacgacagacttggttcattatgc

SEQ ID NO: 13537 - DNA, 1518 bp, Oryza sativa
  ref <308>: DATABASE ACCESSION NUMBER: AK110885
  ref <309>: DATABASE ENTRY DATE: 2001-12-06
aagcgggcagcggccaatccaaccacggcgaaggaggcttgacccgatgaaagctcccatctcccatgcggtaaacgccgatgtccctcgcgcactctggcgtgtcgagcgcgtactgctcctcgttgtccgtgtagtagacgtggtccggcaggatcccggctggacaatccgccatggcgaggccgaacgagctgttgcatcccaagaacagggcgtggcggccgccgacgtggttgatctccgccgccgtccccgccgcgggatccacccggtacaccttgatcgagtgcgtgttccacaccccgtcgtagggcaagctccggtccgccagccatgccgcgtaggcttggaggttcgctgcacccatgcgcctgcacaccatgagccagcatccgccgtcgccgccgccgagccacggcgcgtcgacgaggtagttggtgtgcctcatcatgccatcctgagcggggagtatggtcgtcctctccagggccggctcgccgccgaggtcgaactcgtggatggcgccgtcgcggcgtatcccgtagagcatccggccgtcggcgctgaagccgacgtcgacgtacagctcgttccccgtcggcgtgcgtatccacgtccagtgcgtgtcgcccagcctcgcgaaggacatctggccgtcggggcggtggaggagcacgacgacgcagccgccgccgacgatgtcggacgaagggtccgacgagaggaagacgcggaggtagaggtactccgagagctcgcgcgccgtcaacgtcatgggcgcgttgaccagcggctccacccgcagcgtccagtcgtacgggtacaccacgtacatgccagggacgacggcgccgccgtcgtcgagcagccgccgcaccggctcgacggtggtgaccggcggcaggttgctgatctgctggccggtgacggggttgacgaggtggagcgccgcatcgtcgtcggcggtggcgagccagccgtgggaggcgccgagccaccggcggtggacgtggggccccgggagcgtgacggtgtaggaccggtggtcggtgaggctgtagagggtggccacgttggggtcgtcggcgtcggcgtcggcgccagcggcggcggcggtggtgtagagtaggcagggcgtacaagggcgggagaggaggtggtggaggccgcggacgtacgctgacgaggtgttccaccactggcacacggcgccggcgcggacgaggtcgacgatgtcaagcgcctcgagaattgtgatcaggacgtcggccggcaagtccgaccaggcgccggcatggtcgccgtccatgatgacgattgaggccctctttgtttaggcttataagccaacttataaatcgaaaagtctaagcctaaacaaacaagtagcttttccgtttggcttttttgaagccataagccactctaacactattaagccaaaagctaagttggagaaacttttttggcttatgtgaggtaaatgtatgactcaactactaaacttaggacatt

SEQ ID NO: 13538 - DNA, 1670 bp, Oryza sativa
  ref <308>: DATABASE ACCESSION NUMBER: AK110886
  ref <309>: DATABASE ENTRY DATE: 2001-12-06
gttggattcgctctcgcgcgccgccgccgccgccgccgccgtcgccgagatgggagcagccgcctcgacgaacaagcagccgtctcctccggccaatgagaatatggaagaagaagccgaagccggcggagatcgttgctgctggtcgtggttgccggaggacgtcctgctgaccgtgatggggttcatggaggtccccgacgtcgtccgctctggagccgcgtgctccgcgtggcgcgctgccgccgcggccttccgccgcctccgcctctcgacgccgcggcagccgccgtgcctgctctacgcctgcgacgcctacggccccgacgccgccgcgctctactccccctcgacggccgccaccttctgcgtgcccttccgcatcccgcgcgccgtcgcgggcgcggcgcacgggtggctgttcgccaccgacgacgaggccaacccgtacctcgtcaaccccgtcaccggcgcccgggccacgctgccgccgatcacgaccctcgaccgcgtgaggagccgcgagaccctcgtcgtcggcggcggcggcggcgtcgtgtacggcgtcgatgtctccccgaccgtcggggagaatatacggcacatcaccgcggagcgagcgcgcgactggatgttccgccgtgtcgccgtctccggcagcccttccgccgccgccgggtgcgtcgtcctgctcgtgcacatgccgttctcggagctctccttcgccaggccgggcgacgcgcgctggacctcgctctccggcgtcgcggagctctcgttcgccagggcacccaacatggccatggtgggcgactggggctcgatcctcgccatgggggagctccatcaccgccagtactggaccagcatcgtccacaaccacaagaacgggctcttctacctgctgcgccactgcggctccatcttctccctagacctcaccggcggcggcgcggcgtcgtcgtcgtctccgtctccggtagcgcgaaccgtcctgagctcgccgtcgccgcatcagtactcctctggtcccaaacccacacagtacctcgccgtcacgccgcgcggcgagctcctgcgcgtgacgcggcggtggcaccagacggcgatcgtcgctccgccggacgcctccaacggcaggtggcacgtggagcacgccgtcgccacgacgggcgtcgaggtcgaggagatccgcacgccgccgccgccgccgctcgccacggcggcgtcgacggcgacggcgatcagcgtggcggggctcggcggctgcggcgacgtggcgctcttcctcgggaagagctccgcggcgtgcatcccgaccgagggcttccccatgctaaggccgaactgcgcgtacctgaccgacgacgccggcggcgacgtggtccggtcgccggcggcgaggcgggacttcggcgtctgggacttcgggagcgggaggctgcagaggcttggtgacgtgtggccgcttcatcacccgtggctgtattctccttctccgatttggattacgccttctctttattaggactgataattctatattgttctcgcttgttaatggcattgtccaatgcttaactgatactaatcctaaatatttatcattgtattatgggtcagttgagaatgcaaattactgaatatgtagatgcttttgaagttttgat

SEQ ID NO: 13539 - DNA, 1447 bp, Oryza sativa
  ref <308>: DATABASE ACCESSION NUMBER: AK110887
  ref <309>: DATABASE ENTRY DATE: 2001-12-06
acgcgccgcgcgacacaatcagttcaccaccgcagccacccctagctaaatccctcggcggcgggggaggtggcggcgtgcgtgggcatctcggcgggggtcgtacgctcatgtcggcgctggtttggctctgcgtattggttttaagtggatttcctgtgcacaatgtcatcgattcttcgatccattcagctgaggaacagtatatggagtagcttccctgtcagatttcttaagcaacaagccggattatcaactgtagaattgcttgatcctagaagctgtgggaaacgacatttcacaacacaagtacaggaacatgggaaggaagttgcggcggcagcaactattctagtttttgatcttgagactactggctatttccataaggatcatagaatagttgagtttgcactctgtgatctttctggaggaaagaatagcacttttgaaactcttgttaatcctgaaaggactgttcctgactacgttgaacatctcattaaaattggcactgatctcgtgtgcaggcctggtatcccaaggtttagtgatgtaatcccactactattggcattcgttcgaagtcgccaagctcctggcaagccagttctgtgggttgctcataacgcaaaacaatttgatgctcgtttccttgctcaggagtttgatcgttgttcagcaccacttcctgcagattggctgttttttgacacccttctcttggcaaaaaagatggtgaaagcagaggggaaaaaacgtcgtacaagcttggaggcactgagagaacactatggcatcgtctcgcatgacgatgcgcatagagcaatgcgagatgttatgatattgtctcaggttttccagaaaatgacttttgatctaaaactgacaaatgaaaaactaataaacgaggccatgaagctcccgttccatgtgttctgtgattctgtctgcttgctttttctatggaccagtttcgaacagcagtctgaaccagagagagaagaaatttagatgtctcggaggtttgcacacgatcaacggatcaagccatcaaggtacatgggatgatgggagggaaacctggtacccgtacgccctcttgcagcatgagaaatggacctgcaggatcagctatagcacatgcatgttttgctcccagttggttgcagcttcaacacatgggaaacgggcggctccacatccatcttgcgctgaccgcgtcctgcatgtatggcgccagcatcggccacgaggcttcgatttcttcttcctgccccgccatgacccgcactccttccgattgcacgctagcttatttactctttatcgaacttaacaaaggttgatcaaatttatagaaaaaaaattaacatctaaaatatgaaattagttttattaaacttaaaattgaatgtagtttgataacatgtttgttttgtgttgg

SEQ ID NO: 13540 - DNA, 1469 bp, Oryza sativa
  ref <308>: DATABASE ACCESSION NUMBER: AK110888
  ref <309>: DATABASE ENTRY DATE: 2001-12-06
ctctctctctctctcgctctcgctctcgccgcggagcttggaggtttgggtgagatcggagcagcgaagcggaggcagccgcagccatggcgttggccgctcgcctcgtctcccgctcccggcagctatactctgctcaagctgccttggcaaatggaggtgccactcaagtccgcttgtatgccaaggaggcagatcgtactcccgtcaatggtgatgacctattgaagggcatattttttgaggtaaagaagaaatttgagactgcccttggtgtacttaatgatgggtcatctgatcaccaaaatgctactgctgctggtctcactcgcgccagtagcagccggtgagcatggcgtcgccgccgccgagccgaggctagtggagatccccttcaacttctccgtgcactcatggaacgagctcatctccaaccgcctcaaagcagagctcgccgacaacccgtgcaggcaggagatcgagggcatccccaccatggcggggctgcacggcgacgacgagccgccggcgaagtggatcaccgtccgcctgttcggcggcggcgaccgcgacgatgaccaggcgaagctcctcgtcgcggaggacgacgcctacgtggccggcttcgccaaccggacgggccactggcacacgttccgcggcggccgctgctacccggcgctcccggccacggcgtgcaccgagctcccgttcgggggcagctaccgggacctcatcggcggcgtcgccaacctgcgcgccgtgccggtggggaggtcgtcggcggtgggcgcgatggaggtgctctcccggtacgatccggcggcgaccacggcggccgccgacgccaagatggcgctggccaagttcatggtgatggtgacggaggcggcgcggctgaagccggtgcggcgagcggtggtggagcggtgggagcaggtgagctacctgagctccgacgaggtgagggacgtgccctactatggcaagatgtcgctcatgatactggagtggaagaggaccgggcggtggggtgagttgggcccttgggccaacatcgacagggcccgctgcccacggcccaccggctgcgaggacgaagacgacgccgacgccgacgccggtgccggcgagttacgaggattgcgagcgatccacgcgggcacttcatagttcatacttcatccgtttcacaatgtaagtcattctagcattttctagattcagatgttaatgaatctaaattcattaacatcaatatgaatgtgggaaatgctagaatgacttatattgtgaaacggagagagtactgaattactgatcgaataaatagtagtagctgttgagtgaaatggagggcctctgttttttttacttgttcttgcgtactactgctactaagtgatttgtaatggtttgttatatgacatgatgaagtggttaagttcagagttccttttgttttcccc

SEQ ID NO: 13541 - DNA, 1321 bp, Oryza sativa
  ref <308>: DATABASE ACCESSION NUMBER: AK110889
  ref <309>: DATABASE ENTRY DATE: 2001-12-06
agccaaaaacccaagaaaggagacactgatcattcttgccatatattctaccatatatacatacatatacacacaatttctgtatatatttcttgctaaccattgttgctgctagttgcttcttcttcttctcctctaccttgtcatcgtccgtagtagaagtaatcaagaattcaagattctcattggctgctgctgccatgaaggaacgccgcggcagcgccggcgtcttccccttctccatcggctgcatgtcgcagtccgccgtcgacgtcgccgacccgcacgacaagaagtcgacgacgacgacgcagaacgacccttcctcctcctccgcctccgccgccgccatggccgccgccgcacagagtgagttcttgatcaccgagtagtactgaagatgataacatcaatcttttcaacgacatcattagagtacgtagctgctaacctgcaattgatcaaaaggcgcggaggaagaaggcggcggcgagaaggtgaaaggcgccacggcggcggcggcggcggcggtggcgtcctctggcatcgtggccaccggcgtgcagcggctgatcaaggggatcaagaacctgtacaaattgtcatcaacgatattgacagtgcttgctatctgtaataatctctacatgtgagcttcataatcttcttcttttgttctctctccccttttcttctagctctctgctgctttctgttagcatgtgatcctagggattaactgttcttgtgtaattgtcttgtcagtagctagctcctgatggtaataaatttgctgctagaaacaccacattaatcatgcattcaagtctctggtggctcagcaacgccggtgtgcgaccaagcgtacacgcatctactggagaatgtactgttgctgcactgcatccagctaattaattactagctaattaccagttgattccaattatgagcgcaatttggttaagtaattaaggctggtacacgtagtaccacagctagctagcttacacaagtgacagctactgtacttttttttttcggttgctcatcacacgtcgagaaaatgacaaggcagattggcaatacaccacactgctttgtcggtagctttagaattgccaacgaggaaaagtaccagacacgtattgccaccaaattttgtaattcctgtaaaaaaaactgaactgtttcctatgcaattcgggcgaaattctgtaatgatatgggtagcaggaagtagaaaagaagcatgtcattttcgaattgtgatcatggctcctgttagatgattaattaatctcaccaaccatgaattaat

SEQ ID NO: 13542 - DNA, 1680 bp, Oryza sativa
  ref <308>: DATABASE ACCESSION NUMBER: AK110890
  ref <309>: DATABASE ENTRY DATE: 2001-12-06
ttgcaacagtgatggtttgcacattgtagcatgtttagattgaataatactttactttgaaactgctacatatgaaaccttactatgtattttgtgataatagaaatagtatcacaagctcatttccctagagtacattattattccaaaaatgatcttttactagtagtcaaaacgatacatctgacagaatttgatgcactaattatatgctatgcacactgtttaagcatcattatttgcttgcatcttggggatcttgattctctgggacatcatttttcttcatcatccctttctctgtttcttctgccttcaccacctgctccacattttcagctttgccttccttgccaacatctttctttctcttgaggaactgaataaggccttcaagggcaacatcagtgtcatcattcctcatgagcacctcagctacctctgctggtgtcaccatgacctccttgatcaactcttctatctctgggtatgtggcatggttatcaatggagtggtagttagaggccagaattctaaatgactctgggcagcagtaacccatatggacatgcatgtccatcctgccaggacgcagaagcgcagggtcgagcctctccttgtagtttgtcgtgaagacaattattctctcctccccacttgttgaccaaagcccatccacgaagttgagtagcccagatagtgttacctgttccaacatattacccaaatacacaacatagttggtaaaaagaccccaaaaaaaataaatgtaagagaggctaatgattccaagttataaccttgtcctctgaaggattggatttggaactctcttgaccttcctcccgttgttgtagctctagagtgcagtcgatatcttctataactaggattgacctgttggtcatcccgatgagcaaccgtcgaagggttgagttccagttgacctcagtcagctcgagatcatatacgtcgaacttgaggtaattggccatggctgcaatcaagctggacttgccagttccaggtgggccatacagaagtggccaggatgtgagggaggtaagagttgagggccttgtccttgtgcttcttgtggaagctcatctcgaaggaccggacctcgagccggtagttgccgttcccgccacggccgttgccgttgccgttgctgctgctggagttgtcgcggcagacgaggcgccacctgaactcggagccctcatggacgtcggccatctcctcgccctcctccatgctgaacatcatgctcttggtctcgtcgacgcggctgacccggaggcgctgcatgtcggtgttgatcctggtggcgaggtacccgacgccggagaagagcaggtcccgcacctcgtacggcaccagctcgttcacgacgccgcgcaccagcatcgccgacgccgccagggacgccgccgtggtgacggccctcttgtacgactcgatggccttgtcgtaggacgccatggctggctggccgtccggcgagcctactgctgctgttggctctggtacgtctctgaaaaccttctttccttccagacgaagtgtttggtggtggtcttaagtggccgtatgctggtaatggtcggtgttgaatgactgggcgtttagctcattagctgggctcccggttttatagacgccagttggttctgtgtc

SEQ ID NO: 13543 - DNA, 1736 bp, Oryza sativa
  ref <308>: DATABASE ACCESSION NUMBER: AK110891
  ref <309>: DATABASE ENTRY DATE: 2001-12-06
aacgctaaaaaagtaacagtttctgtactttattgtggtcctggtagtggttgctaatgcgacgtgccttctgctgcgctttcctcatggtggcgctctgcggccccgtcatcgccgaccgtgcctgtcggtatgctaacaagtacaacacggaagacatcatgctttttgaaggtgtccgacgagaatttttgctggaccacgcgaagatggaagcgcggttcatgaagcagatcggcttggatcaagacagtcaaatgacgtacgatggccaacgcttagatctcgtttcgggcctccccgacaagcatccgcacttgttttccgccccaagcaaggaatcccttcacgttggagttcttgctcgcaccctttacgaccttgcccgcaatgacacgaagagcgttgcgaaagcgctttacaccgcggacgaagccctcgcggtgctggaacgcaaggtcgagagcttcgaaaagttcaattccgaatttccaggcttcggtggcttcatgccgtgggtcggatacgttccgggtaacgcgaccacgcctacgaaggtgactcctgtcgcgaactggttgaatcccagccgagttcctgcgctggacaacggagagctgttttgggcggcgtacgccgtcgcacacgtcctcaaaacctactacaagaatccgacgcttgccctccgttggcataacgtctgccaacgaatgatcgacaacgggcccgccatcttctatggcggcaacggcactgtttacactgtcacattcctgtcgaacatgtcgcttccagtttcgcaaaacaactacactggcacgggcaagctcaacgacccttacgaaggcgagctcttcactgacatgctttatctcttcagcaacctttcacaaaacgacaaggacatgctgtgggttcaaaagcgcggcatgctccaggcggtgaacctcactgtgaaggagccaggacttgatggcaagacccggacaatcaccgtccagcgaggcttttggttttcagcgcacgagcagtggaagtatctcatgcttccgtactacctgtcagacatcaactggcgcgtcttcttgaacggcgagcgagcccgaacttggtatgcgagcactccaagcgacgcgtttaacgcttccgacgccggtcttcagcggccatctcctggcatgtgggcgtccgtcaacgggcccgttcccacgaacacgagcagcttcccgtactactcggcgtgcggcattcagccgattgccttcgaagagatcaattacgacggcacgatcacaccttactcttcgttccctctgttcctcgcagatcctgcaaaggcagcgggttggcttcacaacatgatccgcacacgcaaaggacagaactgctggggaacgaccgagtccttcaacgtcacgggtgccaccgtcgccccgctaacaacctgggattcgaagatctcgacgctgcttgcggcgatgggaggcctggccgctattaatcaagaagcacttcctcgagaacaactgaagaaactgatttcacgcctggacatggagtggagtcgtgaattcggctggggccccctggccggcgaagaacttgacttcctgcctccaacgacgacggtgcccttcgttttgcctgacttcaccacttgtgacgattcgtcgccccagtgcgcttgaaaacgttgtgaaaggaaaatcgaatcgaacaaaacgagttgagcgagg

SEQ ID NO: 13544 - DNA, 1521 bp, Oryza sativa
  ref <308>: DATABASE ACCESSION NUMBER: AK110892
  ref <309>: DATABASE ENTRY DATE: 2001-12-06
acctccaagtcaaatcaccaagtgattcgaacccatggcgagcatgaatgatcaacacggcggcgccaccgcccacgtcctgctcgtgccgttgccggcgcagggccacatgaacccgatgctccagttcggccgccgcctcgcctaccacggcctccgccccaccctcgtcgccacccgctacgtgctctccacgagccctcctcccggcgaccccttccgcgtcgccgccttctccgacggcttcgacgccggcggcatggcctcctgccccgaccccgtcgagtactgccgccgcctcgaggccgtcgggtcggagacgctggcgcgggtcatcgacgccgaggcgcgcgtggggagggccgcgaccgtgctcgtctacgacccccacatggcgtgggtgccgcgcgtggcgcgcgccgccggcgtccccacggccgcgttcctgtcgcagccgtgcgccgtggacgcgatctacggcgaggtgtgggccggccgcgttccgctgccgatggacgacgggggcgacctccggcggcgcggggtgctcagcgtcgacctcgcgacggcggacttgccgccattcgtggcggcgccggagctgtacccgaaatacctcgacgtctcgatccggcaattcgaggacctgctcgacgccgacgacgtgttcgtcaactcgttcaacgacctcgagccgatggaggccgagcacatggagtcgacatggcgagccaagaccgtcggcccgacgttgccgtccttcttcctcgacgacggccggctgccggcgaacaagaaccacggcatcgacatcttcaccggtgatgcgccgtgcatggaatggctggataagcaggcaccctgctcggttgttcttgcctcctatggcacggtctactctctcgacggcgccgagctcgaggagctcggcaatggcctctgcaattccggcaagccattcctctgggtggtgaggtcgagcgaggggcacaagttatctgaagagcttcgtggaaagtgcaaggagaaggggttaattgtgtcctggtgtccccagcttgaggtcctgaaacataaggcaacaggttgtttcttgacgcattgtggatggaactcgacgatggaagcaattgctacggcggtgccaatggttgcgatgcctcagtcagcggaccaaccgactatagcgaagtacgtggaaaccgcatgggagattggtgtgagggcacaactagatgagaaaggctctgtcacgaaggaggaggtggagatatccatcaagaaagtgatggatgggaagagggcagtggagtacaagaggaatgcagctaagtggatgcaaaaagccaaggaagcagcacaagtaggcgggagctcagacaagaacattgctgaatttgtagcaaaatatttatcaaattagtatagctttgtatacatctggtttcttcatgtaaggatcttgtaacaccagcatgtaaaaaaaaattaaatagcagacgacaagatggagttagtttt

SEQ ID NO: 13545 - DNA, 1836 bp, Oryza sativa
  ref <308>: DATABASE ACCESSION NUMBER: AK110893
  ref <309>: DATABASE ENTRY DATE: 2001-12-06
atcactcagatcggatccactgcctagagctagcttagcacctactgcagatatcgcgcaagcgagcatggagacacagctgccgaccgtgatggagctggatagctccgagccggccaatttcacgcagccgtcacggagatacagctacctggagaagatccgtagcctgtccgtcgtctcgggcgaggtcgccgggtggtcgtcgtcggcgtcggcgtcgtcgtctcggtcggcgagatccagttactacagcagcagcatgtcaagcaacgcgtcgggtggccctcataatcatcggtacgccccttactcaaactcgtcgccgggtgacattgacctccacggtgctcaggacattgcgcggcagatggtccacgacgggttcatggtgaacttgatcagagagttcgaccgagcgcccgggccagcgctggagaggtggttctccgagctcgacgtcggctggttactccggtcggcggcggcggcggataaggagcaatccgagctcggcttggctgatctcgtgcggcggtggacgcgaggatataccgtgatggccgaagcactcagcgccacgcagactaaggttgcaggtgtacccgccataatacttccgcaggcccagcgggaccataacaatattatgtgtgatcaagagctggaagacgacctccgacttcaattcgcgcggttcgttgaggcgacagtatccaagatgcttgcctttgttgatgccctcgccgctgaaaacactcggctgtcaatagacaacctctcgagactcgtgggcctgtgcagctgcatctacagctgcttctacaagtgcaatgtagtagtaataactgattcagaagaaatagttgattcagaattgcaatgcctaggccgcaaagtggttggtgctttcataattacaacgacaaccttgtgcaatgcgatagagagtatggcgatggtcgccgaagctgttccccctgtcttaattggttgggattcctgtgaaaattttaagtagaatgcagaaatccacgaagctactaggctaattgttgactatgtaagattgttttggggataccagagcttgcggagtaacatgcggtatcttaaatgggttcaaattccgatcaccatgattccacaaatgctcatcaactttgaagatcagctggagaagatctcagagtcattctctgaccctagcctgaggtacctgttcctgcttaacaattcctacttcgtaagagaagagtttcttgagcccaacaattacgtgttcatccttccgtcaggcacaacgctcaaatttatgcagtaccaagagaagtacatgcttgcctcctgggaacccgttctgtattgcctacacgaaaagatgccactgtggtttcctaaacactcctcgcagctggcaagattcaagtcagaatttcagaaaacatttagacatcagaagctatggaaggtccccaacccaaggctcaggcagaaactgcgagaagccatcattgataaggtcattactggatacaaaaggtacctggaggaccatccggagctggagaaatgcagcagtgatctacaggacatggaagacatggtcaacgagctatttgaaggatgaataaggattgttccagttttagactgacatggccatgcgtatggagtgtaaactttaaatcagttacgacgataagagagggcgaggctaaggttaaataagttcaactgtattttgatatgttcccacctcattctacttttttcctaggaaatcctcattctaccttactatgaataaaatatatgggcagtttattttttttt

SEQ ID NO: 13546 - DNA, 1524 bp, Oryza sativa
  ref <308>: DATABASE ACCESSION NUMBER: AK110894
  ref <309>: DATABASE ENTRY DATE: 2001-12-06
aaattgaaattgctatgggttttggaagatgagatccagttggggggaaggaaggaaggatagggataagggatcagtgaccttgtggcgcgagaagaggttgtactcaggctgttcgacgatgggtccgacgaggtcgaggcggttggcgacgctccacgcctcggtgatctgctgggcggaccactcggaggtgccccagtagaaggccatgccgtggtcgatgacccagttcatggcgcgcacggtctcctcgacgggggtggtggcgtcggggcggtggcagtagacgacgtcgacgtagtccatgtcgaggcgcttgagcgagccgcggaggccctcgacgatgtgcttccgggagaggcccttgtcgttggggccctgccctccccagaagagcttggtggagacgacgacgtcggagcggcgccacccgaggtcccgcatcgcctgccccatgatctcctcggcgcgcccgttcgcgtacacctcggcgttgtcgaagaagttcacgccggcgtcgcggcacgcctggagcagcgccttcgcctccttcacgtccagctggttgccgaacgtcacccacgccccgtacgacagctggctcacccgcagccccgacctccccaggttcttgtactgcatcttcgccgccttcgcctccgccgccgccgccttcttcctcgtcgacggtgaggttggtttggatctgcagcgagagagagatcgagaagggctaggtgtcgcgcggatgcgttgcgtattttcagctctactactacctgcgagtcgcacgtgttgagcacgtgtcacggacaggtggaccgatctgtccggggcccacctgtcactgggattggacggagcgtggtggggcccgattgcaggcggtgggaagccgagggggatatgtcaggtggtgtatgacaggtgggccatacgggtaccgtaggtgcgctggctgtgtgggggtaaggaaaagctggggtgacagaagaaaaaggtttcgctcccaccttttgagattcggcagcgcgagagcgatccgcgggcgggcgagtagattccgctacgctggatgacatcccgaccccacaagctgacagcgccaggaagggagaaggcgacgcggccgccgccaccgtccggcacggtgcaatgtcagccagccatggatttttttctgccacgtacagaaagctcatgctcatctcgtcggactggacaccagcgtacaaattgttctatgattaatctatatagtagatagttgttacttcttcgtttcaaaatataaaaaaaaattgattggataagacacatcctaaatttataacactatgaatctggatataattagataaaacacatcctagtacgatgtttagattcgtagttctaaaaatttggatatggttggataatacacatcctattattatgtccagattcgtaatactatgatatgtcttatctaactaaaacttattatattttggaagaaagaaaacatatttatgatgc

SEQ ID NO: 13547 - DNA, 1499 bp, Oryza sativa
  ref <308>: DATABASE ACCESSION NUMBER: AK110895
  ref <309>: DATABASE ENTRY DATE: 2001-12-06
aagctccgtcccaggtaagagctagcagctcgagagagcgcaaaaaaagaaaaaagaaaaccccaaaactccagagattaatcggcagagctagctgtgaccgaggagaagacagagcagccgaatcgaagatggcgttctataatggcgcgagtgttgtcgcgctgctgttgctggtctccacggctgctcgagctgccggcgatggcctgctgctcaacggcaacttcgagtaccagccgagcaagtcacagatgaacggcacaagggtgatggcggagtacgcgatcccgtactggaagatcaccgggttcgtggagtacatctcgtccgggcagaagcagggcgacatgctgctgacggtgccagagggcgcgcacgccgtgcggctgggcaacgaggcctccatcgagcagcagatcagcgtgacccggggcatgtactactccatcacattcagcgccgcgcgcacctgcgcccagtccgagaagctgaacgtgtcagtggctcccggcccggagtccggcgagctccccatccagaccgtgtacaccagcagcggctgggactcgtacgcctgggcgttcaaggccaagcgcggcctcgtgtcgctcatcatccacaaccacggcgaggacgacgaccccgcgtgcggcccgctcatcgactccgtcgccatcaagaccctgtaccctcctcaggccacccagaacaacatgctgagaaacggggacttcgaggaggggccgtacatgttcccgaacgcggcgtggggagtgatggtgccgccgatctcagaggacgaccactcgccgctgccggggtggatggtgatgtcggacacgaaggccgtcaagtgcgtcgactccgcgcacttcaccgtgccgcacggcgcgcgcgccgtggagctggtgtccgggctcgagacggcgctgatgcaggaggtgcgcaccgtgccggggaggtcgtacaggctggagttctcggtcggggacgccagcgacggttgcgtgggttccatgcaggtgaaagggtacgcgggtcaggggtgcacgaccgtgacgtacagctcccagggcacgggcgggcacacccgcgcgtcgctggagttcgccgccgtcgcgaacaccacgcgggtggtgttcgtcagctcgacgtacatcaccaagtgggacgggacgctgtgcgggcccgtcgtcgacgacgcctcgctcgtgtgcgtgtcccagcagcagccgcccgctcgccgcctgcttcgtctctgaaatgttgcgctacacggagcagttcgcggccggtcacatgtactcgcatggcgcgttggaatgtgactgtgctgggagtagcagtcgacctttcttcgaatttgtttcattttgtttgagagtgatgttcgaaatatctgttgaaaatttggtcataattcggcatattttaatctaaaataacaagataataaatatgatatttacaatcaacatgagcatagtggtgaatgt

SEQ ID NO: 13548 - DNA, 1686 bp, Oryza sativa
  ref <308>: DATABASE ACCESSION NUMBER: AK110896
  ref <309>: DATABASE ENTRY DATE: 2001-12-06
atccatggcggttttgggcccaggatggctgcattggccggcggcgcaagggtttgagggcggcggcgccggcgaggcggcgagctccaccggcgaagcacccccaccgtgacggcggatccgggcctccgaggtccgcgctgcgcgagcgcgcgcgcgcggggtcgaacctcgcctagctggacgaaagaaggggggaagcacaccgcagtttttccagattctgtaggtgccatgttctcccattgagttcgatgtgtgtcagactctgcagcgtactgacccctgaaagctcctccatgtgagtgaaggaccaaactatcttttcaagtttatcagggtctccaccataagtattattacccaaggcgacactgttaacaatatcatcttcaatgacaagatccacaagttccacaaacttcacgaagctcagagcgccttctgcgaatgaatggtagcaaagcctgagatagcgtaggcctttgagcatgctaagtatatcgagggcaccctgattcaaaaaggtgtcgtagagttatcttggcaagctgatggagctccttgatcctgggaggcaacccgcttctgatgctgcagatgtgtaggctctccagaagctttggaggtctcaataaaataacatcaatagaatcccagttacctggtggatccattcggattgataaggaccgaagacatctgtggagtttgtcaacctgaaggaacaaatctatcaagctagctttcttgccagatagaaccacacccaacttctttaggtgctcgagcttgtcaccaatgttgttcagttctttagcactgttcgaaaccttgacacgggacaatatctccatcttttccatagttgcaacagcacgaggcatggaaaccgtggagaatgattccttggacttgatgatgtcttcctttgggtagtcaataatgcaaccagcaagcaggtgctttagcattggtagcgccgtgtggaacacttgtacccttgttcctcggatgtcaagtgtctctaagagcttgagctgacctatttccttgggcagttgggcaatatctgtgttccggagacttagatacttgagtttatgaatcttgcatacggtatggaggtcgcctgccttgaggcccttgcgaccttccaaatcaagtactgtcagcagcaaccttgaactgctggaaagtgagttcaagaactttttgatattagagtttgccggatggagttgcatgccgtgccggattgagtagaggagatccaagtcaagtggcagctggttgttgagcaataggtcctcaactgtcgaagactccctgctgatcaagccagaaactactggatgcacggtgcagctctttaccttgcgtgtaccactaagaccagaagaaacaataagcttctggctgtgcatggcttcgaaacagtgcccggcttcgtcctctgcacttgactggttcacttgggctatcaagccttgggcaatccatcgtcttattaaacttgcccttcggacgccgcttccacgggcgaaaatggttgaataccataagcagttcttgtaactttttggcagtgcttggtagcagaaggccattattcggtcctgtctcccatgatctgtaaattctttaccaaggcttatattcaggaactgcagttggtgtttcgtc

SEQ ID NO: 13549 - DNA, 2036 bp, Oryza sativa
  ref <308>: DATABASE ACCESSION NUMBER: AK110897
  ref <309>: DATABASE ENTRY DATE: 2001-12-06
tcccggagttcatcctcaaaagcggcaacgtcacctacctcgacctgtcgcagaacactctgttcgggaagataccggacacgctgccggagaagctcccgaatctgaggtacctcaacctgtccatcaatgcgttctccggcccgattccggcgtcgcttgggaagttgacgaagctgcaggacctgcggatggccgccaacaatctcaccggcggcgtcccggagttcctcgggtcgatgccgcagttgaggattcttgaactcggcgacaaccagctcggcgggccgatcccgccggttcttggccagctccagatgctgcagcggctcgacatcaagaactcggggctctcttcaactctgccgtcgcagctgggaaatctgaagaatctcattttcttcgagctgtccttgaaccagctctccggtggcttgccgccggagttcgccgggatgcgggcaatgcggtacttcggcatttccatgaacaacctcaccggtgagatcccgccggtgttgttcacgagctggccggagctcatatccttccaagtgcagaacaactcgttgacaggcaagattccgccggagctcggcaaggcgagcaaactgaacatcctctacctattcaccaacaagtttacgggctccattccggcagagctcggcgagctggagaacctgacagagctggatttgtcggtgaactcgctcaccggaccgatccccagctcgttcggcaacctcaagcagctcacaaagttggcgctattcttcaacaatctcaccggcgtaatcccgccggagattggcaacatgacggcgttgcaaagcctcgacgtcaacaccaacagtctgcacggcgagctgccagccaccatcacggccctgaggagcctccagtacctcgccgtgttcgacaaccacatgagcggcaccatcccggcggacctcggcaagggcctggccttgcagcacgtgagcttcaccaacaacagctcctccggcgagctgccgcgccacatctgcgacggcttcgcgctggaccacctcacggcgaactacaacaacttcaccggcgcgctgccgccgtgcctgaagaactgcacggcgctggtccgtgtccggctggaggagaaccacttcaccggcgacatctcggaggccttcggcgtgcaccccaagctggtgtacctggacgtctccgggaacaagctcaccggcgagctgtcgtctgcctggggacagtgcatcaacctcacactcctgcatctcgacggcaatcgcatatccggcggcattccggcggcatttgggagcatgacaagcttgaaggatctcaatttggctggaaataatctgacaggagggattccacctgtgttgggaaatatcagggtcttcaatctcaacctgagccataactccttttccgggccgattccggcgagcttgagcaacaattccaagcttcagaaagtcgatttctcagggaacatgcttgatgggacgataccagttgccattagcaagcttgatgctctgatattgcttgatttgagcaagaacaggttgtcaggggagataccaagtgagcttggtaatctggctcagctgcagatcctgcttgatttgagcagcaattctctatcaggcgcgatccctccaaatcttgagaagctgataactctgcagagactgaacttatcacacaatgagctcagtggttcgatcccggcagggttttctcgcatgtcaagcctcgaatcagttgatttctcttataatcgactcaccgggagtataccgtcagggaatgttttccagaatgcttcagcttctgcatatgttgggaattcggggctctgtggtgatgtgcaaggtctaactccttgtgacatcagttctaccggatcatcttctgggcatcacaagagagtagtcattgcaacagttgtgtcagtagttggagtggtgttactactagccgttgttacttgcatcatactgttatgcaggaggagacccagagag

SEQ ID NO: 13550 - DNA, 1567 bp, Oryza sativa
  ref <308>: DATABASE ACCESSION NUMBER: AK110898
  ref <309>: DATABASE ENTRY DATE: 2001-12-06
agctcactctggaagaagccaaccatcagtgcctctgcctgcacgtagtgagctcacatggttcagcttcccgcaatgaagcgcgtgaaggggcgggccccactgtcagtggtggtggcgatcatcggcgggctggctctcgcgggcatcatctttacagaggacctccggggtctcactgaggtcaaggagaaggtgacagacaaggagaagaagagaacgtcgctgcggaccgtgatgaggacgtcggcgttgctctctgctgatcagccgccgccgccagcggtgctctcggtcgaaccagcaacggcaacgccgccgccagcgccgaagatggcgttcaacgcgacccggtgcagcgtgacggatgggtactgggcgtacgacaggtccaagaaactgccttacacggaccagacgtgcccatacgttgacaggcaggactcttgccagaggaacggcaggccggacagcgactacctatactgggattggcatcttgatgactgccttctcccgaggtttgaccctgtgtccatgctggagaagctgcgggggaagcggatcatgttcgtgggcgactcgctgcagctgggccagtggctctccttcgtctgcctcgtcaactccgccgtcccggacaccccgggcgccaagtccatggagcgcagccgcaccctctccgtctacaccgtcaaagagtacaacgcgtccatcgagttctactgggcgccgttcctggtggagtccaactcggaccggaacatcgcgctgggcgcgggcggccgcgtcctgcacgtcgacgccatcgaggagcacggcaagcactggcgccgcgccgacatcctcgtcttcgacagctacgtctggtggatgaccggctacaggatcaaatcggtgtggggatcgttcggggacgatgggtacgaggagctggacgcctgggtggcgtaccggctgggcctcaagacgtgggccaactgggtcgactccaacgtcgatcccgccaccacccgcgtcttcttcatgtccatctccaccacgcacatgaggagcgaggactggggaagggaaggaggaatcaggtgctacaacgagacgtggccgatcacgcagcggggctaccgaggcagcggctccgaccgtcggatgatggaggtgatgtccgacgtgctgggcaggatgaggacccccgtcacgctgctcaacatcacccagctcacggagcaccgcgtcgacgcccacgtctccgtctacaccgagaccggcggcctcctcgtcaccgacgaggagaagaccgatccgcagcgctacaccgactgcatccactggtgcatccccggcgtgccggacacatggaaccgactcctctacgcccacttgtagcctagcctctcggctctcacaagtcacaagcacgcaacgcaacgcaagcccactagtgactagtggtagcagctagcggacaaaggatacggataatgacagcgaaaaatgaggagatatattaattacggtgtatcgtttcaaggatgagttcggatgagtgatcgatcactctccacat

SEQ ID NO: 13551 - DNA, 1707 bp, Oryza sativa
  ref <308>: DATABASE ACCESSION NUMBER: AK110899
  ref <309>: DATABASE ENTRY DATE: 2001-12-06
caaaagagaactgggatcatatcagcggagaggccgagccatccaaaaccatgcacataacttcagatgaacaggttgaaattgctgtggatattgaaagactatccaacaagagtacatctggtaattgtggaccattacagccgctccagtctgttgatgacaatgtacggagtagaggtttgtcagagcacaggaatggtcacaatgatgagctagattcttatattacttcctttgtccaaatgtcattggcacaagccaagcagatggttgacgaagccatgaaggaaatctctgagaatggtaaaagttctctagaagaaacaggcatatcaaatgaagcgacggattgtacaggcccagaaccggaatctgctgctaattctgaacttccgcgcaacctgatattcaactgcattgccacgcttcttgcaatcaagcattttagcgagggccgacatccacctcctaacatagcaggcgtcctggagcgtgcttgcttaatgctgcgaccaagctgtgcagagaacctgcccatctataacgaaatagagaattttatcgctgtcataaagaaccagatactagctcttgtgccatcggcatcaagcaatgccaggctacccatgtacatgtaaatacttccaggcttccagcagacgaagaggcggtgcctggttgcttgatgtcgagaagaattgatgaatccatagcgtctgggggaggtttgaaaatgtatgagcttggatctacagcatcagaagacggcgggtcatcgttgactgtccagctctcttctaaactgtgtgagatgaaatggaccctattcctgcctccaaacaaaaaaaggacggtgaagtggaactcgatctgcagccggcggtgcggcgcgtcggcgcagcccttcctctccatctccagctcctccctcagcgggatggccgccaagaacctcttgatgaactccctgcagcactccttcccggtgacgatcacctcctcctccggcgacggcgacgacggcggcggcgacaccgagcgcatctccgacgtggcgtcgaaccggagcatgtacgccttgtcgcagccctcgaagagcctctcgccgagcgtgtccacgacgtggtagcagtcgccttccaccttgagcacgaagaagtggtcgttccagctcacgatgtacacgtcggcgcgccccggctcgccgccggcggcggcggcgatctctcgccagatgtcgtcgaacgacatggcgccggagagggaggcgaagctctcgggctggaagaagccgacgaaggccctgtcgtgctgcacggcgatgggcctcgccctcgccgcgagcaccgtctccaggtcgaagtgcctgttcgggaacgccgccatgtgcgcctcgtcgtcgcagagccgcctccactccgacgagccgtccctgatgagcgcgtccagctccggccgcgtcggcatcgtcgggtggttggcgtgcagcgccgccgccagcacggccaccagcgccgtgcacgcgctctccccgccggcgctgtcgtcgcgctggtcgatggacgcgaagaacaccggcgtcctcagcttcgtctccgagtccctgctcgtgaactcccgagtctcccagcttcccgccagatcatcatcctgtaagacacagatcaccatctcgatcaatcaccaattcaccattgccaatgc

SEQ ID NO: 13552 - DNA, 1776 bp, Oryza sativa
  ref <308>: DATABASE ACCESSION NUMBER: AK110900
  ref <309>: DATABASE ENTRY DATE: 2001-12-06
tatattgcttatccctcaacgtcctgtaccggatgtgtgatgacttgtatgcatgaccagtgaaggagcaaaggggttcactagcaccagccgggccgtgcatggagcatgaaccgaccgtccatgagctcacggcctcgtcacggcgatgacgtacaggcgacacacatccagctgggcccctccttccatgttccaagccatttcctttggtgagttgttcttcctcttccccccctcccgatcgccctcgtcgtctacttttcctctcaacttcccaccgagcacaccaataaaaactgcagctgctgcccaataacctatctactctagcagtctagctacggctgatgagcaggtgtcaatacaagagtagcaaagctgagaatatctagttcctactttgctagctttcctagtaatactagactgctagcagcagcaattagctatagtagcggctcctcccatggcgtctcctgatggtggcgttggagacggcggcgcggagccacatgaagttatggacgacctgctcgagatgcgcgagcaagcggcgatgctccacagcatgctacatgggacatcgccgtcgagctgtgcggcggcggcgagcaccaggcagctgaatcagctgatagacggggtgatgagcaggctgcagtccagctcgctgtcggtgatgtcgcctggaggaggaggaggaagaagaggatcgggcgggaggaagaagaaaggcgccaaggccgtggccgggccgcacaggcggagcagctccggtagaagaagatcgaaaagtccttttgtcaggatggtcacgaccaaggagctggaggacggcaggcaatggcgaaagtacgggcagaaacatatacaggactccccaaataatccaaggagctactacaggtgcacgcataggccagaccaaggttgtatggccacaaagcaagtacagacctccgagtctaactcgtcggagttcgtcatcagctactacggtgagcacacctgcagcgacccttccaccatcccgttcgtcgtcgaggccgaagctcccgctgcagactacgcgaacctcatcagcttcggatccagcggcggcgcgagcacaagcagagtcgaccctcttcgtcagagccgccatcgtttgatggcagaagccgttgatccgacgccgtcctgcagcttcgccaactgccactctccggtactgtcctcggagtgcgccagcgaggcggcggcgctcagcagcagcctgccgctctccgccgtggtgggatcggcggtgacaacgccgtcgacgtcgatcgtgggttcagcgcctgcggattacgactggccgtcagggctcgccggaggtgacatggccggcagcttcccgtcctctcccagcagcctcgggttcatgactggctcctttgggaatcttcctggggatgacgacgacatgtttggcttcgatccttaacaagggctgtgcatgcatacattcttgccatgctaattattgctactactaatattcaagaaaaacaagtccgctatttgcatgcagaagtgtatgcatgcatgcataatactattgctgtgaggctatagcaaattagcaatacttgtagtacatgtgtgtactgctattggaggaaatccaatatatatacggtacgtagtaaatatgtgtattagttgatcgctgtactagtgagttgtgtgtatgtgattttgtaagtattgaaacataatttgaaattaatatatagtagtgaaagtaat

SEQ ID NO: 13553 - DNA, 1665 bp, Oryza sativa
  ref <308>: DATABASE ACCESSION NUMBER: AK110901
  ref <309>: DATABASE ENTRY DATE: 2001-12-06
tcatgataactcgacggatcgcacggccctcgtgccggcgacgcatcattcaaatttctgccctatcaactttcgatggtaggataggggcctaccatggtggtgacgggtgacggagaattagggttcgattccggagagggagcctgagaaacggctaccacatccaaggaaggcagcaggcgcgcaaattacccaatcctgacacggggaggtagtgacaataaataacaataccgggcgctttagtgtctggtaattggaatgagtacaatctaaatcccttaacgaggatccattggagggcaagtctggtgccagcagccgcggtaattccagctccaatagcgtatatttaagttgttgcagttaaaaagagcagtaccgcaacgttagagaaagcaaagcaagcagccccgggtgatcaacaacctcaaagatggagccggtgggcagcatcgtgggcgcggtgccgaaggtggcttcggcgatcgccaaggcagtgaagacggctcgccggaacaagaccaggtgccgggagctagcccagcgcgtgaaggaagtcgacgacatcctgagggagtacaagaaggtggccatgggagacgcggcggcgacgacgcggaagattctgggccgtctcaaggacgccctcgacgacgcgctcaagctcgtcgagtcctgcggcaggagcagggacggtctgctcttcaggctccacaggttcgtggccagcgacgggctcgccgccaagctcgatgacgtcaacagtaggatcaacaactgcctcatcgccctccaggccgtcaacgttgcccacctacagaagaagatggaccgccacctcgccgtcgccgctggtgggggcgatcaccgccgcacaaacaatccaagggagatcaacgccggcaagagcggcaacaaaggtaacaagggcgggcagcagcacaagcagaacggagggaagggcggcaaacggaggaaaggcaagaaggcggccgggccaccgccgcagccgcagccatgcacccccaccggcgccgtcttcccttactaccttgtccactccatggaggaggatcccacctcctgctccgtgatgtgatccacgcgcgcgtgcacggaggaagccatgcaagcatctaagctccggcagctgcgcaggcgcagctcgtgcttgatccatcaccaccagtgatgacgacgacggcgccgccgccgcggcgacacccaaagaatcgccacggcggcgagcaccgatcgagatcaagtaccaagggtactgcatgattccccgaacaggtcaagctttcattttatcgcatatttgggtatccggaaatccatggactacgtgatgatacacataacacatggatttccacatcatgcattcgggttgcaacggaattgggttggatatcatctgaactgcatttaatttcatgatcggattcaattcaaattggatatatatccgcccattcctagcttcatcttaataataagcagtttcagtgtgatcgagtctgtgtgtactgtaatgctgtgttctgcatgtctgtgtagtcgagttgagtccatcatgtttgcttcattctgtaattctgcatgatcttcagacgctctgcatgagcgagtagtaataataataaagtttgaatg

SEQ ID NO: 13554 - DNA, 1598 bp, Oryza sativa
  ref <308>: DATABASE ACCESSION NUMBER: AK110902
  ref <309>: DATABASE ENTRY DATE: 2001-12-06
acagtcactccccgatccatccaaattccaagacaagctcctcgtgctttcctgccttgccgctgcgtcgctctcgctctccacggcacgcgcacgcaacgcgcgacgcggtccggcgctagctgagctgtgactagccgagcaaacacccgcggctcgccaccccgacggttaccgccgcgcgccaccccccacccgcactgcataaaaacgccccacctccgccgaatcgccgatccgcgcgctgctaccaccacaaacattctaccgcgggacacacactcgtctttaccacacaacacgagcacgcgcgcgagagagaaagggggagataagagcagtttgacttcgagcttcaaccacagccgagtgatccatggcggcaggggagcaaccgggaactgggtcgccgccgcagccgtcgacccgcctcttcctcctcgtcctcgcagtcatcctcacagatcaagtgctagcggcatcagctcaaggcatgtcaatcgggatcaactacgggcagatcgcggacaacctcccttctccgaccagggtctcgggtctcctccggtcaatgcagatcagcaaggtgaagctctacgacgccgaccagaacgtcctgagcgcgttcctcgacacgggcgtggagttcgtcgtcggcatcggcaacgagaacgtgtcggcgatggtggacccggcggcggcgcaggcgtgggtgcagcagcacgtccgcccctacctcccgagcgcgcgcatcacctgcatcaccgtcgggaacgaggtgttcaagggcaacgacaccgcgctcaaggccaacctcctgccggcgatgcagtccgtgtacaacgccgtcgtcgcgctcgggctgcagggccaggtgaacgtcacgacggcgcactccctggacatcatgggcagctcctaccctccctccgccggcgcgttccggcccgacgccgtgccgtacatccagccgctgctcaacttcctgtccatggcggggtccccgttcctgatcaactgctacccgtacttcgcctacaaggccgacccgggcagcgtgccgctggagtacgtcctcttccagcccaacgccggcgtgaccgacccaaacacgaagctcaactacgacaacatgctgtacgcccagatcgactcagtgtacgccgcgatgcaggcgctgggccacaccgacgtcgacgtgaagatctccgagaccgggtggccgtccaggggcgaccccgacgaggccggcgcgacgccggagtacgccgggatctacatcggcaacctcctgcggaggatcgagatgaagcaggggacgccgctgaggccgtcgtcgcccatcgacgtctacgtctttgcgctgttcaacgagaacctcaagccggggccggcatccgagcggaactacgggctgttctaccccgacggcacgccggtctacgacgtcggcctgcgcgggtatctcccgccgatggacgaatcgaaaagcgcgcgaaaggtaggcggtgtgaactgtgaactcgatcgtttttttctccttcaaaatctgcaaaactgttacaaactttctgctgcatgtcacgcatcatatagat

SEQ ID NO: 13555 - DNA, 1472 bp, Oryza sativa
  ref <308>: DATABASE ACCESSION NUMBER: AK110903
  ref <309>: DATABASE ENTRY DATE: 2001-12-06
catgtattcaccgactttctgctgagtctagttcaaaaggagtacaaacgacgaccaagctatagctcatgcgaggggtgaaacgacgagcccttcaccgtgtcagtgtgtctcgaattcgctgtgtgtgtagtacaaatgtgaatgcaagaaggcaagagcaaatcctccgtggtaaagttgggcatcagtagttgcgataaagcagcgatgactgtgtcaagctgtaaattattagctcccgtttgctaacttctcttgttctcaaataattttgctcggctaattaatgaagttaagatgttacctgctacaaatgtgcgaaaggagtgcctttttttgcttggtaccatcacaaatatcagctgtggaaaaatcgtgatgtctggtgaaatcctggtggcttcagttgatgataaatctggaacacctttgaaatgctcgaagtccactgtaagatacaggagtcccaactctgctaaggccattcacagtgtgtcaccattatttacgaagaacctcataacctccacactccacagtgcaagtactagtagtgggtcccactggtacatctttttactttcatcttccaatctctctttcttttctcaagctgttctctctcaactctcaagtactactctctcaagtgagctctctcccgaggctccaagcggtggcggaaggcggcggcaacgtcgagcggcgcacggcgccctcccgtcctctgtccacaacggtggcgcggggcagatcgagcggcggcggtgctgggcagatgtggcggcggcgctgggcgaagccgcgcgctctggctcctcttcctctgtcgcgacccgagcccgaccggagcggcagctgggtagccagatccaggttgggctcgccggatctagccgtggacggcgacggcgggctcgtcagcttaccacggcgatggcgggctaggcggctcgtcggcaaggaggcgacgacggcagcgggaaggagggcgttgccactcgctccacaacgcggtctcccaacctcacgcgtcctttttttttcgcccaagaaccggtggcaaacattggacacaacttcattttggtgggcccggaagtaaacgtggcgtgtggctttctcctttgccaacgtgggagggagaggctgaacgcaagcccaaacgcactaagagttcgtagtacttccactactgtagtttgacagttcttacaacccctcctaacagaaaggatcctctgccttttggtactaaaggcagagaagtgcagtaaagtcttgtgttacagtacaaaacaatgatgtgcagttgtttgctgtagcaacagtataaaaacagtgaaaaaatgctgtgcatttcgcactgttcacgtatcgttgtagcgtactgtagcaattgatcttatccgttcactgtaaataggacggctagaaatatcattaaattatggtactgtgcttatctg

SEQ ID NO: 13556 - DNA, 1596 bp, Oryza sativa
  ref <308>: DATABASE ACCESSION NUMBER: AK110904
  ref <309>: DATABASE ENTRY DATE: 2001-12-06
ctgatgatcacccgcgaattgctcggatggcagcagcatcgcgagcgaagcatccaactgcccgaatccgaaatccatggcgccgaagcttcccgcggagaagaactcatccccaccaccggagccggacccgacgccggcgatccctttgacgtcaagaaactcattgccgccgccgccgccccacgtgaactccggctcctcctgcttgtggcggcggcgacccgacgtcggcggcggcgggggaggggggagagcgggggcgtggccctggaagagggcgacgtgggcgaagagcttgtccttgcgggagaagctggtgccgcaggagcagagccagcggtcgcggccgcagtgcttctcgtgggtcttgaggtcggccatgacggagaagcgcttggcgccgcagcggccgcagacatggcgcttctcgcagtggctccgcttgtagtggttcttcacgcacaggatcgtcttcagcggctggaagctcgcgtgcatccggttccgcttgcacccggcgtgcgggcacgagtacctcctctccggctgcggcggctgctcctccccctccggcggcggcggcggcttcgccagcgccgccgcgctcttgtactcgtcgccgtgcccgcgcatgtgcatccgcaggttcgcgtcgcgcttgaaccccttgccgcagatgccgcagaagtgcgtgtgcggcgccaggatctcgtcctcctccagctgcagcacctcgtacttctcctcctccgccgccgccgccggattctccctcgcatcctgctcgtcgccggcagcgccgacgcattcgtccatggcgccgccgttagtccataccttgaagagctcgtcgtagtcggggctacccatctgctcctcctcatcttccctgttcgtctcgttattacgagccgagctggagctctcgccggcggcgaggctgaccgcttgtgcggctccggccgcggcggcgggcggcggggtggtgcggctgaggaacgaggagttcttgagcgacgggaggaggctgccggcggtggagatgagctggacgatgaggcatgtcaggtcggcgttgacaagctgctgctccggcgtcgccgccgacgacgacgaggcgcggcggccggccatggatcggatgacgtccttgacctgccggatcttctcctcgatgaaggtgaggttgtccagcatcgtgtccgggctccagtccatgtgctggatgctaaccgacggcagcagctgctgcggcggcggcggcgccatgccgaggagagcgtcatccgccatgaacgggtagaagagaggattcatggaggtcaggttcgcagcctgatcgcgcatcgtgttcgtcatctggtcgcgatccattgcaagcttctgaataatctcgcgtgatctttattaggaaaagagatggcgcctctgaaatctgcagaggaagaggaatcaagatcgttagccagttcaaagattgttcttgttttttttcccccaagaaactatttgatgttatttttgagttggttgaaaagtcaagaaactgggaactaattagtagtagtaatctactagattatcaagtgatgc

SEQ ID NO: 13557 - DNA, 1835 bp, Oryza sativa
  ref <308>: DATABASE ACCESSION NUMBER: AK110905
  ref <309>: DATABASE ENTRY DATE: 2001-12-06
agaggcgtacggattacaagagaagagagcagcgtgacatgggaagcaatgaccaccggaacgtagctctcgccgttgaccgtgtccgggtcctgtcccgacgcctcgtccggccgtcgtcgtcgtcgtcgtcgtcgtcgtccggtcacgcgccgccgtgcgacatccacctcacgccgtgggacctccgcttcctcagcatcgactacatccagaagggcgtcctcctgcccaagccgccgctctccggcgaccgcctcgccgacgccctcgcgtcctccttcgcgcgcgccctcgcgctgttctacccgttcgccggccgtctcgtcgccgaggagcgcgccgacgacgggaccgtcaccgtcgcgctgcggtgcaccggcgagggcgccgagttcgtccacgcggcggcgcccggcgtggccgtgtccgacgtcgtctcgtcgctttacacgccgccggaggtatggtcgttctactcgtacaacctggtgctcggcgccgacgccgccaccgagtcgcggcccgtgctgtcgacgcaggtcaccgagctcgccgacggcgtgttcgtcggcatgtcgctgaaccactccgtcggcgacggcaccaccttctggaagttcatgaacgcatggtcggagatcaaccgccgcgctggcggcgccatgagcgacgacctgatgatcagagagatctccacgccggcgccggtgttccggcggtggttcgtcgagaccagcccggtgccgatccccatgccggtcggcaagctgcagcacatcgtccgacggctcgagcggccggaagtgcaggaatgcttcttcaccttctcggcaacgagcgcccggaagctcaaggcgaaggcgaacgacgagatgtccggcgcggccacgtcaaccatctcgtcgctccaggccgtgctcgcccacctgtggcgaggtgtgtgccgcgcccggcgactcccgccggagcaggtgacgttctacacggtgatggtgggatgccgggggcgcgtgaacggcatcccggcggggtacgtcgggaacgcgctgatgttcgggaaggcggaggcgacggccggcgagatcgaggagaaggggctcgggtggacggcatggcagctgaaccgcgccgtggcgtcgttcgacgaggccggcatgagggagtcgctggagcggtgggtgcgggagccggagttcacgtacatgtcgaagctgcaatccggcgatgccggcggcgtggcgctgatcacggggagctcgccgcggttcgacgtgttcggcaacgacttcgggtggggaaggccggtggcggtgaggagcggcgccgggaacaagatcgacgggaaggcgacggtgttcgagggcccggacggcgccgggagcatgtcgctcgaggtttgcatcgcgccggacgcgctccggaggctcgtcgccgacgaggagttcatggacgccgtcaccctcccctcatcgtgattaaacttcattgctctaccaaaatatggtgctctttagggaaatatattaatttcggctttagcccaatcaacaaagatgtgacgagaagatgtaatccattcctcttgcatgcaaaatcatggatacaatggtcatatcaattttcgttaactttggatgaatatttactgataggattactatctgaataatttgtttgttggtggagttaatatttgtcttattttccatcctatgttagttacattttatttggatttgcgcaaacaattttgtgataattaattggttgtaatttctgttgaaggaaaggacagattttatctattgtctagcaatagataatttatttat

SEQ ID NO: 13558 - DNA, 711 bp, Oryza sativa
  ref <308>: DATABASE ACCESSION NUMBER: AK110906
  ref <309>: DATABASE ENTRY DATE: 2001-12-06
attgtgatagtagatgatcaagtgaggagctatagagatcgagatgagcctttcgtcgtacctgacgtgcaacctggtgaccaggcaacggcaacgaggtggcgtggaagaagacgagtacgatgggcggcgtcagccgcagacggccacctgctgcaccgccctgaaacgaggtgtcaccgctgacggactcctcgcgcagccgcgctacgccccggtcaggacgccccaatccgcattgctgctgctcgatccaccaccaccggcgcccatgacgcccacgtcgtcgtccagcaacagcaaccacgacgacgacgacgaaaagaagaagaagcagccgatgctgcagcagcagaagcaggtgcgcaagtgcaaatcgacggtggaggaggcgtcggcgtcgcagctgatggaatgtaaaggcggcggccctcctcctcgtctccgtcgcagcggcggcgtccgccgtgactggagcttcgaggacctccgcgccaacaacaccgccgcctaataataataataattcaatccccccaccctcctgctgccctgcctgtaactaacaacccacttcttgctaaatacatatatatactcctccttaggccctatataaacacgatcactgctaactcgattatcatgtaaataatttatttattattgtaatctgccaatgcccccttaattaattaattatatgtttgt

SEQ ID NO: 13559 - DNA, 2132 bp, Oryza sativa
  ref <308>: DATABASE ACCESSION NUMBER: AK110907
  ref <309>: DATABASE ENTRY DATE: 2001-12-06
aactaacgctaaaaaagtaacagtttctgtactttattgagagaaagcaacaccggtatcggttgagcgcaaatccatatttttttgctttgccctgttttcaacacgccctctcttccccctttcccatcctcttcctgcgcccattccattccgctctcgccaaaacaaaactagggtgatatctttggacctctgccgtccgccatatcctgccgcgcaaagaagaacacattacactcgtaccctgaaaccctctcactctctctgcgatacccgacgatatgctgccttcgaacagatttgaaagacggccgacgctgctgctggccgcggtcgcgttgttggtcatgtcaaccatcgcctccggctcagtgccctgcaacgacggcttcgttgaatacgagtgctcggaccaataccccgtctgctgcacgtggaaggtgaacaacgtggtcgcggcgtgctgccctgccggcgcgacgtgcgatcttggcgaaggattctgccttgtgcaccatgtcaccaacttcaccgttccgccgccgcccccacctcagggcggcatcacggtcgcggtatcggaagcagcagccttcatcaccttcggcgcgattggtttcatcattgccgtggtgggctgtgccttcttggccttcaaggtgttcatcatgtcacaggcgtaccagcagcggcgccttcaggccgagtacgagcgcgtgctgcagggatctagcagcagcgaggacgacgactcgaccgcaaagggtgacctgaccggcgacgacaatgacgacgctggccagtgcacgctgtgcttctcgcaccacatcaactgcgtgctgctcccgtgtgcgcacgtgtgcacgtgccgcgcctgtgcctccaagctgacgcagtgcccgctgtgccgcacagagatgaaatccttccgccccttcaagaaccggctctacatgaagcggccggctccaacaggaggcgcaaccgcctcaggcgctgccggcggcagcggtgccccactcctcattaacgatggccgcgaggactcgacgccggcaccggtcgtcgtcgtggttgcgtcggcgcggcgcgcggtggcggacacaatggaccctcggttgggtgcctctgaagagctcacgcccacgccacgcctgccgcccgccaccgtccaagcgaccccacgtcaagtggccccgctctccgcccgtgcggtggtgcccacccccaaccccgcggcccctcaggcggaggaaccctgcccgccagcagtggtggtcgttgtggacgccgcgccgagtgtcgtagcgaccgagccgaccccgcctccacagaacgccaacagtgccgaggaggatgaccgccatgtcgccgaagccgatgtccccacggacaacacggaggctcatgaccgtaatgatgatcatgttgactcggctcccgcagcagtcgtcgcggatgagacgcatagcaccacctcgtcccaccgcgacgacgcccagcctgaccctattgatgccgcagtcgacgacaatgcgctcaacgcaacggaaggggtcgtcagccccagcgagcagaggccacgtagcccccaagtggacggcaccgcctaaagcgcccgcctcgacacacaaaacaacaacaacagcaacaaaactacacacacacagatttagtcgcactctattcgttccctcaaactacggtggtccacagtaacggactctgaccctcaaccgctctcgacgcgacgacacgcggctcacgcttcgcgcctggagaggaggtgctgcaatttgggaggatgtgcttaagcaaaatttggaagggacgcccgaacggacagcgcatcaccacactccacagccgtacccctcctgtggagtgcgatctcccatttcgctgccccccccgatcgcgccgcgtttcatttcctcaactcccttcgcaacgcagacccattgaggaggccccccgtactccgccgcttctccgcgctcatacatgtgcagtgcagtgtgtgccccctcgacctctttcgccccctctcctcaaagaagggactgaagggggccctcctgggtgctccctcctctttcttctgtttcgcagcccactacccattccac

SEQ ID NO: 13560 - DNA, 1208 bp, Oryza sativa
  ref <308>: DATABASE ACCESSION NUMBER: AK110908
  ref <309>: DATABASE ENTRY DATE: 2001-12-06
aaccgccgcgaaacgaggcaatggcgtcggggtcttccagttccaacgacgccgccgccgacctcaccgtcctcgtcgacgacttctacttctccgtcctctcccacggccgcaacgacgacgacgactccgccgatggagacgacggcgagctcttcccgatatccgacgagaagtacgcctccgagctgcagctccaggaggtgatcatgtcgtcctccgtggcggccaccacggcgcgctcctcgtcggcgccggttatcttcataggtgagtgctcctcctcccacgccgcgtcgtcgtcgtctcggttgacctcgatccccgccgccgccgcgacgacgctcgtcttctgcaagatctgcatggacgccgtgccgccgtccgccgcgcaccgcgcgagccgcgggtgcgaccacgccttctgcgcggcgtgcctcgcgggctacgtcggcgccaagatccaggagaggatcgccgacgtccggtgccccgaggagcggtgcctcggcgcgctcgacccggagctctgccaggggatcctcccgcgggaggtgttcgaccggtggggcgcggcgctgtgcgaggccatggtgctcgccgccccgagggcgtactgcccgttcaaggactgctcggcgatgatgctggacgacgccggcgaggccgtcaccgagtcggagtgcccgagctgccggcgcctcttctgcgcgcagtgcgccgtgccgtggcacgccggcgtcgactgcgcggcgtacaagaagctcggcaagggggacaggggcaaggaggacctgctggtggtggagatggccaaggggaagaagtggaagaggtgccccaagtgcaagtacttcgtggagaagtcccaaggttgcctgcacatcacctgcaggtgtggcttcgagttctgctatggatgtggagggcagtggggcgttactcatgcgagttgcagcactgcatgagaattccagtttaattttggctgggctgatctgattgaatttttctgtgttctcagtgagaccctagtagcatcaattatcatatttaggagaccgatggtcatcagtagcatgaattatatgtcattctctcaccgaattaagtttcggttatcaaaagtatgaacttggagctaatttctaaatctaaattcgctacacatggcacacagctaccgcgataatattcgcttgaatacc

SEQ ID NO: 13561 - DNA, 1652 bp, Oryza sativa
  ref <308>: DATABASE ACCESSION NUMBER: AK110909
  ref <309>: DATABASE ENTRY DATE: 2001-12-06
atcaatggaactctcctccaagcgcgagcgccccaaggactccagctagagtgagctccctgatcgggccatggcgacgatagcagcagcccgtggaatctccaccaacgacatcgcccacatggcgttcgtgtgcaagcgctaggcgggcgctctgtgagttcactgctccaccttcggagaagtcttcagctctgatgcgtccgtctccattgatgaagcgcttctccaagggtcctatggattcgggctggggtgagctccctgcttgcgcagtcgtgaggatcacagcagcaagtggacttgcggacaaggacgtcaaccacatggtgttcctgtgccatcactgggcgaacgttctcctcgaggagctcacgatggcatcgggtgagtccccctctttccctcccttagagagttctgcagcggccacagggtggagaggggggatgcattcagctgctatgtcatcatcgcgatggagcaccattctatacgatttgttgttcgcaattgctcttcgcctgaaggatttggccgtgctgaggcttgtgtgcaagccatggtgggatgcattcccaggtccaccgtttctggtatgctccacacacttgctggaagaaccactggttggggaatcacaagttttgggtcattttctcccatgcaagttgcaaaaaattttcccccaaattcagtctgttggggtggatctcttgatgtacttgggatagtcgattcggacggccaccatgattgcaggattttttgtctgctctgtgagggagaggagagattaccaccattgccagattcacctaatggactcttcgtgttctagatctgtaacattcttatgagagcagttcatgttgtggcatcgtcattactttatcatttccatgagagaaaatttgtgctagtgaatgagggtttacaacgatttgtcgagtaggtccaaattaagattccaaggaactataccattggtccaaattcggtcgtggagacaaacattaatggtattgttatccaacagccaaaggtagcagaatttgcccaaggaagtcattattcgagaccaaaaagacaacacctctttatatgtaatgaggagatgtacttatgtatcatcttgcatggagctgaaagggatgatatcatagttaagctattcagagcaattgagctaacactaccaccatcaattttgttcttgcgaatagtattggtacttactcactttaccttggtgccaatcaaccttggttcgccacttgaataatgtttctacatgcagaaggatcaacactgcctatttcgagaattgggacgacaatatgtggattgcgtgttttaagcattaatttcagtagcatcacatctttaactagacaggtgaaataatggcacaggagaacattaggcccctgcagtgtgggtgtgtaaaaatctccatagagatacaagtaccgcatgtcatttatgctattagagtagggcaatacgatggtcgaccagaaggattgatgatggcacatcatgggtgcaatgtgcacaatgtaatttgttgtattaatatcgactaaggaaaaaatctcgcttgtaaaggattatggttttctatcaataaaattgggtttgaaattttt

SEQ ID NO: 13562 - DNA, 1441 bp, Oryza sativa
  ref <308>: DATABASE ACCESSION NUMBER: AK110910
  ref <309>: DATABASE ENTRY DATE: 2001-12-06
aaaatgcgcttattacaaaattgccctcgccgtcgtgctctccgcctcacttccttcctccctcgctcgtccggggcggcgccgccgcggccggtggccggcggcgccgacgatctctccttctgcgggttcgcgcgtcctcttcctcggcgttcggagacgcattgcctcttccctcccctaggtaacgcgaggtcctcttccgtctaccattccgattcagtttgtgactaggagttccatacctcgagtgctcagcaaggattagggtttatccaggttccgaacttctgatcggttgtgtttggtgatgcgtggcggtagtttagtgttggatcttctccgattgatcgggaccttagtgggaaagctaccaatgggaaatgggggaacctttacgcaatggactcatcggtccaattttattggaaacatttgaatacccatcagattcaaatgtggtatgtatatgttattagatcaactaattgtttagtgtagttagtgaatgctttgttcggtatcagtttacagatttggatatgacacctgcattctgaccaatgggatcatcggttattactggtagtaattgtttttgtatgtgtacatatttgttccctacttgaccatttttgtaagttaagcaaaaataattttgtagactctgtcaaactggtatgcttgacagtttcagtacattgagatctgttagcagaagcaaagatgcgagggcctcttcggattacagtatttttcaaaggatttttggaggaatactgttcattgggatttttccctttcctatcattcggaaggcacaaacaattcataggataatctaaggaaagattcctttgctgctgattacataggaaaaacacaggaaaaataacacccactccgacctcatttttgttttccttcgcgtaagaccgaggcaatcaagcaatacacaagaacttttacaaacacaagcgaagcaactgagcaagaactatgaaggataggaataagacacaatccaattaaaaagaacaaggggaagaagcaagtcgaggttgccagctgctcgaccttgtgagtggccacagcagcagctcactcctgccacgcgcccgtgcgagctcgtcacccgaccgccgcctcgcttgctccgcctaccaccgagctcgccatccctgttgattttgtctgtttgctgctccccatgcctctggaacattggggaaaaagatgatgcggtgaatgaactgatgaatgaaggggataagataaggctttcctgtctagagagtacttgagagtagtgactagatagaaaatagtattctattgcttaattagattataatctatgaggttacttgattgtaaaattcttgtgttgtatgtattcctgtattctgaatgcttcatgtcatcaaattccttagttttc

SEQ ID NO: 13563 - DNA, 1517 bp, Oryza sativa
  ref <308>: DATABASE ACCESSION NUMBER: AK110911
  ref <309>: DATABASE ENTRY DATE: 2001-12-06
ctccccctccgacggcgtccaccacccgaccacctcccgcaccgttgcgagttgcgacccacccacccacccgaaccgattcgaatatcccgcacaccgccccagcgccgcgcgccgcccgcaatgcggcccgtctccagcgccgaggaggtcggcgcgctcctctcgcggagcgactcctccggccgccgccgccgctcgtcgccggtgcagtccgcgtccccgcgacccgccggatgcggctgcggcggcccgaggcggcagtcctcgttccgcgacgatgtcgggcacgcggcctccgagacgtacctcgtcacgcgcctcaccttcagcctcctgcagtacctcgggttaggttaccggtggatgtcacaactacttgccctgacaatctatgcaattttacttatgccaggttttttgcaagttggatattactatttcttctcaagtcaggttcgtagaagtatagtctatggagaacaaccaagaaacaggctagatttgtacatacccaaagatatcaacagaccctgcccagtggtggccttcgtaactggtggggcttggattattggttacaaggcatggggttcccttcttgggaggcggttggctgagagaggaatcatagttgcttgcattgattacagaaatttccctcaaggaacaataggtgacatggttagcgatgcttcccagggtatttcttatgtgtgcaacaacattgctagttatggaggtgatcctaatcggatctacttggtgggtcagtcagcaggagcacatattgctgcatgtgccctcatcgagcaggcagtgaaagaatctagtgggcagtccatttcttggagtgttacacaaatcaaagcatattttggtttatctggaggatacaacatgcatagtttggttgaccattttcatgaacgtggtcttaatcgttcaatatttttcagcataatggaaggagaggagtcattgtcacgttattctccggaaattgttgtcaagcagtcaagttcccagacaatagctcttctgcctcccattgttcttatgcatggaactgaagattattcaataccatcatctgccaggtttcttcttatgccttctgcagatgtccatttaagatgacacaagacaaactcgagcaaatgcacgcttcacctatacctatctaccctccattttttttatggcatgacatgcaggtgttactaaaggaaattttatttactaagtccagtttcacttgaatttaggaagcaatgccaatctaagttgaaaaaaagctggattgatgaaggcgtaaaccaagatgtagcatgcctaacatctctaatgccccaattcttcccttatactctccatccttttccagtgttgtctattagaagcttaaatgtagcatatcatgaatatgaagtctttttacatcttggctattacaagcctaaatgtggatatacagagcagagaattgaagaaaagcatttgcagtttttctagat

SEQ ID NO: 13564 - DNA, 1533 bp, Oryza sativa
  ref <308>: DATABASE ACCESSION NUMBER: AK110912
  ref <309>: DATABASE ENTRY DATE: 2001-12-06
ctagctagctaagctagccatgtgcgactacttcctgcagaggatggagggcgaccaggccggcggcgacctcaccgacatcgtccgcgccgggggaggggccatgccggggagcgtcgtcgtcgacctcccgtcgacggccgccgagtggcagctcccggctgagccgatgctcttcccgccgccgccgtcgttgtcgtcgacgacggacggctgtggcgccgggggagcggcaggcgccgacatcttcggcggtggcggcggcgaccttttctccggcctcgtggacccgttcagcagcgactactcgtccggcgcggacttcttggacgccatgccggacgcgatggcgaaggtcggcttcgacacagctgtcgtcgccggcatgcagatgtcgtcgccgcgctccggcgggatcaagcgcaggaagaaccaggcgaggaaggtggtgtgcatcccggcgccgacggcggcgggaggaagacccagtggtgaggtggtgccttctgatctctgggcttggaggaagtacggccagaagcctatcaagggctcaccctacccaagaggctattatagatgcagcagttcaaaaggttgctctgcaaggaagcaagtagagcgcagccgtactgacccaaacatgctcgtcatcacctacacctcggagcacaaccacccatggccgacccagcgcaacgccctcgccggctcaacccggtctcaccacagcaagaacagcggcggcggcggcggctcgggttccaagggctctcagaacgacaagtcacagcagcagccaagcgttaaagaagagcagaaggatcaggcgacgacggcgacgacgacgaccaccagcacaatcactaccacgaatagtgcttctcctgtggttgtgaaggaggaagaggcggcactggcaggatcgtcggaagcattggagttggagagagtcatggacactactgcagctggagtagtagaccacagtgagctcatggatcatgttttcagtgagagctacaagccgatgataccggagactggccagccggatgatttcttcgcagacctcgccgagttggagtcagatcccatgagcttaatcttctcgaaggagtacatggaagccaagccaagtggtggcgatcatgcccaggagaaggcaatggccaaggaattggatccattcgacatgctagactggtctactactactaactcttcggcagggagctcatttgagcaagggaagagaggctaaacccatgggcataaagccatgcatgagggtttatgcatgcatacggttacataaacttgatcccagctaataaccataaagattgtgacaatgtcagcaaaggaaagatgagatttttttttttacttttcttttcttcatttggtctctctgcttcttcatattattgtgtgtgagaattaaattttgtttcaaggtctaggtatatggacctcattttttaggctgtgtcaacttgttgtacttatgcatgagatgatgaccactct

SEQ ID NO: 13565 - DNA, 1408 bp, Oryza sativa
  ref <308>: DATABASE ACCESSION NUMBER: AK110913
  ref <309>: DATABASE ENTRY DATE: 2001-12-06
gagttagtaggagacacgggaagctagcaagtagcaagcggagatggagatggaggaggtggtggaggacgccgcccatggcatcgtcatcgtcggcggcggcatctgcggcctcgccaccgctctcgcccttcaccggaaggggataagcagcctcgtgctggagaggtccgaggcgctgcgagcagacggcgtggccatcggcatccacgccaacggatggcgagctctggagcatcttggcgtcgcggcggtgctcagggaggccaccaacgccatcaccgcgtatcgcagcgtgtggcagctgcagaacaagaccaccctgctgcctgccaggaaggagcttcggtgcttgacaagaaaggatttggtggagacgctggccaagaacctgcctgcagggacgatccgcttcggctgtcgcgtcgcggccgtcgacgaagactccggcagccgctgcccggttcttaccacggaggatggacacaccatcaaggccaaggtgctgattggctgcgacggcgccaattcggtggtggctaaatacttgggattagggaatccgtcggagcttcctcgtttggccattcttggcctcgccagctacccggacggccatccatttggaacagagttcctgaccattgccggcgatgatctcgccgtcggacggctgcccatcaacgaccatctcgtcgatttcttcctcagcaggcgcaggcattccacagacatggcacgagacgcgagcgccgcgagggagtacgtgctggagaagctgcaggagtgccccgccgacgtcgtcgacatggtgcggcggtgcgaccatgcgtcatcgctgtggaccacgacgaaggtgtggtacaggcccccctggcaggtggcgctcgccgccttcttccagctgaggcggcgcgccgccgtgacggtcgccggcgacgcgatgcacgtcatgggcccgttcatcggccagggcggctcctccgcgctggaggacgccgtcgtgctcgcccgctcgctatcgtcgtcgcgtgccaccgtagaaggtggcgccgacgacttggccggtgaccgtggtcgccggcacgatcagccgcaggtcgacggcgagatgggcgcggcgatagggaggtacgtgagggagaggagggcgagggtgataaggctgtcgctggagtccttcaccgttgggactttgctaagaacgaagtcggccgtggtaaggcttgtgtgcgcggtcgtcatggctcttctaggcaccaggtcacgcaggcatgcagactatgactgcggctctctgtaacttttctgaagtgataagaagtttgtttttacttccttgaattattcgatctgttataactaggggtctgttgttcactttgatgcaaaaaaaaaaaactttatc

SEQ ID NO: 13566 - DNA, 1706 bp, Oryza sativa
  ref <308>: DATABASE ACCESSION NUMBER: AK110914
  ref <309>: DATABASE ENTRY DATE: 2001-12-06
ccacagccaccgagcggattagtggaacaaaccctagcctgagtagattcttcctctagctttcgcgagccgtatcgtatccattggatggagccctagagcaacaagaagaagccaagaatatttgcgccatggagggtggtaattccagcaagggcgccatggagggtggtcaccgctgccgccgcccaaacgtcgacgacgatgaccagatcgaggagggagagatctgctacgactgccacgtctcgggctccgagaccgacgacgacgagcaccacagacgcgccgtgctccctccccgcgacaatggcgatggctgcgcggagcacaaacggtgccgcctcgacaatgctgctacggcgcccgcaccctctgccgggccggtgctgaccaccagcaacggaagcgccatcgtcgccatcgcctccgctgccgccgccgcagcagctgcggcgtcgacaatggcgcgggaggtgttcgcgtgccgcatctgccggaaggagttcgacacccggaaggccgtggacgggcacatgagagttcaccgtcagcaatccattgccacccccaagtataatgccgcagacaactctcgtgtcactgtggtcgctgagcccagaaccgatcttgatctttccggtccacacgggagcagcagcgcgccgccgtcgccaccagcgccggccaatcctcccaatcataatcaggccgtcggtcaccaaccagcggctgccgcgccgaacgccggcgtcgtcgtcgtcgtcgaaggggcgccgcaaaaaagtctaccatacatgtgcaagatgcagggctgcggcagggcgttccccacgcaccaggggctaggtggccacgctgccggccaccagaacaggagcaaggcagcggcggcggcggcctccgagcagggcagcagcggagcgggggccgacgggtgccacggcggcgccgacagcagcaagcatcggtgcagagaatgcggcatggagtggaagacaggtttcgcgctcggcggccacatgaggaagcaccaaactaaggagacggtgaccgtgaacgagaaggagccgaatgtcgctggcaagcacatctctcttggaccaccacctttgccggaccttactccggccgccgctgaggtaacttcgtcggaaccacttgatcagccaccactactgtcaatggtggtgggtgcagaagttgcagcaccggcgctgcttgcgctggccaacgaggcagcggcattgccgccacaggatgatcaggcagaggaagaggcggctgcagaagccgctgcaccggccgaggcagcggcattgcgaccggttgaggcaggggcagaggcggccgatgttggagcagcaccagaggagccgctgctggcgcctattgccggcatgggaaccgtgcgtattttcggttttttggttgagaagccggcacctggagacggcagtggaggagagggttcagcgcctgcatagatcgtcctagttatgatatttgattttgtgattttctttagctatcttcagagccattaggatacttgatttagaggctttctttattatgttcaccgcatagtagttaagataatttttgcttttcgatagcagaagtgttttcttcgttgtactagctagttggccgggttttcgaggttaaagactataagaaacttacagttatatatggtgtgc

SEQ ID NO: 13567 - DNA, 1258 bp, Oryza sativa
  ref <308>: DATABASE ACCESSION NUMBER: AK110915
  ref <309>: DATABASE ENTRY DATE: 2001-12-06
atcagctagcaaagcaaagcattttctcagctcaagttgcttgctcctcttctttctttcttcctcctccccttccctttcaggactcctccccccacatcagtagctttcactgcccaaaccctctttgtgggtggcaaccctagattattaatgtcctcctcctcatcatcaccatctcctcctcttcttcctcccctgcttctctctccagattctcttcatctggtcccttccttcccctgctttgcttgctcagctagctgatcgcacgtgggtagggtgagtgtgtgtgcgtgtgtggatgggagtccacgcaatgtcgtgccacggcggcggcggcggtggcggcgaaggggcactgtcgcggcaggggtcggtgtacagcctgacgctgaacgaggtggagagccacctgggcgagccgctgcggagcatgaacctggacgacctcctgcgcacggtgctccccgccgcggcggcggcggcggagacggcggggaggaagacggtggacgaggtgtggcgcgacatccagggcgccagcaccggccggcaccacgcgacgcccatgggcgagatgacgctcgaggacttcctctcgcgcgccggcgtcgccgtcgacggtgccgcctccgccgccggcgcgcattggctgcgtgggcactacccgccgccgccgccgccgacgacgacgacgctgcagtacgtgggcggctccggggcggtggtggacggcgtgtataaccgcgtggacgggcacggcgtcgcggggttcctctcgcaggtgggcgtggcggggcggaagcgcggcggcggcgtggacggcgtggtggagaagacggtggagcggaggcagaagcgcatgatcaagaaccgcgagtcggcggcgcggtcccgagcacggaagcaggcatacacgaacgagctcgagaacaagatctcgcggttggaggaggagaaccagcgcctcagggagcacaaggctgttgctgatttctcaacattccctagctgcgtcgatttcctgaaagcattcttgacgcagaagctggaaccagtaatgcagattgtgccccagccggagccgaagcagcagctgcgacgaactacttcggcctctttctaatcaaccaaccacaatgttcatagcgaaatgatttaaactcgatctctgtaggaaaatcaatgggggtttgtacttggggatgctggctgttgtgaacaagagctgaaacgacgaactcttttcttaact

SEQ ID NO: 13568 - DNA, 1368 bp, Oryza sativa
  ref <308>: DATABASE ACCESSION NUMBER: AK110916
  ref <309>: DATABASE ENTRY DATE: 2001-12-06
cgcttgtgttttcaacactaggtctgaatgtgaggtggggcgtgcgtgtgtggttgccgtgcgtgtgtggttgccgtgcgtgtgtgagtggctgggcacgtccacgtctgtttttctcaatggctgctgtggaccaggccctggggaccccggaagaggctgtccctggtcaggctgttggcagctgagcagagcaagcgaacggttccccgtctccctcctctccaagcccccaggcccggccaaaagccccagggtgcagctgcccctcccaaaagcgtgagccagaggcgacgtgaggccccagctaccaagtccttggggattccatgccaggagcctgggctgtgccccaccccctggctgctcatggacatgcaggagacggcttcctggacaaggcccctgccctggcttggcagcctctccagctccctggagtcccctgggcccatcaacacctgtcccacacaggccggcagaggggcctccctgacgaagccctgctgctccccggacctgggaggaggctccctgcctaggagcctctgcgccgatcctgcctgtgccgaggctttgtgctgtgactttgggcagaccattccaggggttgctgggccgtcaagaccagagaactccagggcaggcttgaggcccaggtcctgcaattcagcctgtttctccgtgaagtcaacctggatgagcctccccttggcatcgaggcagttgggagccctcttcccaggcaggaggaggctgcccgtcgctccacccctccgtgttcactgccagccccgagcaccaagccagctgggtgcaagggggctgcagcccagatgggagaagacacgttaccccagccgccactggagtcaccctgacccttgatggcagcagacagaccaccggctgaccagccggatcccacggtccaggctggccggcagccccctttgcagagaaggggacccgtgaggggctcggccagtcctcggacagtgcgcctccctggcgggatgcatgggatccccgagcgtggtctgtgtcttcagctttcagttgaccctgggaaagaggagtaggcagctgggctgggcactcggaggcaccttcaggcctggtcagcagggacgcggggatcacgccgggaaggagcggctggcgtgagaggcggacaccgtcggcactgcccggctgtcctagaacccgagggcctgccgaccaccgtgtttacacgacttgagtgttgaaccccgattataatgtctggacatggcctttcccagcctaacccgagccccggggaagcgggaaggcatgtggccagcctcttgcactgctttgtctccaaaataaactactgaaatc

SEQ ID NO: 13569 - DNA, 1578 bp, Oryza sativa
  ref <308>: DATABASE ACCESSION NUMBER: AK110917
  ref <309>: DATABASE ENTRY DATE: 2001-12-06
agtgccaagcccatctggacgctcaccggagatggccttcgccgtcgcgccgccggtagcgccgcctccaccttctcccgcggcggcatgggggaggcgccgcgcgagggcaactcctccgcggttcgcgctggcggcatctaccagagacggcgacccggccccgccgacgttcgagcggctgcgggagcagctcctacagctccacgcagaagccgacctcacccaatccaaagcaaatagcacgagggtaaggcttgtgcggttgactgaggctgctgagaatcttaagaaaagagctgcggtcagcatccgaatgggcaaagagaatgaggcagtggatttacttgtgcaaaagaagaagctgaccaaagctcttgaaagcataaaacagcgcattgaggtgcttgataagctttccatgaaaatcagtgagggatgtctaatggcaaagaatccaatgacaacataagagttttctctagtaaagttggtgatgaggctgatgagactactagctctcctgcgaaatcatctgaaaaggcatttgatctgcaacatgtggtgcattcaggcatgactggccagttggagcaaagtgaacttcagacgtccgatagcttctcattttccagtgatcttgaatcaccaaacagcataactaaccattcttcttatgatgcttttctagaccatattggttttcagctggattcattagaatgtgaaattgaacaatatatcagttcccaactagcagaacaggtggacattcagaagccaataaatgccaagtggcaaaaattgtctgacgtattgaagcttgtaactgaaactagagaaaggattgcaaagattgtggataatacagtaaaggaggctggatctgaggactgaggtcatagcgaagtatataaagcaatgtattgatgacatcaaaccctgtttcttttatttgtaacatggtaagttgtgtcattgttttgatttcactgcacatagcttagattatcactattttcttgtatgagacgatcttatgattctttaatatcaattgtttattgtctacctgcctctttgcttgtatacctaaatatcaatacaatctagaaacaaatatgcaagaaatcctgaagctgaagttatgattgaattcattcaaccagcacatggacttttacttctaaccaagaaacagagtacttcgaatagcgaggttatttaataggttacccacacatgtgcatgctttagtgtctgtttaacaaagtataagacagcaactatcactatgatatcaggtattcatatacattctgtaaatcatacttataattttccaatgatgtccgcaagagtgatctttccacactttgcaaggccaagctgatcaaactggtctgagatcattgcaatgtctttgtcatcgatctttcctatctctttgagtttgtagatcagaaagtccgatttgctgtggcataaaaagaaaaagaccacaaagttaggactggataactgccttgaatacaaaaggtcacactgtaatgcaacattataaattactttcagatt

SEQ ID NO: 13570 - DNA, 1473 bp, Oryza sativa
  ref <308>: DATABASE ACCESSION NUMBER: AK110918
  ref <309>: DATABASE ENTRY DATE: 2001-12-06
taggctccgtgcaaatgccatgtagctccggtactcgtcctctgctttgacccgtccactagaagcagcagcggcagcattgctgatggcgttgttgtttgccaggacacgaccgaagctgtggttgtactcccagtccccggtttcccagtcgaaagcgtagagcggcagaaaccggtggccgaaactggcgacgaagtcgatggcgtccagcacgaactccgcctcccgcgtcgacgtgtagtaggccaggctgacgcgcgtccacccggggcgcacgccgtggtagcccttctcgacggcggatttgatggccttggctcgcgccggcgtgatgccgaggaggcggtggccgtagggccccgcgcaggagcatcccccgcgcgcctgcacgccgaacaggtcgttgagcagcttcgtcacgaaccggcagtgcagctgcggccgctcatcctgctcggagccgtcgcgcggtgagtacaccacgaaggagagaacggggagacagcgccctccgctgggccggtcgccgccgagcagcagccgcaggtttggagacgcttgcatccggcggagagcaagggcgagcatgtggtcctcgcgcgcctcgatgcacgcctcgccgacccactccttcacccggaacgccagcgcggcccggaccttctgtatgatcgccggcgtgccggcgtcctcgcgctcctccgtgtcctcgcagtacaccgtgtcgccgtatgcgctgacgtagacgacggtgcccccgccgctggtggacggcgcggtgcggcggaggcgatagagccgcttcgccatcgccaggacgccggggcttcccggtccccccaggaacttgtgcgggctcaggtagacggcgtcgtacccgtcctcctcgccggaccgcatgtcgatgccgacgtagggcgcgctgcacgcgaagtcgaagcaggcgtacgcgccgtagccgtgcagcaggcgcgccacggcgcgcgtgtcggtgcggatgccggtgacgttgctgcacgccgagaaggatcccagcatgggccgaccggcgcgctccggcgccgccggcgccgcctccagggcgtcgaggtcaaggtggccgtcgtccgggcgcagcccgatctccaccacctccgcgaggctctcccgccacgtgagcaggttggagtggtgctcgtacggccccacgaagacgacccaccgctccgacggcggcaggacgtccagcgccacggagcgcagcgtcggtggcacggccatgcccgtcacctcctggagccgcttgatggccgcggtgcagcccgtgccgcagaagagcagcacgtcctccgccccggctcccaggctgcgcttcacgtacttcgccgcctccgacgccagcttgctcgtgtgcaagcccacgtagctgtccaccgtatgcgtgttccctaataaaaacccatcattgagttaattaattacattttcacg

SEQ ID NO: 13571 - DNA, 1481 bp, Oryza sativa
  ref <308>: DATABASE ACCESSION NUMBER: AK110919
  ref <309>: DATABASE ENTRY DATE: 2001-12-06
ggctcatcctctctctctccaaatctgtggacatttcacgcgcgctctccgctccagcctccagccaccgcccaccggccggcgatgtcgacggcggcggcggccgcggcgtccacctcgctccggccggcctcccagtccgcgctccgtctcgcgggttcgccgcggcggtggtgctggggagccccggcgctctcccctgcgaggagagcattccacgcggacacgcggaggcggaagactttgttatatgcaactgataaaggcccagaagaatccttgaagaagacaattgaagttgacaggttgatcgagatgctgggatgcaaatcctagagagcttgatcaaatagtggttgaaaatgttctggcgttcgatgagggtttctgggttcggctggcagcaagaattgatctatgcaaatcggatgatgataaaaaagactatgaagaattggctgaaaatgtcatgaacatagttgaccgtcttgtccataagactgatgaaaagattgaacagtcaactgatgtgctgaaggcaattattagtcctgtgatgcacgaaggtgaaaacgccacgtggccaccgagagatccggaggctctcaaattgatggagaaagaaatttcaaatagagaaaaagaaggacagctagacgaaggatttctgtcagaggttaatgctcagttgaggcaggctaaacaagatggagataaaccaggacttcaagctatgctgcagaaggtgttgcagctgtatgcgtccaattttctccaaaagcgtagttacgcttacaaagggggagaagtaatagtgcctgaaagttttcttgaatctgtaataaaggctccggaaaacgagtggaacaagctgttgcttgatgggttaacagtggggaaaggaaatgtttcaccagaagaattttatgctgttataaagaagagaattgagagagtcttaattcgcacagaaggaggttcttatcagcagcgcatactcgttgaatatctaaaagagatacaggctagagcggaggaagttgtgaaggtgcttcaaggaccaaccatatgatgatgtctggtggtcgattttaaacagtgcaggttatccagttcgatcatggttttgacgcatcacctagcaaaagcttagaaggcgacaacagacaacctaactagttgtctgattcaggaacccgagataagcatagcgagaagagaaacagatccaaatgtcctaaaggagtgcgtgattttcattccccactttggtcttcatctcgaatggccgattttgctgttggaatgtttgatttctgttctgtctgattgacacttgacacgagtgagcttgactaagctgtagtaacatgtgaatcggtttttgttgtgtaagggagaaggttcaatgctgagcttgacttgttactgaggtgcttgttgaactcattttaagttactgatccctgcaactgttgatt

SEQ ID NO: 13572 - DNA, 1719 bp, Oryza sativa
  ref <308>: DATABASE ACCESSION NUMBER: AK110920
  ref <309>: DATABASE ENTRY DATE: 2001-12-06
gtattatgcatcagtccatgcattcatgctgcatgatcggctagctagctctgctcgcgcgtctacgtgatggcactgatcagctcgctgcagaggccaaggaagccgaggtgcccttcccacccaatgctctccctctccccatccctcgtctgcctcctcgtcctcctccccttcctctccctgctcctcctccaccgctccgccttcccggcttcacgttctccgctcctcgcccacctcaccgcgtcctcctcctcgcgctcctcggcgagcggcttcgccggcggcgacctacgtgagatcgagttctcgtggaaccacctgccgttcaggcagtccaggccgccgccggcgaggctcaagatcgccgtgttctcgcggaagtggcccgtggcctcggcgcccggcggcatggagcggcacgcgcacacgctgcacacggcgctcgcggcgcgcgggcaccgcgtccacgtgttcacctccccgccgccgcacaccgaggccgcgcccccgcgctccgccgacgggccgcagctccacttcctcgacggcgaccccggggtgtggcgctgcgacgaggcgtggaagctgtacgaggccgaggccgagaacgacccgttcgacgtcatacactcggagagcgtggccgtgttccaccgctgggcgcgcggcgtgcccaacctggtcgtgtcgtggcacggcatctccctggaggcgctccactcggggatataccaggacctcgcccgcggcgacgacgagcgcatgtcgccggcgttcaaccacagcctggcacagtcggtgtaccgggtgctgtccgaggtgcgcttcttccggagctacgcgcaccacgtggccatcagcgacgccacgggggagatgctgcgcgacgtgtaccagatccccagccgccgcgtgcacgtcatcctcaacggcgtcgacgaggcgcagttcgagccggacgcggcgctgggccgcgcgttccgggaggacctcgggctgcccaagggcgccgacctggtgttcggcgtctccggccggctggtcaaggacaagggccacccgctgctgtacgaggccttctccaagctcgtgctgcgccaccccaacgtgtacctcctcgtcgccggcaaggggccgtgggagcagcggtacatggacctgggccgcaacgccaaggtgctcggcgccgtgccgccggagaagctcaaggcgttctacaacgcgctggacgtgttcgtggacccgacgctgcggccgcagggcctggacctgacgctcatggaggccatgcagtgcggcaagccggtgctcgccacgaggttccccagcatcaagggcagcatcgtcgtcgacgacgagttcgggtacatgttcgcgcccaacgtggagtcgctgctcgagaagctggaggccgtggtggaagagggcgcccgccgcgccgcgcagcgcggccgcgcgtgccgcgactacgccaagaccatgttcgccgccaccaagatggcgctcgcgtacgagaggctcttcctctgtgtcaagaacgacactttctgtgcctacccagctgagttcgattagttcgttaattttgatcagcgtacgtgtgtttatttcattgaatactctatttaataatcacagaaattaaactatattaatcttcgtatttatactctgtatttggacctcatataaatatccacaaagtacattggt

SEQ ID NO: 13573 - DNA, 1280 bp, Oryza sativa
  ref <308>: DATABASE ACCESSION NUMBER: AK110921
  ref <309>: DATABASE ENTRY DATE: 2001-12-06
actctcgcttcctcgtttctctctgcgctcgcgcggtcgccgccggcgtgcgaagggacgcgagctttgcccacaagggaggcgcctgatgccctgatcttgtcgcgccattgccgcgaacctggggcgctcgacggcggcgagaacagcagctggccagatcgcacggggtggcgccgccgccagagcctccagctcacggcatgagaagaggccgcgcggcgccaggcggttcatttccatgccggtgaggtgatggtgatgacctcatccctccccttcctccatggcggggcatgcatggttgttgttatggggacggaaaccattccgtggaaacgattcgtgcttgtctttgccgcgtgcacacaaggtgttcgatgaattgtctgaactctgaaggtgagatggtggcagtgggaagacttagaacttagaaggaattgaaaaggtgggagaggccatgagcagagaaaggtatctggccagagtcaccgagttttgatgacactggctatgctcttcctgctgcaaaatggaaggggatttgccaatctggcatgtccttcagagctaagagttgcaacagaaagatcattggtgcaagatggtatgctgatgatttcaacaaaagccaacttgaagctgcaggtgaattcctgtcccccagagatttcgatggccatggcacccatgtggcctccacagcagctggcagtgttgtccgcaacgttagcttctatggtttggcttctggcattgcgcagggtggtgccccgaaagctcacattgctgtctacaaggcttgctggagcatcggttgcagtgaggcgaccattttcaaggcaatagatgacgccatacatgatggagttgacgtcttgtcactctccatactcagcccaacagggcacactccagcatttcatgcggtgatgaagggcataccggtgatatatgcagctgggaatgatgggccatatacccagacagtgaacagtgttgctccatggctgttaacagttgcagcatcgacaatggaccggctgtttcctactgttgtcactcttggagatggacagacgcttgtggtattttcttccgtctactgaaaaaactagtataaaatacatagatgaaccctgcgtatatcatgattttaaggatcacgggggttgaattattgacctcaggcaagcaactctgtattctctatcacttaattgtacgtgcagtaggtctcatctatttattagttttattgaaatttaattcagaat

SEQ ID NO: 13574 - DNA, 1551 bp, Oryza sativa
  ref <308>: DATABASE ACCESSION NUMBER: AK110922
  ref <309>: DATABASE ENTRY DATE: 2001-12-06
agcacacacagtgtcagtacacacactagcttctctcaccggctctccgccatcttctcgtcctgtatgtgtagtttaatggcgaaagattctgacagccaagcttttagctcgtactcgtagctcgtagctcgggaatttaggatccccacctccacgttccttcctcccgatcctcctctcctcgctcacatcacatcacatgccggcccggctcgccattgatcacctctcgtgttgactgagaagcgtttgtactgtgtggtggttggtgattgggtgttgtgccggtcatcttctccctcgccggcgagcgcttatatagtcgtccctgcttctgctgctgtcgtgtgagcgagcgatcttggtgaggttttctcttggcgatggggaaggcggggaggtggctgaggagcttcttggcggggaagaaggatgggggtgggaggagatcaggggagaggcagcagcacggcggcggcgacgcgacgccggcggtggaggtggcggcggcgagtaccagggagaagaagcggtggagcttccggcggtcgtctgcgtcggcgtcggcggcggcgatggggaagccggccgcggtcacggcgccgtcgacgccggagccgagcgtgtccgggctcgcgtcggtgtcggagcgggcgcgcgacgtcgctgatctcgaggggcagagcaagcacgccatggcggtcgccgccgtggcgaccgcggcggagggtgacgacgtgtcggcgagcgccgtcgaggtggtcgccgccgtcatgatccaggccacctacagaggctacctggcgaggaaggcgctgtgcgcgctgagggggctcgtgaagctgcaagcgctgatcagaggcaacctcgtgaggaagcaggccaccgccacgctccgccgcatgcaggcgctgctcgtcgcgcaggcccgcctccgcgcacaacgcatgcgcatgctcgaggaggaagaagacgacgacgtccatggccacggccaccaccaccaccgccggtcatcgccgcaccacccccggcaccgccgctcctacgagatggacaggtcgggcgaggagcaggccaagatcgtggaggtggacgtgggtgagccgccgccgccgcacttcgagcggcagcccagccgccgccgcggcggcggcgtgccgaggagcgtcaagatgcagcgttcgtcgtcgcacgtcggcgttccggcggcgcacggctaccaccaccaccacctctacagctacgggcagtatccatggtcggtgaagcagctggacagatcgagcgcgtcactcaaggacagcgagtgcgggtcgacgacgagctccgtcctcaccgccgccaccaccgtcggctactgccgctccctcgtcggcttagacctccacaggggccactactgatcgaccaaacacttgctcgctcgccgatttccgtcaaagtttgtataaatttcaatcaatttcgagttgttttttgagcaaattcttgtcaaacgattccgtgttccaactgttgatagagatgtgagcaacacaacgtgtg

SEQ ID NO: 13575 - DNA, 1558 bp, Oryza sativa
  ref <308>: DATABASE ACCESSION NUMBER: AK110923
  ref <309>: DATABASE ENTRY DATE: 2001-12-06
aagatgacaatttgacacgaaagccttcctgtgcctttttatggtaattacgtttatacccctgcgatccaccggtacagcaccatgaacgccgtctcctcctcctccgtccccggcggcgacatcctcaccgcctccgcgtcccacagccatggctcctcctggctgtggctatggtggctctggtagctctggctccaccgggagctccaccgcccggagaaggacgatagggatgacgcggaggtggccagccgttccacgtactcccgcagccagccgcgcgtcgcgcccgccgcttcggccaccgcctcgccgggaggcggtggagactgctcggctgctggcttgtcttccttgactgcggcggcgctcctggttgtcatgggcgcggcgcgggagacgacggcctcgacctcctcgtcgatgtggtagtcgaacgtgccgagcgagtaggtggggcgggcgttgccgccggtggccgtcgacgcgctgcggttgctgacgctgcccatctcgacgcggaagctcctggaacggtccctgctcctcggctccggcggcggcggctgctcggcggcgaggatggcggagatcgaggggtgcgggagcgtgacggtggcgcggcagagcgggcaggacggggtggtgcggagccacgcgtcgacgcaggcggcgtggaacgcgtggcggcacgccgggagcagccgcagctcggcgtccagcgtgaacggcgacaggcagacggcgcagtccggtgagctcttggggagcgccgccagcgacgacgccatcgtgaacagcggcagcgactcgatcagccgctgcttctcgtcgcccaccacctccttcttcccctcacaaaccccattacgccgcaccggagaagcgtccgccgcctcgacgttgtgcacctcacggcgcgtccgtgggagcggcggcggcggcggcggcggcggcgacgacctggacagaagtctgagaagtaggtggatcgagaccgacgctagtagaacgaaggcaagaagagcagcgatgatgaggagagacgggaggaaggacgaggcggcgtcggaggatccggtgacgggatcggcagacggcggcgacggagacgagagagtggacgccatggcgaggcttagccttagcttgagaatggtttaacttaacccgcccgggaatgagacctctcgcgccttttatccccgggtttctttggagtgcgcggtggtggtggtgcggatgcagaggccggaagtaaatagtggcgggtttgcactctcctgatggagagatcccagaaatggtggaggtcagccttggaaaccaatccacgtctcggtttctacttttctacctctgcctgccctttgcaacctgaaattctgctactactgctacgtggaaaatttcgcatagcagttgagcagacagcagctcaactgtttgcaattcgatagtttgttgcacaatagtacaatgttgtacactggttagtgaacttaagtacgtgcaaagaatcaaatccgcagtaaaaatactgcattacagcagc

SEQ ID NO: 13576 - DNA, 1726 bp, Oryza sativa
  ref <308>: DATABASE ACCESSION NUMBER: AK110924
  ref <309>: DATABASE ENTRY DATE: 2001-12-06
aaaccacgcagccacgacacatcgatctcccatctccttgtgcagccgctgatctctatagctagcatcctctgatccattgatcatacaagcacttacctagctaagctagctcgcttgcatttgctatatagtttgaatttgtcacccacagcgtcgacgttcatggcacctgttccggccaccgccgccgccgccgcccctgcggccgtcgtcagcacccacgagatccggcgtgcgcagcgcgccgatggcccggccaccgtgctcgccatcggcacggcgaacccggagacgtgcgtgccgcaggatgagtacgccgacttctacttccgcgtcaccaagagcgagcacctgcctgagctcaagaacaagctcaggagaatctgtaacaagtcaggcatcgagaagcggttcatgttcgtgaacgacgacgtcatggaggcacacccggagttcgccgaccgacacctgacgtcactcgacgccagggtggagatcgtctccaaggtcgtgccggagctcgccgcggccgcctcggcgaaggcgatcgccgagtggggccggccggccaccgacatcacccacctcatcttcagcacctactccggcgtcaaggcgcccggcggcgaccgcctgctggcgtcgctcctcggcctccgccccaccgtgtcgcgcaccgtgctcagcctccacggctgctacggcggcggccgggcgctgcagctcgccaaggagctcgccgagaacaaccgcggcgcgcgcgtcctcgtcgcctgcgccgagtccacgctcatcgcgttctacgggcccgaggtggggtgcaacgacaccatcatcgggcaggcgctgttcggcgacggctcgggcgccgtcatcgtcggcgccgacccggtcggcgccgtcgagcgcccgctgttcgagatggcgttcgcgtcgcaggccaccgtcccggacagcgagggcgccatcaccatgcagcacaagaagggcggcatggactaccacatcggcggcggcgtgccggagatgctcgccggcagcatcgagcggtgcctggccgacgcgttcggcgccatcggcgtcgccgccaggtggagggacctcttctgggccgtccacccgggtggccgaaggatcctggacctcatcgaggaggcgctcgggctggacaacggcgccatggcggcgagccggcaggtgctgcgcgagtacggcaacatgagcggcaccacggtgatcttcgtgctcaacgagctgcgccgccggttcgtcgccgacggcgccgagggagccgactggggcgcgctgatggcgttcgggccgggcgtcactgttgagaccattttgctccgcgtcggaagcggcctcaagggaaattaaataaacttaagtaaatttaattattttacttatacatgaattgcattctattggaaggtaagtcctataataaaatgtgttgagtcctaccactttgtttgtccgtttgggtcatggacatttttaattagggcatcaagttgagggagtagctctgctaaaaggagagatgtttggaccttaactgggtgttttggaagtgaccttgaacccaaaagtgtggagtagctataatcatggtcatgcatgccatttgttaattactgcttaatgacgatctttgtaatatcaaaagttaaataaataaagatctttgtgcgcagttacagttcgtttacacagc

SEQ ID NO: 13577 - DNA, 2037 bp, Oryza sativa
  ref <308>: DATABASE ACCESSION NUMBER: AK110925
  ref <309>: DATABASE ENTRY DATE: 2001-12-06
ctaattactctacgctaattaatccagcagcttagcttagcatagcttatctatggtttgccacgtcttctcgtccttctcctcctccctaattcgtgtgctggaggcgccgctgctccttccagctgcttcggcttcttcttcttcttcttcttctccggcgagccggagcggtggccgccgccgccgtgcagcccacgtccgcccttcgccggcgatctatcccggccgccaagaacttgcctctcactcatccatgctacccaccgacttcgacatcaaggtgttgattgagcggcacgaagccctgacggacgacgtgcaggagatgctgcagcatcaacgccggcgacaccagaagacggcgagcggcggccgggagcggatagccaccgtcgaccacctcaggcgcctctgcatggaccactacttccaagacgaggtcgacgacgccatggacgcctgcctgctcgaggagctcgcccatggcggcgacctgcttgacgccaccctcgccttccgcctcatgagagaagctggccaccatgtctcagcagatgaggttcttggaagattcacagatgataatggcgaattcaggctcgattacagaaaggacatcagagggttactcagcctgcaagacatatcacacatgaacattggacaagaagcctcactctgcaaggcaaaggagttctcaaccaggaaccttgaatctgccatcaactacctcgagccaaatcttgcaagatatgtgaggcagtcgctggatcatccctaccatgtcagcctgaatcagtacaaggccaggcaccatctcagctacctccagaccttgcctatccggtgcactgccatggaggagctcgcacttgcagacttccagctcaacaagctactccatcagatggagatgcaggagatcaaaagatggtggatggacctgggattggctcaagaaataccagttgccagggaccaggttcagaaatggtttgtgtggatgatgacagccatccagggtgcctccttgtcaagatgcagaattgaactcacaaagatcgtctcctttgtctatattgtggatgatatttttgatctggttggcacacgtgaggagctctcctgcttcactcaggcaatcagaatgtgggaccttgcagctgctgattccttacctagctgcatgagatcatgcttcagggctctacacacagttacaaatgacatcgcagatatggtcgagagagaacatggagtaaaccctatcaatcatctgaagaaagcttgggcaatgctgtttgatggattcatgacagagacaaaatggttgtctgctggccaggttcctgactcagaggaatacctaagaaatggagttgtcacctcaggagtgccacttgtatttgtacacctgctgttcatgctagggcatgatgtgagccaaaatgcagcagagtttgttgatcacatccctcctgtcatctcctgcccagcaaaaatcttgagactctgggatgacctgggcagtgccaaggatgaggcacaagaaggattggacggatcgtacaaggagctatacctcaaggagaacccggggctcgccgctggcgaggcggaggagcacgtgcggcggctgatcgcgggcgagtgggaggagctcaaccgggagtgcttctccgctagccccagtagatcgtcgccggcgacgaccttccccgccggcttcacgcaggcggcgctcaacgccgccaggatggtcggcgtcatgtatggctacgacggcgagcggcggctccccgtcctcgacgactacgtcaggatgctgctcttctgaattcgatcgattgattcgacctgaattttaatttcatccatgtatgaacctcatcatcgtccatgcataatggcgtgtagagattaattgtggattaggtctttgtaaataggattatagttagttgagtgagggagatagtactggtcgattttgtagtaaataaatatgatgaatttttactccctccattatac

SEQ ID NO: 13578 - DNA, 1422 bp, Oryza sativa
  ref <308>: DATABASE ACCESSION NUMBER: AK110926
  ref <309>: DATABASE ENTRY DATE: 2001-12-06
gcttgatgcttcgcacgcgcgtgacggcgccgccgttcctcgcctctctcctctctcctctctccgccactccgcctctcccccatcccatcgtccacccggcccgagctgcggaggcgcagacctccgccgctgcgcccgcatcggcacagctacagaccaacgcggccgccggcgctgggagctcgggacgcgaggacagcggtacagccggacccccggctgactgacgcagtgccgcctgcctctgcccgtcgcggcgtcgccgttagcctcttctcttgctctctgccctctgcgctacggctgccggctcgtgtgactcagtggctgtgaagtccttcccagcgggcgagacggcgacccggctcctgcaggttatacctctagcagtttagctcatagcttcattattcccatttagtcattgtgtttgaactttctgccaattgccactaccatttgctaatctgtgattagtgaatgggatgctgacttgctgccgctgtagtttgtaggattggtaaaacatgaagagaaatggggatattgctgttgaactatctatacttctatactatgagctggtggttctgccaaccaccaccaccaccaccactgaaatatgggccatggtgttagtataagtttctgagtgcttggtcagcttttttctgtacttctgtagaatagttgtgtagtctttactctctagctggtatttgaagtactatataaactaaagttctttaattttatattgatttaccttttgtcatcttgattcaactaaagaaaacccacaaactttttaggttttaattgtaatttaaaatgacatagacagcacaattcattgaagagtacatattttgtaatcatatcaaaggacatattgttagcacaattggagtcatctatctatactgaaacaaactatgccatttttctttctgtttgttaatacaaagaagctaatatttgttgcaacacggatgtaatttgtttgttgctgttttgaatctggtgtaacgcacaggtatttggctagtctatatttattatttgtaccttttgaacttgcttgtttcattagtcgattatttgttttataagatgttatttgctatatttgtatctctttttaccaaatttatacttgcaatgttcaaaaatttttggcatgtaatgtgaaattgtgaagtagggctagtcaaccataaattcctggctatgccagtctccgtccggttaccagaggagctcaatccagttgcttgcagcttgtatcaggcggtgagcagctcactcctgtagatccgcttgcttgcagcttggatcgggctgggagaagcttattttgggacaaacggaaggaggcaaagatgaactttttatggaacggagggagtagggtggaac

SEQ ID NO: 13579 - DNA, 1534 bp, Oryza sativa
  ref <308>: DATABASE ACCESSION NUMBER: AK110927
  ref <309>: DATABASE ENTRY DATE: 2001-12-06
gcacaccgtcttcgcaatctcctttggtcggctgcccaatcctcccttcccttcctctcctcaaacccccccaacccaaatgctcccctccgctccccgtccccgcctcccaaaaccctagccctctcgccgcgcgctccccccctgatgccgccccagcctccgccggcggcgtcggcgtcggccagtgccccggatcccgccgtcccggcttggctcagggggctcccccgcgcgcccgagtaccgcccgacggagtccgagttcgccgaccccatcgccttcctctcccgcgtggagcgcgaggccgccgcctacggcatctgcaaggtcatcccgccccacccgcgcccttcccgccgcttcgtcttcgcccacctcaaccgctccctcgtctcctcctgcgacgcccccgcgccctctcccgccgccgcctccgactcgtccattcctccatcctcctcctcgccgccgccggtctccgccgcggtgttcacgacacggcaccaggagctcggcaacccgcggcgtggacgcccgacgccgcaggtgcttaagcaggtgtggcagagtggggagcggtacacgctcgaccagtttgagtccaagtcccgcgccttctcaaagacgcacctcgctggactccacgaaccgactgcgctcgcggtggaatcactcttctggaaggcgtcggcggaccgtcctatctatattgagtacgccaatgatgtccctggctctgggtttgctgcacccgtgcagttgcaacgcaagaagaagcagaaaagagagactgccccgatggacgaatgggagaagagttcaggctggaggctgtcaaatagcccatggaacctgcaagcaattgcgcgggctcctggttcgctcacacggtttatgcctgacgatgttcctggggtgacttctccaatggtttacattggcatgctgttcagctggtttgcgtggtatgtggaggatcatgatctgcatagtctcaacttcctccacactggcgcacctaagacgtggtatgcggttcctggtgatagggctgttgagcttgaggaagttatccgtgtacatggctatggaggcaacactgatcggatcgcgtcactagcagtgcttggtgagaaaacaacactaatgtccccagaggtccttatagacaatgattggtgcaatatcctggtgagtttgtggtgacattcccaagggcttaccatgtcgggtttagccatggattcaattgtggagaagctgccaattttgcgactccccaatggttgaagtttgctaaagaggctgcagttcgaagggctgtgatgaattatcttccaatgctctcccatcaacaactattgtacttgctagcagtttcatttatatccaggaaccctagagaactactgtctggaatccgaacttctcgtctaagagatcgtaaaaaagaagaccgagaactgttggtcaaacaggaattcttgcaggatatgattagtgaaaatgaacttatatgttcatttcttgg

SEQ ID NO: 13580 - DNA, 681 bp, Oryza sativa
  ref <308>: DATABASE ACCESSION NUMBER: AK110928
  ref <309>: DATABASE ENTRY DATE: 2001-12-06
gtagaacgtgggatgtgtgggaggtgtatcacggggaggaggatcggattgagatttgcagggaaggatcagtccgtaccggatcggcagcagatcgcgcattcgcaggagcaggcgccacgtcgtaggagggctgatcccttcccggcgagcaactccatgagcgccgcctccgcctccgccgccgccgctgccccctatagatccggttggttcgcctgaaaccgcagccatgagctcgacgagcaaagtacggatagcgtccaggaggagtagagggagggcggtttgccgaagcggtcggggtaggagacgccgaactcgagggcgagcgcggaccgccgcggcagaaggggcggcgctgcacgccggcgacggcgagcgccgaccgccacaggagcgggtggcgatctcgtgaggcccaagaacagaattggatattacgtgtacgtgcggcccaattttgttgggccgggacgaaattacgtgcttccatgctagttgggccgtcagccgagacctttcttgtggcccaataacggaattgtgagttacatgcagccgattttacctaccgactggaaatttcgacatgcgtcaggccgatttatgttgatggaaattacgacatactcctacaccgttgactttttagcatatatttgactgttcgtcttattc

SEQ ID NO: 13581 - DNA, 2078 bp, Oryza sativa
  ref <308>: DATABASE ACCESSION NUMBER: AK110929
  ref <309>: DATABASE ENTRY DATE: 2001-12-06
gagtaaaatgccgtttactgtgcattactccaaccagtattctgatacttgacacacaccaaacgaggtcaaaactaaacattctttgatatatatgcaggacgtgaattgaagcaaggggcatgcagttgtatccattctagcagacacggtccagctgcatgctgtgatgagtccttcgatcaggatggcgccggcgccatcgtcgtcgctggcaactgccggtcacggcaagaccaagagcgggcgctcgtcctcatcggccgtgcggccggcgctgctggcgatcgccgtgagcgtgatggttgtgcttctcatggccgtcctcttcggcgcacggtggacgccctccggcggccatggcggcggcgcagacaccagctgggtctcggccggagctcgcgtcgtcttaaacgccgtgtccagccaacaaggcgccgatcccgtcgtgaaggtggcgcagccgcacgaccggctactaggcggcctcctctcgccggacttcaacgacacctcctgcctcagccgctaccgcgcctcgctctaccgccggcgatccctccacgtcctctcgtcgcacctcgtctccgccctccgccgctacgagtccctccaccgcctctgcggccccggcacgtccgcctacgagcgcgccgtcgcccgcctgcggtcgccgtcgtcgtcgaacactacctccgacgctccctccgagtgcaggtacctcgtgtggacgcctcacgcggggctcggcaaccgcatgctctcgatcacgtccgccttcctctacgcgctcctcaccggccgcgtcctcctcttccaccgctccggcgacgatatgaaggacctcttctgcgagccgttccccggcgcgacgtgggtcctcccggagaaggacttccccatccgcggcatggagcgcttcggcatacgcacccgcgagagcctcggcaacgcgctgggccgaggcgagggcggccgtgacccgccgccgccgtggatgtacgtgcacctgcggcacgactacacgcgcccgggcgccagcgaccggctcttcttctgcgacgacgggcaggacgcgctgcggcgcgtcggctgggtggtgctcctctccgacaactacttcgtcccgggcctcttcctgatcccgcggtacgagcgcgagctgtcgcggatgttcccgcgccgcgacgccgtgttccaccacctcggccgctacctgttccacccgagcaacacggtgtgggggatggtgatgcggtaccacggctcgtacctggccaaggcggaggagcgcgtcggcgtccaggtgcgcaccttctcctgggcgcccatctccaccgacgagctctacggccagatcgtctcgtgcgcgcaaggcgagaacatcctgccccgcgtgcgcgagtccagctccggctccgacaacgccaccgccatccctggctccgggcggcagcagcagcagcggccggcgaggcgcaaggcggtgctcgtggtgtcgctgcacggcgagtactacgagaggatcagggacatgtactacgagcacggcgcggcgggcggggacgcggtgagcgtattccagccgacgcacctgggcgggcagcggtcggaggagcggatgcacaaccagaaggcgctcgccgagatgatgctgctcagcttctccgacgtggcgctcacgtcggccgcctcgacgttcgggtacgtcagccacgggctggccgggctgaggccgtgggtgctcatggtccccgtccgcaagaaggcgcccaacccgccgtgccggctagccgccaccgtcgagccgtgcttccacacaccgccgcactacgactgccaggcgaggaccaaaggtgacaacggcaagacggtccggcacgtccggcactgcgaggacctcaaggatggtgttcaattggtggactgagttgcattccattgtccctccgcctgtccatctgcactgttcttcacttgtttgttgttaaagcattaagaaaacatttactgaattgtaatcaagtttgtatgatatgatatttctcaagataagaaactttgcacattagcaagac

SEQ ID NO: 13582 - DNA, 1418 bp, Oryza sativa
  ref <308>: DATABASE ACCESSION NUMBER: AK110930
  ref <309>: DATABASE ENTRY DATE: 2001-12-06
agcccaatcctctctgccagttgcaacactttctcaatccctttcttgtccttcttcttcttgttgctcacactaaaatccatcccttcctgaatatacagcgcatagaagtccctcctctcagccatgagagctgcaagcacagggccaaccccataaaccccctgtccaaccatttttggcactgtcgattcccctgcctccttccatgtcttcctcccccagttctcctgcctgctccactgcctaacctccggcttgtcaaatctctcccctctaaatctctcaccacgggaccctctatccctcggcaccatccgccgatacttgtccttgatcctgccccacttcggattgtcaatcgagccattatcctcttcctctctaattatctccctgcccgaaccacgatccgtcaatacctcacctcgcgggctttggtcgcctctggagaaaaacttctccgcggaggtctcccacgaggaggagcggccggcgctagccctcgccgcgggggcggcgccgccatcgcggctcgcggcggcgagccaagggagcgcgctcccgccgtcgggcgatgcggtaccatcaggtgcggtggagaacgaaaccctacctcccagccccagctgcgaggggccgcccgggctaaccgcggctctggcgctcgcacggttggtgacggtggttaccggatgaagcgcgggcgaggaggccgtgggcctggagaagcacgctgcgcggagaaggccggcgaggaggatgcgtcgcggcgaggacgccgccgcgaggagcgggaggggctgggatttggtgaggccggagtggagcatagcgcggggcggggggagtagggttttggatgaggctggagccgagggggttttgggcggcgcgcgccacccgttcgacaaaatgccgcaacgagccgacgacgacgatgcgtggaaagtcacggttttgcagttcgcttcatctctggcgaccaattcatccaacggcacacgtgcatctttcttcctttactcgcacaccgtgcggcccagttcacctacagcaggccatcggctagcccatcagaattcagaaagaggagagaagggacttctgtattttgtggacccctttaaaactacagtactgtaagggcaattactataatgcttcatatgctacctctagaaataacacatagaattaggtgatgaggtggaggagagaagtgaggtgagagatgataaaaccacccctaaatgaagaggtggcttccacacaaactccaagaaggatgtgagagtactaaagacattgatatttgtctattagggacagtggcggacccagaaaaatcatattgggtgtgcccacgctaggatgtataataccattctttaactaaaacatgtcaggttataggt

SEQ ID NO: 13583 - DNA, 2745 bp, Oryza sativa
  ref <308>: DATABASE ACCESSION NUMBER: AK110931
  ref <309>: DATABASE ENTRY DATE: 2001-12-06
acacaaacacaaaccgacagatcattaagtgaagaacatctctttgttctttctttggacagatcggaatggggaagagccgcggcagcatcgctttcttcggcacctacaggccaccggtgcccctggatatcttctcctgccccgctaatccgccgccgcagtctgccaaggacgagctgctcctcaccgacggggagtcatacaaccagaacgggcagcccatcccagcagcggcgctcaaagagctcctgacgttcttgggcaagaagaacccgaagctggcgtcggagtgcggcgccacctcggaggacgcggagaaaggccgcgtcaccggcctggtgttcgtctccgagagggacaggggcctggagacgctgcacgtggctttgcgcttcgtcgccggcggcaagcaggtcaaggtgctgagcctgggcaacatctacggtgccgacaccttcggcggagtgcgcatggaggacagcggctgcgtcgctggcggcttcaaagttgggcgtaccaccgtcggccactccctggtgtacgtgtccaccaaggcgccggtgaaagcacggcgcaccccgtggaccgtggtgtacagaaccgacctcgccgacggcaagaccgagcgcctgacgccgctgggccagtacgatctgagcccggcggtgtcgccgtccgggaagatggtggcggtggccaacttccagcagaacaggtggaacggcgagatcgagaacctcaagacggacattgtggtcatgaacgtggacaaacgagcgcagggccgcagcgaccgcaaggtgctcatcaaggacggcggctggccgacgtggggcagcgacaacgtgatcttcttccaccgaggcttcgacaccacgccgccctccaacaccgccaggtggggcgtcttccggttcgacatcgccgctggcaaggaggaacgcgtgacggatgagagcatcgatgccatgactccggcggccatcagcgagacccaggtggccgtggcgaccgtccgcgagaagtccaagcaggtcctcatgaaggtggagcgcgtggtgacgcagtacaggcacatcgagatcttcgacacggcctccaagacgtcggtgcccatcacccagaagacgaggcctgaaggggaccactacaaccccttcgtgctcgacggaggaacacgcgtgggctaccaccgctgtcgaaccgacaagctactcaaggtccaaaaccaaaagagtactccgacgacaagcatccagaggaggttcgacaaggtgcagcccccggagtcgcacgccgacgtggggctcttcagggtgaccggcgtgttcccgtccgtctccaagaacggcaagaagctggcgttcgtggacaacgagttcaaggccgtgtggctcgccgacggcaggggcctccgcgtggtgtacaaggtgagggccaccaagagcgtcttctccacgtcgtggaaccagaacgacgacctggacacgctctacgtctgcgaggggccggccttctcgatcgacaagccggtgcagatcatgaggatccccaacgtgtcccgggaggactacgagaacatggagacgttcccgctcaccgacgaggagtacaactgcgcgttcccgtccaccaacgctgagggcaccaagctcgtgttccggtcaagcaggaacagggtggccggaggggagaggcagcacaagaacctctacatcatagacgcggagaagggggaggccgccggtgtggtcccgctcaccgacggcccctggaccgacacccactgcagctggtcgccgcgggagggctgcgactggatcgtcttctcctccaccggcaggcccgagaaagacatagtcaagggcaaggacgagccggagaaggaccacggcttggacccaggctacttcgccgtgtacctggtgaacgccaaagacatcaagaagggcgaggtgccggtgcccgtgcgggtgatccacagcgcgcccactatcgccgggcacatcaaccaccccgtgttcagcccggacatgaagagcatcgtcttcgccgccgacctcgccgcggtctccgccgaccccatctccatgccccacttcacgcactcggtcaggccctacggagacatcttctccgtcaacctgcgtgacaccacggacatggccaagaacagggacatccaggagttccaccgcatcacgcacagccgctacgagtactccacgccgacatggaccggcattgccgacgacgaggaggaccccaacgccaagtggaagatgctggagagcctgcccaacttcacgccgtggtgcccgtacgcgcgcggcgaagccggcgagaaagagggttggcacatgaccggacacctcaccatccaaaagcggtgctgctgaaggaagctgatgatcaggctattgacgttgttacttcagctgtggccccaaggtgttccagactgtggcttttgcaacggctggatgaataagtcagttttgagtttgttatgcgtgcacgagagatgtggcgagctgcaggagttggcgaccgcgtcaggtcgtgcgttgtgggcgtgagttttgcgcggcgttgaatccaggagttccggatcgtgggatggcgcgatttgagcctaggattcctttttctgtttatggagtataagtagcagaatagctaaatttccatttgtaagtttctttattcagttgaatgaaatctacagaaaattccacacgc

SEQ ID NO: 13584 - DNA, 1425 bp, Oryza sativa
  ref <308>: DATABASE ACCESSION NUMBER: AK110932
  ref <309>: DATABASE ENTRY DATE: 2001-12-06
atatctgcattggtgtcttccctccggtcactcctagctcccccatccgttgcagcatggttggcgccgagatgcttgtggccgcggcggtgagccaggtcgcccggaagatcaacggcatcgtcggcgtcgcgcagggcgaggtgaagctgtgctgcaatttcagcgacgatttggagggcatcaaggataccttggtgtacctggaaacccttctgaaaaacgccgagaacaactccttcggaagcgacagggccaacctgcgacactggctcggccagatcaagtccctggcttacgacatcgaagatatcgttgatgggtactactcttccaaggagcagttcgatgggggcagctatgctcagaaggggtcattattctgctcactatcgaatccaatgcttctgaaaggtagcatggtttataagatgaagtccaagagggagatgttacagcaaaggcaacaattgcccaatcagtatcatttcctttcacatatcaactcagcagtgaattttgaggagaagcaaacaacatcatacagaaatactgacattgcaattgttgggagggatgcagacttagataatctcatggacattttaatggaaaacagcgctgaagagctttccattatatccatagttgggcctgtaggttttgggaagacaagcctagcacagttcgttttcaataatacaggaacagaggtattcagctttaggatatgggttcatgtttccatgggtaatatcaaccttgaaaaaattggaagagatatagtttcacaaactacagaaaaaattgagggaaatatgcagctgcagtcaatcaagaatgctgttcagcgtgtgctaaataaatatagttgcttgatcatattagatagcctttggggaaaggatgaagaagtgaatgaattgaagcagatgttgcttactggtagacatacagaaagcaagatcatagtgaccactcatagcaataaagtagctaagctgatttccaccgttccactgtacaagctggcagctttatctgaggatgattgtttaaaaatattctctcaaagggcaatgacaggtccgggtgacccgttgttcagggaatatggagaagaaatcgttagaaggtgtgaaggcacacccttggtagccaattttctcggttctgtggtgaatgctcaacgacaaaggcgtgagatttggcaagctgcaaaggatgaagaaatgtggaagatagaggaagattatccccaagacaaaatttcaccactatttccatcattcaagataatatattataatatgccccatgagctaagattatgctttgtatattgttcaatcttccctaaaggaactgttatagaaaagaagaaacttattcagcaatggattgcacttgacatgattgagtgtg

SEQ ID NO: 13585 - DNA, 816 bp, Oryza sativa
  ref <308>: DATABASE ACCESSION NUMBER: AK110933
  ref <309>: DATABASE ENTRY DATE: 2001-12-06
aaacgatccaataatcccttccccctccccatccaaatcaccttttaattattctgcgtccgcgatttcgcaatcacccgaattcatttcgtgttatccccaaatctcgcgtcatctctcttgacctgggccaagcaatcgatcatcccgatccactcgggctttaaacaaatcgctgcaaatttgttgttttccccttaaatttttatgccaagatcgcttaaattcaaccggccaggtggggatttcctaggagaggaaggcgatggcgccgccgcggaagcagcagcaggaggaggagatggttgccggcggaggcgaggcggcggcgctgcgggcgccggcggacgtgatcgcgcgggtgttctcgcagctggactgcgtcgacctcctcagctgctcgctcgtgtgcaggcaatggtaccgcgactccgcggagctgcgagaggagtggagaaaggagtacatggaggcctggaaccagtttggtctctacgtcaagcagcagccgcagcagccatgcccgacctgctcaagctcgatcagaaccctgcgaggcctgtgttcctgagaactgctgctccctccattccctgtcctgccattttcacaaaggcaaaacatttgtagatggcaccaacttctgtattgcacatgagcattggtggtggcagacttgtgtgttttgggtagtgtcagtgctgcctctgcaacagattcatcagtatgtgtgtacatggtgaataaaactgatgttagttacatggtggattgctcttctgtataattgtattgttgattggtgtgtaatgcagt

SEQ ID NO: 13586 - DNA, 1559 bp, Oryza sativa
  ref <308>: DATABASE ACCESSION NUMBER: AK110934
  ref <309>: DATABASE ENTRY DATE: 2001-12-06
aagctgaaagattttacttgcgtcagctccggctaccgtggtcaatgtgcacaatatttcatttggtcctcacctcagccctgtaggcatgcaggcagcaggccttcagttactgcatcccttcggaatcgttaaatgaacagtattcaagcagccgcaggagtatgtgtccggtgtcccactgacaccgataagcagcgacaacgtcgacactcaacatatcccatcccttccttatcccaacgacctgcacgctgcattttcatcactagcatcagtgtattcaaacctgcagcttacactgaagagtgaagactgaactccacagatatgttggccgagggaaggcaagtctacttgccgccgccgccgccgtccaagcttcctcgtctctccggcaccgatccaaccgacggcgtggtgacgatggcagcgccgtcgccgctggttcttgggctgggtctcggtctgggcggcagcggcagcgacagcagtgggagcgacgcggaagcgtctgcggccaccgtgcgggaggcgcggccgccgtcggcgctgacgttcatgcagcggcaggagctggagcagcaggtgctcatctaccgctacttcgccgccggcgcgcctgtgccggttcacctcgtgctgcccatatggaagagcatcgccgccgcctcctcgttcggcccgcaaagctttccctccctgacgggcctggggagcctgtgcttcgactacaggagcagcatggagccggagccggggcggtgccggcgcacggacggcaagaagtggcggtgctcgcgcgacgtggtgccggggcacaagtattgcgagcggcacgtccaccgtggccacggccgttcaagaaagcctatggaagcctctgcagcagtcgctcccacatatctcccggtccggccggcactccacaccgtcgccaccctcgccaccagcgcgccatcgctgtcgcacctcggtttctcctccgccagcaaagtgctcctcgcccacaccaccaccggcaccacgcgcgctacttgatctcattgttatctccgaggattatgccggtgcactgtctgtaacctttttctcgtaatcacgcctcggtttgttcccaatgcatcgtcacgcattgctagtttgacagtttgctaccgctgcctctgtgtgtgcctgtgcgtgtggcagccgaggtgtttttgtttggttgggtggtgggaggcgcgccccggtgcggtggtgggcgtggcccccggctacctagtgctggttcctgcgtgtgcctgtcgaacctgtggagcgtggtcggaagtacggtacgcactgtccggtctcatatgccggggcagaggggttcggtccagtgtggtgcaggcgtgcggattgggatcacatgcagtggctactgcaacttatgcagtcctaaagacaccattgaattataaattaacgtcctagatctttccttgatactgttcacaaataacagtgaaaagttccttcctgtagcaggtactatagcaattactgtttaaaataactgtagcatttgtttc

SEQ ID NO: 13587 - DNA, 1615 bp, Oryza sativa
  ref <308>: DATABASE ACCESSION NUMBER: AK110935
  ref <309>: DATABASE ENTRY DATE: 2001-12-06
aacccctcctctctctctccgccttctcgactccatcgattccaccccctactctcccatctcctctgcttccgatctgcgccgccgcggcgggagggtctccggcgaggtcaaggccccccccgtctccggcgagatcgtcgcccggaccctccacctctctcggtcggttcggggaggaggcgacgcggcccggccgacctcctagtcggatcggatcgaatcgaagtggagaagattgggggtttaggtgaaatcccatgccaccggttgcgtccggctccggccggaagaggcagctggtgctggagtccagcgattcggaggcggatgagttctttgtctcgacgcggcgcaaggaggatgatgatgatgatgccggaaatgccggcggcggaagcggaggtggtggtgatcagggtggggaaaaggtggtgactgttagtcctgagaaggtttctggtgccaagtctactgatgaaggaggtggttcagacaagagcaagggaagtgaggtgggtaagagtgttttgcaacctgatgtgaagaggatcagaactgaggctgcccatggtggcggcagcggaagcggtgggagtgtatcgaaggatggaaccggcgggaaaatgctgcgcccggggttccccaagtggcgatttgagaagccggaggtaagggcagggcgggttcttgatgagaaaggtggggtcgagacgaaggtaagcagttcccaaaaggttaaggaccatgcatcgagttcggtttatgagagaagacggccagagccactgaaacctgagaaatcgacgccatcgaagactaaccaagaggttataagggtacaagggaaaagcggtgtcttaaagatccgtccgaagaacaataaggtggctagtgaaactggtgatggcaagaacctgccgaagaatgctaaggtggatggggatactggtgatggcaaagttctgccaaagaagactacagtggaggaaaatggtgatggaaagattttgaccaagagtggtgttttaaagctcctcccaaagaacaataaggtggccaaggaaaccagtgatggcaatcctcgaagcaagaacactaaggtggttggggaaaccagtgacgccaagattctgatgaagaacaaggcgaatagggaaagtggtgatgataaggcaccgaagaactgtacggtgaatctagaaactagcgctggcaagattttgtccagaaacactaaggaagatttgaaaaccagcgatgtctgtagacaagataaggagaaaagcgatgcaattgatgtgtcccaaaaacagggtgcagatggtgagaagagaatcacagaaaaactagtctcccccatcctattgaggaaaagtgacccaagtgtagtgggaatttctttgggccagaaaatgaagcagcaaaattcaaaggcgcaactgaagatatcctcactaggccaacgtcagccttcacttaatttgaaagatgagaagaataagaaaaaaagattgcttgatcataaaatgtcaccagaaaatttgtccaagaaagcaaaaccaaatgccattgatcaggatacatctcgtccttctcttgagaagcatggaat

SEQ ID NO: 13588 - DNA, 1507 bp, Oryza sativa
  ref <308>: DATABASE ACCESSION NUMBER: AK110936
  ref <309>: DATABASE ENTRY DATE: 2001-12-06
actccactccacactggcacactgcccatatccatctattctgaatagagcctctgcattgagttaagaactaatccgtttgactaattctgtttttgcacacaagtcgccataatcaccatgacaatggccatggcgtcaatgaagggagagaacgtcactgtatctgcagcagcagctcctcggatgaagaagctggcgagcatgctttgcatgaagggagggaacggcgatggcagctatctcaacaactcccaagctcaggctctgcacgcccggcgcatgcttcactttctggaggagacactggacgcgatgatggaacgttcgtccagcgacaagctcttcacggcggccgacctgggttgctcctgcggcagcaacagcctcttcatcgtcgacgtcatcgtccgccgcgtctccgaggcgtacgagtcccgcggccgcgacgcccccgagttccaggtcttcttctccgacctccccagcaacgacttcaacacgctgttccagctgctcccgccgctcctcgcgccggtggccggcagcctcgaggagtgcctcgccgcgggcgaaggcgcggcgacggcgacgcggccgtaccacgcggccggcgtccccgggacgttctacgggcgcctcttccccggcgagtccatcgacgtgttcacctccaccttctctttgcactggctctcgcaggtgccggaggaggtcggtgacagcgcgtcgccggcgtacaatggcgggcgggtgttcgtccaccgcgccacggaggccgtcgccgccgcgtacaagcgccagttccaggccgacctcgcccgcttcctgcgttcgcgggcgcgcgagatgaagcgcggcggcgccatgttcctcgcctgcctcggccggagctccggcgacccggccgaccaaggcggcgccggcctcctcttcggcacgcacttccaggacgcgtgggacgatctcgtccaggagggcgtggtcgagggggagaagagggacagcttcaacatcccggtgtacgcgccgagcctgcaggagttccgcgacgtcgtgcgcgcggacggcgcgttcgcgatcgacaggctcgagctggtgaggggagggagtccgctggtggtggaccggccggacgacgcggcggaggtcggccgcgccatggcgaacagctgcaaggccgtggccggggtgctcgtggacgcgcacatcggcgagcgccgcggcgcgcagctgttcgagcggctggagcggcgcgcggcgaggcacgcgagggagctcgtggagaagatgcacttcttccacgtggtttgctcgctctctctcgcgccataacagcatcgcaaacggatgcgtatagcagcatccgcatagtagtaggttcggtgaacccgttttgagtggttgcacacgaatttgctgcagctttctttcatttccttggcttccaatgaaacgagttctacgtgtacgtttgtaccgcacgtccacgtgcacagtgatttgt

SEQ ID NO: 13589 - DNA, 1607 bp, Oryza sativa
  ref <308>: DATABASE ACCESSION NUMBER: AK110937
  ref <309>: DATABASE ENTRY DATE: 2001-12-06
aaaaaccctagccccacccgccgccgcacgccggaggaggaggagatggctgacaaggagaactccaccccggcctccgcggcgcggctcacccgctcgtctgcggcggctggggcgcaggccaagcgttcggccgccgcgggcgtcgccgacggtggcgcgccgccggcgaagaggaagcgcgtcgcgctcagcgacctcccgaccctctccaacgccgtcgtcgtcgccccccgccagccgcaccaccccgtcgtcatcaagccgtcgtccaagcagcccgagcccgccgcggaggcggcggcgcccagcggcggcggcggcggctcccccgtgtcatccgcgtcgacgtcgacggcgtcgccctcctccggttgggacccgcagtacgcctccgacatctacacctacctccgatccatggaggtggaggcgcggaggcagtcggcggcggactacatcgaggcggtgcaggtggacgtgacggcgaacatgcgggccatcctcgtggactggctggtggaggtcgccgacgagtacaagctcgtcgccgacacgctctacctcgccgtctcctacctcgaccgctacctctccgcccacccgctcaggcgcaacaggctgcagctcctcggcgtcggcgccatgctcatcgctgcgaagtacgaggagattagccctcctcatgtggaggatttctgctacatcactgataatacgtacactaggcaggaggttgtcaagatggagagcgacatactcaagcttctcgagttcgagatgggcaatcctaccatcaagacattcctcaggcggttcacgagatcttgccaggaagacaaaaagcgctccagcttgttattggagttcatggggagttatcttgctgagcttagtctacttgactacggctgtctccggttcttgccatcggtggttgctgcctcagtggtgtttgttgctaaactgaacattgatccgtacaccaatccttggagcaagaagatgcagaagttgacaggatacaaggtgtctgaactgaaggattgcatcttggccattcatgacttgcagctcagaaaaaaatgttcaaacttaactgcaattcgcgacaagtacaagcaacacaagttcaagtgtgtctcaacattgcttccccctttgatatccctgcgtcatacctccaagatttaacagagtagctgtttttggtctgcaactttgcgatgttaacagtctgagcttgtctcgagctcccggagataaaggaagaattacagttgcagggcagcttctcagctaagttagagtgctctaagcatttagatgctgaatggttttaaagcctgagccttagggggagatttcagagtctatttaggagccactgaatcgctagcaggctaacaggcattctcctgtttttgtaaaattgtagttctgtattataacttacaacatggtgtcttggtttgttgggagaaaaacttgtaatgtttgatatgctggtccattccctttgttaatctttttttatgaaattgtcggttacagtctcagtaccttcttttccctatttaagggtagaatcacaaatggacttgaat

SEQ ID NO: 13590 - DNA, 1418 bp, Oryza sativa
  ref <308>: DATABASE ACCESSION NUMBER: AK110938
  ref <309>: DATABASE ENTRY DATE: 2001-12-06
aaggagaaattttaattgtcttcaatggcaagggcctttttggctgggttccaaactgtattttctccaaaccagaaactgatgcaaatgggtggtattagaagtagatattttcttatgcgatgacttgcagagatttttttgattgatttggtaaattgtgctggtagaaaaaaaaatggccatgatccctttatcaaataaaggaagaattattgggtctgtgagcacagatcaaaccactcaacatgaatggttcttttgcagatgtgtttgcaatttgtagatgaaatcaaatgatatttcattgttgttttgatagtgtttctgcaccattgatgtttcactttttaattttgtcaaaaagaaaacaatattctcgtgcgatcaactcatcaccaaacttaatacatcaagtgaattactacaaaagaaagtttaaggcaagcgagcactataaatgaacaaaaagaagctagctcagaccaaaaatggatgggtttctagcttggcttctaaaggttcctaagggcagacaaccaaaaggaagcttctgaggattgaggaagcactagccagtagccaccccaaacaggtccattggtggactacttgattgtacaacatgagcacctttatcaggcaggtttcttttgactctgatgcttgactctgatttcggtcacttccatttaagtctcagccaattgtcctaatatctttagacagcgataatttgttgtcatctcagcatttgggaactctttattcctcaaagctctaatgcttatgcaacaagtagataaaacggaacacaactacatccagtttgttcagctaagtaaaccctaatgttaacgttttatacaggagagatggactgcaatatggggagaggaagacataccttgtatctcactgtctacgcttagcgcctcagtcatgcataagctaagaccgcagccagcgtgggatcgtacgtgcaccgcagcagcagcttctggcctcctctgggaattggatatgcggtccgagctcggtgcctttgagctgggaaagcaggctgaagctgtggagtgttcattggatgtcttgcttgatgctctcacggcacgacggcttcgcctgggacgatctataacccgaaaacagaggcataataggaactgcatatagttgcatgcctggaagcctgggttcatttttttgcagaataggaaagctgattagatagttaaagcgtattccttcactcttttgaggtcactagcaactgctgaaatatggaaaacattccttttggcgggaaattaatatggagaaatcttttcagctgtgatgttagcaaaaaactgaaacagcatattcaaaggttgtaaaacatttcttttggcaggaaattaatctggagaatgcct

SEQ ID NO: 13591 - DNA, 2135 bp, Oryza sativa
  ref <308>: DATABASE ACCESSION NUMBER: AK110939
  ref <309>: DATABASE ENTRY DATE: 2001-12-06
aatatgcctcctccgctatccccttcctctccgcggccggtgagctagctagccgcgtgccttctccctgtcggtcctgtagccgcgccgatcgctggacgtatccgatccggttacgcccgcgggatgccgattacgattatatatgagcccaaaacaaaccctacctctctggctctctctccatagttcatcgacaggtagaggagaagtcctgtggacggaatctgttcgcggcgccgcgtgtcgccaggtcgcgtcggcctacactgcgattaattcaacgctgaaaggcgagatgaattccaagaaaagcaagtgcacgtgtactctaactgatgatcttgtagtcgatatcctatctcggttgcctttgaagtcagtttgctgcttcaagtgtgtctgcaagtcctgggcatcactcttctcagatcaatacttttgcacgaagctgcccagaaggcctgcaggtcttttgtaccaagacagtaataacagttcgatccagattgcaaagttaccctcaggcaacagtgaaatcggcacatctcttagctttatgccacaccatgagaatctaaaacttgtagattgctccaatggtttaatcctttttacacatgggagtaaatctgattcacccgattcttctcacttcattgtgtgcaacccagcaacacaagagtggattgcacttcctgacacatgccctagagtaaatggatctgattatattgctatgttggccttcaatccatcatcgtcctgtcatttttttgtctttaacttccagaagaggagatccccacactcaggggtttttgtcatcactgaagttgagatattttcctctgaggatttcacttggattgccgatgatgcatttgaaactgaaattatgatgatttcaatgccacatgtcctacttcatggtgttctgtatttacggactgtagaacatagtgtttttgcaattgaaacaccacacatgtataaaccatggatacatcgttggacctttgagcttcctggggattcatgtcccatgaacaactatatatggggctgcctcggcgaatcgtccggcatcttacactatatgcagccaaactatgatggctgctggcttaatgtctggaggcttgaaagtcgtcatcaacagtggagcatgacgcactctcttagcatgatcgatgcctttggaaggggtacccttgttcatggtgatccctttagtgttgattggtctgcagattatggcatgctgtcttttgacctcgagagagagattgttttccttcatgaccgtgtatcaagcaaagtgctttcatacagcatacgtactggaaaactctgtgagatgggagatctccctagaaattctttgtattatgttccatactggcgcaagtttccagttgtagaggaagaccaatactggttatgacttgtgacagaaattatcctggcgcaagtttccagttgtagaggaagaccaatactggtgacttgtgaccgaaattatcctgtgaatgttttactatataagtgtatactatgtgctgtagtgctgctgtgttatgttatcgatacctgtcttggtatcttattcctatggcagtgccaagtgccaactacttagcccctcctgtactctctgatgatgcacatgagcttttggagatcagattggaaatctggattagtatgctttgctgttgcccttgatctgtcaagcatcaacatgttccatctacttgtactgatttatagaactttgctggaggtaaggagggaacaggggtgtttacccaaccttacacacaatgttgacagagcaggtcgggtggccgctggtgttttggtcctttcatcagcaacaaatgtaaaagtttgccaatcgcgaacaaaatgctacgccactgcttacataggtgtcgggattgcaagtgcggcgactttaacacagtattttctagcttccgatgatattttactacaaatccatgttttacccggagacaaattctagtgcttgcggtatgtttggtatacaatcaaaattttctccgcaacaattcaaacatgtacgcattgtaacatgatatactcatgtacaacgggtgattgatctg

SEQ ID NO: 13592 - DNA, 1488 bp, Oryza sativa
  ref <308>: DATABASE ACCESSION NUMBER: AK110940
  ref <309>: DATABASE ENTRY DATE: 2001-12-06
gttcgtgccaaaacatgtccttgtcgatctgaatctttcagctctcatcgctcgacacccaaccactcgatcataagccaagcagtttatgttagccaattgctacaatatccttaagaggcgtcaaggcgaagtgtcacgggaaaaaaaatgggtcgtatgattgccaaattttctgcacacttcgttcttctcctcgtgttcagcttgagcaacgacgtggtggtggcctcggccgccggcggcgatggccagttcacgtaccaggggttcgcggcggcgaaccttaccgtggacggcctcgccaccgtcacggcgagcgggctcctcgtgctcaccaacttcacgtaccaggcgaaagcgcacgcgtttcacccggcgcctctccgcttcctcggcgagtcctccacggcggcggcgggggcgaacgccagcggtggcgccggagccgacgtggcgcggtccttctccacggctttcgtgttcgccatcgtgtccgggtacgacggcctgagcgaccacgggctcgcgttcgtggtcgcgccgacggcgaacctctcggcggcgaacgccgggcagtacctgggcttcctcaacgcgacgaacggcacggcgagcggccaaatcctggccgtcgagctggacaccatcatgaaccccgagttccacgacatcagcagcaaccacgtcggcatcgacgccaacagcctcatgtcgacgcaggcacggccggccggctactacggcgacggcgacggcgccttccgtgagctcaggctgaacagccgccagccgatgcaggtgtgggtggactacgacggccaggccaagcagctcaacgtgacgctgtctcccgtgcaagtgcctaagcccaagaagcctctgctctcccaggccatcgacctctccacggtcatggccgaggagatgtacgtcggcttctcgtcggcgacgggcgtcgtgaacacccaccactacgtgctcggctggagcttcggcttcgacgggccagctcctcccctcgatctctccaagcttccccggctgccacgcttcggtccgaagcctcggtccaaggtcctggacattgtgcttccgctggccaccgcatttctcgtcgctgcggtgctagctgccgtcttcttcgtcgtgcggcggcggcgccgcttcgccgaggtgcgggaagattgggaggatgagtttggtccgcaccggttcgcatacaaggatttgttccgcgcgacggatgggttcaaggatagaaatttgctgggtgttggagggtttgggagagtttacagaggggtgctaccggagtccaatttggagattgcggtgaagagggtttcacatgattcaaggcaaggtataagggagttcgtcgcggaagtggtgagcattggccgacttcgacatcggaatctcgtgcagttactaggctattgccgccgcaagaatgaactcctgttggtgtacgattacatggcg

SEQ ID NO: 13593 - DNA, 1437 bp, Oryza sativa
  ref <308>: DATABASE ACCESSION NUMBER: AK110941
  ref <309>: DATABASE ENTRY DATE: 2001-12-06
gagagattgatcgagcagagcaccatggctgccatggcgagctcgcgtgggtggggcgatctcccgccggatctcctcgcgctcatcgccgacggcctcaccatcaaggcctacacccgcgtccgcgccgtctgcaccgcctggcgcgccgccataccggcggcctcgccgtcgctcctcgtccgcctcgactggaaccgccacgacgcgtggttcctgtccccgaggatctccaccgcgctccacgagaggctggccacgctcctccctgacaggagcgtctgcctcggctccggccacggctgggtcgccgtccacgaccccatcttctacgagctgcagttcggcctcgtcgatcccctcaccggcgtcgacatccccttcagttcgttcccgcatttcgccgaacacaagctgcgggtgtccaaggtggtgttcgcgccccacccgacgccgaccgacttcaccgcggcggccatcaccggccacgacgagggccgcgtcatcacctacacggctcaggggagcagcgggtgggccgacgccgggtgcccccgtctcggcgaccgggacagcatcgccgacgtggtgtaccacgaggaacgcggcggcggcggcgagagggcggtgtactgcctcgcgacgagcggcgacgtgcacgtcctccgcctccacgacgccggcggcgcgttcgagccgctgttcgacaggggcaacgcggcgttcgacgccgccgccgcgttcgcgccgccgtacgacacgatccgccactgcaccaatgccaagaacctggtggtctgcgacgacggcgacatgtaccagatctggcggaacaacacctgcaccaggatggggccattgcccggcgggggagagtaccgcgtggagtacaaccagatgttcgttctgagataccaccctcgccgccggccgtgctgggtgccagtggaggatctcggcggacgctcggtgttcgtcgggaagaacaattcggtggcgctgcgcgtggacggcggcggcggcggcggcggcgtgccggggctgagagctaactgcgtgtactggactgacatctgtccagctcgggccaaggtattcgacatggtttccggcaagtcgacgctgtgctttcatggcgtagaagaccaccgcgccatctgctggtacttcttggcgtagcagcagcaagaagcccaactctaggttcagcttgtcagcttccggaatcggattgagaaagtttgattgaattggttatgtggtattggaagtttaggctgaattctgtgataagagacagaagttttggctgtcttcgttgctgtcattccgatggtaaaaaaaaaaatgagatgcggaagtaaattttcagtgctgtgaaaattaaacctgtttttcattgtttcagattaaaatagtttccctgtttttgagtgt

SEQ ID NO: 13594 - DNA, 1540 bp, Oryza sativa
  ref <308>: DATABASE ACCESSION NUMBER: AK110942
  ref <309>: DATABASE ENTRY DATE: 2001-12-06
ggagcacacgcacgcgcggcgcgacggcgcgacctcgcctcgacacgagctctcgtgatctcgtctcgccgcgtctagctcgccggcgccgccgcgcgcgcgcgtcccctcgccgccgtacgtgtagcggagcgactccctctctccctcccgcctcacctccgggaccggtcggtcggtcgatcgatcgacggggcgaggggatggcggcaccggaaggccagaacaagttcgcgggcgtccgcttcttgcccaaggacctggagctcctcgccatcctcgacgccaagctccgcggaagcccgttaggccccgtggaagccatcttccacgacacgcagatcctcgacttccacccgtacaagctctacggtatccaccgcctcgatcgatcgatctccctctctctctctctttgtcgatctccttcttcttctccggcgacggagatgtatgctgaggacgaggaggaggaaggctacatctacttcttcagcacgatgcagttcagatgcaggaagattgtggagcgcgcggcgcagggcggccggtggaaggtgaacaactgcgagactctggaggttggcggcgtcgccgttggccggaagttcaccatgaatttctacgagcatatcggcggcgacaacgacctcatctggaccaactggggcatgcaagagttcgccaggatcatcggcccaaacaaggagctcgcggatcttgccttgtaccgcctatacaagaagaaaataacaagggggacaggcgaggagaagccggaagacatcgccgcggctagcgatggcgataccgagagcagcatgaacaagcgtagacgtgtagaagcgtcggcggcggccatggcgctgccaccgccaccgccatcgccaggcctgcctggaacaatgatgttcatggcggcggaccaggcgaacgtggcctcgacctcgcaggaatggcacggccagttcgccaacggcgctgcggcggcgccgagtcctagcggctgctggccctgggcgccaccgccgacaccgagcgcagtggagcctttcagcttctgggccagcgcgtcggcggcgactcctcctgccgccgcgaactaccacccgtcgccgcagccgcagccgctgccgccgcagggcggcgagtactactccagacacggcgccttctcggtggcgcccgtgcccgcgtccgcctgctcgacgccgtccccggaggcggcgaccagctgcctcttggctacgacgtcacctctgccggcggcaggtactgagggcagtgacagtcagcagcaagaacccccctgcgaattgatggaattttgaaattttggcgaattgcttatagctgattctgatctggccgacaaatttccgtcaaattcgcagtgttcaacttcgtactctttttctgaccgttggctgttacttcactagttctacatatgtgagactgcattgttttttgtactagtattaatcttggtgatctgttgttctgaaatgcttataaattttgcccttgtgccttgaag

SEQ ID NO: 13595 - DNA, 978 bp, Oryza sativa
  ref <308>: DATABASE ACCESSION NUMBER: AK110943
  ref <309>: DATABASE ENTRY DATE: 2001-12-06
acctctgccaacctagcttagctagagcctagaggagtcatctccatttcttagcttctctcctcaccagaagccaccatgagaggccctagcaccaccaccatggccaccttcaagcaaagcttcctcaagaacctcctctcgagcctcaaaagctccagcaaaaacaaggccgccatgtcgaccctgagtgagaggaagcgtgccatcaagtcctccgccgacatcgccatggccaccgcccgcaccggcatcgccggagcagcacggtggccacatgccatcttggcatcatcatcatcgtcttcttcatcttcatcttcatcttcatcgtcatcgtcgatgccgagaactacatttccatgcaagatgatgcaagggaaggtgaggaggaggtgcaagagcatcgtgaggaggaggacgccattgatgagtagtagtagtgaggttgcgaggagactggtgaagaagagggacaaggtgctgaggaggatgatacccggaggcgagctcatcgccgacgagatctcgctgctgcacgaggccatggattacgtcgttcatctgcacgcccaggtcgacgtgctccgccgcgtctcgagagccgccgtggcgcggagatccagtgcgtcttcttcttcttcaggtgggcttgcacaattgaaggaacggacggttcagatctctggtgaaacggagaacccatgctagatagtaggatgtgattctgaaaagaggagcaagatgtgttgcagatattggagaaatatccaagagggtgatcagatttatgtccctgatcacacttgataagcaagtgcagaagtgcccggagaaatagaagtggaagagtggtggagagtaatcaagattcgtactgttcaaagatgaatgagaggaaatttgtaagttggtggtactaattgtagtagccacttttgtaccagaagtaaaagtgaaattgattaattataatgc

SEQ ID NO: 13596 - DNA, 525 bp, Oryza sativa
  ref <308>: DATABASE ACCESSION NUMBER: AK110944
  ref <309>: DATABASE ENTRY DATE: 2001-12-06
cccccaccccacgacgccgagacagccgccccctccctcctatgtacggtgttaggtgttctttccccttcacgagatttcctcttccatgatctcttgcaccgtatgatggatcaagaaactagttgcaaaaacggaatgaggaggaggagaggaagaagaggagtggtgaattggtgttttccgtcatatttatttttgttctccataaaaccctaggttgtggtgctccggataatgcttggtatcgtctcttcgttgttcgagtcttttcaggtacatgccatgacatgttttcatgaagggatgggattagctacactgtcgcacgacatgaactcacttagtcatgattattgtaatatgttgataagattacttgtgtttagacataatgggttaattaaatactagagttattgaccattgtttaactactctttcaaggatatccctgcatgtccatcaattgttgtaacataaccttaatctatatgttgatgcttccgtgatgttttcttgtct

SEQ ID NO: 13597 - DNA, 707 bp, Oryza sativa
  ref <308>: DATABASE ACCESSION NUMBER: AK110945
  ref <309>: DATABASE ENTRY DATE: 2001-12-06
aacggtccaatactaggtctcaccgggagcgtgaagcccgaaacggcacgcggaagcgcgaagcggcggccgccgccgccggtcgagcgggacggcggcggcgctgcgcggcgcgcccaaccccccatctcctggctccgccgccgcggcgcccggtgaactcgtcgtgtgtctgggacctcacctctagggatccgacgagcgacgatggctactcctcccctccgccgcggcgcccccaccaggtgcacaagagatgaatagaggccattctcattagcaatgagctcatcatggggtcccagctccataacctcaccggactgcatgacaacaattatgtcagcattgcggatagtggatagacgatgtgcaattatgatagtagtccggcccatagatgccatgtctagggcctcctgtacaatgcgctctgactcagtgtccaatgcactagtggcttcatcaaggagtaggatcttgggtgacttcaggattgctctggcaatagcaattctctgcttctgccctccagacatttggacaccgcgctctcccacctgttgttttatttcaaactaggttatcactagggttggaatgcttataagctaaacattcttgaaattcttaacgatatgtgcaagatattgacatgaacactaaattgatgggttgtatagacaatatgaaagcgtcattatggt

SEQ ID NO: 13598 - DNA, 2015 bp, Oryza sativa
  ref <308>: DATABASE ACCESSION NUMBER: AK110946
  ref <309>: DATABASE ENTRY DATE: 2001-12-06
attcaacggctcttcttctttgtcaacgctactaaggacctgacggttcgcctactggatgaatgaaagaacatgagaaagggttataaaacatacaaacttttgtttgtgaccaaatgatcttcttatgcagcttattcaatatcttcatctgaaaaagtggctgcaggatgagagggtcatgaaaacaacatcggcgtcaaagcttggcaagttaatgcaccatcgtttcctagaaagtatttcattgaataaggcttgagttgtattatatggtgctaataataatttggaactttcacatcaatgaagtccagcttttgaactgatcaaaagggctttgcacatgaacagagggctccttgattgctaacttggagatatctaatcttttggaagcttctcacgctgtatgcgtgcaaggctctgaggatttctgattgcatccagcatcctgtccaagaattcaatgaactggcgatcttcatgagcaacctgaggatctgaaaacctatcgaagcgatactgatcctgcacgttccattacaaccataaagcttcaaaaaacagaggaactccagcactgagcaatagatacatcgtggggatatcatatactacataagtacgtcttaaatcacaggtatgtgcaaacagaagaaaactgatcactccagtaccagaaggtggcttacacttttcaccaagactggaattgaaccttcgatgcctttcacatatttttcatggccaatgatgaaggcaagtttatcagctgatttaacaataccctatggaggcattttcacatgacaatgtggaaaagaagagaacagattacaccaaggttgtctcgatgagcaactaaatgaatctcatttctgatgagctttttgaataccttctccaccatgaaagaaggctctccgctctccgttttccgacggccaatgacagcggtcattgtgtcctcttcaattatatcagcatcagtgaaagcaaagtcaatctatatgtcagtaaacaccgtttcagcagttcacccactttctcccattgtcagcaagatttacaatggtgaaagaaatcaacatacttgggtgccttcctcgtagctgctgacctgtatccctgctttcactgcctcacttgcactgatcgtggacctggctgatcaaccccaagaatggattagatgcaactgacaaagcatgtcatccaaggaaattcaggtcaggagctcatgcgtccactcttgaaacaatgagtgatccaaaaagaagttagcttcagcaaccagaacttacgagggtattccaaggatgccagtgagagaccctcgccggaggcgagtgccgaggtactggatggcgaggccggacgccgggccggagccgagcccgaccaccatgccgctctccacaaacctgtccacctgaggccaggccaggccagccaccgagctcgtcagaataatatacacatgatccaagcgtcaacgagctgatggaacagtggagaatcccctcaccgtgagcttggcggcgtcgaagaggccgacgacgtcggcgtccgcggcggccgcgcaggtcacagcacgtctccggctacggcggcgcacggtggccggtgcgacgttgccgatgcggcgggggcgtgggcacgggcggagccgcgccgaagaggagctcacgcttgccccggcaacggcgtccatggttgggctggtgcctcagcttgctggcctagcgagcttgacagttgcatacattggatggatggcacattgacgaagcggataaggggtgcgaagcaggtgcaacaccagcctattgtccttgttctcctcaggcctcatatgctcggttgtggagtcaccgatagctctttgcggtataaatacgttcactaatcgatttgtactcaatttacatattcatatgttttatacaatggtagtttgtactcaattcacatattcatatgcttatacaatggtaggctagcatttgaat

SEQ ID NO: 13599 - DNA, 1686 bp, Oryza sativa
  ref <308>: DATABASE ACCESSION NUMBER: AK110947
  ref <309>: DATABASE ENTRY DATE: 2001-12-06
gagatgaacagaagctgcagaggcgacgagaagagaggcaatcgctccccgtcgtcttcccccttctcccctgctcgtcgtcgcgggcgcaatcgggtaggtcgccggcggccgcggttgggtgcgcgagagcggcggcggggtcgctctctttggcctggagtatcctcggttggaatcagattctgacggtgcgtgtggtctggtggcaatcctagagacagtaaagttgatgatctcatcataagagatgtttattcctgaattagataaccggtctgatcctcaggagccatcaagaaatcctggcatttggcaatgcaccatttgcgaacacggaaatgatgcaaaaaaaaaatcatgtgagcaatgcggtgttcttcgatatttctcgctgtatttcaataatgcccttgaagttgatggcagagctaaacggagagacaagcattatgcggtatctgtactggcaagaactcttttctcaccatccagtgccaagtcaaaagacgttgttctttctggtggctttaaagctagcagaaatgcaacaggaagtacacgagctacgttggatgcgctgcataagacatacatgacccgtaaagaacgccacattaacataggtacactgcatttgtacatcaagcgcttttggtaatttgatttgtttaatttatggcattatccaaattcttgtagttatatgtacttgctgctatatataaaccagatatttaatgttgtatgattctatatatgctagtcatttgcatagcttaactctcaattgcctcattgtgcatctggtgtgactaccattttgggtgtaaaattttcctgtttcaaaaccaagtgactgtctgaactataagcttagctagcctgccatggtccttctgcaaacaaacaaactgaagcacatatgtgggaggtagcttacaggtcttgggagtttacagggttttatataatttggtttacctgaactttgaaatatgaagatagtcagtgtaaattttaacctacttatgaatgttcagttcttcccctgaattagggtaagcattcagttgacccgtgtttttccaatgggagatccatatgttgaacttatgtttcatttatttattagacttcctgatggagaaatctgtaatatgactgcatatcttcatgttcacagtgcctttcaagtttgatacaccatctccggatgacgtggtcgctacaggactaaaatcgtcgagaagttttagaaaagttgacacagatgctccccatgtcactgaaaagagggtgatggataatgatagttctacacctgagaaggatacaactgcagactcaaatttgcctgtaaagtcgaatgaattcggtgaaagtagtgagagtgtttctgttggtagtcaaaatgaaacactttgcttggaccatgagctacagcatttgagtttggagaggaagtcacaaaaaagtaaagccaatattaaaaagccagtttcttcatccctgtacaagccagaaccatggatgctccagcatgaagatgaaggcatccctagacaattaaatcttgctattgttggccatgtcgattctgggaaatcaactctatgtggtcgtttgttacatgccctggggaggatttcaaaaaagcaaatgcataaatatgagaaggaagct

SEQ ID NO: 13600 - DNA, 1396 bp, Oryza sativa
  ref <308>: DATABASE ACCESSION NUMBER: AK110948
  ref <309>: DATABASE ENTRY DATE: 2001-12-06
aaggagaaagacaaggatggcaagaagatgagcagggttggaagctggggatccatggcgttctactcctcgtcttcttcctccagaagccaaccagtgtctgcagcagaaggcaagaatggtggcaagaaggagaagaggaggagcagcatcagcaggagcatcacgtgtgccggatcgatctgcagcaccaaggagagttcggtgtcgagcagggggagaggccggcgccgccggagcggcggcggcggcggcggcgatggcggcggcggagggagcacgtcgagcaggtcgctgatgggtcccgggtaccacggcgactccgcggcggctgtctccgcgtcgtcgtcgttcaactctgtgatgacggcggcgacatccgccaccgcgaccaccaccaccaccaccaccagctcgtcggcaacctcgccgccgtcggcgctgtcctcgccgctgtcatccatcggcggctcgttcagggcgatgcagatcaggaagctctccggctgctacctccactgccactcggtgctcgacccgcgcaccctcgccgccgtcgtcttctcctgccccgactgcgacgaggtgttcgtcaagcccgactccctcgagctccatagatcaaccagacacgcagtttcagagctcggggcggacgacacgagcaggaacatcgtggagatcatcttccagtcgagctggctgaagaagaacgcgccggtgtgcaggatcgagaggatactcaaggtgcagagctcggacaagaccatcaagaggttcgagcagcacaaggaggcggtgaaggagaaggcgaggagcgccggcgacgaggccgggaggaaccccaggtgcgtcgccgacggcaacgagctcctcaggttccactgcaccaccttcgcctgctccctcggcctcgccggcggcaccgccctctgctgcgcctcctcgtcgccgccgccgctgcactgcaagctctgcagcatcatcaaagacggattcagggtggatggcaatgggaggatcacgacgatggcgacgagcgggcgggcgcacgacacggcggaggtttcgccggacggcgagaagagggcgatgctggtgtgcagggtggtcgccggcagagtgaagaagctccacagcagcaattcttcagaggatcatgactgtgactctgtcagcccctgctcagaaggggtttactcagatttggatgaactgttcgtgttcagtcccagagctatacttccttgctttgttgtcatatacagtggctactagatcaaagaaaaccagtagaatagcttgattttgccactgttcttaatctagtttctttctctgttgtaggttgtagtatgtttacttacttcatgttcatcaagtcagatcataatgc

SEQ ID NO: 13601 - DNA, 1031 bp, Oryza sativa
  ref <308>: DATABASE ACCESSION NUMBER: AK110949
  ref <309>: DATABASE ENTRY DATE: 2001-12-06
attcgccgcccgcccgctcctatcgccgcttccgccgctccgggcttcgcctgtgccgctccctcgactggcgcttgcgccgcccgtcgtcgcgccatcccctacccgtacaaccgccgaatccctatcgccgcccttcttccgcggccacgccatcgccgcccgccaggccgatctccgtcgcccacgaccacgccgcgcgccaatcgcccattgccacctccacggatcgcctctcatcgatctcctccgtgccaccaccgatcccgcgttgacctcctccgcgcccccttcagtggccagatctagattggcggtgagccccagccatcaacgatggcgcccttccctactgttggaagctgttccagcaacctccttggccggcggcgcggatcgtcgccatcacctcggctcgctgatctcctgcgacaacgcgaatcaacctggccatgcatcctgttttcaacactaacgaatcgagatatatgcagttagagagcgacatgaaatgtgacctgaacgcttcgtcgtggttccacaacaacagcagcatagaggggcggcagcctgtgatgctacctgaatacccccccggcttgctccattctagaggggaactttgagcacattaaagagcatctctgacctttaaaagtggcttaagggcctctactgatataagtaacctcactggacatatgttggtagcaacaaaatagaatgggcgaaggcacaaactgtgttggctagaacagactgaatttgtgaggatggcagtgcagttcaatgccataattgtgccctttggaagttcggaatcattggaggggaagacctgttgaaagtatgccacatgcccctattgctcagtttctctgcgcttgctagaaacgcaccctttggcaagaatcttgtgcaacagtgcaagcatacagtaatcacctcaagccaactgctaattacgtcctaattctgtcaaactgtgtgactgctaatttgttttttcagaatcaggcttgtgtaagaag

SEQ ID NO: 13602 - DNA, 1410 bp, Oryza sativa
  ref <308>: DATABASE ACCESSION NUMBER: AK110950
  ref <309>: DATABASE ENTRY DATE: 2001-12-06
agccagccagcagtaggcccagcacacacccacagtcctctatcacatcatggggagcatgagcacaccgccaccggcggcggtcacggtggcgaacgtccaacgtcggcgacgataaccatggcggcgggcgggtgctcctgttgccgttcccggcggcgcagggccacaccaacccgatgctccagttcgggcgccgcctcgcgtaccacggcctccgccccaccctcgtcaccacgcggtacgtgctctccaccacgccgccaccgggggaccccttccgcgtggccgccatctccgacggcttcgacgacgacgccggctgcatggccgcgcccccggactacggggagtaccaccgcagccttgaggctcacggtgcacggacgctggcggagctgctcgtctccgaggcccgtgcggggcggccggcgcgcgtgctggtgtacgacccgcacctgccgtgggcgcgccgcgtggcgcgcgacgacggcgtgggcgccgccgcgttcatgccgcagccctgcgccgtcgacctcatctacggggaggtgtgcgccgggcgcctcgcgctgccggtgacgccggcggacgtgagcggcctgtacacgcggggcgcgctcggcgtcgagctcgggcacgacgacctgccaccgttcgtcgcgacgccagagctgacaccggcgttctgtgagcagtcggtggcgcagttcgccgggctggaggacgccgacgacgtgctcgtcaactccttctccgacctcgagccaaaggaggcagcatacatggaggcgacatggcgcgcgaagacggtcggcccgttgttgccgtcgttctatatcggcgacggcccgctgccgtcgaacacggcgtacgggttcaacctcttcacgagcaccgtgccgtgcatggaatggctggacaagcagcctcctcgctctgtcgtgtttgtgtcgtatgggactttctccagctacgacgcagccaagctcgaggaggtcggcaatggcctttgcaattcaggcaagccattcctttgggttgtgaggtccaatgaggagcacaagttatctcgagaacttcgagagaagtgtgggaagagaggactaattgttcccttttgtccccagctggaggtgcttgctcacaaggccacaggtatgggaaccaacaaaaactcaaattaattattttgacagcaaaataattttcttccaggttgaaaataattgtcatttttataagacagatgtgaaactttaaaaatttgactataaataacatgtaaaatgttttttagaaatatgcaaaccatatgtataattaatctaaaaagtacttcaattcaataaaatcatatatttattggtgtttatatatatatggtaatagaaaatattggtcaaagtt

SEQ ID NO: 13603 - DNA, 1351 bp, Oryza sativa
  ref <308>: DATABASE ACCESSION NUMBER: AK110951
  ref <309>: DATABASE ENTRY DATE: 2001-12-06
atatgagagagatgtcaaccctaagccaccagcaccaccatgttctcgtcctccaactcatcctacttctgccctttctccacctcgttgtccccggaacgccagccgccgcccgcaagttctccgacgtgttggcgagcggccgcaacgtgagcgacggcgacgtgctcgtctcccccggcgggtccttcaccctcggcttcttctcccccgccgccaccaggaggaggtatctcgggatttggttctccgtctcgccggacgccgccgtccactgggtggccaaccgtgaccacgctctcaacgacacctccggcgcactgatgctgaccgacgccggcgtcctcctcctcctcgacggctccggcaaggtggtgtggtcctcttccgccaccgcgctgccttccgcgactacctccgccgcggcgcggctgctcgattccggcaacttggtggtgcaagggcagggctccggcaccgccctgtggcagtcgttcgactaccccaccaacaccctgctgcccggcatgaagatcggcaagaaccggtggaccggcgccgagtggtacctgctgtcgtggcgctcccccgccgatccttctccggggagctacaggtacgtcaccgacggcgacgaggcgctgccggagaacgtcgtgctcgacggcaatggcaccgaggtgtaccggaccggggtgtggaacggcaggaggttcaacggcgtcccggagatggcgtcgttcgcggacatgttcagcttccagctcacggtcagcccgggcgaggtcacctacggctacgtcgccaaggccggggcgccgttctcccgcgtggtggtgaccgacgacggcgtggtccggcggctggtgtgggacgcggcgacgcgggcgtggaagacgttcttccaggcgccgggggactcctgcgacagctacgccaagtgcggcgcgttcggcctgtgcgacagcaacgccggcgcgacgtcgatttgccggtgcgtgaaggggttcagcccggcgtcgccggcggagtggtcgatgagggagtactccggcgggtgccgccgggacgtggcgctcgactgcggcacggacgggttcgccgtgctgcgcggggtgaagctccctgacacgcgcaacgcgtcggtggacatgggcgtcaagctggacgagtgcagggcgaggtgcgttgccaactgctcgtgcgtggcgtatgccgcggcggacttgagcggcggtgggtgcattatgtggacaaagcctttcgtcgatttacgtttcatcgacaatggccaggacatctaccagcggctagcgaaatctgaaataggtaatttaacctaattttgatt

SEQ ID NO: 13604 - DNA, 995 bp, Oryza sativa
  ref <308>: DATABASE ACCESSION NUMBER: AK110952
  ref <309>: DATABASE ENTRY DATE: 2001-12-06
aaaagggaaaacctatcctcctgcgcggcgccgcccgccgctcgcctcctgcgcgcccgccggcgccgctccgctcgcgtggctgcgctcccgatttccctaccccgccgctgcctcggatcgcctgtggccgccacctcccgtcggagccgtcgtcgttgccgaggaagcgggccgcatcgccgccgccgccgcctcctacgcgcgtaacgcgcccccgccccaccgccccgcatccccccttcccttgctgacgggtgctgcaccgcgccggcgccggaacggcgaggttcacatccgtcctgctgcctcccctcccttctagccctccgcagccgccgtcatcaacgtcctccgcggcaaccgcacgtcgccgggtccgccgccaccactggaacaccgcccttcctccaaccgccccttccaaccccatcgccccctcctcagctgatcaccccgccgccgcagaaggttgtcaggacggccgccggcgaggcttcccgctcctccatcctgttcaggtcagcgggcaggccgtgctacacgttcttcgcttcgccgacgatggtggtcaagcagtagtgccagaccgattggcatgacatgtttgcctccattcagtaaaattcatctgaattcaaagtgttccaactgtggcgttttgcttctgaacagctccccaacttgcacttgatgcgatggttctgttttgctgctaaaagggagagcagcaaagctgctgcacctgaccactgcacatctttggctcttcctttctgaccactctaggagatggattacaagcgaggcaagggctccagatcaatatcatccagaagaaagtagtactaattttaaaaaaaacttgttattttatatattgcactacttataatttataatttacagatgcctaaatatataggatgttgatttattaatgtttttatcaccgaactactcccgagctaaatgccagagaggatggatttctc

SEQ ID NO: 13605 - DNA, 1539 bp, Oryza sativa
  ref <308>: DATABASE ACCESSION NUMBER: AK110953
  ref <309>: DATABASE ENTRY DATE: 2001-12-06
accaccaccaacccacgcaacctacgctagggttgagcccgcggcggcgaacggctatctcgccacggcggtggtgtccaggatcgcggaggcgcagcacctgccctatgcgtacggcgcgccgccgcgtgttggagaacttgggggtggatcgtgccctcactcgccatcctctttcgtggtgataagcggctcggagttggaatcccccggaaggatcatgggcggattccaattccttgaggcgccctccgaccgctccgactcaagcgtgtcctcgcttgttccaacatcgcctgcgcctgctcggttaatggctcgtgacacaacaaaatcacgtgaacctcgggtcaatccacaagttcgtcttgcacaggccaaaaggtttgcagagggtgccttggagcactacaacagaaggaagaaggacaagtttgagctcgtggatgccgtgccttgtattggtatacctgagccacactgtatttacacccacatcaacttcactgccaggtccagcaagaagggttcgcaggaactacttttcttcgcagagctttaccactgtcagagaaggcaggaagtcttcaccgcaaggttgagcaagaaaggttcacggggagaaccttccaacgctggcagaagtctggttcagagaggcttcgttgtgacttgttgtgagccattgggtcccgattctatggttgggcgtaagcttctcgagcgtgatgatactaaggtggtgaggaagaacaccgatttcacctactgctacggctgtccgcagatgatatcccatcccaagggtgaaatgtatatcgctggacactgtaacattccgcacgtttatgagggtgtgcgttagtatcgctgcaatgctaatatgctcgaggactaatcactgcaacactatctgtgccactcaattataagtagaccatcttcgagtgctaaagtctcgtggagtcaggagagagttggactacaagaaggggaacattactgccaaacgattcaagatatcacgattttatgaattttgcaatgtgaaccaaatcaatgatgatggcgttccgtgtggcttggatcaacataatgtcaaaggaacaataaacaactttctaagcaaaacaatgatgattgcctcatttccggtaagctacaactgctatgattttgaagatagatttgaacacgtctaccagtatgatataaatgatccagtatgtgaaaatgatggaacagatcggatcattacacaagctgctgtcatttactggcttcgggtttgaggaaaatactccttattgttactttttagattgtaacggtgaaaggtttggtaagaagagatatggcagaatatcacctagcagcataattagactcttatggttttgacgttgttgttgattaggtgtactacttatgaagattcaacgtattttgccaactatgtaaataaatgtgtattttgccaactaaatctgtgtaaataaataaatatgggatgaatatgaacacttcagttgacggtct

SEQ ID NO: 13606 - DNA, 1788 bp, Oryza sativa
  ref <308>: DATABASE ACCESSION NUMBER: AK110954
  ref <309>: DATABASE ENTRY DATE: 2001-12-06
cgccggccgcggcgcgccgccgttctgacgctccacggccacatgaactgccgccacctcgccctccggctccgccacctccgccgccttctcgcggtcgcacccctttcctcgctcgcggccgcgcactccgctaaccgctcctccccacggctaaaccccacttcggtgccgccaccgccgcggcagctgcatctcccgaccctccaggctcgacggctctgctccaccacgcacgtcgtcctccccacaaacctccaggacgagcggttcgcggctctctcggataggatctacgacgccgtgattgagaccgcggcgggttccagcgagggcacggaggcggcccttgacgcgctgggcgccgagctgaccaccccgctcgtcgccgacgtgctgcatcgcctccgttacgacgagaagctggccttccggttcttcgtctgggcgtctcaccaggacggctacgagcacgaggccgcgacgtacaacgacgtcatcgacatcctctccggcacgcggtacaaggcccgccagttcggcgtcctctgcgacgtgctcgaccacatgaagcgccgccgcacaaggtccgtgccggtcgacgacttgctgggtatcctgcgcgcatacacggagaagcacctcacgcatctcaggaagctggctaagaagcggcgggtgcggatgcgcacgccgccggagaccgacgctctgaacgtgctgctggacgccttctgcaagtgcgggatggtccgggaggcggaggtggtgttcagccgcgtgaagaggaagctgctggggaatgccgagacatacagtatcctgttcttcgggtggtgccgggcaagggaccccaagagggccatgaaggtgctcgaggaaatgattcagatgaagcacacccctgagaacttcacttacaatgctgccattgactcattttgcagtgctggtttggtctcagaggcaagggatttgtttgagttcatgagaacagaggggtctacaatttcatcgcccacggctaagacatactcgattatgattgcggcgctagcaaaggctggtcagatggaggagtgctttgaactgatttcagaaatgagaaagtgcggctgtatgcctgatgtgtcgacatataaagacttgattgaaggcatgttgttggtggataaactggatgctgcttattgtgttttagatgagatggcaaaggctggctttccccctgacattgtcacttacaattgctttctgaaggtgctttgtggtcttcaaaaggctgatgacgcgcttgaactctgtgaaaggatgatagaggcgcattgtgagcctagtgttcatacatataatatgctgatggtgatgttctttgagatgagagagccagatagggcaatcaatatttggatcgagatggacaagagaggatgccatcgcgctgttgatacctacgaaacaatgattgatgggctgtttgattctggaagaacggaagatgcgaccgctcttctagatgaggtaataaaccgtggcatgaaactttcgtacaagaagtttgatgctatcatgttgcggctatcagctgtaggcaaccttggcgcgatacatcggttgtcagagcatatgaggagattttacaatgttgcaatgtctaggcgttttgcaatcacacagaagaagaagagcataggtctgagaaggaaatgaatatttcgagatttcttgttagtgcagatgatcaggagtttatatgaggttagctaattattggtttattattgcagc

SEQ ID NO: 13607 - DNA, 1390 bp, Oryza sativa
  ref <308>: DATABASE ACCESSION NUMBER: AK110955
  ref <309>: DATABASE ENTRY DATE: 2001-12-06
gcgacgtggcccacctcgccgccgccgccaccgccccctcgccagcggcggcggaggcgtgggacgggcggttccggctgcacaagccgcgggggcagcacctgctcaccaacccgcgcgtcctcgacgccatcgtccgccgcgccgcgctgcgcccgggcgacgccgtccttgaggtcggcccgggcaccggcaacctcaccgtccgcctcctcgagtcccccgccgcccgcgtgtccgccgtcgagatcgatccgcgcatggtcgacgccgtcaccgcccgcgtcgacgccctcggcctcgcgcacaagctcacggtgatcagggcggatgccgtggaggccgagttcccggagttcgacgtgtgcgtggccaacatcccctacgggatctcctcgccgctcatcgcgaagctgctgttcggcccctaccggttccgcgcggcgacgctgctgctgcagaaggagttcgcgcggcggctcgtggccgcgccgggggactcggagtacaaccgcctggcggcgaacgtgcggatggtcgccgacgcgaggctgctcatggacgtgagcaagagggacttcgtgcccatgcccaaggtggactcctccctcgtcgagatccggccgagggcggccgagcccaacgtcgacctcgccgagtggctggccttcacgcggtcgtgcttcggccagaagaacaagaccctcggcgcgatcttcaagcagaagaggaaggtcttggagctcttcaggagatcccggtgcgcggaggaacgctgcgacggcaatgccaatgccggtggcggcagcagactcatcgcacttggcggtggcgacgacgacggtgacatgagcgacggcgacagcaatgaaggccacgacggagcacccagcttcagtgaggaagaggtcgccgtgttcaaggcgaagatcaccggtgcgttggagtcctgtgagctcgccggcaagaggccctccaagctgtcgaacgacgagctcctgcgtttgctcaagttgctcaatgaacaaggggtacggtttcagtagcacttatatccgatcattgctcgccgtttttctacctcagcgagcagtagagccaagaacaagaagatgaaggttggcatgttgcagctgaggtcaggtctcctgccatccatggcggccggttgccacatcaatacatcatgttcatgtcagccgtcactggcagctcgtcagccacaggacgccagattacttcaagtatgctcgtcaaccggtcgatagatgtgttcggagatgtggagaaaatgcttcaagtctcaagcattacatgcatgcaactgtaaaagcagtgtgctactgagagagacatcttggatgctagaggagcattatccatggtttcc

SEQ ID NO: 13608 - DNA, 1990 bp, Oryza sativa
  ref <308>: DATABASE ACCESSION NUMBER: AK110956
  ref <309>: DATABASE ENTRY DATE: 2001-12-06
tcggcacctgcaaagtacggcctcgacgttgcaatggcggtggcgttcgcgccatcgacatggacggcgaggtccctgcctgttccctccagtccgagcacggacagcttctcgatgaggagccccttctgcaagctgtagctgcctagctccacctccgacctcaccgtcaccgccttgccgcgcaccgtcgcgtagaagcggacgtacgtcgcctgcccctccgcgagcaccatctccggccgctcgtcgtcgtcgacgtacacggcgccctcggcctccgcctcggtggcgccgaacgggaacgcgaccaccagcgtgaacggcgtcgcgcgggcctccttggagatcgtcccgccgcgctgcatcgggaggatcgtgttctggaacacgtgcacgttgatctcgttgagcggcgcgtccagcttcacggcgccctcgcccctggacaccaccaccttggtcgtgtcgaacaggttgtaccagctccccggcgggaacatggcgctcaccgaggtggcgccctgctcgagcaccggcgacaccatgacgctcgcgccgaacaggtactgcgtgctcagcccgtagcacggcgtgaagtccgggaacgagaagaacaccggccgcgccaccggagcgccggtgagatgcgcctggtagttgagcgtgtacaggtaagggagcagcctgtaccgcatgccgagcgcgttccgagccgacttggccacggactcccacacatacagctcctgcctcggcgacgcgaagttggcatggtccctggagaacgggtagaacgcgccgagctcgatccaccggttgcagagctcctccgtcggctgcgggtagaacccgcagatgtcggcgccgaccatcggcatgccgaagatgccgaagttgagcatggtggagatggagtagcggagattctcccaggtgcccttgttgtcgccggtccagtgcgcggcgtaggcgcccgacccgacgaacgtagagcgcgtcaggatgaacggccgcttgccctggagcccctgcagcgcctggtgcgtcgcgatggcctgcgagaatccatacaggctgtgcgcattgtactccaggatgccattgtagtgcgtcgcgctggtggcgatggtgttgaagccgagccgcgccgtctggccggaggcgttgatcttgtacggcggctcgtcccacctggtgttcgtcaggttcttgcagtccaagcagcacacccatggcgtcgtcgtgttgggcagagggcacaggtgcgtcgtcgggatctcgcatttcccggtgcagaagttggatgcctcgttcatgtcgatccagaggccatccacgggcacaaggtcatgaaacctcctcacctcgtcgatccaccacgagacgccattggggttgaggaagtccgggaagtagacggggccgggccacacctgcgccaggtatggcttcccgtccagcttgatgaagacgtcgccctgcatgccgcgctggtacacgccataggtgttgttcacggcgatgccggggtcgatgaggacaatgtacttcatgccctgtgcatggatcttgtcaaggaattccagcagcttgggacgcgggtagttcacgggatcaagggtgaaatccttcgcggcgtccatgtgatcgtcgtcgttccagatcacgtcgagggggatttgcgcgttccggtagccctccacgacgccctcgaccactgacaagttcttgtatccccatctgcattggtggaaccctgagaacaagcatgtgagaagaacattagagagtcgcatcgttatctgaaacgaattatttggtatttgcatatttgttttgcagtacaatttagagcaccgactctgcatttttttttgttggttaattactgtcttgatctgatcctgtgcagcgggagccatattttatcgatgtgctgacagttaaagttagtacttatgatctgcatctggcaatatgtgcatct

SEQ ID NO: 13609 - DNA, 1591 bp, Oryza sativa
  ref <308>: DATABASE ACCESSION NUMBER: AK110957
  ref <309>: DATABASE ENTRY DATE: 2001-12-06
atcacactagcttgacacgccctcaatttctcacaccagaagcaaagcaatcatgtcactccttgcattaccactcctagccttcttgtccatattcttgactcctacaacggcagtgagcagctcaacgctgcagctggcacgttctcactcggtgacgcccaatgccggggcgccgctcagcgcgtgggccgcgtccgtagccgcccagtcggcggcggacacggcgcgcatcgtcagcatgctcacgtcgggggcggggcctctgacgaccagagccaagcccaaacccaagaacagggcaaacccacccgtgccgatcgcgccggggcgtcagatcctcagcatcccgaactacatcgcccgcgcgggcctcggcacgccggcgcagacgctcctcgtggccatcgaccccagcaacgacgcggcgtgggtgccatgcagcgcctgcgccggctgcgccgcctcgtcgccgtccttctccccgacgcagtcgtccacgtaccgcaccgtgccctgcggctcgccgcagtgcgcgcaggtgcccagcccgtcctgccccgcgggcgtcggctcctcctgcgggttcaacctcacctacgcggcgtccacgttccaggccgtgctcgggcaggactcgctggccctcgagaacaacgtcgtcgtgtcgtacaccttcgggtgcctccgtgtcgtcagcggcaactccgtgccgccgcaggggctcatcggcttcggccgcgggccgctctccttcttgtcgcagaccaaggacacgtacggctccgtgttctcctactgcctcccgaactacaggtcgtctaacttctccggcacactaaagctcggccccatcgggcaacccaagaggatcaagacgacgccgttgctctacaaccctcatcgcccttcactctactacgtcaacatgatcgggatccgcgtcggcagcaaggtcgtgcaagtcccgcaatccgcgctcgcgttcaacccggtcacgggcagcggcaccatcatcgacgccgggacaatgttcacgcggcttgccgccccggtgtacgccgccgtgcgcgacgcgttccggggcagggtgcgcacgccggtggcgccgccgctgggcgggttcgacacgtgctacaacgtgaccgtctcggtgcctaccgtcacgttcatgttcgccggggcggtcgccgtgacgctgccggaggagaacgtgatgatccacagctcgtcgggcggcgtcgcgtgcctggcgatggccgcggggccctcggacggcgtgaacgcggcgctcaatgtgctggccagcatgcagcagcagaaccaacgcgtgctgttcgacgtcgccaacggccgcgtcggcttctcccgtgagctttgcacggcctgatcgatcactgtgcgaattgcgtaattgtattgtacgtacgtactagcttggccgtcaggcgttcgacttttggcttaccattcatgagctcatgccacagttcatctagtatgttatttttaaacgctgagttagtaaataaggattgtaataggtgatttcgtgtgggttaaatcaattatgtagcatatgtgatactgt

SEQ ID NO: 13610 - DNA, 704 bp, Oryza sativa
  ref <308>: DATABASE ACCESSION NUMBER: AK110958
  ref <309>: DATABASE ENTRY DATE: 2001-12-06
atatccattgacaaatttctcaaaaaatactctctactacttaatccgtaggtgaggaatgcgcgatcccatcgcgctcctcctccggatcgcgacccgcagttagcgagaaaataacggcgccccccaatccccggttgttgcgtccccttcctccgcatccaacctcgcgccgcccccacatcgccgcgccccatcctcctcgccgcaccatgcctccactgccggcgcccccttcctccgcattcaacctcgcgcgctccccatctcgtgcgcactcccagagattaaaggagtgtaggaggatctgataaaaagtggagctattttcattgcgacgaagttggtcagctccaattatttatctttctatatctctctattttttttacaaagttaggaaggagaaggatgcactgcagtatcagttatcgtatgatgtaactctctgtttgtactgctatgcttatttagtacttcctccgtttcacgatgcaaggctttctagcattgcttatattcatttagatgataatgaatctaaacatataaatgtgttatattaacatctgggcaatgttagaaagtcttatattatgaaacggagggagtagtaacatttatcagatatcgtctctatttagttctgccttctcaatctaaaataataagatacgctattaatatctaggctgaatttgatc

SEQ ID NO: 13611 - DNA, 1334 bp, Oryza sativa
  ref <308>: DATABASE ACCESSION NUMBER: AK110959
  ref <309>: DATABASE ENTRY DATE: 2001-12-06
tcttttgttcttgagagaagttcagttgtttccaacgaaagtcaacgctttgctcctctctcaaggcctcgatacaggattttttgtttgaaaaggaggattttcggtattgattccaagtcaatggtactagttttgctcaagtaaacaaaagcacaaaacacacatacatgtcgagttctaacatgttgctagtggatgaaaaacgcctcagcttttacagttagtgtcatgaagatctgctagatttttttcttatgtcctgatgcacttgtttcctgtcaaatttctatgaaaatcacgcagaattcatacgattttagacagccccaacattacacacacaaacacaaatgcatataccatgctcaatgtcctgcttgaatctcttgtattcctacaaaacaatacacatccaatttctctttacaatttacaaatcactttactgatcattctgaaagatgatcagttgagaaatttgaggtagtccttgaggtccgtggggaagcaagggtactactgcctccagaacgcgccgtgcgctcgcagcatcttcaccgccttgtccttggtcgacggcgagctctccacctgcatcagcgccagcagcttcgccacggcgccgcccaccaccatgtcctccagcaccctctcggcgggggtgggggcgcacgccaccagccacagcacgttgacggccagcctcgtggcgagcccggacacccggagcacggcgcgcgccacggcggccaccgccagcccgtgctaggcgaaggccagccgcccctcggggcacttacacaggcgcttcaggaggaggagcgaccgctcggcgacgtggcggttggcgtcgaggaggagcacgtcgtcttgccgtacctgaagaaccaccgctccatgctgcggcggtcgtaggtgacgccggtggccaccgtgacggggtcctccattagctccatcgagatggggcactggaacaggggaggaggctccatggccgtcgtcctggtcgcccggcggccgccgccctcctcctcccaccaccgcgctcgcctccggccccgtgccgccctgcctcgagtgagagagaggagggcaggaggcgagaaaacaggggaaggagagaggtgatggcgtggacagtccgacaggtgggccccacgtgggtcccacgctgactcagccgccacatcagagaaaactgggttcaaaaccattaaaggacataaaataaacggttttgtaagttgagggatgtcgtatatctggttttacggttggaggacgattttgtatttcgatgacaaattgagggacctttggtgtacttt

SEQ ID NO: 13612 - DNA, 1399 bp, Oryza sativa
  ref <308>: DATABASE ACCESSION NUMBER: AK110960
  ref <309>: DATABASE ENTRY DATE: 2001-12-06
tttgctgggcaattttgcagtgaactatgatgtttgccttatgacaaggatacagaagatgtcactggactatcatttcaaagtagagcaggaatcaggctcatctatgcattcattctttggcttcaacggtactgctgctgtgtggcgggtatcagctactattaacgaagcaggaggttggaaggatcacacaactgtggaagacatggacttggctgtacgcctgtacgggcaagcctcaagggatggcaattcctgtatgttggtgatataagggttaagagtgaactcccaagtaccttcaaagcctaccgacatcggcagcatagatggacttgtggtactgccaacctcttcagaaaaatgcaacggaaattgccaaaaacaagggcgtatctgtatggaaaaaacttcatctactctacagctttttcttcgtaaggagggtcgtcgctcccatcctgaccttcctgttctaccgtgttgtgattccgctgtctgtcatggtccctgaaatcagcattcctgtctgggggatggtctgcattcccactgccattaccatcatgaacgccatcagaaatcctgggtctctccatctgatgcctttttagattctatttgagaatgtcatggccatgcaccgaatgcgtgcagctctaacaggcttgctcgagaccatgaatgtcaatcagtgggtggttactgagaaggttggtgatcatgtaaaggacaagcttgaagtccctcttcttgaaccattgaagccaacagactgcgtcgagaggatttacattcctgagctcgtggtcgcgttctacctcctgaaatggtcctttttgaagcgccaaagtggctggcgctgtcaccgtggcgggggcggcgctgaggtggcatggggagcacgctagagtggctggatccgcacgccgtggtccttcccactcgtacctggttgcttcagaagacagaggccgccggatccgcgcgcctctgtcgctcccgaggacggggggcggtggatttgtgcgccgccatccttgcccctacactttaccctttccgacagcatgggggtatggaggtggagcggtggtgacacaaggatgtgcaacggagagtggggggaggacggacgacatcggcggcggtgggtggagggcggatggcagcgggggagcacgggcgcgagtggagtggcggccgcatgggctagggtttggggtagatgtggttgttttttcgaaacagtcccttccttttttatgtttacaacgctatccctagaagtggaattttctcttcttcgtattgtatttctgtgaaataggagggcttttccggaagaaacgcaacgggtgttaaccggtccaaggacgtatgagatatttcatac

SEQ ID NO: 13613 - DNA, 1652 bp, Oryza sativa
  ref <308>: DATABASE ACCESSION NUMBER: AK110961
  ref <309>: DATABASE ENTRY DATE: 2001-12-06
gctgttataagctcactcctaccccgtcctcatccaaaatcaacccctcattcgcttccccttttcccagagttcttgctccatctcagagaaacaaaatcgcgccgccgccgggtgtcgaacacctggtgggcgggggttgcgccgccgccgcagggcctctcggccggtatgggtggcggggtgtgttgaggaggtgtccgcgttgctgttgctgctgttggagggagccgggagccgctacgcgagggacgacaagcgtcgaacacctgcgaccgtcaccgaccgccgtctgcccctgtttcgaccgcaccgtgccacgcgccgtcgaacttcgccgttccgtcactccgtgattccgagggaattgttgagtcgattgaggagcagggacagcaagactgcgatcaagatttgatagaaaagtacttgcggcagtatatacctgtgcttgagttgaacgaccaagagaggagctggtgcgactcgacaaggtctccggtggccgccgagaaccccacggccgcgtcctgcggcaagccggcggctctcaggtccaccgccgcctcgacgctgtagctcatcccgtcgagcgtgcggagggtgaccgccatcctcgctgcggcggcgtcgtaactgttgagttgtgatccaaatttatttgcacacgtgtaaagattaacttcggacgaagcgaagcggagacccgtcgccggaggcttgggccggagcgaagcgtaggctgaagtggattgggtcgtttcctaacagtacctgacctcggcccgcatgacgccggcgaggaggctcaacgtcggcatcgcggtggtgttcttggacgtgacggtgttgacgtcgatgccgacgtgatcgacggtgccctcggggtcccacatcgggttgctgaaggtgtcgaactcgacgccgacggtccgcggcgagccgtaggggccgaagtagttgttggacagaagcccgaagaacgcgccgtccgagtgcggcggcaggttgtcgcggggaagcccgacgaagaaggccatgccgtccgccggctggttcgtggagttgcggccgatggcgaaggagaaggcggtggtgaagctggtggtggtcgtcctcccgccgccgacgtcgtcgtcccagagccgcacgagctgccggtgcgccacgcgcccggctctccagacgcccaggttcgtgaggttgatccggtcgccggcgtgggccgcgtctcccatgaacaccaagttcttcgcggcgtccgcggagaaatcgtagtcaaaggagagcgccgcggcgcgtagggtggtggtgcagcagaagaggagaaggaggtgtagctgtgagcttcggtgattgccggccatggccatagccgatcggagccgagctgccgtggcgttggcttgctttgcggctttgctgctgttattatcatgggaagaatttcccgcgtcttgggggaaaaagaatttgtggcaaatggaattacaccagcctgtacgtgtcgtatagcgattgactaatgggacgattgacaaatagaatttcgttgtgccgtcctggtcacggtcacgcatatatattgttacatattggtacaatgacgtgttgtcatttttgttcgttattataactacactcgttttatc

SEQ ID NO: 13614 - DNA, 1601 bp, Oryza sativa
  ref <308>: DATABASE ACCESSION NUMBER: AK110962
  ref <309>: DATABASE ENTRY DATE: 2001-12-06
agaagcccagcgccgccgccgccgccaacgcgccctcgcgaccgccgccgccaccgcgcgtcgccaagagtctgccccgtgagcagcccggaggtcggggcagcggccgcggtgccgagggttcggcctctgcctccccggtggcggtgggtgaccgggagggaaagaagacctccacggcaactcagggcggcggccatgcctcctcgtcgccgcggcgcctcggcgagaagctggcccgcgaccaccccggaggcggaggccgcggcgccgagggattggcctctgctgccttcccggtggtcgaccggaagggaaagaggaaggtgtgcgcggcaagcgagggtgccgccagctcgtcctcgccgcccttcgagaggctgagcggtgaggagctaggagcaggagcaggagggcgcggcaccgaggcatcgacctccgcctctgctgcggcggtggtggatcaggacgagagagaagtccgcgagtggccaagatttgctcttctcagcaattcacaccttctagagattggtgcaagatgtgagggacacaaggatcttagtgctgatgctcaagaaagcacctatactgtagtgagctctgtggttcgtaacttctccgcggacttcagttggtggtccataatgggtaatcccatgaaacaaacaataccaaatacctgcaccattttagcatgtgctgtatgcattgaagcgctacatcgtttggagtgggagcggctgcacggtcctggtaccttcctgtgccgggctgcagctcctcgcaagctccgcagggcctgcatacgggatgatattttgcacccagaggagggagtcgaatcaaagaaaatggttcttttactgaaaaagataaagggcatgggtggtattcgcacaaccaatgctccaccaccagccccctttctcctcccgctcaaatcgtggcggatgtaccgccaaaaaggtagtctcacacgagagcgcgctgtgcacctcctgcgcacgggtggcccttacattggaatcattcgggtgtccctcctataccactttattgatgcctcagttaatgatgaactagtctataggtgggtaccccctgagttgagaactgctgcagacgtctggctgattgacgctcttgttgcgggaagggccacggacaatgatatctgtgatttgatcagtgagacaaatggtaaccacgttattgtctgttatggttacagacatcgtggaggggagctacagattcttatattggataaccatgcgcagactgggccaagtaggtggatcggatttgaggagcggagaaagtgtgtgtactgagggtagatcctctccctctggatctggatcaacttaatcctttgccagtgtatcctattagtggttgttaggcagataaataagtagtttgtatgataaaaaagtcctttgccagtgtatcctattagtggttgttaggcggatacataagtagtttgtatgataaaaaagttgtgtttcagttgatttttgaacctctatggagcctactaaatttgtcacacttcaccttaccaaatagtagtacaaagtttgccacacttc

SEQ ID NO: 13615 - DNA, 1347 bp, Oryza sativa
  ref <308>: DATABASE ACCESSION NUMBER: AK110963
  ref <309>: DATABASE ENTRY DATE: 2001-12-06
aaaaaatccatttgcaaggccccccgcgtcgctccctggggcaggggtgacacgggcggtgactcctgccgccgcgccactacccccgcctctgcctcgccgccgcccgagcgggccgccggaaaccacgcggccgtaagaacggcggcagcgggggcttccttttcctgcgagatcgcagggtcggagcccatgaccccgaccaacttcgaggcgatgacagctgcagcgacgctgggatggagctggcgctcgaaggcctggccgctggcgtcgaagaggaacgcgacagcgttgacggcgaggtaggccagggcgacaatggcaaggtgtcactgccggatctggcgtccgctaccagatccggcctcctcggagtgagacacgcccatgagccgccgctgaggtgtggctgcgtggatagggaagcacggacgtggaggcggtgtagctgccatatccagccctctcccatctggatccggcctccccggtgcgggagggcgacccccaagccgccgacggtggtgtgcggttgcgtggaggcagcgacgcggacgtggaggtggcagggcgaggcaggaagggtgtgattgcacgccgtcgagggaggaaggtggtggggatgggaggaaatggggcgccaactagaagcgcccggtggcggtggtaggccggagcggcgtcgtgagaggttgatacgggcaggcctgcgcgggtggcgccggtggcagcggaagctggcatggacgacgtcaggaggtcggcgcaagcaatagcagggaggccggcccagccaggcgtgggtggtcaatgcggcaacgacgggaggctggtgatggtggtgtgtgccacaaggcattccgaggcgctgcttgggtgcctatacagtgcccaggcggttcttcgtgacctctacggacggctgcgtcagtgtcatcgtcgcttttctccctggagacgtcatctaggtggccttcctgccaaaacctctctcggacaacttgcatgtgctcactctagatgtttgtattcttgcggcagcgccctagtcaatacaggctgaccatgtcagtgggccttgtgggaaagtggttccatccttctttctcaccctttcccctccaatccatttgacgtggatagagttgagtgcagtgcccgctgttaggttttggttttgggtggttagatggtagcttctttgttagtctagtggtggccaatcacgcttagcgacggccgattcaatgttagccttctcctggattctgtataggcactgcgggtgcgtggtggtgttggtttttttcttggctggctactgcctctcaaggtcttagcttt

SEQ ID NO: 13616 - DNA, 1448 bp, Oryza sativa
  ref <308>: DATABASE ACCESSION NUMBER: AK110964
  ref <309>: DATABASE ENTRY DATE: 2001-12-06
atcgcttctccccttccatctcctcttctccccgatctcgctgcttccaatctcagatcaactcaaagctttccaaacgaatcctctgtttccttccagaaacatcgacttcttgggaggtttctgatcgatggaggagcagccgatcaagaacgccgtccacatcggggagacaccggtcaccggcgactgggcttgccctgacggcgggaacacggaggtcgccgcgtttcttgacaaggcgggggcggaggcggaggcggaggcggaggcggaggcggagtcttccgggagccatccgcttggcgagatcgccgggagcgcggggcacctgctgctgctgaagctgtggcagcgggaggagtcccgcctcggccgccgcgcgtgcgcgctcgaggcgctcatggacgcggcgcgccgcgacgcgttctacctctgcgcggccttcctcgccttccacggcctctccctcgcgctcctcttcgccgcctccgtgtctgcgtccgcgtccgccgcggtggtctcgccgcccgcggagcagcgcgccgcctgttgcagccttgcaggaggtggtgggtgccgtcgtccctgtcgctggtcgcgtccctcgcgctctcggcggccgtgcagctccgggtctgcgccgggagtgcgcacggcgacacgcgcgctggcgcggtgcgtgcaggagctccggatgaagggcgcggcgttcggcctgtccaaggagccgcagtacgggggtgacgagggccaagtgcgccagcgtcgagggcgccggtgcgtggggcccgctctggtggtgctaccagaacatcgtcgccgccgccaccatgtgctccgacaagttcatcttgtgctcgtaggccggaggctaagagttgaaatggcattgccatctgcttcaagcgaatccgatttcatgcatgtttcaaagaagacaaggtgctctccaaggttgaacaagggctcagcttcaccccgacttgacaaatctaacactgctcattccaacaagaagacatgtgcaataaaacccactgtacatcgcaatggtcctatgggaaaatcaaaatgcgcttgcaaaaaagagttgaaactagacaatgaaaatgcggactacatgaaagaatatcgtagggagctatgcaaaaggttgctgtaccattgcttcaacgacttacatccaaaacgtcgtttctaagcttcagaaccaatatgctcatttggttcaagcagtgttggatgtgtgcttagtccatttttgtagccccctccctccctctgccccaaccaacatatgtaacaagtcaagtttcagaactgtgtatgtggctactgtttttgtcttaaactggaaggttgtgaagggcacaacaatcaaatgacatgaactgtgtatgtggctactgttttcatgtacatatatgttggtaaagaagtgaatt

SEQ ID NO: 13617 - DNA, 1932 bp, Oryza sativa
  ref <308>: DATABASE ACCESSION NUMBER: AK110965
  ref <309>: DATABASE ENTRY DATE: 2001-12-06
actttgccttctccatttggaccagagcaagggcttcctcttcagcattcctgagttcttggtacttcttggactcttccatcttcatctggtgcatctgagcagcctgctgatttgatcattattcactattgtttcaaaatatttcagataatagttgaaatttacagcgacatagaagtgggcagaccttctgtttagcatcaattgcttccttgcatgcggagttgtacatttccattgtctgcttcagctctagtctcagccgtctcatttccgtttcgacatccttctgaatttcaaacgacacaaaaataagagttgatcaaagtccaatactctaaaagattccagatcaccaagattttgatcaactgcagcaaaactgatgttgccggtgtgcttgcttaccccagctgagcttaggctttcgatggacattgatgcggaaagcgaaagctccaaagaatcgccgaagtccatcgatggcaactccaagctcaaaggaaaatcaacatcatctgaaaaggagctacgggttaccgagggccttggaggagctatgaagtcgatatagtcgtcgaaatcctttgggggtgctgatctagctccagagagaggcctttccctggttggagcttttgcaaagccagatagtcggtccaccgatggtctgtttgcctttggagatgattgattggaaatcttcttccagtctcctcttgatctgttcagcaaacccggaacatgatttcgtattatgttagcaagttcagaaggtaaaccgagtgacatgactgataaacatatctatatctacttatttgcatacaggtgtttagattttagaatctgattacttcaaaccattttgcaatgtaattattgagtgaagcgattattccttatcgacaaacttacctcggatatccatcagattctatgcttgactgtgagtactgtttgggagggagagtggtaaagggtgctggggctttggctgccttgacttggattgccttccctttgtggatgacatgcactgtgcagtaatcaggcaccatcttcatcaagcatgttggcacatcaggatttctgaactttctgcaggacacgaggttcatgactgtgttcagttattacaggttatcaagggattggggaatggtgcacagcacagccatggaggaatgaacagtcatgcacctgatgaatgtgttcctcgtcgacgccccgacgacgatgtcggtgatggcgttgctagtggcatactcgactattgctttggagatgtcactgccatccaagatcacttccttcaattgcatctgcagtttgcaatctttggttcatgcagattcatggagcattaccattttgctgtggcttgacatggacgagctggagaacgctgcccctggcgaggagccggtccaccgcccacttgaccgcctgctggctgttcttgtcccggtcgacggcgaccaccgtggagctgtccctggcctcgctgtccccgccgccgtgcgaagacgccgaggaggagaaggccgacaggtacatgctccccgcacctcgccggcaaaaagatcgtcggagtcggagaaggagaggaagagacaaaaaaaaaaaaaggattcttttgcttctcctcctctccctcttcttccctcttcttccctctcctccggttttttgatcaagccaaccaaaaactgcaggaggtttcgctgtttttttttcttcattttttttggggccaaatttaggtgctgcagcgttgttaatggccgttggcttacttatgtttttgtggctcttgtgtccccacttgtcattgactgcaggtgttgctctctgatctatttttgcatgtccttgtgtgcatcctagttgaaacacggatgatatatacagtcttgcatttttttt

SEQ ID NO: 13618 - DNA, 2040 bp, Oryza sativa
  ref <308>: DATABASE ACCESSION NUMBER: AK110966
  ref <309>: DATABASE ENTRY DATE: 2001-12-06
gcggaagacattgtcaggtggggaatcgtattcttgtagtactgaagactgaagtcgcagcaggttttggtttggtcttttttgtgaacagccatgtcgtcgtcgatggcgtcggcggcgccggagccgccgttccggccgagggagaagctggtggagaagcagaggtacttccagagcgtgcacaagccgacgtacctgaaggggcgctacgacgccatcgcctccgtcgccatcccgctcgccctcgccgcctccagcgtgttcctcgtcgtaagtcatgaatcaaagcctgaaactcgagacgcgtttcttcccaaacctgaaacttcgggtgtgtttagttcacgctaaaattggaagtttggttgaaattgaaacgatgtgatgaaaaagttgaaagtttatttttttttgaaggactcgcacaagacggtgcgaagttctattgatagagcaggaaaaaaattacaagattacaaccctggaggatcgtaaccaggaaaaaagaaaaaatataccaccacccacacaccgacagcgccaacacacaagcccgggagaaggctagcaccggaccggccgccgctaagcgtgaccgaccgccgctagaccaacaatccaccaccactcaacctctgccgccatgtgggatcactgcaccagcgccccaccgccggccagcctttatgcgccaaaaaccgcccacatccaccggcagctcttccctcgcgccgaggtcgcctcctccaccgccggccgcgcctctcgcgccaagccggcctcctccaccggacgcgcccctcgcgccaatccggcttccctccatcggccgcgcctctcgcgccaaaccggcctccatctccgccgctcgcgcctctcgcgccgagccggcctctgctgccatcggctgcgtctctctgtgccaagccggcctccgacccctcctctaaacactgtgcgccgccggatgcggctgtctgccatgcccccgctagccgtccgagattgccatgcctccccataccgtggtgacggtcgccaccaccacagccactgctgcccttccatccccgccgccatctcaccatcctctcgtcctttctcgccgtcgtcgagctccaatggcacacggcgcagaccacccaccgtggtagcccgcgccgccgtcgccgcgagctcgtcaccaccatcgccgcgacaaacagactcctccggcgttggttccgccgccggcgcggccaggttcgccacaccgacgccatcccctcgccacctccgccgccaccacagcagccgctgctacccttccatccccgccgccattttgtcatcctcccgcaccttgtctctatcgtcgagcttcgacgacacacggcgcagacggcccaccgtggtagcccacgccgccgtcactgcgaactcgtcgccaccactgtcgcgaccgccagacctccgggcgctggatccgccgtcggcgcggccaggttcacctcaccgacgccatccccttgccgccctcgccgtcgtcgccatccccgccaccagacgccgccgccggtcgccgtcccgccagatccaggcgcagatctggcggtttcctccgccgccgccgccaacgcctcgacgccgctgccaccaccaccagacaccgccgccgcaccgctcaaccccgccgccggctgctccaccgccagatccggccggcggcacggatctggccagttccgccgccctcgagcaggtccccctcccatgcccgagcgcgaggacaaagccccgccgccgccgtccttgtggccgcgcagctttgccggcagccgctcgagcggtggcgaggcagaggaggaggaaaggggagacgagcgccggtgaggtcgtcgcctcccggtcgcccgtggggggaggggcgacacgagaggaaacaggtcaatattttgttctcgtgttttagttggaagtttatttgtgtatgaaagttttgatgtgatgaaaaagttgaaagtttgaaggcattgacgtgcattgagatttcactcc

SEQ ID NO: 13619 - DNA, 1553 bp, Oryza sativa
  ref <308>: DATABASE ACCESSION NUMBER: AK110967
  ref <309>: DATABASE ENTRY DATE: 2001-12-06
attccctattccattcccttttctcctcctcctcctcctcctcaccgccggcggcgagcggccggccggcgagcagagcagagcagaggagagagccgacctccatctgggctccaatcgaagctgaagcgcctcgtcgtagtttgggcaaaagaagttttgattttttttatttattttgggtgctgaggaagagtgtaattatctgtgaggattgagaagatggatggaggtgggacgccggatggggatccggtgccggacatggacatgctcatgctgtcatcagcgctcgatggcctcgacagctacaccgacctcgtcgtgggttcatcggtagccgacagcatcttctcagctcttacctgtttcccaccatcacaagaacgattgctgcacgtctcgactcctgtgggttctaattctaggcaagatgattctgatgtttccatcactaaggagggtacaacaacaagaagaggtgattgcgccgccggattagcttcaggtgagccggtggccgcgggaattggctctgtcccgaagccgttcgacggcgtcacactgacggagaggatgctcagggcgcttgcgatgctcaaagaggcgtcgggtggcgaagcgatccttgtgcaggtctggatgcctgtgaggaatggggagcagcatgtgctgactacctctgaccagccgttcttgctcgatcagaagcttacgggatacagggaagtctccaggcagttcacattctcggctgaagaaggacccggtctgttccccggattgcccggccgggttttcatgtccggcatgccagagtggacgtcgaatgtgatgtactatcatggctcggagtatttgagggttgattatgctaggcgccacgaggtccgtggatcccttgcgatgccggttttcaactcaagtggtgggtcttgctgtgcagtgttagaagtagtaatgacacgagagaaggataacttttgcttagagatggtcaatgtttcgaatgctctgcagggcacacatgacttgaacacacagcacagaaagaatgactaacatcagatggacaccttacaaacacaatttcagtcaatgcctagggtcagtcgggaagacaagctgagtttcttgtcctttatatcacccacaaacacaagccacccccaatcatccagaactagttggaatttggaaaccgggcaatccatccaatcccaaatatccccaattgaggtaggtgatctagcatgatgtatgctcaactgaccatgaactttgctagcacacattttcaaaatgtttctcaggacactcaccgaacttgcaattctgggaactcttctaacatgagttatctttagtcaaaatatttctgcacagcagccacgagttttttttttcctctaaggctggttgcttagtctcccagcagatgtaaagaataaagacggccatatacatagcttttgttaatctccttttgtctttctagagcatcagtagatgcatatgtatccacatcttgctttaagtagccgtaatttcac

SEQ ID NO: 13620 - DNA, 1496 bp, Oryza sativa
  ref <308>: DATABASE ACCESSION NUMBER: AK110968
  ref <309>: DATABASE ENTRY DATE: 2001-12-06
tcagtgttgcccccatggactgaattgctttgtagaatttcctatgaacctgaatccatcaaagcactcaagtggcatcactgtccatgcctgaattcagcaatctcaacacacaaaaggaaaggtgttcaaattttgtcttgacattctgacctgcttgtaatcgaaatctgtaactcgcctctccttcagcaaaacaccagccaagaacaccagtgcagaagggatgcttagtaatccaagagcacccttagaacaagaaaagaaaaaaaaagcaagaatcacaatcatatcaattgacattgtgtgagaaaacaaatgatgatgcaaatcattatctaaggtcagggaatatcacacctgagaccctatggagtggacaagaagaccgctgatggagaatccaagcaatgccccaacggaggagctgaacccacacaggctctgcatgtctgcggctagcggctggtgcgtgatgctgttctgagcaaccagcgcgtccaccgtcacgtcggccaccgccgcgcccgcgctctgcgccgtcagcgccaagatcgccggcatgatgcccagcttgcggtggagagagagcgtgagcatggacgacgccccaatcactcctgaatgaatcaccgagagaagtgatcaagaaaggcgaaagccttcgaactgcgagatgggatcgaggaggcggaggctgcaatcccctcaccggcaggaggaagtacgggcggcggcggtagccggcgacggggacgacgtcggtgagcaggccctagatgggcttgacgacccagggggcgctgacgaacccctggtagaactgcgccgccgacggctgcacgcgctgcacgtccttccagtagtaccccgccgtgacgccgccgacggcgtcgccgacgccctggcaggccccgtagacggccacgacggcgagcacgaagctccagcgcagctcgcgggacagacgccggagccagccgccggggaaggaggcgccgccgccggcttctcgaagcgccgcgtcgtcgtcctcctcttggcgatccatctgggcagcgatttcttgccgggggtttcttggggatctacggcggaagcccgccggaattcgcacggctagaatgcaggtctcgcgattgctcggtgggagagattgacgaggcgcatcttggcgttggcgagctgagcaagagcaagtgtgcgttgatgggtatctgcgctcaaggttttgacttgacaccccccccacccaccttgcaactattatagtactgtatactcctactaatttaaccatggtaattttgcaccattaatctatgtactagtagtagaaaactgggcaacatgtcaacactaattttgcctttgtgccttttactattgcgcatcacctctttgcactgcgttattactgcgtagctgcttacgacctgatcaaggcccgacaggaattaataagtgaatatgaaataagttcactttcgacattt

SEQ ID NO: 13621 - DNA, 2104 bp, Oryza sativa
  ref <308>: DATABASE ACCESSION NUMBER: AK110969
  ref <309>: DATABASE ENTRY DATE: 2001-12-06
gatcatgcattcacgccactcacggtgaaccggcggccggccgatcggcggaggatggcggccgcggcgggggactcgtcggagccgaaggcgagcatcggcgcgggcagctgctggtcgccaccatccacctcggtctcggaatcggttttattttcgcccacccatttgccttccactgtttagggaaaagaagagccttgatctcgccatgttgcatttgctttccttcatccagtggttatctgcatgaagtaacttcgatgcttacagaacgagcacttcgtgattgttcgtatggaagctatgttaacacatcaacctgcaattgcgtgcaacagtggtggtcatggaagttgtaaatgcattaatggggtttctctatgaggcctcctggttaaatccttgaaagaatgtctggtaaatgatcataatataacaattttgatgggaggaaataagaacagagcattgtggtgcaggaacaattgctagctcctcagctgctttattcttaacctttaccatcagatggtttgatagcatataatttgacttatcacatacagtatgaaagaattttccaggctagacatcaatttcctgaagttctagacatagctagagagtcagcaacaacaacaatcattacaattcagtcagttcagctattgtgagtaaaccaaattgcatggtacttatgggtctgtccatctttcgtactactaggttgtgtctaatccaggattaggttgctatattttgggatagagggagttcgcattaaatctggacttctagattatgaagttccggacgtaacacttatcaactggaatgattaaaatacctagagaactcacttattaatctctatctatcttctgttattctgccatgctgttaggacttaggatggaccaatgtcatctgctattcctgcacctgagctagaatgtcttagaaatgaatatgatactagcttgagttttttttaaaaaaactgtttggtttccttcgtgtcctatctttgttattatgggcatgaatccataacatttcttgagtggctatttctaagtggagttctcttgccgccaatctttttccaatggaaagttgactagctgacagtttattgttctatggtatactattttggtatttataccatgttattttatccaaatcttttcttggatgttccaatgccaaatacttcttatggttttctaattctatatctgggacatccagaatactcataccttgttgtacctgtacggtcttattatgggtagatccctgctatgctatttcacaattaatttgatgttttggcctatcacttcatattattgttcgagacaaaggacaatttgcaaagaaatagttggtgtactattgataaattaatgcaatttatgtttcctccatgtaggttgcataagagcacagttttctgataaaagattttacaaaactgcaaaagttgcaagtcagagactcggagtattactgaactttgctgatcgtaccacaatagatctgctggcttttgcccttcaagacccaagagggctagcttgatgggagactaatcaagtccaagattcctttttcacggatggatggtcccagttgagtggaccttttggtgggaagcggacaaactaaagcagatgctaacaagctgtttcgtcaaagattggttcctacctgtcttccccgcaggttagcagcagaaaacaacggggccgcatttcggcacactgcatccatcaaggaactgttgagtttgacttgccagtagaagagcctacggagttattgcagctgcagctacaactaggcaacaccattctagaccctcttcattactgcacatgcaggactgctcactaacatgtgggaccgatggtcagtggacaatgggacacatattattgttggcttgtaattgtagtaaatgggtagccgaataggccctgtatagaatgatagaataatttttgggagtagattacatgcacgtgaaaatttattaaacttcagtataactatcgttttgttattatatatgggtttagtttaattttgattt

SEQ ID NO: 13622 - DNA, 1502 bp, Oryza sativa
  ref <308>: DATABASE ACCESSION NUMBER: AK110970
  ref <309>: DATABASE ENTRY DATE: 2001-12-06
gagttccaggcccacgaaacccacccaactcgatggaggacggcgatggggacgaaggcgccgccaagcgtaccaagctctccgccgccgccgccgccgccgccgccggcgaggaccgcctcagcgcacttcccgacgacctgctcgtccaagtccttctccggataggaggaaccaccgccgcggcgaggaccagcgtcctctcccgccgctggcgctccctctggtgcctcctcccggagctcgatttcgtccccgaagccgacggcggcagcatccgcgccgccctcgctgcccatgaaccgccttccctacgccacctcctcgtcgccgcccaggacgccgcccctcacggcatggcggaatggctccccgtcgcggcgcgccgcctcgccggggatctgttgctgttcaacatggcgccgaagagagatgccaaggacgacgacgacgaggaggggaaggatggctccccatttcttgagctcccctgcttcggcagcgccaccaagctctctctcgacctagggttccttcccctcgccgtgccggtctccggcgtgttcgcccggctcaccgacctctcactggacagcgtccggttccacggcccgtgcgagttcggtgacgccgcctcgtcgcggcggttcccatccttgaagaatctcaacatccggaacacccagggtttgagcaatttcatcatccactcggattctctcctgcagctggacctgaggagtgtgagaggattgaagcagctcaatgtcgtggcgcctgcactgcaagtgttaagcgtgttcttctgctttgctgatactcaggctaggagtcaaccggtcgccgacatcgcagccccgcagctggagactctccagtgggaagatgcttttgatccaagctccgtcgaatttggcgagatggcgagtctccgatgtctgggaacctacttttttcttgtatatggactagaagactttaagaacaaccgcgattgcttgaggctcttgaagcgctttcggcgtgatgccatctccagacttaccctcacgcttgcctttctgccgaaggacctctgtgactttgaatacttaatggaaaatatgacaatgctccctgacattgtgtcccttaacctcaacgtattggcaaatggacatgccattggccccagcttattccatgttctcaggatgtgcacaagtgtaagaaggttgaagctagtaacacatatttctcttgacctcgaggtaaaagctgaaactattgttagtttgtttatctactacaggcttaccgaggaagtccagaatgcaatttgcattttcattttctgtcacacctaagctcgattcaccattttatttggctagtttccttacgctaggtagtgatttgaattgataatgatatatgtagtaaacatgtggcttatgtatgtcctattggaaaaactttgctctgcaagtttgacaaagtgccatactgctctttcctttttg

SEQ ID NO: 13623 - DNA, 2185 bp, Oryza sativa
  ref <308>: DATABASE ACCESSION NUMBER: AK110971
  ref <309>: DATABASE ENTRY DATE: 2001-12-06
acacaaaccgagctcctcaagctctctctctttctctcccatgtccggccattagtgccaccggccgatctccctccccggagcttcgcaagccaagtccttgcgccaccaactccgcctcgccgaggtgattctatttttcccctttcccctttccctccaccttaagataagccgccaccaccaccttctcttattgccggagctgagctcttgtcgccactgttccggccatccctctctctccctccgccttccaccaccctccccgggtgcgcgtcgctcgggaacaccatctcccaccggcgttctcacctcccggccaccggagagccggtgccttgcttgccctcctctctgttacctctcggctgccaaacagaagaaaaaaaaaagaagaacgagaggaagaagaagaggaaggagaaggcattgacaagtaataataactccctttttcttttatttgtttttcaatctttaagagctcatatctcttcaaccacaaatccaattccaagaattctttgatctaaattcatccaatttcaaatcctttattttgataccaaatttcctatttttaaaattttaattaaaattctttatttaaaaaccttttccttatttatttatttactttctaattctaaattattttaattaacctttaaaaaatatatattttaaatttatttgatttactttatatccctttaattttaaatttcttgtttgaaaaacctttttaaaatttaattttcctttaatttctttaaaagccatttcctttcaaaattcaaatatcttttgaccttttgcttttgcctctcttcatgctccaattttgttattttcttttaccgtttatctgtagtactttcccttataggttttatttgctatcttttacgtatacgtacgttagacaatacagaaaatctcatcaacatcacaggagctgacgtggatccagccgactacgctgaagcctttgaaagtttcaaggctcaaggcaagacacaattaaaattttgaccacatgaaataatcaaccctcatgtttactttatgcataagttaatcatatgaataacattgtggtggcttaaaatgatatttaatacttttaagcattgttatatgagattatggaaaggtatactgaacatcattttatgtggtttattattcaaacatctttacaaacttaggaatccggttaaaatgggtatttttgaatgttatatataatgaagtttgttggtgtggggagtttggaaagttttgggtggtttaactggattataattacccccttataccatgggaaatgacatagttgtgtccatccacataaccaggtaattattggacttagcctagtacattgtcccactatatgaaagactgttgggtggctctatgagcggttggtgtgaacatgcgtaaggagttagggggcagtgtttcataacagtaggtcccgtgaaagtgtgacgatatagtaaccttgctttaggcctggcaagagttcgaccactatgatgagccaagattctactgtgcagtaactagtagtaagtgggaccttcgaacggctctggtgtcctcagccttgcaaagtatttgaaagagcatctatgcccctagtgggttttggtttattgatgacaaatgattaagggactactgcacttattaagtgtctaagcaagtgattagtccgatgaagaagctaggaaatggacttatcgatggatgagaattaaagagaagatattgaagatgcgggtatgaagtgactacctatggcaagacggtgaagcgcaagcgacgctcagttgcgatggaccatacggtggtaaagggcaagcaagggggttggcgccgacgaaccgaaaccggtggtgaagggcgagtgaagactgtgtcgtgatgaaccgtgcgaggccatttgaagccatggattatccacatcaatcatttgagaaatggaagatgaaatgtcaaagatcaagaagatgagatcgtcccgatgatcaaatgaccttgacgttggtaaccctccaagagaaaaaacaatatggtgtgaaggtactcctattggtataactttgcctttcaaatttgagtttaggaggccgtactattaagagagataccacatgcatataattggttg

SEQ ID NO: 13624 - DNA, 1284 bp, Oryza sativa
  ref <308>: DATABASE ACCESSION NUMBER: AK110972
  ref <309>: DATABASE ENTRY DATE: 2001-12-06
acacaaacactcacacgaacgactgacttttgtagccacaccacctcatctctctctctctctctctctctctctctctctctcctctctctctcccctctctctctcaaacatacacacatttcacaagaacctgcgagaaagaagagaagtgtgtgtcgagatgatgatgctccggctcgtcggcgccgaagctaggaggagggcggccaccggagctgccggcggcgagcggtggctgtcggcggcggcggcggcgccgaccaagggaaggctcgaggggaaaattgcaataataaccgggggagcaagcgggctcgggaaggcgacggcccgcgagttcatccgcgagggcgccgccgccgtcttcatcgccgacgtgaactccgacctgggcgccgaggctgccgccgagctcggcccgcgcgcccacttcgtgcgctgcgacgtcgccgacgagggcagcgtggccgccgccgtggacggcgccgtggcgagccacgggcgcctcgacgtgatgttcaacaacgccggcgtggcgggcccgctcgccggcgccacggaggtggcgtcgctggacctggccgcgctcgacgccgtcatagccgtgaacctgcgcgggacgctcgccgggatcaagcacgcggcgcgcgtgatgcgcccgcgcgggtcggggtccatcctgtgcacggcgagcgtcagcggcgtcatgggcgggctcggcacgtacccgtactcggtgtccaagttcgccgtggcgggcgccgtcagggccgccgccgccgagctgtcgcgccacggcgtccgcgtcaactgcgtctcgccgttcgccgtggcgacgccgatggtggtggcgcagttcgcgcagatgctcggcggcgccgacgaggcgcgggtggcagcggtggtgagggggctcggcgagctgaggggcgcggcgtgcgaggcggaggacgtggcgagggcggcggcgtacctcgcctccgacgacgccaagtacgtgtccgggcacaacctggtggtggacggcggcttcaccagctacaagcacctgccgattccccagccgcacgattgagctgatcggacggccacggaagatccgtttggtgtagagatgggggttatgtgaatcctctatcctggaaaggaagtggattcgagtagagagaaaaaggattgtggatttttaggtggtttttttttcttatctggttagtgtgtgggtgaaattctggatgtctgaaatttggttaaaacttaaaagttgagtacgtgcatggg

SEQ ID NO: 13625 - DNA, 1799 bp, Oryza sativa
  ref <308>: DATABASE ACCESSION NUMBER: AK110973
  ref <309>: DATABASE ENTRY DATE: 2001-12-06
cacgcgctgtagagcgccgtcatccccaggcgacgggcgaacggatcccgcgtgcggccgcgctcgcccacaaatttcccaggcaaccacgcgcgctgttctcccgcgctctgctcgcgacttgccccaaatttcttcgcccgcccatctgcgcggccgccatctgctcgccccccatctggtattctcgccggagttggtgcggcgggatgtccacgcccggcgcagcttggagaaggaatggatcgaggacattggatgcggcggcgacggccccaggccgaaccctaggtgtcggggcggcggcggcggctccctcattcggtcggggttcttttggtcacgctgtcgggctaccaccgccgccccgttctcgcggacacggtcgcgggtcagtagcggcagcgacgaccgtcccggctttctccattgatggttctgtcggaggtgacttcaccagctcaattggtccccatgcatcgtctcaaccttggtttgatgcggccggcggtgatccctcatctcctggatcatgggaccaagatgtacgtccacctggtggtttcatgagctattttggaaatgaagcacagaactctcatttggttggtgcagttattcacatgagtcctctgaatcaggcacacaatggtagttcaccgcccgaagtggaaatattacatggcaatgacagtgttagaaccgagaagaggatcatgtggactccggacgaggatgttagagtgatgagcgcttggttagaacattcaaccgactttacctgtggtgcggataagggtggtgtccaatattggggtgaggttgtcgaaacgtacaacaaaactacccctccacttcgaagaagaaatgcgaagcaatgcaaggatagatggaacaagattaataaatggacagacctctttgaatgtgcttacgctaaggctcgtagagtatttacaagtggatattcggctgaaatgtggcttgatgcagcacacaagttctatgtggatgacaacaaagaatgcaaagacgtggttggaccttatatgctgacagaggtttggaaaatttgccgagatgtgccaaagtggaaaacatataatgaaaacctgaagaatgcacgtaaaaggaaagcattccatctggaaggagaatctgaggaaaatgaggacacttgtgatcagatgccacaacgaccaattggtcagaaggcagctaaaaaggcagctctagctgctaaaaatggcaagttaaagggttccagcagtagtgatgatggtcactcaaaggattctcctattgagctagacaaatttgatagatacagtaaattttaggaggcaaacaatgagaagcgtatgaagctattggacaggcaagagaagatagcttctgagaagctagaggccacaaaaattgcccaccttacagcacaagagtacaaagaaggaaagaagcttgataaagagacaaagatgatggagacttataacaacctcgtttcacaggatacaagttcaatgtccgatgaggaaaaggcacagcgagctatgatgatgaagtgtcttatgaaggccctttttcctgaaactgtttgagaaggtatttcttatctgtgtagttctgaaatttagcacttgtagttctgaaatttagcacttgtagtagccatatatgaacctcagccagttctggtatgaagatatgaagtttctgcttatttagtattctgtgacaaacttgttaaattctgaaattctgtgacaaacttgttaaatttagcacttgtagtagcc

SEQ ID NO: 13626 - DNA, 1377 bp, Oryza sativa
  ref <308>: DATABASE ACCESSION NUMBER: AK110974
  ref <309>: DATABASE ENTRY DATE: 2001-12-06
aactactaacaggcagctgccagccatggcttcctccccgccgtttcgtctacctctcgccgttgtgctcctactcgcaataatatgtgtccttttggcttctcctagctgccatgcggacgatctcaccgccaccatgacaaacgagcacgagaaagagcatcagctgatgatgatgatgatggacaggttccataggtggatggcgacgcacaaccggtcgtacgcctccgccgacgagaagctgcggcgattcgaggtataccggagcaacatggagttcatcgaggcgaccaaccggaacggcagcctcaccttcaagctcggtgaaacgccgttcaccgacctcacccacgaggagttcctcgcgacctacaccggcgacgtacgccttccgccggagcggcgggggatgcaagacgactccgacgaggaggatgcagtgattacaaccagtgctgggtacgtcgccggcgccggcgccggcaggcgtacggttgcggtgccggagtccgtggactggagaaaggagggcgcggtgactccggccaagcatcaaggccagtgcgcggcgtgctgggcatttgcagcagtggcagccatagagagcctgcacaagatcaaaggaggagatctgatatctctgtcggagcaagagctggtggactgtgacgatactggagaggccacctgctcaaagggttacagcgacgacgccttcctgtgggtgagcaagaacaagggcatcgccagcgacctcatctacccgtacgtcggccacaaggagagctgcaagaagcagctgctcggcgtgcacaacgccaccgtcagaggcgtcgtcaccttacctgaaaacagggaggacctgatcatggcggcggtggccaggcagccggtggccgtcgtgttcgacgccggtgatcccttgttccaaaactacaggggtaatggtgtctacaagggcggcacgggctgctccaccaacgtgaaccatgccctgaccatcgtcggctacgggacgaaccatcccgacactggggaaaactattggattgccaagaactcgtacggcaatctgtggggcgacaatggcttcgtctacttggccaaggacacagctgaccgcacaggtgtctgcggcctcgccatatggccgacctttcccaccattcggtgaaaccggccacacagacgaaaagttcgttgtactagtttatgtctgtggctcaggctgatcgtatcgatggatcatggtggcaatacttgtagctgcatacatgtatatatgtgtctatttcacccatctatagctccatcgtttttaaattactagaataaataaaagtcatgatgatctctcatcatgtgtgttgtttt

SEQ ID NO: 13627 - DNA, 2011 bp, Oryza sativa
  ref <308>: DATABASE ACCESSION NUMBER: AK110975
  ref <309>: DATABASE ENTRY DATE: 2001-12-06
agtaccaacagccaagcaaagggaggcaaagttgccagcgttggggatcaggcgtacggtttcttcaaggggccatggcggctgcggcgccgagttcggtggtagccggactcgtgtccgggctagggctggcgcgctcctcgttaacgcccagcgacggccgctctccttccctctcgcccctgcatccgccatggcccgcggccccgcggctcgtctgtaggagcagcggagcccggccccccagggagagagccgtggccgccgccgccgccgccgcaaattctccgcggcagcagcagcagctaggagagcatgagcatgaggaggctgtggcagcggcggccatggagccggagaggagcagtccccatgaggtcaccgtcctttctttctccttggtttggcgattgattgattggttggtcccgtgcaggtgagggaggagatagcgaggtgcttcgatctcgtgcgccgcctcggccgtggcgccgtctacctcggctcctccagggtgccgcccacccatccccattacctccatgccgccgagctctcaagggagatagctaggctgctggactgcaccacatggtccggagctggtccaggtttcatggatgctgccacccaaggcgctcttgaggcgggcaaaccggtcggtggcttcaagattggcaaggaggcgggtgaatggacaacctccaattttcatccttacctgccatcagagtcatatctcacctgcaggttcttctctgcaaggaagcatgggttagttgatgccgcggtgcggaactgccctaccgatagaactgccatcattgcattacctggtgggatagggacgctggatgagcttttcgagatgatggcgctaattcaactggagcggatcggttccacgcttccagtcccattcttgctcctcaattatgattcttactactccaaactattggactttctgaatgactgcgaggagtggggaaccgttgctccgggagaagtagcatctctttggaaggtttgcaatgggaatcatgaagctttggagtacctggcacagttctacaatgtacctcttgctgaaagaaattactgcatatcaccacagttgaagcagcaggcaacttcataggccacaagttgacgattcaggatgaacaaagagcagaagatgttgctcctttcctctctggtgatgccagaactcctgaactgacttttgcaactgattgacgggggttcagtgcaaaatgatcaaatgaaaggccaacaaatgattttcttgggccttggttctgttcatggtactccataatgtgcaagccccgttggagacttgcagccagtgaatcagttgggctaagcttgcttgactgtaaagaagaacgaactgcactttttctggacacttcatcaccgggacaatcagatacactaagtttgcttggtgacagccctggtgaggtgcggggaggcactaactgatagaaaagatttcctgtcagacacaaggtcttgatcaacttttgtactggacaacacttcatgctcttcctgaatcgggtcttcacaatcatctattacaggctgatcatcttcctcacttgtttttggattccccttagagcaaggagtgtcatcaccactctctgcatccatgaagtcatcgaaagtgtcttcagatgaggaatgaagctttcttatttggtcacgcagttcttgtacatcctcttcatccacatccatctcttcctctgaatcaacttctatgtgaggcaagattagagagcgattgagactgactcgcaaattatgcaggctttcacgggcattctgtgcactgaaatacccattcttgcagggttcagtgtctccagattttgttcgtatgagctcgtcctgcaagtgatagaacaattagcaagtgtctgtaaattgttgccacttttatctgctgctgaggaaataccttcaactgacgtatttgatcgctcaaaccatt

SEQ ID NO: 13628 - DNA, 1422 bp, Oryza sativa
  ref <308>: DATABASE ACCESSION NUMBER: AK110976
  ref <309>: DATABASE ENTRY DATE: 2001-12-06
cataaaatgtatcttgttctatttgaaaccactgaacacctatcaactgattaactccactggttaggcattttattttttttattccagtgggtacagcccatcgatggcatgtcaaagcaagatgcatttctaaccaaaatgctattgctttgggtcatctcaaagtgagatgcatttctgaagcaaagggaaatcattgttttgaactatccattagcagcacattttctattgaaatgtcattatcagccattactttgttaggcatgttgaatcttggccattctgctattagagtcgcctttcacgatactgattgcttaatttgcagtgtcctcgctgcgaaaaatcttggagaaccagcatacagcaacttcctagaccacacctatctgggtgaccggacaaccacaataagggaatacctggccactaccggagccggcatcatggaagaggagcctccagaatcgctaaaaagccgctatggcgggtagctagcgagctagctagctccacgaagacgactccgtcgactcccacagccaccatggatcgaacttccatccgcttcgctgtcgctcaaatctgacggttggtggtgttcctcacaattctgctaaataatccctgatgcttcagtgcataatactaccaaaattccaatttttcgggccacatagtgttcagactttcagaggaagattgtgattcatgaccctcttcatgggagagttgaatgattgatgtaccacaacaataacagtgactattttgtcaccaccaccaccaccacagaaattctggagccatatgatacatgcagaaaaaaaaaaatgaggacaaaatgcatcttttttttccctgcctttttcttgtggctgctgttgaattgaatctcggacaactttttgacaatgacggtggtgtgaaagccggaggattggatttttcccggtcatccactagcagcagcagagttcatcaccggcaggtcaggtcaatcgtgcaccgtcccaatcatggcggcaaattgcattgttcttctggcatgtaacaatctgcgttttttttttctttttgtggcgcctctcaacgacgacggcgacattgtcgtcggcgtgtgcggtttttgttggctgcgtgcgtgtcagcgtgtgtgttgtttaggacggcggcgagtggaagaagaggcagatcgccgagcagtcgtcgacggcgatgccccggcgcttgcgcctccatgcccggacggcgaactcgacgagccgcttcgccgccttctccctctccggcgccgacgccacgatctgcaccgcctcctcgttcgacaccacgtcccacacctgccgcgcagacgaagacgaacaagttgagatgtttgtcctaaaaaaatggaatgaattttattttgtactc

SEQ ID NO: 13629 - DNA, 1281 bp, Oryza sativa
  ref <308>: DATABASE ACCESSION NUMBER: AK110977
  ref <309>: DATABASE ENTRY DATE: 2001-12-06
ctcctatacctcccctcggcggcgaggcggcggagctccggcgagcctggagcacgtcggggtttcccctcccgcggcctcgccgtatcggatcgccggcgtatggcctacgtctacctaggtattccttccatgcatggcctccgtgctccggctagccgtcccgcccccacggtcgccgccgtgtccccgcgtgctgccggccacctccggggcgcggcggtgcggcgggctcaagctgtaatcagccgaagaggcctcgatatcccttatcccaccacctgcagatagtgatacagtgctccaagtgtgcgctaattctctgaagtctgaacatgcccttggcaaccgatttaacccagtgtcagcgatactctattagttgagttcagatactatgcgaggaattgagagacagccgagcttcaggtgtcccttttggtcgatttgaaattatattaagggacgtagaccaaatcactatgcaaatgaggaacaatgatgttctgaaatctgttttggatatgcaacttctatatttgcaaggtacctgcagcttatgaagcctgaaatcctggcaagtactgaggcacctcaccaatggagataaagatgaaggggatattcaaaggtttgaagataatctctcaaatattcgcactgcagaagcaacaagagatggaaatcgggtgccctacagacgtcaggcatgtgtctcacataggcgtgggcactagtgattcatgcccaagctggatgagtgaattcagaggattggaagagttgtcagcaggctccatgggctcctttgcacagtcaaggaagacatcctgggcatctcaagattttgacaaaccaccaagagccacgctcccaacagaagtctgcacagacaaatccggccaggaggccgcctcctgctgccatgacatcccgagaggccccaagaacccgaggaggaagaaggcagcaagagcatcatccgcgagctccttcttgtcgaggtcaaggtcctcctcgtttgtgacagcgtgcggtgatttcagcgagttgcgtggcggcctccgagtcgcctagtttgaatgacagttcatatagttttctggtgtgtgttttcttcgtgctgttcgatcaggaggagaataaaatcgcctgaaataatcgtatgagcgttgtgatggatgctaagcgtctagattagggacatgtgtaatgtgtccatgactgaacaaactatgcattgtactgctttttttgagttttggctatttctgaagtttg

SEQ ID NO: 13630 - DNA, 2033 bp, Oryza sativa
  ref <308>: DATABASE ACCESSION NUMBER: AK110978
  ref <309>: DATABASE ENTRY DATE: 2001-12-06
attttttggaagcctcgatgcccgtatctgctggagcgacgatttctcctcccatatgcgctatatttcggatggagtaccaaatagaggatctgctgggatgctcttaaaccctcgttccccttgtctcccaaaccctctctctccttcccctcgcttccgcctccggccgccgccgcgaggccatcgcctgctgctgcagcggcctaccctagcgtcggtgcaagacggcgccctgcggcttcggttgcggggtgggtggtggcgttgcgggaggaggagggaggcgggccgggtccaagctgaggcggctcgtgaggtccatggcggtggcgccgccgctgccgccggcaccggcgcggctgctccggcggtggcaggggtcgtcgccgtggctgtcctcttccttcggccgcacccgctacttttcgcgcccggccttcgccgcgggaggaaggcaagattattctcctagttctggcatgggggttagcaaaactggtgctttcaggctgggattgcatggcaacttaaatgtacaaagtagcgtgcaagaatgggttgatgaaaccaagaggttatttttcctcaggaccaccaacaatgtcaggaacaacatcactaatggcactactcctctgcgggttggaaatctgcgtcatgatccctcagaagatatcaggagttcaaactatccttccttgtataatcaaagagaaagagggccatctaattcaattgtaaatagacatgtcgatacagatttggctaagcatcgtgtgatgtatcagtcagcacatgctgtgcctgccccattcagtgttgctaataatgatatcaaaccactgaacctgcttgatggctccaaggaggaaattccttggcacgattccgttacggtggaatcttctctgcctaaagtttccaagtcagagacaactttggtggttgataaagctatcccaaacaaaaaggagcacaaacgcattacaaggaaagtgacgctaaatatcccggacaaagcttccttgtccactgagtcaaaaaatgcacggaagttgcttgctaccatctatgacaaagttttggttgtcgacaatgttgagtcagctaggagtgttgttaaattgcttactacaaagtacaaaggctttattcatgcatgtgacacggaggtggcaaatattgatgtcaaagaagagacgccagttggtcatggagaagtaatatgctttagcatctattcaggaaattctgatggggaggctgattttggaaatggcaaaacatgcatatgggtggatgtgctagatggtggaagggatgttctaatggagtttgctcctttctttgaggacccatctatcaaaaaggtttggcataactatagttttgatagccatgtcattgagaactgtggaatcaaggttgctggatttcatgctgatacaatgcatcttgcacgcctgtgggattcttccaggagagctgatggtggatattcacttgaaggactaacaaatgatcacagaatcatgaatgctgttctaaaggacatacataaaactgggaaggtgtcaatgaaaactatttttggtcggaaaaatgttagaaaaaatggatctgaagggaaaaccatatctatcgagccagtcaaaaagttacaaagggaggatagagagttgtggatttgctattcctcactagattcaatgagtacattgaagctttatgaaagcttgaaaaacaagcttgaagcaaaggaatggattttcgatggttgtcctagaggaacaatgtatgatttctacgaagagtattggcgtccctttggtgctcttcttgtaaagatggaaacagagggaatgtttgttgaccgtgcatacctttcggagattgagaaaactgctgttgttgaacgaaaattagcagcggataagtttcggaaatgggcatctaagcattgtcctgatgccaagtacatgaatgtgaatagtgataatcaaattcgccaacttttctttggtggcatc

SEQ ID NO: 13631 - DNA, 2163 bp, Oryza sativa
  ref <308>: DATABASE ACCESSION NUMBER: AK110979
  ref <309>: DATABASE ENTRY DATE: 2001-12-06
gaaaaccagcttttctccctccctctctcttttccttctctgtttttccttcttccgctgcagctgccgccggcgagggcgggggcggccagcatcctcgtggcacagccggaaccctagccgccggccgccggcgccgccacctccccgaaaatccgtcgccatcgatcatcctctcgcacaatcgaagattggtggttgggcatggatctgattcttccatttaaaaagggcgatttcgcggagtcaaagtccttcatcgatggttacaaatgtgcttggtttcgctgtaaggtgaggcagctgtgaagttatcttattatttttctcaggagttcattgcacattgtggcatatgacacctatattaacatgtcatgtgaaacacctttgtatcgcctgcttgtcgcttgatacagtgttggatggcatatgctttatggttagcatggaaccacctagaatttcagtcccaaacagaactctaatgtaaaaattgatggagtttgtgtctttatccagtcatgttggctattctactagaaaacagagatgacttataacagccaggccacttgccactggaggagttgactgagccccttgtgagtgacttttaatcaaaacaaaatcgttttgtttccttaccagcattgctgactactggccaatatgatgcttgcctggagtttgtgcgtgcacgcattatgtcaacatgccagattgatgtgatcagtggaggcatggtgctatgagtatatatattggctacatatggtgttttctgcctatgtaagactaattggtgcaatgtccaatttactcacatttagtgcagtatctgtggtttgatcttagtaatacagggaccaaattggttgtatggtcgttcactttgcacaaattggtgtactagataagttcgatagatggcagtccattttccataatagagcatattgctgagctaaaaacaagtcatcttatttcttttcagattaatgatatgcgtgtcacagaaacagggtcctttcagtatttactggagtatcttgattacccagacgaagagaaaacatggactgaagtctttgaaaagaacccagcgtatggcaaaaggaactcaaatgtggttagagaaagagaatgcatgcttcgtccttcctatcctgagttgtattggggggatcaagttcccgagcaatttccaaagagtaatgtgatagtatctgtttgtgataccccgaaagtaggtgatctggttgagtggttgtctgaaggttcttactggactgcgaaagttactaagttacttagtgaagatatggttaaggtacagctgttgaaacctcctataggtgaaggggggagttatactgcttactgcaaggacatcaggcctgctcttgattggtgcctggagaaaggttggactgtacctctttcacaggcaaatggacggtgctggcatgctgctcgtctgattcatcataaatctgacacagagatgagtggttcagatgaagagtcgacatctgatgacgatgaagaggaagcgcagaaatccttgaaaagagcatcaaattcgtctcaagaagctccaggctcaaacctggaaattacatcagatacaacctccagttctaggattaacagtcagacagctaccattgccacaaccaaggggatttcgagatccagcccggtatccatttccactgggccatagtcatggtgcacaagcagctgtgacttgtacagttaaccaggtacccgcagttccagcagacaattagggatataggtgatagacatgtccaatagcacaaatgtttcagagctggataggatctcaaacagtactatagccgctgagtctcttccaaagatctgaactggctaccccctcaaccatttgtggagaaggatccatcacgagacacaacactatataaatataagaaatataatgatgttggagtcttggagatacatcagcattcagccagtacttcatcccatgaaatggatatatgctttacacgttgttgttttcatgactgaagtgctacgttggcaggctgcaatgtttgcagcgttgccgctacttttagggacagttcatttgactgatcaatgagatttatacagctctgaaatttc

SEQ ID NO: 13632 - DNA, 1456 bp, Oryza sativa
  ref <308>: DATABASE ACCESSION NUMBER: AK110980
  ref <309>: DATABASE ENTRY DATE: 2001-12-06
gcgccgcgccccatccggccatccgccacctctccgccgcgcgcgcggctgcggttgctatgctactccggccacgcctctccctcctccgagccgtcgcgccgcgccccgtcccaccaccaccccgcgcctcgctccccgtccgtcgcacgctctcctcgccggccggagcggcgaggaccgcgtccgccggcgatgcgccgccgccggcgcagcgaaccgggctcaagggcgggaggaagagcgcgccaccgccgccgcctcccaggggttcgtccgtgaaccccgcgctgttcttcccgccgggggtggatcgggacgcggcggtggcggcggagatggtgataccggcgtcgaacatcgtggtagggccctacgcgggggactcgcgggtgaaggaggcggagttcgtcaagagcagcgcgcgcgcgcgggactgccccaaggacgaccgccccgagttcgccgtgctggggcgctccaacgtcggcaagtcctcgctcatcaacgcccttatccgccgcaaggaagccgcgctcacctccaaaaagcctgggaagacccagacgattaatcatttcttggttaacaaaagttggtaccttgtggatttgcctggttacgggtttgcggctgcatctcaatctgctcgaacagattggtcttcatttaccaagggttacttcttgaacagagataccttggttggcgtactgctccttgttgatgccagtattccgcctcagaaaattgacatagactgtgccaattggcttggccgtaacaatattggattgacctatgtgttcacaaagtgtgataaatccaagaaaggtaaagggggccggccagaggagaacatcaaagagttccaggagacgatcagttccctgtacccagagcctcctccatggatcatgacgagtagcgttactggattaggccgagatgggctgctcctccacatgtcgcagttgaggaattactgggacaatgaagcaaccatgagtccatgatttgcttagaagagggaagagggaattacaaaccacgagtccttgacccttgccgatatatcttgaattacatgagcttttagtccagttccttctcattctgttgtatgaccctttggtttatagtgggatactaagagaagctttgcgatgtggagcttcttgtaatttcccctcctcagagtctcaggtgtatacatttaacaggttctgcggcggcagggggagcgatctggaactagacaacagttatggtgaaggcagcctaggaaattcaaaggactgtaagcattcaatggcacgaaacttattgccaaaaattctactactagtactgtgcatttcatacatttcgtcgcccgatccgacagactgccggcctggatggttttacacttcatgatggcagtaacaagcactgctagtaattttgatgatgt

SEQ ID NO: 13633 - DNA, 1546 bp, Oryza sativa
  ref <308>: DATABASE ACCESSION NUMBER: AK110981
  ref <309>: DATABASE ENTRY DATE: 2001-12-06
attcacagtgcatctctgtggcatttggcctcagcacaaaaatacgaatattccgttccacgtcgtctatccgcgcggcctccctaggaacgcgtagcaaactttggctacgggttcctcggtcgtaggtaggacccacggcgcgtcaaggatgagagagggaggagagagaacggtcatccttgtgctccacgccgccgatctcgtcggccagaggaggaaggaggactgtcgggcgcaaaggggaagctcaccagccgccgacggggagaaaggagctccgctgtccctcgccgcccaacccgcgtccgtcgtccctcaccacccgacccgcgtccaccgtccttcgccgagctcatcggcccccaccgccagatccacgcactccgtccctcgccgagctcgctcccgccgattcaacgctgctgccaccgaatggatggggatccggccggaagaggaggaggggaggcgctcgagctgccgcgccgcctcgatctgcggcggccagaagaggaggaggaggggaggcgctcgagccgccccaccgaccagcaccgtcgagctcctgatctgccgctggcgtcgtcgccgcatgggccgcccggtgtcggcgttgctgctcaggccgtccgtgccatcgtcaccgtccgccgagccgcttcacgccgccgccatcgttcgccgcgccgcgcaaaggggaatctcaccggccgcgcaggaggaggaaggggaggcgcggcggccggagaataggggaggcgtgcgggcggagatggagaagcgcgcgggcggactgggtggggatcagactgaggatatgggagagagaaatgatttttttttgtgtggctcctatttgaggctacatagcaatgtgagacttgtgataaatattattcttcttgtgtcttcgtcctatgtggcagccctagctccgtaaaataggtgacgcactactaatgccctcactgtagaacctgcaaaccagaactctcccatcctcacaaactctgaaactggtattgccatgctgcatcttgccatactctgacaaccgagggagggtttgctgtgagtatccaatcagctgtgagtaatccacatgaagcagtattgatcgatgtcgccagctactggaatcatcaggaggacatggccactcgtcgatgcagcggtcatacgagaaaagctccagcttgcaggaagggtgatggttttccttgtgactacgcatcgagcgctcagagtagacggctgaataccacagggagcaacaagtaatggcaggtgaggccataggggacgagttgagcttcattccttgcacactgctcccatgcgagcataatctgccgggtcataggtatggagacatatctcgtacacactgtcttccgggatggcagagcattttgtgcctgtaaatgtaatatcgacatgatgtgtataagtattttagaaggagaaaatcaaatgacgtgcttagcatattgagcagagacagattaagacagttcaataccatataaaatgtactttctct

SEQ ID NO: 13634 - DNA, 1825 bp, Oryza sativa
  ref <308>: DATABASE ACCESSION NUMBER: AK110982
  ref <309>: DATABASE ENTRY DATE: 2001-12-06
acgattactctcacctccgttcgctctcgtcttgcgcctctccgctccgctccaccacaatcgccgtgctctccacgcctccgccgaggaggagatcgacctcgccgccgaggccgcgcccctcaccctccacgcgctccactccaaccgtctcgcgctcctgcttcacctgcgcccagtcaccgcgccgcctctgatgtcttcctctcctcgcgccccgatccccactcccagtcccagtcccagtcccacggcgccgcgccacggcacagatccgtcacggccgcggcggcgtgctctccaccgtctccgtggccttgctcccgcgcgccgcggcgccatgcgcgtcaccgtcgccgtgggctttgctgccgcgccacgcagctgtgtgcgattcccgcgcggcgccgcgccgcgtctgatttcctcgcgcgcaagctcttcctctccgcctccgccctcgcagcgccccattccccactcccaccgcgacacggccaagctccgtcagggccgcggcggcgtgctcgccaccgtcgctgtggccttgctcccacgccacgcagcggcgtacgaagccggcgggagcgcggccgtgggtgtcaactggggcacgatactgccccacacccatgccccccgttggcaatcgtggtgcggatgatggcatgctgcaggccaatggagtcgacctggtgaggatgttcgacgccgaaccatggacggccggcgcgctcgtcgacacccgcatccagatcgtgatcgccgtccccgaagaccagatcgcctacgtctccagtgacccacgcagcggccgcttatgggttcgcgcagagcgtctcctactacctcaagaccagcatcgacgtcaggtacgcccgcactgcttctctcgtgaaatggggaatcgcgctctctctagtcgctacgggttgtggattggtgagagggatgtcgcgcgcgcatgttgtttgcgtatgcatgctaaatgttaggtgttgtgcgcggggcgagacgattcggggcgtgtagcggatatctgttcgggcgcgtcgaaagtgttcgacggaatgcctcatagatggtatggaattgtgacatgcagtattgtgtggttcatctgaaatcgatggttcgtgcaatcgtgctgctgtcgctgcctgctgggttcaggtctgtcctatcgcctgaaagacttcgagtgttactgttaattaattaggcatcacataaaaatgtgttaattagaggcagtccatcatatgtatcctgcaaccagcaccatgcagtaactagtttcatttatattggtgcacagtgccagttgctgtgtcacggtttttataaattcagtgacatcacactatgatttccatgtttgttcagagcggaagttgtataagttatggctatgcaaatgttagagaaacatgcactgattagtttatgatttatgaaaggttgtttgtagactgtagactctgtttatatgcttctgcagatgctgactgaactagttcattcaaaacatactcaaaatgtcgagtggataaacgcagaactgggctgatcaattggactaccatttctaggtttataactgtagatgccattggaagccaggatgaaattgtatgttgtgtcatttagaccattttaatcctaaattgtgttgaatcactgtggtgtgtccttattgatgaatgtttgggctttggagaaacaatgtggattctaccgactttagtcaattcagattctagctagtgctttgattgaatcttgattttctataactcccagctaattaaattgaattgttgag

SEQ ID NO: 13635 - DNA, 2392 bp, Oryza sativa
  ref <308>: DATABASE ACCESSION NUMBER: AK110983
  ref <309>: DATABASE ENTRY DATE: 2001-12-06
gtcagccgctttgccgcactagcagcagtagctactactaccaagcaagcgtagacgacagcagcagcagcagcagcctgcgccgcgatcccacccacccggacgaggaggaggaggattttttccccctctctccccttcgctttcctggagcttgaaggatagggatcgaggaggaagaagacgaatcaagaagcaagcaagtactgtgttgcagcaagaagaggatagcaatggcaaaagagaacttagagagagagagagacagagacagaggagatagtatgagcaaaagcagttctcaactctgaacattgatagcttcatcttcatagcttgatagaattatatccgagcttgcaggcatgtacaagaaccagcttcaggagcttgctcagaggagctgcttcaatctgccatcctatgcgtgcatccgcgagggtccagatcacgcgccacggtttaaggccacggttaatttcaatggagaaacgttcgaaagccccgccttctgttctactctgcggctggcagagcatgcggcggcagaggttgcgctcaatgagctgtcgaagagagggccatcatcgtcacttgctgcaaaagttctggatgaaactgggatctacaagaacttgcttcaagaaacagctcatcgagcaggtttaaaactgccagtgtacactacaattcgatctgggccaggtcatacacctgtgttcacatgcacagtggagttggcagggatgaccttttactggcaatcccggcaagaccaagaaacaagcacagaaaaatgctgctatggcagcctggtctgaattgaagcaattgccccgagtaggtgagccatcatcctcatcttgtccaccagatcatgacgatgatgatcaggaacagattatagtggctcgtactcttgcaagcttgaatcagacaaatggaggaaagacaccacagcaaaaggaaaaacagcaaagcagtaaccgcccgtcatctcggagaccctcttatccgaaatcaaatgcatcattttatggccggttgcatttacaaaagcatgcatacccaagtgttccaccagagcaagcaatgtaccatatgtggcatcaggtgcaagcaacacagcagaagccgcattttccaatggtacccactatgggcagtacaggctttccaccgcctccaactgtgctccacatgtaccctccacctagagggcaattcaccatgccatccagccaagatggtttaggtcttattccatgttatcctgaagcttcccccgtccttccacggtacttctcgccttatcctgcctcctttgtaccaagacgtccattgccagttaatgttcacaaaattcatgagaaaaggttagtgggtgctgatatggttgagcttcctgatgctgcggtcttctcccgatacactgctccagatttctctggtacatcagaaaatgctgttcaagataacaagaaagaagaatataccgagagcagtcctgcctccgagcaagaaagcaaatctcatactgcctcaagctccgccacgcgttcaccatcacaacagctagaatcaaatcaagatatagaaatcatgggcggtttgcggttggaatcaaagaagcccgcagaacagccaccggagtcatcaccatccagggtcaatcctgttcttctgtgtgaaactggccaacggcaccattacagttttgttcgccatggtgatcctgtccacagaaatagtcctcaaataagtgtggctacatcacctagtcctattcgtcgtggtgatcctgcccacataaacattcctcaaataagtgtggccacaccacctgagtgccggtctccccgtgcacaagctccaccaagatttggaacaagaatgccggtaaatttgccgagttcgttataccagcaacggcctccttggttagctgcctcagttacaatcagaacaactatccctgtatgctcagcgaggccaaatgtggtgaactctagtgctggagcagctcaacctgctgttcagatcctctcggcctcgcctagaaaagaagaacctgaagctcgcacgaacaccagtgacacaagcaatgctgcaacggcgagttctgagctcaataagctccatatttgaaagtcacagttttggttcatctgagctttagtcagggctgagaacttaactctcagctgcatctcagttttgattgtttcttttcctttcattttttttatctccttgggtatttagctagatagacataactatatgaagagttggagagcgggcatctctcgcgatatctgaacctgttggattttttatgtaccacaccttatcaagaagagtgaatgggaacagtatatataccgaatgc

SEQ ID NO: 13636 - DNA, 2189 bp, Oryza sativa
  ref <308>: DATABASE ACCESSION NUMBER: AK110984
  ref <309>: DATABASE ENTRY DATE: 2001-12-06
gatgatttcgcgtggaagtggaaggatcggaggcgggcgcgcgagcgagcgaggcagaggggacggcgagccgcagctaccgcacgggcctcgagggatcgatccgcgccaccgccgcggccgcctctggcgaatgcgcccgcgcgaatgccgccgccgtcgccggaggtggcggcggcgggcggcggcggagggggagagagagagaagaaagggggaggggtaaaaccgtaaaaaccgtaggaaagcgagggtgaaagtgaaaagcgagaggaaggtgggggtggggcactgacaagtgggccccgtttgcagtgacacgccatctccttccggtagagggagcccgtctcgcctccgctccgattccggcggcggcgactccaccggcggcgaatcgccgccgccggccaccgccacgcgccgctcttggatcattcaatcacccccaagacaccattccaatccagttcagtgttagttcggaatagacatgaacagttcttggcttcttgatgatttgctcttagctgctgttctatgcaattgttcaatatttttttgtgtgtatgtgttttttttaatttttaatttgctgaggcacagaatttggaattgctccataaatgattggaggatttgttgtgacttttccacaatgtttcttctcatcttgattggttgccgtgcaccccaagcagcaaattccaacccttgcttagaattgatgtggtcaatccaggcttccagccgattggtggattatggtgttctttatatatcatgttttggatacactccacgttgatctagtctcatatgtcagtgaactaacattttttttgcaagttggtctgaagggaaagttcatggctactgctcttttgctgtatggtttacatccacatatttgatggactctcttccacactcaaatttaatttactaatttagtgatgtatatataggcagtaggcacatagcatacttgagcatgttctacttcttctagccattgatttgttccagagatttggagattgttcagtttttgtttggtttcttgtaaatttaagtagcacagagtggagatgcaggaaggaaggaaaggggtgccatctctgctctcatctcagggagaatgcattgcatccaacatcacacagctgattggttggacaccactgatagaattgaagaatattgctaagaaagatggcatagctgctcggctggttgggaagattgagccataccaacccctttcctctgtgaaggatcggagtgctctcagattgatcgaagatgcagaggagagaggcttaatctcacctggcatcacaacactagcaggggtcacaagcggcaatcttggtatcggagtggcgtttgttgctgctcagaaaggtcagatgtaacatgctagtctcctgcagaccctgcactgaatggattcaaggggctacttgatagagttgaacagctgaagaaggatatggagaatgtgtttgttatagatcaattcaccaatcctgctaatcctgatgcgcacttcagatggacaggacctgaaatatggaaagatacagcaggcaaagtggatatatttgtagctgcatctggttcaggaggcacagtgacaggcgtagggaggtatctcaagatgaagaatccatccataaagctgatatgtgttgaaccagctgaaagtgcagtaatttcaggaggtgaaccagcattccataacatccaaggcataggtccaggatttatcccagaaatattggacagatcacaaatagatgagatagtaacagtgaccactcaagaagctatggacatggcaagaaggttggcaagggaagaaggattgctcgttggaatatcttcaggagccaacgcagctgccatcttgaaggttgcagcaagggaggagaacaagggaaagatgatcgtgacgatgttctccagtggtggggagagatacctgaattcggagctatttgcgcaggtgaaggaggaatgcatcaacatcaacaaggcattctgctgacatgtgtaggggtgatcatgcagtgtaatcttcaaggcttcattcttggtggttgttctactctaatattgtaagaagcttctgtacattggtgttattactcttagattagaatcaattgtatggatgttcagat

SEQ ID NO: 13637 - DNA, 1747 bp, Oryza sativa
  ref <308>: DATABASE ACCESSION NUMBER: AK110985
  ref <309>: DATABASE ENTRY DATE: 2001-12-06
gattgcgccggacgcaccacgcgaccaaccacgaaccacgccacacgctcgccgacttcttcgcctctccaaaagtctcctctcctcgcgaaaaccctagctggcgctcaaggcggcggccgccgccatggccgacccgagcttcaacttccgcgtcggcctcgccctccgccgcgcgctcccgtactacaatgacgccggcccgcagagcgagttcttcgaggcggccacccgcggcaacgtccgccgcctcagggagctagcgagcggcaaggacgcggaggggaaggcgtggctcgccgacatgggcttctcgggcatcgggccgctccaggctgcggcgcgcttgggggaagtggagtcttgcaggtgcatggtggaggagctcggcttcgacatcaatgccggcagccagcttggcataacagctttggctgctgctgcgttggatggaagactggctgctgcaaggtatcttcttgaccatggggctgatccaaataagaagtgcaatgcatgatctgttcctcttcactgtgctgcaaaaaatggtcatgatgaagtagcacgactgttgctatctagaggagctagcattgatatagcttattttcatgggacaccactacatattgctgctgcatatgggaaggctgatgtcatgaaagttttattggagcaccatgcagatccaaacaaggtttcagaagagttgggtacaccgttggttgcaactcttcatgctacttctcaaggactagctgagtctatttcactgaagtgtgtaaagctacttgttgaggcaggcgctgatgttaacttcagtgatcgtgacactccgttggtggtagcaattactaatggcttgactgcctgaattaaatacttgctaaaggctggcgcagaccctaatatcccaacttgtgattgtggtgccttgccaatacaacttgctgcaagctatggaagaagaaaggacgtggaattactgttcccgttaacttcccccatttgagctgtgtcaaactggactgttgaaggaattcttgcccaggccaaatcgaaacatgccaaatcaaaatgttcaaagcccaaggacaaacaggatgatcagaatgaaaaggctcagctcaaactatgtggtgagaaagctgttaagagaaaggactaccgtggtgcctcaaatttctacagtcaggcaattgagatggatcctactgatgcaacactctattcgaataggagcctttgccatcttcaaatgaccgaagcggaggcagctttgtttgatgctgagttttgcatacaattgcggcctgaatggataaaaggttattacaggaaaggagctgctctcatgttgctgaagaagcacgaaaaggcatgcgatgctttcatggctggactgaagctggaacctggaaatgctgagatggagaaagcattacgggaggcgattgaggcgatgaagaagcatcatgtcgctacaaagaacttcaagccatccgattagataagtttaggctttggctgcacgttttgtgtaacatattgtgcagaaaacggtcgtaatgctctgagctggagcgctataatgtattaccagtacctcgtacaccttttggatcacatagctggtcgtgcgtagtaccacttaggcctaccatgtttggagagatgctttcctcggtgtttcattactcgagtatcttgatatcctctcggactccttatcatttcatcgcct

SEQ ID NO: 13638 - DNA, 1650 bp, Oryza sativa
  ref <308>: DATABASE ACCESSION NUMBER: AK110986
  ref <309>: DATABASE ENTRY DATE: 2001-12-06
aaaattgatacactcgtttaaccattttttttcctcgcaaaagttgctgtacaaactcgaactctgctactcacacatatgtgatatgtacatagatggatacacaattatacacggaatttagtttctgtaatacgcttcagatttctagaaggcaggcggcctggacgtgcccggagaactcgggcggcgccggcgcgcgcgcccacgacgcgggcttgccggcctcctcccgcagcgtgtacaccgtctggtcgccgccgtggcagtcggacccgatgaccacgacgcggccgtcggggatgacggaaacggccgccgcggtgcgcgcgtcctccggcaccggcgccacgggccgccacgccgcgggggcggaggagatggcgccgtggcgcgccacgaggtgcccgtcgcggagcatgtacatgcggtctccggcctcgggggcggcgctgcaggttctcgggcacgcgccgtcgtcgacgaagccttcttggacggcggaccaggtggacgtcgccgggtcgaaccactcggcggagccgacgaatcgcccctgcgccggcgtcgggtacccgccgacgaccaggaacttgccgtcgacgcagagcccgcgcggctcgtcgcgctcctccgccatgtcggggagcgcggcccacgcgtcggcgtccgggtcgtacgccagcgccgatcgaagggcgttcttctcctcgtcgtggccaccggcgacgaacaccttcccgccgacggcggcgcacgcgaagaacgaccggcgcgggcccggcatggccgcgccacggcgccacgcgcccgtgaggaagtcatacacgagcaccgagtccgtcggcgcccacgtctccgggtcccagccgccgacgaccaccagccgcttcctcccctccacaccgccatccaccgccgccacctggcagaacagcggcaagctcccactcgctccacccacctccggcagcggcgtccacctcccctccgccgggtccaacagcaccatccggtacgagttccccggcacaccgccggccgacgactgcttgtccgccgccgggcccgcctcggcgagctcacgccgcgcctgcaccagcgcgagcgccgggcgcgccaggccctccgccttcctcaggcggttgtacgccggcgactccacctccgccttccactggcgcgagatgcggcgcaccgccggcagctggtcgaaccccacccggatgaggcactccctcgccacctcctccggcaaccccggaatcagctcgttgtaacccatgatgctcaatcgagctggaattcgagcaagaaatgcgtgagatgatgatgatttcttggcttctcttctcttctcttgtctgagcttggtgtgtttgatgtgttttgtgtaaggcagagtggcgggagtggcatccgctacttatacaaggggaaagaagggaacggactgcggatggagggatggatggattgcgtgatttttttggggggtttatgtgggccccgttgcttgcacggctatggtttatgtttctttcagtttggctttttctagttttttttttgactctgtgacgtgtaaaattgagtagattagctcttttgagactaatctaccagtagatgatatggtttgttttattt

SEQ ID NO: 13639 - DNA, 1736 bp, Oryza sativa
  ref <308>: DATABASE ACCESSION NUMBER: AK110987
  ref <309>: DATABASE ENTRY DATE: 2001-12-06
agaacacctgccgcgcgcgccgtccgcccccaaaaaccctcgccccaaaccccgcgccggccgaagcggcggctccgtgcggatgccctcccgtcccgtcccggcgcgccccggccggcggtagtaggaagtggggggcgccgagcgtaagatgcggcgcttctccccggccgccgcggcgctgctcctccgacgctcgctcgccgccgccgccgccgccgcctcaccagcgctccgctcgggtccgagacagctggtgcgtgcctcgcttcttgacgaaagtttgtctacacagacgagttcagcggcttcaaccatggctgtgcagtaccaccaatggtctagttcagcagacggggatgatgatgaggttcttgaggctttcaatcgggactgttgtaccgatgcaggtgctggtgttttggatgattcagcatctactgcctatgttgagaagctctgcacatcaggcaacctccctgatgctgttcagattctccgacatttacatgataggaagatccatgtaggattgggtacgtttaatttggtgctggagcaaacaggcgaagtgaacaacttcgttctttttgccaaggtgttcaggtacctgctgctttccaaaatagctcctgacttgacttcttatacaaatgttgcaaaggcccttcagaagttggatgactatgaactaatacttaaatttgtgagacaagttatggaaattacacatgatagagatcctacagtgatgaatcgcattgttttcaccacggctaaatatggacagattgataaatgtttgatcatatttgaagaactgaagaaagatcaaagagggttagatgttgtcacattcaataccattttggacatgcttggaaaggctggtcgggtggatcaaatgcttcaggaggtgaagctaatggatgaacttggccattctcctgacattgttacatacaatactgtaataaactgcttgcggaggcttggaaggttagatcagtgcaaaatcttcgcaagagaaatggttgagagaggcatcgatccagatttaagaacatatactgcactgattgatattttcgggcgggctggccatattactgaagcccttgaaatgtttgaccagatgaaaaggtcacatcaaccttcaatttatgtctaccgggccctaatcagtgacttaaagaaggctggacagtttgaacttgcacaaaagttatctgaagagatgaaaacaagtgcttcagaattactaggccctgaagattttaaacataagttcaagggtagaaagatcaacaagaacaagtaagaaaactgtcaatgatcttccaggtgtgaatatttcgtttgcatgtgccttgtgctcatccactgtttcagccaaagattctgggataagttgaaatttttcagggaatgtatctcattaacaatgagataatcacatgggcttacaaaagagtgatgattactaacagatacaatgatatcaggccgagagaaccagaatataaatcataaacctctttgaaatatcatggttggaggcttttgctgatgtgcatttgaagagacaggaacacacttctctcatttatatcttcacggatgcaagagattatctagagacaggtcctttgcttatgagacctgaactgtttatctgagattgttccaccatagcgcaaacttgagccaatgaagagttaattctcgattgaatt

SEQ ID NO: 13640 - DNA, 2651 bp, Oryza sativa
  ref <308>: DATABASE ACCESSION NUMBER: AK110988
  ref <309>: DATABASE ENTRY DATE: 2001-12-06
caggtgagtactgccccgagtgctcccacttccagctgaaggtgttgtcccgttcttgctcaagaatgttgtcctgttcttgctcaagaacgattgagttcactcgagcccaaaggttgagatacttgagatacatcaggggagctctaggcgccccaattggcaattatgtagcgcctctgcgtcagttctctttcgtgtgcacttcggcacagggcacatgctcccacatggcaggagccagctcctggatgtttgcaccatgcagccatttatcctcccagaacagcatcgtctttccatcacccaaatggcagattgttgaagccacgacaaggttgcagacctgcttggagacagccagacaggtacctctggttatcactttatacttaaacaagccttcaacctgaaagccaccgaagtacgagattgacatagcagaagtgattctcctacttcacgaaggtatttgtatactcctatatgaacaagttagtgagcttggaattagagcaacatgtgataacaaggctcgttttggtgtttgcttggtggtgcagaataaaaataagaagtccctgcattatttcttggccttgccaataaccctcatgtttcaaagtacaaaaatgtactgaagcaattacccttgtattccccatgttacttcagaagcaacagtggtcagatgatgagaaagacaaactagcctaaaggaataaagcaacaataccaagaagcaatgattctggactcgatgaggaaggtggagagaaaccttgaatcctgaaagttcaaaagtggggagttggtctctcgatgaggacaaacgcctcatggtacctgtgaagttgtttgggtctggcagctggaataagattttgctcagttcattcctggtcgcacagagtcaatgcaatgaaaggtggcctagtgttcgtgatccagatatagatcttggggaatccagatatagatcttgaggaatttaacgttgttcaagtgagaaagccccaaaaaacgttctagaataccatgtggggacaatatattgcctagtgacattaaattcttcagcttctatgaatctctctttctgaatctattgatggtgagactagttaacacagccacaacaagttcaaggaggaaatcgtctagaagtggatctaaaaagcaaagtgatgaaagtctagctgtatcagatgatgtcaacaactcttctaactgttcttgtggagtcaggaagagaaagagatctagtactgacaaactcaagttgcagaaaagaaaatgagggggtctatctctgatgaccatgaggttgtcatagagaatgcctctatctcagttggtgaaggcacggccaagaagagaaggaggggcactatctctctctggtaaagagggagaagtcaatgagacaatgaggggctctttctcacgtgcttatgagggagcaaccaaacagtgaatgagaggctgagtctattgataatcatggtgttgtactggaaagcaagagagcaccatcaatgtactcttttttttggcgtgtcttttccaatggagcttaagtgatataattaggatatgtttccccaagagtttaagttataccaataagcattattttctcttctctacatgaaatgagccaaagagaactcaacagcagacagcatggctaatgcggcctttgagttggagcttcaaaccatggcttctgaagaaagagatgctgatatgagaaatgtgagcaattggtgacacaagtcaacgccaagacattctgtggacaaaatgttccacatccacacatcttgccgattgcatgtccttcgctccaataaatgcatccagcaggcttgcaaggcactatatgtgtgaggtatggcaatttttctttcaaaaatgctacacacacgacctgtagtgtctgatttttggacgactatgaagtgcacggcgtcaacaagaagtagaacgtcatatgaagcctcacgccattctgttgtacgccggtcggatggaacagtctgtcaagctgttaagcaacatggtccaaacaaatgggaacttctgatgatgggtcagctattgccgttccttctggagcagatcccatttctgttgagaatagcaacacttcttaaacttctgatgaatatcagtgcagaaagcaatcctctaaacctctgaagggagcttcgtgtgtgtatggtattttcctattgccattgataggcacaacttctggaagtggaaggaaggaatatacatgtgtactgtatatatatacgcgctgtgtggtgccttacaatgaacagcgcatctcatggtttctggagtgaaaaattgacatgaaaatcaattttagttctttagaaaatgggaattttcattgagcattgaattaatttgctagtttggtgatccattatcgtctgcagggatctccgtaaaatataatcagcgttccctgtattgtgatctgtttatgagctgatacacaggttgtaagtagatgtgtatgtgacctgtttctgaaccggtacacaaggttgttggaagtagatgttaaccggggatgtactctacaactgagctcttatagactcaagaaacgttgctcgtcaattttgttt

SEQ ID NO: 13641 - DNA, 1976 bp, Oryza sativa
  ref <308>: DATABASE ACCESSION NUMBER: AK110989
  ref <309>: DATABASE ENTRY DATE: 2001-12-06
agtcagccagtgagctactgagcagtgaccactagtaggttctactcgtcggcaaccgatcttgcctcgccggagaagacaacgcccgcggcggcggcggcggcgacgctctccttttgatgctctcatgaagcggcacaacgcggcggaggtgccggtgccggtgagctacggcggcgagcgggatgagaagaccggaagcaaggtggataagatgggtggtggagcggctaggcggtggcggagcggcggctgctgctcccgcctctggctcgtgctcgtcgtgttcgccaccgtcacgatgctgctgcgccaccgctacgactccggcctcggccatggtgccgccgccgtggtgcgcatcgagccggtgcaccggaaggtgaagccagccgatcgcggcggcgccaggccgtcgttctccgattccggcagcgcgaagccggtcaccgtcgaccacaagtcggcgacgaccgattcttctaccggaacggagtctgacggtggaggcgagccatcgtcggcgtcatcttcgctgccggcggcggcgcacccgttctcgcgcgcgctcgcggcggcgggcgacaagggcgaccggtgcggcgggcggtacgtgtacgtgcaggagctgcctccgcggttcaacaccgacatggtcaagaactgcgtggctctgttcccgtggaaagacatgtgcaagttcacggcgaacggcggcttcggcccgccgatgagcggcggcggcggcatgttccaggagaccgggtggtacaactccgacaagtacacggtggacatcatcttccacgagcggatgaggcggtacgagtgcctcaccgacgacccctccctggccgccgccgtgtacgtgccgttcttcgccggcctcgaggtgtggcgccacctctgggggttcaacgccaccgcgcgggacgccatggcgctggaggtggtggacatcatcacgtcgcggcccgagtggcgcgccatgggaggccgcgaccacttcttcaccgccggcctcatcacgtgggacttccggaggctggccgacggcgacgccggctgggggagcaagctgttcagccttccggcgataaagaacatgacggcgctcgtggtggaggcgagcccgtggcacctcaacgacgccgccatcccgttcccgacggcgttccacccggcgagcgacgaggccgtgttcgtctggcaggacaaggtccgccgcctcgagcgcccatggctcttctccttcgccggcgcggcgcgcccgggcagcgccaagtcgatccgttccgagctcatcacgcagtgcagggcgtcgagcgcgtgctcactcatggagtgccgcgacgggccgagcaacaagtgcggctcggcggcgagctacatgagactcttccagagctccaccttctgcctccagccgcagggcgactcatacacgcgcaagtcggcgttcgacgccatgctcgccggctgcatcccggtgttcttccaccccggcacggcgtacgtccagtacacctggcacctgcccaggaaccacgccgactactccgtctacatctccgaggacgacgtgcgccgcaacgccagcatcgaggagcggctgcggcggatcgcgccggccgccgtggagcggatgagggagacggtcatctcgctcatcccgacggtggtgtacgcgcagccgtcgtcgaggctggacacgatgaaggacgcgttcgacgtggcggtggacgccatcgtcgacaaggtgacgaggctgcggcgcgacatcgtcgacggccgcggcgaggaggagaagctggagatgtacagctggaagtatccattgctgcgagaagggcagaaggtcgaggacccccatgagtgggattcattgttcgcgttcgcctagctcaccatttctaccaattaaatttgaccttcatgtttgtgaagtgatctatcacaaattaaattatcttgtt

SEQ ID NO: 13642 - DNA, 1585 bp, Oryza sativa
  ref <308>: DATABASE ACCESSION NUMBER: AK110990
  ref <309>: DATABASE ENTRY DATE: 2001-12-06
aacaactaacccaacaacctgaggaggaggcagccgcgagcgcgagccaagagagcacccagctagccatggaggtggccgccgcctccctctccctcttccgcacgccgcaggcgcaccacctcgccgagctccgcgtcgacggcgccgaccagtcgccggtcgccttctccgacccctgcgccgtcggccgcaagcgccgctgcctcttcccgcccttctccccgcgcaagaggatgctgctggagctcccgcccttcgcctccacgccgaccgcgcccgcgccggggagcgcctccccgggggctctctcgtcggggggtgatcggtcgacgaggaccggcgggagcggaggcggaggcggaggcggtgggggttcgtcgttctccgctatggcggagagggtgttggcgccgccatcggtgtccagcgggagcggcgccgcgttcgcgttcgcgttcttggccgcgtcgccgaagcagcagcagccgttgacgcccatgggatccaccgccagctgcggcggcgcgggatccgggttcttgccccctgatccgtcgtcgtcgctcacccccatgggctccaagtccaacggcattggcgcctccgcgttcttggcttccccgaggccggcgaccaggagcgccaacgatgggggcggattcgcgttcttccgttcgccggagccagagcgcaccgccggcgacaccacccgcagcggtgccccgttctcggctcctccgaatctggtgtccgggccggctggttccccagcgtctgcggcggctaaggagccatctcagattatcggcgatggtggtctcgtcgcgccgccgtacaccatctcgtcgtcgccggcgcggaagtcccggagcagcaccctctggtcacgccgcctcgcccacgccgcagccgagggccgtacgagcccgcagccgccgcgcgacgagcagctgcagatcaccctgccgccgccgccgcagaaggtcaccaagacggtactagccccggccaccggcgagccctcccgtggcgccaccctgtcctcgtcggcggccaccacgtgctgcacgttcctcacctcgccggcgaaggcgaccaaccaggagcgggaggcgcgagcgtcctccaggatgggcggcggagagggcgccaccaccgcggcggcggcggcggcggcggtggcctgcgccggcggcgaggtggtggtgagcgtgacctgctcgtgcggcgcccgggaggagttctgcttcgaccactgccattgacactgccacatcctcgccgtcgattgcacttggccgacagatggcgtgatctcatcgctccatttctgatgtgatatgctcttctttggttctctcgtctagttctctgctagtgtctctgttctgtgaaaacttcagattcggttgaactgaacagtttcatcagtgtttcttatttctgagatgaaagtttctcatgtttcatagggtttgtttagttcgaacttcaaatcttggtggtttgtggtgattttaagaaaaaaaaataaggaatgtttttggatgcctgatttagtgaatcctggtggttcaaaccg

SEQ ID NO: 13643 - DNA, 2358 bp, Oryza sativa
  ref <308>: DATABASE ACCESSION NUMBER: AK110991
  ref <309>: DATABASE ENTRY DATE: 2001-12-06
tatgctggttcggcgattagagctgctaggtgaagttgcaaaattggcaagttcccttcatcttcctgaagatgtgagctacacatgtgaaacggctgcatacttttggttattacatgtttatgctcgctgggaacaatttttagctgcctgtgcgcaaaaccaagacaagccctcatttgttaaagaccgcttccctttctcagagttcttctcagatactccacaacctaccttcactggtgagtcctttgagaaagatatgcatgcagccaaaggttgtttcaaacatcttttgacaatatttcaagagctggaagaatgtagggcttttgagctacttaagtcaacagcagagagggcaaattatctaatgaccaaacaagccaagattgttgccatgacttgtactcatgcggcattgaagaggagagactttcttcagttagggttcaaatacgataatttgctgatggaagaaagtgcacagatattagagatagagactttcataccgatgctgctgcaacggcaggaagatggctatgctcgtctgaaacgttgcattttaattggtgatcaccatcagttaccccctgtcgtgaagaacatggcttttcagaagtacagccacatggaccaaagtctctttacaagatttgttcgtcttggtgtcccttacattgagctcaatgctcaggggcgtgccagacctagcatcgccgaactatataactggagatacagagaacttggagatctaccttacgtccgtgaggaggctatcttccacaaagctaattctggcttctcttatgactatcagttggttgatgttcctgatttccgtggcagaggtgagtctgccccttctccttggttctaccagaatgaaggggaggctgagtttatagttagtgtctacatctacatgcgcctgattggataccctgccaataagatttcgatattgaccacttacaatggtcagaagcttcttattcgcgatgttattaacagaagatgcaagccatggaatatcgaaccacctagcaaggttaccacagtggacaagttccagggtcaacaaaatgatttcattttattatctcttgtccgcacccgttttgtggggcatcttcgtgatgtcagaagacttattgtggcaatgtcccgtgctcgtctgggcctgtatgtgttctgccgtcgttcactttttgaacagtgctacgaattgcagccaacattccagcttctcctccagaggcctgataagcttggcttgaatcttgaagagtgcacaccatttacagagcgacctttagaggaaactggaaatattcattatgttgctggtattgaagatattggtcatctagtgaatttcagattagaacatcttcgtcagatgcaatacatgcaatattatgcacctcatgcaaatgtaccactttcagcagtaccagaaaacaatgctgatgcaactgaaaatggcaatgctggcaatggtatgcataaggcaaacgatgtcatggctgaagaaaatggtgatgcagtgatgagaaataagatggaggaagacactattgatacaatgcaggaagaaaacaagatggatggtaaaaatcctgaggcaaacgacatggctatggaggagaagaccgtcgacggagatgatgatccaaagaataagatggaggaaggaaatactgaggcaaagaataagatggaggaaggaaatactgaggcaaaggacaagatggaggaagaaaatgatgtggcaaagaacaatatggaagagtgagctaacatggctgttatctgattggactagaggctaacaaaggcttcatgttcgctagcttgatccaccacaattcttgatctggaataccaaatattgaagcacgcaacatcacatggaggggttcataacatggctcctgggatggtgtgcgtggaatggagcatgatatgcgaaggttaaagatatttttggagcttcttggccaaactatgctccttttatttccggccaattgtgtggtataccgtatacacatgtactgttatatggtttcacacatttggccgaaacacacgacggctattcagggggcattagcatgtacaaaagagatgagtttcttgttgtggtttcttcccttaactgtttaacatagctatgcgagtgcaagagggcagatgaaacattgatgttgtgatatttttgtatactcgattgttttgtaatatggttacgaggagcgttagagttttttttttaacactgcagcatgaggaggtagactactgtaactgctgtctgataacactgcagaaactggtggtagctgt

SEQ ID NO: 13644 - DNA, 1384 bp, Oryza sativa
  ref <308>: DATABASE ACCESSION NUMBER: AK110992
  ref <309>: DATABASE ENTRY DATE: 2001-12-06
atcgttgcatgctaaactaccttaacccaatcggagctcctgtcttgagtcggcgccgcggcgacggcggcggcggcggcgggcgcgtcctgccggcggtggtattccctcctgaccgaccacagcgcctccgtgcaccgccgcatcgacggccgctccttcctcgccggcgcgacgcactgctcggcgagctccatcaccttctccaccgtcgccaccgacgccgggctcctcctgatcctggggtccatggccaccaccacctcccctcccctgaacctctgcaacgcctgcaatctcatcgcatcgctgtcgcggcggcgctcgatgggcgggcggccggtgacgagctcgacgaggaggacgccgaaggagtagacgtcgctcttgtcggtgagctcgtacgtgctcaggtactccgggtccacgtacccggcggcgctcttcccctgcgtgtcctccgactccgagctctcgccgccggccatccgcgccagcccgacgccggccagcttcgccgtcagcgtgtccgtcaggagcacgttcgatgaccggacgttccggtggatgatccgctgctctgcaaacggtatgtgatagcatgagctacgtcgatcgcgatgttgagccgttgcgcaagttctaaaccatttccacaggattctgcagtgtgttgcatttgcacaaatcctgatcaattcctcctactaggtgacctaagtacagttaatctgcaattaaatttactctacttaaccagcaaaacaaccaagaactgaagaattggaaggcaccagaaggcagaattgctgggcaaattcctcgatagaggaatagttcttacctggatcaatcgagacttggtaacctgtacttctgctcccttgagaaatcgtcgtccgagaaatctcaagttcatcctcatttctggacttcctgggcacaaagcaactgaaaactccggcgagactctgcgccgccgccctgaacgagccgctgctgcgaaccgagctcctgctgatctctgaagatggaacgctgtaagaggaagcctgacgacggtagacctcaggagggcatgattggtatctctggcaattccatggcaagaagatcgagaggaaaaatttcttggtctgattattgcttcatcgtttttcctttggatgcataaatatggggacgatgacttggtgccgttcaatggcacaagcctttgctgagcgtgatgttgctgtcctggagctaggtcaacggtgtgctccgacgacctgcaggtcgctactatgtcgcttcccaattctttaattgttgatctggttggacggtatatatagtgataactgttttccattatctaaaaagtgatataattgttttctgt

SEQ ID NO: 13645 - DNA, 2231 bp, Oryza sativa
  ref <308>: DATABASE ACCESSION NUMBER: AK110993
  ref <309>: DATABASE ENTRY DATE: 2001-12-06
gaaccgttgccgtgccgccgccgccgccattgacgccatgggagcagcatctccgcgagctcgctcgcgtttccaatggcagacgccccgcggccaccatcgcctcctcctcgtggaaagaaatcatcagagctcgtctccgacaagaaaccctcaccgcctactcctccagcctccgtcccgccttcacctaaccctgcttgctcaaggccttcacctagtcgagctccggcccgggacgaagcctccacgatccaggtccacgcccgcctcgccaattcgggctttctcctcctgcgcctacgctacgagctggcgccgaactcgcgagctcctccgcctcggggtcgcgcgcagggtgttcgacgaaatgccgaagcggaccgtcgcccgcttcaacgccctcttcgctgggctcgcgcagcgcggggaagctgatgaggcgaggcgcgagtcttaagcccctccgggaagaagggttgccagccaccgagctctgtcatggctgcctgccttacttatgcggtggtcaagcacggggagcagttgcattggcttggcttgtttgaattgctagcgttacaatgcgatggattctgggttattgaggaatgatgagcacaccatgcccttggatactgttggagaaatgatatttgggttcagtgaagaacctaatgggaatgatttcgctggtgttctcagcatgcacaagtttgtcagcattgtcacttggtaaacacctgttgtcatgtatgcaaggtgcagttagtgcttatcggcttttatcagccgtggaggaacaaagcttggtgtcttggaataccatgatctcgggttttctggcacacagggttgttcatgataaacagaaggtttcaagcctgagtgccggacagttttacatggaacctgatgattaatgggtctgcagactgtgcacaccacgggagattgtccaggtcttttcatcttttagtaagatgcaaatggagggtttttcttttcctcgagaaactggcaggagatctgccttgatttatattaagaagaatatcaactgagtaggttcaaattacgtgtcctgatacaagaaccgaaagaaaacaactgttaggatctaattgatgtacataaatttctgcaggttaattctcgtcggcagagattggcaactccatctgtgtgatgttctgaattgccatgaaggcgatttgcagttgtctttctgttgctgctgaaagattcttctgttcctctccagccaaatattctgaaaaaaaacaatgacaagtgtgccgaatgcttgttcagccttatcaattttttcggcaatgctgggagttcaagtatgatgttttccaaacaacagcaattgacatgtttgttgctaatcatttactttcttctacctagtttgatcattaatggataatttttttatatatttattggtttacatttctttgtattttcttggcaggaaagttgtttccaggttgcaacactcaagagtaggaatgtgcatgaaagcctggtcattgcggggtgacatttgatttgaatttgcaccatccttattccctcgcaagtaaagatggtgccatggtaccaaacattacagttccacaatatcaagaacctgatattaggttgatatgctgcgtacctgtgttaaactctcgtagtgaccttgtgccatctcagcagaattagttttgagcttgcattttgccgcaaagccatgatcaagattgaccctgtggtcgacacgtgtcaagtggtgggagcaaagaaccacatgcactgtggaggcctagaggttcgcactgtgagtgccgctttaggcatcactgagaatgcaagctggagatggagaagttaaaatcaaatttgtcatcttttgcgagctgatggtcccttgtatcagtggaggatgagcccactggttttgctgggaatgttctttttgcagaatattttagtctgcgccgtagcgtgtgatctgctgagtagaatatactgcttgtactacttttcttagccacagtaatgatagaactgtaaggatttggtggatttacctgtagaatttcatagtaatcgacaaatgatataatcggtaattaaatggccttcaaaatcgatagtgttgtctattgtcgcatataacattataaaatgtacgttttataatgtacaagatgagtgtactgtatcttttacacgcc

SEQ ID NO: 13646 - DNA, 1816 bp, Oryza sativa
  ref <308>: DATABASE ACCESSION NUMBER: AK110994
  ref <309>: DATABASE ENTRY DATE: 2001-12-06
attcgctctcctggagcacggctgggacctctccggcgacatggccgtcgacaacatcctcgcgtcccagaacgtcggaacccagctacgcgcctaccctcctcccatcaagtacttcgaggccttgctccgccaggagcacgctgagctgctggaatatgtcgacgacgtagatcgcgtcgtcgcgctgctcaagccgctgccgccaccaaaaactgtcagataccctgttctttttgagcgagcgtggggattcggcagactatttccttgcgatgtgacggatgagtctcctcagtatcatgcctacctccaggaattctacagacgcaattgcagtgctcctccatctgttgctgccgccatctcgctgtgtctgaagaatgagcgcatcttgaggtctgagtggcagaatcgaggtgtccaagtccacccttacaacctcagcctcagtgacaacattctagaatgcgcttcaaaccttgtggacaagatgaacgccgagtctgctactgtcgcctacgctgctttagtatgtgtccaaactcttcacttccatctccagcacctgcaatttgtagttttgaagctcctaattactagtttcgctgttgtatgtgcatcatttgcaaaacgatggttaattccaagtgtgtcgccaaggaggctgagctaatggttcagcggctgcgtctaggagatcgcatctacgtgcactacagtgatcgcaacctgagtacaaggattcggcatgaggctttgggccttatggctggcacgggacctacttcttcatcggtcactgaccctatggttcattctgcacttttgggcatagcgagagaagctgaatggtcgtggaagatcataagccacaaggatgttggccccttaggagacagaagaagcgaagcaatcaggggctctgccctgtgtatcataaaggacgaattggatgaatatgctgccgcagctgccacagctgctgacttgagcagtgaaccttttgttgtttggcaacggaatatgattgctgtcatcgaaggtggctatcctaactggtatgatatgtgaaaaggggcactactgttaagaaattggattctgcagtttatgtcgctgaagactattccaaagactcattagataatatatttgacgaggatatgatgagcaagtacatcaatggctctcacaagaggaagatgaaaaaaccgaggggaaagaattcactgaaggaagaactgaagtacttcaagaaagatattctttagttcttctgagcagaggaaagggatagatgatgcataggacaaatgggaagcaatggtaatcgcggtcgcaagcactaaagctgagatgttcaccttgtgtgtttcctggtataatgaaagaatatgtatcagggggacaatagggttaggtttcagttattatggtctacattcctgaaaaccttgatctgtaatccttgatgcgcgggtcaggcttaccaagtaccaacgctatttattaggagtcgtgggatggttaccctgtacctgtgattgctattttgttgtccgtcaatttgtcaagtaatggagtccaaggcagcccttcgaaaattaggagggaaacgctgcagcaggggatttatgtttgcctgacgttccattgcaagtccaggccaggaatcctatttctatggtcatgtgtcatacagatgctgtatgatccaagagtcatatatatatagcgtatgctgtaggtatgtatttgctgcatacatttggattttcaacctaaatttaaagctgattttagggtttttttt

SEQ ID NO: 13647 - DNA, 1735 bp, Oryza sativa
  ref <308>: DATABASE ACCESSION NUMBER: AK110995
  ref <309>: DATABASE ENTRY DATE: 2001-12-06
gatggcagtcatcgagatcatgaagatcgtggaggagctcctccttccggcgctggccgccgacttgaccagccggctcgtctccctgctgatccgctcctaccgcagccgcgcaaccaccggcgtggtggaggacgacgacctggagaagctccagctgctgctccttgagctgcacgctgccgtcgacgagggacagggccggcacgtcacgagccagaggctgctcctgtggctccgggagctcacgcagagcatgtaccggggctactacgtgctggacaccttccgctaccgctccgtctccatccaggcgcagcagcaagacgacgctcgcggcgctgccgccaagcggctgcgcaccagcgccggcgccgcggtgcgcctcgtgctcggcagtagcagcagggacgacgacgactcgtcccgtgccctcgcccgcgccctcgcccatctgcaagccgtcctccagaacgtgaccccgttcctccagatgctgggcacctaccggcgggtgccccggagggtcagcgtggacacggagaggtgcgtgccgatcgggcgtcacgtcgagaagcagcggatcgtcgcgttcctgctcaaggaggacgaggcggctgcgcacgtcgtcggcgtccttccgatcgtcggccctaggggcacggggaagagcaccctcatacacgatgcctcccacgacgcgagagtgcgcgcgcacttcgcggtgatcgagcgcttcggcctcgacgaagtgctgctgcccctacacgccgctggagcgggcgcagccgccgccacggacgacacgtcaagccggagcttggaagatcaccggatttacctcgacgcggtgcacaacatcgtccggcaagagcgctttgcccggaacaggtccctgctcatactagaggacgcaccggccgtcatcgaattcgccgagacagcgtgggtcctaccaatggctcacgggagcaaggtcgtcgtcacgagcgaatacgaccaaaccaaggcgggtctcggcgcgacggaggaggcaatcagaaccaagaagatgtccaaggaggagtactggtaccacttcaaggcgctcgcctttcgcggagcggcgaatgatccagcagggccggcgcacccagcgctggcggctacagctaaagagatcgcatccgtcctgaacgggtcattcctagggatgcatatattgatcgccctgatgcgatccgacccaagggagtgcttttggcgcgccgtactccagagcctcgtggatctctgccgctcctcgaactccaagaggatcaaggccgacatgggctacgtgcaggagttcgcgctgatcgggcggatcgctctcaagcttgtgcttccgatgcgtctcacgcttcgtagctgctccatcaccaagcaggggggcgatcctcaattaggacctgagcttaatcgtgtggcaggagggatagcttacagttgtcgcagtgatgactctgggtgcgtggatgtcatcctatgcagatcacgcatccctccctacgagatctacaagctctcctgcgtcatggaggaagaggtccatctagaacgtgcgtcctagaaaaatgaatttggtaccctgtataaaaccatgttaatttgcttgcttctaggtagtatatgatcttgatgaaatttacgtcttgcttgcgtatgtacggacccattctgttccattgatgtacagtgactgtgaactaaacgg

SEQ ID NO: 13648 - DNA, 1454 bp, Oryza sativa
  ref <308>: DATABASE ACCESSION NUMBER: AK110996
  ref <309>: DATABASE ENTRY DATE: 2001-12-06
tgcttgcgtccttcttcatgtccggcttgggcggcgcgccgccgtccttgctgccgccgtcgtcgtcgtcggccgcctccttcttcttcttgcgcgcgccggtgaggtcgagcgagcagtcgatgtcctcgatgacgatgatggacttgctcgtcgtctcgatgaagagcttgcggaggtcggtgttggagtggacggaggtgagctcgatgtcgtagatgtcgtagtcgaggtagttggccatggcggcgatcatggcggatttgccggtgcccggcgggccgtgcaggaggtagccgcgcttccacgccttcccgacgcgggcgtagtagtccttgccgttcttgaacatgtcgaggtcgtccatgatctccttcttcttggccgggtccatggcgagcgtgtcgaacgtcttggggtgctcgaacacgacgtggctccacgccgaccggacgaggccgtcgacgtcgctccagttgtgcgtggagatgttggtgaagagcttccgctgccggttctgcaccatgacggcgcggccctggcggcggatgctcgggaggtaggtgttgatgacgagctcgcggtggcggtcgaggaagaagaggcggtagtaccggcgattctcctgcgcgcggccgccgccgccccagccgtagtacccgcctccatcggtgcgcggcggcggcgtggagtacgcgcaccaccagacggtgacgtcggtgctgtcgtcggcggcgacgacgtcggagacctcctcgccgtcgaccatgctgaggacgagcttgtcggcgtccttggcgccctcggcgcggaggtggcgcacgtcgcgcgccgacgacgcgctgaggtaggccttgacctcctcgtacgccgcgctccgcttcatcctgccgccctcgtactcgtggatggtgaccgacaggtacgggtcgacgagcgccgccagccgccgcgcgtgccggttcatgtgccgccccaccagcgtctgcagctgcagccgctgcagattctgccacaccaccgtccacagcaccgcgatcaggctcagcaccacgccggagttcagcccgttcaacaacgacgacgacgacgacgtcgcctccatttgtctcaaaaccaaattaatttcccaattcacgaacacgcagaaggattgatcagagatgtgatatgggtggatatggatatggaaagatgtggaggctttggcacttggcgcgccgtggatttataggggcgcggcggcgggcggaatgtgcttggaaagggggtaaggaatggtggtggtgtggtggtcgagtcgtcgttgtcgtcgcatctctcgcatgtgcagctgctgctcaagccgacatgaacgtttttgttctcttgtgatgtggtggtagtggactggatagactagtactccactgttgtttacttttgggcgaaggatcaaatgctaggcgtttctt

SEQ ID NO: 13649 - DNA, 1574 bp, Oryza sativa
  ref <308>: DATABASE ACCESSION NUMBER: AK110997
  ref <309>: DATABASE ENTRY DATE: 2001-12-06
aaggctccatcctcgctagttgtggcgagccccaaaaccaactcccaatccgcatctccctccgctgcgccggcgccgccgcccgccgccgccgtggcccggccgtcggctcgcctccgcctccatcctcgggcaccggacgtcgtccccgccgcccggaggccgacccctttgcctccttaggccttctgccctagttccggcggcctggctctaaattcggccgcagccggcgcaggtcgatcaccgcccgcgcgccattggaagcggaggtggagaaaggaagctggcattggtgcgtgattgaaatgctgacctgattttttttagtacattgaggattagcgatggatggagacagttgttatgttaactcactggttgttaaaatcaactcgccagagtgggatgatggcaccatgatgggggctagtccacccgaggagcaacattcaacggtcgaagaagttgttgtcgtgagacgaaaccagaaaagaacaaagaatttcagcgggaaggaagacgaagggttggtttcggcatggttgaatgttagtaaggatgtagtccaaggcatcgaacaatctcgttgtgcatactggaagagaatttacgattacttccacgcaaacaaggacttcacctcagaccgttctcaaaattccctcatgcaccgctggtctactattcaagagaatgtgaccaagttcgagggttgtctaagccggattggggatagaaagcaaagctgggtttcaagtcaagataagattatgcatgcatgtgctctgtacaaggccgaagatgagaaccataggccatttcacatgatgcactgttggaatctcttgagaaaccagcaaaaatggattgataggtcgtctcagctgccatctcacaaaaaacagaagataaccaacaattcaagtctaggtatgtctactactactactgatgatactgcggctgctcctcctcctcctccaggatttgagttatcgaagactccagaaagtattaatgctcctccaagatgtgagttatctgagagaccagaaagtaggaatgctcctccaagatgtgagttatctgagagaccagaaaataggaagggggagaaagaaaaactacgacgaggtggagatgtggtctttgtggaggatttagatgatttgttggcaaagaagaaagaggcagatgtggagaaagagctcaagaaagatgagagatatatacaatcacatgccctagagcaagagaaggttgcactagaacaagcgaaggttgcaaacgagacaaaaaatcttgagatgaggagcaaagaattagaattgaagaccaaggagatagatttgaaaagaatgttagaagaagagaggattatgactatggatattagtgccatgtctgggctacaacaacaatattacaagagcttgcaggaggagatcgtcactcgacgatttaatagctcgggttgacctcgtatgtctattattgttgttacggactattatgttttgcgaaccatgttgaagtcgtatagagaattatggtaaacagcaaaccttgtt

SEQ ID NO: 13650 - DNA, 2232 bp, Oryza sativa
  ref <308>: DATABASE ACCESSION NUMBER: AK110998
  ref <309>: DATABASE ENTRY DATE: 2001-12-06
atctccccgtttcaaaccctagggcacgtcctccacccccgaaaccctaaccctagctccccaatccgcccgttccggccaccccaccgccccggaatcccctctccgccatctccgccgcctcctccgctcccgcccgctccccgcgccgcccgcggccgtgccctcgaccacccctcaccccctcgcccacggggttcggcgtagtgcggggggctcgtcccgcgcgggcgctctcccgtgccccccgcgggaagggaaggctctccattgaggcctcgctgatgaagttgcggccatgagtaggctctccttcaggccgcgcccgctcgacattcacaagaagctccccatcgtcaagtccgcgcgtgagcttgaggacgatgagaccacgctagcgcttcgggctgcgccgccggtgctgcggcactcccagccggagcccgcggctgatggcgaggcacatccaacatccagcaagaagaatgtgcaagaaatacctacaccacagtatgatgatgttgatacatacgaaagggactatactcgtacctttgcacagccaacatcctacatacgtgccagaggagccagggctgagattggtgagtttgttgaatatgatttggacaatgaagatgaagattggcttgaagactataacaatgagcggaaaaatctgaaccctgaaaagttggaggtcctcctattcaaactggaaacattggaccacaaagctcgagaaagagcaggcatcataacccccacctttttaggaccaataccagttattctgcagcttgattctgccatggaggctttgcagtacttgtctgttcgttatgctgtgttccaggctgtatataactactggaaatcaaagagagagcggtggcaaaagcctattttgcgacgtttgcagccgcctccgccagttaatgacacaaatccatacaatgtgttcagaccaagggagaaggcttatcgtcttcacacaaggaggatgcaaagacgagaaaatagtgtccaatcattcgacaaactccgtgtggtccggcgcaatctagagcaggctaaggcactaatgggcgcattgattaagagggaagagagaaaacgtgagactatggagtgtgaggttcaccttcgacgtatccagatgagatacaagcatgaggcacagcttattgatgatgggattgctctatcaggcctccagcaagctggatcaagtgaagatgattatgcagattcagatgatacggccaacgagcaaccatatgtacgatcggttgcttttcatcctagattccctgataataagctatcagctgttccgccattgcgtttgaagcgcgagcgtgagctaaaaagaagaccccaccagaatggctggttgttcaaaagggttcctgaaatgcgggatcctgaggagccagtaatgctatttacaagaccaattgaccctgataagctgaagatggctggtatcaggccaccactagatccacctattgatagtggtactactgctccaccattccggtggcaagctagaattggacggggaggtcgcatcatctttgaccgctggaatccttttcttcaagtcccggtcggccaggaaaccaatcatagaccctcaatgccagaaggatgaagcaaaggcttttgctgtcacatatatctctgttcagctggtgagagattaacaagtggaagagctgtttctccatgatccagttggccctcggagctccgagctctccttttgatgtggcaggaaattctaaggtttatttatctgatgaaagaaagacagccatgcttctctcctggatttgctgctgatgctgcttgagggaacacgattgaaagatgagaatggagtcatggattggctttcctggtgctaacatattttcatcagttcctcatctctttgcagctgttgtacaattggtggcgctgtacatgggaaaaaagggtaagaaatctgtttacccggttttttgtctgacctcttacttgtagaggcagtatcagatgttgcaatgattttgacaactatttattgggaagggaaaaatccttctcattgatacatctgcatgttgctcgcccacatggtgattcatcaccctagtgcagttctgcatataatcaaacttgtaactgcatgctttgttgttgcacagtggtagttaatgagaaaatattgtctgtttctct

SEQ ID NO: 13651 - DNA, 1274 bp, Oryza sativa
  ref <308>: DATABASE ACCESSION NUMBER: AK110999
  ref <309>: DATABASE ENTRY DATE: 2001-12-06
gatccgaacaactctgaactctgaagtgaaatccttttcgttttcgaatcggactcacactaaatctcctcatctttttatatcacgagctatcgtgcaatttatcgttgatcgatcgaatcgtggtgaagaaatctgcaacgaaaaccgatggacgccaacatgctgagcgcgatgatggccgccgtcggcggcgacaagccgcagccggacacgtcggagcagatcaacgtgtcccccctcgccctcctcaagatgctcaagcacgggcgagccggcgtgccgatggaggtgatggggctgatgctgggcgagttcgtcgacgagtacacggtgacggtcgccgacgtgttcgccatgccgcagagcggcaccggcgtgagcgtggaggcggtggaccacgcgttccagagcgagatgctggagatgctccggcagacggggcggccggagatggtggtggggtggtaccactcccaccccggcttcggctgctggctctccggcaccgacatggccacgcagcagagcttcgagcagctgcacccgcgcgccgtcgccgtggtgatcgacccggtgcagagcgtcaaggggaaggtggtcatggacgcgttccgcctcgtcgaccacatggcgatggtgctcggcggcgccgcgggcggcgaggcgcggcagaccacgtcgaacgtcggcgccgtcgcgcggccgtcggcggtggcgctcgtccacggcctcgggcggcactactactcgctcgccatcagctaccggatgaaggagggggaggagcggatgctggcgtgcctcagccggagcgggtggtccgacggtttcgcgctgcggcggttcggcgcgcacgacgccggcaacgaggcggcggtgcgcgggatgcgggacctcgccgtgggctacggggcgcaggtgagggaggaggacgagacgccgccggagaggctcgccgtggtgagggcgggcaaggtggacgccaaggggaagctggaggagaaggccatggacgccatgtccgccaacatcgtgcagacgctcggcatgatgctcgacaccgtcaccttctaggattactagttttattttttcgtctttttttttcaattttgaccgctggtaaatttcttttcaattttgaccttgcccaatcggctcttgagctttaatctcttaagcaaatatatatgttcaagggatttttttttcgatagatgaaattatttttcttgtgaagtatagtacaatataaaagcagacgcttatat

SEQ ID NO: 13652 - DNA, 1449 bp, Oryza sativa
  ref <308>: DATABASE ACCESSION NUMBER: AK111000
  ref <309>: DATABASE ENTRY DATE: 2001-12-06
gtgcaagcatggtttaattgttgttgcctcctctcaagctagctagctatactactccgatcctctctcgcttattgaaacctagctactgcttcacatgtagcgcgtgctgcaactcgtgttgtgtcactcacacacacatccaagaaccaagattccgaggtaaccaacgctcgatcttttacttaccctatctcccgacgatcgatcgatcgatcgatggaggggagcagtaatagcccggataggcagtcgtcgggcggcagcccgccggaggagcgcggcggcgggggaagcggtggaggaggagggcggagcgccgccggcgagccggtgcggtcgcggtggacgcccaagccggagcagatactgatcctggagtccatcttcaacagcggcatggtcaacccgcccaaggacgagaccgtccgcatccgcaagctgctcgagaggttcggcgccgtcggcgacgccaacgtcttctactggttccagaaccgccgctcgcgctcgcgccgccgccagcgccagatgcaggcggccgccgccgccgccgcagcggcggcctcttcctcttccccatccgccaacacctctcccgcagccgcgagcgccgccaccgtgcaggtgggcctcccgcccggcgccgtcgtccacaccatggccatgggtgggagcgcgtgccagtacgagcagcaggcgagctcgtcgtcgtcgtccggcagcacgggaggttcgtcgctggggctgttcgcgcacggcgcgggggcctccggcgccggcgggtacctgcaggcgtcgtgcggcgcgtccgcgtcggcgtcgtcggcgctggcgcccgggctgatgggggatgtggtggacagcgggggaagcgacgatctcttcgccatctcgaggcagatggggtttgtggggagccctcgctgctcgccggccagctcgccggcgacgccgagctccgcggccaccgccgcgcagcagcagttctactcatgccaattacctgcagcgacgatcacggtgttcatcaacggagtcccaatggagatgccgaggggtccaatagacttgcgagccatgttcggccaggatgtgatgctcgtccactctactggggccctcctcccagtcaacgactatggaatcctaatgcagagcctccaaatcggagagagctactttctggtaaccatccatctccaagctcttactagctggtctcatcgctctctctctactccgatcagtcaatgcagtttcgtcttcatgaaagcaccacatttttaggcatgcattcatgcttatatatgtgtatcatgtttgaatgtgcaaaactaattactattaatttaattaattgcatgcatgtttgtgtgaattgtgaaatgcatagctagctattgttgtgatcttcttaatttcctgcttaatgaggagtacatttat

SEQ ID NO: 13653 - DNA, 1353 bp, Oryza sativa
  ref <308>: DATABASE ACCESSION NUMBER: AK111001
  ref <309>: DATABASE ENTRY DATE: 2001-12-06
aatccatccggtcactcgccaactagtatccccattcgccgccgccgccgccgccttcgccgccggcgatacggtggtcagcgccgccgcggccgctcgtatctaaaggtatatggccaaaatggttagtcagtgtatctctccgcggcagtcctttcgcgttcctcgtttttcatcagctcggcctacgctaagttcacgtttagcaattggctacgccaacccgtcgttttgcggtgttaaacgctcaaatcgtccgagttttatagcagcagcactggatgtaccaaaaagtatgtcctcccctaattcagagagctccctgcctttgaaagaggttatctgggcatggtgcaatgctgacgcggtgtgcttcgatgttgacagcacggtctgcttggacgagggtatcgatgagctcgcggacttctgtggggcaggccaagcggttgctgaatggacggctaaggcgatgactgggtcagttccgtttgaaaaggcattagctgctcggctatcgttgttcaagccatctttggggcaagttgaggactgcatggagaagcggccaccaagaatatctcctggaattgctgagcttgttaagatgctgaaagctaaaaatgttgatgtgtacctggtttctggaggcttccgacagatgatcaagcctgttgcaatgcagctcggcattcctcctgaaaatatttttgcaaaccagttactgtttggaacttctggagagtatgttggttttgacccttcagagcctacttcacgaagtggaggcaaagctgtagcagttcaaaacataagacagaagtgtggttacaggacactctttatggttggagatggtgcaactgatcttgaggctcggcaacctaatggagcagacttgtttatctgctatgctggtgtgcagatgagggaagcggttgcatcaaaagccgattggttgatctttgattttgacgaactaatgggctatttggtttaggttttttttttcctagaaaccaccagttcttattttgtctattgatgagtaaataactgtccatggaagcacttcagagaatcagagctacacatgtcaaggcgtttaacagggatagtaataacatgtgtcaagcgaaggtgtttgatctcagttaaaaattcctctatctttctatcaattttccttttcaagccaatggcaccaagattccagagtgtcaatacttaccttgtgtgttgttttgtgatttatcattggcctgttcagaacagggaggatgtcaccctagattgatgccttcacagatgttgtaatgtgaaagcttttatagtatgcttgtctttctttct

SEQ ID NO: 13654 - DNA, 1452 bp, Oryza sativa
  ref <308>: DATABASE ACCESSION NUMBER: AK111002
  ref <309>: DATABASE ENTRY DATE: 2001-12-06
aaagcacaacactcgcagccattctgctttgctttgctgcttcttcctcctccctccctgcttctttgctttcttgctaatttgcaggtaactagaggtagtacagtttagcaagctcaaagctgagagagagagaggggttataatctgtcatggagtacgagaggatacacaaagttcagatgggagtgatgtctccaaccaagctgaggatgaagctgctgggatcccatggcggcagcatcggcagggttgacgaggcaaagaagtcgccgcgagcgtcgccggcgaggctcgacgccgacgaggacgacgacgaccaccccaagaacagcctcctgccccaagaactcgacgaagattatcccaaggaccagtcggattcttctcgctcgcgctccgacgcgagccatgggagagctggcaatggctacgacagcggcggcttcgagttctacagggaggagaggccgccgccaccgccgccggcggcggtggcggtggtcggcgggacgttcttcaggcaggtgccgtcaaagtggaacgacgccgagaagtggctcgccgggagacacgtcgtgcactccaacccaatcttctccaagaaggccgccgccgcagcagcggccgtgtccggccgcgttgcgccggaggcctcggcgtcgtcgtcgccgccgtcggtggcgagcaggcagcgccagcagaagaggctccgcgtgtcgtcggaggcggcggcggtgtcgatgcgggacgtggggacggagatgacgccgatggcgagcaaggagcagtcgcggagcggcacgcccgccggcgccgccacgccgtcgctgagtccgctctgctcggtgccgacgagcccgaggggcgccgcgtccgcgtcgtcggcgtcgtcggagcgggagctccagatcaggacgcgccgcgagatcgccgcgctcgggctgcagctgggcaagatgaacatcgcgtcgtgggccagcaaggacgacgacgacgagctcccccgcgcctcgccggagaagagaccgagaccgagaccgagacctcactccggcgacggcggcggcgaggccaagaagagggagttcgaggcgcgcgccatggcgtggcaggagacgcacaagtgcaagctcgcgttgaggtttcagaggaaggaggtgaagattcaggaatgggagagctgccagaaggccaaattcgaagccaagatgaggcacgcagaggtgcaggcagagcagatgaaggcgagggcgaagcagaagctgagcaggaggctgtcggcgttgagccacaaggcggaggggaagcaggcgagggtggaggctcgccggagccggcaggcggcgcggctggcccgccaggtgcaccgcatccgggagaccggcgccgcgccgtcgcgcctccgccgctgctgcagctggctgttcctctgaacatctgaagaaaaac

SEQ ID NO: 13655 - DNA, 1314 bp, Oryza sativa
  ref <308>: DATABASE ACCESSION NUMBER: AK111003
  ref <309>: DATABASE ENTRY DATE: 2001-12-06
ataccgcggcttcccctcctcctcaagatcgccgccgcgaccgccgccggcgcgttggcgctcattgtcgcggcggggctccggcgggatgacgccgtcgcctccctccggcgggagatacgcgacgccgtcgccgccctcgtggcgagcaacgaggacggcgtcgtcgagggggagggcgaaggcgaggacgccgccgaggccccggcgccgtccgtgctgatcacggggttccgcgcccacgggaagagctcgctggtgaacacggcgtgccgcgcgctcgcggccgaggaaggcccgctgctgctgcgcgcggaggcgtcgccgccgggcggcgggtccgacggcacgcggaagcggcggagggtgaaggcggcggtggccggggatagcggtgacgcggggacggacgaagccgtggtggagcttctggacgcgcctccgctccccgaggcgacgagggccacgagagctgacatcgatgcggcgatcagcggggggaacccggagtgcgtggtgctggcgctgcgctgcgacgcgcccgcgaaggagcggaacgccgccgtgaagcgcctgccggagatctccgccgccgtgagggcgaaaggtctgaatttgattgttgtattgactttcaagaaggccatgagatcagcaagacaagctgaagagctcatacgagaggcttcattcagggcgagaacagattgtgtctacttcatcgagaactacacctggaacaataatggtcccaaccttcgccatcctcctgtcatcaagaacgactttgagacacatttcacggttctgacaatcattcgacagtgccttgagttcatcaaattaaataggagtcaatccaagcgggaggaaaatggtgagaagggtaattcaggagatgttaaaggtatactggaaaaagtcttaacagcaaatgctaaatcttcaggagaacttagcgttaaacctgcactggaaaaagtcttaacggcaaatgctaaatcttcaggagaactgagcgttaaacctgcagatgtcaaacctgttctgactgttcaatgattattactgaaatgtcagagcaattcgtgcgcacactcaatcatcacacatttgcacaggtatgacttactgcagtactttgtatgcgttgtatgaggtagtttgctacactgcacaaagtgtatgttcattcattcatccgttctgtatgatgttatataggtctttttatttgggtgtgtggcacataactgatttgttggtattgccatcatctagagacataattaaagaaagtgcctagaaaaaagc

SEQ ID NO: 13656 - DNA, 1391 bp, Oryza sativa
  ref <308>: DATABASE ACCESSION NUMBER: AK111004
  ref <309>: DATABASE ENTRY DATE: 2001-12-06
cttttcccctcttctctcccttcctcatctctctctcccttctcttctgcggccagcaatgcctcggcggtgatggcggcgacaggcaacgcggcggcggtggagcagcgcgcgggcagcgggggcaggagcggcgcgcgggctcccccgtggtaggagcggcaggtgcgctcgaacaggtcctgcgccgccgacgtgcggccttccccgcggcacatggaggagaggagggagttgagggcgacggcgtccggctctacgccgtacttccccatgacgtcaaaggcctcgacggctttcttgaggttgccgctggcacagtaggaagagaagatggaggcgaaggtggcgacggtgacgcggccgccgccctccttgttcatggtgaggacggcgtcccacatgggctcctccatgccagccttgccgagatgtcgacgaggaggttccaggcgtagccggtgtgattcaccgaccgccccgactagacgaagaagcggacggcggacttggggcgggagtagcagacgcgagacctgtgcacctgctccgcgacctccaccgtcgggccgatgccgcaggaggagagctccgcttccgcatccctcggctagacctggccgaggatcttcaggaacgcctccgggtgcggtgaatcctcctcgccgttcggagagagagagagagagagatggacgcgatggatgtggagacagcgacgacgacgacatgcggatggatgcggcgctccgcgtcgggctcatggcgacatggatgaaaacggcgctccgcatcccttcacatgccccgtcgaggtttccccggtcgacgaggtcggcgcacgcaactatgagcctcctcggctcgccgccccccatgtgcggcaacaatggcggctgctcggagtcggaagctgaggccgcgattactgccgtcgcggcgtcgtcatcgtcgtcatcggtcggcttgtcgctgcgggctggtgatgagccaagcacgtcagcatgggcagcatccggtgatgcccgagcttggtgacgccgccgccgccggtggaagcacctgcctcgccggccgccggccgcccccatctactctttgtcagccgcccgtggtgagaggagagagagagaggaagagaggggaggagaagaagaggctgacccatgggacccacgtgggtcccacgctgagtcagctgccacgtcggacaaaaccggagttaaaaccgccgagagacttagtttgcactggttttataagttgagggatgcattatatccggttttgtggtttaaggatgattttgtaactcgatgacaagttgagggaccttgggtgtactttttcccacagtaaaatggaagctggtgtgtatcatgttatcttcc

SEQ ID NO: 13657 - DNA, 790 bp, Oryza sativa
  ref <308>: DATABASE ACCESSION NUMBER: AK111005
  ref <309>: DATABASE ENTRY DATE: 2001-12-06
aaccctagctttgcaaggagacgggcggcggggggcgctgcgtgcggcgtgcggtgcggcggcgggcgcggtgtacggcggcggcgagccggcgaccgcggggcagccagccaggcaggggcggctgccggctggacgcactggcgcagcatctcctagggtggcggcggagcgggcgcacggccgtggaggcgtcgacgcaggaagaggaccactcggcttggcgccagggcgcggggcagcggctgactcgtgaggcagcggcgcggcgcggcctgcggcgacagcggcattgcggcgcgacgcgcggcctgctgcgacagcggcagtgcggccatggacgacaagctctacccgcctcgaggcccagcgcgaagaaatcaagtcccgagccccgaggtaacgaccgcaccccccggcgatccttcctcctggtttggtttaatccctagctcctgtctcatgtgaatcccctcggtacttaggttttgcatcaagatttcagtttcgcatgattttctatgtttagcatccatgtgttcctgatcctgatgttggatgaactagtaatgggctaacaacctttttttaattgagattactagcgacttagcaaacatatttctgtgcatcatatatgctaatttgtgctttgtatcataatgtatgaacttgagaagcaagatagggcaacaatagttgaatgattgtttagttacattcattgaaagagaatttttcttgcaaattaaagacaaggacatcatcacttatttccaaaatatcaaac

SEQ ID NO: 13658 - DNA, 795 bp, Oryza sativa
  ref <308>: DATABASE ACCESSION NUMBER: AK111006
  ref <309>: DATABASE ENTRY DATE: 2001-12-06
acgtggcatcccagtcatcaaataaattaaaaaataaagagggccccacctgtcagtgactctcctcctctattctctctttattcgttggcagcagcggcgggaggacgaggggagcagcggcggctggcggcatcggggcgcagcgcggtcggcggctcgcggtagtgggaggacgagggcaatggtggtagcggcggcccaagatgttgctcgtcgtcctcgccctcgcaattaccggtgcggtcttcgacggctcgcgagtcgctggaccacatctccatcaactgcactggcggggtcggggccacatccggctgccgctccgtccactcgcgccgttcagcaccgacgaggagggcgaggctcctcgtccccgctcagccgcggctttgcttggatagtcccgactggaggcagtcggcggcggggagggagtgggaacaggagcgggacgacggcgacgacagaagaggaagttggctcgcgtcggaatcttggtggttcgtaggcgatgatgccaccgccgccgctgccacccgagttcgacgcgagaaacggcgtgcctgcgccggggcaggcggagcaggaggcgatggagctggtgcgcgcgctcaccgcgtgagttgatggatattttgtaatcttgagctttttgatttctgttttgcatgcacgtagtggctggctaaagtctggctcgttctttccagttatgcatgtaatgaactcctaatggagatgaataaatagagaagaaaacagaaaagctgcggtgagacttaagcagcacac

SEQ ID NO: 13659 - DNA, 525 bp, Oryza sativa
  ref <308>: DATABASE ACCESSION NUMBER: AK111007
  ref <309>: DATABASE ENTRY DATE: 2001-12-06
ctcgggctctcaggctctcagctcacgcagccgcagcgttgttgctgcgatctgcggcgagacaatggcggggcggccacggagagggagaggcgggtcaggcggcggagaagcccagtgctgggggcttcctccacatagacgggtgcagcgggcggcgagccggcgaggcctcatctggcgcgcggcatcgaccatcgaggactccgagagtagcagacgacttgctttgtctagataccaactgcagcagtaaatcgagctctaaccgtggttgtaggaatgttcctacttggaataactgaagaaaaataacaagaaacggtaatgcccaaacgaatgctactttctgcaaatgtcactaaccaaactggagaaatggggaaaacataaggtggtattcatgttacactttgttgttttgataagggaattaataataatgtgtcccggccaagagatgcacaaagaaatcttgttattactttttggagttgtgggaataaattcttgtacctaagtgct

SEQ ID NO: 13660 - DNA, 915 bp, Oryza sativa
  ref <308>: DATABASE ACCESSION NUMBER: AK111008
  ref <309>: DATABASE ENTRY DATE: 2001-12-06
attttttttcaatcaatcaaaatccaagaacaagaacaagaacaagaacacaaatccagagagagaggcgattggcgccaccattgccatgcacgccgcctcgtccttgttcttgacccgcgccgccgccgaggccgccgtcgccgcctagtgccgtgatcctctttcgccgccgccgccgatggcgccgccgatgcaggagggggaggagcggccgggcgggagcgcgtgcgtgtggatggtgacgacgctgctactcctctccgtgctcgccggcggcgggtgcctcgccggctacgtggtgctgccgccgcacgaggcgccgcactggctccccgccgtcgggctggcgctcgtcgcgctcccgtgggcgttctgggtcgccacgtgctcgtaccggtgtgtccggaggcgcgccgccgaccggcaggccatgggctccgccgccgtggcgccggcggccaccggcagcatgcgctcgtgcgccgactcctgaaactcacttgttaattagagttattcaagacgcaaatgaaggtgatgagggcggaattaaattcgatgactccatgtacagatcgattcaaattggaggatagcaaagtatttggatgaatttgatatggtcttgcgcctatgcatgaatgcagatataagccccctgcttggtacactgaaactgcaaggaaatgatgaaaagaaagggtgcaacctattgcagtttcaaagcaaaatgcgaatgaacagttcatcttgaattaagatttgtcctacaccttttttgtatttttggaagtatgacttgaaaagttgaagtaatcttgtttgtattctgagaaggtggaagtgatgatctcatagatgatggataggacagtgtcatacacaaatggtcaaatataatatactgtcttg

SEQ ID NO: 13661 - DNA, 788 bp, Oryza sativa
  ref <308>: DATABASE ACCESSION NUMBER: AK111009
  ref <309>: DATABASE ENTRY DATE: 2001-12-06
tttcccttttttcttttcctctttccacgaggcgacgacggcgacgatgagcgcggcggcggcggcggacgtggtgcacagcggcggctgccactgcgggcgggtgcggtggcgggcggaggcgccggcgagcgtggtggtgtggatctgcaactgctccgactgcgccatgcgcgggaacgcccacttcgtcgtcccggcctccaagttcaccctcgccgccggcgccggcgagtccctcaccacctacaccttcggcacccacacggcgaagcacacgttctgcagggtctgcggcatcacctccttctacaccccgcggtccaaccccgacggcgtcgccgtcaccgccgcctgcgtcgacccgggcaccctggcgcacgtcgagtacaggcacgccgacgggaggaactgggagaagtggttctccaggagcgacatctccgacttctccaagcccaaggcgccgccgccgccgccgccgagtaagacctagctgctccggtggtgatggtcgctgggtaagttcctctccccccctttctgttgtattgtgagcttctttagtatcaaaaattatgtgataataaatgaaacaccaatcgatatggagatatgtgcaatatgtgttaattaactacatatctgtgttgcaattggtgatttggatgtttaatttgctgctttctcatgttcaattcgactgtcttaaaatgaaattgagactagaagaaggatatgaggatatgctttcgtgtggtgtatatccaatgtgtacgaaaaaaaag

SEQ ID NO: 13662 - DNA, 917 bp, Oryza sativa
  ref <308>: DATABASE ACCESSION NUMBER: AK111010
  ref <309>: DATABASE ENTRY DATE: 2001-12-06
cctatcgttatctcctcccgtcccatccaaccccgccccgtaataccccccctccataacacccactgccacgagcccacgaccgcattagcattagcattagcataagggagggagggagggagggatcattagaggaggagcacagcacatggctgccgcggccgccaccgtgacggcggtgcagccagcggcgtcgagctgcggcaagcgcgacggcgacaatgcgtgcgtcgtcgacatgtgcgcctctctcaatcttccccgtcgtcccttcttcctcttcctgacatgttatcacgtcacgcgcgtgcgttcactgcaggcccaggaaggcgaagaaggggaggtcgccgccggaggaggaggtggaggccttcctcgccgcggcggagagcagcgtggcgcggcgcttcgcggccaagtgagtactaagtacattacggcagcatcgcacggtgacatcgtctcagcgcgagcgagctgtggcctttctgtgaccgtaaggtttggttttctcggggatttatatagctatagcccttgcactcgcagcatcggcacggcagtgggcctgtaaaattttccgctgctgctgaagctcgcgaagtgcagcttgtcagtgtggtgttgttgcactcgcagacagtaaaaacgccaaatggggttactgtacatgcctctgggcttgtggtttcctctgtatttttctcttgctttttgtatgcttaggcaccgtttagatcccgaacttttttttttcaaacttttaacttttctgtcacatcgaattttcttacacacataaatttttaaatttttctttacatcgttctaatttctttaaacttttaattttgacgtggaactaaacacagccttattctattatgccaaatggagttctgcttttttgg

SEQ ID NO: 13663 - DNA, 582 bp, Oryza sativa
  ref <308>: DATABASE ACCESSION NUMBER: AK111011
  ref <309>: DATABASE ENTRY DATE: 2001-12-06
aaaacgcatgcatgaaataatcctctctaattaacacagaaaccctaatcggtgccggttggtaaccccacaagcttaacgtgtcgacgatgagggagctgatgcggaggatgagcttctctgaccgcgttggcggcggcggcggcggcgacggcggcggcggcggcgcggcggcggccgtgaagcgcgggctgatgaggaggctgagcttctcggaccgccgccaagagctaattaatccgttgttattaaccgcgatctcagctcgattaattgatgaattaattgagcaaattaagcagatgagatgagagatgagagatctcgatcgacttctcttcaattgagtttctgaaaaattatagtaggatgttgattaactattcagtagcttagttagtgctgatgaatgccaaatcgatcgagatatagactcggtgacttctcaagtggtctttaatttctcctttggtattcatccatgtcttacctatggttattaatattatgtgctgattgcaatcgatatgatcctgtcagaaatgtccattggaataataattcatgaattattcagcatgc

SEQ ID NO: 13664 - DNA, 474 bp, Oryza sativa
  ref <308>: DATABASE ACCESSION NUMBER: AK111012
  ref <309>: DATABASE ENTRY DATE: 2001-12-06
ataacctatagactgcaggtctgggcgctagctggaggagagggctccgttttatccattgggcgtggatgggggcgatgggacgcacgtgtctgggtgatgaaggcaggcgtggcgacggcgacgcgcgtacatgggcgatggcgcagctccgtgtttcctggagagaatccaggagagcggttagaggtgcggcttggcgtggcgcgggccctggcacgacgcggcacggaagggacgacgctggcgcgggcgtgggtccggcacgatgcgacgcacggcgcgatacaacgcgatgcggttgcggagcagcaagtgcggtgcggctagggttggggtcggacgtggctgaggggaaggaggcgcggttgcggtgcggcacgggcgtgactggcgtggccggaagcgatgtggtgcacgcggtagacgggatcggacggttggcggacagtgaatagtggcagctgagaaaag

SEQ ID NO: 13665 - DNA, 490 bp, Oryza sativa
  ref <308>: DATABASE ACCESSION NUMBER: AK111013
  ref <309>: DATABASE ENTRY DATE: 2001-12-06
atctccatctcgatcctggaagcgcgagagagagagggtgcgtgcgtgcgtgcgtgctagagccaagaaccacgagcacggccagcgtcggcgagaggcggcggtggatccggctatgtcgggcgagtaccagttccaggacgagctggcgccgctgttcgcgcggccggggggcggcgcgggggagatgcagatgctgccgtcgtcgtggttcgccgactacctgcaggcggggacgccgatgcagatggactacgacctgatgtgccgcgcgctggagctgccggtcggggaggacgtcaagagggaggtcggggtggtggacgtcgtcgcggccggcggcggcggggcgccgccgctgacgccgaacacgacgtcgtcgatgtcgacgtcgtcgagcgagggggttggtggaggaggtggaggcggcgccggcgccggcgccggggaggaggagtcgccggcaaggtgcaagaaggaggaggatgag

SEQ ID NO: 13666 - DNA, 750 bp, Oryza sativa
  ref <308>: DATABASE ACCESSION NUMBER: AK111014
  ref <309>: DATABASE ENTRY DATE: 2001-12-06
aatcctttctcccttctgtgttccatccctagtccccacgccggcgccgactcccgatctcgcaaggccaccgtgcgtctgccgcgtcggcacccgtgcagggttgccgactcgccacgccctcgcccgcgcagggccgccggctcgccgcgcccgcgctgtcacgtcccggcgcgcccgcaccgtcaggtcccgttgcgcacgcgcagggccgttggctcgccgtgccgccacgtcccggtgccgccccaccaggtcaaaggggaaaacgacgaccaatcgctagatgcggccatggcttcgtcttcaccactcgcggggatggaggctccacggagataaattacctgcacggaggtggtgatggtgaaagatcttgccccgtttgcatttcacggtgatggtgatggagaaaattcttctccgtggaggcaggtctggtggtgtaacctccgactaggaattccccgttgccatctcctccgtggaggcgggtctggtggtgtaaatctccagccaggaattcccgttgctatctctagtctgaacatattaagaaatagaacagactccctcggtcccataaaccacgaatctagaattagatacgaatctagaattagatatgacatattatagtacagtctgtttagattcgtagtattaggatgtgtctcgcatcagttctatcttgtttttttttatgtgacagggagtatgaactgtaagagaatcaatccttttcgtgtc

SEQ ID NO: 13667 - DNA, 574 bp, Oryza sativa
  ref <308>: DATABASE ACCESSION NUMBER: AK111015
  ref <309>: DATABASE ENTRY DATE: 2001-12-06
actctcctgatcccctttctcatcctagatccaatcggccagggggcggcgacggcgaggcagccagccgccggctgcgccttccacggtcctccgcgcgacatccacgagcctccaagctgcgccgccacatgcatgccgagcttccgcgagacctcgacacgccgctgttgttgtctccaagcagatcttgcgctcccatcctcttctggtcgactactccacgcggcggcccgctgctacagctattgcacgttgtgccatggctgattagttgccactaatctttctggtttttcatgcttgattgcttcttgttggactattttgtgcttgattgcttttgcatgtgtaagtgtgagacagatcttttgttttcagccatcaaacttgttaatttttgttgtttcctgattaattacttaagaatggcgtgtgtttttgcacttggcaagtgtttagctaagcattgcccctgctgatgtgtatttttgatgatttactgatggtatgtccatcgtttgtactgcatatttctgaacttctgaactaaccaaaggttggagcaaaaaag

SEQ ID NO: 13668 - DNA, 592 bp, Oryza sativa
  ref <308>: DATABASE ACCESSION NUMBER: AK111016
  ref <309>: DATABASE ENTRY DATE: 2001-12-06
ttggagaaggcatacctcgaatcgggtaccggagacggaggaacgaccgaaggggcctctttggtcgttccagccggcggcggcgcgctctcggctccaacgccagccgcgccacccagcaatcgcacggcgggagacccagctggacggcggcggcgttcggcaacccctcttctgcctcttcctcgtcctttctactaggagtagtacctagctagtagtactaggttccaaggagacatggagagcagaggaggagcggcgtgaggaggaggagcaacaacaacgaagaagaagaaagatgcgatgcgatgcgatcccgtgtccctccctcccggagacgcggcagcggcggcgcacgggtggggtgggtggggattggggatgttccgtggcttgcgggagaatccaatcctccttcagagccagaggaaagagagcaaaccttttctctcagactcctggaacttgtcacgcaagaataataatctcaaccaatctaatctgttgttccgatttctgaatctttcattattagtatctttttattcaaaacaataaatactacagtttatcgggtttgaccgagttt

SEQ ID NO: 13669 - DNA, 570 bp, Oryza sativa
  ref <308>: DATABASE ACCESSION NUMBER: AK111017
  ref <309>: DATABASE ENTRY DATE: 2001-12-06
aagctccgtccctcggtaactgtaagctcctcatggcgagccggagccggtgaccgctggcggcggcggcggcggcggcggaggcggaggcgggaggcgagggttactcgggatacggcggcccgagaggagatggcagcaggttgcaacaggcgttccatggtttcagggctccacaccctccgggtgacgccgagccggggagtatcgccgtcttggagaacctaggcctcctatcgccaaatctacgcccatcaacgagacctatcagctgcgctgggattacttccgaggggaataatagaaatggctggagagacttgatgaagatggataggtgggtgactgaacccttgggtgatagctggttgttggcaacttggcgtgcaacttggtacatcactcattacagggagaagcgcatgctagttgagatggaggagctcctctgcttcttcacggtagaacatcactatcacaggtaattgaaccaatctgtgtagcttgtagcctctcttatggaggtcggaccaagtcactggttaattgagcctatctttgactgctgat

SEQ ID NO: 13670 - DNA, 506 bp, Oryza sativa
  ref <308>: DATABASE ACCESSION NUMBER: AK111018
  ref <309>: DATABASE ENTRY DATE: 2001-12-06
atgcgatggtcgcggctagcgaacgccaagcggatcgaacgccgaggcggcgaggcgcagcagttatacgagtacgtgttgatcgagcgcgaacgccaccgcccgcggccaccgggcagccagatgatcgcagcggcgagaggcagcgaagaggggaacgccgagacggcgaacggccgagccctagtggctgggggctagccgtggctggctctccgcctctgcctcctcgttgtcatctcctcatcctcaactatgcaatcttcatcagctgcgatcatatctgctcaaagtctcgacctggcgattgaaaactagaccgtaacatcggtaatttcgagcaattagcaattaccatgattttaattttctgattaattattgcattttaaatgatcgattcgattgattatggaattaatcaattatcgaaagtaatgtgaatgtattttctttttgcttaaaacatgaagacatttatttccttaatccttgccacgccttct

SEQ ID NO: 13671 - DNA, 851 bp, Oryza sativa
  ref <308>: DATABASE ACCESSION NUMBER: AK111019
  ref <309>: DATABASE ENTRY DATE: 2001-12-06
acagcaaagtaaaacgaccaagaaatcgaatttaggacaccaagacattggagtttcttcaccagctgaatctacaacggttccactatcaatcttagacagtataaacaggtcaacaaaaagaaaaatcgacagatttcttcagatatatgtagatctgtaatttcagtgctaatttggaagggaactcagctaatcagtggatttaaacgcgtcaggaactcagcgctcatttctcaatacctgcgggaacagcccgtggcaggcatttccgacgaggacagcagcggctacaaagcagaacagcaccggcgacgtaccgcgccgctccttagctcctcctcctcctcctcctccgccgccgccgccgtgggcatgggcacccctctcgtggcgatgcctgtgagcggcgtacatgccaccaccaagcacccgagcccgtggtgcaccacgccgttccggtccgcagatctggccctggaggaggaggaggccagccagccacccggcgcccaggcggcaagctcttcccgctcgccgccggcgcaggcgagcggaagccgtcgcgaggccgaggcggcgccggcgcggcgggggtcgcgcgtccgtggcgtgcgaaccgagctgggtcggcctgggagcgttactggtgggcttctttcgaatgtgtatcatgggctcatgggctgtatcctttcttgggcctactttttggagattttgttgggccttaggtctaatgaactcagcacctccgttcataggcttgggcttctatctccctgtctgagctgtctccaattcaggtctgtttatgacaaagtcattggatgtttgttcccttcgctaac

SEQ ID NO: 13672 - DNA, 588 bp, Oryza sativa
  ref <308>: DATABASE ACCESSION NUMBER: AK111020
  ref <309>: DATABASE ENTRY DATE: 2001-12-06
gttccaccctcttctctcattggccgagcagagctttgtaactgaagctgcagttgggtggtaggagatgaaggattgggcgccggcgatcatcgcgtcggcgctgttcgcgctgctgtgcccgggaggcatcctgcagatgccgggcaggaaccggccggtggacttcatgaacatgaagaccagcttggcgtccatcgtggtccatgccgtcatctacggcctgctgctcatgctgttccttgtcatcttggaggctcatctctacatctgatccgagtgtgttactgtgatttcgttttcttgatgacactgctgtagtgctgtgttttttctgttctctagtttctttagataacttctggacctgagaggcgctgaggacgcctcgagcccttgatccttcacagccacaaggcttatggaatactaataaagaagcaatgatgctttatgcttaaacagttcaagcaggagtcgtatggctctagttgactcgttgtttcaattggctaaagctcggctcatcggatgttcttgaaatcgaagagaagaattatgttccgacagtgatttttttatcagttt

SEQ ID NO: 13673 - DNA, 975 bp, Oryza sativa
  ref <308>: DATABASE ACCESSION NUMBER: AK111021
  ref <309>: DATABASE ENTRY DATE: 2001-12-06
acgtgtactcgttggactgcaggtgaagagatcaccgatcgatggctgccgccggagatggagcaggaggcggcggcgagcagctgacggtgctcggcgcgtgggggagcccgttcctggtccgggtgcgcctggcgctcgacctcaaggggctcagctacgagtacgtggaggtggacctcgccggcaagagcgacctcctcctcgccgccaaccccgtccacgccaaggtccccgtcctcctccacgccgggaggcccgtctgcgagtccatgctcatcgtcgagtacctcggcgaggccttcccttcctcctcctcctccgccgccgcggccaccacgatcctccccgccgccgacgacccctacgcccgcgccgtcgcccgcttctgggccgccttcgtcgacggcgagctgctgagcgggtggatggggatctacgacggcgggaagaccggggaggagagggcggcggcgctggcgcggacgcgcgcggcgctggacgcgctggagggcgcgctccgggagcgcgcgggcgggcggtggttcggcggcgagcgcgtggggctcgtcgacgtggcgctcggcgggttcgtgccggcgatgctggcgtcggagccgacgaccggggtcaggatcgtggacgcggacaggacgccgctgctggcggcgtgggtggagcggttctgcgcgctggaggaggccaaggcggcgatgccgccgctcgaacgcctcatcgcggcgggcaagaagaggtacgccgatctgcaggcggcggcggcggcgagcgagtgaggtggccggccatgtgtccgtcgctgctctgtttagctgaagaaaagtctggcatatataaacaataaattccgtagaaactgctatgaaaataatgttatttgttggtttatctacatattttagttttgtaactacgtatgtactgggtgtttcgttggatctttggtacggcgtccgt

SEQ ID NO: 13674 - DNA, 822 bp, Oryza sativa
  ref <308>: DATABASE ACCESSION NUMBER: AK111022
  ref <309>: DATABASE ENTRY DATE: 2001-12-06
tctctctttctcccattcggaatattgattcttgccctctcgcccgccttcctggtgcttcttgggagttgggagggagggaggggatggactggcggccggacggcgcggcgccgccggttccggtggcggcggcgcccgtcgtacctgtggatttcacggtggtcaagaggcggctcggtggcggcggcgacatggaggtgcgcgacgcgtcgggcggcctcgcgttccggttcgtggcggcggcggcggcgggcggtggcgggggcgggggcagggcgctgctcgacgccgccggtggtgttctcgtcaccgtgaggagcggcgagggagagtggcaagcattcagaggaaacagtttggattataaagacataatttacacggcaaaatcaatatcagtttgttcaaatcgaaatgaagtacatgtattcatgccaccaagaagcaattttcaagatacgaaagcaagctacaggctcataggaaatacatcccggagagcatgcacaataataagtggggactccattgtttctcagacaaatctcctatataaactcaagaaggttgtctattcaacacggaagtttagagtgaccatttacccaggaaatgatacacttcttgtcatggcaatggttatgaacttctttatggaaaaatgacacacaatcggaatgcctttttgaggaaatgataacttcctgccagcataaatcctgtatatatttttctttattattgaccagattgtttacgcccttaatatggaattatggatgcctcattcttctgtcattcagcaaattctctttactg

SEQ ID NO: 13675 - DNA, 777 bp, Oryza sativa
  ref <308>: DATABASE ACCESSION NUMBER: AK111023
  ref <309>: DATABASE ENTRY DATE: 2001-12-06
tagaatccgagtgatcggaggtggtgttggtggaggcggcgaggatgagcaggaacaacggcaagagttccaagctggagtgcctgaggctgatgagcctgtcgagggcgcgtggcggcggcggcggcgggccgtcggcgactgtgcgcccgggcggcgacagcggcggcgtcaacggcgcgaacacgtcgccgcgcaggctgtcgtcctcgtcgtcgtccaccgcgtcgccgccgagctcgtgcgtgtcgtcggagggcagcccggacgcggcgggcggcggcgcggggccgcccatggtgctggctgggtgcccccggtgcatgatgtacgtgatgctgtcccgggaggatccccggtgcccccggtgccacagcgccgtgctgctcgacttcaacgacgacgaccagcgccgcccgcgccaacgccggtgatccgatcggcgaggctagctagctggtgcaacagccgggggctcagttcttgcgtttagttcttcttcgtcgtcaccgtcgccgtcgtagctttaatttaattaccatcattcatgatcgatcagagtttacgtggatcccgaaaggaattatttcatagacctgtttcttgcgtgcggtgcaccctgtcaaacggaattggtctaggtaataatttcgcgtttcagtagtatttcctgttctagtgttcagctgagagctacgtgcaacagtgcaaagactttaagtttatcatgtcatcaacatttaaatcatttaatggaagtaatgctcttgtcctgtc

SEQ ID NO: 13676 - DNA, 588 bp, Oryza sativa
  ref <308>: DATABASE ACCESSION NUMBER: AK111024
  ref <309>: DATABASE ENTRY DATE: 2001-12-06
atccaccatggctgcctggctcacctcccacacgaccatggcgtcctggttggtgcccttccgcccctgctgcgtgtgcaggcacgccgccgcgctcgcgccgttgacgcacaccctcccctcgaccttcgcgagctcctcctccgtcatctcccctcctcctccgccgccgtggtgcagcttcttgccgccgacgccgatggagaagacgccgccgccgccgccggaaacagccccgccccgctccaccccccgctgcctcctcctccgccaccgctgcggccacccgggtgacgctcccgcgccggcgccggcgcggggaggcaggtcggaggagaggcaggagcccatggcggcggcggcaacacggcggagcacagagttgggcaaccgcttcgcaaaagtgcggattgtatagggtttttgatgtgttttttgatgtttcctcgtcttgtagacttgtaggctactcctactactccttgagttctcttctcacttgttgagtggagtatcatatgatttgtatggtcttgttaacttggagatttggggttgaaaatgaagaaaaaaagtatttgttttagt

SEQ ID NO: 13677 - DNA, 633 bp, Oryza sativa
  ref <308>: DATABASE ACCESSION NUMBER: AK111025
  ref <309>: DATABASE ENTRY DATE: 2001-12-06
agatcgaaaaaatcgctatctcgccgagtcgccagtcaccgcctcgacgccggtcgccgtaccgccggcgctgcacgcccccctccaagccgtcgccccatcgcccccagccgcccagtggtggggcggcggatgccgagcttggcgaggttgccgaggacgaaccaggcgaggaggacgaggatcttgtcgacgagccagagcgggagccacgccatgagcaacacggcgagctcgaacgtggacttgccgagcacctcgccagggaggacgtggacggcgtcgcgcaccaccatcgccgggagggcgctgtggtcgcacaggtcgagcgacaccaccatgccggagttgccgcacccgacgacgagcaccttcttgccgcggtatgcctcgccggacttgtagaccgcgacatgcatcacctcgctgctatatttgttcttggactgtggagacttgctgtcagtgggtgtgttcagaattgctgctgcagcttgcagcgaatttgtgatgcagcagctgcagcttgtatggctgccgagtagagcgagtgttgctatctgtttttgttctctttttcagaaatttcgcccgcaaattttaaatttgaattcaaatttttaaaagaactag

SEQ ID NO: 13678 - DNA, 815 bp, Oryza sativa
  ref <308>: DATABASE ACCESSION NUMBER: AK111026
  ref <309>: DATABASE ENTRY DATE: 2001-12-06
cactaaaacaacaacaattactagtttactttgatcgttctaggccttatcgatcttacgcatcacgtcgtaaaactgagaatgcaactaaaaaagattgatgatctgtgagaacctttgtcatgaacgtaaaaaatgctggtttaagtgtgtagtaatatggagggaaaaactctcacaagatacatctcggtacatatgcaaacacacaagtcaacaactgcaacgacacgctcgttggatggacccgtgcaggccaaagcctaactaggcacggtgcgcgagcagagtagcggcggcgattacagcggcagagaacaaggccgcctttgtctccttgggccggacagcagccgacggcgatggggccggagctcttacggtggcggcggcggagtcgcttcctgtcccagcaggcgatgccgaaggcgacgaccccccgaagaacggagccccggagaatggagcgggagctggaattaatggaatggaaggacgccaagttaactgatccattttgtcggtgtttgactgttttcagaaggtatttctttctttttgaattgaaaaggctataggtacaaagctttacaaactgtgagttaattgagattttctgtaattattttacagttaaatcaaacggttaaaagctttgtttgtaaatattttttaagcatgtgtaatatttcctttttttgaaagagttatttaaaagcatattttgtaatgttacttttcagaataattatactctgtaaaaacaattatttataacatgcagaagcaatttatcgctctaccttttttttccc

SEQ ID NO: 13679 - DNA, 668 bp, Oryza sativa
  ref <308>: DATABASE ACCESSION NUMBER: AK111027
  ref <309>: DATABASE ENTRY DATE: 2001-12-06
acattctctcctcgccgtcgtctcctcctcctcctcctcctccacatcgccggccggccgccgccatgggttgcggtggctccaaagaagctgtggccaccggcaacaccgtcggctccaccggcggcagatccagccgccgcctcttccggcggaagtccagcgtcgtcgccgccgccaacgccgccccgtctcacgcgccgccgccgccgtccgacgagagctcggccgccgccgttgtcaaggaaagcagtgtcaacgaagaggtcaaggggaagggcaaggcgacgccgaaagagaaggccattgatgaggagaagaaggatgtcgaggagagcaccacggcggccgccgccgatgaggtcgtcgtcaaggacaccggcgtagtgatcgtcgagaagacgacgacggcggcggcggccaaggcgacgccggcggccgtgaagaagatcgtcgaggagaagaaaaaggaggaggccaagaacaaacaagaagctgtcaccgatgataagaagaaggagaaggtgattccgaccaaggtcgccattgatgagaagaaagaggatgtagtagtgccaatgaaggaggagttcgtcaaggagaaggagaagatcactgacgccaagaacgacgtcgcatcaaccgagaatgtcgccgccgtcgatgag

SEQ ID NO: 13680 - DNA, 1085 bp, Oryza sativa
  ref <308>: DATABASE ACCESSION NUMBER: AK111028
  ref <309>: DATABASE ENTRY DATE: 2001-12-06
aatccatctcaaacactggcgcgtcggcggtcagtggcccgtccactcggcccctcctctttttaactctctctctctctctctccggccgccaccccctcgccgcgccgacgtctcgcctccgccgcctcgttctcgttccgatggctagacgcgtcagcaccacccgcctcctcctcctcctcctcctcgtcgccgccgcggcggcggcggcggcggccggagaccaggaggacccgcgtggcggcggcgacaacggcaccgcccgcttggatcgccgcaccaagatgttcctgcacgcggcgcgggcgagcgacggcggcgccacggggatggagaaggccgggctgggtctcttcgacgccttcttcgctagcttgtccatgattctggtcagcgagattggggatgagaccttcatcatcgccgcgctgatggcgatgcgccaccccaaatccaccgtgctctcaggcgctctgtcggcgctggtcgttatgaccatcttgtccaccgggcttggcagaatcgttccaaatttgatatccaggaagcacactaacagcgcagcaactgtcctttatgcgttctttgggctacggctgctgtacattgcttggaggtcagattctaaggcatcacaaaagaaggaaattgaagaagtagaggaaaagctggaagcaggacaagggaaatcaacatttagacgcatcttctcaaggttctgtactcctatttttttggagtcgtttgtgttgaccttcctggcggagtggggcgaccgaagtcagattgccacaattgcgttggccactcacaaaaatgcggtaggggtcgctgtgggagcaaccttggggcacaccatctgcacatcgttcgctgtggtgggtggcagcatgctggcatccaagatatctcagggcacagtggccaccattggaggcctcctcttccttggcttctctctgtcatcatatttctacccaccattgtgaattttgtgatgaactgatgacatcctaccaagggggtgtatattccgttgcagccaagcatgctggcttgaaatataaacgcaggcgctacat

SEQ ID NO: 13681 - DNA, 888 bp, Oryza sativa
  ref <308>: DATABASE ACCESSION NUMBER: AK111029
  ref <309>: DATABASE ENTRY DATE: 2001-12-06
acctccatctatctacctggagttagtgtaggtgagaggttaggtcgatcatggcgagtggtgttgcggcgccggcgccgagcgtgttcgaggcggcgcggccggcgttggagagcggtggcggcggtggaggcgcgccgccgccggggagggcggacgcgagcttcgacaccaacatggtgatcatcctggcggcgctcttcttcgcgctgctgttcgccatcgggctcaactcgctggcgcggtgcgcgctccggtgcgggggccggggcgcggccgccgcaggcggcggcggcggcggaggaggaggaggagcggcggcggccggggtggggtgcggcggcatcaagaagcgcgcgctgaggagcatcccggtggaggtgtactgcggcggggaggagacggcggagaccgacgtgtgcgccatctgcctcggcgagttcgcggacggcgagaaggtgcgcgtgctgccgcggtgccggcacgggttccacgtccggtgcgtcgacgcctggctggtctcgcacggctcctgcccgacgtgccgccgccaggtgatcggcggcggcgggagcacgccgccgccggacagcgacaccatcgccgtggtcgtagcatgatgtgagagacaaaagatatactactccagtagtcttcgtagctagctgggctcctgcctggcctctttggcgccaatcccttctaaaaaatatctcgctgatcgatctgatctctccggatattttccggcgaacggctagtgactagtgactcatcagcttgttgtggcgaatgtattgacgggtgcccaattggcccaaattggtcactgtatatacacgttcaacatcgccgtcccgaaatgtactgtaccactaacattttcgt

SEQ ID NO: 13682 - DNA, 536 bp, Oryza sativa
  ref <308>: DATABASE ACCESSION NUMBER: AK111030
  ref <309>: DATABASE ENTRY DATE: 2001-12-06
ctagctccccgaggatgcctgcccctgcctagcttaatgtggaactaactaggagtattaattaattccttccactaatcacccatcagcgccaaccggcggccacggccaccgtccgctccgacgacgacgacaagttgccactgctcactgctcactgctctggaaggtggtgaagcaggtgtcgctcggcttcactatgaagggccaccaccaccaccattccttgccgccgtcgccgccgcccaagcgccggtgtaccgccctggccgcggccgtccctgcgctcgtcgtctgctccatcctcctgcccctcgtcttcctcctgggtctccaccgccccgggcatggatcggaggagcgcgccgcggttgtcatcagcactgaaatggggtttagcaagcacaagcatctggatgggaggatgaagcacaagctactcaaggtaatgctgcttgctgattctgcccattggctgactcataactcttagtcgcccagctttactgaaagcataagagtgcatacgaagtttg

SEQ ID NO: 13683 - DNA, 989 bp, Oryza sativa
  ref <308>: DATABASE ACCESSION NUMBER: AK111031
  ref <309>: DATABASE ENTRY DATE: 2001-12-06
cacttggcccgtaaggcgtaagcagcgacacccgcagccgcaggcggcaggcggcatcgcggcgcgacggccatggaccccgagccccaccgcgtcgacgcctccctcgctccaaaccctagccgccgccagccactcctccggccgggcaagacgacggccttcaagcgcgaggagcgccgcaagcgcaaggagcgaaagcagcaggagcgcctcgccctcgatctcgagcggtgggagcccctcggcgccccgccccgccccgccgccgctgcggcctccccatcccgcgccgcgctaccggacaagccgtgggtgtgcgacccgcccccggaacccgagccctccgcgtcctggggctgtggctggggcccgccggcggcggaaccccctcgggagccgccggtgccggcggccgtgtccccgcaggccgccgccgtggaggcttgccgcgccttcttcggtgagcacgtcgaccacgacgacggcgacgacgaggatgaggaagaggaggaaggcaatgtggcccggttcttccaggagctactggagaaggacgcgggcctgagggggttctacgaggcggagcgggagaagggccggttcctgtgcctcgtgtgcgaggggatcggcgccagggcgggcaagaggttcgccggctgcgcggcgctcgtgcagcacgccggatcggtcgcccgggccgggaggaggatggcgcaccgggcgttcgcggacgccgtcggccggctgctgggctggagcgccggccggaccacggctttgcagacggattctgacaatgctggcatgtgcgatgaagatattcactgcgaggatgttccgcaaagcgcagaaatggagatgtgtcctcatcagtgatcggtgtacaaggacccagtagcctgtttaacagctaatttccctccggaagagagtcgtcttttgttcagaaagctttgctaatctgaaggtcgtttttcttttgtcag

SEQ ID NO: 13684 - DNA, 728 bp, Oryza sativa
  ref <308>: DATABASE ACCESSION NUMBER: AK111032
  ref <309>: DATABASE ENTRY DATE: 2001-12-06
aattgcagccggccgtcctcctcgtcgacgagccgacgtcgcccctctgcagctaccgccgagccagcgccgccgtcgtcggtcgtcttcctcgtcgccgagccgacaccgcccctccgcagctgcagccaccgctcgttcgccgccagcggccgccctcctcgtcaccgagccaacgccgcccgtcgtcgccagcggtagccctcctcgtcgccgagccgccgcctctcctcctccgccggcagcggcggccttcctcgtcgccgagcggccgctgcccctccgccgccgctcctccgcatccgccgccagcgcccagcggcggccctccgcgtcgcgccgccaagacgccgctcctctcgccgcccctccacagccgcagctgcctctggccttcctagtcgccgagctgccgctcctccgcatccgccgccagcggcggccctccgcatcgcgccgccgagccgcagctcctcccgccgcccctcctcctcgtcgctgagccaccgccaccgccgctcctcttcgtgaagccgccgtcgccccttcccctgccgccgtgcatcgcttctacacgaggacggcgaggagagcttctggtgagaggagagagagagagagggagaggataaggaaggagtggcgagaaatttaaggatagggttaatatatactaagggtattttggtcagttgtgcttgtaaatatatatatttttttattttgct

SEQ ID NO: 13685 - DNA, 576 bp, Oryza sativa
  ref <308>: DATABASE ACCESSION NUMBER: AK111033
  ref <309>: DATABASE ENTRY DATE: 2001-12-06
gaggtcgcccacgtctctcggtctctccgccttccccttcgacggcgcggcggcgaggcgcagcagcggaacggctccggcggcgaggatctggctttgatggttgcttgacaaggatgaaatggcctcccgttcaaagttatctggtattcagaggcaggtattggcattgtacagaggattcctgcggacagcaaggctcaagtctccagaggagcgccacagaattgagtctgttgtctcagcagagttccgtgagaatgcaagaaacattgatcggaagaactttgtgtacattgaatacttgctgagaagagggaagaaacagcttgagcagctcaaggaccctgatattactggactatcaacccttgaaattaataaggcttcttctttgcactagcaaagtgtaaaccatgtgtttggtgtttgcacaaggaggaaatgaaataggaatgtatttcttttgatggtatgcaaggaacataatgatcatcatgtatcaaaactctttatgcagcaactttctggagttcgttcatttggctatgtgaattctagatggatttccttggc

SEQ ID NO: 13686 - DNA, 611 bp, Oryza sativa
  ref <308>: DATABASE ACCESSION NUMBER: AK111034
  ref <309>: DATABASE ENTRY DATE: 2001-12-06
gtccacctgccacgtacggcccaacccgccaccgaattcgattgctccagtgaccatggacgacgctggcaacagcagcaaggaggcggaggcgcaggcgccggcgccggcgaaccaggcccctgccaccgccgccgccgccgcccgcggcgcgattcatcgcgggccgatgctgcgcctcgccgcgatgcagctgatgctgttcgcggcgtacgagatcgtcagctcgtacgccgcgccgccagtggcgcttccccgcctcttcgcggcgttcgtcgcctggctcgtcggctgcctctcgctgtttgtcgcgccgccctgaagggctgcacgtttcatcggaggttgaaagcatagccatcaggtattcaggattaatctatcagcatcaatcatcagcggtagtgtggtgtaacggggctcgttttttgttttttttttcttctttatgtggagtgggagtatgacgttctgcaggtttatttatgttgaccactcgttgtttattcggacttgtttgtccgtttcagcagtatgctactgttaggctgcctgtatcagatttctctgcacatgagagcaggtaaaatagcatgctattagccagctat

SEQ ID NO: 13687 - DNA, 489 bp, Oryza sativa
  ref <308>: DATABASE ACCESSION NUMBER: AK111035
  ref <309>: DATABASE ENTRY DATE: 2001-12-06
aaccttgtaaccctcgtccaaccttggtgagaaaaaaaatggcggtctcagccgtcgccgcccgatctagggccatagcccgcgccgcctcctcctccctcctcgcccgcggcctcctccccacctcccgccgcgccacctgcatcaacaggttgcctttggtgtccgggggcctcctctccacgctgccgctccacagcgccgtcgcgtcggcgcggttacggtccgcgatcgcgcccgagtcacagagctggggtttagtcccccaagggaactccatgcctttatgagagcaaagcttaccttttccgttgtaactgcctaaacaaattgtgaatgctttgaattttcataatgttcatttcgctatcagaactatgaatgagcttacgagaacttatttttctgtggtaagaatggtttggtgggtaaaagtttggttgttttctgctatactagctatttttctgtgataagaatgcttatttg

SEQ ID NO: 13688 - DNA, 885 bp, Oryza sativa
  ref <308>: DATABASE ACCESSION NUMBER: AK111036
  ref <309>: DATABASE ENTRY DATE: 2001-12-06
tatcctttcctgtttcacgagaggaaaaatcggggagagcagcgagattgcggcgagaggcgcggcggctcggtgcgacggcaatcggcgagaggcgcgacggtggcggcagcggcgggctcgatggccgacgccggcagcagcggcggtggcggcgacggctggatgcacgacgacagcggctggatgcgtgacgcgtgacggcgacggcaacctcgatgggcgacgacggcggagggttcgatgcgtgacggcggcgctggatgcgcgacggcggcggcgggctcgattcgcgacggcggaggtcgatgcgtggcggcggcgatcaatgcgcgacggcggaggtcgatgcgcggcggtggaggtcgatgcccgacggcagcggccgatgcgcgatggcgggggtcgatgcccgacggtgggctcgatgcgccggcggcggtcgatgcccgacggcggcagcgagctcgatgggcgacgacggcggcggcgagctcgatgggcaacgacggcggcggcggcgagctcgatgggcgatgacggcggcggtcgatgcccgacggcaagggcggcgacgagctcgatgggcgacgacggcgccggcctcgatgcgggacggccctcgatgggcgacgacgacatggaagaatggaagagagacctaatttttgttagcccaattatacccctgttaaatcaacggttagattagattggtacctcatgttacctcgtacctcatggtacttccttaaggatgggaaagatgctctaaacctatttctatctctctagtttattttgtgagagcgttttatccagctccattcctattttggatgagctgaaactatttagctgacctccaactctaagagatgcttt

SEQ ID NO: 13689 - DNA, 589 bp, Oryza sativa
  ref <308>: DATABASE ACCESSION NUMBER: AK111037
  ref <309>: DATABASE ENTRY DATE: 2001-12-06
atctccgatcccgagcactcgacaccgccgccgccgccgcgacgacggcggagctccgatccgaggaggaggaggaagggtgggccacaggggaccgccggcgatgtcggccgcggcgtcgggggagcgagacgagctcgcggattcgctcgcggagctcttcaccaacgtctccctcatggtccgcggcgagctccaggggactaacagccagctttctctacttgagaaaatgaatcgacgtgtagcagaggaatacaataactatggagatgttgcatccggcctgcgggttttcgtagaacaactgaatgagaaaaaccaaagctttggtgagtatgtatcgcagattgatgcgatagaccagcaggtgaccgagtttgaggcagtggtgtccatgcttgataagcatgtttccctcttggaaaagaaagtaaagtccgcatataacattgctcctacccaatgaataatcgttcctctctgtatgtttcattttaatttttgtcatatgagcttatctaagcgaggtagaaaccaaacctgtggatgagaatttgatgcccgttatctctgatgtttccaacac

SEQ ID NO: 13690 - DNA, 598 bp, Oryza sativa
  ref <308>: DATABASE ACCESSION NUMBER: AK111038
  ref <309>: DATABASE ENTRY DATE: 2001-12-06
gacgtactcacaacctcgccggagatccaagcagcccgttcgataataatcctatcggcggcggcggcgatcaccgaccggccaagcagcatatataccttcggtttcgtaatttttctctcttgttcgttctccatggcggcgaatttcgtctgcttcttcgccggcttgtgcatcggcatatcgatccaggcgaacgacgaagagcagcagcggcggcggcgcctcgtcgagctggagcggcgcggcgaggagcgggagaagcaggtcgccgagatggtgagccgggaggaggatcgcgagcgggagcggaagaagaacctggacaagctcgaccagatcgtccagatcctcaggaatctgtgaccggatagccgccggccgccgtggagacgaggctcgccggagctaggagagatgacaataacagtgttattactactgtactagattattactccctccgtcccacagtataaggaattttgagtttttgcttgcaacgtttgaccactcgtcttagttatattttttttgtaaatataaaaaacgaaaagttgtgcttaaagtactgtagataataaagtaagttataaat

SEQ ID NO: 13691 - DNA, 875 bp, Oryza sativa
  ref <308>: DATABASE ACCESSION NUMBER: AK111039
  ref <309>: DATABASE ENTRY DATE: 2001-12-06
acacaaagcaagctcgataacgtcgatcatggcggcgtcatcctccctgtctccttccctcctcctcggctgctccttcctcatcgcggccgccgtcctccttcgccgccatgacagcgccgccgccaccaccaccaccaccacccacctccacttctacatgcacgacgcctacaccggcccggctcccaccgccatgcgcgtcgtctccggccgctccttgctgcagtccaccaccgacatcgtcgacggctcgtcgccgccgcggcagttcggggacatcgtggtgctgaacaacgcgctgacggaggggccggacgccggcagcgcgcgcgtgggcacggcgcaggggttcggggtgcgggtgtcggagggcgggttggtgacggacctgagcatgcacctggtgatggaggccggcgagcaccgcggcagctcggtggcgatcaagggccggatcgacgtcggcgtcggcgtgcgcgagtcggtggtcgtcggcggcaccggccggttccggctcgcgcgcgggtacatggccagcagcagctacgactgcagcctcgccgccggcggcgtcgtcgagatccacgtctacctgcagcactagctagcagcctgacacactacgtacagctagaacgcgcgcgcctctcctgcatgcctatgccttttcatttcatgtgttcttgctaaagttgtaaccagcgtcctgtgatgtattgtactgtactgtagctcgtctattttcgattttttgcatgagcacgtctgcatgtttgcagcgtgagcgtcgtgtgttccggtcacgttcgtgcctggaacgcgtcttctcatggacaattaaaggcagcagcgcacaaactacattctacatt

SEQ ID NO: 13692 - DNA, 455 bp, Oryza sativa
  ref <308>: DATABASE ACCESSION NUMBER: AK111040
  ref <309>: DATABASE ENTRY DATE: 2001-12-06
atcaagatgtatccaatcccctggtcgatcgtcttgccgtccggccggccggagctccgacgtcggcgtgcgttcgccgcgtgcatcgcctccgccgccgcctccctgcgcgccgccggcgagagaacggcggcgaacatgaacaagaaaagcacaaaggcatgcgctcctgaagatgccatgtgtatacaggagatgatgatgatgatgatgcgaagagaagattaagagtaaatggatttcgagatgagtagtttgctgattacttggtagtgtggttgatggtttgtgatcctcaagagggtttatatttatatacattatgcagaacagagactaagtaagacagcagttcatgattagtcaattcagattcagtcatggctagctctcctgcatgtacgtctgtctaatcgttctttttttaaaataaaaaattggatgattgtttgttc

SEQ ID NO: 13693 - DNA, 919 bp, Oryza sativa
  ref <308>: DATABASE ACCESSION NUMBER: AK111041
  ref <309>: DATABASE ENTRY DATE: 2001-12-06
aaaggggagatgaaccgagagagcggcggcgccatggcggcgaggcggttctccttctcctgggccgacgaggtggagcgcgaggaggcggcggagcagcagcagcagcagcaggaggaggacgacgacgaggagaatcagccgccgccgccgcctcggcgatgcggggagacaggggagcaggcgaaggcgaacccgttcggcgccgcgcggccgcgggaggtggtgctcgccgagaaaggcgtcgactggcgcgcccgcgaccgcgagctcgacgacgcctcccgccgcggcagcgccatccgcagcaggagtcgcgtgcacggcagcaagaggcacgctcgggatgcgcccgtggcggcgaggcggcacgaggactcgacgccggcgagccgccgccgcatgatcagcttgccgccggtcagctacggcagcgcatggggtggtaagaggaaatgcgccggccaggacgagccgtcccggcaagaccggccggtggccgaacattgccggagagttttcggccagctgaacatcggcgaaggcggcgaattctctcgccggagctccaccgagagccgcggctcggtctgcaccgatcgaaccgaagcaagcaacgctgcagctgcagaaacggagaccagtgttggtcagaggaggatgagtaggaggaggagcaggaagaacgtgaggaagatggaatcaaccaagtccaagaagcagcaaactctgcaactctaggtggtggcgtgaagctgcacggtgatggtctcacctgtttagtgattactgatttctgcatctacgctactccactgtccattgattactgactagtactagactgaactagctatggatgattagacatgtacctaatgcagtactagtataacatgttgccacaagtttaggcagt

SEQ ID NO: 13694 - DNA, 1115 bp, Oryza sativa
  ref <308>: DATABASE ACCESSION NUMBER: AK111042
  ref <309>: DATABASE ENTRY DATE: 2001-12-06
gacgcaccggtactgagcaccgcagccacggcgccgccggctgctcgccggcgaagggagcagccacggcgccgcccaccaccgcctcgaaggccacctactgcactcgtcgaggtcttgtgtctcctcggccgacgagtggctagcgttctcaaggcggcctctctctcacagacacccattctcgctgcttcgtcgggctgtggtcagaagttcagaggactttacatgcccaatgtacaagttgccgatgtgtctaatttgacagcaggaattacggtctacaagaaagataagatgaactgtatgctggatgcttatgtgtttaacaagtccttcaagccttggtctctccgggttcattcctctttgccttcagaaactcagcaagaacctgaagcgcgacatcgacatcatcattcctcattaggacctctgcaacctccgcaggcgttgtcagcacctcctcaatcagctgctcgatttctgggtacatggcatggttttcgacattgtggtagttgctagccagaactcggaaagcctctcgagtgcaataccccatgtggatgtgcatgtccatcctgccagggcgcagcagtgctgggtcaagccgctctctgtagtttgttgtgaagacgacgatcctctcctcgccgctggttgaccacagaccgtcgacaaagttgagcagtccagatagtgtcacctgttagaacaaaaatacccaaagtggcagcatcattggtgggcttggcacgcttgatctctccttcgtcccgttgctgcaggtcgatggtgcagtcaatgtcttcaacgacgaggatggaccggttgctcatcccgacgagcagcctccggaggtcagagttggacttgacctcggtgagctcaagatcgtagatgtcaaacttgaggtagttggccatggcggcgatgaggctggacttgccggtgccaggtgggccgtagagcaggtaacccctcttccacgccctgccaatcctcctgtagtagtctttcctcttgacgaacctctcaagatcgtacatgacggagtgcttgaggctgtgatccatggcgagcgtgtcgaaggtggaggggtggcgcaggtc

SEQ ID NO: 13695 - DNA, 634 bp, Oryza sativa
  ref <308>: DATABASE ACCESSION NUMBER: AK111043
  ref <309>: DATABASE ENTRY DATE: 2001-12-06
gtcccttcagcaacagctagtcagctacgattcacaaagcggaatcacttccagtgagtctcgaatccgccactccaacgaagcgcacacgagagagaagggagggaggaaagaatcgcgatgagaggcgcgctcggcggcaggagccgggcgcggcagaacgcgatgcggtcgggcctggtggtgctgggcgccgccgccttcggctacctctccttccgcgtcggcttcaagccctacctcgaccgcgcccaggaggccatggacgacaccacccaccacggctccgcctccggtgccgccgcccagcctgaccacgccggggaagaagacgacgtcgcgacgtccaaggacccggccgtcgtgctccgcgactgaggccgctcgtcgaagcttccgtagaggttggtgccttttgcttttggttggttgtgccattccgtcgaacaccttgtgtgcagctcgtagcggagctgcaatcttgcgcggagagtgctgttgctgaataaacacttcacattaccaacagacttgagcatgcatgtcgttctcttcatagaacacagttactgtcttgctgatgaacataagtgctgaagtgcaaatgggcgctactgaatttgtcgaaaaaaag

SEQ ID NO: 13696 - DNA, 809 bp, Oryza sativa
  ref <308>: DATABASE ACCESSION NUMBER: AK111044
  ref <309>: DATABASE ENTRY DATE: 2001-12-06
gtgcacctcccttccatccgccgcccagatcacgcctcccacccgcgccgactccgccctctttctctccctcgacgcccaccgatcctggctcgccggcggcggggtgcgggcggccccggcgcgctcggcgaaggagcctcgcctggcggcgtccgcgtcactctcggggccttccgcacgcggccggcgcctctcggggatggtctctggcctcgaccttggcctcctcaacacgtcgcgcgccggcccactccgctgcccgattgccggcgccgtcgagacaggcacgcgcgtgttcgcggaactcgacgacctcgacaccgccgccttcgagtcgccgtccgccgaggaggaggaggcgaccaagtgcccgcagtcggtcatgcactccgccgacgagttccatgggaggggccgcatggtggagttgtcgtgcgggctgacgctgggggtgaccctaagatcgcggtgctgagcaagggggagcaaccgatcatggtgtcgcagttcatgatggagcttcgggggctaaagaccgtcgacggcgaggacccgccgcacatcctccacttcaacccacgcctccgcggtgactggagcagcaggccggtgattgagcagaacacctgctaccgaatgcagtggggcgccccgctccgctgtgagggctggaagtcccactctgatgaggagaccggttggggacccctgcaattccagtttgattatgttagttcaggtgaattatgtgaaatttgttgatcgagtgaataatttttggagtttgagaactgaattctggacgc

SEQ ID NO: 13697 - DNA, 662 bp, Oryza sativa
  ref <308>: DATABASE ACCESSION NUMBER: AK111045
  ref <309>: DATABASE ENTRY DATE: 2001-12-06
gatcagagagcttgagatctgtcaacaccaggagcgagctctcactgccattgccaattggcaattgaaaatcatcgtaaaccgccatctccatcatcatctcgcgcatggtgagattactgctgctactcctctgcctgcatatgtgttcaatctctgttgcaatgtagtgttgatatatgaatatgaatgttgcagtcgctgctgccgttgttgctgcggcccgtggtgcgcgccgcggcgagcgtggcgaggcggccggcgtctgcggtggcgacggtgctgcaccgcgccggcgcgctcccgaggaaccgggggctggagcgcctcgtcagggacgacatgctcgtcgggggtgaccacaacttcatcgcgcatttcgtcgtcggcttcatgcgctgcctgtgttagctggagtacatagctaggcggctaagctagattagatgcatagcaccggtattgatgaattgatatctgatctgcatttgcgatttgggctccatttttggggggatacgacgttctccgtggctttgataattaaaacagctagtgtagcatgcatttgcagcgatttgagcaccatttctttgcaccctgatatctgttcatgtccaacatatgtcgactgccaatcactcagtagtactccctctttc

SEQ ID NO: 13698 - DNA, 930 bp, Oryza sativa
  ref <308>: DATABASE ACCESSION NUMBER: AK111046
  ref <309>: DATABASE ENTRY DATE: 2001-12-06
gctctctttgaggtgggttggcttctcctccccctctttaccttttcctcctcggttcggttccgtggttcgtctagggtttagtgggttgagatggcggcgccggatgtcgagtaccgctgcttcgtcggcggcctcgcctgggccaccgacgaccgctccctcgaggccgccttctccacctacggcgagatcctcgactccaagatcatcaacgacagggagacggggaggtcacgtgggtttggcttcgtcaccttctcctccgagcagtcgatgcgcgacgccatcgagggcatgaacggcaaggagctcgacggccgcaacatcaccgtcaatgaggcccagtcccgccgctccggcggcggaggcgggggctacggcggcggcggtggcggctacggcggcggtcgtggaggcggcgcctcaacctctcacggcctcctcctcaagagagacctcctcaccgccatggccgagctccaatgtcagggctactggtccttcgccctctccacgctccacgttgcccgcgccgagccttgtcattgcctgcgccgacccctgcctgcttcgtctgctagcctctcagtctcgctgaagaagagaatagaggagacgaaaggaaagatgatagaaaagagaagaagaaaaaagaaaaagaaaagaaagagaagagaagagatgacacagacatgtggtgcccactgtatgccatgtcagcgaaacctggaaaaattgggtcaatactgccttgggactttttttttttttttgcacagtttgtaataattgaggggtagaaatttctggtattgcgattagggactttagacagactcgacatgaagtcgagggacgtcaagtgaacttattccctactactaggcccaacgataagcgagttcttctggactctgaagcccatat

SEQ ID NO: 13699 - DNA, 668 bp, Oryza sativa
  ref <308>: DATABASE ACCESSION NUMBER: AK111047
  ref <309>: DATABASE ENTRY DATE: 2001-12-06
aaatcaagcgaaacaaaagcaataaagatgaaggcttcctcgttggccgccgtcgccgccgcggtgctcgtcgccgcggcgtgctccgggcgcgcgccggtggcggaggcgacgatcgagagcacgtgcggggcggcggcgaagggcgaccggcgcgtggacgtcggcttctgcgcgcggcagttcgcgtcgtaccacggcgcggcggaggcggacgcgtgggggctcgccaagatcgcggcgctcatcggcgtcaacctcgccgacgacgccgtgttcgacatcggcgccggcaagatccgcccctcccccggcggcggcgccaagggggacaaggccatggacgcgtgcgccaaggcgtacgacgccgtcggggtcgccttcgcggaggctgccgacgagctgggctcgcgccggtacgccgcggcgaggcaggagctggcgcgcgtggcggcgctcgtgcagcggtgcgacggcggcctctcccgggccggcgccaggtcgccgctgcccaggtacagcgccgactgccagcaggtggccatcatgggcatcgccattactaacctcctcaagtgacacgtcgccgcgtcgaacacctttggtggtgtggcttggttcttggctgcttacctacaaagtgaataaattttgtatctgtagtttat

SEQ ID NO: 13700 - DNA, 913 bp, Oryza sativa
  ref <308>: DATABASE ACCESSION NUMBER: AK111048
  ref <309>: DATABASE ENTRY DATE: 2001-12-06
atatgttccggagaaaagtcgtgttagagcatcctcaactgatgctccatccaatcctcctgagaaatagctgatgggagtgaaaaatcggcttccagcggatactccattggcgttcctctctcctcacaccgaatcgcaaccgccgctctgggtcgagctcccgcccccatcaggagttccggaacgacctccgcccatcgtcatcgtcgctggcttccggtgaaagtgagtcctcaatggcggtggagaggctggagagagagggacgtacaagatctggaagctcccgcccaatgtcgccgacgggctccacgatgcgttcctgcttcgtcgtcgtcgcccctccacctgcgagctgctgtcgttgctcctccgcgctcgcccggtgccaccgccaggcttcgggatacggcagccactccgcccgtcgccggcggccttccacccacgagctgccgccgtcgcctctccgcgctcatccagtgccgccgtcgccggcgccgagatgcggcaccagacgatcaagatgccgctggcgcccctccgcccgtgagctgctgctggcgcccctctgcccgcgagctgctgctggtgcccctctgctcgtgagctgctgccggtggaaaggaagagaaagaggaaaggaagaaaggaagagaggtagagagagaaggtagtgaggaggaaaggaagaggaagaggaaaaaaaagggggagaatgagaaaaaaatagaaatatttattttgttataattttttacactttacttattttgctatattacaaatatattcatttcaaacatatatttagtcatttaaaatataactgttgtaaaagaaattacataaatgtatacaaatgtatggttagttggaagatattaataaaatatagaaggatagtgat

SEQ ID NO: 13701 - DNA, 520 bp, Oryza sativa
  ref <308>: DATABASE ACCESSION NUMBER: AK111049
  ref <309>: DATABASE ENTRY DATE: 2001-12-06
actccccacgcgtgcggcggctgtacgttgccgctggctccgctcttccgttgtccccggcggcgctcccctcgacggctcgtcccctcggcccaagcgacgcgatgacgacggcggcggcagctgctcccatcggccgctgagcccccgcgtccgcgtttcctgtccccggcgacgctcccctcagcggctcgtcccctcggcccgagcgacgcaatggcgacggcggcggctcccgtcggcccctgagcccccacgtcggcgtttcctatcacctgtgccgaccgcccgatcgccgccgatacaagagctcggacatcctctagcccctttccactctggttactgtacaggcctccgagctccctttcctggcagatccctgccaccaagctcgttaccatttctcttctttttccctaggttgatttgtgcaattgacacatattttactactgtaaggattactatgaactggatcgttaattatgtacagcaaagttttgtgtagatgctcctc

SEQ ID NO: 13702 - DNA, 1092 bp, Oryza sativa
  ref <308>: DATABASE ACCESSION NUMBER: AK111050
  ref <309>: DATABASE ENTRY DATE: 2001-12-06
tatatttgcaatgcttaagcttgaaacctagcttgaagctagcttaatttgctagccattatagcctctcatcgatatatataccccaatgcatatgtaattaagcttgaatcctatttttcttccttgtttgtgttttgtgtttgtgacttgggtcgaattagtttgagagaatttggagggtttttggttttggttttgattttgattttgattttgatttagtttttgagttacatgaacaggttcagaaatgtgttgctacgaaagtgcaagagcctgtcacgctctctctcgaggtcgagctcctacaggaacctccgatccatgtccacccgggagcacgtcgtcgccggcggcgatggcggcattgtcggcggcggcgacagcaaggcggtgtcggccggcggcgacggggcggtggtgttcgtcgggagctcgcggcggcgctacgtgatcagcaacaagcacctcagccacccgctgatcgccgcgctcatcgacgacgacgtcccggcggcggccgccggagacggaaaagaaggcggcggcggcggtggggtggttgagaggaggaggtcgacgtcggcagcgacgacgacgtcgtcgtcgaccaagccgatcgccgtcaactgcgaggtcgtgctgttcgaccacctactgtggatgctggacaacgccgtcgacctccgcgccggcggcgacggcgacgacgacgacgccgccatgagagagctcgcccagctctacgcctactagctgctgctgctgctgctgctgatcatggagagagatcagcttaatcaacaccatcaatgttagttaagtactcgatcggtacatgcgtgcatgcatgttgttagtaattgttttgattagttcttaaaattaactgccttgattgatttcatttttaattttgatgttcatttggttcttgcgcgagatctaaaagattattcggcgcgatgaagaagatgatttgatgcatgtacatgcaaaatgtatggaacatggtgtagttattatggtttatgatgtttttcacaaaagaagaacagatgaatgaatttatggatagagttgtttgtt

SEQ ID NO: 13703 - DNA, 872 bp, Oryza sativa
  ref <308>: DATABASE ACCESSION NUMBER: AK111051
  ref <309>: DATABASE ENTRY DATE: 2001-12-06
acttcctcgtccagctcccccgcggcgccgccggctatggcggcgacgacgacccgcgggcgccgcgcaagacgtggtcgggggcgctccacgtgggcgcgagggagcggctggagagcctgatgctgtcgcggcgcaccgtgtcggacatggcgtcggtggtgccggcggcgagggcggtggccggcggcggcggcgagccggcgcggaggccgtcgtccgtggaggtgggcgtggacggcgcggtgcggctgcggatgcggctgcccaagtcggaggtggcgcgcctgatgaaggacagcaaggacgccgccgaggccgccgagaggatcatgcagctgtgcgtcgccagggaccagggcggcgccggcgccggcgccgccgtcacgctcgctgcctccggcccggtgtcggcgatgtcggggaggaagacgtcggccatgaagaaagagaagcggacgaggtttgtggccttgcctgacgagatcatcggatgacaaaatggggccaaaatgttattctctcttcttctttttttttttctttcttctttgtttggcttttcagcaagaggaattgcaggggcttagaacatgagaagccgctcctaacatggcttcctatctctcccctacaaattcctaacttctgaattattaggccagtcgatgtcgatcatcaccatcctcatctagtaggtaatcaagttttgtttgtaagtacctagtagcttagctagtgagaacagaaggttaaaaaggggaaaaaaaaacagagctagaaatgtttgctgtgtacgtagtgtgcctttgatagttgatatgtatgtatgatggtgctgtcatctggataaagaaactacttaattagtc

SEQ ID NO: 13704 - DNA, 658 bp, Oryza sativa
  ref <308>: DATABASE ACCESSION NUMBER: AK111052
  ref <309>: DATABASE ENTRY DATE: 2001-12-06
tcagacgcgtgggtccagacggttggggagcagtggcgaagaggagggacgcggcgggttgtacatcgcagccactagcgggagggaggaggagtttggcggcagcatcgacatggttgccttgttgctaggttcgacacgtgacaaacgacttggatgacgacatgcgaggtgcactgtcgaaggccagctcactctagacaccaatctggatgtcacaaattcacaatggagctagttggcatcgaggtcgatgctattgcatggagctcacgccgccttcgactgctcagggatgctaccggagcatgccaccgtcttcgccttgattcagggctatcgtcgtgtggccgtttattcctcccgagctaccaataagggcgagcaacctcctcgctctgcccatccacggatccacccactgctgtgccgccgcccaacgggcctacttgccaccagcgccctggccaaaccagggcgttgcggcgctcggccacgccagcccacggcgacccctttctgtgctgcctctcctctgtcgcttcccgccaccgcgccggcgtctgtcctgggcacgtgagcgagaaaaaggtacactaaaaaataatccaagaagaatagaagggaacgaggagaagaagcaagaaagaaagaagag

SEQ ID NO: 13705 - DNA, 455 bp, Oryza sativa
  ref <308>: DATABASE ACCESSION NUMBER: AK111053
  ref <309>: DATABASE ENTRY DATE: 2001-12-06
tacgggcccggttttccgtataaactgggtcaattctcttcttctaaatataaaagtggaacaaagctccgccttagggttcataaaaaaaaagaggtacagcgtggtcgagctactagcctggcgtgcgtcgccgtcgctcgcaccgtgcccccacccgccgcccgctgagcctgccccgaagccacgttgaggccgccgcactttcgcccgggcgccgcccgccgtgcttgcgccggccaccgcaccaccctgcacccaccgtcggccgcagcggcgccttgtcccgcctggcacgcccgccgccacgccgccatgcgctggccaccaaccgtgcatggcaggagaaatcaacgcgctggccacggcggcgttggtgtcctgaacccccggacatcatacacaactgccgagcgaagcgaaggcgatgggagggaaaaagaagaagaaacggc

SEQ ID NO: 13706 - DNA, 668 bp, Oryza sativa
  ref <308>: DATABASE ACCESSION NUMBER: AK111054
  ref <309>: DATABASE ENTRY DATE: 2001-12-06
agcccggccgcggcggcggacttcgtgcggcggtcgtgccgcgcgacgcggtacccgcaggtgtgcgagcggagcctcatgccgcaggcccccgcggtggggcgcagcccgcgtctcctggcgcaggccgcgctcaccgtcggcgccgaccgcgcgcgctcctgctcgggctacctcgggggcggcggctcctccagctcgtccaagcgctccggcggcggcggcaggggcggcgcggtgggggactgcgcggacacgctgcgggacgcggaggagcggctgcggcagtcggcggcggagatgagccggatggggcggtcggggagcccgcggttcgcgtggcggctgagcaacgtgcagacctgggccagcgccgcgctcaccgacgcctccacctgcctcgactccctcgccacctacgccgcccccggcatcgacgtcgacgccctcaggaagcgcgtcggcgccgtctcccaggccaccagcaacgccctcgccctcgtcaacaacctcgatccgcaccaccacttgtaattactctaaatcactcccctacgtgcacctctacaatcacttgtatgtagtaataatctcatcgctcctatcctacacgtattatggatgcttaattatagtagtaactgccttgcttcttccaaaaaaaaaag

SEQ ID NO: 13707 - DNA, 674 bp, Oryza sativa
  ref <308>: DATABASE ACCESSION NUMBER: AK111055
  ref <309>: DATABASE ENTRY DATE: 2001-12-06
taaaacctctcgacccgtctcccccaaaaacccacgggcgccgccgctcctccgaggcggagccaaacgctcgctcgctcgccttgctgcgcactagctgaccaatcccgtctccttctccgatccggcgcgccgccgccgccgccgccgctttgaggtgacaacgatgaggcgcgccccgcgtctccacgcgctcccctcccgcgcgctcgcgttcggcggcctcccccctccaccgctgccccgcgcgcagcttcaggggatcactgagccgggtgccgcatctcggctcggggccgcgttcctagcccgcgcgctcgccaccaccggccttcctgctccgcggcgtcctcgcgcgctgcaggttcagcggatcactgagccgggggctgcatctcggttcggggctgcgttcctggcgcgcgggggcttctccaccgatgcctcggccgcggcgcaggacagcgcgaagcctgccgcggcgaccggcggggaagggggtgatgggaagtcagggaaatctgagcaaggggacgctggaaaatcagtgcgaggagggatgagtccttcaaaatgtcttctactggaatcctctgtagtggaaatcggcccaattgcttgaaatggcattattcagtgctttatttgaagaaattttgcttctctcagccggt

SEQ ID NO: 13708 - DNA, 837 bp, Oryza sativa
  ref <308>: DATABASE ACCESSION NUMBER: AK111056
  ref <309>: DATABASE ENTRY DATE: 2001-12-06
acaactcttgttagggctccatcgcggacgatggcggatggtgaccgtcaggaggccgaggcgcccgtggccgggatcaagagggtgaaggaggaggaggcgaccgcgtccccaagtggtggcgagaagaagaagatcctcccgaattggaggaagtcatcgatcccgtgtgaggggagtgagatcctgaagaagaagaaggaggcgattgcggcgaggcctctctgggtgtcgagggatgtcccgggggcgatggagtgctggattgaggagcgcgagaaggccttggcggaggaggaggccgacatcgcgtccgggaagaagaagaggaagaaggtggtcaagtacaagatgcctaatgaagttatccaacagatgatgagatacccctacacctacccggagtgcaccgaggaggagctggcccgacgttctgcctcaaatcgccagctccaccgcctcagaatgttcatcgatggcaagatgttcgcctacgagcagaccctcatcgaccagtacctcaaacatggctatgcgttcgacgaggcggagatctccgacgaggaggaggaggaggaggaggagcagaagtagcaacctgtctgtgttgtggtgcaagatccatctaccctaagtaatatcgcttgcttgcttactggagtagtatcttcgtgtccctgtgtctgtctgtgtgatccaccacctatccttccttcctaagtgaagtgtctgctcgccaatgactctggtcttggtgtgtgttatcatctcatatcttatttgctactgcatgctttgctacttgagctatatattttcctgatattacaccttgct

SEQ ID NO: 13709 - DNA, 618 bp, Oryza sativa
  ref <308>: DATABASE ACCESSION NUMBER: AK111057
  ref <309>: DATABASE ENTRY DATE: 2001-12-06
atcagaaacatctgctcgaacttctctcctctcccacgatgaaccctacaagcccaatcctctcatcccttcattcaaatcaggagcaaatcgatcaaaaatcggtcacttgggagtagtagatgccaatgaaagaggtgcagatttcaacgagtagtgcagtaaggcaagcagcggcttgcggcgcgcggctccggcaggtgtcggcgtcgactgccgcgcttacggctgcttggcgacggctacagcaggctgcatcaggctgcggagggtgtcggcgttgagtgcggtgggctgcggcgtcggctgcttcaggcggtgtggtggctacgatgggcagtagcagaaagaaacgtatatactctatactgaaatggttgtgacctgctatctctgtctatcgtgtaggcatttagatgtagattttcatctgttccttgttgatctactagaatatttctcctttttttttgcttatcctgtaggaatggccgaggttcttgacagccattgttagggttaagtcttatttcaccacatcgtttttttctttttgtcaaagggcatatgttaaaggaaacaatgtcaaaatttctatcgaaatgatgctagttgact

SEQ ID NO: 13710 - DNA, 1109 bp, Oryza sativa
  ref <308>: DATABASE ACCESSION NUMBER: AK111058
  ref <309>: DATABASE ENTRY DATE: 2001-12-06
aacagcaacaacaggtacaagtccgtccgccgccgccgccgagagcgagagatggagatggatccccctcggctgggcatgggcgcgtactccggccccgtccgcccggtcggggacggggacggcggcgccgcgggcgagacgatgctgctctgggccctcggccagccggcagcgcagcgccacaacgccttcgtccgccacggcgcgcactccctcaccctcgacgctgcggccgccgtctctccctgctccagtccccgtcctccatgtccacgcccggcgtcaccggcgccgttgtgtgggacagcggcgtcgtcctcgccaagttcctcgagcacgccgtcgactcgggcctccttaccctccgggccgcgcgggcgctcgagctgggagcgggctgcggccttgctggctgcgtcgccgcgctcctcggagcccacgtgctgctcaccgacctccctgaccgcctcaagctcctcaggaagaatatcgacctcaacgtcggggacgacgcaaggggctctgctcgggtcgcccaactcgtctgggctgatgatcctcacccggacttgctcaacccacctctagattacgtgcttgggtcggacgtgatctacagcgaggaggcagtggatgatctgctgctcaccctcaagcacctctcagcccctcacaccaccatcatcctcgcagcagaactccgcaatgatgctgtactggagtgcttcttggaggcagcaatggcggacttccaagtcggctgcatcgagcaacagcaatggcacccagatttccgctctacacgtgttgccttgttcatcttgctcaagaaaccaccttcccaaccggacgtgctgctctagctccaaattttgggcgtccctcatcgaaagctgaattgtagcggagtaccagcatttactccatcctttgttctggactctggagtttaattttacaccttttgcatgtatggaattagggggtcaaaactgtacgcttttgttttctcctattgattacgtgcacttcggaaatgaaattgaaaattgtagagacaccatttaatcggtctactccttttatatatataggatttttaagac

SEQ ID NO: 13711 - DNA, 555 bp, Oryza sativa
  ref <308>: DATABASE ACCESSION NUMBER: AK111059
  ref <309>: DATABASE ENTRY DATE: 2001-12-06
gtgcagagttggaatttggaaggcgagacgaagaaatcacacaagaaaagctgccggacggtgctttcgtgctcagataaccacaagacagaagatgaggcggtcgtcgtcgttgctgcccgtctgcgcgctcgtcctcgccatgctctgcgtggcgagcctcatggacgtcacggaagggcggcgaggcggaggaggccgcgcctacatcggcggcggcggcgtcggggccagagggagcgccacgagaaccagcggcagcccgcgcggcctcagcggcggcacctgggcggcgtgcgctggttcctcgctgctcgccgcggcggccatgctcttgtagctccgcttcatggaatacaatacatgatgcttcgtgtatataagtgacttgtgtgatgtggttgtgcagtggccacaggggatgagttttccggaaaatgtccgggctgtcgtcatgatcggcaaggagacgaggaaaagtgtgattaactgttcgttgtaaattaagctcgtgagatttgcagttccgtaattgatgattcttttgttttggag

SEQ ID NO: 13712 - DNA, 1022 bp, Oryza sativa
  ref <308>: DATABASE ACCESSION NUMBER: AK111060
  ref <309>: DATABASE ENTRY DATE: 2001-12-06
atggccaccctagccgccgcgatttcggcgggccccgcggcgcccgcccccgccgctcgccgccgccgccgccgcgggttcgccgccgtgagctgcggctcgtcctccgcggccgacgagcggcaggccctcttcagccgcatcgcccccgtctacgaccattgccgtgttccttgtagctgaacgacgtgctcagcctcggacagcaccggacatggaagcgcatctgcgtgtcttggtccagggcaaggagaggggatcgtgttcttgatctctgctgcgggagtggggatttggcattccttctgtctcagaaggttggcttggatggacaggtgatggctgttgatttctcaagtcagcagctgcaaacggctgctagccgtcaggatcaacgctggaagccttgctacaagaacatcaagtgagcatcctcaatgtggatcgaaggcgatgcacttgatttgcctttcacagactgctacttcgatgctgttacggttggttatgggttacgcaatgtggttgacaaacccaaagcaatgcgggagatatttagggtcctaaaaccaggatcaagagcatctattctagattttaacaagagctcatcacttttcacaacgtcattgcagagttggatgatcgataacgttgtggttcctttagctagtggctatggactcactgaagaatacaagtacctgaaaagttcaatattacactatctaacagaaaaggagctggaggagttagctaaagaagctggcttttctgcagccaagcattatgaacttggtggaggtctcatgggagacttagttgcaactcgctgagtagaatggttgtgaagaacctgatctgtacaacttacctgaattttgtagctgcttcattccttttccctctacatcatctgatagttatgttccgctgatccaacagggatcatgcatcaaaaactcaaaactttcgtgatgtatatttcctttcttctttaataaaaaaggacaattgtaacc

SEQ ID NO: 13713 - DNA, 574 bp, Oryza sativa
  ref <308>: DATABASE ACCESSION NUMBER: AK111061
  ref <309>: DATABASE ENTRY DATE: 2001-12-06
accactatcaacacaactcttgcatcaccatctgagagaaaccagggagatacacacaagcaatagccatggcgagacaacaactcctaggtttgttcttggtcctcgccattatggtggcggtcgtgtggggcgaccctagcggcggctgcgaccaagaccggcaggacatgatccgggagtgcaagaagtacgaggggtggccggcggagcccaaaatcgagccgtcagaggcgtgctgcgccgtgtggcaaagggccaacatcccctgcctgtgcgccggcgtcaccaaggagaaggagaaggtgtggtgcatggagaaggtcgtctatgtcgccaagttctgcaagaagccgttccagcctggctaccagtgcggaagctacactgttccatcgagcctagggcaataaatagtacgttgttactgatttttatttttccttgtgacagaagaagtacttctgggattagttttcatgtctcgtgacatgcacaatgtataacttctgtgatttgtgtggactgcaaaattgggaaaaactgagaattaataaaaacagaaacttcttct

SEQ ID NO: 13714 - DNA, 616 bp, Oryza sativa
  ref <308>: DATABASE ACCESSION NUMBER: AK111062
  ref <309>: DATABASE ENTRY DATE: 2001-12-06
atgttgtcaggtctctgatgtagtggcgcctctcacaggccccggggagtcaggcgcgcggtctccagtacgcgagcccggagcggcgaccgctggatggtgcgaggtgggcgctctacgcgaggctgtcggcgcagctgccgtcgggtggaatggtggaggagctcggccgatggctccgcgagaggtgcccgctctcggaggagcaggtcctcttctgcgtccgcaggttcctcaagttcaagcagaacaggcacgccctccaggtgagccccctcacccccaccccccggcacacacaccagaccccagtcccctcccgcgaaaactctggcttaatttggattgggatgtaatggtaaggtttcagtcgattggatccggttgaaactccaattgtttcgtcctatctacactgtattttagggtaattttgtgtcaacaacggaacaactccgtttgtaatattatagcatttgccaatatcttagggaactataatgtactagtagtaatctagcagcataatgtgttttcctgtaatgcatgcaatgaactgcagttagccagttatccagtgttgtttaatctgtgcaatcattatggtacaatcagt

SEQ ID NO: 13715 - DNA, 611 bp, Oryza sativa
  ref <308>: DATABASE ACCESSION NUMBER: AK111063
  ref <309>: DATABASE ENTRY DATE: 2001-12-06
tttgcctctgctgcaggtcgggacgcaccaagacgcggtctatggagatgccgccgcctccgtcttcggctcctgccgttgtcgccgccggccgtaaaccacctgagatgaccagcgccgcggccgtagcacccatggccaccgtgggcaatcctcacgcccctctcggtcagtcgacttcagggaagaagctgatcttcttcgggtctgcggccgcagtggcgcccttcgacctggaggacctgctgcgtgcatccgccgaggtgcttgggaaaggcgcattcgggacgacgtacaaagctgttcttgaatccggggcgacggtggcagtgaagaggctcaaggatgtgaccctgaccgagccggagttccgtgaccggattgctgacattggcgagctgcagcacgagttcatcgttccccttcgtgcctattactacagcaaagacgagaagctgctcgtctacgacttcatgcccatgggcagcctctctgcggttttgcatggtgagaacttgacagttgtattttgttgtgattcttaattcacaatgaaatgttattcttgtgtttgttagtactatgatgcattgttatttggtggtgatgat

SEQ ID NO: 13716 - DNA, 657 bp, Oryza sativa
  ref <308>: DATABASE ACCESSION NUMBER: AK111064
  ref <309>: DATABASE ENTRY DATE: 2001-12-06
tcgccctcccctcgatcaaccggcgtcgcgccgccgcctcgcttccgccgccaccgccactgcctctgccgcttcacttctcgtctggacgacgccggcctcctcccccaatcgcagccgccgccgctcgcttctcctctggagtctggacaaactcctcgttcccacgtgtccccatcgttccccgtccctgctgcctcctctcgtccccgatcccagtccccagaggcgtcaatcggaaggagctcgagggcggcgccgactccgcgtgcaagacctgcacgatccaccagcgcccaagcttcgtcctctcagtctcctgcgccgttcgtccttccgtccccgccatcgctgcctcaggtcatccctgccgtggccgagcggcggtggttgggcaaaatggtggcagatccgcgactagatgccggtgaggaggttgcggatcagccttctttcatcccatcacacaggagaaattagaggcaaaccagatgcaaagcgaggtccaaggagtgcaaagcaaggtccaaaggagtgctgtcccatattacctttgtgcgttctttgatgttggcttgaaatctgggataaagttgtaatctttgtacataagttgggaccttgaattatattgtgcaattttagaagtcatgattt

SEQ ID NO: 13717 - DNA, 879 bp, Oryza sativa
  ref <308>: DATABASE ACCESSION NUMBER: AK111065
  ref <309>: DATABASE ENTRY DATE: 2001-12-06
agcccacgcaaccctcgaacaatggcgagggctcgccggggacgacaaaacgccgccgcatcgccgccgtcgctggccctgcagctgcaggtggccagcctcgtcatcgtcttcgtcttcgccttctcctccgccatcacgcctacacgagctgatcatgtagaaggacacatgtcgcacgagatgtttggctacgaaaacgacgcgacggggccggcgaagtggggctcgctgcacaaggagtgggccgtctgcggcgacggcaagaagcagtcgccgatcgacatcaccacggtggagccgcagaaagtgaaggagccgctgatgcaagcctacaaggccggcgccaccaccattcagaaccgaggccacgactacatgctgaaatggaaagatgggaatagcaagctgacggtccaagggaaggagtacacgctcaagcaggtgcactggcatgaaccctccgagcacacaatcaacggaaccaggttcgacgcagagatgcacatggttcacgaggaccccagcatggcgagagccgtcgtctctgtgctgttgagcaccaaagcaggccaacccaacgcagtgctcaccgaggtagtaacaacgacgtgcctcaccgttcacctgaaatggttcgtttccatttcatctcccacggagaggccaagaaatggaaatgaacacatctagatgaattgtgaatactaactagaaagtacttgatgtcaaatagtgatctttagtactggtaagtggtactgtataacccaatatggtacatggaagattggaagtgctagctagcacggtagcacccatgtccccacaaatgcaaaatacgttcccacgaagtaatacgagaatatattttaaact

SEQ ID NO: 13718 - DNA, 688 bp, Oryza sativa
  ref <308>: DATABASE ACCESSION NUMBER: AK111066
  ref <309>: DATABASE ENTRY DATE: 2001-12-06
aactccggcgaaacccaaaaccctactccctcgtcctcctcgtcgacggcggcggcgatgctcccgcagagccagagcagctcgctgcagcggctcaaccacgtcgagcagatgatagtccgggcggtgaatctggccggggcggtcatggaggagctggggaacgccactgggccccgcaccgagggcgtcgctggccactgccgcgagttcatgctcgccatgaaggaaattcaaacgacattgcgtgaggaaatcaaaagtgcttgcgaatatcgcccatttgagaagtgtgactacagtgcaaggattgctaatgagatttgttgcaaaaaggtggaatatgtacttgagaagctggatgctatgcaaaagaacattgaggatgttctactactagttaattgataactagttatctacctacctactggtttacagtggcacaagtgtgactgagcggtttacaaaggaacatgagtgtcggtgtagccagcttgcaaatgcacaaggcatcattgaactatggaatgtaatttaccttcggtttacagtgctttggtttaggtggttgcacagtgataaactgcaagtaaccacttcagtcttgcagaaggtttacagggcagaatctgaaatgaatgcttgctagtactcgtatgaaatgaaaggaatggttgcacatgct

SEQ ID NO: 13719 - DNA, 761 bp, Oryza sativa
  ref <308>: DATABASE ACCESSION NUMBER: AK111067
  ref <309>: DATABASE ENTRY DATE: 2001-12-06
aagctgccaaccaacccagcggcagccggcgggccgatggaaaagctggtgatgagacgcgagcggcggcggagcgagctgttgtaacgcaagcggtggcgcgagtgaggtcggcggcagtatcctccgtcgtcgcctcgttgggagcggtcgcgtctcacggtcaggccgccgctagctgggatttgaggaaagaggtgccaaccaaaattttctagtggagcaggttgtctcaagcagaatttcctaagcatccgaaggtgcccagccaggtcgcacatatccggacgtctatgaatgtcctctgttaggcattcctgtagtaattttccaatcaccactaaaaccttcatgttgctctcattgcaaattttgggatcaagcaattcagtcaccccctttccttcagcaagagcttgagccagacttgccgcctttttcttggtgataagctcctgaagaactattccaaaactataaacatcacttttggaggtgagacgtccctcccgacaatacaggggatccacgtaacctatactccctatacacttaacagtatgagttttgtctgtcgagagaagtctcgatattccaaaatctgttatttttgcattaaaattgtcatccagcagaatattggaaggctttacatcaccatgtagaacagggctgcacatagaatgtaaataccctagagcatctgcacactctatagcaatatccaatcttatgtccaatgaatcaaggctattcttgtc

SEQ ID NO: 13720 - DNA, 707 bp, Oryza sativa
  ref <308>: DATABASE ACCESSION NUMBER: AK111068
  ref <309>: DATABASE ENTRY DATE: 2001-12-06
agacccagctgctgagctcccactgccaccgccatactcgaggctggccatgaaggctcccgccgaccaccaccaccaccaccaccactcctccacgccgccgccggcgaccaagatctccatccccatctcggccgccgccggcggggcggaggcggcgctgctcgggaaggggcggtacaaggcgtgggcgctcgccgccatcgcgctcctcgcgctctggtccatgttcgccgcctccgtcaccatccgctggtcctccggcgacctcgccgccgagttcggggacctccccgacccgcttatcgacgacctcgaccccctcgagatggaggacagagagaagctagtgcgccggatgtgggatgtgtacacacgcaccggtgttgatcgggtacggcttccacggttctggcaagaagcattcgaggctgcatatgaggagcttgctggtgatgatacgcaggctagtgagacggcagtatctgagattgctcgcatgtcagtccacaggcctgaacttgaacaatcgtcgaacaagtattagaaataaatgtgtaacatttggtgaagtggagatggtagttggaacccgaataagtatttaggattatgtaaaaatttaatatcccacttgaagatcacttgctaaatatgatcacagtttacttggtttgttagccaatgcaaaaattccacttctctgc

SEQ ID NO: 13721 - DNA, 852 bp, Oryza sativa
  ref <308>: DATABASE ACCESSION NUMBER: AK111069
  ref <309>: DATABASE ENTRY DATE: 2001-12-06
aatgcatcgactgcgtcaccatgccgccctcacctcctcccgcctcctcgtccgcgacaaccagcgcatcaccgcgctcgcccgcgccggcgacgtggccgccgcgcgcagggtgttcgacgccatgccccgccgcgacgccgtctcctggaacgcgctcctgaccgcgctgtggcgggcgggccgcgacctgcccgccgcgcgcagcctcttcgacgatatgccctcccgcaacgtcatctcctggaactccatcatcgccggatgcctcgcccacggcgacctcgcggccgcctccgcctacttcgcgcgcgccccgcgccgcaacgtcgcctcgtggaacgccatgctcgccggcctcgtccggctcggcagcatggaggacgcgcggtcgctgttcgaccaaatgcccgagaggaacgtggtgtcgtacaccaccatggtggatgggctcgcgaggtgcggggaggtcgctagcgcgcgagagctgtttgacgcaatgcctacaaggaacttggtttcgtgggctgcaatgataagtgggtatgtcgacaacaacatgttggaagaggcaagaaaattgttcgaggcaatgccagagaagaatgttgtggcatgcactgcgatgatcacagggtattgcaaggagggcgatttgcagaacgccagaaggctgtttgatgggattcgtgccaaggatgtcatatcttggaacgccattatttctggtatgctacacagattacagtttcctttcttacccatcttctttctttttttattgtacttggagtaccagtgaaggtggtgattgactgatttgaaatttaaagttgatctgattcatccttc

SEQ ID NO: 13722 - DNA, 532 bp, Oryza sativa
  ref <308>: DATABASE ACCESSION NUMBER: AK111070
  ref <309>: DATABASE ENTRY DATE: 2001-12-06
acccctagccacggattccatcgccgcggaggacgaggcgcgctcatcgatccgccgctccccgtcgacgacgaagcgacagcatcaagggttctaaccacctcttcccccgccgtcgccgtgagcgcctttttctcttcctccttctccggaagaattgggcgggggatttcgctctcatcacgaagaagagagcatcgtgccatttccttgcaagcaggataataagtatctaccgaagcttcggtgaaagctcaacaagattgatgaggacaaggattgagccataggaaaagccaaggcggctagggctgagcaaatatgcccttaactacccattatatattttcagaatttctattgtatttttatagggcctggattggattacagagtttggcctagaatttaagcactaccagccctaggcatgtcttggcccctggacgaggataaatcatatcatatctacggtggattttcacccaccactttactctccattatatataatgatgattcttgccgcatc

SEQ ID NO: 13723 - DNA, 667 bp, Oryza sativa
  ref <308>: DATABASE ACCESSION NUMBER: AK111071
  ref <309>: DATABASE ENTRY DATE: 2001-12-06
agcacgccgctcaacctcgccgctcacgctcgccgccgccgcttgcgtcgcgctcgccggccctgctcttgtcgctctcgccgccgccgccgccgccgctttcgtcgcgctcgccggccgcactctcgtcacgctcgccgccgctgctctcgtcgcactcgccaccgccgccgcttgcgtcgtgctcgccggccccgctctcgtcgcttacgtcgcgctcaccggccgtgctctctcacgctcgacaccgccgccgccgctcgcattgtgctcaagatgcttgacgagaagcgcgaacgtgagctcactcccaggaaggatgatgccaaagaaatgcaagagtagccttggcttcatctaggaaagatggttgacaaactgatctgcaacaactcttgtatctttcttgcctagtttcctattcttgcttctagccaacaaagcttgataaacttgttttctcacttcttcggtcatgtctttccttccttcgatggtttacttcaacgggagccacgacatgttctagcaaaaggaagaaaatcaagttcattgatagtacaaataaccatggcatgttctagcaaaatctaattgtatcaaaaagcaagttggcttaccagcaaggtgtcgtacataatcgaaatcgactgcaccaaattcattt

SEQ ID NO: 13724 - DNA, 958 bp, Oryza sativa
  ref <308>: DATABASE ACCESSION NUMBER: AK111072
  ref <309>: DATABASE ENTRY DATE: 2001-12-06
aaaaccaaacccccacctcccacctccccggagccgccgcgccgccgccggagcgagccagtgagcgatggccgggacgggcggaagaaccggcgagccggaggccaccggagtggaggcagcctccgccccagagcgctccgaatccagccgatgcatgccgttcgaggactgcgtcgccggcatcaagtcgtctctcaaaaatccgacggtgcggttcctgatggagcggatggataaggccggctgcccgatgccgccggggatgatcacggcgaggaactgcgggactgccgataagaatggttcctacggttcccggatagggataacggtttgctgtgaagaaatacgatataaagatgagataactcagctattaattcacgaattaatacatgcctatgatgattgtgttgtcaaggacatggattggaagaactgtgctcaccatgcttgctccgagattcgagctaaccaccttagtggtgactgccattataaacgtgaattgttgcgtggcttcatgaagatgagggggcatgagcaagaatgtgttaaacggcgggctctgatgtctctcaggaacaacccacactgttcagggacagctgcaaaagatgcagttgaggctgtatggagtatatgctacaatgatacacgcccatttgatagggctccatgatattattggcaacattacaagaagccatgaattaagattgtgcacccctgctggggataattttgttccccttcagtcaattgtagttaagcaaagaacttatttttttgctggagcaaagctgtattaggctataagtcatgactcgagttcatgaacattgtagtgaattagctcatatgatgattctattatcttttgcattacatagttggacaaagtataataagctcctagaaaagacttgtgccatgggttacttcttcatgaggt

SEQ ID NO: 13725 - DNA, 577 bp, Oryza sativa
  ref <308>: DATABASE ACCESSION NUMBER: AK111073
  ref <309>: DATABASE ENTRY DATE: 2001-12-06
acacggtgtcacagtcacaggtgcattgacggattgagtagctagtctacacgaaccacgcaacacgagcaagatcgattcatacaccatggcggcggcgagccagcttctggccacggcgacctgcctcctggccctgctcctcgccgccggctggatggtcgccgccgccgacgcgcgccgcctgctcgacgacgtggagtacacgggcacggctatgccgccggcgccggcgatggcgccggtggctgaaccgggcatggacgttcacggcggtcggatgatgctcgccgagggccgcggcctgctcgccggtgggcttcgcctcgcggggaggctgcttctaggcctcggactctaagaaggggaaatggccaactgaattttgccccccttttctttctttcgttgcatggatgctactacattggattctatcaataccatctcctggctctttgtcatctttttgcattggaatctttcggaaattgatcacctttacgtgtgtgtatgttcagatgtgtactactactgtaattctttttgccgactggtatacatattcgtttctttc

SEQ ID NO: 13726 - DNA, 724 bp, Oryza sativa
  ref <308>: DATABASE ACCESSION NUMBER: AK111074
  ref <309>: DATABASE ENTRY DATE: 2001-12-06
gctgctgttcggcggccacggcgacgccacgttcctgtacagcgtgccgaagagagcgctgctggcgccaatgccaacgccgacgagggtgggcgacggcggcgtcgacgacatgatgagaggccaccgctggtggaccacggcgcagggctggttgctcatggcgcgccgcggctcgccgtgcactttcctatgggaccctttcaccggccgccgtgtcaggctgccccccgaccacgacggcaccgtcctcaccgccgaaggcagccatcgccggaggtgcctcctgtcatgctgtggtcccatggacccgaccagctgcaccgatctcgtcatcgacctcgccgacccggagctctggtattgccgtcccggcgacaaccactgggtgaagctccatcagcaaccgtaccagtaccgcaaccctgcccaccgtgacgccatcatcagttttttacgcaagtttacggcgatcgacggcaagttctacaccgaactacacaccggcaatgtcggcgtcctcgagttctcgccggaggttgccgaggggaactaattcccctcggcccaccggcacccgttgtcaagcgttatcaaatccatgcaggctcttaagtcgtgtagttatacaaagtcacaaacctgtattatcgacgaaaatctcgttccttgtagattgagatgcatggcctctctgtttactttaaacatcattcaagcggac

SEQ ID NO: 13727 - DNA, 1011 bp, Oryza sativa
  ref <308>: DATABASE ACCESSION NUMBER: AK111075
  ref <309>: DATABASE ENTRY DATE: 2001-12-06
gtccccgtcgccgtcagccgcccgccgcactcgtttccagcgatcaccgcgcgagacgcgccgtgaagaatctcccgggggatccatgacggcgacgttgaatcagtcacactgattccatcccaatcagaggaggcgctcgctgatccatggatccggagacggcggcgttcgtcgggcgagatatcgatgccgccaccaatggtggtgaggtagctgaggagaggaggaggaaggttgagctggtgcaagaagccatccgtgagctcctggaggagaagaggacgggggagcggcggcggcggcagggtggagatggtggtggcgaggaggctcggcgagatcacgaggaggaagaagacgatctcctttcctcgttgctctccaaggtggatgcgctgcaaaatgatgccgctttggaacaagtgaaaccgaattgctcccatcctaatcctgaaatcagcaaggaggtcaagctaggcgacgtagcgaaagacctgaacaaaatcaagaggcagaacatgatcacccacatcctactcggcacggtcattgtcatgactgccgtctggcaattcaacgaggtgtcgttcctcctcgccgtgaagagaaagcttagcaatcctttcaagtccttgggggacttgatcaagagttcgctgaaggggggagggaagccgatgatcgaggcgccaccgctgcctccagtcggcgtcccggatgttacccggaatgatttgccattgctactcatcagcaacggcaatggcaacaatgatgactgagaattagtgagatagttatgcccacaaaggtatgaaagggcaactcctcaatggaaaattggaaatgctgtttgttggtttctttatttgttgcagacttttatgttgatcttggtatcaagtggaaatgtgcacctttttaaggattgaaagcaagtgcacgtttcttcacttgttgtaaagatatttgaattttttgttattaagcagttagtttgtcaacttt

SEQ ID NO: 13728 - DNA, 828 bp, Oryza sativa
  ref <308>: DATABASE ACCESSION NUMBER: AK111076
  ref <309>: DATABASE ENTRY DATE: 2001-12-06
acgtgcgcagatatggcatccggacaggtgctcggtggccggcggcagcgcgagcgcggcgggcgtcgacgaggccaaggagcgattccaggagatccagggcgcctactccgtgctctccgactccaacaagcgcttcctctacgacgtcggcgtctacgacggcaacgacggcgacgacgacgacgacgaagcagatctgtcggggatgggcgatttccttggcgagatggcgcagatgatgagccaggcgacgcctgcggagagcttcgaggagttgcagcagctgttcgtggacatgttccaggacgacatcgacgccggcctctgccagtcgacgccgccgccgccgtcatggccgtcgcctccggcggccgccaatgcacgatcgccggcggcggcggcgacttcacgcaagggcgtgaacaagcggtgctcaccggcggcgatggacatggactccggtttgagcagcctgctgggcatttcgggcttctgtttcgaggcgccatggacgtcgcaggacgcgagcactgccgccggcggtggcggcggcaagaggagaaagcagaggccgccgccggcgagccacaacgtgtagttggatgttgatcagccgaagcaacgtaccagaagaagattttgattgcccagtgctcgccacgaagactgacatttttttctttttcttcatttgttctttttgttcatggctgtactgtaaatagagaacacgctccagaatttggttgaacacacggtgtataattaatttaggagtaagagcatgtttctatttgatcattgatcgtaatgagctgaatttgt

SEQ ID NO: 13729 - DNA, 699 bp, Oryza sativa
  ref <308>: DATABASE ACCESSION NUMBER: AK111077
  ref <309>: DATABASE ENTRY DATE: 2001-12-06
gaagctttcattcgcgaagccgcacaacacaacgcaacgccgcgcttccgcctctccacccgccgccgcctccctcgccggcttgccgccgccgccgcggtcgcgaggcggagaccttgcgggacgatcggagcgacgtccctctacacccctccccctccgcagcggcgagaagaacaagggggccgcccgccatgctgcgccggtgcgtgcgggatctgtacccgctgcggcctcttaggaggatccctaggccgatctccagcgaggtcccaagtccagcatttcttcgacccagaagcaagtcgacaaaagcttcccaacagagttcaacacagaatactgtccctggccctcaaggagaaccttctcagtcaggaagcaatgttccgaaagttctgcttggaactctgatggtcggcgctgctgctatggctgcttatcaagctggctacatagacgatcaatttaaggatataatatttccctctacaatgaaggaaaaaaatatcagaaagatatacgatgatctgaaggctccttctgaacaaaaagttgatgagaagcaagtagtatcagatccaaatgttgacattgttcagaacagtaacaacgaggctcatcctcaaaaggaccttccaactgaagggatgggtccaccagaaattccaaccactgatgagcagactgtttcctctg

SEQ ID NO: 13730 - DNA, 796 bp, Oryza sativa
  ref <308>: DATABASE ACCESSION NUMBER: AK111078
  ref <309>: DATABASE ENTRY DATE: 2001-12-06
aatcgatttctgagatagcttttgagctgaaagagattcggagtttccggagagtaacgagccatatcccgaggaggatagtggctaccctcagcaacaaggatgactcgtcccagcactcgctctcaatcccatgatgctccggagggttcccgaagccgtggtgatgaaccgccacctcctcctaccatggctgaggttcttatggccgtggagcgcaaccgtgaggctcaaaacgccgtccttcagcaaatcgcagcaagtgtagccgctaccgctgcccacattgcccaaggtgcgggcggtggtggacaccatgccaccgggggactcgctgtttcagcgtactcaacctccggtgttcactcgctccgatgatccacttgatgctgatgattggcttcgcaccatcgagcggaagctcacatcctccccctaccgcccgcccgcagctcctccccctaccgccgccgcgtcatccatcgccgactgccgacgccctcctcctctcccgccttgcactgtcggcctcgcagagaagggaaagagcgagagagatgaggaagggagagaagaggggaaaagagagaggaggctgatgtggccatgctgatattttggtcccacgttgactcagcgaccacgttagataaaaccggggtcaaaaccaccgaagaatctgaagagaacggttttataagtcaagtgatgtcatatatatctggttttacagttgggggacgattttgtaactcgatgacaagttgagggaccgaataatttttccttttgtgcc

SEQ ID NO: 13731 - DNA, 1075 bp, Oryza sativa
  ref <308>: DATABASE ACCESSION NUMBER: AK111079
  ref <309>: DATABASE ENTRY DATE: 2001-12-06
ggaatatccgccaacgccacttcccccgcaccttaccgtccacgccaccgtcctccctcccggactccccgcagcgttgccccctcttccatggccaagcgtctcttccactcgtgccgctccccctccgtggcggacgccgtggtcacctccaccactaccctcctcgccaccgaccacccacctttcttcccgggcagctgcccgcgccgtgttccccgccgccgaccacagcagccgcctccgggtgcatgtgccgctggctatgcggccgacgacctcacaccggcgcgcgggacgcctgcgtaccgctggcttaagagctcgcagtggcacgtcatcgaggccgccgggatcaccgacgacgaccacacgcctcgcctcaagatcgacgcgcggagccggctgcggcgctctcgccgccgcctgcaccgtcgggcggaccccgtcagcgggtcgtcgggggacagcggatggttcaccagcgacgaggactcgtacgcgaacagctgcggcgtcggcgtcggcggcggcgaggccgagacgctggtgacgtcgaccaccacggagtcttcgtccggcgcgagcgggaactgcggcggcagcggcgaggtggacggcgtagtggtggccgggagcttcgcggtggtgaagcgctccgacgacccccgcgccgacttccgcaggtccatggccgagatggtggtggggcgcgccatctacgacgccgacggcctcgagcgcctcctgcggtgcttcctggcgctcaaccaccagcgccaccgccgcgacatcgtcgccgccttcggcgatgtgtgggaggccgtcttctccaacccgacgtcgtcgcagcgccgcattgtcacatccgactctgcgatctgcaaggctgcagcgaccgtgtcaaaccgtcggtagaaaacaaacatgcatgtgatacgtatagcaacggactaggcctattactgtactagtagctgtatctaagatgtgattatggagaggtagtatgagtacgtgtagacggatgtacattagtactgtacgagcaaatttctttttttgggttcgtgtc

SEQ ID NO: 13732 - DNA, 910 bp, Oryza sativa
  ref <308>: DATABASE ACCESSION NUMBER: AK111080
  ref <309>: DATABASE ENTRY DATE: 2001-12-06
cccctctccgccgctctccccccactccggcgtcgctctccatccccccaccaccgccggcggcgccgctccccctcacccccaaggccaagtcgtaagccagccgtcgaggccatgtcgtcgtcttcctcctccttcccgacctctcgctcccctttccccgccggcgccggcgccggcaccagcgggggcggaggaggaggaggagggggctccggcggcggaggtgggggtggaagatggagcggcgtgcgcccctggggctccagcggcggcacgtcggtgtcgtcgtcggggaagcggattcagaaggagctgatggacctcaacgcctccgactgctccgccggccctaagggcgacaacctctaccactggctctccaccatcatcggacctcagggatctccgtatgaaggagggatatttttcctcgatattgtattcccaattgactatccgtttaaacctcccatggtaactttcaagacaaggatttatcactgcaatgttgactccactggtaacttgagtatggacattttaagggaaggatggagtcctgctttaactatttcaaaggtgctacttgccattaaagccatcataacaaacccagatccatactgcccacttgtgccgagcattggacatttatacttgactgatagaactaagcatgatgaaatagctgcggagtggacgatgaggtttgcaagatagggagttccatctgcagctaagcaagatcactaactccgtaaatgaatatatttggtgtaccctgagatgtacaatgttgggaaaagatcaatactttgtttaggttgactgtgacataagatgtacctgtgcattttatattagacaattattatgttgttagcttttaggtggcagaattggcttc

SEQ ID NO: 13733 - DNA, 499 bp, Oryza sativa
  ref <308>: DATABASE ACCESSION NUMBER: AK111081
  ref <309>: DATABASE ENTRY DATE: 2001-12-06
gtgcaggtgctggcggacgtccccggcggcgtcgagctggcggcgcgggcggcagccccggcgccggccgcggcgatcggcgaggccgtgcgggtcatggagcgcgtccgcaggcggatccgggtccggatcggggtcggagaggcgggcggcgcgggcgcggcgggcggtgaagagctcggaggcgctcgtcatggcggggtggcggcggtggtgcgaggccgcgagctccctgcctcctcgacgcggcgaccgaacggacgggacaaggatttggttggtcgtctccgctttgctcttcttcctcccctttttcttcgtcccttcctttttcacgcttaatttaattgttttcttgctattttatgctcctgtattggacctacgtcaaaatgacaggcagccatgtacagtatgctaatactatgattgacacgttctattttttttatcagcacatattgcaagtgctagtaaaaaaaatattagggacattatc

SEQ ID NO: 13734 - DNA, 531 bp, Oryza sativa
  ref <308>: DATABASE ACCESSION NUMBER: AK111082
  ref <309>: DATABASE ENTRY DATE: 2001-12-06
ctcactaacacacaagtctgacgcacaaaccggaggcacgccgatatgtccacaagcagcaggccggaggtcgggcggtggagccttgccggcgccacagctctcgtcaccggtggcagcaaaggaatcgggcgcgccatcgtggaggaactggcgagcttcggcgccacggtgcacacgtgcgcccggaacggggctaccctgaacaggtgtctggaggagtggagagccaagaagctcgccgtcaccgtctccgtccgacgcgtaggtgcgcgctgacccggaggcgatcgccggcagggtcgccgccatgttcggcggcaagcttgacatccttgtacgtacgcaccaaaacatcggcctcctaacctacccggttgaattaattttccatacaatgtgctatcttgtggctactagtgctagcaggcagatgacgacaaggtgtacacgtgattcctagttgcagatcttgtgctacctttttctttttgttttcttcttcgatatgggatgagtttggtttgttgg

SEQ ID NO: 13735 - DNA, 887 bp, Oryza sativa
  ref <308>: DATABASE ACCESSION NUMBER: AK111083
  ref <309>: DATABASE ENTRY DATE: 2001-12-06
aaaccctctctcctcctccggtctccttcctccccttcacctccgcggcgcgccgtcggtcgccgctcgccgccgccttctggttcttctccggtctatttccccgcgggattcgtcgcggacactccggttggttggtgtatctaagtcggttcgagttgccaaaatctgattgttctccggaggtgaaggtttactaggcaatcatggatgtcgataagcaggaaacgatggaagagaccattcttgttggtgatgatctcatgcgtgggttgccatcccctgtcataccaaaggaaattgcttcacatgtccttgacggtgttgagatttgtgatggcatactcaaaaatcttttcttatgtctgcaaatcaatgatattgagccgttttgccaagatgaaattgtactataccgacaatgtgctgagaaaagggacaaggaaataagagagcggctgcaggatagtgaatataagctgggtttttcaatgcccctggaagaagctaaggaaagagctacccaactccaatcagaaatcacactgcttgaaaggcgcatgattcttgctagtggacttgagggcatggaaggatttcgccaaagatggagcttacatggacagcttggagacacaaggaaaaggttggaagcgctgaacagtggaatcgtaaaaagagggagccaaagttctccagtgcaagagacaactcctgcagtcaggaagaggtggttcctttggtaggttagttttcgttttctgatttgcaaaccagtgtagcatatggtatattattggccatgggcatgcactcgttcctttccacagtatgctgtctccaaaccaacaatcgcacctgctaaccagtacaatttgcatttatac

SEQ ID NO: 13736 - DNA, 1008 bp, Oryza sativa
  ref <308>: DATABASE ACCESSION NUMBER: AK111084
  ref <309>: DATABASE ENTRY DATE: 2001-12-06
tggcccgcgtcaaatcgacccgaattattatcgctcgctaaagcgcacaagtacagtgacaagggacgtgtggttggtgacaccgagatcccgtgtttaatccccagcacgttcacggtttctcgagggacgcctctcactacaaatctcttcctttttttttccaaagccataatccgtttcgctgcctgctgctactgtctactactactactactcggatcactcgcgcgcccgtccgcttctctgctgcgtgacgacgcctcgtcgccttctctacctctcgcgagcgcgcgcgacgcagcggcagcgtccgtgtcgtggcgtggcgcggcgcggcgcgctctgcacggagagagacgatgatcgcgaggcgcctcaagatgctggtgctggtgtcgctcgtcccgctcgcgctgcgggcgacctcgctgctcgccggccatgtcgcgccgccgtgctcgccggagtcattgcggcctgagcaccagcccgccggcgccggcgacggcgtcaccatgggcggtggcggcgcgtctgcgtcgagttatcggaggaaccggaggaggatggagggcggtctcgccgccgccgccgtcgccttccacgcgaggaggttccggccgcacggcggcggcggatttgaggccgacaagaggctggcgccgacgggctccaatccgctgcacaatttgcgatgacgcagcgtttcttctcaaatcgaattcagagagttttgcaggctgctgatgagattgttgttgatgatggtggcgactgtatgtatgatcagattttggctcttcttcttgtgtgtgtgtgtgtgtgtgtgtgtgtgtgtgtgtgtgtgttaacatgtctcattctctgctctcgaagtctcaagacttgattcttcttactgggtgtgttcttgataagtatggcggtgtgtggctagcaatatactcgtatacatacgtattctacattttccatatacttgtagccgtgttcaattgtttgttc

SEQ ID NO: 13737 - DNA, 663 bp, Oryza sativa
  ref <308>: DATABASE ACCESSION NUMBER: AK111085
  ref <309>: DATABASE ENTRY DATE: 2001-12-06
actcgtgtctctctctttctctcctcattctctctgcctctcctctccttctccaccactccgaatgtgcggcgcgcgggaggcggccttctcggtgccaccgacgaggtggcggccgggagcgggcggggagcggcgccgcggctggataccgggggccgggagcacgcggcgcgcgggaggcaggaggcaggcggcttgggagcgcgcgcgacgccaggatccgcgctgcctctgccgccgatgaggaggagatggaggaggcggccgggagcggccccacgacagtcctccgccgccgtgatggctggatctgccgcctccgccgccgccgacgatgacaaggcggccgggagcggcaccgccctccccacgcatagtggccacggatccggtagtgggggatgtgtgcgacggcggatccagcgatggcggcgatgatgacgaggacgacagcgacggtgccttctaggattagggttcggattttttgattttattttcttttcagttttttatttttgcttgtgggcgacataacttgcacgcgaaaatagcgatatttccgtgtggtccgcttaacccgactgcacagaaagatgcacacctgggtgtagacgggcaagacctctccacacgaaaaaaaccctgtttgaccgcatg

SEQ ID NO: 13738 - DNA, 549 bp, Oryza sativa
  ref <308>: DATABASE ACCESSION NUMBER: AK111086
  ref <309>: DATABASE ENTRY DATE: 2001-12-06
cgacgcgaggaagctggaggagctgttcaagaagctgaacccgtcggccgaggagttcgtgccgctggcgcgccgccgcggcggcggggacggcgcgcgccggctgtcggcggacgcgcccgtgttcgtgtcccccgcgatcgacttctacttgcaacacccggtgcagcagccgccgccgatccaggtgctccccgtggtggtgggcggtggcgggggcgcgggattggactccagcagcgacgggtccaccaacggccagccgaatcgtcgggtaatcgatcgcctaatcgcgctgctgggttcggtgcgattagtttcgctgtggggggtttggcgtagattcattgtggcatgatcgatctctatcgatcgatcgatcgatcgattgggatttggggtttagggtgatgttgttgtcttcattgccggagttttggtctctgacgcgatcattccagaatgttgattcatgggcgaggggggtttagttctagttaggttatgatatttatgtgatcaatttaagacgaattttcctcgaggacc

SEQ ID NO: 13739 - DNA, 552 bp, Oryza sativa
  ref <308>: DATABASE ACCESSION NUMBER: AK111087
  ref <309>: DATABASE ENTRY DATE: 2001-12-06
gatccggaatttgcgagaggaggcatggtgagtttgcagggggcgcgagggggcggcggcggcggcggcggctacgggtggaggtggggggagaaggctggcctggtcgtatccctcctagacgacgcgctcttccacgtcctctacgccgccgaggccgtcgtcctctccgccgcgctctgcagcttcttcctctgctgcggctgcaacatctgacgagacctgatgggtacctgatctgcgtgctcttctgcttcgatgcggcggcggccggcgtcctagtccgacctgaagcctggtgaaagggcggcgcctgtatcatcatctcctcgcacaacttcgcatcgcatgtaaccttctcggcgttggccgtcgcgtggcctgttcagttctgtttggcttcttgttcttttgtgagccaagcacgttgcacctgaccggagtgcttgttgctgttgcctcttttcttttgctcctggagaaaaatttttgtatcgcgctgttcccgttctgaatttttgatgtactagcaattataagttctaaattttc

SEQ ID NO: 13740 - DNA, 684 bp, Oryza sativa
  ref <308>: DATABASE ACCESSION NUMBER: AK111088
  ref <309>: DATABASE ENTRY DATE: 2001-12-06
cgtcctcacttctctcttcttcccccccccccctctctctctctctctcttcgtcttcccgggcggcggacggcgcgggtgggcggcggagcaggcgagcgaggcgggtgggcgagctccggcggcggcggggtggccttggccgggtgccttggtggatttggtgggtggcgcggtggccggacctggggtggtgggcgccgcggtgggggccagggtggcggggtggaggagaccgacagcgtggtggttggcgccgccgcgggggtggcggagatggcggatttgggcgggaggccgctggcccgactcactccccgcccttcacgacgcgctcgccaccgcccacaaggagcgccgcaagctcagacccatgttcaacgtcgtgccggggctcgacgggaagcccggctccgtctcgctcgagctcgggagcaagcctgggtgcttcttgatcgccggcaccagcgcgaaggtgcaggttggttgcaggagccgcggcggcgacgggttaattaattctttgatcctttcgatgctcaatttagtaattagcatggcaattagcagttgaatgggaaaatgagttggatttacatatgtacactctgcctctcagtgtttactggagtagcagtgttgttactctgcaatgtcagctctttatcttgccattcttttctt

SEQ ID NO: 13741 - DNA, 880 bp, Oryza sativa
  ref <308>: DATABASE ACCESSION NUMBER: AK111089
  ref <309>: DATABASE ENTRY DATE: 2001-12-06
aagctaaagctagctagctagctacccagctcacgcgaatggcctcctacgacggcggcggcgacggcgggcggtctggcgggggcgggagcggcgacctggcgtcgagcgccaagctggtggcggaggcggcaagtcggtgttccaggaccgcgtcgcgtcgcgacctggagaaggtcgacaaggcttgcatcgcgggtggcgcctcccggcgagaggcggcgcagagcagtggcgcggaggagcggcaccggtggaggggcgacgcggaggagcggcgccggggaagaggcagcgaggaggagcagcgccggtggaggggcggcgcggaggagcggcgccggcgaggggcggcgcggagcggtggcgcggaggagcagcaccggtggaggggcgacgcggaggagcggcgccggcgaagaggcggcgaggaggggcggcgcgaaggagcggagccggcggaggggcgacgatgatgtcgacacttggcgacgggatgacgacgccgccgggatgctgctgcgcgccttagagtgtgcggagagagagagggggaagcacgcgtgggtcccacggatggcaagctggttttgactggccaaatttggctaggcagggagccggtttggccagctgatagcttggccatccaaatagcaagtctgttggagtctgtctaattttgaaccaaacttgctaaatttttgctcggagagtgagatagcaagactgctggagatgcttttacgtagtgtgggcgtttttttgcgaaaaagcccctattcttttcactttttacattcatgtccacgatttatcctatacaaacactgtttgtgaggggcctatacgtaattaaagaaaaccggagggctttttt

SEQ ID NO: 13742 - DNA, 894 bp, Oryza sativa
  ref <308>: DATABASE ACCESSION NUMBER: AK111090
  ref <309>: DATABASE ENTRY DATE: 2001-12-06
atcaagctcacaagaaaaccaaaacagcaaccaatcaacaagcgatcgagcaccttcgccgccgttgaagacgacgacgacgacgactccggcatgggcaacagcctgcggtgctgcctggcctgcgtcctcccctgcggagcgctcgacgtcgtccgcatcgtccacctcagcggccacgtcgacgagttcagctgcccggtcaccgccggcgccgtcctcgccgctcaccccaaccacacgctcaccaccacgtggtcctccgccggcgtcgggtgccccaccaagaagctcgtcatcgtctcgcccgactccgagctcaagcgcggccgcatctacttcctcatcccctcggcgaccctgccggccgacaggaggaagaagagccggcagagctccaacaagaagagcaagcggccgagccaccaccatcacaagagcaacggcgcggcgacggccgcgagcacggcggagcaggacaactacctgagggagcttctgtccgagaagacggcggcgtcgggtggccagcggaggcggcggagcggcagtcgggtcggcgtgtggcggccgcagctcgagagcatagtggaggagcaatcggattaattaaggagagctcgaagagcaatcttctttttccactcatatatattcttttggttttctttctgatcttccgatgtgaataccacgagagagaaggcatttccggttctctcaccttcaatccgtcgacgcatgtataaacatgtccgggtttgagcggtttttagctcgggagatgaggggaaaacggtgacggaataaatgtaaaaagagccccaacctgtacaaagagatttggttgggttcattcaagctttctaaatggaaaaagggcttccttttctt

SEQ ID NO: 13743 - DNA, 626 bp, Oryza sativa
  ref <308>: DATABASE ACCESSION NUMBER: AK111091
  ref <309>: DATABASE ENTRY DATE: 2001-12-06
acattacatatcccatctcagagcagcgtacaaggacacggaatcagcgaaaaggcacgagctcacgatcgagctagatcaagctaagctagcagtaagatcggaaggagaaatctagtcgttgttggtcatagacaaggaaaaaaaaaaacaagccagaaaccgatggggaactgcggggcgtcgcagcgtgccgtggagtcgtgggccgacggcgacgagtgggaggacgaggcggcggcgtcgtcatcgtcggaggacgatggccaccgcgagcggatggagcacgtggcagaggtgaccatcaggatcaccaagaggcagctgcacgagctgatggagcgcaagggcgccgggaatggccacgggaagatcagccggcggtccacgcagcagctgctggcggacatcatgaactccggcgaggtgcaccaccacgaccagcacagggaggcgcactggaagcccgccctgcagagcattccggaggccgtggagtcatgagttccattctacgccttaagcttggtggttaagtcgccgcttgattatttttccaagaagtttgtcgctttcctccatgtttcttttccatgaccacattttctttactctgcaccagattt

SEQ ID NO: 13744 - DNA, 621 bp, Oryza sativa
  ref <308>: DATABASE ACCESSION NUMBER: AK111092
  ref <309>: DATABASE ENTRY DATE: 2001-12-06
ggaacggcggcgccttcggaagaaggcaagaagagcgacggcaatggcggcgagaagccgacctcgccggcggacgagaagagcgccgcgcgcaaggacgaaggcaaggacggcaaaggcgacaagtcgtcgtcggcggcggcgtgcaagcaggaatgcagcaagtgctcggccgggaaggaagccgccgacgaggctggccgcgccggtgggaagacggcgtcgtccaaggacacggtcacagccaagaacagcgacgacgtcgacggcgacaaatccgaaccggcggcggtggcggtggagtaccagtaccaccaccactacagccggccggagccggccatggtggtgccggttcacctcccgtactacgccgcgaacgcgacgccgtactatgccggaggatactacccgatcccgccgccgatgccggcgatgctccgtcaccctcctcagctccggccgcagccgtcacgcttcgacgaggactacttcaacgaggacaacaccgtcggctgccacgtcatgtgaaaccgcaaaacacgccaagctcctcctggctcccgccatgtacaaccgatcgatcaccaagaaatcagcgaccaccattcgtttcttcag

SEQ ID NO: 13745 - DNA, 902 bp, Oryza sativa
  ref <308>: DATABASE ACCESSION NUMBER: AK111093
  ref <309>: DATABASE ENTRY DATE: 2001-12-06
agcttcggactttcgtccatcgccggcaagaacagcagcgcagcaggaggtgtagccttgtagacatggcgagccttggctactacgacgaccgtggcgcgccgtcgtcctaccgctacgacgcgcggcaggcggcggacggggcggggacgtcgttccacctcttcatcttcctcgccaccgcgtcgctgctcggcgccgcctcgctctactcgcggtgcgagtccgcggtggagagcctgttcgaccaggtccgggtcgtcgtcgtcctgtccccgctgctgctcctgctcgcgatgcagtactgggcggcggccgcgggcggcggcgggcggcggtcggggctctcgtcgctgctcatggcgccgctggtaggggagcacagcggcggcggcggcggctggtacgaccagcgccgcgacggctcctcgccgtggggcgtcgcgctggcgctggcgctcgtgctgctgctcatctcctaccagtcttgcttccaagattggtggttcccgctcgtcaaccgccgccggtgagccgagatcaccgacgagagcaatgaaatttgcaaagatcatcaatcgatcgatcgattagcaggtgcaggttcaaaactttgaatcggttcattccacggatgaaacctagccgagccatgtatgctccattttagtatagttactctgttacttctactcatcactggcttcaccgctggagaagaggaaaaatggaaaatgataggtaggggatatttttgctgcatgatcattggagcccggactgtctggactctggtgtcttgagctattaggcattaataactacagtatcaattaatcttggatgtaaatgtaatggcagcagcatactgtgacactgacacactattgtgtgctataaat

SEQ ID NO: 13746 - DNA, 490 bp, Oryza sativa
  ref <308>: DATABASE ACCESSION NUMBER: AK111094
  ref <309>: DATABASE ENTRY DATE: 2001-12-06
atttcagacttcagtttggtgttaagctctctttgtctcggcctctgaatctctctgaactttctgatgtgttcgtggaggagacgagttcttgccgtgttcgtcgtcgtcatcgtggtgatcatggcggtcgccgcttcccgtgctgacgcggcgaggccggcgccggaggaggcggaggagcggctggtggactgcggcgaggggggatacgagtcgatggtgtacccggcgatggtggagaaggccaaggagacggtggagctgctgctggcgaggttgccggccggaccgagccccaagggacccggtcactgaagatcatagtgattacatgttctttttttttttcacttttgttcatagtttgatttctcaaaacagagaaacaaaagatattcttttttacctgtatatgatatcagtaggaatactggatgtaattagacagtgaatttactgattgctacgaaggttaggattctttgat

SEQ ID NO: 13747 - DNA, 545 bp, Oryza sativa
  ref <308>: DATABASE ACCESSION NUMBER: AK111095
  ref <309>: DATABASE ENTRY DATE: 2001-12-06
gtcctgtctggctgtctctcctcctccccgcgtggcggcgtcggtagataccgcgtgattcatccggcggcggcgagctccgccgatggagaaggtgaagggtctgctgaagccgcggccgacgccgcagcagcagctgcgggagtggcagcgcaagctccgcaacgagtgccgcgtcctcgaccgccagatccgagatgtgcagagggaggagaagaacgtggagaagtctatcagggaggctgcaaagcgcaatgacattggatccgcaaaggtgtgctgtactaatcatgctgcttttgcttaagcactccggtttgtagattgtgatgcagtacacacgaacatcattttttttacccccttctgtatatgcctatatggctggttggatcccattcgtcagttaatgcaagtttaaagttgatttaattttattacgttgagcaaaatgctgctcatttggctttgcaaacatcgaacctggtaggggaatgtggacactgcttagattgtaattgttcgctaaaacttttggacctacc

SEQ ID NO: 13748 - DNA, 778 bp, Oryza sativa
  ref <308>: DATABASE ACCESSION NUMBER: AK111096
  ref <309>: DATABASE ENTRY DATE: 2001-12-06
gtcgaccaccaccgaaccaaaccaaccccggccactacgtcgccgaggtcgttcgtcccgttgccaccgcgccggcggcgacggcggcgacggcgtcggcgcctgcggcgaggcggcggctgaagctgctccggcccgacgacacgctagtgctcggcggcgtctaccgcctcgtcaccttcgaagatgtgctgaagcagttcgtgtcgaagcggaacgccacgatgagccgcgccacgatcgccaccgctgccgaggacgacgatggtcaccggcgacagggtcaccgcggcggcgaggcggcagcggcggcgccagcgaaggtggcggcccagtctcgtcaagagaatccatccagcccaagcccgaccgatgaggcccggcctgagcctgaacccgagcccgagcccgatctcgtagcgacggccatggcgctcggcgggaggatgagcctctcccggcacgggcagtggaggccggcgctgccgagcatcgccgaaggaagcgtcctgtgcttttaagggagggagatggctgaccaagtgaccatatgttcaaaatatgttacactctgatctgcagagcttgctcactgcagccgtgggttatattagctgtcgtgttatacgagagtctctgcatatatttttctgccctgttctgtttgaatttgaatcggagtttgtcagtttgaattagtcatggcatacgtaggagataattgtttttttgtgacggtacgtttaacacacatgtatggacctacttcttgacttgt

SEQ ID NO: 13749 - DNA, 539 bp, Oryza sativa
  ref <308>: DATABASE ACCESSION NUMBER: AK111097
  ref <309>: DATABASE ENTRY DATE: 2001-12-06
gttttcactcgctctggctccgaggcgctccccccccaaataccctagcggcggcggagatggaggaaggcggcggcggggaggaggcggagaggtggccgtggtgggcgggggcgagcgcggcgcaggtggcggcgggcgtggcgtggttccggcggggcaggggcggcgcggcgttcgcgatgccgttcaaggcgttcgccatcgccaccctcttcgtcggcgccggcgccaccgccgtcaccgccggagttctcgcggcgggcgtcggatcggtggacgagatgaagggcgtgggcgcgagcatccggaggtggatgggagctcctccacgacgccgagtggagggaggaggagacccatgaccagcacaacgctagtgcgtgttcaattgtatcgatagatcccaggcattgtatgtgctctagaaatcctcagttttttgcttcacatcgtctaaggcccaaatgtgaaatgttcgtctgtttgaactggaattggaaaagaaaaaagcaataatcgcctcgatacttcgttgc

SEQ ID NO: 13750 - DNA, 678 bp, Oryza sativa
  ref <308>: DATABASE ACCESSION NUMBER: AK111098
  ref <309>: DATABASE ENTRY DATE: 2001-12-06
aaaaacatatcgaccaatccctcttccagtcaagaaaaaaggaagattacaccaacaaacaaactagctagccaatggcctctttgtcctctttccggctcgccgtggcggtggcggcactgttggttgttggctcctgtgccactgagctcaccttcaaggtcgctgagggctctagcgccaaaagtctagagcttgtcactaatgttgccatctctgaggtggaggtcaaggagaagggcggcaaggactgggtggcgctcaaggagtcgtcgtctaacacctggacgctcaaaagtgagtcgccgctcaagggccccttctctgtccgcttccttgtcaagaatggcggctaccgtgtcgtcgacgatgtcatccctggaagctttacagctggctctgagtacaagagtggaatccaactctaagtaacagacatgtgtactcttgttgggtcacatgcgaaatatgaacatctaaataatcctctcttaaaagagatcgtgtcatgtttgagtgagcaaataattattatttttggttattttgttgtaataggccgatggcaacataaggcatacatgtgtccttccaaaatattgctgcggagctgtatgtgagcattgtttggaatatatgtcatttatataagatatatggaaaaaagtatatttggtc

SEQ ID NO: 13751 - DNA, 738 bp, Oryza sativa
  ref <308>: DATABASE ACCESSION NUMBER: AK111099
  ref <309>: DATABASE ENTRY DATE: 2001-12-06
aagaggcttgcaggttgcagcgaacacacgcagcacggaaaggggaaaaaaaaaccaaaccctctcgtcctccccttccccgcccaccccggcctcgccgcccccttcccgtcgttcaccggcggcgaattcaagctgacgagctcgccaccgggggggggatttaggattggttcgatcttggccggccaagaagtacaagtttcttcgggggattagcttgttcgcgagggggaggagttcggtggtggagccttcgccttcgtgatggcggacaccaaggcggaggcaaaggcggaaactatcggcggcggcggcggcggctctggctcgttcagcgagcaggcgtttgttgagaagcttaacaagctcaacaacacggcgactaggatccagacactttcaaattggtgcatttttcaccgaaagagagccagaaaggttgttgatacatgggagaagcagtataacagtgcaaataaggataagaaagtatcattcctgtacctgtcaaatgatatcctgcaaaatagtaaacgcaagggaggggagtttgtgaatgaattttggagggttcttcctggattattgaaagacttttatgtcaatgggggagaagatggaaagaaagtagttggaagattatattatgaacttgtggcttcagtaaaatccatttcattttgcttgcatgcccagattgtggatggttgaagttgatgaaattgtaagcttaat

SEQ ID NO: 13752 - DNA, 893 bp, Oryza sativa
  ref <308>: DATABASE ACCESSION NUMBER: AK111100
  ref <309>: DATABASE ENTRY DATE: 2001-12-06
gacgcgacaatggcggccgccagaatgctcgtgctcctggcctctctctgcgctctcctgctcacggcgtccgcggccaaatggactcctgccttcgcgacgttctacggcggcagcgacgcctccggcaccatgggcggcgcatgcgggtacggcgacctgtacggcgccgggtacgggacgcggacggcggcgctgagcacggcgctgttcaacggcggcgcgtcgtgcggcgcctgcttcaccatcgcctgcgacacccgcaagacgcagtggtgcaagccggggacgtccatcaccgtgacggcgaccaacttctgccctccaaactacgccctgtccggcgacgccggcgggtggtgcaacccgccgcgccgccacttcgacatgtcgcagccggcgtgggagacgatcgcggtgtaccgcgccgggatcgtgcccgtgaactaccgccgcgtgccgtgccagcggagcggcggcatccggttcgccgtgaacgggcacagctacttcgagctggtgctggtgacgaacgtcggcggcagcggcgcggtggcgcagatgtggatcaaggggtccgggacggggtggatggcgatgagccgcaactggggcgcgaactggcagagcaacgcgcgcctcgacgggcaggcgctgtcgttccgggtgcaggccgacgacggccgcgtcgtcacggcggccgacgtcgcgccggcggggtggtcgttcggcgccacctacacctcctcggctcagttctactgatgagcattaattgcaagcctatctcatttaattaatctggaccgttcgatgtagtatattgtatgctttgatcgacgtggcataggatggaagaggccgcccacgaagaaaatttgggacttgtgtat

SEQ ID NO: 13753 - DNA, 660 bp, Oryza sativa
  ref <308>: DATABASE ACCESSION NUMBER: AK111101
  ref <309>: DATABASE ENTRY DATE: 2001-12-06
aatgattaatagggacagtcatcctctgcccactctgcctgcccaaacctaccacttcacactgccgccacagcccgcagccacagcgatcgagcccctctccctccgcgagccgtgtgcagcgggcgacgggataactaacaaaaatggcggccgtggtggcggcggtggaggcgggggtggtcgcggtggcgcgcgggcggggcagcggcaggctgctccggggaatctactggaggctccgagccgggatccggcggatgcagtcggagcgcgggaggtggcgcggcggcaggcgtgaccacgcccggttcagcttccactacgacgcgctcagctacgccctcaacttcgacgacggccgcgccgccgcggacttcgtcctagtatgagtccgacgcgacatggccggcgtttagccgcgcagtatgcaggtggtgtgtgtgtttgtctgcgtgttagtgcgtttctgcttagaggcccgtgtaattaacggaagctggcggtgtgtttgggtggttagtgtggccgcgtactctgctcttcttggtttaactaggagctagtactactatttttggtgaatgggaaggcagattctgtactattatttctaacaccacgatttgcaagggggaaagagtgcttctttgccgtttt

SEQ ID NO: 13754 - DNA, 515 bp, Oryza sativa
  ref <308>: DATABASE ACCESSION NUMBER: AK111102
  ref <309>: DATABASE ENTRY DATE: 2001-12-06
cgatccccttgacggaaaacccaaccgacgccgccgcccgatccatcggcggccggcggcggccggtgggtgatgctcggcggcggacacgaggtcgaggactccttcgacccctgcttcaccgacgcccacaccgtgtcgccttcccgcacctccactccgcgcctcctagcttccgcctcgtcactccgccggcggtgtcgccctacgcgaccacatcgccggtgggcggtggcgtcaagccctgtcagggcggccggagactccgcgctcatccggataacctgcggatcgccggatcatctgcagcatatacaaggattattattatggaaaattacgggtctgagtggctgagattttcgtttctgatgaatctcactgatgttgaacaatgatcacagagcaagtcgcctgctgtcgtgtcgtcgtctcaggttaatcgtatcccagaatggagttaacatgggaccgatcaatccaccaattgttagaatcatataagaattcctttc

SEQ ID NO: 13755 - DNA, 857 bp, Oryza sativa
  ref <308>: DATABASE ACCESSION NUMBER: AK111103
  ref <309>: DATABASE ENTRY DATE: 2001-12-06
tcaactcaagcaaaagcctccccctccaattcaatttcctctctctccatctctctcctccaatcgctgcctcgctcacgcacgcgcgctctacctacctgagggcgaggctggtgccgatggcaatggaggctgcggcggagaggagcgccggagcaggggcggcggcgacggcggcgccggagagcggtggcggtggtgcaggggagaggcggtcgcggttcaggcggatctgcgtgtactgcggcagcgccaaggggaggaaggccagctaccaggacgccgccgtcgagctcggcaaggaactggtcaggattcttcttcttcttcttcttcttcttcttcttcttcttcttcttcttttttgatttgattgattgtcctttctccctccctccctcccaaatccgtcataaaaatccaatcttttcattttctacttttctttctttcttccccctccgggcttcgccggccggctcgccggcggcggcggcggcgaccgactctccggctcgccgtggccgtttctctcttggtgcgcgtccctagtatcctaggcagctatagtagtaggttttctagatgagcaaacaaaaccaatcatgattgctggcgagcgcggtgacctcagttgcgtcccgaacggaacaacaatcttacaatttttgcatgcatcaaaacgccaccaccatctcctccctctctcccccaccttttggatttttcttgtcgactcaagagagtagagagaggttgattggtttcttgtttttttacatttccccttttgtttttggttcgtgttggtgcaggtcgagaggggcatagacctggtctacggcggtggctccatc

SEQ ID NO: 13756 - DNA, 663 bp, Oryza sativa
  ref <308>: DATABASE ACCESSION NUMBER: AK111104
  ref <309>: DATABASE ENTRY DATE: 2001-12-06
cggagttcttcaaggcggcgtgccctcgcgcctacagctacgcctacgacgactccacctccaccttcacctgcgccgccggcgccacagactacgccatcaccttctgccccgccgctcccaccagcgtgaagtcgtcggggcagaacccgcaggccgccgggctgcagcagctcaacgacaccacggtctacttcggcggcggcggcggaagcccgcaatccagcggcgcgacgaccacttcggcttactcctccattgccgccgccgtattctcggtcgccgccgtcgctctcgccgctctgctttgagccgccttggctggcagcctggcacgtcggcgtcggcgtcaaaatgtccacgtacacacacggcggcgcaatggagcaggttggccgccggcggccgcctcctggctgcgctccactgcgcagtgggcccctggaggaagacagtgttgaccgagctctgttacagggttgacctagatatcgatgattatagttttagtaattctttttgatttttttggggggattttagtgtatttattaggtgattttgttggggcggagacggatgattcgttcattctttgttacaccaaaatcagattatgtatgtagggtttgattttgcatgagattagttactagtgatttg

SEQ ID NO: 13757 - DNA, 660 bp, Oryza sativa
  ref <308>: DATABASE ACCESSION NUMBER: AK111105
  ref <309>: DATABASE ENTRY DATE: 2001-12-06
aaaaagaaaaagcggggaaaactcgttcccctctccaccgccggagatggcgacccaaccccgagccggcgacggcgcgacggcggcggcggcggcgaaggaggcccccgccgtgtcctacttgcaggcctgcgtcgagctcgacgactggtggctggagagggttgaaggcgaggaaggcaaggtccgcgtcgtcggctccaacaccacgacgagtcgagctggtagaagattcacttctgcttccattaaaacacggcatgctagtggtgaccttgagactgaagatggtatcatcataatgattgcacgtccaccgaacatttctaaaatgcatctgaatggatttcctgacgaggtgtccaaacacttctcacttggctttccggttcaatgggagaatattattaatgcaaacatggcagagatgaacaagcagccgcaatctccactaaaatctactgaatattatatagaaaagtttttgcggggaaacttaaaatattcaatgggacttttctcttgggatggtctcaacatatatcaggggtctagaagtgatgcagacagatttcctagcgagaggctttctaattcttctaatggaagacctactgttgaggatcctactgcaaatacagattgtaatgttaatttcat

SEQ ID NO: 13758 - DNA, 817 bp, Oryza sativa
  ref <308>: DATABASE ACCESSION NUMBER: AK111106
  ref <309>: DATABASE ENTRY DATE: 2001-12-06
atccttccatgcaccacacctgctcgaccacatcgacgcatcgatcatctcccaagaactaaccgatcggatggccatggagttggaagcggaggaggaggcgatgatgacggcgagggagaacgagaggctggtggagtcgctgtacgcggcggtggcggcgggggacggggcggcggcgtcggccgtgctggcgggcgacgtggactggtggttccacgggccgaggcggtgcgagcacatgcggcggcgcctgaccggggaggccgaggctgcgtcggcgtcgtccttcgtgttcgtgccgcggcaggtggcggcggtggggcgcggcggcgggtgggtggtggcggaagggtgggaggggccacgcgcgtactgggtccacgcctgggccgtcgagggcggccgcatcacccgcctccgcgagtacttcaacacctccgtcaccgtccgggacgtcggcggcggcggccactgccggccgcagctcgacggaggaggagttcgccggcgcgccgccgtgtgctggcagagccaacgtgggcgcggcggcggcgacgacgacgacgacaggtcgctgcctggcctcgtgctcgccatctgacacgtgggcccacgcatgcatcaatccttcctggcgcgctgggtcggccccacctggcgtctcgctggaaagtgggcccccgaattcatgcgaacgtgtacgtcgtgtagtactatactgcactatatctttttttttttttgaaaaaaaagacagacatctaaatgtgctgctttgatgttgaaatgctgcaatatatatacaggcttaact

SEQ ID NO: 13759 - DNA, 946 bp, Oryza sativa
  ref <308>: DATABASE ACCESSION NUMBER: AK111107
  ref <309>: DATABASE ENTRY DATE: 2001-12-06
gacgctgcgacgaaccggagaaggattttcttccgatctcgcttccacctcgccgcctcgccggggaggaggagggtcgatggccgtggcggcgccggcgaaggcggcgcacgcgctggcggccgccgcggcggggatggtgctcctgtggtgcgtgcactttcgcggcggcctcgcgctcagctcccccaccaacaagggcctcatcttcaacgttcatcctgtgcttatgctgatcgggttcatcattctaggaagtgaagccataatgggctacaaaatatggccatggggccatgacacaaataagatggtccatttgcttcttcatgctattgcacttttgctgggttcagttggaatatatgctgccttcaagtttcacaatgaaagtggaattgctaacctctacagcctgcactcctgggttggacttggaactatctgtttatatggtgtacagtgaatatttggcttcgtcaccttcttcttccccggcgcttcgccgtcgctccgacgcgccgcgctcccatggcacgtccgctcgggccttctcgtctacatattagcgttgctcgcggcggagctggggttcctggagaagctcaccttccttgaggccggagggctcggcaggtacagctcggaggccctgcttgtgaacttcaccgccgtgctcgtcatactgctgggctcagccgtcgtgatgtatgttactgctccgatgcacaatgaacattctcatgggtattcagcagtgcgcaagccatgagccagatgagccattgatcgatccagcttcttcatcggctgtgtctgttgtataattgttttgctgaattattcccatagctgctgcctgctgcaaacgtggttcagatctatgggcatgtgatgtaactttgtaagtaactgacgatattaattacgagatgcgaaaattttg

SEQ ID NO: 13760 - DNA, 826 bp, Oryza sativa
  ref <308>: DATABASE ACCESSION NUMBER: AK111108
  ref <309>: DATABASE ENTRY DATE: 2001-12-06
aacctttgccaccactgatccctgctgctactcctcccatcttttacccactttgactccactccacctagctacctagctagctcgcaccttcttcttcgtgttcgttaagcttgccgggcttaccggcaaagaaggtcgtcggcgacgcgatgatgaggaggcggtggtctcgcgcggccgtcgtcgcctgcttactgctgctcgccgccgcgtgcgcggagtcggcgcgcccactgccggccccggccaaggcggcggcggcggttgtcgtcgtcaggccgaggagcgcgttcgacgtggtggtggccgggctcgtcggcatcgggctcgggcaccggtggcggcccggcggcggcgacctggtcgacgacgagaagcggcgggtgccgacggggcccaacccgctgcacaaccgatgagtactacgtggtacgtgtacgtacgtatagctagctagctagcctgccgcggcttggagagacgcgtccatgttatatatatttccgccattagcgtgggcgcgaggagcaagcaaagctccatcgcagagtcgtcatggcggcggcgacgacgacgaggaggagaagaggaggagaagaatgggaaggagaagagaggagttcgtccagtattgtttcccttctgcttccctttcttctttgtccctcttctgatccacttaatttggttttttttatttttttttcttgattttattttgatttttttcctctcttgtattgattggtttgtgaagtggacagcaaggccattctgttgatcgaaagagagatagagatatgagtatagtgtttcttgtttc

SEQ ID NO: 13761 - DNA, 770 bp, Oryza sativa
  ref <308>: DATABASE ACCESSION NUMBER: AK111109
  ref <309>: DATABASE ENTRY DATE: 2001-12-06
taatcctaagatttcagattttggcttagcaaggctatttgggaatgatcaatcacaagacgtcacgaaccgtgttgtcggaacatatggatacatggcccctgagtacgctatgcgcgggcattactccatcaaatcagatgttttcagctttggcgttctgattttagaaatcgtcacgggaaggaaaaacaatgtctcctacgactccgagcaatcggttgatctcttaactttagtgtgggagcactggttggcaggaacagttgtggagcttgcggattcatccatggcggggcattgtcctggagaccagatcttgaagtgcgtccatcggactcctgtgtgttcaagaagaccccacggagaggccaatgatgtcgatggtgaatgtgatgcttagcagcagcaccgtgtctttacaagctccatctaggccggcattttgcatccaaaagagtagtgtcaactcagattcgtactcggagccattccgtggagctaatcagtccacagtatagttggccataaggcccgaggcccgaaggcccggcccacggcacgcctttttggcccggcccaagcacggcacggcccgacttgggtcgggcccgtgctggcccggcccgactgtcgggccgtgcctgggcctccccaccggcacgatgggccggtaggccaggcccggtacataaagtacagggactaaaaatagacatataaatgtaactgtctaaagaatagggaccttaaatagacttattttagct

SEQ ID NO: 13762 - DNA, 512 bp, Oryza sativa
  ref <308>: DATABASE ACCESSION NUMBER: AK111110
  ref <309>: DATABASE ENTRY DATE: 2001-12-06
atcggcagtggcagtgcagtgcaaaacgagaattaatctaggctagctactaccacctgagtttgctgttgctgttgctgttgttgcatgcggctgtgacggcggcggcggagatgatgtgcgggaaggaggagaagctgctcggggtgcagaaggcgccggggagttgcccgtactgcggcggaggggtggcggcgacggacgtggaggccaagtgggtgctctgcttcctcccgctctgcctcaacaacaagcggaggttctcctgcaccgcctgcaaccgccgcctcgtctcctaccccgcaattgtccatgactagtagtagtagcgacctctctttctcttctcttccttttacttttcttttgttttattttcttttcccctgattcggagatttgtcgtcgtctatcttctccgggaaggtgatttgataaattctgttctagatctggaactagctgcttctttcccagcgagaagaaaaatagagcatatgtagtatttgatg

SEQ ID NO: 13763 - DNA, 513 bp, Oryza sativa
  ref <308>: DATABASE ACCESSION NUMBER: AK111111
  ref <309>: DATABASE ENTRY DATE: 2001-12-06
atcattcttctctctttctctcccctcaacaccgtagcactgcttctcgcgaccacgcgaagagggaggaggaggctagcgaccacgccgacaggggtgggggcggcacgacacgacggtggtggggtcgtgcatcgcggcggcggtcgccgttggcatcttgctcggctgcttgtgcaccttcctctaccccgatgggctcctctcctgctgctccaacgccgccctccattggcctcgccaggtaaaccacctctgcacctatctcccccatccccgccggcggtgggcgtagtggcgctacagcaagaacagccgccgccggtgatggaggtggactcgccggcgaccggagatgaagaagatggaggtgggtttattttgatgaagacggagacgggtttatttagttggagtttagggatgttacatcctactgttttagcttgttgcactctattgtagtaagctgtttcactttattttgatttgatgttgcattgcaattatttt

SEQ ID NO: 13764 - DNA, 1012 bp, Oryza sativa
  ref <308>: DATABASE ACCESSION NUMBER: AK111112
  ref <309>: DATABASE ENTRY DATE: 2001-12-06
gcaaaatttgacaacgcaacgcaaagcagctgctcttccattccatgtctgcgcgtcccaaccctccgcccgtgcggcggccgcgctggcgccgggatctcaccgtccggacgccgcgcgccgacgtcgccatgtcgctcgccgcgccaccgccgccgccgtccctcgacaccacggtggagcccccgctcgctgagatggagctcgtctgcctcgtcgacagcggcgaggccggcgaggtgtggctggtgcgtcaccgtggcacgcggcgggagtacgcgctcaaggtgctctacgagcgctgggccgccgccgccggcggcgacgccgacgacgacgaccactcgtccctggtgcggtgccacggcgccacgcgccggagcggcggcggcggcgaggagcaccggatcgtcctgctcgagcacatgcgcggcgggcctctctccggccgccgcgtcgcggacgagcgcgccctcgccggcgtcgcgcgccaggcgctctccgggatcgcgcacctccaccgccgcggcgtcgtccacggggacatcaggccgtccaacctgttcgtcgactcgtcggggcgcgtcaagatcgccgggttcggcgccgaccgcgccatcgaccggacggccaacggcgggccctgcagggcgtcgctcagccccgccgcgtacatgagccccgaccacgcctgcggcggcggcggcggctacgccggcgacatatggagcttcggcctcaccatcctcgagctctacacgggcagcttccccttggtcgagcaggggcaatcgatcccgctgacgtgttactccgacggaccaccggaggcgccggccaccgcctcgccggagttccgaagcttcgtcgggtgttgcctgcagatgaatccggcgaagcggccgtccgccgtgcagctcatggatcacccgttcgtcacgtcctccgtattttctcaagaataatatagttattttttaaaaaaatgatattggtatgacatatttctact

SEQ ID NO: 13765 - DNA, 627 bp, Oryza sativa
  ref <308>: DATABASE ACCESSION NUMBER: AK111113
  ref <309>: DATABASE ENTRY DATE: 2001-12-06
gatccatccatgcatgcaaaccttctcaagcttcaacgatcagcgtacgtacgtagcacgagctagcgagccgtcgacgccgacgagttctcgatcgatctccatcgccggagattatatcgaacaatggcgatgtcgtcgtctcccgcctcgccgccgccatccttcctgatcggcggcgcccaggcccagctcctgcgccaccgggaggaaatgctgcttgttcttccctcccctccctccggccggcagctgccatcggaggaggaagaagcagcaccatgcgccgtcaatggccggagtacgatccttgccgccgccgatgattccaagccaacgcggcctggagcgccggcggagggctccggcggcaacggcggagcaatccacaccgctgcttcttcctgatccatcgcatcgtctcgtctctgctgttgatggtagagactagagagctatctatcttggaagagatgataactcaataattaactggcatgatccattggaggagagggatcaacagctaaataattaagcatatttgagatacattagacagaaattcagaaaaagattctgaattctacaatcggaagagaaataaagctgaaactatattggtgt

SEQ ID NO: 13766 - DNA, 607 bp, Oryza sativa
  ref <308>: DATABASE ACCESSION NUMBER: AK111114
  ref <309>: DATABASE ENTRY DATE: 2001-12-06
atttccagtatttgtcgccggctatataatatatcggacgtccagacgacgtcactctttactccgatccgtttcatggcatcagaagctgctacgacctgcatcgggtttatcctcctcacagcaagctcgatcgctgcgatccacaggtcacacggagaaatcaccgagacgtcgttcatcgtcgtgtcgtacctcagccttgtgctgctcttcgtgttcctccgccgcttcgaggcggcgccgcggaattcgccggcgaggggcggcgccaaggccggcgtatgggtcgtcacggcgctgctcgccgcggtgttctcgtggagggtttccgcgctcatgccgtggccggtggatgcgattatttgggtgatggccgcctcaactgttcttgggggattctacgccttgttccttcatcatcccggcgtagactgaaaatgatcgatcgatcgatcgacatgctgaagcaatggaacagttaattcctgtgtaaatatcgttacgtactggctgctagctattggatattgcaaatgtttggttctttcttcacatgtatatatacatatctagctttactttatatatacataaaccattgtac

SEQ ID NO: 13767 - DNA, 771 bp, Oryza sativa
  ref <308>: DATABASE ACCESSION NUMBER: AK111115
  ref <309>: DATABASE ENTRY DATE: 2001-12-06
actgttgctccgctgcctcgccgcgcggctcggcccggcccccatatcccgtttctgccatttcccatcacaattcacacccccacggcgaggagtccagaagcgtcccttctcctctcctctccacgccgtctagtctcgtctcgtctcgccgaccgacccatccatccatcgatcgatcgatcgctggattgagggttcagttcacgcgcgacaccagcagcctgcctcatcaccttccgctcccgtccccttccgcctctcgcatcatcgccttctacattctccgcgcccctcttgaggcgtgataccttggccttctctgcccgccgatctgcctcgccacgcggttcgtcgtgctgctgcggggcggcgtccggcggagagggggcgcgcggcggggtgtaggtagctatgaagaacggggcgaggaaagacgcgggcggcggcggcggcggagtgttcgtcccgtgcgtcgacatcaagtcgttcgtgctctcgctcgccttcctcacggtgttcgtcgcattgtggcagctccagccgtacggctcgttgctcaccgcggcgcgctccaccgcctctgtctcggctggggacaccgctcggagcgacggaggcggtgcccagatccacgccatggccggccggatctgggggagcggcagccggcagcggggaatgaaggtggcggtgatggacgacgtggcggcgcgggagttggaaacggcggttggtggtgactgcggctgccgacggcggcagtgtgat

SEQ ID NO: 13768 - DNA, 732 bp, Oryza sativa
  ref <308>: DATABASE ACCESSION NUMBER: AK111116
  ref <309>: DATABASE ENTRY DATE: 2001-12-06
acacacgcagaagaagagagagaaagagagagagagagaaggcccaaacaccaccaaaccctagccctcacctcgccccgccgtccatggaggcggcgctgtgacccgccgccgccgccgccgtcgtcgtcgtcgtggcgtgcggaaccgatagggcggaggggatgaccgccagatcgggcgaccccggcgtctcgccggagtcgtcgtctgcggcggcggcggcggcggggtccgggggcggggagatctgggggacgtcggaggacctgctcctggcgtgcgccgtgagccgccatgggacggcgagctgggacgcggtggcgaaggagatgcagtcgaggtgcccttccgccgccgtgttcacccccaccacctgccgcctccggttccgcgtcctccaccgccggttctccggcggcgtcaccgccgagaacgaggacgccgacggcggcgaggaggaggaagaggccgacgccgccgccgtcgccggctgggtggaggaactccgcgagctgcgcgtcgccgagctccgccgcgaggtcgagaaatacgatctctcgatcgggtaaaaaccagcccgaaaataaccaaaaaaagaaattaataaacaccttgtttttttattttaactttcggctggttcgtgcattgcccgccactctccaccgtctgatgctgatcggtcggccacaatttttttggaataaactgcttattgcgatttttttt

SEQ ID NO: 13769 - DNA, 458 bp, Oryza sativa
  ref <308>: DATABASE ACCESSION NUMBER: AK111117
  ref <309>: DATABASE ENTRY DATE: 2001-12-06
atcatcaccaccaagccatcgtcgctgcgcatatggtgggtcgccgacctgatgcgctggatgtcgcgggcgaagcgccggtcagccagtaagcagcacgccgacagtgacgcctcctcctcctccacctcctccgccgccacggcgcggccccaacccaacgtcgccgtggacccggacgagagagaacggaaggcggcgttcgagcgcctggacaacctgggacggtgcatcgcggacgtggagagcatcggcgagaaggtgttccgcgctctggtgaacaccagagtctcactgctcaacattctgagcacaagcttctgatgaattcccaaccaaacatcactagaaacgcaaactcgatcgaattttgctactttgaaagacatctgtacataaaaatggggcctttttttaggcttttgataatcatagtactggcatgtttagagagctcc

SEQ ID NO: 13770 - DNA, 590 bp, Oryza sativa
  ref <308>: DATABASE ACCESSION NUMBER: AK111118
  ref <309>: DATABASE ENTRY DATE: 2001-12-06
atggccaacctctgccaatcaaacacccttactactcctgctcctacgaccgcgatcttcttcatcttcaagatagctagcttgttcgagtgttcttggcagcgcggcggagttggggatggggtttcggtcgtcgtcgtcgttgtcgctgatgcagctggctgttcttgtggtggaggtgttgctgctttgcacggcggtggagtgctcgaggcctctgcgtgatcacgttggcggcggcggcgggttctcggtggggaggctgccggtgttcgccgtcgccagggccggaccgagtccacgaggccctgggcattagtagtcttgtgttgaggagaactggagacatagccctggggatctcaagctctgtgtgataatcaagatcttctcagttagcttctacactttcttctcagttagcttctacactttgatcttctactgctgctgctgtttaaatgtttaatttgttcattttagtatggatagttttttttttttggcccaagttgtcttgggttcattctatgtgtaggatgacaataaattgtaagttgtaaagcatcaaaatttgagaaagttggctc

SEQ ID NO: 13771 - DNA, 1030 bp, Oryza sativa
  ref <308>: DATABASE ACCESSION NUMBER: AK111119
  ref <309>: DATABASE ENTRY DATE: 2001-12-06
aagtcttcccatgtagcagaagaggccggctcaccacgccagtgcacaagaagctggcggacaccgcgcgccaagcgagcgctctccacccgaatcggctcagggacaacagcaccatggtggatgtcggggagcggcgttggagcggaaagtcgattcagaaacgtcacgacccgtcagccttcttaatgagaaggactggtgaagagaacgccgagtcgctacggcggacgatgccctgctcgatcatagcggcgcactgccgttccagttcatccttatgggccgccgggtaccggtacggacgaacagcgacagggggcgcgtccggcttgaggacgatggtgtgatctcgagcatgctgcaggggcagccccttgggctcggcgaagacgtcgccgaagtcggctaggagctcatcgagtagcgactcgctggccgctgttgtgactcggatgcgtggtgcaggagacgacggcacgcctgcccagcagatggtgcggccgtggtactggaaggacatcgtccgctccgtgaagtcccaaacaatcggccccagagacgccatccactgggtgccgagcaccatgtcgtaacctgcaagtggaatgacaaagagatcgacggtgaagagcgagccgtcgatggagagcacggcctgtcggatgacgccaggacatgcgaccttctcgccattggccacagtcgccgtcatgcgtgggcgtggctggaccggcagacccgtgcggcacgctgcctcctcggcaatgaagctgtgggtggagccgctgtcgaggagagcggtgagggtggtggcgccgacggtcacctgtacctgcatggtgtcggcgaccggtacgccggcgatcgcgtggagggagaacaccggggactccaagtcctgcggttcctcagccgcgtcggtgtcgtcgtcgtcatccatagcgcagtccaagaggaacaagtgcttgcagattttgttatggccacggctgtacttctcgtcacagttaatgttgagattatgggt

SEQ ID NO: 13772 - DNA, 966 bp, Oryza sativa
  ref <308>: DATABASE ACCESSION NUMBER: AK111120
  ref <309>: DATABASE ENTRY DATE: 2001-12-06
aatccactccagtcccgtcccgtttccttgctgcccggccgcctgcccctcaacctcatcgcgcaatctccatcaccgtccggcgtccgcgagcagcggtgcagagggcgtccttactcgttccgcgcgccccgcccaggtcaatctccccgtaccctcagcctcgactctctgagtctccacgcgatcgacttcgcccgcagcctgcgccgaccctctcgatctccatccatcccacgaggggagcaccggtgggtgccgtcgtcctccgttcttcccccaaaaagaatttagggggttcatgtccctgttggtacacgatgaaccctgcaagccgaagacattatgattctctcgtcgcgcgatatggtgaccaagatgcactcgccgaccgtttcggcggccaaaacgacggccctgacgcctggtggtccaacctgcgtgtgcggatgtctcaggatcatctactgaggcacgaggcgcggaggcgagccgccaccttggaggttttcgaggatagagaaaactcgcatgatggtgcctttggttgcggtgaccgggcctctgctaaggccatggtaactctgcatcagcccaatttgggcgagaccagggagcaggattgcgccgtgtgccttgagcctttcgaggaaggcaacacgcttagaatgatgccatgtttccattccttccatcagcgctgcatcttcagttggctccgcattagccgcatctgcccggtgtgccgtttcacgctgccctcccaggctgattttgagtcggagaaggctgagaaagaacgagttagtgcttcacctgaagatggcaataactgattgatgaagatcaatctgcttagtgagttactttgcttgtgtcctgtctcacaattgagttgatcttatttatgcttcatggttgatatatttatcatctaaagatggcagcaattgtcctgctccactt

SEQ ID NO: 13773 - DNA, 718 bp, Oryza sativa
  ref <308>: DATABASE ACCESSION NUMBER: AK111121
  ref <309>: DATABASE ENTRY DATE: 2001-12-06
atggtctatggcattcgtaacggattgaacgccaccggctcgaccgccgatgcccaatgggcctctccgccgctcgcctcagccgcttcgccgtcgtcgtcctactcctctgcctgtgcgcgcccttctgcaagccagagccagatggtgacgtgccgatcgaccccttgccgggcttgccatcgagatccctgcgctgcttcgacgacggccaggtgtacagctgctgcgagggcgcgtacaggctgaacccgtcgggggtgatcgccgtgccgcccggggaggtggacagctactgcggcggggcgtgcgtggtggagacggaggacgtgctcaactgcgtggcgagcgcgctggacggcttccggttcttcaacggcgcctccgtcgaggacgcgcgctacgcgctcaggaggggatgcagccacaccatcaagagaggggacttcaacgacttggagccgcagatgggagactacccggacatctacggcgacaacagcagcgacggcggcgaggacaacgccgcttcgccgcgtttgctcgcgtttcttggcgccgccgccgccgccgcatggctgctgctctttggtcgctgagcaggttgcatcggcggccttaaagactgacgctgtcatgctactccgtactgatcaggcctactccgtactgatcaggccggttttaacggtgttaattcagtgctgattttgctctc

SEQ ID NO: 13774 - DNA, 513 bp, Oryza sativa
  ref <308>: DATABASE ACCESSION NUMBER: AK111122
  ref <309>: DATABASE ENTRY DATE: 2001-12-06
ctctcccttctctgtgactctacgaggccggcactgcgaagcggaagaggtggagggcgtcggcagccggcgacgggcgatgcgaggggagggctgcctgcctgtctcctcgtcgtccgacgcgaggcgccgcggcggcagccagcgatggagggcggtgggcgacaggagtggagctgggcagcggcggccggcgggagagggcagccgccaatccgccatggcctgccgcggaggtggcccgccacccgtggacgacgctggtggttagggcgcagatcactcgctcagagtcgtggctcagcgccgatcgatgtctcacgcaaggtcggcggtaaaactgctatattcagtaaggcttgctcaccatgcgattctactgaatatagtttcaaactgaacagcatgaaggcagcaaatctccttcaaccccttgtcgttcctgaatcttgttattttaccatgctgctcattagctaaatagttagttcctgtgagctttagttgtttctc

SEQ ID NO: 13775 - DNA, 692 bp, Oryza sativa
  ref <308>: DATABASE ACCESSION NUMBER: AK111123
  ref <309>: DATABASE ENTRY DATE: 2001-12-06
aaatcagggaccaaatctagggcgcggccgtacctctggcggcggcgaagaacggggactcgatggagaaccgcggctggacccggccgttgccgttgttgtcgtcgtcgtcgttcttcccggcgagcgggccacccctcggccccccggcggccgccgccgccgtggcggcggggcgccatgagagggacgacgagagcctcctccccgcaaccctcagcatcgtggccgccgctgcctcctcctcctcgtcggcttcctcctactcctcctccgggggattggggaatctggtcgcgggttagggttcgctcggtcgccggaagaggctagagagagagagagagagagagagagagagagcacgagaggcggagcaaatattgcggggggaggtgggcttcgtgggccagaatatcacggcccactagaattgttgctgctagcgcaccttttcttcttcttcttcttcttttttaatagaggctgctagccttcttccttgaaggagatattttactccgtccataccagaatatagcaatcttgaatcagatgagacggatcctatctaaatttatagtactagaatctattcaatccgtgctaggctgctatattatgtgtgacggatggagtaactatttgacatacttagatatggcaattaactatttgtcatctggacccat

SEQ ID NO: 13776 - DNA, 486 bp, Oryza sativa
  ref <308>: DATABASE ACCESSION NUMBER: AK111124
  ref <309>: DATABASE ENTRY DATE: 2001-12-06
tagctttgggtttttatttattttttatttaaattttttttggatgctgagttcatctgtttgcttggctagtagttggctttgctttctttttcttttttagttttagcgcgagcggcgccggcacatcgggttttggttgcctgccggcgccgccgggcgctcgcgctcccggcccgcgccgccgccgcgggcgtcgccggcggccgggaagaaagaggagagtggccgagtgagattgtcaggagaggcttgtctagctaagttaggaaagaagaagaagaagaatgccgcgtgacgtggcaagagtgacgtgtgccactgcagctgaagctttacagcgtgtgtatgtacaattgtactggctactgtaggtgggttgcttgcaatgtaatgcgatcagtgtgggcgttttgctgatgtaaatttgtaactgtccgtgcaaatttgccagggatcagttgagatttcagaaaatttcagaac

SEQ ID NO: 13777 - DNA, 1020 bp, Oryza sativa
  ref <308>: DATABASE ACCESSION NUMBER: AK111125
  ref <309>: DATABASE ENTRY DATE: 2001-12-06
atcagcaacccaaacggctcactccccaaccggccaaaccccaagagaacccagccggcctccaccacaccacacaccaccaccctcggacacaagaaccgcacgcgcggccggccaccgtcgatgccccctcgccactgccgccgctagccgacgaaccagcatatcttcgccgacctcgacctccatggaccgggcctccgaggagctggagcgccgcagccgctacctcagttcgctcgtccgccgcaccaagctcgccgacccgcccgagccggagccggagcctgagccggagccggagagggagagggagagggaggtggcggcgaaggagagcggtggcggtgaggggaagggcggtaaggtggtggaggagaaggaggtgaaggcggcgaaggagaagaaggagaaggagaaggaggcgaaggtgccgaggggggagggggggaatggggaggagaagaaggtggcggtgcgcgtgcgggcggcggacatgccgccggcgctgcagcgccgcgcgatccgggtcgccctggaggccaccgccgccatgccgcggatcgacagcaagcgcctcgcgctcgcgctgaagaaggaatttgatacaacatatgggcctgcttggcactgcattgtcggcacaagcttcggttcctacgttactcactccttgggaggtttcttgtacttctctgttgacaagttatacattcttctcttcagaacagctgttgagccactaagctaccaacgataatgtgcgatatctctatctactgaaacaaaagtgtagattcgatgcaatttgtaattttgaactgaagttgtattagatgctcaacgagtagtaagcttgggtagaggtaaatggccacttctctacatgctaatgctaaattgtaagacagctaagcttatgtaactgccatgtaccacgtgagctcctgctgtgtaagctcgcttttgacttgcaaagctgtagcttaactgaagtttccaaagctttcctgtgtctgc

SEQ ID NO: 13778 - DNA, 725 bp, Oryza sativa
  ref <308>: DATABASE ACCESSION NUMBER: AK111126
  ref <309>: DATABASE ENTRY DATE: 2001-12-06
ctcctcgccgcgccgaccatcttccccgtccaaccggcgccgccccgacgacctccgtcgtcgccgcacaggccattccccatccgccgtcacctcaggccgcgccatcgcgatcggtcaccggccaggccgcggcgccaagcgccgagcgccgccgtgtcgcctcctgccgcgccgctggtgccccggccctcttccttccccgacgccgccgggccatctccaggctgccgtcgcacgggccggcacccagtcaccgcgccgtcgccgaccctcgccccggcctccctttccccaccggcgccgctccctttctcctttctccttcccccaccgccgcccagcaccaggcccccgtcgccggcactcctcttctctcgggcacgcgtgaggaaaccgaggcagagaaggaatcgagagagagatgcgaggagaagaaagcgagaaacagatcaggttaagagagagaggaaataaaaggaaaggaaaagaaagggacagtgggacccactagggctccaccatcttgactcctctctctgacctcctttgacctggaaactaccaaaaagtctagcttgcatacctctgtcttcctcgggacagagcccactttcagcccctttatccaccaaagtccatattacatctctccagaacccaagttcctctctgaaagtctgtattttctccctcctccaaacttcgggcagtagcccatcagt

SEQ ID NO: 13779 - DNA, 579 bp, Oryza sativa
  ref <308>: DATABASE ACCESSION NUMBER: AK111127
  ref <309>: DATABASE ENTRY DATE: 2001-12-06
taaacccacttcacagctagaatcgcacagaatacggaaatgttaaacaccggtatcccgtttgggctcgatcgggacaggacaatttttttagcaatcaccagaaatcatcacgagcttatccgagtcccactcccaagagagacacaatgtttcttgtgcttatccgagtcccactcacaattctctcaccgtgggcatggcgcgtgagatctcgctggcgccaacggcggcggtggaggagccggcggcggcacctgctcgcgtccgccggcggcggcagctccacctcttcagtgtcgccgctgaagtgcacgaggtcagtgtgggagagcggcgtgagcgtggtggtggcgccgacgccggcgcccaccgtgttttcttcggttgacagtctccatcaacaggaggttcttcattttcttgctttaagcagtgtcaagaaaatcggtgacatgaattggtacgagcatatagatgatacatcgatcgaatctgatatgaacttattcatgtccactccctgtacatatatttgatctggaagttgacggaagcaaaaatcgtttccccatatat

SEQ ID NO: 13780 - DNA, 956 bp, Oryza sativa
  ref <308>: DATABASE ACCESSION NUMBER: AK111128
  ref <309>: DATABASE ENTRY DATE: 2001-12-06
acagctcgccaccatcagcgtcttcttcgtcgaggtcagcggcggcgacacggtgttgggtcatggcgagctacggcgacgacggcgtggagctcaccgagctgacgctggggcctcccggagccagcgctcgcagggccaggcgcggcaggaagaacggccatccgccgccgtcgtcctcgatgattcaggcagcgtacttcgtgaaggtgagcatggacgggacgccgtacctgaggaaggtggacgtcgcggcgtacggcgactacctcgagctcgtcgaggcgctcaacgacatgttctactgctccaccattggactgatggacgggtacggcgagtgggagcacgccgtcgtgtacgaggacggcgacggcgactggatgctcgtcggcgacgtgccctgggagatgttcgtgtcttcgtgtaagaggatgagagtgatgcgagcttgtgaggcgagaggcttgagctcaaacgtgtgacagaaacaattgcaggttgaccagtgcgttgtagataactgaacctggacatcgatcgctcatgcaagtggtgaaagcgctgacgaaaaggatgacgcaattttctgaccgaccaaagctatgctgcgcacacatgattgatgcaacaacatctacagaaagaccagcatatcagcatctcactagctagcctggaataaatgttagttaagtagttgacactgcagatgcggtcaatctctccagcttgctgcttgcttctcacatgagcctgaatgcctctgatacggttgacttccctgatgagatcccaacattttagctcccttttgcctctagctagttgtaagttgtttcggctgtatatgtatgtatgtcgcatcacatgtacatggatcaagagttgttcgttgtacctcccaaattttgatacagctagcacgaagatcttttgagtctgagatgaggttc

SEQ ID NO: 13781 - DNA, 581 bp, Oryza sativa
  ref <308>: DATABASE ACCESSION NUMBER: AK111129
  ref <309>: DATABASE ENTRY DATE: 2001-12-06
ccggaagccggaagcgacggcgccgcccgatatggaggcggagtcggcggcggcgaggcaggcgaaggagtcgctggagctggcgttccagatgtctcagatcctcgacaccggcctcgaccgccacacgctgtcgctgctcatggcgctctgcgaccgcggcgccaaccccgaggccctcgccgccctcgtccgcgagctctcctccgcggctcctccgaccaccgccgccgccgcacccagccccgcgtccaacgccaccgcggcgccgtccgcaaaagccgcgtcgcttttcccctccggtcttcgcaaaccctagggttcgtgcccccttctctcagacgagatcacactatcacttgatcctacattacgttgtcttagaatgtaaactagcggatcgttctgctctgtagattcgttttagccgcaacaccttcctggcttgtatcctcaagagattatgcacaatttttctatcagaactccttaattttaggagatcgtgacatggatccgttcagagatatggggatatcggtatgacatgaatatttgattgcggagacacttgtggcatt

SEQ ID NO: 13782 - DNA, 1019 bp, Oryza sativa
  ref <308>: DATABASE ACCESSION NUMBER: AK111130
  ref <309>: DATABASE ENTRY DATE: 2001-12-06
gagccaaactcccctcccccaaatcgcagcgccgcctccccaaacctgctcgttctctcgtgcgccaccgtccaccgtcgccgagccggtgccatcgccgtccaccgtcgtcgggccgcgccgccgccatccaccgtcgccgggccacgccgccgccgtccaccgtcgccgggccgcgccgccgcggtcagcagccgtagcgccgcggagcagctgcagctccgccgtcgtctccggcgggcgcagcgccgccgccgtcagcagctgcaggcctgcagctccacgcgtccgccgtcgtctccgccgggcgcagcgccgccgtcgtcagcagctgcaagccgctggtaaatctcctcaggtctccatcgtatttgttagattcaatagattttagaagtggaagtagtggcggtggtagcaataatagtggcaatgttgttggtgtcttggtgatgcatcaagagagacgaacaactagtggcagtggaccaacaatggctggcaacatcttagaatgctgttcgtgtgattccacccaatgatgatgaaaagaagcccccgtggaggggattgaggagattgagaagatacgcaaaacgagggagtgagggttctctttgtggggtcgtctctgtgatggcatgggtgttggggtggggttttgtccacaggggtttatggtgcatgaaagctgttgtgtagctcctcagggcattagatggccgtccaagttggtacaatacactgctctgtcttgcaggcatttgatcgaacacgtcctgggcatgcagctgagctgagggaggcaaaacagactttaggctgaaacgagagagggagtgggctggcagtaaaagggagtccactgtaataggagcttttgtatcattctgggatttgtagtttaggaaattgaaaggggatttggatggggaaaacaacatgtgcatttggacttatgattcgacagtgtaattgtaatttgactcggctctgtataaatggactgcataatattt

SEQ ID NO: 13783 - DNA, 449 bp, Oryza sativa
  ref <308>: DATABASE ACCESSION NUMBER: AK111131
  ref <309>: DATABASE ENTRY DATE: 2001-12-06
tcaaacaacgctggtgctgtcactctctacccaccaccgacacgcaaggagcagaagaggattctggcaatgctctcgtagatccgtcgatgggatggatcgtaaatactcagctgtcgatctcgctcaagtaaggggaactccgtcgtcggggatggaattcagcgatagagaggcagcggacggcgccagggcagcctcaaccgcgtcggcggccccgaatatcgccgtgactctgatctgccgctgccgcctggttcacctcgccaacaccggtgccatcccagctcgatggagaacccaggtcgtcgtccccctcgtgaggcatctccggatcggctctcctccgtccccgatggggagagatgatctgagaaaacgggaaatatggggattggagagagaatgtgaatgtttagggtaataaatcggtagaaagacgagaaagt

SEQ ID NO: 13784 - DNA, 541 bp, Oryza sativa
  ref <308>: DATABASE ACCESSION NUMBER: AK111132
  ref <309>: DATABASE ENTRY DATE: 2001-12-06
ttcttccattcgctttcgcctacccgccgccgcgacacggaatttcaggcggcgccgctcgccggagaagtggtcggcccccgtcgagagggagggttagacagggagaaggagaggatgaggagcagcgaggccatggagctcctgggcctcccagcgcacacccgcccgtcgccttccgaggttaaggctgcgtataggagaatggtgatggaatcgcatcctgatcgtgtcccgacgcatcagaagtctcaagccgagtcaaaattcaagcaggtcaggtacagattgatctctgatcattgtggaaaactcctaggccatcatgtttttcggtctcatggtgacggtgtgcttcaagcatgaactttatgatatgtgctttccacaatcaaatggccgatgtatgcttgtttttgtatcactagctttccaggacttatcataaacatgtatgtatatggctttgcaatactgcacgcggaagaatttttcatgtctgcatgataattagcaatactaatccgtttccagttggatg

SEQ ID NO: 13785 - DNA, 626 bp, Oryza sativa
  ref <308>: DATABASE ACCESSION NUMBER: AK111133
  ref <309>: DATABASE ENTRY DATE: 2001-12-06
tggccatcggcgagttcgtgtccgtgtacgcgcagtgcgacatccaggcggcccagatcgagcgcgcgcgcggcggcaaggacgccgacggcggcgaggaggaggaggagctgccgagcccaacgatggcggcggtcgcctcggcgctgtcgttcgcggcgggcgccgcgctgccgctgctggccggcgggttcgttcggccgtgggcggccagggtcgtggccgtgtgcgcggcgagcagtctcggcctcgccggcttcggcgtggcgagcgcgtacctcggcggcgcgggcgtcgcgcgctccggcgtccggatgctcgtgggagggtggctcgccatggcggtcacgtacggggtgcttaagctgttcgggatgcatggtgtttaacgggcaagtctttatattttcaccacgtaaataattaaaccaaagggattattaccaagatactccctctgtattcaattacttgtcattggataatactctctctgttttttaatgacgtcggtttagttcaatgtatttaacgatggatgtagtattcattttcaaattgactcttattcgaagaaaatgtataaatacctaagagtatcctatatcgataaaaaaaaaaaaaag

SEQ ID NO: 13786 - DNA, 692 bp, Oryza sativa
  ref <308>: DATABASE ACCESSION NUMBER: AK111134
  ref <309>: DATABASE ENTRY DATE: 2001-12-06
gcaaaatccaaacgtgacacccccggcccccgcggcgaacaactccacgaaccacggccaaatcctcccatatcagcagctagctagcttgctagcgcacagcaacacatcacttggtgagttggtgtacacaggagggtggagagatggtgaatggatactgcaacctcacctcgtcgcctccggtggccagcggcgccgtggaggccgagaccaaatgggaaggcgtggccgtcggggcggcgacgctggtgaggaacttctcgtcagcctcccagaggttcaggcccgtggagaggagcaggtcgacggccggtggcaacggcggtggcctgcaggccgtggtgcggagggcgttctccatgaggaggcagccgtccagcttcgcggatgggtactggaggatccacgacgacatggacggcgacgacgcggctggcgagcatcaggagcaggcggcgttccaggatggggagcaaaaacggagggaagagcaggatcatgcgacgggaaagaaggagaagatcacgaagaagaaagggcggatcttcaaggcgtgcaagaagcttcttgggttctgattgacacgttgagatcaaagttgtacttgtagttcttgcttcccctttttggtctttctgttttgtcatgttcatcgtttggagtaaataagacttgatttcgttgacaag

SEQ ID NO: 13787 - DNA, 603 bp, Oryza sativa
  ref <308>: DATABASE ACCESSION NUMBER: AK111135
  ref <309>: DATABASE ENTRY DATE: 2001-12-06
cgaagctccaagctctctctctctctccctctctccaatccatcaccgccggccgccgttctaagttcccccacaaccggccgtcggctttgtttgtgcgccgcctccagccgccgtcgccgtcgcgcgtcagccgccggagccgccccttccttcccctcaccgcgccctctccctcctctctctgtgcctgtgaagaagaagggaggaaacaagaagaagaaaggaggggagaagaagaagaaataaaggaaaaagaagaggactgacaagcgggccccactgcacaacaatccagaagatccggttaacatcacaggagctgacgtggacacagccgactacgctaaagcccctgaagatttcgaggtgcaagaagaaccgtattacgaagaagttccagaaggtagcgaggcctacttcaatgatgagtttttctaggcttagtctccactcaagcttatgtctgtgaagtttagtagctttgggtttttctttgtactttcaaataaggttgtaatagtttagatctttaaaaccattaacagttgtataattagtttgtatgaacaaatttgtataattaatcagaagctgttttgt

SEQ ID NO: 13788 - DNA, 982 bp, Oryza sativa
  ref <308>: DATABASE ACCESSION NUMBER: AK111136
  ref <309>: DATABASE ENTRY DATE: 2001-12-06
attccgaagcgcggacaaggacaccacctcctaccgtcccactcccacgccgcgacacacgccactccccgagaaagccatgacgcgccgggccaaccacaccgcctcgccctccgtgaacgccacgacggcggcggcggcggcggccatgatcaccgccaccccgtccccgccgccgaggctgccgcttcccaaccccggcaatgccgacgccggcgccggggcgtggggcccctacgccagctcgcgcgcgttcttctccaacgtggccaccatcctcatcatcctcgcctgcgtctccctcctcgccttctgcctccacgccgccgcgcggtgcctcatccgctgcctcgcccgccgccgcgactccggggcgccggcgctggcgccggcgctggcgcaggcgcagccgcccaagccgtcttccgacgacggcgccaacacgggtagctcgggggcggccagcgcggcgtcgggggtcgcgatggtcggcgggtgggccgaggcggagtgcgccatctgcctgtcggagctggcggacggcggcggcgagcgcgtccgcgtgctcccggcgtgcgggcacggcttccacggcgcctgcgtggacgggtggctcgcggcgcgcgcttcctgccccacctgccgcgcgccgtcgcgcgccggcgagccctagccagacaaccgaccaggtggccgctgctccctcttcagtcttccctgcatgccttccggcttctagctttgccgccgccgcctccggccgatctgccggtgacgcagacacgaagtgacaacaaagtacattacgctggagcttgttcagctagctctgtgatgttcatcgagtacagattacagagtaccacctagtactactagtacctgttcttccatggttcgtgacaatgctgctcgtcgcgtcgtccatatggattaatgaaggcataatgctcttccattcgcatggtttttgttggttttc

SEQ ID NO: 13789 - DNA, 517 bp, Oryza sativa
  ref <308>: DATABASE ACCESSION NUMBER: AK111137
  ref <309>: DATABASE ENTRY DATE: 2001-12-06
aactacaccggtaaatccgttccccacctcgtcgtctgagcatggacgacgacgacgacgaggtcgccgccggcgaggctggacctgcgccggcggcggcggcgacgggaggccacgccgaccgtgtattccgggccctcgcgctcgcctccctctacatcctcttccggcggtggcgcgccggtggggccggcctcgcggagcggccgtcgccggccgagatcgcggcggccgtggcgctgtgcgcctccgtggcgtggctctacgcgctccccgccttcgggatccgccggagcagcgagatctccacccggcggtggcaccaagattagtcgacaactcgacatgccctgggggtaaccactctgtttctcttcacccccatttttttttctttttttttgttcgatttgatctctggtccatgactccatgtgatcttgaagcaaagcaaagaaataatgatatgtttcaattcgagcatataattgcatgagattttcctaagcttcgaaag

SEQ ID NO: 13790 - DNA, 560 bp, Oryza sativa
  ref <308>: DATABASE ACCESSION NUMBER: AK111138
  ref <309>: DATABASE ENTRY DATE: 2001-12-06
attgccatcgtcatcacagcacaaatcagtcaaatagtcaaacaaaacacacaccaccagcagcagctagccatagccatggccatgacgacccgcaccctcctcctcgccgccgtctgcgccgccgccgccttgccccgaggctggagcccgataaagaacatcgacgacccgcacatccaggagctcggcaggtgggcgatcacggagaacaaccgggtgtcgccgagcgacgagctcacgttccacagggtcaccggcggcgagcagcaggtggtgtccggcatgaactaccgcctcgaaatcgaggcggcgagcggcggcggcgacgtcaccggcagctacggcgcggtggtgttcgagcagaagtggagcaacacgcgcaagctcatctccttcgacaagaaccacaacttctgagctccccggagggcgatcgatagctctcgatcggcaagatttatgtgttgaatagctcgagttgttttgatgtaaccattgcgtggatattttgtccatccaattgtttttcacatcgataaaaagccagatttcttctg

SEQ ID NO: 13791 - DNA, 956 bp, Oryza sativa
  ref <308>: DATABASE ACCESSION NUMBER: AK111139
  ref <309>: DATABASE ENTRY DATE: 2001-12-06
acaagtgtttgtgatgcagcagctgaggtagctgagaacgtgagcgtcttcaacctcaagctcaagctcgcccatggcgagggcgtgcgtttccactcctcgctcacccacttctcctcctctagcataaaaggcgtgtcatctttagccaagaaagcagaggaggtaggagagaaacagaggagccgtcttgcccatggcgcgggcggccgttgtcctcgccgtcgtcgtgttcttggcggccggcgtgcaggctgggagcggcggcggcggaggaggggcggcgtggacggcgctggacggcgtgtgcggcgacctgggcggatactacgtcaccccggagctctgcaagtcagcgctctgcggcggcggcggcggcggggacacgtcgtcgtcgtcgtcgccgtgccgcgccgccagcggcgcggggaaggtggcggcgctggcggcgaggctggcggcggcgaacgcgaccgcggcgagggccagcgtcgaggccgcgtcgcgcgccctggaacagaatcccagcagcagcagcaacggcacggcggcggcggcggcggcggcgaggaggcaggggatgcggtcgtgcctgcagctgtacgccggggcggtgccggcgctggagtgggcggcgcggtcggtgtccgccgggcggtaccgcggcgcgcgggaggtgctccagtcggcgcagtacgtctctctggggtgcgagggcatggccggcggcggcggcggcgcggcggcgcttccccgcgagaacgagcggttcagcgtcatggccatcgtcgcgcacgccgtcgtcgcctccatgctgggaccctagctaattaattactcaatggcccttcgcctttgtaattaattagtattaatcagttgattaggccacctggttagagttaatccgtgcaataattaagtttgtaaggagtgttaatgcaggactattttgc

SEQ ID NO: 13792 - DNA, 720 bp, Oryza sativa
  ref <308>: DATABASE ACCESSION NUMBER: AK111140
  ref <309>: DATABASE ENTRY DATE: 2001-12-06
acaaacaaattaatcaaccaacacaccatgtctcccttctactgctgcctcgccgccgtcctgtcgctggcgtcggcgtcgccggccgcggcgtccatctcggtgtccgccgccgcggagcctccggccaacagtttgttgccggcggagcagttcctgcgggctcacaacgaggcccgcgcggcggtgggcgtgccgccgctggcgtggaacgcgacgatcgcgctggacgcgcagcggtacgccggcgagctccgggcgagctgcgaggcgcggccggtgtgggcgtggggcaccgacggcttgtacgggcggaacctgtacagggggagcggcccgcgggtgcgcgcgggcgcggacgcgtcggcgcactgggcggagggcgcgcggtggtacgaccgcgacggcgactcgtgcgcggcgccgccggggcggtgctgcggcgagtacacgcagatggtgtggcgcgccacgacgcagatcgggtgcgcgcgctggttgtgccgctgcctgggcgacacgtgccctctcgtgttggacaccgtcgccgtctgcgagtactacccgccgggcaacatcgccggccagcgcccttactaacgcatatatatgccgcggtatatatatgtagcacatgcacgtgcgagctcataaaatgttgtggtgtaataacacgtgcgtgatcaactttcaagaacgtttttgttcttgcattggaac

SEQ ID NO: 13793 - DNA, 571 bp, Oryza sativa
  ref <308>: DATABASE ACCESSION NUMBER: AK111141
  ref <309>: DATABASE ENTRY DATE: 2001-12-06
acccttcaccttcatcgctaatatacagtgccaaaaaaaaatggctccaagaaacgccgcgtgtcgatcattctcctcgccgtcgccgtcgccgtggttcctctcgccgccgccgtcgcaggtaataacaacatgcaaatcgtaccaactaccagtgaccagccggccggcggcgagagcaccgccgtcgtcgccgaggcgttgatcatcagtcggccaccatgggaaggcggcggggtggccggcggcgcgcaggcgatgagcgagtgcatggagaagacgctgtacacggggccgtgcctggaggcgctgtgcacggcggcgtgcatcctggagctcaacaacggcggccactgccgaggcggcttcttgtttttcaagaaatgcagctgcttcttgtgcttctagttgtattgtacctgtaccgcgcgcgcgcgcgcgaggggccgagtaattagttaaatccgtgtggtctaagtttgtggattcaatttttattagtaacagaaagagggcgaatgaaatgatgaataagattttgttttttgttagtataacatgtttttgtttt

SEQ ID NO: 13794 - DNA, 679 bp, Oryza sativa
  ref <308>: DATABASE ACCESSION NUMBER: AK111142
  ref <309>: DATABASE ENTRY DATE: 2001-12-06
cccctctctcccatcgccgccgccgccgccgccgacacagccgctgacctcgccgccgccgacgccgatggagatggccgcccccgtctcccccgcgccgcgcaccgtcgaggacatcttcaaggacttctccggccgccgcgccggcctcgtccgcgccctcaccgtcgatgtggatgagttctacggattctgcgacccagagaaggagaatttgtgcctgtacgggcacccgaacgggcggtgggaggtggcgctgccggcggaggaggtgccgccggagctgccggagccggcgctcgggatcaacttcgccagggacgggatgcaccgccgcgactggctctcgctcgtcgccgtccactccgactcgtggctgctctccgtcgccttcttcttcggcgcgcgcctcaacggcaacgagagtagagtgctaaactgtgaagtgctgccatctgttctttcatgtgcttcgtttgtgttgcacaaggagctaaatcagtcacaaaatttgtattatcattatgtaatgggaagcattatctgttccttatctgtttgtttatgttgctttcatgtttgtttatagtgtttcgttgcttatctgttgtctttcgaaggattcatattgtacgctggattattttttaactcccaaggaaatattgggtcatgcctc

SEQ ID NO: 13795 - DNA, 1039 bp, Oryza sativa
  ref <308>: DATABASE ACCESSION NUMBER: AK111143
  ref <309>: DATABASE ENTRY DATE: 2001-12-06
aaattaacccggcataagctctccagccatccaggtacacagcagtagcatacttcgagttcgagctagaagtccatccctttcactgtcgtcgcggcctccctgaccgcgccctcgtcgtccggcggcgagtccgccgcgggcagtatcgccggcctgtactggtgccggctcgcgaacaccaggaacgccgcgaagttggccaccccgagcgcggcgagcatccagtagaacaggtccagcctcccgtcgtccaggccgtcccggatccacgcgccccgcgtggcggcgtcgacggcggacacgaggaggctgctcaggaagaaccccatggcgagcgtggcgaggaacaggcccgtgctcatggacttcatccgctcgggggcctccctgatgaagaactccagctgccccacgtacgcgaacgcctcgccggcgcccaccaggaagaactgcggcaccagccagaacgcgctgatcatcgcgacgcctcctccgccggctccgccggacgcgtcgcggcgcttcttctcgacgagcgccgagacggccatggcgagcgtggcgaggacgagccccgcgccgacgcgctgcagggaggtcagcccctgcgggcggcgtgtgatcatcaggcggcgcgcgagcgggacgaggagccgctcgctggcggaggtgaagaggaggatggacaggaagaggaagacggagaaggagcccgccggcacggcgaagccgccggtgcggcggtccatgtgcgacgcctgctcgacggagaaggtggtcatctgggagtagaccgtccagaagaggatgctcgtggaccagatggggagcagcttcaccaccatcttcgcctcctccacctccgtcaccgtcagcgccgccactggctgctccggtggcgtcgccgccgccaggtcggcctccacgattgcggctttgtccagacacctacgctcagacgaaaatacaaagaaacagagaatgctaaagatctcggggccattcaaaataaattattcgccggattattattgtt

SEQ ID NO: 13796 - DNA, 627 bp, Oryza sativa
  ref <308>: DATABASE ACCESSION NUMBER: AK111144
  ref <309>: DATABASE ENTRY DATE: 2001-12-06
acatacaacacatccatctctgcatctacattgtccatttgatcgatattattcttgcttagaacatctcataatctcatccatggcgagatcggcggcggcggcgatgctcatgctgtcgttgctgctgctgggctcgagccgcagctggccgccggttgccgccgcggcgaggccgctgctgcagggtgacggcggcgaggtggtggcgccgccggccggcggcggcgtcggggtcctcgtgctgctgtcgtcgtcgccgtcgctgcggcactggctgccggtgctggagatgaagcagggcgcgtcgtgtcaaacgaatgatcccaacaacgttaactgcccacccaagccgccaaagtaatcaattcaagagggagatcgatagcgagacgtgcacagttaattaattaattctaccgctgtgctgcactggaataatatgctggagaaaaattcatttcgtttttttaaatcaagatggagcaaatttccttttttttagtgtactgtgtcccttttattttgttgatgttaattcatttcttaataaatactaccatctctgttttgtttttctatttggcgttggtttgtttgttcaaaattaataaatttggagggagc

SEQ ID NO: 13797 - DNA, 1171 bp, Oryza sativa
  ref <308>: DATABASE ACCESSION NUMBER: AK111145
  ref <309>: DATABASE ENTRY DATE: 2001-12-06
catgtattcatgttcactttcactcctgcaactaaaatgtccccatgctgtcgctgtcttacgcgacgccttctatttccagccatgtcgtccaccacctgtttgatcagccgcggggcgttcctcctgctcgccgcggccgtcgccgtcgcgctgccgtgcgccgccgcgctgcaggagctgcagctgcaggacgccgtgctgatcgacgacgtcgtccaggaggcggcgcaggcgtggtaccacgggaggcaccggcggacgggcgtcacgtacccgctctcgctcccggggagcctgtccggcgtcgcggccgacgtggcgcgcttccgggcaggtagcctccggaggtacggagtccgccggttcggggagttcgccgtgccaccgggactcgccgtgcgcggccaagcctcgcacctgctcgccgtgcgcgccaacctgggcaacctctcgtccgtgttcgacgagtacgcggcgagcggcggataccgcatcgcgtcgccggtgctcgggctcacgttctacggcctggcgcggcggggtggcacggccaggctggaggtgctcgtcacggccgcggccatccgcgtcaacttctcgatggcggtcccagcgctgcagccaggggccgtgccgctctgcatggccgtggcgctgaacggcagcgtcaccgtgaccgacgtgcaggccgggagcaacacctgccacgtgtgggaccagggacacttcgcgctcgtcctgggcggagcaggcgacggcggcggcgtggtggcggaggccggcgaggtgagcaagtggaagctggcgctcttcggggcggcgctcggcgcgggcggcacggtgctcctggggctggtcctggtggcggtgctgagcatccagcggcgcaagtcggaggtggcggagatggcgcggcgggcgtacgaggaggaggcgttgcgcgtgtccatggtcgggcacgtccgcgcgccgtcggcgggcgggtcgcgcaccacgccggacgccctcgagaatgagtactgcgccgcattgtgacagagaactgcaaagaagcaattgaagttgatttttttttaagctctcattttaggattttcggttcatattcttttttacctgtgataatactagtatgttttaaataaataattgggggtaaattatggat

SEQ ID NO: 13798 - DNA, 953 bp, Oryza sativa
  ref <308>: DATABASE ACCESSION NUMBER: AK111146
  ref <309>: DATABASE ENTRY DATE: 2001-12-06
ctaagcgattcccgtagtagcggcgagcgaaatgggagcagcctaaaccgtgaaaacggggttgtgggagagcaatacaactgcttctgcctcctcaaccccacttcacctcaccctcctcccgcgcgcggtcacggactagccgcacgccacgccgccaccactagctcgcttcatttccaccgcacgcacgcacgcacgtacgcgcgccgcgccggctccctcccgccacaggtacgcgcggggtaccggcggtgtgtgtgcgtgtacgtgcgcgtccggcggctcgcacgcgtcgtccgtccgttgatgaggcccgcgcgccggggctggggagtgggtgccttggcgcgggcgttcctggttctgctgctgctgctgctggccgcggcaacgacgacgacgatcggcttcggctgccgaggcgcggaggccatccgcgtcatcccgccgcacgggccggcgccaggcagtgcgaggagtagccggggccacggccatcgccgaagccatggcaacgctgcccgggtggtggatgctgcaatgccggtggtggggacgaggccggtgcccgcgctgtcgccggcggcggacgaggagagcaagcgccggatcccgagctgcccggatccgctccacaaccggtgaccccctgacgcattgaccaccatgctctggcacatgtgctcgccacgctgctcctgcatggatcgatcaacccttttgtctttcttgcctgcttaatcctctcaacttctcttcttttgttttctcaacttctctgtaattagtaggcagccagctagatagggctttgtattggaagaatctcccaatccattcctcctcctagcggtaagaggggatcgagattcttggcatacaaagccctatcatgcctcaccactttatttatgatcgatgatgatgagaaatcaatgaaaaaagaatgc

SEQ ID NO: 13799 - DNA, 1004 bp, Oryza sativa
  ref <308>: DATABASE ACCESSION NUMBER: AK111147
  ref <309>: DATABASE ENTRY DATE: 2001-12-06
aacaatttcacaaccatctttccatctccacccagccaatttccctcccccaccgccagcaacgtcgagccctctgccttcccggcgacgagtgcgtgtgccggcatgtccagtccagtccgccgcgtcggcagcgacctcagcagcggcatctactcagcagctgcaagccacggccaccagcagcaaaccacgagtgacaacggccacgggtcagccaacgacgacgacgacgacgacgacgttgccaaggcgaagcagaggctctcgtcgcttctcttctccggcgtcggcacgtggcggagaagcgtggacggcagcggcggcgacagcaagcggcaggtgaaggggaacagcagccgaggaggaggaggtgggctggacattgcgcagctggtgaagaagtacgcgtccatggtggagcgtctcttcttcgcgtcgtccttgtccaataatcgccgccgtggcggcggggatcagagcgggaggaggacggagctgcggcggaggcggcactcgttcatcatctccggccttcgtcgcggcgccgccgccgccgctgccgccccgtcgaagcgtcacgaggggagctggctgttctcggcgcccgcgtcgctgcgcgggtcgccggtggccagcgggcacctgtcggtgaaggtgtcgacgtcgtcggaggagagcacgatggaggagctgcacagcgccgtccaggccgccatcgcgcactgcaagaactccatcgccgccgccgcgccaagcagcaggccggcggcggcggcggcggcgaccacgccgaccggtgtaaatgctgacgcggtggtggcgtgtacgtcttctcgtgcgtcgtaactgcaccaatgtaatgtacctgttcgtgttctcggttcgatctatttcctgtgcgtaagttaatggcgacaattaatattagtccgaaaatacgagtgtattgttgactaattaatttgaaatgttagttatcgatcaatcggccgattggatcg

SEQ ID NO: 13800 - DNA, 640 bp, Oryza sativa
  ref <308>: DATABASE ACCESSION NUMBER: AK111148
  ref <309>: DATABASE ENTRY DATE: 2001-12-06
cagatgcacatctctctgtctttccccgtctttcttcgtctctctccctccaccacccgagttgtcaccgaccagatcgatcaccggttccaagccatcgttgctgctcgcgtggatccactgccggtgcctggatcccctttttgtctctctgcctccctctcgcatgaattcgccacatcaacggtgatgggaggggtggatccgatgacctcttcccctcctgtgcggatcccttcgtctctcggtgatggcccattggcagttgtgacgcccgaggcacgtaggcggcaatgagactggtgggcagcggatccggcgacaagggaggctcgaggacggcggcgatgaggctggtgggaaaccggcgttgggaggcacgtgggcaaagatgaggctcgagggcacggtcggttgagttttggttgccgccttctgaagttgctgtcgccgcctgcttcctcgacatcgccgcctgtgggagccgcactatggggaatcgcctctcggtgttttcgtcgattatctggctccctcaacacccagacacccaagagcctagcttgtgagggccgcctccatgttagatttgtggaatcttgttgtaaccatgatattgattccatctggttttgagtcc

SEQ ID NO: 13801 - DNA, 2737 bp, Oryza sativa
  ref <308>: DATABASE ACCESSION NUMBER: AK111149
  ref <309>: DATABASE ENTRY DATE: 2001-12-06
cgacgcgtcgtcaagctacttcgtttcctcactcggctttcatcgtcgcggctcctttccttcccctttcctcttctcctcatcctcggtcgttctcgagcttcgcatcgtcttgcgcggctccgcaccctgctttggataggtttggcccacacaggaccatcgatcacggctccctttttggcatcgcatcaaaactacggaaaggctcgactcacgtcaagcacggcttcaatccatctctcgcaaacggcttgcttcttcttcgcacctcgaacgctgcattcgacagctctcctgcgttgaagctactcagtcgtaccggacaagcatcccaggagattcctcttccgttgctctcggcgcctccaaatttgcaccgtctaggtcgcgcttgccccacgtttcgctcttctgtctccggaagaacaggatctctagctctcctctagcttttctttttgcccaccctttgctcttctccgcatttgcatttccaccctccaaaaatgtcgacggcttctccccttcaccacggccacggcaacggtagctacggcaccaattcgcctgctcccactggcgtcaccggccgcgatgccggcgtagcggctgccgctgtcactgactcggctgttcgttccggctcggtcggtgcctccgcctccggcagcgcccccggctctgcctctggatccctgtacggcgagggccacgctcatcacaacacccaccaccaccactcgggtcaccacgctcactcgcacggcgctctggctagccccgtcaacggcggcggacacagctcgagctggtccccctacggatacccctcggctcccgtgtacggaggcagtcctagcccctacggccacaacgcctactcgcagtacgccagcggctacggctacaccaacggcaccacccaccacgtcgccactgccccgaccacccctgctgccaacggcaccacctaccacaccggtgtcaacggcatgatgatgcaccacggccagcacgctggctacggatacggcagccaccatctcggatcgcacacgcccacccacactcatagccactcgtccgcctactttatgaacggtgatggctcccacagccacctcaacggctccacccacctctcgtcgccatcgtacacctcggcgccccagtactcgacccagctgcccctcgccggccgacaccgtgtcaccaccaccctgtgggaggacgagggcacgctctgcttccaggtggacgctcgcggcgtctgcgtggcccgaaggcacgacaacaacatgatcaacggcaccaagctcttgaacgtctgcggcatgtcgcgcggcaagcgtgacggcatcctcaagaacgagaaggagcgcatcgtcgtcaaggtcggcgccatgcacctcaaaggtgtctggatctcgtttgcgcgtgccaagcagctcgccgagcagaacggcatcgccgacgcgctctacccgctctttgagcccaacattcagtcgttcctgtaccacccggacaactacccgcgcaccgcggctgtgattgccgccgctcaggagcgccaggcccagcgacagcgcgctccgggcctccccagccctggtgctaacggcgcctcgcaggcgcctcctctgatgcgagccaacaccaccccttccaacggcgacacgtcggggtttggtagcgggctgagcagcagcacgagctggactggctcgcacgaccagggccacgcctcggctcccaccacgactcagccctcgccctcgtcgatgcacaacggcgccactcagatgcacatgagcctctcgagccacggcacctcgtcgcccacctattcgcagcaacagcagcagcagcagcagtacccgatcacgcaggcacagcagctcgcgcgacccggagtcggcgaccgacgccagtcggcgcccatctcgctcaacagcgtcaacggacacgcgggcgacaacgcgtacggcgctgccaacctgggtgctgctaccgccaacggaggcctgatcaacggcgcacgcaaagtgtcgggtcttaagcgctcgtggaacgacgccgaggacctcaacggttccgccaccgcctcgccttcggaccgcgacatgcagcgaagcggaagcggcgcgtccaccggctacaagctcgagggcgacgactcgaacagccccgacacgtcggctgatcgcatggccaagaagaacaaggcgatgccgcagcgcactgctgccatgccttcgatgtctggcaacatgctgatgggcgtcggctctggcaacggccttcaccacgagtagagctgaactgcatccaacatgcagcaagctctctgcgcaaaaaaaagggttccgacttccgactcctgcatctttctcctgcattttaccccgtcgctctcccgcgagctccattcagcatggacgggaggcgtagctcgtcatccgccgatcactgtcacgagcctcaataaaattccttctctcccacaatcacacgaagatcaaccacacaatcaacgtcaacatcatcacgaacgatcacatcaccgaggtggagactggcacgatcctcgacagcaagaacgtctttctttaatctgcttgctcgagttggcctgcgcccgcacacgagctgagcggcgcgtggttgccgtcgatcgtgtctctcctgcctctccctttcttggtctgtcaaataaacggcttgtctttcg

SEQ ID NO: 13802 - DNA, 2795 bp, Oryza sativa
  ref <308>: DATABASE ACCESSION NUMBER: AK111150
  ref <309>: DATABASE ENTRY DATE: 2001-12-06
atccccgcttcatcctccatccttcgtcgtgtctttttcccctttcttctcttccatcgcgtcctcgcatcattagcatcacgtcgcgcgcccggttcgcgccttcatttcgtccgcaacctccaacttatccttacgtgttgatcgactggttccatcatcacgcgccaccatctcccacttcccatctcaactcgatccgatccgctctggagcacattgtatcgcctgtcacatctgctttgtacgctggtagtcaaagccctttctaatcctcgtatcaccatcaccgtcacgacaccatgatcagcgcctcgccttcgttctcctccccaaacatcccgcaaggcttctccgcagccacttcctcgcctcagcctccttcctggaacgccaacgactctcctcactcgctcgccatgtccaactcaaccatcgacccgcacttttccccagaccacattgctcctcccggcttccacaaccccatcgacgctccctttggcgctcacttccagcctcaaatccacaaccactgcgctcccggcaccatcctcatccaaccctccatgtatgccccccacgacccggcccccttctggaagcccgacatggtcaaactcgaacccggcaccgacgtcttctccacagcccacgtggccccgcaattcgccttccccggctcgcagcccatgatggcaaccatgagcctccccgcctacacaacccatcctatggacaggcgcttcaccttctcggacgccgaatccattggctccgtcccttcccccagctccacttccgagacttccactcgtcccggctccgccaagaggggtgccaagcgcaagcaatccgcagccgacgcatcgctcgacgccgcttccgaacagacctccgacgccgcctccaaagctaccaagaagcagtcgcgcacaaacgctcagcgacgtcctcccccttccgcatcgcacgtcaccgaggctggcaagcccttccccgtcatcgacacttctgcaaagcactccagcctctttgtgccccccgacacctcgggcctgaccaagcgcgaggcgcgtctcgtaaagaaccgcgccgccgccttcctctcccgccagcgcaagcgcgaacagttcgaaaagatggaggtcaagtgcaggggcatctccatgctcgtataccgcatgtgggagaccatcgcaggcaccgacgcccccctcgaccgcgtcgacgcaaccccgctcgccgcagtcctcgcaaacgaagagcccatggctcgtctctgcctcgaagaggtcatctccaagaaaggcgcttccatcgctcccaccgcagacgagctcgaaggttcccccgctcccgaggctccctccgctcgtcgtccatccgtcgtacccactccggccgctcacaagaatgccgacaccgcctctgctgagcttgagcgtgtccgagccgatctcgctgcttcccacgagcgcgagaagcagctcgctcaccaactcgacgccatgcgcgccagtctcgcagcagccgccatgcccttggacaacagcgtcggcgtcgccggcttcgagtccatcgacgtcactgccgcccaatccggcctggcttcgcgctcccaacctttcaagggcgttcagggcgcagagcttccccttttcgtccccgagtcgcccctctccaagttcacccacatggatgcagccatgcccgacgcagctcacgccgccttcggcctgtccaagaccccgactctggccactttttccgagaccgctatgcgcaaccgatcagcgcatcagcccttcgttgcagacaagctccaaggcttcggcatgggcctcggtctcgactacaagttccctaccgcctcgctgccctcctcgccctccacagcttcgtcctcgtcgtcgcacgacgtccaccacgcgcgtcatctctcgctcccctccaatagcctcgccaccgccaaagcaccaagcacgttggcttcggtgctgctcctcgctggcatgtcgttgatgggagctggtcccgccgagtcggccgcatccgcagcccgacccactagccgcaagcctgcgcgggtcggccgcaagaaaatgctcaaggacgctgcagcggctgaccgtgcggacgacaacgacggcgagccctcttcgcacctctcggacgacgacctgctcatggagatgggtatcgactcggcttccatctccgaggctgacgacgacgatgacgaccagcttgacgacgatgcgatcaagcacacgactgccaccgcgagcaaagccaccgtctcggcacctgctctgagctgcgcctgatctgccaagcagcgctccttttcccccctttacgaccacagcgcgcctcgccatgcgctctcacgacaggaagccgagtacagcttcaacgaccaagttcctgtgtaccatcatgaccttgcatctctccctcgtctcttttttgcctgccttcgtcacgtttccggaactgtattctcacccacctctcccgctttccaccccgacccgcatacatgcacgagcattttcgctgcccgcgcgcgccaagggcgtccccgacgagctggttctcttgcggatgcgtttggcgcgccattttgtgtttcgatttctccatcatccccctttcttcggccgtgcaggcgcttctgcgggacccctctactgcgcgctgcagtatcgaccggggtcgcagaatcgcgcctgcacctccacgactggccttttgtacatgattcaaatcaactttttgctgctcctctc

SEQ ID NO: 13803 - DNA, 924 bp, Oryza sativa
  ref <308>: DATABASE ACCESSION NUMBER: AK111151
  ref <309>: DATABASE ENTRY DATE: 2001-12-06
aattgtcaacgccactccccttcttccgcccgagctcaagtcccaatccgagagagtcgatcagcggcagctagagcagagcgatggccgcgctgctgggcatcctcctcgcggccttcctcgccgccgccgccgtcctttttgcgctccgcctgctccactccttcctgtgggtcccgcgccgcctggagcgccggttccgccggcagggcatccggggcccgccgcgccgcccgctctccggcaacgccgccggctaccgcgacctgcccgccgccgcccagtccgcgccgctcgcgtccttccaccacgccgtcgtggcccgcgtcgcgccgcaccaccgcgagtggcccgagcggtacggccgcccgttcgtgttctggctcgggccccgcccgcggctggtggtctccgacccggaggtcgtgaaggccgtgctgaccgacaccacggggaccttcggaaaggctggccccggcggcaacaacccgctcgcgcggcagctcttcagcgaggggctggtggggctcaccggggaggcgtgggcgcgccaccgccgtgtgatcgcgccggcgttcaacatggagagggtcaaggtaagaaggtgtagattgtgttagaaaaacgtgtcattaatcgtgatgcttatacatcatgttggcaacttatcgatctcgataaattacaatggactagattctcaaacataagtccatatgtaattatgtcagccttgctaaaatgttcattactcatttcttatatgtaagttgtgtcatatgtgaactcagctactctccaaggctaggatcctgtatagaactgccaaatttgctttctaacttctttctacaattctactaactttgatctaaatttctatggatgtatttacaatggaatggaatttatccctttctttac

SEQ ID NO: 13804 - DNA, 2859 bp, Oryza sativa
  ref <308>: DATABASE ACCESSION NUMBER: AK111152
  ref <309>: DATABASE ENTRY DATE: 2001-12-06
atcgctgccgtctgcctgccccttggtccgctcgagcagtcattcgacacaggccgatcgtcgcgccgttcgcatcatccaagcaacgcgcgatcccgctccatacgctaagcagctcagcacgggcatcctgcaatcaccaccaccacctcggcaagtcgatagatcgctgccagcatccagcccggcgctgacgaggatcctgcatccacacgtcttggacaacattcgaagctctcgcccatcagtgccaaacactcgagcttgaaaccacaccgaccaggcagtacttctgttcaggaccgtcgtcggagcatccgagacagccacccgcgagcgcatccgcacgccgccagcacccttccatctgctccggcactattccatagcagtcgtcaatcacattccaggcccgacagttctcgtttatcaagacaacctccgactccactctctctctctctctccctataatcacacacacgctcccttcatgatcgcgcagcaacgtccatctccggccatgtcaggttcttcgtttttctcacagatctcctcgttcttcggagccagtcccaactccaattcgcggtccggcgcacgacactcgtctcccttcagctcgggccttccgtcctcgtcacgccgcggtccacctcaagcgctcgacgccaatgcgtggtcgttgccttacagcagccgcagcagcatccccgcctcccccgcctatcccaccgatgcccccaactcggccaccgacggtcactatccgccggccgctggcatcgcacgcgcctcctcgccctacgcccacgaccatcctcccatctccaccagctccgtcgcagagttcagcaacatgtatccgaccgcatccacctccaccctcgtccccggcacggctgccaacaccctcagcgtctcggccggtggttcggtgcccaccaccgcctatccacccatgcgccacacctggaatcgcatccgcaagtggtgccgcaaaaactaccccgaaatgtccgacacgctcaactggccctgcaccgaagacgcgctcgacgagctcgagatgaccatcggctacgcgcttccctccgccgtgcgcgagtcctacctcgtctacgacggccaggagctcgagtccaaccagtcgtgccaggacggcctcttctttggcgccgccctgctcagcctcgagcagatcgccgaggagtggaagttttggcgcgccgtcgacgaggatcccgagaccgccgccaatccgcacgtgcgcaacctcatggccagctgcccgcacaagtggatccgcccagagtactcctgccgaggctggatccccctcatcaccgaccacgccggcaactacatcggcatcgacctcagcccccatcccgccggtgcaggctcgcccggacaggtcatcatctttggcagagactttgacaccaaggtcgtctgctggaagggcgagggcgccggaggctggggccgcttccttcagtcctttgccgacgagctcgacgctggcgagttctggacgctcgaggagctcaccagcgccagcgaagacgaggaagacgtcatcggctaccagagctactttagcggcggcggcgccggtgcaggccagggcggtggtgaccgcggaggcgagggcgctgccgccttccgaccgcaaggtcagtacaaaggctggccggtgctggaagcgtgggcggaccgatcggtgcgtctgtgggagtcggtcggactcgcgcctggcaagccggtgggcaacgcgcagcagcccgcgcagcctcagccccaatccgtagtcaaccggcagtcgcagctctttggcgacgacacgggcatcccgccttcggtgcaggccgtcaacgagaacggcgaagcgatcgatgcagagggcagcgggtcgcaacgccccgccatcgccgtcggcaaggagctggccggacaagtgtcggtcgatggccccgcgcatccacttgcggatgcatccctggccggcgacacgagcgccgaggtgctcattgctcctgcggattccacgcttgccactgacgcaaccacagttaccgtcgacacgcaggccgccgacgccaaggaggccgacggcagcgtcgatgtgaatctgacgcccaccaacagcacgcgacgagtgtcgggcatgctgccgcctcccttgcccgagaccaaggcgtcgttgcgaaagcagaagcagcgcgaggaaggttggggatcgcccatgctcaatcagtcggttgcgatggggcagcagccccgccgacccgtgcgaccggcgccggcccccgctgccacgctggatctgcccacgatcgaagacgtcaaggcgatccaggcggcggcgctggccgacgacggcaagtcgcacaatgtgcagtttgactcgcatcctcaggcgcgcagctcgttcaccaacctcggcttccgcgatctcgcgggcaagatcggtgcgcccggtatggggcttggcggcggcagcaacggcaatgcggtgggcagtccccaacagcgctccgagtcggtcgagctcgaaacgaggagcagcgtcgagaaccgcagtgcgaacagctacattgtgggccagcgcgggcgagcgcgcgggctcggactcgaggccggcgaagatgaggcggccgcagaggcgttcggtgcgatgtccgtctcggccgccaagacacgcgagatgccgtcgttgatcgatgcctcttcggcgcccggttcgcctctggtcaggggtacacctaagctgagtgaggccgaagtgcccgctgcgctggcctgaagggctttgtgcacatgtgcatgccaaattccatcgcgatttttttcacc

SEQ ID NO: 13805 - DNA, 2816 bp, Oryza sativa
  ref <308>: DATABASE ACCESSION NUMBER: AK111153
  ref <309>: DATABASE ENTRY DATE: 2001-12-06
ttctgcgaagggttcgagttggagcacgcctgtcgggacccgaaagatggtgaactatgcctgagcggggcgaagccagaggaaactctggtggaggctcgaagcgatactgacgtgcaaatcgttcgtctgacttgggtataggggcgaaagactaatcgaaccatctagtagctggttccctccgaagtttccctcaggatagctggagcccattacgagttctatcgggtaaagccaatgattagaggcatcgggggcgcaacgccctcgacctattctcaaactttaaataggtaggacggcgcggctgctccggtgagccgcgccacggaatcgggagctccaagtgggccatttttggtaagcagaactggcgatgcgggatgaaccggaagcctggttacggtgccgaactgcgcgctaacctagaacccacaaagggtgttggtcgattaagacagcaggacggtggtcatggaagtcgaaatccgctaaggagtgtgtaacaactcacctgccgaatcaactagccccgaaaatggatggcgctgaagcgcgcgacccacaccaggccatctgggcgagcgccatgccccgatgagtaggagggcgcggcggccgccgcaaaacccggggcgcgagcccgggcggagcggccgtcggtgcagatcttggtggtagtagcaaatattcaaatgagaactttgaaggccgaagaggagaaaggttccatgtgaacggcacttgcacatgggtaagccgatcctaagggacggggtaaccccggcagagagcgcgaccacgcgcgtgccccgaaagggaatcgggttaagatttcccgagccgggacgtggcggttgacggcgacgttaggaagtccggagacgccggcgggggcctcgggaagagttatcttttctgcttaacggccggccaaccctggaaacggttcagccggaggtagggtccagcggccggaagagcaccgcacgtcgcgcggtgtccggtgcgcccccggcggcccttgaaaatccggaggaccgagtaccgtccacgcccggtcgtactcataaccgcatcaggtctccaaggtgaacagcctctggccaatggaacaatgtaggcaagggaagtcggcaaaacggatccgtaactaatttacacctcccgtagcttcatctgccatcgtccagccccctttgccgcgaattcctgaaggcccagtaagtatggcgctcctagctgtcggaacattcaacacaaacgagctcttcaccattcgtttcgatcccgagacggagagtctggagctgctcgatgtctctcaagccaaaggcaaccactcgtggctttcgacggcgaccatccctaaatcagacggtggtgcggcgcgtccgacccatctctacgcgacttgctggacagagcctccaagtgtagcggcatatcgcattcatcgtcaaggctcctccagggctagcttcgaactgctcaacacggcagagaccgctgcgagatcgggctacgtctacgtcggtttcccggaaaaggcaacacacccagtgctctacacgtgtggcggaccaactggcgaggtcgtagcgatcgatggggatactggcgctttcgatctcgccggtaccaagcatccagcggtcgtgccgtccgaggcgcctctggacggagtgactggcgtcggttctgccggccgcatccaggaaatcgactttgtcacgggagaatgctctatccccggtaagacgcttgccgaaaccaaagaattgcgtcgtcaagaagcgcagaaggcttcgggaggcggcagtggcagcccggccactgcgcaacttgacacctcgaacggcaagaacgccatggactttggcgggttgcgccacggctcgcacggcatcgatctctctcccgatggcaccctgtgctatgtcccggacatcgggcgcaactgtgtctggactatgcacgtcgatcccaccaacggcgctctcagcctggccgacaagagcatcgcgccgcgcaagaacgatggcccgcgtcacacgatttctcaccccggtggacgctacatctacagtctgcaggagcacagctcgatggtagacgtgttcgaggtgatcaaggactctaacggaacacgtctggaatggcgacaaggcgtcaagatcatcccgcagagcgacgacgagggcctctactgggcggacgaggtgcgactctcgtgcgcctatgatcgtcccgatggcgagtatccgctctacatgtttgcctctacacgtggattgtctgccgaaacaaagggctgggttgcagtcttccaactcgacaagaatggtctggtcgtcccacagagccgcgatgaaaacgacgagcagggagatgcgctttgcctgtggcaatctcccacctccggcgggtgggcaaacgccatcgagcctgcacccaccttcttgcgtgggcccaacggcacctcgcaatatgctgcgctcacgtgcagcgaggtgggcgttgtgcgaatgcttcgtctcgatgtgcccgaccctcagaagcccaacctcgcatcgatccatgaagttgccaccctcgcaattggaaaagatggcaacggcaggctcaggggggccgccacagcggtatggatatgagcacttgcggtgcttgcgcgaaacacctatgacacggtcccgctgcttttcgctcattcttccatcaaagttctctccgttagaacgacttcggtgggctcagtgggcgcacaaagggcatcataccggcaaaatcacaaactcgttcgcaccacc

SEQ ID NO: 13806 - DNA, 3280 bp, Oryza sativa
  ref <308>: DATABASE ACCESSION NUMBER: AK111154
  ref <309>: DATABASE ENTRY DATE: 2001-12-06
accggtcgaccaactctcccttctcggctcgagccaaccccgcaccctccacatccacctttgcttcgccgcgtgcacagacaacacgcaccctgtacgaaagcccaaacactcactacacctcctcgggcccatcaccgctcgaacgcatctccgccatgccaccatccacgaccaccctcgccagtcgccatcctgtttccgccagcagatccaccgagccagccagcagcagtgtctcgcagcccctcccctccgccgcctcgacctcgtcgcacgtcagcatccccaccacctcgcccgccttcactggcccctcgcacggatacagcccctcgtccaccgccatgccccatcgtccttggtacaacggatcccagccctcctctccgcgaggcgcagcgtccatcccgcgctcccagatttcttcgccaggcgctcattggcttgactaccacattcgccccggttcggctgccgcaaatcatccgccgtcgacctcacgcacgcatctcgaggatcgtctgccgcctcatatcctccagcgtctcttagacatctaccaggtctttgtccacccgcactggccgatcatctatcttccttccttcacctcgctccactcgctcaagcgctcccggcccatcgtctttgaagccatccttgccgtcgcctccaacacctttgatcccttcctcgacaccgccgccggggacgagcagcagagcgtcaatcctctcttcgatggcctctacgccgaatcaccgcttggcctcgacctcgcgtggaagtcaaacgagctgcgcgaccactttgtcaatcgcgccaaggcgcgcatctttgaaggcaagttcgttcaggatatcggcactatccaggccgccatcctcatcagcgtcatcgagctcggctgcggcaacacctcgagcgcatttcagttcggcggcatcgcttgccgcatggcgctcgacatgaacctccaccgctgttcatctcaagcctcagcctcggctgcttcgtcgatccacggcgatggcggcgccaccgacaacgcagatggggagaggagcgaggcgcgcaggtcgggctcgcagctgcaagagcgtctgcgtgtcttttgggcgtgcttcatcctcgacaagatcctctccaccgcgctcgacaagcccgcacagctgcgcaccgccgagatcgagtgcgactggccgtcggtgcaagaggcggacgagtacgatctctggatcaacgagaccacgcgcaagtttgtcgacaagggtcaactgaccaggcttgaaggcgtcaaggtccacgcgctcagcagcttcaaagcctgggccgaggtcatggccatcctcgagcgcatcctcgaggaggtgtacagcccgcaagccaagcgcgatcgtcgccgcaccaagggtgcttcggactacgaggcactgctgaggctcaacgaccgcctttcaaagtggcgtgccgacctgccttctcacctcaagtggtccggcacctggacttcgcccgacgtgctcttctcggcacagtcgcagtccggctatgccgatcgcaaggagtcggatccacaccgcgggctgccgccccagatcctcaccatgcgcgcgtggtactgcacctgcctcatcctgctccaccgaccgcgtgtgcctaaactgctcgagggccccaaggagcatgccaccggcacatcggaagatgtcgacgccgcagcgcaatccgatgcaaagtctcctgcagccaagaagggcaagaaaggcagtcaagcgtctgccaaagacaagcgaagtcccgccggcctggacatctgcaatgccgcagcaaaggaggtgtgcgacatcctgcatgtctacggctcgtccttccgcatccgcaagatctcgagcagctgggtctacctcatcttccagagcgccaccatccacgccgcgctcgctgccagcaagagcgtggtcgccttcaaggcacgccagtcgtccatctggagccggcgcggctccaaggtcgcattcagtgagctgggtgcgcctctcgcggaagaccatcacgagctcagtgcgagcgcggaagatgcagaggcgcatgccaacggcgcagaggtcttctcgtccgaggcgcgccacgtgcccgaagccgagcttgagggcgcgtctgagctggtcaagaccagcgcactgtacctcgccgaatgtgtgcgctatctcaagaggatcgggccgacgtggcagagcgcgtcgaaccacgtgtcagttctgcgcaatctgtgtattgcgagcgcgcaggcaagaccgttgagtcccaccctgaagcacgcacgcggtgtggcacagcctgacccgcaggcttctaaccagccggtcggcgcggtgaagcaggaaccagctgcttttgacccggaccaacgaggcgccccggtcaacgacgtcggtgcatccatgcacggacatgcgcatcagatgggcggcccgccagcgggaggccacggcgagcatgcagcgatcgcagttcacgagtctgggctcgacgcgcaagcgtcatatgcagcgccgattgcccagcacatgtaccacgaagaccgcaaggccgagacgatgcacatgcccagcgccgccactgcggctgccggcgcgaccggcacgaccagcgagctggccatggcgaacacggatgcaatgcagccgcactttcttgcgtcgcagggatatgccccgcccgcgcatccgccagcgcagttgctgccgcctgctggcgtcggcgtgcactcgcatctgcccccgccacaccacgcgcaccacgggcatcacgggcaccagcaggccggttatccgatcaacgccaacgacgccgcgttctgggcgtcgatgcccgtcgcgtccgagggctacaacgagtgggacgagttcttccgcgcgttcaatccgggcggcgccgcagcggatgtgacggccaacccgaactaccatcccaccgccgccgtcgatctgatcaccgcgctgcaggatccgaaccgcctgctcaacgggctgcagtagtcaagatcaaatctacatacgccgctctcttgagcagaccctcgtcatcttgatcaggcccacttctgcacctgcactgggtagcagcggttagtcttccttctgcgctgctactccgcaagactgtcgggctgttgacagcggcgctctcactgtagctgcgtactggcgcgccgttttcttcgcacgcagccggacgtggggggcgacctgctcaatcacacacatgttcacgc

SEQ ID NO: 13807 - DNA, 2851 bp, Oryza sativa
  ref <308>: DATABASE ACCESSION NUMBER: AK111155
  ref <309>: DATABASE ENTRY DATE: 2001-12-06
atcatccacacacacaccacagctggaagcactccgatagaggcaacatcgcatagcgtccaggtacttccgcagcgtcgacgcaggaggcgatgttcagttagctcgaggcccaccacaactctgctggaaggttccttccgaggtagaccgtcgcgatgagcctgcagttcgacgaggccgagctgctcaaggcgtacaacctcgactcgctcgagccttcgcaatggcacacaaccgaggcagaaactgatgccaagggcgctgcatcgtccatcggtgtggcagatgagcccgacccgctcggcctgcgttcgtcaatggccaccttccgcggcctgcccaaggacgtcaagacgcagacgtcgctctcgtccaaagcctttgatgccaaagtcttcctatccaccatccatcccgatgcgacgttcgccgacctgtcgcacggcatcctccacctcaagaacagcatcgaccagcgctccgaggcgctcaaggtgctggtcgaagacaactttgaccgcttcgtcgccgtcaaggccaccaccgacggcgtctttcgcgagatgcgcgacaccgagtccggaccgctgcagccccatgcggactacggcgtggcgtcgctcaacaccatccttgccaacgcctcggccaaggcagaccaggtgttcatgcctgtgctcgagaacaacctcaagacgatcaagctgcgctcgacgctgggcgtatttgagcgctccaagttcttcttcaacctgcccggctcgctgtccgagtcggtcgagagcgggcgctacgacatggcgctgcgcgactacaagaagggcaagtatctgctcgacagtcgtccgggccagctgctggcggtgggtagcgccaagctgcccgagtcggccggcggcgcgcgcggcgatgtgcagcagaagcgcgtcttcgccaaggtgtgggatgcggtggaggcgactatgaaggacatgcagagccggctcaccgcacagctgcgcgagccgcgccgcaacgtcgacgagcaggaacgcaccatcgagatcctgctcgagctcgatcccacggacgatcccgtgtcgatctatctcgaggcgcagcatcagcatctgcgcagcgtcatgcgcaacaccttcgacgcgggcgtgagccggatcgaggcgacgcgcgcggggcagcggccgtcgagcagcgtcgccgaacgcgaccgcgcgcgcgacctccagaagagcatgcggctcgcgggccagctcgacgccagcttcgacaagtgcacgggcgccgacgagtggcgtgcgatccgcgacctggtcaaggcgctctcggacaccatgctcggcggccttcccagcttctggcgcgtcgccaagaaccacgccgagggcaagttcattaagaccaaggcgcgcgcgggtgcgggcgcgggcggggacaaggtgtcggcgcagaacaaggcgtgggcggtcgaggcgctcgaggcgtacatcagcctggtgtcgcatttgttctcgctgacggacgtgtcgattctgatgcgccagccgctgccgcctgtggcggcgtgggtgcccgcggggacgagttcggcgacggcggcgcactttctgcgcgagacgctggcgcacgtcgtggatgcgtgcaacgatctggcggcgctggggatcgcgtcggcgacgacgttgcgtgcgctgctcaccaatgcgcgcttctgctttgtgcaggtggtgtgcgtgctgtggcaggaggacgccaagatcttccacctgctcgaggactggacgctcaatccggacgagcaggccactacgctgcatctgcgtgccatcgctgccttccacaagagcaacgcgcgccaggcatttcacctcgccggagggcggtcggcatcgacacctgtgtcagtactcgaagcgcgcggtaagaaccgcgccgcagagcagcctgtggcgagcgagtttacgacgcgcatcaagggcgcgtttctcgatgcgctctatgcctttctcgacggcatggtgcagttggccttttccgagtacagccccttggaaccacgcacggcgttgtcggtgcaagccgtaccgggccagccgggcagttcggtcgacgtgcgggatcttgacacacgcgtgctgttgagcgtgacgaatctggcgcacctcacgcgcagcgtgatccccgggctggtcaagcagttctcggacgcatacgccgtcaagatggatgacgacctggcaacgctagccgaagtggcggtgcaactcgatgcgatcctgttcaacgactatgttcagcgcaaatcaggcgccctctctccgataatatctcggggtattctcgaatcgggtatagattgggcgtcgattccgaagcctagtggggtgcattcgtttatctacgaggcgctgctgtcgctcgtcgaggtgcacgcgcacgtgcgcagtatcgccaaaccactcgtcacgcgaaccatcaccacgctcgtagacgatctcaccgccaccacgctcgatgcgttccagcgcatcggaagatttggaatgggcggtatgctgcaagccacactcgagatcgagtttcttcatcagatgctggcggcgtacatctcgccacaggcggaacagcggctcaaggacgtctacgagaccatctcgcataactacgtgcgcacatcgggcgacaaggacaccctgaacgctgagctcgaacgcgtcaagcagatcctcgtgcacacgcgcaagtcgaccgccctcgagttcctctgcttccgcaaaaaccgagtcgcccaaccaaaggacaagccttcggaccagtagcttcccgcaccgatgcaagccattccacacac

SEQ ID NO: 13808 - DNA, 2801 bp, Oryza sativa
  ref <308>: DATABASE ACCESSION NUMBER: AK111156
  ref <309>: DATABASE ENTRY DATE: 2001-12-06
caatactccaggttcatcgtcaagatcctgaatagaaccagttttttatcatgagaatcagcgaaggtatagtcagctggttatgcagtgcatatctatctcataccatttacttacatcgtcttggctagctgagcactctgcctgggcctggcacttccgcttctgctggcgccacagctcgtcactcccagctccgttgccggagcacaccgacgatgtcgcgaccgtggcctcaggtgccttcctcgcctcggttttgtggacaggcatggttcggcctgccctgtcacggcccatctcgtggtgcaggttaacggccggggccatgggagcggctgccgtggacgcgaacggcatctccttcggctgcggcggccacgccgccgccctctgatcggcgaacgccggtgcgctccttggcccgctcgccgtctgcacgaccgtcgactcgacgcggttgctcgcggtgacattggacgccttattgtcggtgccctgcgtcctctgcgcgctctccagcgtcgccctcgccaggacggccgggcgggagaagagcgagaagttcatcacgccctcgccgccgccgctgccgctcgaccgaggcagcttggctgcggcgagctgtggctgcggctgcggctcggctcgggtggtgggaaccgacaggccgccgtggctttccttggagggttccctggtggtggtggtggcaaccggagcatttctgttattggtggcgccgttgtgattggaggctggcagagaggcgagatcggtcggcggcgcggcggccgccgcggcagccgccgccgcctggagctcggagaagaagtcggagccatagtccgctgctgcgagagcagcaggggcggcggcgtcttcatcgtcaattatggggtaatggatccacggaacggtgtcatcatcaccgttgtcctgcgtggtggcgccgaagctagaagcgaagtcgtgcaccgccggagccatgcccaaggcgccgaagccgccccccactttggcgaacgcatcgatgccgccgggctgcctctcctgggctctactactgctgccgccgccgccaccgccggtgccaccgaagaagccgaacggcgggaaggccggctgcgggtgcttcttcctcccgtgcaccaccgcctggccgttctcccacagcagctcggcgaagtcgttgccgtcggacctgcacacacaaaacaccgagccatatacaaacacatgcatcagcttcctcgatcggaatcaaccggagagctaaaccggaggcagcgaaagatcgcgttgcacccacatctgtgcagtccgtggagacagggtgaagaaatcaaggaaggaggagtttgcagctgtactccgagtgcagagacgagagctccagccgaatgcgaagccctgctctcctccgcggccggccgggcaacgcgaggtgagctctctctttctttcgctggagggagggagagacgaagagaagaggaaacgaagccgaagtcgaagccgaaggtgaagcgggggacgggcggggcggcgctgttggtccgcgtgtgggataagaggctgtggcgtggggggacctagcggacgggaacggaatggacaagcagataagaaagacgcaacgcaacgcagcggttgcagccgcagccccaagccccgggttccctgcaccgccctcgcgtcaatccacggaccagtgacaaaacgaggccctgcccctctgcctcacgttccacgctcggggcaccccccgccaccggtacacacctacgcagccgcgtgtctcagcgcgcgggcggggcggggcgcgacgacataaatggatggttggggtgattggcggggaccaaaccgatcgatggatcgccgcatgcatcatgatgaatactacaggatactcctccatcccgtgccccgcggttggcatggcactggcagcggcagcggcagcggctgcgctagtgtgtacttggtgatactcccccgccaggtccagctccggcattcgtcgtgacaatgcagaccgcagcgcagaagcatgacatgacatgagtgaaactatagccaacacagtgtgcctggtaactgcggtgccacgggggttggtttggttggtcctcgtttgtggcgcgtgcaggtgcaggctcgatcgggaaaggcaaaagcggcggtggttgctgctgccaaagcaacttttgctcggcggagatccagcccaggtactccaggtgcgtgcatggcagcatgactgcctggcagtgtgactggccgaccggtgatgggaaggctcaaggacgacggacactgtctcacactcacagcaaggtagtagtagtagtactactgctagtccttgcttccactcgatgataaataaagctgccccccctcgcgtcacacatgtaccacatacctccactaatgattgacactgccgccagaggagatagaagagagagaatgctgcagctactgtacagtactacaccccctagctttgctttgacttggggcttggctttgattgcttagggcatgtttggattgctgccctactaaaattttggtagttccaaattttgggctaccaaaactttagtagggtagagttaaaaatgtttatttggattgaagccacaatttacccataagagacaagttcatagacaaagccaaatgtatggtattggtagagttttagtagagatgtttagtttgctaccctaccaaaactttggtagggcaaattttagtagggtagtaatccaaattagcccttaatt

SEQ ID NO: 13809 - DNA, 3005 bp, Oryza sativa
  ref <308>: DATABASE ACCESSION NUMBER: AK111157
  ref <309>: DATABASE ENTRY DATE: 2001-12-06
gtccttccgatccgcagcatccttcctctccttcatctcacacccgcctttcttcctcttcaccaagcaccgtcatacgcaccgtctgcactctgcctcctgatcgtgcatcacggaatcgcgctgtttccccatcaacccaacacacccagcctcgttacccgtgcagcagcgcacagcaaatagctccaaaatgtcagacttcccctccaccgagaacgggaagatctcgttcaagaaccgcgtcgtcgtcgtcaccggtgccggtaacggtcttggtcgagcatacgcactcttcttcgcttcgcgcggtgccaaggtcctcatcaacgatctcggcccctctgccaaggacaagaacaagaaggctgccgatgtcgtcgtcgaggagatccagcaggccggtggcgaggccatcgccaactatgactcgaacaccgacggcgagaaggtcatccagcaggccatcgacaagtggggccgcatcgacatcctcatcaacaacgccggtatcctgcgtgacaagtctttcaaggcgatgagcgacaaggagtgggaccagatcacggccgtccacatcaccggctcgtacgcctgcgccaaggccgcatggccctacatgcgcaagcagaagttcggccgcatcatcaacacctcctcggctgccggtatccacggcaacttcggccaggccaactatgccgccgccaagcacgccatgatcggtttcggcaagacgctcgccatcgagggcgcaaagtacaacatcctctccaacgtcctcgcccccgtcgccgccagtcagctcaccgccacggtcatgccccccgagatgctcgagaacctcacgcccgactacgttgtccccattgtcgcctacctcgtctccgccgagaacaaggaggtttcgggccacgtcttcgagtgcggtgccggcttcttcgcccaggtccgccgtgagcgcagccgcggcgtcgtcttcaagaccgacgactcgttcacccccgccgccgtgcgtgccaagattgacgagatcctcgactttgacgagaagcccgagtaccccttccgcatcaccgacgccaaccacatggagttcctcgagcgtgccaaggaggccaagtccaacgaccagggcgaaggccccgtccgtctcgacggcaagaccgtgctcgtcaccggtgccggtgccggtctcggccgtgcctacgctcacatgttcggcaagctcggcgccaacgtggtggtcaacgacttcctcgagaagaacgccgccgctgtcgtcgacgagatcaagaaggcgggcggcaaggccgctcccgccgtcggctcggtcgaggacggcgagaagatcgtcaaggcggccgtcgacgcctttggctcgatccacgtcatcatcaacaatgccggtatcctgcgcgacaagtcgttcgccgccatgtcggaccaggagtggcacgccgtgctcaacacgcacctccgcggcacctacagcgtctgccacgccgcctggcccatcttccagcagcagaagtacggccgtatcgtcaacaccacctcggccgtcggcatccacggcaactttggccaggccaactactcgactgccaaggccggcatcatcggcttcaccaacacgctcggcatcgagggcaagaagtacaacattctcgccaacacgattgcccccaacgccggtaccgccatgaccgccaccatctggccccaggagatggtcgacgctttcaagcccggctacgttgctcccatggtcggctacctcgccagcgaggccaacgaggacctcacctcgagcctctttgaggtctcgggtggctgggttgctgccgtccgctggcagcgcgccggcggccactcgttcagccacggcaagccgccctcgcccgaaaagattgtcaagaagtggtccaagatcaccgactacgagaccaacccctcgtggcccacgagcccgagcgactcgctcggcgacattgtctcgaacttcggccaggaggaggaggacgaggatgatgacgacgagggcggagccggtggtgactacagcgaccccgaggaccccgagattgtgcagaaggccaagaaggagcccattgaggactcggagttctcgtacggcgagcgcgacgtcatcctgtacaacctcggcgttggtgccacggagaaggacctcgaccttgtgtttgagcaggacgacgacttccgagcggtgcccacgtttggtgtgatcccgcagttcatggcgagcggcggcatccctctggactggctgcccaactttagccccatgatgctgctgcacggcgagcagtatctggcgatcaagaagcccatccccacgagcgcgacgctggtgaacaagcccaagctgatggaggtgctggacaagggcaaggctgcggcggtgacgtcggtggtgcacaccttcaagggcagcggcgacctcgtgtttgagagccagagcaccgtcttcatccgaggctcgggtggctttggcggcaagaagtcgggcaaggaccgcggcgctgcgtcggcggcgaacaagcctccgtcgcgcaaggcggacaaggtggtgacggagaagacgacggatgcgcaggctgcgctgtaccgtctgtcgggcgactacaacccgctgcacattgaccccagctttgcgcaggtgggtggctttgacaagcccatcctgcacggcctgtgctcgttcggtatctcgggcaagcacatcttccgcgagtacggcgcgtacaaggacatcaaggtgcgcttcaccggccacgtcttccccggcgagacgctcgagacgagcatgtggaaggagggcaacaaggtcatcttcaccacgcgcgtcgtcgagcgcgacacccaggctctcggtgctgccgccgtcacgctggccgacgagtaagctggccagcatcttggcttgatccgtccgatgcctttcccttgcctctgatctggaattctatagtgtatgatcg

SEQ ID NO: 13810 - DNA, 3614 bp, Oryza sativa
  ref <308>: DATABASE ACCESSION NUMBER: AK111158
  ref <309>: DATABASE ENTRY DATE: 2001-12-06
cgaggaagggcgtagcaagcgacgaaatgcttcggggagttgaaaataagcatagatccggagattcccaaataggtcaaccttttgaactgcctgctgaatccatgagcaggcaagagacaacctggcgaactgaaacatcttagtagccagaggaaaagaaagcaaaagcgattcccgtagtagcggcgagcgaaatgggagcagcctaaaccgtgaaaacggggttgtgggagagcagtacaagcgttgtgctgctaggcgaagcggttgagtgccgcaccctagatggctaaagtccagtagccgaaagcatcactagcttacgctctgacccgagtagcatggggcacgtggaatcccgtgtgaatcagcaaggaccaccttgcaaggctaaatactcctgggtgaccgatagcgaagtagtaccgtgagggaaaggtgaaaagaacccccagtgggtagtgaaatagaacgtgaaaccgtgctgagctcccaagcagtgggaggggaaattgatctctgaccgcgtgcctgttgaagaatgagccggcgactcataggcagtggcttggttaagggaacataatttccaaaatacccccgagccctaatcccctcttccccttcctcctcgctacggcggcggcggcgacggcgaccgccggagccgacccgatcccacccgagtccttccctgtgcgcgcaccgctccttcctctacttcccgaccgccgcttcctcccctgttggtgtgggcgcgggcggctagaggaatcgaattgaagattacggaacaactctggaggcatggcagaggggtccctagttgttgccatttgccagtatggtggagagttcacttctggccccaatggcaatttgatctacaaaggaggagaagcacacgctgttgacgtcacacgagagatgtcactagataacttcaaggatgaggtgtccaaggtgtttcatgttgaggtttcagatgtgtcactgaaatactttctcccgaacaataacagaactcttatcacaatatcatgtgatcgagatttgcaacggatggtcgattttactgctagttctgcacaagtggatgtttttttgataagtagagtggagaacaggagtataactcagactggagcccccactgctaaacctgggtctaatgcacgaggtgataaaaggaaaacgccaacttccaaaaataaggcatcaaaaaacaagaagaagactcccagtgctactggcactgcagttcaagctaatgccaataatgtgaaacagccaagacaagttgttaccgaaaatgatgacaacagggtttttccactggaatttgggagtgatattgcctttgccaatacagctggagctggttccacagctccagacatcttgaatcagcaaaagcttgctcttgttgataacacagcgagggaatcagttgggctttttgatgattcagtcaatccatatgttggctctgagatcacaacagaacctacacagggtcttaacaatcctattgtgttttgggatgatattatcaaaggtgtcggtcaagaatttgataatgtgaaggattttcgtgctcagttatgcaagtatgctattgggaaaggatttgtttatcgattcattaaaaatgaaaccacacgtgtcactgtaaaatgtgttggtgagggttgcacatggcggttgcatgcatctgaatcatctcggaacacgaaatttgttatcaagaaaatgacagacgagcatacatgtggtggaggaagtggagagggtcagcggcgagcaacaagacagtggctgactactgtcattaaggagaagctgcatgagaatccattgttcaagccaaaggaccttgtcaaggaaatttatgaagaatacggagttatgctgacctattcacaggtttggcgaggtagagaagtggcacagaaggagctttatcatgctatccgggagacatatagccatttgccctggtattgtgaaaggcttttggagaccaatccaggtagcatagctttgttgtctccgatggtggatacaaaattccgccgcttctttgttgcattccacgcttctttgcatggcttcacaaatgggtgtaggcctctcatatttcttgacaaggttccgcttaaagcgactaatgagtacaagttgctggttgctgctggagttgatgcagatgatggtgtctttccagtggcatttaatgtggttgaagatgaaaattatgagagttgggtttggttcttgatgcagctgaggtatgctctccagaatcacaactatccttacaatgctatgacatttttgtccagtggacaaaagggattggatgctgctgttccacaagtgttcgaagaaagtcaccacgccttctgtttgcatcatatcatggaagaattcaaaggagagctgaggaagggaccgtggtcacaacagataagagatgggatggttgaggatttcactcgagcagcccaagcctgcagcatcgaggattttaacgcatcaattgagagcataaggaatatatccactgaagctgctgattggattattgcaagtaagccggagcattggtcagatgccatcttcagaggctgtcgttatgatcatttctcctcgaacattgttgatgcttttaataactggatacctaccaagaaggaaggatcaatagtgctgatgatagactctctgagaatgaaaataatggaggtgatagaagcaaggcgcgagtcttgcaagtcctggtcagggcctttaactccttccatggaattcaaagtgcaggatgagatgtccaaagctgggaagctgactgtgctgtgctcttctgaaaccgtgtttgaagtccggggcagtgcaatttatgttgtcaaccttgcaaattgggagtgcacctgtcgaaggtggcaactttctggccttccttgtatgcatgctgttgctgtgttcaacagggttgggcgatctttctatgactactgttcaaaatttttcagaatagagagctaccatttggcttactcaggagcaatattcccaattcctgacatggataccgttgattttagtgctggggcaaatttgattccacctcctaagccacggacatcagataaacccagaaggaagcgttttaaccccaacaagatacctactgttgtacggctctgtagcaggtgcaagcaagcaggacacaataaggcaacctgtgaagcgattttgtagacaatggaagttctggattacccagtatgcgtagaaggtatgccttcagtccgtactccaaccttttcgtctcctaagataacctctttccttcattatgaagtttgaaatgtgtgagactgaaattcgatagtctgtagaaatccgacatcttaaacagttaaaatcgatatgccagttgtatctataagtataactgtacagaaagagagcttgttgactgaaaacatctaaatgtcaatatcatggtctttcatatgccaaaaaaggatatcctttatgtaaaactcatatatgccaaccctccaattcaggggcaatgaaaatgcaaatggcttgtattcgag

SEQ ID NO: 13811 - DNA, 2999 bp, Oryza sativa
  ref <308>: DATABASE ACCESSION NUMBER: AK111159
  ref <309>: DATABASE ENTRY DATE: 2001-12-06
actcaacaccaccatctcaaagtcatacatcgtgaccgtctgatcttctaatcacccacgcacggacaacaaggacaatacacgagttcattacacagcatccgaacagcgctctttctgctcgcctcccatgccggtggcagcatagacacaaacatgccggttcaaggcgacccctacggtcaccccaggccgccgccggcgtacgacgtcgctgtgcggcccgcttccccacaccatcagcagccctaccttgatcgccatcatccccatcaccaccaccaacatcaccaaaaccacgcttacccggctcatgatgcgcaccacacgcaccacacgcaccatgcccccctcaagagcgaataccccgaccaggaacacgctatgatgccgtctcactcgactccgcacgtcagctcgacaccgcactcggctcagcagtcgtcgtccagtctgccggcaaccgtacagcgtccagcgcaccagctcgtccctgaacagcagcaccagctcgccaacatccaccgcttcacaccctcctgctcgcgctgccgccagaaaaagctcaagtgcgacaccaacctcccgtgcaaccagtgcatcgcaaagggtgtccacgacgattgccgcaaggattccaggattccccgtggcaggaagcgccccaagatcagtgcaacttcgtcctccggtccagacgaagagatagccgcgctccgcagacgcgtcaaggagctcgaggacatgatggctcgccaaaaccgtcgcagctcctcgccccgtccagactcgtcctcttccagccaacggctttccgacaagcgctcgatcccctcacacatgctcggcaccagttcgcgtggctctcagacatccgctccgtccgacctcgactacagccattcgcgcaacaacgccagccctaccgctgcttcctttgactcggacgacgaccagctgcccggcgagaccgaaacgtcgctcaccttgctcgaaaagctcgccgcctccgatccgcgcgtcaccgagccgggccacggcaaggctatggccaagcagatcaacaacgtctccaacacccagatccctcttgatgcacccaacgcctactttgcgctgcccacggcgctcaacgagcgcatcgagatcctcaccttggcaaagcgcatcgtcccgtccaagttcatcgccgacaccctcatccacaccttcaacgtccgctgtcacagttgggtgggccgcatcgtgcacatgcccagcttccagcgcgacatcgactttttcacgctcgcctcggtcgaggagtgcctgctctcgcccaaaggcatgtacgatctcgcgcgttacctcatggtgctgcgcctcggcttgcgtttctacccgtggaagggcagcgcgttcaccagcgactcctcgcccgaattcatcgccatcaacgctctcaagaatcgcggcgacaatgtgtcgggccagtggctgacgctcgccaagcgtgcgctcgcagcagaccgcaccttcagcctcggatcgctcacagcgatccagaccgcgctgctcatgatcctcgacggacgcgactcgcccagctacctgcgcatgctgctgcgcatcgccattcagaccgcactcgacatgggcctgcaccgcctcggacgcgccatgccctcgcccgcaaatccggacgaggacattgtgcgcctcgagacgggcgtgcgcatctggtggtatctggtggtcaaagattggtgctcggcgcagcgagagggcgcctacacgatccatccgacgcagatgaccacgcgcaagccgctccatgccaccgacgccatgctcgccgcgggccgcaccgacgagatctcgctcgacgagcactgcgagatgagctacacactctgccagatcggcctcgccaacatcatccgcgagagcattgatctgcgcaacgaacagagcatgctcggcggcacctacgatgtcatctcgcccaccaaccgcaagctgctgcaggtgaagctcgagaccttccttgcggatctgccgccgttctacacactcgagagcaacgccacgcatccgcccatcgtggcggtgcagcgttctctgctgcatcagcaagcttttgacgtgctgctcaagctcaaccgcaagagcctttcttcgtacagcgagcgtgcgacgtgcacgctgctggccgagcagattgtgtcgacgcagacgctgctgcgcagcgtgtgtccggtaattgatgggttctgggtcaactttttgcatctgttcggcgcgacgctcacgctgaccatctcgctgctgctggatggcgagatggatgcagaggcgagggagcggcgcagaggcaaggtgcatacggcgctgacgaccatgcgcgagacgccgggctcggatcgcggcagtcgcatcatcgagacgctgctcgccgaggagcagaggctgtggcagtcgcatcgcagctcgccgctcaatctggccggcttgacgcgtcggatcgtcgagcagacgctcgactcggcgacgagcgcggcggaacgtggcggcggcggagcgatctcggtgcccatcgagccgcactgcggtacgagcgtgtgggacgtgacgccggaggagtcgttaattccggcgttcgcatcgggctggggttcggcgccgctggatgtgctggatccgacgcagctcatgccgtggcagcccgccgacgagctgtacagccgcccgtcgcggccgtacatagacagcctgcgaccatggcaggaaccgtcgtcgccgcgcaccgagtccggaggccacaacccgctctgggattggctcttctcgcatgctgcgctcctgcacgggcccgatccgccggtggagggaaatcccaacccgccgcagccacagtcacagcttccgccacagtcacagcttccgccaaagtcgcggccttgatcgcacacgcataccccgctgcaatacccacaacacccgcacagcattttcgaacc

SEQ ID NO: 13812 - DNA, 2993 bp, Oryza sativa
  ref <308>: DATABASE ACCESSION NUMBER: AK111160
  ref <309>: DATABASE ENTRY DATE: 2001-12-06
atccttcctcctcctggctcaattcgcttctgctcgcaaccggatcagcagtcaccagcgttacgcctatcgccgcgcgacgtcccaaaactctggcatgctatcctcagcgtaaactttggacccaagcgtcgtcggcccaggcgtcgtccgcatcactccgcgcagccgacatgcatcttccacgacatacgatcgagtcacatgccgctgctcctctcttcgagcatgcaagcttctgctccccagatatctccatcttccgcgatcggccgccagaggatcacgcatcgaccaatgcttcaccctcgacttccgagcttgcccagccggccgtcttcgcttgtgccaccctcaatggctttctcgtagctcagtccgacccagttaagctcgccgctaacaggtcctggtccagtgcacagggcggtctgtctcacgctgtgcccgtctcccattcctctctcctcttgctcgtcggcggtggaagagtaccacgcttcgccccgaacaaggtcatcctgtgggacgaggcagcagagtatatcccctcacagcccgatccggagtcccatcacgccgactctgacgacgaagatgacgaccattccagctccttcccctcgaggcgcgcatccaccatcttttcggctggttccgagttcgacgcatacggcagagctccttcagccgaattcgagaatgtccaaccgccaatctcatccgagcagtcatcacctcgccctcccagcatggacgactccgtgaagtcgttgtcggatctcgatcatatccagcaccgcaccggaccagctgctggcagttcatcccgctctgctgccgaatccggctcttcagtcgatcaaagcatgctcgcgagctctctcggcatcggtcggctacaatcatcgtatctttccgataccaccgatcgtgacgcacagtcgtccgtgcaattcagccgcgactctcccaatctcactgcctcaagccactcacacgccatcatggccagctccgcaaatctcgcagaccctttcgcagaggacgaggcgctcccacctcacttgtcgccagagcacaatgctcgccccggctccttcacttcatcagaatcccacgccagctctcatgctcatgcgtccagggtcgaaagcgctacttcgtctcgtcaattccgaccgacttcggccgcacacagagaccgcgcggatggcctcggcctcatcgattcggtctctagcatggcaaccaccgacacccatgcaaccgcaaaacgtccccctcgcgtcctacgaggtcgcgaggttgcagaactcgaattcagcgaggtcgttcgaggcgtctatgctaccaccatccacaccaccaaaccacgctctcgccatccaaccagtaaaggcaaggcccgagccacatcaggcgcagcatctcctctcaatcgagaggctgaacctggtttctgcgtcgtccttgtcgtcctgcttgccaccagagccatcgtcttcgaactcttgccgccgtcgaccgcgccaacgcttggcggccgtcccacttcgtccgcgtggagtatatcgaagcgagccgtcgcccagacgcacaagaacccaaagggtctcggctcggtggcgcctctgtacctgcacacgcctccgggcacggtatcgcaacccagcgccgtggttgcgctgcctggacgccagaagggacacgtacagctcttgctcatccacttaggcatgacgcacgtcgatcagtctcggcccgcctcggtcctggcaccacctgtcggcgcatctaccatcatcgtagctcacgaggcttccctcgctgcgcttgccttgagcccagatggtcgtctcctggcaactgcctcctccaaaggcactctcattcgcatctggtctcacaatatcgggcaaagtgacggcactggttcgcgaaacagtcgcgcttctccgcacgagccaaagtcaaacgcaccaggcaggaccggggtcggtgccacactagcacgcgagctgcgccggggcaccgatccagctaccatcctgagcatcgcctttgcgcctgacgcctcgatcgtggctgccgcaagcgacaagggaacgatccacatcttcttgctttctcagcccggatccatggcgccggccgacgatgcaaccgagctgcccagatcgcaggcatattcgacgactcgcgcctccaacctgggccgagtcgccgctagctatctacccgcaggcctcggcaacctcgcaggccaaatcccgccatcggtgctgccccagtacctcaagtcagagtggagcagcgcccaatttcgcattcccctcaagacgtttggatccgcctcgcgccactcgtcggcatcggcacaaggcgacgaatctggtatctacggctcaaacgctccaagaagcaccacgctcggtaccgagaagtctaccgaaggcgcttgggcgcacatgcgtagccgcataagcgacatccgcaagggtgaagccaacgtggacgaaaagatgttcttgtgctgggtcgaagaagcagcccaattgccagtcacagtgaccaaaggtaaagcgtcggcgcagccctcttccaggtccgaacatgcatctcggccgcgtccactgcacacgtcaaaggataatcacgatggccccaaccccgaatcgccgtaccgctttcacctcgtcgttctaacgacctcgggcgggtggtacaagctcgcgatccatccaccacaatcgaatgccagcgaggacgcatcgggctccaccgtgctaggcatgtaccgccgggagtcgaagcgcgcaactgacaagcccaagccgctggaatgcgaactgctcgagtttcgccccatggcggcgatgctggacggatggagagcatgacacccgccacgaatcctgttctcagtttggccacgttggtcgccatcacaaacaatgtcttttgcatcatgaaatccattttcaacaggt

SEQ ID NO: 13813 - DNA, 3318 bp, Oryza sativa
  ref <308>: DATABASE ACCESSION NUMBER: AK111161
  ref <309>: DATABASE ENTRY DATE: 2001-12-06
ccatgcagctccgcgtcaagctcgtcacagccaccatgaaaaacatcacctccatcaaactggcttcccgcttcgccatcatctcggagcgactctccgccttgcgtgccctcgaactcgccgcctttcgcgccgccatgtggatcgccactctgctcgccgtggctgccaacgacctcgaaaactacactacgctcctcaccctcgtcgcattctcaggaatcgcccagaacagccattccaccgcaacagactcgctcgacaccaccaagctctttaccgtcatctccgtcctcaccctgctccgcaacccgctcttcctgctcgcacagtacggtccgatgctcctggcagctctcggcgcctctgtcggaattcgcgattttcttctgcaagccgagatggtcccgagtcaggatgacgccagccgcggccgaaccacgtcgtcatcgtcctttagctgcagcctagatcccaagtctggcaatgcccaggcttccaatgctgccgcttcgtcggtctctgaaacatcgagcatcgtctcaaagggcgtccgcctacaagtcggcacaaaggctctcatctcggacctcaacttcacgatcaacaagggccaactcgcatgccttactggcgcgaccggcactggcaagagttcgctcctgctcgccttcctcggggagctgagaagttctgcgggcgagctcttcgtcgagcgtagccccgcgtacggaactgcctactgtgctcagtcgacctggctccaggacgcctcgatccgcgacaacattctcttccactcggacctcgaccaggagcgctacgatgcggtggcgtggtgtctcgatctcgaacaggactttgccgccatgccagaaggcgatgtcacccgggtcgggccgcaggggtccaagctctccggtggccagaagagcagagtcgctctggcgagagcgctgtacagctccagcccactccttttgctcgacgactcgttggcggcgctcgatgcctctaccacagccaagatcgttactcgcctccttgcccgtgaacctcaaggtcgagatggcagttcagtggctcccgcccgactggtgctcgggggcaggaccgtcgtcctcgcttgtcacaaattcccgcttgggatccagccagatgtgcacattgccctcagttccaaagaggagaccgcggaaacggtcgccgacgtcaccgtccagtacgctagccatcagaccgtcactttcccaccttactcgaggtctctgccactcaaaagtgcttccgccagctccgatcaaggatgcaaggacagcagcggagccagcgatgcggacccttcacccaatccacggactcagctgcgtccttgggaagccttcaagttctactgccgcacctgcggtacagcacgcgcgctcgtctacgtcgccatcagcatctttgccgccgcttccctcgcctcgatcaacatctatctctacttctggtcgagtgccaacgatcgtaagcccaacgcaagcctgtgggcctggatcggaggttacgcggcagtggttacggtcaactcgctggctttcacaggtcaggtctactacctcttcatacccgttgcgcaggcctgtgcgcggaggatgcactcgatcatcctgagctcgacgctggccgcacctctgtcgtatttcctcaacacctcgggcggggccattgtgaatcgcttcagccaggacctctttgtatcggacaacgacatgaccaaggccttgttcaatgtctcctccaatctgggcgttgtgctcggcagtatgatccttctgtccttggcatcgccctggttcttgctcatcttgcccgttctgctgcccacgctgtgggcgatcaagtcgttttaccttcgcacatccggacaagttcgcaagctcgacctcgagtccaagtcgcctctgtataccctgttcggcgagacgatcgacggcatcgtcaccatccgcgcctttgggggcggccgagcatttacgcagctcaacgagattctcgtttcgcgcagccagcgcgccttcttcctcaacctctcgctgatgcgttggctcactctcgtctctggcctcatcgtcgctggcctctccacggcattctgctcgctcagtgtcggcctcgcccagcgcagtgcaaagcacggagcaggctcggacacggtcggatgggtcgcggtcgggctgacgcagctcatgatgctcacgagcgcgatcacgatgctcacgaaagcctggactcagctcgagctgtgcctcgttgcgatcgaacgcttgcagcaggtcgccacgctcgaagccgagaacgacgatgggacccgctcgtacgaaggcgagagcacggagcgcacgtcagccattggggccgaggtggttgtcgagtccgtcaacgtcggctacacgctgcccgacttggatgtctccaccacggtcctgcgcgacctttcgttcacgcttgcggcaggagaaaaggcggccgtggtcggcaggacgggaagcggcaagtcttcgctcatccaggcgcttttgcgcttcgttccactgtcttccggaagcatctcgatcgaaggcgtcgacacaaccgacttgcgcctgcgggctctgcgcgaacggatcctggtcttgccgcaagaggctgtggtcgtttcgtgctgcacgctgcgggagaatctcttgatgatgctggacactgccgacagcgtcgatgtgcccagcgactccgagctgtgggacgctctgaagcgggtcgggctcgacgccatggctgccaagtggggcggtttggatgcggctctggatcaggcggacgagctgagcaatggccagaggcaacttctctcgctcgcacagctcatccttgcctgcaaagccatccgtgctcgccatgggcgcagccgcatcggatccgagggccacttgattgtcctggacgaaccgacatcattcctcgacgacagcggagacgcccttttgagggagctgatgcaggatccactggccctcggcgactttacggtcctgatgatctcgcaccgcttcgggcccattcttgcttgcgacaaggtcctcctgctgcacaagcatggcgaagcttcgacagggccgtcctacgaattcggtcctccgagagacctgttctactcacccgcatctagtttcggactccttgctcgcgatgccggcatcacaagatggtagactcgtatactggcggtcggactagttcgatccccctcgcacagagaccctccccaccgtgccttaagaagcttgctgttcacgg

SEQ ID NO: 13814 - DNA, 1654 bp, Oryza sativa
  ref <308>: DATABASE ACCESSION NUMBER: AK111162
  ref <309>: DATABASE ENTRY DATE: 2001-12-06
acacacaccctctcctctctccactgcccctctatcccctccctttttccattccactcctatacggaaccgttccacgacagctggcttcttcgtatagacgaccatcaccacactcgttaccagcaacgcacctctttctcgtctcgtctcgtctcgtctcgtctcgcatcgtctgtctgttcattcgacattgtcctgggtcgatcccgtttgcaaacaacaccaaccaccgtcacgatgaaggccttcgcgacgctcctcctcgccaccctggtctcgggctcgctcgcttcctcacacgcgtccacctcgccccaccgacgccaccacaacaaggggcccctcgatgccgaacaggccatcgcaaagcgcgcaacctactcgggcatggccacctggtacgacgtcggcaccggaaacgctggcgcttgcggcaagttcctcaaccccggacagcacgtcgtcgccctcaaccagcccatgtacggcgaccttggccagcgatcctcgtggtgcggcaagaccatcgtcatctccaacggtcaaaagactgccaccgccaccgtagaggacgcttgccccaccggtggaggaaactgcttctacggctccctcgacatgagcgtcggcctcttcaccgagttctttgacctcggcaagggcgtcttccccatcacctggtggcccgcaggcgagggcggcggcgactcgggtggcaacagcaacaacaacaacaacaacaacaacaacaacaacaacggcggcggcggtaataacaacaacaacaacaacaacaacaacaacgacgacaacaacgacgacgacaacggtgccgccgctgctgctgctgctgccgccgccgccgccaagaagaaggcccagcagcaggcccagcaggctgctgccgaagcctcctcgtccgccgccgccgcttcgtcctccgcggccgcctcgcgatccgccgccgcctcgcgcgcttccgtatacagcgtcaccaaggcggcggcgcgtgccagcgcctcggcttccaaagccgccgccaagtcgcgcgccagcgtccgcgccagcaaatcggccgccgccgccgcctcgtccgcctcggctgctgccgccgcttccgccgccgccgccacccccaccggcaacctcaacaacttcgccaacctctacgacggcctctccaagatcatcatggagcaggccgactcgtgatcgcgcgcgctccctcccatggactctagatactgcgggtcagcctccctttcctctgtaccacttttctctcttttgctctcgtctctttgttttttctcttcgggtatctttggaaggaatctcgctcgctatcgttgcggcgtcggctcatcgcatcggatggtgatgcgggggtcaagactgcgtcccctccgccacgccaaaatcctgcgtctctccccgaacgcctttcccttctcccacaagctccacttcagagcatgttcttcccttcgccttgctagatctcttcgttgcttttgcttgtatcacgatgtccgcaccacccgagctgggctccagagtgggttgcgggaccgtcgttggctctcttttactttcccgacgccttttgcgctttgtcttgccatggaatgtccacaattctttgtcactc

SEQ ID NO: 13815 - DNA, 3036 bp, Oryza sativa
  ref <308>: DATABASE ACCESSION NUMBER: AK111163
  ref <309>: DATABASE ENTRY DATE: 2001-12-06
atcgccatcgcctcgcccatcgcacgcctgacgagaccgcaccccgtctcgcgcacacctttcgtactctcaatccgcagcatggcctcctcgaccggcagcgaggcccagtggaccgctcccaaggtcagggccgcgttcctggactacttcaaggaaaatggccacacctttgtgccgtcgtcatcggtcgtgccactcgatgacccgactcttctcttcaccaacgctggtatgaaccagtacaagcccattttccaaggaaccgtcgacccgcaatccgacttcgccaagctcaagcgtgcagtcaacacccagaagtgcatccgcgccggtggcaagcacaacgatctcgacgatgtgggcaaggacagctaccaccacaccttcttcgagatgatgggcaactggtctttcggcgactacttcaagaaggaggccatcgagttctcatggaacgtcctcactaaggtctacggtctcgaccccgataggatttatgtcacctacttcgagggcaagcctgacgttggtttggagcccgatttcgaggctcgcgatctctggaagtccgtcggtgttgccgacgatcacattcttgctggcgacatgaaggacaacttctgggagatgggtgaccagggaccttgtggaccgtgctctgaacttcactacgaccgcattggcggcaggaacgccgcacacctcgtgaacatggatgaccccaatgtgatcgagatctggaacaacgtcttcatgcagtacaaccgtgagcccgaccgttcgctcaagcctctgcccaacaagcacattgacaccggtatgggctttgagcgtttggtttccattctgcagaataagatgtccaactacgacaccgacgtcttcactcctctcttcaaggctatccaggatgttaccggagcgaggccttacaagggtgctttcggcgacgaggaccctgatggcgttgacactgcataccgcgttgtcgccgatcatgtgcgtctgctcactttcgcgattgctgatggtggtgttcctaacaacgctggacgtggttgcgtcgtgcgtcgtgtgctcagacgaggtgcacgttacgcccgcaagtacttcaacaccgagattggcagcttcttctccaagatcgtccccacacttgtcgagcagatgggcgagatgttccctgagatcaagcgcaaggaggccgacatcaaggaaattctcgatgaggaggaagcgtctttcgctaagacccttgaccgcggagaggctatgttcgagaaatacgccaaggatgctaagtcatacgagcgcacagaactcactggtgccgacgtgtggaggctttacgacacatacggtttccccgtcgatctcacaaagcttatggcagaggagcgtggtttgactatcaacgacgaggctgttgctgaggcacaagagaaggctagagaagctagcaagggcgagaagaaggttggcgccgagcttgtcaagctcaatgtccacgacatcaacgctctggagaagatggaggatgttcccaagaccgatgactcttctaagttccaaaaagacaacatcaagagtgtcgtcaaggctatcttccaaggtggcaacttcgtgaagtccacctctgaaattaccgaaggcgcacaacttggtctgatcctcgaccgaacaaacttctatgccgagcagggtggtcaagagaacgataccggtctcatcctcatcgatggcgttgccgaggtcaaggttgacaacgtacaagtctacggtggctatgttatgcacactggctacgtcacctacggctctctcaaggtcggcgatgaggtcctctgcgagtacgatgagcttcgcagacaacctcttcgcaacaatcacaccggcacacacatcttgaacttcgccctcaaggagacccttggcgatgacgtgaaccagcgtggttcgctcgttgcgcctgagaagctgcgcttcgatttcagccacaagtcaggatgcacggacgcagaactccagaagatcgaagagctctgcacaagctacatccgccagaacagcgaggtctacgctgctgatgttcctctcgcccttgctcgtgagattgagggcgttcgtgctgttttcggtgagacctaccctgaccctgttcgtgttgtcagtgttggcgtccccgtagaggagctcctggaggagcccaagcgtcaggattggcgcagcgtctccatcgagttctgcggtggcacacacgtcaagaacacgagcgagatcaaggagctcgttgttgttgaggagagcggtatcgccaagggtatccgacgtatcatcgctttcaccggcgccgctgcccatgaagtccagcgcatcgctggcgaatgggaggagaagatcgccaagcttgagggcatgtcgtactctcctgagaaggaggccaagaccaaggagtcgcagcacgagctcaatcagctcgagatctctgccgtctccaagtccaagcttcgcgagcgcatcgccaaggttgtcaaggccaaccttgaccagcagaaggcccagcaaaaggccgagaacaagaaggtccttgacaccatcaacaactactttgctgagaacaaggaggccacttactacgtcgccgccgtcaacgtgtctgccggctccaaggccatccaggaagccatcaagaccatctcttcgaagcagaaggacaagagcgtgtacatcgtcgccactgccgccgatggcaaggtcgtgcacggctgccacgtctccgccgacctgcagggcaagggtgccgacgccaataagtgggccaacgctgttgctgagattgttggtggcaaggctggcggcaagggtgctaccagcttgggccagggcaccaacggcgataaggctgacgacggtgtcgaggccgcgaggaagtacctcgagagcttgtcgttgtaagctcgaattgttttaagaagacctcgttattaaagcatcgcaatgaatatggcgtcttattgcgtctgctgctacgcg

SEQ ID NO: 13816 - DNA, 2868 bp, Oryza sativa
  ref <308>: DATABASE ACCESSION NUMBER: AK111164
  ref <309>: DATABASE ENTRY DATE: 2001-12-06
catccactcctgcctcggccgagcaccttcccttctttcaattgcctctctcgcaccaccagactcgaccttccagacagcccgcttcccctttcacagaccccgccatcaccatggtgcagtcatctgtgctcggtttcccccgcatgggtgcgaaccgtgacccgaagaaggccaacgatgcatactgggctgacaagctctcccgggacgagctcgtcaaggaggccaagcgcctgcgtcttgctcactggcagatccagaaggatgccggtgtcgacgtgatccccagcaacgactttgctttctacgaccacctcctcgaccacatccagctcttcaacgccatccccgagcgctattccaagaacaagctcgaccctctcgatgagtacttcgccatgtgccgtggccaccagaaggatggtgtcgatgtgcccgctcttgagatggtcaagtggttcgactccaactaccactacgtcaagcccaccctccaggacaaccagaccttcaccctcgcctccgaccccaagcccgttcgcgagttcctcgaggccaaggaggctggtatcgccactcgccccgtcctcgtcggtcccgtctccttcctccacctcggaaaggccgaccgtggccagtccgtcgaccccatctccctcctcgataagcttgttcctgtatacgttgagcttctgaagaagctcaaggaggctggcgccgagaccgtccagattgacgagcccgtcctcgttcaggacctcccccagaaggtcaaggatgccttcaagcctgcttaccaggcccttaccgccagtggtctgcccaagatcgttctcgccacctacttcggtgacgttgtccacaacttcgatgtcttccccagcctccagagtgtctacggtatccacgtcgacctcgtccgaaacccagagcagctcgaggccgtcattggcaagctcggctccagccagatcctctctgccggtgttgtcgacggccgtaacatctggaagaccaacttcaagcgtgctatcgagactgtcgagaccgctattcagaagctcggcaaggaccgtgtcatcgttgccacttccagctctctcctccacactccccactctctcgaggccgagaagaagctcgatgctgaggtcgctgactggttctccttcgctgtccagaaggttcccgaggtcaccatcattgccaaggctgtcaccgaaggccctgctgccgttcgtgaggctcttgaggccaacgccaagtccatggagtcccgcgccacctccaagcgtatcaacaacaaggccgtcaaggaccgccaggccgctgtcaagcctgcggaccacgagcgccaatctcccttccctcagcgtcttgctgcccagaagactcacctcaagctccccatcttccccaccaccaccatcggttctttcccccagaccaaggagatccgtatccagcgtaacaagttcaccaagggtgaaatcaccgcccaggagtacgagcgcttcattgagaaggaaatcgaggaggttgtccgtatccaggaggagcttgacctcgacgtcctcgtccacggcgagcctgagcgtaacgacatggtgcaatacttcggtgagcgtctcgatggttatgccttcaccaccaacggctgggttcagtcctacggatctcgctgtgtccgtcctccgatcattgtcggcgacatctcccgtcctgctgccatgactgtcaaggagtccaagtacgccgcttccatctccaagaagcccatgaagggtatgctcacaggtcccatcacctgcctccgatggtctttcccccgtgacgacgtccaccagtccgtccaggcccaacagcttgctctcgccatccgcgacgaagtcgttgaccttgagtccgccggtgtcttcgtcatccagatcgacgagcccgctctccgtgagggtctccctcttcgcgccggcgaggagcgcgagaagtacctgtcttgggccgttgactccttcaagctttcggctgctggtatcaaggactctacccagatccactcccacttctgctactcggaattccaggacttcttccacgctatcgccgcgctcgacgctgatgtcctgtcgatcgagaactccaagagcgacgctaagctgctaaaggtctttgaggacaaggagtacccgcgccacatcggccccggtgtgtacgacatccactccccgcgtgttcctgccgagcaggagatgaaggaccgcatcggcgagatgctccagtggctcaagcccgagcagctgtggatcaaccctgactgcggtctcaagactcgccagtggaaggagaccaaggctgctcttaccaacatggtgaacgcggccaagtccttccgcgagaagcacgctgcttaagtgggtgcgctcagcaactcaaggttctgcattgcccccggcgcaacgaatgcagaggccggagcgtcatgacgttcgcctgactggggcaggcgagcggcggggtcgttgtcacggccaccgcgttgtaatgtgtctaatgtgtttatgataccaaaaagttcaacctgtacctgcatcggatcggaaggggtttattccggggacacgcacaatcagtgcatgtatgatgtgaacgccttcaacattggcgttcatgagcaggtggtcacgttgaactcatagagaactgggatccggcgttgaacttggtttacataatggctttcctttggggggacgtccaaaaagggacttgcatctttgagtgagaggactgcattaggcagcccggtagtggataggtagcaccttgcggacctcttgcacgcaaatgaacaattccagcaccttg

SEQ ID NO: 13817 - DNA, 3209 bp, Oryza sativa
  ref <308>: DATABASE ACCESSION NUMBER: AK111165
  ref <309>: DATABASE ENTRY DATE: 2001-12-06
caaaaatgtcacaagagaaattgcagctcaaggcccaggttaaggaacttgaacaagcatctcgcagcctagatgattcatcagcacagattatgaagctccaagaaataatcaaggatctgcaaagaaggctggacaatgattcaaatgagaagaagatgctcgaagaacgtgctatcgaatttgaacaagttcgtaaggagctggagggttcaaggactgaggtcgcagaactacaagctacaatcaacaatctgaaagctgacctaggaagagctctggaagagaaatcacagctggagagccgtatcaatgatctggaacacacaatcgcctgtaatttggaagaattctcgcaggagaaatcctcacttggtgccgagatccaaaaactgaaagaagccaatgcttctcttgaaggcaagctgacatccacagagtcacagctccagcaactccacgccgagaaatcagaagcatccattagcagtgagaagcagatctccgatctgaatcaagccatcgccgatctcgaaacaaagcttgaactcctttcttcagagaaaactacagtcgataacaaggtggctagcttactgaccgatgtcacagctcgtgatgagaagatcagggagatggacagccacctgcaccagctgcacctggagcatgtcaagctgattgcagaggcagatgccgtgacgaaggcggtgtcggagctgcgagcacgggtgagcgagctcgaggaagaggtggaggagcagaagctgatggtctccgatggcgcggaggggaagcgagaggcgatcaggcagctctgcttctcgctcgagcactaccgccatgggtaccagcagctcaggcagctcctgcagggacaccacaagaggccattggtgatggccaattgagagtgagaatttctaaaacctatcttggcaatgcaactgcaaagcaaaattgcatcaaagaacctgtcaatgcaatgcaaagttgcatctccctccccttttcttgttctatgatgtagctcattcagatgctggtaccctatggtgcgtgtattgtaatcgaggaaccgagtctgaacaaaggacacattgaagcatctcgcgttccttggttagccttcactccttcagccatggccaggagaggaggagcagcagcatcgtcgtccatggctaatctcctcggcgtcgccttggtgctcgccgccacggcgcagacgtcggcgcgtggcggcggcggcggcggacgccatgactaccgcatggcgctgagcaagagcatcctctacttcgaggcgcagcgctccggcgtgctccccggtaaccagaggatcgcatggagggccaactccggcctcgccgacggcaaggccaacggcgtggatcttgttggtggctactacgacgccggagacaacgtcaagttcgggttcccgatggcgttcacggtgaccatgatggcgtggagcgtcctcgagtacgggaagcagatggcggccgccggcgagctcggccacgccatggacgccgtcaggtggggcgccgactacttcgtcaaggcgcacccggcgcccaacgtgctctacggcgaggttggagatggtgactcggaccacgtctgctggcagcggccggaggacatgacgacgagccgtcaggcgtatcgccttgaccctcagcatcctggctctgacctcgccggagaaaccgccacggcattggccgccgcgtcgctcgtcttccgtagctccaacccgggctacgcaaaccaactcctgcaacactccaagcagctgtttgatttcgccgacaagtaccggggaaagtacgacgacagcatgcctgtcgtgaagaaattttatgggtcattcagcggatacggggatgaactactgtgggcatcggcatggctataccaggcgaccgacaaccgccgctacctagattacttggccaacaatggtgacgcactcggcgggaccggttgggctaccaacgaattcggctgggacgtcaagtaccccggagtgcaagtcctagctgcaaagtttctcctgcaagggaaggccgggccgcacgccgccgtgctgcggaggtaccagcggaacgccgacgtcttcgcgtgctcctgcctcggcaagggcggcggcggtggcaacgtcgggaggacgcccggcggcctgatgtaccaccagggctggaacaacctccagttcgtcaccggcgcgtcgttcctgctggccgtctacgccgaccacctcgccgccgccggccgcgggcaagccgtcgtgcggtgccaggccgggccggcggcgcgggcgtcggagctcgtcgcgctggccaagtcgcaggtggactacatcctgggtagcaacccgagggggattagctacatggtcggctatggcgcgaggtacccgcggcgcgcgcaccaccgcggcgcgtccatcgtctccatcagggccaacccgtcgttcgtgagctgcaaggatgggtacgcgagctggttcggccgcgccggcagcaacccgaacctgctcgacggcgccgtggtcggcggccccgacgggcgcgacggcttcgccgacgagaggaacaactaccagcagacggaggtggccacctacaacaacgcgccgctcatgggcgtcctcgctcgcctcgccggcggcggccgcggcgggctcgccgaagcagcgatcaagaggccggacaaccagaccttgctgccacctctcgcagctgcggcgtcgccggtggagatcacgcagctgaacgcgacggcgtcgtggaagaaggacgggaggacgtaccgccggtacgcggcgacggtgagcaacaggtcgccggccggcggcaagacggtcgaggagctccacatcggcatcggcaagccgcacggcccggtgtgggggctcgagaaggcggcgaggtacggctacgtgttcccgtcgtcgctggccgccggcgagagcgccgccttcgcctacgttgtccgcggccgcgccgcgccgccgccggctgacgtctgggtcatcggctacaagctcgtctgaaattgggacgtgcaacgaacaaccattgctgattcaagatggatcgtttgatattgcaaagcatattatgaataatatattgcaaagctcgtttgggttatcgtttttggaataatatatagtttcttcttctcgatggatc

SEQ ID NO: 13818 - DNA, 1940 bp, Oryza sativa
  ref <308>: DATABASE ACCESSION NUMBER: AK111166
  ref <309>: DATABASE ENTRY DATE: 2001-12-06
ccaccatcctccaacatcgcagctggaatacttcggctcaaatcaccatgtcttctcgcttcgtcgccgctcgtctcgcgcgcgtcaacgctgcccgacttcagtccatcgcagctccttcacacagcgtcgcccgcctcagcatctgctcgcgagccagccgtccatccctcgcgttcagcgcaccctcgtctttcgcaggcgctgtcaggatgaattcgaccaatgccacatcgctcaacccacccccagccccgcttcgtttgcaagcacccaccgccgagcaggagcaggccgactacgacgccgcagtcaagcaggtccaggaatggttcgacagcccccgcttcaagggcatcaagcgcccctatggcccggaagccgtcgtctcaaagcgcggatccatgcccgtacaacctccggcctcttcgctcatggccgacaagctcttcaacctcctctccgagcactttgccaaaggcaccccagcccacaccatgggtgctatcgatcccatccagcagtcccagatggcccacaaccaggaggtcgtctacgtctctggctgggcttgcagttcggtgctcaccacctgcaacaacgaggttggcccggatcttgccgactacccctacacaaccgtgcccaaccaggtgcagcgtctcttcaaggcgcaacagcaccacgaccgaaagcactgggatgagcgatgccagctcacacccgagcagaaggccaagacgccctgggtcgagtatctccgccccatcatcgccgacgctgacaccggacacggcggtctgagcaccgtcttcaagctcgccaagctctttgccgagcaaggtgcggcgggcattcacctcgaggaccagctgcacggcggcaagaagtgcggacaccaggccggcaaggtgctcgtccccacctcggagcacgtcaaccgcctcacttccacccgatacgcctgggacattctcggctcgtccaacatcctgatcgcgcgtaccgactcggagtccgccaagctcatctcgtctagcatcgatgcacgcgaccacgagtacatcaagggcgccttcaacctgcccgagggcaccagcagccttgccgacaccctcgccgccttggaggccaggggtgcttcgggcccggaagtcgacgcggcagagaaggcgtggatggagaagtgcgagctgctcaccttcaacgaggccgtggccaagcacaacgctgccaacaagcagggcgttgaagcctacaacgccaaggtcgccggcggcgtgtccaacggtgaggcacgtgccatcgccaaggaggtctttggcgccgagggtgttcccacatggtgctgggatgctccgcgcaccaaggagggctactaccacttcaggggtggtgtggccgccgcgacgaagcgcgtcaagatctttggccagtatgccgacatgctgtggctcgagaccaagacgccggatctcaagcaggcacagggctttgctgccgacatccaccgcgacctgccgggcaagtggctggtgtacaacctcagtcccagcttcaactggagcgcacacggattctccgaccaggacctcaagaactttgtctgggacctcgccaagtccggctttgtcttccagctcatctcgctcgccggtctccactcgacgggcgccatgacctgcgagctttcgcagcgattcaagaccgacggcatgctcgcgtacgtcgagctcgtgcaacgcaaggagaaggagatcggctacgacgtgctcacccatcagaagtggtcgggcgctgcgtatgtcgaccgcatgctccaggccgtcagctccggcagttccgcaacccaggctatgggcgcagacagcaccgagcgctccttctagactcgcttcaactcagctccgtttgcaatcagatttcgttcttgttcttgt

SEQ ID NO: 13819 - DNA, 3094 bp, Oryza sativa
  ref <308>: DATABASE ACCESSION NUMBER: AK111167
  ref <309>: DATABASE ENTRY DATE: 2001-12-06
tctctgcgtttattcccagagcaatcgccgcctgcgactcttggaggcagagcaagccgctcccaagccgctcccgagccccagcccagatcctgtcccaccattgttggcaaggaaaccttgacgggagcacacggctcggcgaaaacaagtcgaaggcgccctcccccagacctcgctccattgccccttcgtgtcttcggcctgatagaagcccgaggttctctgcccctcctgctgctgcgacaccagccagcatcttgccgattatcgctcgacaaaccggttcggttcagctgccaccgcctctcgacctcccatccgcctatcgctgtacgagccttgtgtcatttgctgctgcaagatggcctccctcggcgacgacctgctgcgggtcgtcaaccaactgcaggacctggtcttcaacacgatcggcaacgatagcctcgacctcccgcaaatcgtcgttgtcggctctcagtccgcaggcaagtcctcggtcctcgaaaacattgtcggccgtgactttctgccccgcggcagcggtatcgtcactcgccgccctcttatcctgcagctcatcaatgtcgaggaggacgagtccgagtccaacgacacggttcacgtctcataccaaaaccccacccaggccagacgctctgagtgggccgaattccatcacatccccggccggcggttcacggatttcggcgacgtcaagcgcgagattgagaacgagacgtcacgagtggctggcaacaacaaaggcatcaaccgacagcccatcaacctcaaaatctactcccctcacgtcctgaacttgaccttggtcgacctgcctggtcttaccaaggtgcccattggcgaccagccgccagacatcgagaagcaaactcggacgctcatctccgagtttatcgctaagcccaacagcatcattctagccgtttctccggcaaacgtcgacattgtcaactcggaagctctgaagcttgccagacatgtcgaccccttgggaaggaggaccatcggcgtcctgaccaaggtggacttgatggaccatggcaccaacgccatggacatcctcactggccgagtctaccccttgaagctgggctttatcggagtcgtcaaccgatcccagcaagatatccagggcaacaagcctatggaggatgccctgaaagccgaaatggacttcttccgccaccatcccgcctaccgaaacatcgcggtaaaatgcggcacccagttcttggctaagacgctcaaccagaccctgatgagccacatccgggagcgtctgcccgatatcaaagcccgcctcaacaccctaatggggcagacacaacaagagctggcgagctatggagacaaccatttcagcggcaaggagcaccggggctcgatgattctccagctcatgaccaagttcgcctccgccttcgtttcgtccatcgacggtacctcgacagagatatctaccaaagagctctccggcggtgcccgcatatactacatcttcaactcggtgttcggaagtgcattggagaccatcgaccctacttcgaacctctcggctctggacatccgcacggccattcgcaactctactggaccccgacccagtcttttcgttcctgaaatggcattcgatctccttgtcaaaccacaaatcaagctgcttgagatcccttcacaacgctgtgtcgagcttgtatatgaagagctcatcaagatatgccacacatgcggctcaaccgagcttctgcgttttccaaagctgcaggccaagctgatcgaagttgtctcggacttgttgcgagaaagacttggcccagcctcgaactacgtggaatctttgatttccatccagcgcgcctacatcaataccaaccacccaaatttcctgggcgctgctgcggccatgagccacgtcgtgagcaacaggcaagaccaagaaaggaagcgcctaatccaggaggagcgcgggcggcgcgagaaacgacggatgaaggagctggaggccaacggcactgaaactccggaagacgacgacgccgccagcaagggcgacgcccccagttcccgaaagcagctcgctaaaggatcgcgcagcatgtcaccagccgtccgcgagaatggcagcattgcgtccgcggtgaacggcacaaggcccgcgtcgccgtccagggccgggggcggtcctcgagataccttccttacctacttctttggcaaagatggccctactcagcctggcggcgcaggtgctcctacgtccctgccgcgtcacgtcagccagtctattgaacccagcttcagccaaagtattcgtcggagcgaggaaaagctctcccaccgccctgccccgtccccgctaggccgagagcctgagagtccagcggcgaccgaattcggccacccgggcatatttgggtccgagaataccgaaccggccttgaccgaccgcgaggccatggagacggagctcatccgcgcgctcatttcgtcctatttcaacattgtacgcgaaaccatcgctgaccaggttcccaaggccgtcatgcacctcctcgtcaaccacagcaaagatgtggtgcagaaccgccttgtgagcgagctttacaaggaggccctcttcgaggatctgctctatgaagatgacggcgttaaaaaggaacgcgagaagtgcgaggagctcctgcaaacctaccgggaagcatccaaaatcattggcgaagtgttatagatagatgcttcacctacgacccctcacgagagcactctatgggcagggggcgcattatgaaacgacgggcctatctttgctttgacgcatgtacatctagatggcgaggtccggggctgcttcttcgtatggttggttgaggcaaagctacagcgtttacatctgtacatattcagcgaaagtcacggcaaccgtccctactcggtatgtaacgaagagtcacgttctccatcctcggatctacccatcgcactgtcgccctcgattccatatgcgtggaggggaaagatgtcggaatcactgaactttgtgtcgtagtggttaagtgtgttgtattgtcgg

SEQ ID NO: 13820 - DNA, 3102 bp, Oryza sativa
  ref <308>: DATABASE ACCESSION NUMBER: AK111168
  ref <309>: DATABASE ENTRY DATE: 2001-12-06
agcgagccaaaccacagcctgcatttcgagcgcttctttcgttcacggcttgcgtacgccgctccattcctgggtgctgtatcctatccacagctggccgatccgccatcatgtccagccggcctgaacttcgtctcgacgacgaggtcggcttcatacgctacttcaagtccttaccggcagtcggcgacgacacggtcagagtctttgaccgaggcgatttcttcacggcccacggtgaagatgccaacttcatcgcgtgaactgtctacaaaaccacctcggtggtacgccagctcggccgcaacgatgccagcgggctcccctccgtcaccatgactgtcaccgtcttccgtcagttcctccgagaagcgctgttcaaattgggcaagcgcattgagatctttgcgagtcccaacgggaggatgaactggaaggtggtgaagcaagcctctccaggcaacctacaggatgttgaggaggacctgggcggcttcgagtccgcacccatgattctggcggtcaagatctcggtcaaagcgtcggaagccccaagtgtcggtgtatgctttgccgacgccagtgtcagggagctgggagtcagcgagttcttggacaatgacctcttttcgaactttgaggctctcctgatccagcttggcgtcaaagagtgccttctccagatcgacaaggccgagaaggacaaggatccggccttggtcaaactgcgccagattatcaccaactgcggtgtggctatgtcggagaggccggctggggactttggaaccaaggacgtcgagcaagacctcgcgcgcctcttgaaagacgagaagtcaacagcccagctcccgcaaaccgagttgaagttggccatgggttctgccgcggcattgatcaagtacctcagtgtgctccaaggcccctccaactttggccagtaccagctctatcagcatgatctgacccatttcatgaagctggacgccgccgccctcaaagccctgaacctcatgccgggcgcgcgcgatggctccaagaacatgagtctgtatgggctgctcaaccattgcagaacagcggccggaagccgcttgctgtcgcagtggctgaagcagccccttatgagccgagatgagatcgaaaaacggctgcagctcgtcgaagcgtttgtgaacgatacggaacttcgacagaccatgcaagaggagcacttgaaatcggtccctgacttgtatcgtctggccaagcggttccagcgcaacaaggccaatctggaagatgttgttcgagcataccaggttgtaattcgccttcctggcttcctgggctccttcgaggccgtgatggacgagaagtacaaggatccgatagacgaggtgtacacccagaagcttcggcagttttcggatagtcttggaaagctggccgagatggttgaaacaaccgtcgacctcgatgctcttgacaaccacgagttcatcatcaaacccgagttcgacgagagtctgcgcgttattcgcaagcggctggacaaaatgagatcggatatggaccgcgagttccgcaatgccgcggatgaccttggccaggaggagaacaagaagattttcctggagaaccacaaggtccacgggtggtgcatgcgattgaccaggacggaggctggctgcatccgcaaccattcgaaatacaaggagtgctcgacgcagaagaacggtgtttacttcaccaccaacacgctgcaggcacttcgccgcgaattcgaccagctgtcggagaactacaacagaactcaaagcagtctggtcaacgaggtcatcaccgtggcagcctcgtactgtcccgttctcgagcagctggccggagtactcgctcatcttgatgtgattgtcgccttcgctcactgctcggtgcacgcgcccacatcctatgtccgccccaagattcatcctcggggcgaaggacagacgattctgaccgaagcgcgccacccttgcatggaaatgcaggacgatgttcagttcatcaccaacgacgtcgagctcactcgtgaccagtcctctttcctcgtcatcacgggtcccaacatgggtggcaagtcgacgtacatccgacagatcggcgtcgtcgctttgattgctcagattggctgcttcgtgccctgtaccgaggctgagctgaccatctttgacgccatcctcgcgcgtgtgggtgctagcgattcgcaactcaagggcgtctcgaccttcatggccgaaatgctggagactgccaacatactgaaatctgccaccaaggagtccctcatcatcattgatgagctgggccgtggtacatcgacctatgacggcttcggcctggcttgggccatctcggagcacattgtgaaagagattggctgctttgctatgtttgccacccacttccacgagctgacggccctcgccgatcagtacccccaagtccgtaacctgcacgttaccgcgcacatatccggtgccagcatggccagcaccgccgacaaacgggaagttactccgctctacaaggtcgagccgggcatctgcgatcagtcctttggaattcacgtggccgagctcgtccgcttccccgacaaggtcatccgcatggcgaagcgcaaggccgatgagctggaggacttcacgggcaagcacgaacagaacggcctgggtgccggctacagcaaagacgatgtcgaagagggcagcgcgcggctcaaggaagttctggtccgctggaaggacgaggtcaaggatggcaacatgagccgcgaggagatggtgcagaagatgagagagctggtccgagccgaccaaaccttgctctccaatcctttcttcaaatctgtcaaggctttgtaaacgatcgggcgtgcggtcccataccccgactcggaaaatgggcattggggaagaggacaggatcggaacatgaaggacaagagatctgatatgactgcttcctggtaagcttggcgttgggttttggtattagtccagggactggacctgggcgttattcatccggttgtgctctagaacgagtatgcactgtacctgtcaatgatgcattccaaag

SEQ ID NO: 13821 - DNA, 3063 bp, Oryza sativa
  ref <308>: DATABASE ACCESSION NUMBER: AK111169
  ref <309>: DATABASE ENTRY DATE: 2001-12-06
actgccgtctcactacatactccatctcgcctgccttcgacatcgtgggccgcctgcactagcttccgtccacatcaggagcctggtcctattgcggcgtctgcctaccctgccatcatgtcgttcaagaaggacgaggaggtcggctccaccggcttctaccaggacaagacttcggtcatccaggaagctcgtgtcttcaacgagacccccatcagtcctcgaaaatgccgcatcctcctcacaaaggtcatctacctcctctacatgggcgagtccttcagccgacaggaggccaccaccctcttcttcggcgccaccaagctcttccagcacaaggaccctgcgctcagacagatgatctatctcgccatcaaggagctctgccccttcgccgacgacgtcatcatggtcactgcctccatcatgaaggatatgcagcccaacgtagaggtcatctaccgccccaacgccatccgtggcctcagccgagtcgtcgacccttccatggtccaaggtctcgagcgattcttcaagtctgccatcgtcgacaagaacacctccatcagctccgccgcccttgtttccgcctaccagctccagatcgccgccagagacgtcgtccgcaggtggggcaacgaggctcaggaagccatcaactccaagagctcgtctggcgccagcttctccagtggctttgccggcgctggcagctacctcggcttctccggctacggctcgtcgcaggcccagtctcaaagcaactaccaggccgtcgccagcagcagctacatcacccagtaccatgccctcggtcttctctacctcattcgtcagggcgaccgcatggccgtcaccaagcttgtgcagcagctcggcggcggccgcggcggagcatccagcggccagggtagcgtcctcaggagtccctacgccatttgcatgctcgtccgctacgccgccaaggtcgccgaggaggaccccaacttgcgcgcacccatgatggagctcctcgaaggctggctccgacacaagagcgacatggtcaactacgaagccgcgcgcgtcatctgtgagatgaagaacgtctccacccaggatctctaccgcccgatcgccgttctgcagctcttcctctcgagccccaagtcgacgctcaagttcgccgccatccgcaccctcgccaagctcgcgcagacgcagcccgctgccgtacagacgtgcaacgtggacatggagaacctcatcaccgacaccaacaggagcatcgctacctatgccatcaccaccctgctcaagaccggcaacgaggcttccgtcgaccgtctcatgaagcagatcagcggcttcatgtccgagatcagcgacgagttcaaggtgatcgtcgtcgacgccatccgcagcttgtgcctcaagttcccgtccaagcagaccgtcatgctcagcttccttgccggcgtcctccgcgacgagggcggcttcgagtacaagcgcgccgtggtcgaggccatctttgacatgatcaagttcatcggcgactgcaaggagaccgcgctcgcgcacctctgcgagttcatcgaggactgcgaattcaccaagctcagcgtgcgcatcttgcatctgctcggcgtcgagggtcccaagatgccccagccccacaagtacatccgctacatctacaaccgcgtcatcctcgagaacgccatcgtgcgcgccgctgccgtcagctcgctcgccaaattcggtatcgccgacaagtcgctcaacgcgaggatcaaggtgctgctcgagcgatgcctcgacgacgtcgacgacgaggtgcgcgaccgtgccgccatgtacttgcgcgtcctgcgcgagtcgagactcgccgccaaggtcgtcaacgacgagtcgagctacaagctcacggcgctcgagtcggctttgcagtcgtacgtctcggacccctcgtcttcgacgagcggattcgacatcaccaaaatcccccgcgtcacgcgcgaggaggcgcgccaagaggcgctgcgggccaagagcgaggctacagccagcgtggcgatggctgccgacagctcgcaaagcgtgcacgccaactcgaacaagggtgcttcgacatccaaggtgacgtcttcgggcgactcggaaagcctgtacgcccagcagcttgcggcggtgccgcagtttgccgagtacgggccggtgctcaagagctcgtccaaggctgttgagctcaccgagtccgagaccgagtatgtggtgagcgcggtcaagcatgtctttgccgagcacgtggtgattcagtacaacgtcaccaacacgctgccggataccgtgctggagaacgtggcggtggtggtgggtggagctgccgaggctggcttgcatgaggatttcatcgtcacagtgcctgcgctgtcggcgcaaaacccgagcggcacagtctacgtctcgttcacacgcgaaggaggcgcgacggactacgcgcaggctacgctgtccaacacgctgcgctttgtgtcgaaggaggtggacccgtcgtcgggcgagcccgaggaggagggatacgacgacgaataccagaccgaagagctcgagctcggcgtcgcggactacgtcaagccggtgtacgccaactttagcgaggagtgggacaagctcgcgtcggcgccgtcggcgaccgagacgtttgcgcttactgcactcgacggcctcaagacggcgtgcgatacgctgatcgagctgatgggcatgatgccactgggaggcaccgagtcgccatcgtcgacgtcggtgcatacgctcaccctgtcgggagccgtggcgaacccgggcaagcccgtcaaggcgctggctcgttgcaggatgacgtttgcctcgggccagggtgtgacgatggagctgtcggtgcgcgccgactcggacgaagcgtgccagctcatcatgagcgccatcgcataaagcgcctgattgctgcgtcgcttggctcacgttgttccactcatcccttcccctacaccttgcccctttcccccatttgccaaatcgtgaacttgttccacaaac

SEQ ID NO: 13822 - DNA, 3215 bp, Oryza sativa
  ref <308>: DATABASE ACCESSION NUMBER: AK111170
  ref <309>: DATABASE ENTRY DATE: 2001-12-06
attccattcgacaaactcgacatcgcgctgcgacgctccggccgacgcaacgcaccgctacaaacgcattctcgagtccacctgtgctcacctcggtcgttcctacaccgactcggtcgactcgtcaatgtgcgcggctttggccagcattcgctcttttcacctctcgtgagcttcggcattggccgagcatcatatcgctccttctttgcaacgcaaccaaatccttccatcggccacggccggtcaacgtctcagctgcaattcagccttcgcctcgtccggtcctcggcaagtccgaaccaagaatcggctcgattccgcacaggtgcttccgcctacatcgcttcgccttgctccatccttacgcctcgtaagcttctcttcgccctcttccgtgcgtgtcgaagacgagtgtcgattgctcgctcgaactcgtctgcacccatccttttccaacgtgacaatcgcccggtaaggccgaacgacaatctcacgcacaacgccgaaaagatcgctgtcgacagctcctgcacccgcacttgccctctgcgcagcatcttctggcctgttgccggagcaggaacgtagcgctcaagcaggccgtcacgcccatcattgatacccttggtgcgccaccgacgctcgccactcgcagctccaggacgccgttcggttgcctctgtggtccgcctttgctcaacatgaacggcatggaacacggtcaaagctttgaccccgcctttgatgccttctttcaggctccgtcctcatcctctccacatcaccaacttcagcattccgccgccggctcgcctgcgtccatccagcagatcggcaacatgagcgcagccgactcttcgctcagtctgtacgctcaagacacctcggcgatgcgcccgagctcctcgtcgggcggcaatctccatctcaacatctccaacctctcggtcacgggcggtgaagccgacgcctcacacgcacaggcacaccagcagcagggcgtcgccagctcgctcagtttcgcgcctaacaacacggcctcacctcagtccaccctcgcgtcaccggccgatgccactgcttcattcaacatgcccagcaccacatcaacctcgccgctcttgcatcctgatgcaccggtgggcacagccacagaagcccacctcggcgttcctaccgcatcgtctcctctcaagaccgagtacaacctcggaaacgagtcggctggcctgacgtcgacgatgcgctcctacagctctacttcgatcaaaagcgccgcgggatcgcagaatgccgacagcccaagctccggcttcggtgccggcggcgcggcaaatcagagcatgggtgacgtctcgatcgatgatgccaatgtcgctagccagtcggaagccgagctggcggccgagaaacgccaaagcagcaaatttgtctacaagctcttccgcatggtcagcgaccccgactaccagcatctcatcagctggaaccgcaacggcaccagcgtcatggtgtgcaactttgacgagttcgccaaggaggtgctgggcaagcactttaagcacagcaacttttccagctttatccgacagctgaacatgtacggcttctacaaggtgaacaagacgcctcgcggccatcgacagtcggtggacgcgcagatctgggagttctcgcatcccaagttcctgcgcggccgttcggatttgctcgatgacatccgtaggaaggccctggactctgaacacgcgcgggtcgaagctcgcgatctgcagtacagcgtcagtgtggggcagatgcagctgcgtcagcaggtcgacgagatgcaattccggctcgaggagctcacagagcagaacatggcgctgcgaacctttacaacccaactccgagacgtgcttggcctggtgctcgagcacgtcaaaaagacgagcggcggcaacattggtttcgacgtgcgcatccccacgctggacctgccctcgcccatgccgccgcaaggcctgtggacgccgcagggtcacgatggcccgcctatctttgtcaccgagcccgagttcggcgctggtgtcggaccgggtgggctgaggatgggcccgacgcctggcatggtgcctgggccgggccacgctccgccaccgatgcatgcaccccaacaccactttggcggtgcgccggatgggttcgccatgacgggcacgcccatctcgcgtcgcgtgtcggcgagctcggcgcatagcgagagcatgcttgccatgaacggctcgcccatgcacggatcgatgcagggtgagatgggcatgctgcctgctggtctgccgcagcgctcggcttctttcggcgagggacagatgcctgcaccccacttcaatatcggccgcggcggcgtcaaccgaccgggcctggcggggctcgcaattgacacttcggctgcatctggcatgtttggcggcatgcatccgagcgtgagcccgacatcagcagggctatcggcaagcaatgcagggctgggcgtgatgagcatgccgccgtcgccgctgacgccacagcatcaagcgatgatggcagcgatcaacactccgctgcctccgtcgccggcgccggggtcattggcgggtggccagttcaagccgttcgatggctcgccgttcgtgaccaataacggattcccctcgtacggccatggtctttctcttgccgaccagagcttctttgggccggaggccgatggtcccaatgccaaggcgatgcgcacgcccatgaagcacacggcgtccaattctgggcctagcgcgcagggcacgccagtgctcatgcagtcaacgtcgcccgggcttgccaagcgcaagtcgccaatctgaacgcgatgtcttctttgatacccgggtggctggcgcacgtcgtcgccatcccagtgattctccccttcgtttgtctccacaatcctttcccctcaaggacatcccctgaacccaacttctcttcttccctctccacgattgtgcctacgctggcatttcccaccatcttggccgactgtggctttcccctcagcactgctggcacagtgtgcagcggggctagtgtcgggagagtctgaccacgctcgttttttcgatttgatcccccctctgtctctccgccttgcggcctgtacaagttcggactctcgtcgtcgtttaatgcccgaagtcaccttctgtacctttttt

SEQ ID NO: 13823 - DNA, 2784 bp, Oryza sativa
  ref <308>: DATABASE ACCESSION NUMBER: AK111171
  ref <309>: DATABASE ENTRY DATE: 2001-12-06
atctcagacagcccctctcttccgtctggattaggatcctagctcttggccggcaccatgaacggcatcaagcaagactccccacacggggcgtccgccgccgccgacgcaccgtccaacctctccgagaaagcgctgcctcctatccagagcgctctccactccgcccaaaaggcagccaaggacgccgtcggatcggcacgcgacgccacttcttcgtcgtctcgcaccaccgagtatcccgtgccgcagtcgcatcccgactcgcagatcgccgattacgtcctcgtattccagcacatcgccaaaaagtaccttcgctccagcacaaaggtgcccgccgcagagcgttccaagatcgcagcagagtacgacgcactcgtacagcgcatccgtgacactggcctccacgtaaccagccgcgaaggttccaaaggctccggtcagatcttactctttgtaaaggcagactcgcagctcctccatcagctcgcccggcaggaggcgctctccgactacctccatggcgtgctctccgtacagccgcccccgccgcgctcctcgagcctcgccgacgcatcatttcaaaagcagcagccgtcgtcgctccacctcacgcccgcatcgcgcctccgtctcgtcgactcgctcctcacgctgcccagcctcgcctcgcacgccgtcaagaatgcagccggcagctctcaggtgccctcgggcgctggtctcaggctcggcctcaaagagttcccgcatctcgtcgacatgagcgccatccacgaccccgcgtacaactcggcatggatgaagcgctggtcgcacacctcgcccgccaagctcttctcgggcatcggcctcgcagacctcgactcgatccgcgaacactttggcgaggacgtggcgctctactttggcttcctcaacttctacttccaggcgctcgcccccgccgcgctgctcggcctcgccttctggctcctcggtaggcccttctcgcccgtctactcgctcggcctcgtctcgtggtcctgcctctttgtcgaactgtggcgcatgaaggaacgcaagctcgccgtgcgctggggcacactcggcgtctcccaagtcgaccgcaggcgccacgactttgtgccgcgcaccacgcgcatcgatccagccaccgaagagcccgaggaggtctttgagtggtggcgccgcgaacttcgcgtcatcctctcgctgcccatcgtcgccttcttcgcctccgtgctggcggctaccatgacgctcatgtttgtcgtcgagatcttcgtcacccagctctaccacggcccactcaagcaggccgtgcccttcatccctaccgcgctgctcgtcgtcgccgtgccccagatcatcgccgcctggcaggccaccgcggtcgccatcacaaagtgggagaatcaccacagcgcaaagtcgtacgactactcgctcacgctcaagcgctttgccatgcaggccatcaccgcctacggcgcactcaccctctccgcctacatctacatcccctttggcgagtcgatcatggagaccatggtgcagcgcggcttcttccgcgactcgatccagcacgccatccgcacgggcaacatcagtccaaagggcatcgacttccacatcaacccggaccgcatgcacacccagctcttcgccgtcagcgtcaccagccagttcgtcaacgcctttaccgagcttgcgctgcccgtgctcatgcgcaaattcgccgagtggcgcggggagcgcgccgcccaaaagaacgccgacggctcatcgcagcgtcagcctcagcgccaggactcggcgtcgtcctctgccccgtcctcgggcgatgtgacgccgctcgagcccggtgcggccgacggtggcaaagaggagtcggagcggcgcttcgtctcgcgcgtgcgcaaggagctgcagcttccgccgtacgatctgtttggcgactacgcagagatggcgacgcagtttggctacattacgctctggtccgtcgtgtggccgctgtcgcccgtgatggggtttgtcaacaactttttcgagctgcgctcggatgcggccaagatcagcgtgaacaaccgacgtcccgtgcccgtacgggccgagacgatcgggccctggctcgaggcgtttggctttatcgcgtggttgggtgcgctcaacaatgccgcgctcgtctacctcttccagcagtcggagcatgcgcatctcgagggccattcgcggtacgagaccaccatgcgcacgcacctccatccttcgcgcgccaatctcacgctcgccgacgatgcacagtcgcgattcagcttctcaaggctcgtgccgtcgcacatcccaacgtcgggtgcggcgggcgcgatcgtggcggcggtgctggtggcgctgttggcggagcatgtgtatgcgctggtcaggtcgggcattcggcacatcctcgagcggctcatctggcgcggctcgcacgaggagatggtcgtccggcgcagagagtgggtcctgcacgtcgagacgctcaagtcgcacgtgcacggccagatcgacgcagctgagggcgggctcgagagcatccgcgaatcgctctcgggcgacgtacgttccgcagccggattctggagcaaggacaaggacgtcggcgccacggccatccacaactcgggcaagaccgaataagctccctccccctcctcctcatcctccttgcatctcattgcggcttgatgcttgtttcatatcgactcttggaatggacgtgcgtgagtcgaaaag

SEQ ID NO: 13824 - DNA, 3442 bp, Oryza sativa
  ref <308>: DATABASE ACCESSION NUMBER: AK111172
  ref <309>: DATABASE ENTRY DATE: 2001-12-06
atcaggacatcatcttcatcggctggctctaccgctacgagctttgtccctctgcgttcaagtcgaggtccgagccacgctttcacgtcgcaggcactcgcagcaccgcagctccgtcggctgcgcttggattccgcaaccaaaaccgtctcgactgccccgcctccctttaaacgtctttggtccgcgacgccggccgcattccaccttgctcgtatgccggcaccgcgctgatcgcagcctcttccgcgtcaagctattgacgtccgccttggctcgcactcactaggcactatccatcatgggccacgctcagtcccgccaacagcaagaccaggcccgccgcgagcgcgcccgcatgggtcgagccgcagcatcggctcgcacgttaccttcatctgacagccaagatcatgtcccagatgcagtggttgcagttgctgatgatgacgccagctctggccgaaagcgaagtcgaagctccacctcacctgcgcctgcgaccgacccgactgcggtgagcgagcctctccgtcaacggcgtaggagatctccagacgcccctgctagctcctccgcctcttcgtccgccgatgtcgcttctcaacctgctgcctcggctcctgctgacgagcccatgcatctcgaatcgcaagagtcacgctctcctcttccgtccaccacggctcccgagtcatccgagcccctggtcgacgccaatgcagcttccctgaccgatacttccgctcctgccacactcacctccgagccatcctcgacagaagccgcatccaccccagacgccggcgccgaacctagcaacgccacgcctcctccgcatctcgacgctttgcgccaggagagggagcgtgctcgacaacgcatcctcgaagctctcggctctcgtgcccccatttcatcgccagcctcggtctcttcccccattcagccagcggccaccacctctaccactgcttcggccaccacaccctcgccacgtccacatccattggcatccgccacgcttgcagcgctactaggaacgatggccgccgcacaaactgcaaccggtgaagcagcgtcgcagcctgccgcagccgcatccaatctcgcagcaggtgcaaccccttctcagaactccaacgcacagccaaaccaagctcagcaaccgtcgcgaccccacaccatccgcgtgcctctgcagccagagatgatcagcggaacatccatggtggttcaaggcgcgctcgtcgcgcgcaccgttgccagccgtcccgcttcctccgaggcttctgcgggcgatgacgccgacgcttcgactgcttcggatgccccacgcgcacccgagtctgccttctcgtcccgcacagaagcaccgcgcgactccaacaaccccatcggtcttcctcccggcgctctggatggagacggtctcagaggcgccgtgacgctggaagagcaagccgtgatgctcagtcgaatcctgggtatcgccgctgcagccacggcagcatcgcttctcaacgcgtccgagtctcatcatgtggatccgtcgctacttcagaccagtctgcgccgcccgttcgaacggctgagccaggcatccaccgaccgcaacgagcgctggctcgccgactggcaacgctcgcgcaccgttgaccgtccgtcgtcctcgagcggcggcggcacagcgtcggattcctcttcggcctcgtccagtctcggaaacggccttcgcggaagattggctgctctttcgcgccgcgtccacagtgcttccagcacgtcggaacttgcgccgacaggtggaattgaaagcgttgcgagccaaccggctagctcctcgaacgatcctacagaggcacccggatcacaatcgtctggcgaccaagtcgatgcaggccaagattcgagccaagattcgaggcagcaagagatcatcgcgcatctcctggacgcagccgagcgcgaggcatcttcgcagaggcaacgcacggattccaatgcgtcctcggctcaggatcgcgctgtgccgccgcaaagtccgtctcgaggcagcctctctcggctcgtccgatcgacgttgggcacgttcatgcatccgagccgtcttctgcccacgcgccagtcgcgctctgaaggctcgcagacgaatgactcgagttcagaccgagatggtcagtcggccgcatcctcttccgacgcatcagaggcgcccacggctgatttctcgctcggtcccaacgatgtcgtgggcacgctgcgccaggtgcgaaacggcgtactgccagacggcgtgccaggcagctttggcagcttcctcaatcatctggttcgcgatctcatggctgcggtgcagctcatgcgcccgtcggaagaagctgcgcccgctcaacccgaggcgcacacgaccaactactttgagcatgccacacaagctcagaccacctcgggtgccgaggtgcttgacggcgaaacgtcggagcctgcagcgacagatgccacagctgcgtcgaatgagtcgacgcagggccaacaggatcagcaggcggacgacggtgtcggcgcggccgaaacgcaggcgcggcgggatcgggacttccagaacggcaatctgtcgttcttccgcctgttccggtttgatcccgtggcgccgtcgcagctggtgccgtgcatcgtcgtgggcgtgcgcagtctcaacgtgaccgagcgcttcggagaggagatgatgggcgcgcgagcacctggtccaggccgagatgccggcggcacacgccagcaaacctcacgtccgacgacgctgggctcgacgcggacgacggaagcctcgcctcgtgcgcgcgctcagtccgagggtgcgcctgctactgcctccgtgcgggacgatgcgaccgatgcgaacggcgaagagctgccagcgtcgcgctttatgctgtttgtatcgggtgggcgatatcctgcgaaccacccgctgcttacgtcgaatccggcgacagcaggacgcgatctgatgatcctcatggatctgctgagcacgatgcaggccatgcagaacaagccgagcaccgtgacgcagcaggagatcgacgctgccgccgacctgtccaagatccgcggcagcgaggtggcggctctggtgggtgagggaaagatcaccgagaatatggccgagcgctgcctggtgtgtctggaggactggaagcaggacgacgagtgccgtgtgctggcgtgtcgacatgccttccatacaacgtgtgtggatcgatggatgaccacctcgtccaatacctgtccgatgtgtcgtcgacagggcgtcacaaaggacggccgacgcgcgggcgacgagactgccgactcgcagcgtgccgcccaggcttgagcgatcatctcattttcctataatcaattgtacttctagcgcaatgagacacatttagtcgtc

SEQ ID NO: 13825 - DNA, 3465 bp, Oryza sativa
  ref <308>: DATABASE ACCESSION NUMBER: AK111173
  ref <309>: DATABASE ENTRY DATE: 2001-12-06
ttatgctcgtcgccttcgagagcaccgtggtctggcagcgccagcgcaccctgaacgagttccgcggcatgagcatcaaaccctacgacatgtgggtttaccgactatgccggtggacggagatccggagtgacaagctcctccccggcgacttggtatcagcgggtcgcaccgaagaggacagcggcgtcgcttgcgacatgcttctggttgaaggcactgccattgtcaacgaggccatgctttcgggcgaaagtactcccctcctgaaggactccattcagcttcgccctggcgacgtcgtcatcgacagcgaaggccttgacaagaactccttcctctggggcggcaccaaggttctgcagattacgcacggaaaccccgacgaggagaagcccaagcttgcttccggagtgccaccgccccctgacaacggagcgatggctattgttctgaagacgggtttcgaaacgtctcagggcagccttgttcgcaccatgatttactcgaccgagcgtgtatcggcaaacaatgccgaggcactctttttcatcctgtttctccttatcttcgccattgccgcctcttggtatgtctgggatgagggcgtcaagaaggaccgcaagcgttccaaattgctcctggactgcgtcttgatcgtcaccagtgtcgtccctccggagttgcccatggagttgagcttggccgtcaacactagtcttgcggctttggccaagtttgccatcttctgtaccgagcctttccgcattcccttcgccggccgcgttgacattgcttgtttcgacaagactggcacactgaccggtgaggaccttgttgtcgaaggtattgccggtcttgggcttggccattctggagccaatactcccgtggagtcggatggtgctcacagccacatgactgccgtccaacacgccggcatgcacaccactttggtgttggcctcggcccatgcacttgtcaagcttgatgagggggacatcgttggcgaccctatggagaaggctaccctggctgcactgggctggcaactcggcaagaatgatactttgaagacgctccctgccgttgcggcagctggtgctacctccggctcggttcaggtaaagcgacgcttccaattctcttcggccctcaagcgccagagctccgtggccacggttcacgccgtcgatccgaagacgggcgacaagctgaagggcactttcgtcggcgtcaagggcgccccagagacaatcatgaagatgctttcggttataccaaaggactacgaggaaacttacaagtacttcacgcgctgcggttcccgcgttctggccctggcctacaagcagttgacgacggacgccgaactcggttctggcaagatcaacgaacttaagcgggaaaaggtcgaggccgagctcacttttgccggtttcttggtgctccaatgccccctcaaggacgatgccaaagagtctgtgcgaatgctgaacgagagcagtcaccgcgttgttatgatcacgggtgacaaccccctcactgcggtccatgtcgctcgcgaagtggagattgttgaccgggacgttctgattcttgatgcccccgagaacaatgacgccggcgaccaattggtctggcggagcgtcgacgaccaggtttccatcaacgtcgacccctccaagccgattgacccccagattattgagaccaaggatatctgtgtgaccggatacgccttgagcatgctgaagggcaaccctacggcttggcgaaccattctgcggtacacttgggtctacgctcgtgtctcccccaaacagaaggaagagatcctgcttggcttgaaggacatgggatactacactctgatggctggcgatggaacgaacgatgttggcgcgttgaagcaggctcacattggtgttgccttgctgaacggtacccaggacgatctggtgcgaatcgccgagcactcgaggaacactagaatgaaggagatgtaccagaagcaggtggacctcgtgaagcgcttcaaccagcccgcaccgcctgttcccgtcgtcatcgctcacctttaccctccgggaccttctaaccctcactggcaaaaggctgtcgagcgcgaggcccaaaagaagggcatctcgccgcaggaatacgccaagcagaacgggcacgacatcgaacaaaccatcacttctcctgctgctcagcagctgatgaacaacgaccccaggacggccaggcaacgcgaggccatgaacaaggcttccgggctggctgacaagatgacctcgacgatgatggaacaggaaatgtcggccgaggacgagcccccgactctcaagctgggcgatgcctcggttgccgcccccttcactagcaagctccgcaatgtcgtcgccattcccaacatcattcgccaaggccgatgcaccctcgtggccacgattcagatgtacaagattctggctctcaactgtctgatcagcgcctacagtctcagtgtcttgtacctggagggcatcaagtttggcgatggtcagattactatcagcggcatgctcatgtcggtttgtttcttgtccatctcgcgtgcgaagtcggtagagggcctttccaaggaacgtccccagcctaacatcttcaacttctacatcatcggctctattcttggccagttcgccgttcacatcgcgaccttgatctacatggcccgcttcgtcgagaactttgaggagaaggatcccaatgtcgacctggaggccgagttcaagccgagtctgctcaacagtgccgtctacctgcttcagctgatccagcaaatctcgacttttgccgtcaactaccagggccggcccttccgcgagtccttgtcggagaacaagggcatgtattacggaattctcggtgttacaggcattgcattcgcctgctccacggagctcgttcccgagttgaacgagcagatgaagctggtccccttcaaatacgagttcaaggcgaccttgacgacggtcatgatactggactatgtcggttgctacctaattgagattgttctcaagagactgttcagcgacttccggccccgcgacattgcgctgcgacggaaggatcagctcaagagagaggaggaccgcaaggccatcgagcgcgcggagaaggaggcaaaggaggagcaggcacgcgtcgccaaggtggaggagttcgagcgaaagctggaagagagaaagaggaagatccgggagtggggtcagggaaacgctgctccggcaacagcagcgcaatagacggcggtatggagcaagccacgtgggctcaaggggcatgcattagaggggtgtctgggagtaggtatatgcaatccactgcggtttctgtagacttggtctgaggcacccgtacaaatgaccaggtgaccggctcattggacagtggttcatctgagacgcaagc

SEQ ID NO: 13826 - DNA, 2978 bp, Oryza sativa
  ref <308>: DATABASE ACCESSION NUMBER: AK111174
  ref <309>: DATABASE ENTRY DATE: 2001-12-06
agctatcccatccgctccacctcttccacccaccctccgcattcctagacatccacacagcaccccggtcttcacagtactggcatcactgccattcaacccaacaccaatagatccggccgacaccctgatcaggtagccaatatgtcggcgccgtggactcgcgtgcctggcggtcccgttccaccatctgctgcaggcagccgaggttcagacgacaatgctacacttcacaatcccgttcgcacctatgacgctcccctcgccgctcaaggcgtcagctcgtcgtcgtactacgacaacgtcgccgactatccttccgaaaaggagtacgaaaactacccgggcaactacggcggctcgggtcagtggaccaacgacgctggctccgacgcatccaacacctatcctccaactcaggctggtgccgctacgcgacacaagcaacagttttcgcactccaccgacatgtcgaggcgcttcgaggctggtgccaacaaggcgcaacccgagtccgtgtccaagcgtcccggcttcaagcgccaggatagcgactcctgggagcgtctcctcaaaggcgcaggctactcgcaggacaacgccaacgcaagcttcgtcggtctcaacggcaagcacggtgcaggccctcagcttggccatccctccgtccgcttgctcctctacatcctcatccccaccgccctcttctggatcccaggcatccttgccctcctcgtctacgatgctcgacccgccaaccgattccgcgagcccaaggtactcgatgtcggcatcttctggtggtccatctggctcagctccatctgggtcggctggtgggcctgccgtgtcggcgccatcatgatcccccgcgtcctccgatggaccgtcggaaacctgcaccaaaagatgcgacgatacaccgagttcctcatcgtcaccgaaaagtacgtcgccttcttcctctggaccattcttctctttgcactctggctcgccatcgtcatcggcaacttccagggcgcagacaaggctgccatcgaggcagctcctttgacacccggcaactcgacctcgaccagcacatcgtcctcttcgtcctctcgcaccacctacatcaacaccaacgatcagagctcgtggccatccacaagcgacatcatgctctccggctaccgactctggttcggcgtctgccttagcgccgccatcctcctcgcggaaaagctcttcatccagggcatcgcctacaacttccatcgcgtctcgtacgaggaccgcatccagacgtccaagttcaacgtcaaggtgctcaccaccctttacgagaattccaagaacctcaaccgcaaagacacgtacatcgctgccgagcaagaagccaagcgcaagtctacggggcttcacctcgcacgtgtccgcttgcgcaagacgggcgccaaggtgcgcgacgtggcgcttcagagcaccagtgtgcttggcaccgtcgccagcgagatcgccggacagggtgtgctgcaggccggcaacccccgctcggtggtcgcctcgtccctcaactcgcgcaagcagacccaggcgctcgcccgaaggatctggtacagcttctgcccgcccggcaagtccgagctgatcgtagacgacatcatccactgcttccccgacgccatcactgccgaggctgcattcgagatctttgaccgcgacctcaacggcgatatcaccaaggacgagctcgaggcggcgtgcatcggcatccaccgcgagcgactggcgctccagctgtccatgcgcgacgtcgactcggctgtgggacgcttggactcgatcttcatgagcgtcttcattctgatctcggccatcatcatcgctgccatgctttccgtcgcattcagcaccctcgtcacgtcgttcggcacgctcattctcggtctctcgtggctcatcggaagcaccgcgcaggagactctcggtgcgatcatcttcctgttcatcaagcacccctacgatgtcggcgaccgcgtcgacgtaggcgaagactcgtacatcgtcaaggaaatgcgactgctcaccaccgtattcaagacgaccaacggcaagaacgtcatgatcagccactcgcagctcgccaccaagcccatcgtcaacctgcgacgctctggcgcgatcgaggagacgttcaagtttgaggtggcctacggcacgacgtttgcacagatcgagagtctgcgcaccaagatggtccactggttggagggcgagaagcgtgacttccttcccggtctcgacatcaacgtggtcgacttcctcgagcagggcagcatgcttctgtcggcaggcatccgatacaagtcgaactggcagcagggcggcctcaaggcgcagcgccgcaaccgatggctgtgccagctcaaggtgttcttggccgagtgcaagatctacggacccaagggcgatccgaacgtggtcaccaccaaccacgtcaccatggtgccctacccgccgcccgacgcgtcgcttactgccaccaccgccgaggcaggcgtgcagaacacgctgggcgcaggcgagcgcgcctaccgcttcatggactcgggagcagccatcggcgggcaggacgtgtttgacgaccttgccggcgatgcaggcactgcacccggcaccgcgccgccctcgcgccccctgtcgccggccaacgcgctcgagcagggccgactgcgcaaccccggcctgcccacatcgtcgtcgggacctgcgccgccgtacgccgccgcacgccgcactgccggcatgggcgagtcgtacgagctgactgaccagccgcgacgcatctgattctcgcatctctgcgaccgccgcgggctggtcccactgacaccagcctattgaggtagctgtgacgtcctcttttcacttttgtatcgcatctcttgcatcacctgcatcgtcaatgcacatggacgctttttccttctcgc

SEQ ID NO: 13827 - DNA, 3120 bp, Oryza sativa
  ref <308>: DATABASE ACCESSION NUMBER: AK111175
  ref <309>: DATABASE ENTRY DATE: 2001-12-06
atcgtgctcaggcctccctcctcactgcgccacaaagcgtttgccggtgcttcaaaaagggcctctcactatccttcgctgcaatcactctcatttcggcttggcaagtgtggcatctgtttcccccaaaacactcgcaacatcttcgatgggagcctgtgcgacggctgtctcggtagccagccatgtcgctcatcgtggatcccgaccatgtaatacactccctgcggcttgcttatctcaagcgtatcgacgatcactatggtccgaggatcatcacgtttccctcggtcaccaatactaatcgcccgaccaccagcaccgccgctagccacggtgacgcgcccaccgcatcagtatcgacatcatcgtccaacacatcgttctttgcatcctcgtccacagcagcacagagagatgatgcaagtggcagaaatggcgcgctgtactcgcactataatccgttcagtgcagatgcctacgttgcggtcgccggcctcacagatgcctcgcgccacccagagctcgagaccatttactcgcccgtgcccaccgtaggcgaggcaggtccctttggcggattcaaccaccgccgagggagcgcacacaagcagtccggcgactacaaagccaacgacgatggtctcgacaagacgcaaccctccacaggcctctcctacacgcagaccatctacgggccaggacgcagcggcgctcttggcatgcgcgtcaacggacgcagggccagcaagcgcgtcagcatcagcggcgcaagcgccaaggcaaccgagatagcagagaaggatgcggcctcaacggaatacgacagcgcggaagcttttgccggcgccgaagccaagcaaagcgatgctggagctcgccaaccacaaccactcgactcgtccgaggcagcagatcgctcacttggaccagcctcggtcgccgccggcgaagcgcagggtacggtgatgggcaagcgcgtcaactttgccgacccgcctcccgtgcattcacgaagctctcttgacgtagaccgttcgtcggaaggccgatccgtgtctccacatgctgccacctcgactgctgggcgcagcgactcagtgtatgcggagggctccaccgagtccaatacggcgctctccagcctgggctcggcaggctcgctccgggacggcagcctgggcctcaccaccatcaatgcggccatcaccggcggactgcactcgccgcactcttcggcgagccagagcatggatccgacgttgacggcacgctcatcgcccgtgctctcgcgtccagctgtgccgccactcggcaacgcacccgggctacccgcaccgcccaagatgatcatctccgccacgggcgatagcgacgacaacagcgatgccgacacgcctgcgcacattctcggcccgtccaagggccgccagcaccgtcgaccgagccactccatcagcacacgccatgcagcacagtcggactacttctcttccatccgcgtgagccgcagccagctcgaaagccggcacgccagtcggcccaaagcgtcgatgctcagctcgatgctgcagaagcaggactcgagcccggagaatccgtttgcggcgctctatgcgggcatcgccggacgctctgccacggcgccgagcatgacagtggagatctactttccatgggcagagggcgggcagccaccatcggcgaacccgccatcgagcggcgcagtgtcggtgcacgccaagaccaagtgcatgaagctcaacatccgcaaggacgcgacgatggaagaggtcatcggctatgggctgtactgctttgtcgaggagcggtggaagcccgagctcgatccgcccggctcgtcgcggcccgagagcgagcgcgaggcgaggctcaccaccatcggctggacgctcatgatcgtcgaagacggcgaggtggacgacgacttcccggccatcgaccagagtctgttgctgggcaagtttggcggcgacgagtttgcgatttgcgaggcaacgccgaatcagatcaagcagcaccgtgatgcctatgcgggcattgcaagaaggacgctggttcggccactggcgcccaacaagacggcggtcaagggagcagcgggtggcgagtcggtcgcggtcagctcggggatggatgcaactcacagcgtgctcgctggaggagccaagagcggggcgacggccatctcggcaaatccagcgctggcatcgcggctgggcgtgcccggtgtgggcgcccaggtgcctgcgggctcagtgatgaacgtgcaaggaacgccgatctttgcgtcgggcgcgctgtcgcgcagtgcgctgggatcctcgtcccagtcgatcttcctgcgcgtgctggtgacgccgaatccagaggtgcggtacaagacgacgttgcaggtgccgtcggacatgtaccttgcggacgtgctcgagatgatctgtcgcaagcgccatctgtcgaatgtagacgactgggcgctgatcgtaccggacaagagcatcgttgtgccgctcgatcggaccgtcgagtcgctgcaggggaatcacgacctggcgctggtgcgacgctcgagcttgggtgcgctcgggggtgcgggtgcgctcagcagctcatctacgaatccgaacgcctccatcttcaaacggtactcggccaactcggacgcgagcgcgttgggaggtcagcccaagtacaccaaggcgctcgacattgcggcggcctacaagagctatacggtgtgccgcaggtcgccgatgtttggtgggcggcacaacgagcgcagcctcacgctggacggcgactggctgcacattatgcctacggacatgaagacgtttggcaaggcggcgtcattccacgtgtcgagcgtggtggcgtgcaagctgtcgagcaagctggccaacgcattcaagctggtcgtctggcgagagtcgccgcgcgataccaagcgctacgactttgaggccgactcgacgcgcatcgcggccgaaatcgtgcgcgaaatcaaccttctccgcagccagaacacgtaaaatcccggcggggggtttttttcccacacctttacccctgtctcggaatgaattctgttttattttc

SEQ ID NO: 13828 - DNA, 2733 bp, Oryza sativa
  ref <308>: DATABASE ACCESSION NUMBER: AK111176
  ref <309>: DATABASE ENTRY DATE: 2001-12-06
ggattcgtcacgttcgtttcgagttgatcgatcttgtgtttaattccaagctcctcttgagcggccgtaattcttgatcgtcgttcccatttgctatagctagctagccatggaggacctgtcgctgtcgtcggagctcgacccggcgctcctctcgacgtcgacgtcgtcgtcgtcgccgccggactccgcctcgccgtccttctccttctaccacccttcgcctcccaactacaccctcgccgtgtccaacctctcatgccgggaccctcgccgcggctccggcggcgccgggttgttctcgtggttgttgggttctttctcgaccagctcgccgccggccaccggcggtgcgggcctcctgaacaacgtgtcgttcacggcctccagctcgcagatcctggccgtcgtcggccccagcggcgccggcaagtcgacgctgctccgcatcctctccggccgcggcaccggcggcgagatcgccgccaggccgcacgcggtggtgtccgtcaacgggcgcgcggtgacctcccgcgcgcggctccgccggatgtgcgggttcgtgacgcaggacgacaacctcctcccgctgctcaccgtgcgggagacgatcctgttcgcggcgcggttcaggctccggtccgccgtgacggcgcgggagcgcggcgagcgggtggaggcgctgatgcaggagctgcgtctgtcggaggtggcggacagctacgtcggcgggtgcggcggcgccggcggcgcgccgcgcggggtgtccggcggcgagcggaagcgggtgtccatcgcggtggacatcgtgcacgacccgccggtgctgctgctcgacgagccgacgtccgggctggacagccggtccgccatggacgtgctgtcgctgctccgcgacgtggcgcgcgcgcggcggcaggtggtggtgctcagcatccaccagcccagctaccgcatgctcgcctacatctcctcgatgctgctcctctcccgcggcgccgtcgcgcacttcggcacgctcaagtcgctggagcactccctgtcccgcctcggccacgagatccccatgcagctcaacccgctcgagctcgccatggaggtcaccgagcagctcgaggccgaccacgccaggttcggcgccgcgctcgccaccaccatccatcaacaccaacacaacaaggtcatcgacgacgaggacgaaagcagcggcgctggcgagcacgagcacgagcacggctactactgcagccgcgcggtggaggtgggggcgctggcggtgcgctgctggcgcacgatgcaccgcaccaaggagctcttcgcggcgcgcgcggcgcaggcggtgatcgccgggctggggctcggcagcgtctacttccgcatccgcccggacccggagggcgtcgcgctccgcctgggcctcttcgccttcagcctcagcttcctcctctcctccaccgtggaggccctcccgatcctcctccacgagcggcgcgtcctgatgcgcgaggcgtcccgccgcgcctaccgcctctcctcctacgtggtggccaacgccctcgtcttcgcgccgtgcctcctcgccgtgtccctcctcttctcggcgcccgtctacttcctcgcggggctccgcgccacgacccaggccttcgcctgcttcgcgctcgccgtgtggctcatcgtgctcatggcgagctccctggtgctcttcctcagcgccgtctcccccgacttcgtgctggggaactcgctgatctgcatgtcgctgggcgtgttcttcctcttctccggctacttcatcccgagggagagcatcccgaggtactgggcgttcatgtactacgtgtccatgtacaggtacccgctggacctgctgctgatcaacgagtacggcggcagcagcagcggcaggtgcgtggcgtgggcgggaggcgtgtgcttgaggaaggggggtgatgtgctgagggggagagggatcgacgaggggatgagccgccgtgggtggaggtggaacggcagtggccatgtggatgacggttgctgtggggggaagtcggagatggcacggtggtgcgagaggcactggagctcggcgtgtcggtcggcggccatgcgcatgacaagctcgaggtgcgcttagtggcagcggatctagaggcgggcgtggtcagggggcaggtcatcattgtggtcgaggtcccgtgcggccatgtggacctagtcgtgcaagatctaggcgtggtcgttgggccagcagcgggcaacgtagcagacgatagaggcagagatggggtcgaggagcccttgcggctggatccatcccagtcctagtcgctgtcgctttggcggcgggctaggcggggtcgtcgggccaacagagtggcagccgcgggaggtcgcccattgccggccgaggagatgaggcacgggctcaggttcatggttggatccatcccagtcctagtcgctgtcgctttggcggtgggctgggcaaggacgatgacgacggcaacgatgggattgggttggaagaatttgataaaagaagagccaatgccctccgatgacgacaagaaggaggattgtgatcaatggagttcctcagcttgccactcactagaagggtggattgtgaatttgtgatgtatggatagtgccagattcttacttttgttgttgtttctctctctgttttcaccagatataataaaataatgcggcgggtgtccaacaact

SEQ ID NO: 13829 - DNA, 3026 bp, Oryza sativa
  ref <308>: DATABASE ACCESSION NUMBER: AK111177
  ref <309>: DATABASE ENTRY DATE: 2001-12-06
atctcatacagcctacgcacatcactttcctttgcaaagttggtcgtgccatgtgctcccacctctgatctacactctttcctcgcccagagcatactcttcaccatgtccgacaacaacaacgcaccacagatgtacgccacacccgccaagaagccagtgcgctctcacacagccgacgtcgtggctccattgcccaccgtctctgcctccttgaacggtggcgacctcttccacaccaagcagcgccagatcgacgaggctcgcgccaacaacgacgcgcagcagaccttcgcgcagcaccagtccgagtttgagcagtcgcgcgacacgctgctcggcgccatcgacaacaccagccacctgctcgcagacctccgcgacttcaacaagaacaagcgtctcatccactacgccactgccgacgatgagaacgcacaaaagaccggtccgtcgcgtccgcagctcggccagcacaggcgcacccagtccaatgcaccctctcacagcctcgaggaggcagacgcacacccgtcctccagctcctcttccacagactctacaccgcgtcgagcacctcctgcgttaatgcgcgcttacaccactcagcccgcagcgcacgccagcctgcccaacacacccgcacgccacgccaccaccgctcaccacgacgacgaccaagactcggaagagtccacagacatgtcggtgctcaagctcgacctccgcgtcggctcggtagctgccgatccgcacgcacttgtccgctcgctcgaacgctcttccgtcgcccagctgctggacggacgcatggaaaagtcggggcgtcatctggagaacctcaagcagcgtctcaccgacacccagtccaaggtgctcgtcaccggtgacctcaacgcaggcaagtcgacgtttgtcaacgcgctgctgcgtcgtccgctcatgcccatcgaccagcagccgtgcacgaccgtcttctgcgaggtgctcgacgcctcggaaagcaacaacgacgtcgaggaggtgcacatgctcaagcacggcgtcaagtactcggcgtgcgacccctccaccttcgcgcgccacacgctcgacgacattgggcagatcgtggccgaggccgaggagatgtcgcccgaagacgcgcccatcctcaagtgctacgcgcgcgacacgcgtgccacccaggactcgctgctcaagaacggcatcgtggacattgcgctcatcgacgcgcccggcctcaaccgcgacagcctcaagaccaccgcgctgtttgcgcgccaggaggaaatcgacgtggtggtgtttgtggtgagcgcagagaaccacttcacgctctcggccaaggagttcctgtggaacgcgtcgcacgacaaggcgttcgtgttcatcgtggtgaacaagttcgagtccatcaagaacaaggacaagtgccgcaagctcgtgctcgaccagatccgtcagctcagcccgcgcacttacgacgacgccgccaacctggtccactttgtcgattcgcaggccgtgtttggcgccgaggtggacgacgccgaggctggcgcggcaccggacacgccgtcggatgagctcgggctcaaggtgcagggcggtgcgttgagcgtcgagacacgcagcacgcagagcctgcaggcgtttgcgcgtctggaggcggcgctgcgcgactttgtgctgctgaagcgcgccaagtcgaagctgctgccgtccaagacgtacatggtgcgcctgctgtcggatattgcgttcctcgccaagatcaacacgcaggtggcgcagatcgagttggccgaggcgatcaaggcgctcgaggtggcgcgtccggagctggcgaggtgtcaggcgtcgcagcacaagctggagagcgtggtggagagcgaggaggacgaggcggtgacggcggtcatacaggaggcgcagcgcaagctcagctcggccatcgacctcattggcaacggcaagcctgcggtggaggcggtgacgctgcccgcctacccgggtctgttcaatgtgtgggagtatgcgcaggaggtgcgtcatgcgctcacgtcgtcgctcgagctggcgctgcgctcggtggaggatacggcgcgcggcacggcggcgcaggcggtggaccgcgtgcagaagctcggactggcgcatctgccgcaggacgtggcggagacgcgcacgcgcatcttcaacccggacgccatgtttgccaagcgccgtgcgatgccgggcctggtggggctcggattgggagccgaggtggtggcggtgcagccgagcgactttttggacgtctaccaccactttgtcgtggtgacgggcggaaagctcacgcacgacaagcgcatcaaggacggcagcagcagcagcagcgacgacgaaatgagcctggtgtcgcccgtgtcgctgggactgggagcgctgacgctgatggggagcaaggcgctgggcgccaagacggcgattgatgcgttcgtgcgcgtgtcggatctggtgggcaacccgacggcgcgtcgatgggcggcgccggtgctggcggtggtgtcgacgggtctggtggtgtaccttatctacgacctgcccaacagcgtgcctcgcaacattggtcgcaacatcaagaacggtctggcctcgggcagccttgtgcgcggcaacggaagcagcagcactagcagcagtggtggcgacgagcagcgcggcgaagaggtgtcgtttggtgcggtgcactctgcgcgtgtgggacgcgagacgcgcaaggtgctgcgtctggcctcgtgggatctgcaggagcgcttccgcgttgcgatcgcccagcgccgcgccgaggtggagaagcaggaggccaagcaggcgtcagccaacctggccatcgagtggttcgacacgacgacggcgcgtgggcgagatcaagtctacggtcgaccacgtcaagggcctcgaggcttgaagtgggttgtctttagtattatttgtttgttcgcacgttgattctatgtattcatgatcgccactcc

SEQ ID NO: 13830 - DNA, 2778 bp, Oryza sativa
  ref <308>: DATABASE ACCESSION NUMBER: AK111178
  ref <309>: DATABASE ENTRY DATE: 2001-12-06
tacgcagaacgtcatgatcttccgcgagtgcgccgtctcgggcgtgatttatcacggggaagttgcatctccccacatcggcacctcggagacgacggcaggcgacgcccccaatgtcgtgtcggagaaggatggattctccagcaacgagggctcttcgggttcggagcagggacacgagtcaggcgtcaaggtcaagcctctcaacccagagattcctccgttccgcgaccagaagctcatcgacgcgctcaaggaccccaactcggagcacagcgagcagctcggccgcttcttccgctgcctggctctgtgccacactgtgctcgtcgaggagcaggaggacggcagcatcgagtaccaggcgcagagccccgacgagcaggcgctggtccaggcggctgccgatgctggcttcatcttcctcagcaaggaacgccagacgctccgcatccttacgccctactcgaaagagcccgagacctacgagctgctcaccgtcaacgaattctcgtccgccaggaagagaatgagcgtcattgtccgccgcgagtcggacggacagctgctcatgctggccaagggtgctgacagcatcatgtttgagcgagcccgccccggtcaggacgagatcaagcaggctacggacgcagcgctcgaggagttcgccaacaagggtctcaggacgctctgcctgggtggcaaggagctttcgggccagttctacgacgactggtcgcaccgcttccacgaggcctccgtctccattcaggagcgtgaggagaagatggaggcgctggcgagcgagcttgaaaaggactttgacctgtacggcgccacggcgatcgaggacaagctgcaggacggtgtgcccgagaccattgcggatctcaagcgcgccggcatcaacgtgtgggtggccacgggcgacaagctcgagacggccatcgcgatcggctacagcaccatgctgcttaccgaggacatgaacctggtcgtcgtgcgcggcggcgagtacggacaacccaactcggcgtacgaacagctccgcaaggcggtggtgcgcttctttggcggaccggctgtgctttcggagatggagcaccagcctccaggcgaggagagcgaaagtcgacgatcgtcgttcatgtcgcgcaggccgtcgtaccaccgcaaccgccgcagcagcgtgagtcaggtgtcgctggtgggcgaggacaacggtcaacgctccggcggcttcgcactcgtgattgacggaacggcgttgggccatgcgctcagcgaggactttagcaaggatctgctgctgcgcatctcgacgcagtgcaaggcggtcatctgctgccgtgtgtcgccgctgcagaaggcgctcatcgtgcgtctcatcaaggacggcttgggcgtgatgacgctcgcgatcggcgacggtgccaacgatgtgagcatgatccaggccgcccatgtgggtgtgggtatcgcgggtgaggagggtctgcaggcggtcaactcgtccgactacgccatcgcgcagttccgctatctcaagcgcctggtgctcgtgcacggccactggtcgtactaccgcaacgcgacgatgatcaccaacttcttctacaagcagttcatccaggtgggtacgcttttctggttccagatctactgtgcgtggtcgacgacgcaggcgatcgactacgtctacattctgctctggaacgccgtctggacggtgctggcggtcatctgcatcggcatctttgaccgcaacatcaacgacaaggtgctcatgcaggtgcccgagctgtaccaccagtcgcgcaggcgcgcgtactttggactcggaccgtttgtcatttacttcattgacggcatctaccagtcggtgattctgttcctcttcttcgcctactcgtacaacacgacgtcggtgaggagcgatggatacgacatcaacctgtacgagtggtcgacgggcatggcgatcgcgtcggtgttggtggcaaacctgttcgtgggcatcaatgcgcgcgcatggacgtggttcatctttggcggtgtgtggttgggcacggtggtgatgttcgcctttgcgccgatctacgcgtcgtttacgtcgacctactcgtacggcaacaaccacttcctgtatccgagcatccagttctggatgcttgggcttctgacgtgcttcttggcgctgctgccgcgcgtgctggcaaagtgcttccgccagtcgtactacccgacggacgtggatatcctgcggtacgtagacaagcaggatgaagatcacgactttacgacggatccggcgattccgcacgcgcggcccgagtacgcggagagcatgggtaggccgagcatgacgcaccacacttttgcgccgctggtgcgtgccgcgacatcggcgtcgcccgtcgacgaggccgcacccggcggcgtgcagatgcacgagctccggcagacggcgtcgcgcgccagcagcacgcactacgacatgctcacgggcgagcagaggcccaaccgcggctacacgtattcgtccgacgagcccaccaagaagaagagcgtcaaggacaggctcgtcccggatgtcttcaggaggagcctgctcaagaagaaggaggagcgcaagcggctcaccatgattcaccaggaggaggatgaggtggccgaggagcatgctgcgccacagtcgtcctagacgccggtgtgcccgtgggctgtggtttaactctctttttcgttttcgttttctaatcggattgtatacaatgg

SEQ ID NO: 13831 - DNA, 3393 bp, Oryza sativa
  ref <308>: DATABASE ACCESSION NUMBER: AK111179
  ref <309>: DATABASE ENTRY DATE: 2001-12-06
aacgcattcgaccaccagcatcctcgaacggtctctcgactgaggcagcctgaatcgcaatgagccaggtccaagctcccctcggcgggggctaccctcagtcgcctgatccaacgctcagcgacccaagatggcttcagcaactcgccagccatccgatcttcacaccgcgcgaagaaagcagcggaacgagcactgcctctgatgatcagatcgttggcacccatgcacgtctgatggtcgtccgaggcaccgacctgatcgttgcggtcgacaacgaggtgcgcatcgcatcgctagtggatgtcaaagcttccgcagctactcccgcagcgttagcatcgcgctcgtcttcgctcggagcgatgtcgtccaccaactacaaggtgctcgtgccagcacagggacctgcgatcgactttgagatccagcacctcagcctcaatcctaccggcaagctgctcgcctgcgtcggtgccagccaaatcacccttctcgtcatgccgcgatctggttacaccaagcacgtcgatcgcaccgtcgcctgccgcgccgtgccgatcgctccctactaccactctgctcattcggatgccgccgtggccaaggttgactggcacccgtggggtgagagcggcacttcgctcctcgtcctcaccgacgacggcctcctgcgcgagtacgatgttgccagagacaccgaggagccgcagcagacagcatcgttcctacccatccagcctacttccaacgctcagaggtcgagatcgcgctccgcgactcccagcctagcggcgcacaatcgcagctcttcacccattgccagcagaagctcgagcaactttggcgcctctcgcggctttggcctctctgcggaggatgacgatgccacaatcgcggtgagcttcgcgctctgcgtcaacgaggcatctctggcgcgccccactgcctttgaccaagatgacgacagcgcttgggcagcagcagcttcaaggtcgcagggtcccaccgactggtcgccgctcacagtgttcggcttgatgaagaacggcgatgtgtgggccatctgtcctttcctgcccaagagcgccgttgttccggcagcctacattcacgaccttgccaagcttgcctcgcaccatgcaaacacggtcgagtcgcagcagacgtcgagcgtcgacacgcagctgcggtacgtcaacgcactcctcaagcaagcgtctcaaggcatcgcaaagcgcagcagaagcagcattagcaacggacgccagacgtccgtgaccccagcacccgaagcttttgcacgatcacggtccacatcgacaatggatctcgaccagctcgtcgacccacaggacgcagatgcggatgagagccaagtcgacatggatgctgtgcaagacggtcccattcgactccacccgccctcatggtcgtaccgccaggacgtgcgtcaaggcggaagcgccaaacgggctcctcgtccgcagggcccctttttgctgcggccggcacctgtagagttgtgcgacgagcgcgagacagtggcgtgcgacattgtctggacttggctcacggacgaacgcgccgagcggaccgacagcaccaccgtctcgggagtaggtgcactcagcatcgtcgggcacgatggccgcgtcgatgttggactcctcttcgagtcggtccagggctcgtgggactcccgcacaaccaggccacgcaacgctccacaaaggaggaccaagacgcccaagacgaaccgatacggcttgtccgacaccgaagacgaggcggacgaactagaggcactgacgttggacgagccggaggagctgccttcactgctgatctacgagacgatcgatctgggtctgctggacacggcggtggagaatggcgtgaagagccatgcggcggcatcggatctgttgctggacacctcggcgcgcaatcgaccgacgttcgtacgcgacccgctgtacggcgatacgctctatgtctaccatgcgttcggctcccagtgtctgggctttgcgacgtggacgtccaagctgatccaggcgctcaacatgccgtcacaggacgagctggacaacgatgcgcacgccgatgcgtcgtcagcaacagccgagtcgcgcgagcaggcgctcaccaaggtgctgcatcggggcgagaacaccgaagtcgtctgggtcgtcaacacggccgccccgggcaccggcaaggggcgcaacgcgctcgagatcaacccagtgacagcagtggctatcctgtcggacgtgtacctttcgtacgcctttctagccgtgacggcggatctgcagttggtgggagtggagctgtcgcttagtgtcgagcacgacggggcggactcgccggctgcaatggctccggagctcggattgagcgagtccaagcttccgaagccgtacgtgtcgctgctgggcgagggaccggcgttccagcctccggcggtctttgccgcaggttcgggggtgcagggacttccttcgcatccgcgacgtgcggcgatggccggcgtatctaaaggcgaggtccaagtgacgccggacacgcttcgtacactgggcaagacagtagagtcgtatcggcacgagatccgcgacgtcgtgtctgcaggcaacgcggtacaagcgcgtctggatctgcaggtgcgcgagatgacgcgccagctttccaagctcgaccagatccgcgcgcggtgttccgcgcttgggagtggtgatggtcagagtgcactgggcgagcgtgttgcccgacttgcatcgacgcaggtggcactagtgtcgcgcattgatcgtgcgctgcagcggttgatggactcgcaccagccgagcatctcggtgtacgagcgacgctggttcgacgaactggaacgcattgctgccgacgtgggcattgcgcgcacctcgagcggcgagctcaagcccgacacccgcgcacgcaagggcatcgcagccaaagcggatcgtctcgcacaccaactcgtgctattgcggccccagatggacgtgctcgccgccacccctgccaatgaacgcgccttgttgggtgcagaccagctgcgcaaggtcgaaaatctgcttgcggcccaagcaaccatgctggccgaagccaaggcaaaggtcgccaacctcaatgcaaggatgtcgcaaaacccaccgcgtcagccgagcgtcgcagtcgacgcggatctgtcgattgccagcatctactcgagcgcgtcgggtgttccgcccggtctaccgcacagcagcacgctcgccaacctcgcttctccctcgtcgttccgctcgcgcacgccatcttccttcttcgcttagccgacccccatctcaccatctcaatccaacgttgtgcagcgccgagaag

SEQ ID NO: 13832 - DNA, 3298 bp, Oryza sativa
  ref <308>: DATABASE ACCESSION NUMBER: AK111180
  ref <309>: DATABASE ENTRY DATE: 2001-12-06
accatgctcatcgacctcttctggactcaccgcagcgcctttgtatgacaatccgtcgtcgagctccggttccggttccgctatccgcagccgccgcgtccatcccagcgctcgctgcttccaccagcattccctcgaccaggctccataccattccagcaccgataacgagcgtccactgctagggcctaggcgtccctacacggagaacttcttgcgctccgctcctcccactctctccatccagcctgctccttctctccgaccctccggtctggttgcgcagtcccacttcagcccagtccgcattgctcgacccttctgaagccggcgctatcctcccatccacgccacttcgcggcagctcaaccagcccggcccgctttcctccaactcgatttcccctagcacatcatcatggcgggaaggcacagcaagtctggctcgtcagagacggacgcaaaagcctcagaggcagctacagctgattcgtctcagctcgagactagcgaggcagccaccaacctcaaggcagaggagacagaagctccagctgcgagtgcagagggctccgctgaacagacagaagccgccgagcaagaagactcgacagcccaaccttccgccgaaaccgcccacgacgatgccgcctcgcgcgaatcgtctggatccgacgacaaggctgtcgcatcgtcacccttcaagaaatcatccagcaagtccaagaagggcggcaggaactcacgcggcaagtccaatggctcgaagcgcagcagcgacgagctcgactccaccaaacccgagaacgccgatccatctggctccgcggatgccagcaccgacgcagaagctcagcaaggcggtggcgctgaggctgctgcggatgcggacatgaacggagtccaggagcaagcaaccgcgtcttccgcaaacgagaaggaggaagaatctacgagcaccggttccaacggtcgagacactgcccacgccaaaggcgccccagccagcaaagagctcgctcaacttggccttggctcctttggtgacggtgcagaagacgcgctcggcccacgccgctctcggcgtggcccaggcgcatcgcccgacccgaaggcgcgcgtccccaaacctgaacctgaaacagatgcatcttcactgcaaggcatcccaaccgactcagccgaggcagatgacatcaacgatgctaccgccgtcaatcaagacgctcaagccagcgcagacgccgtcggcgccgcggacgacgatcagaaggcagctgatgcttccgccgtgccgcaagaagccatgcagctggaggaaggcgccgccgatgccaaggtcgaggcggacaacggatctggtctcgaaggtcagcccgaaacaacacaagaagcacccgagatcgacggccacgacgtgcagcccgacgaaggcgaggccgattacggcaacgccgacgaggccgacctcgagggcgaggaaggcggcgacgaaggcgtcactcgctgtgtgtgcggcagtgcagacgagaacgtcgggctcatgatccagtgcgagacgtgcaagtgctggcagcactgcgtgtgtatgggcatgcaggtcgaggaggactgccccgacgtctacttctgcgagcagtgccgacccgagctgcacatccccctcttgcgctcgctcggcctcctgcccaaggccgccaagaagagcaacggcaagggcggcgccaaatactctgctcgcgagctcaaggaggccaaggacgccatcgcgctgttggcgcaggagaacgcacgcaggacgcaggctgccgaagccgccgcagccgcggctgcctacaactctcgcgaccgcaagggtggagcccagtcgcgaaacgacaattccaaggagcagcccaagagccccaagagacgtagcaccatgaacagtcgcgattcggcctacggcggatgggaaccgatccctcccggtctgctcgccgacggcgaagtctgggatggcgtggatgaccgcaaaggtggcaagaagcgcaagcgtggacttccggacgacccgaacgaaagctcagcagagacacccgaggcaggtgcgggcggcatcgacccggcattcgcatccgcggactccaagcgacgacgcatgagcgtcagtggcgctgaccaccacggagacgccgacatggaggaagatgaggctgccgccgcggaggtgtcgacctcagcatcacgggacaagagcaagaagaagaagggcaacaaccagtacacggtgcgagaagcctccgtcactgctgaggccgcctcgtcgaagccacgtcacccgaaccaatatacctaccgcaacaaagacaggaacgcgggtccatctgccaacggtcaaaagacaggctcgagctcgacctcgaacctcacatcgcactcgccgagcccgagtccgagcaagggccgagcggaacactcgcgtcgtgccgcggcgcgcgagaatgccagtcaattcggcacacccgctcccggcgagtcgtcgggcgcttcggctcgcggggcgggctcaacggtgcagtggggtctacccgaccacctcactcacctcgcctacctgcttcctggcccgggacatcgcaatggatccggcaagacgtccggattcgcttcgggcgaggaagcaggcaacggaggaggtgcgatggacaagaagggctcgtcgagcggctcgggcagctccgtgccttcgccgccagcgtcaggatcggtgccgacgccgttccacgttctttcgtcgatcgagtcttccaccaaggtgcgcttcccgagccgtcgcatgacgctgggcgagatgcgcaagcgagtgcgcaacattggcgagtatgtgacgcggagccagatcgaggcggtggagcgagagaagcgcatgaagctgcttggcatcgtgccgccgtatgtcgaggagatggaggctgaggccgaaatggaagccgaggccatgcagaacagcgccaagaaagccggggatacgcgcgcagactcggctccggagcaggttgtggacggcgaggggagcaaggagacgactgcagccacactgggcaaccagcaaccgctgccactcagcatgcgactcatggaggagcttacacgcgagctcatccagtttcagcgaagattcggcgtcggcccgggcagctacggcagcatcagcaatgcgcagcaatcggcaggcgttgcttgatgcggggcataacattcaaagcagagccggactgagtcacacctgcaatcattcaaatttgctttcttgtttg

SEQ ID NO: 13833 - DNA, 3257 bp, Oryza sativa
  ref <308>: DATABASE ACCESSION NUMBER: AK111181
  ref <309>: DATABASE ENTRY DATE: 2001-12-06
accgccgctatcgccgcgcctcgcgccaccaccgccaccactattccgcccaccggtctatcacaagccaaacctgtccacctctctcacaactcactcgcgacaacggccgccgctttgtcgccctccgcttcccaccccacctccgccgcgagacacccaaatggctcgcacccgcactacgatttatccgacaaaacacaccttcacctaaccgccgacaccgatcggaatcggtacagtccatccaacaccaccatcattaccgcagggccagggcgcctatgctgtgcgccaccctaccctgagccttccatcgccagcatggatgatctgctcgcctatgtgcgagccaccgaggaagccgtcaaggtccttttgaagaataccgaggagcccattaagaacctcatcgccgccttcgatgcatacaggagcgcctgccaggctgtggtcttcaccgacttcactcttgcggccaaggaagaggcgcgcttgtggaacgcgcacgtcgagggcaggaagtacttttccacacagctcagacaataccgcaagattactggcgcggataaaccacatgctgcaattcgcacaatcatcgacttctacctgaaatggatccgcgggagcgtaaagttctaccgcaaccacgtctacaagctgagcacggcgttcggagttcctgaattgcaagacgttgcccagcagatcaagccggaggcgcagaatgttacacctgctgcgaacatgcttacgccggagctgcacggccgagtattgaactcctgccatcagaccgtgatctacttgggcgatctttcgcgctggcgcgcttctgagagattggataagaaccccgacttcggtccagcaactggatactacggactagcatgtaccatccgacccgagtctggtatgggccaccaccagttggctgtcgttgcgcttgagcagcgccaccacttgcaggccatttaccacctgtaccgctccatctgtgtcgcagagccacacccgaacgctgtcaagaacctgactgtgcagtttgaaaagacgaatgctgcctgggacaagggcgagctcattcaaaaggcttcgcccaatgaccctgaagccccgaagcgcgccttgatcggctggttcgtccgtctgcacagcatgtgcttcaagggcgagaagttccgcggtttcgatgagcttgagcgcgaagtcatgggccagttgtccactgaacttaagctgcgttccttgggcgcgacactgtctcgcatggttcttgtcaacattgcttcgcagcacatgtctatcgagaattacaaggagaaacaaactccggaaaacgagcatgccttctactccttcttgcgcataaacttacgcgcgtacaccacccttcttgaaatactccaggacgatcttatcaaggtcacccgtgccactgccgagatgggcgaggttgagctcacgaacaaaattcttgttggctccggccgcgtccttccggctctgcgcacttacagctgctggctgtaccagaactatcaacttctccttggcttgaaaagcgataccactttggccgcccctattgagggtttctggaagtcgtatggccgcactttggatcttgtcgcatcgaacttttcgatttgggagctggaaacctattccccaattccttacatgcttgaagaggatgtcggcacgcttggattcgagcctttggtcgatcgctctggtggaaaggccaacaaggtgtggaagctcatgcctagcggtatcatgaagcctcgcttcagtgatcgtgatatcacccgtttcttgcctgcggaggaaatgctctgccgcgtgtacggcttcctcgaagatggtctctactttgcacacgaactcgacgaatctcctattaagatcaagggcgatcgcgtcttctacggaaatggcgacgagatcgagcagctccttatgcctgcgactatcaagaagccagtgagcaaggcggccccgaaggctaaagcagcacctgcgaacaagccactcagctacgcaaaagctgctgccaacggcaaagctcaagcatcaaagccagccgctccgcagacccgtgcgcctgcattcacccagtcgcagtcccacggtatgcaggatgctcagttgagccgcatggtagacgaccttgttgacgacgatgaggctaaggaccctgtcactcctccgcagcagttctcgaccaaccctgccgttgtgcaggctcatggagagcccactgtcgagactacgcctgagttcgccaaggctagtgcgggttacccacagaaatctcgatccagcagcaagtacgcgtctgtttcaagtctctggcccacctctcctgtcgtgccagccaccgtcagccctaggattcccaccggattccctgtggggtcgctcgcctcgccaccccttgagcatggacacacccgcgttggctctgttaatagtgttcgcagccgcaactcgcagaatgtaggcgattcctggagctcacttgaaggcctccctcaaggcaccggcatggctcaggcacctgtcaccaatgttcctcagctccccggtctgggcggcgcgtacggcgatggtcagcttcttttcggtgctggaggtggcatgtggagcgccgctatgggtggcaggaagagctttggaggtgtcagcccagatgccggctttggcggctgagttgcagagcatgctgtgcaattgactattgcacatttgttcaattccactcaatgcgaactttctatgccggacccttcgacttgaccgttgggaacacgatacattttgacgcatacgttccatcactctgcgagcgcgaacgctttggaagcactatcacatccttttcaagaggctggtaaggatattgttggaagaccactatccgctcccgttgcacatcgaaaaggttttccacctcgggcaaagaccgccacactgcagaaatgttgtcgcccacatgcgcatatgggcacgctggtggcttcttccgctcgtggcgtcattgcggcgcttgagttacactcgcttgaataacgtaagttttacccctgaatgatccccgtatcagaacggatttgtcgaggagaaaagaaaaaagatcgagagttgtttttgtttttcctgagaatgataagtggagagcgatgatggagagattgtttgagcttggtaaacaggtgatagtaaataaatcaacttttggcgag

SEQ ID NO: 13834 - DNA, 1667 bp, Oryza sativa
  ref <308>: DATABASE ACCESSION NUMBER: AK111182
  ref <309>: DATABASE ENTRY DATE: 2001-12-06
ctcttcccctgcttccagaagccaagttcaaacatggcgcacaacgacgaagcgtcctcgtcgcgttccacctcctccgccgccgcccaaccctcgccaccgccacctccacgcctcgcccccgcccccgcctccgcctccgcctctcccatggacgcggcggcgcccgcgcgcgacttcatggcggaagccctccgcctcgtccacaaccgcctcacgtgcctcgtcgaccgccgcaccatggcccgcgtctgccacgactggcgcgccgccgtcaagccgctgcagaacgcgccgcatctccgcccgctcccgtggatcctcgtcccgcgcgccgacggcccttccttctcgtgcgccctccgcggctgcggcgggcacggcctcggcgtcccggacggcgcgcgcgccgcgcgctgcttcggcgcctacgacggcggctggatcttcctcggcgagacctgccgcaacacgctcctcagcctccgcgaccatcagctgcgcttcaacctccccttttttgtccgcccggacaagacggctgctgaattggggcggccagacggccctgtccctaacactggtgtgatcatgctcgccgcgacgctctcttcgccaccggaggacgaggattgcgtcgccgccgccatcatcacctactggcccttccaggctgctcgacgcactcacgcattctggcgcgttcagtcagcaaatgcttcccaggatcaggttgcggcgatggggcatggccctagtgccatcgacgagccagctctggaggatgtcatacaccacaagggagccttccttttcctcaccgcagaagaagacctccatgttttcacagcacgggatttccatgaagacggcgacggcaacatgaagatggcgcccagggtgattcttcgcttctggcgtggccggcgcgattatggcggagacgtcgttgctcgctacctggtggagtcccgcggcaatctcctcatggtggtcaggcgcgttcctgctcctcttgccgcgccgccgaggaagcggaacaaggccctgcacggctggaaggagctggagtcgctgggtgagcggatgctgttcgtcgcgcgaggctgctccagatcgtacgacgcgggtgactatccgggcgacgagttcggcgagggcgtctacttcctggatgacgggaggctctaccgcgagtcgacagtgttcgcttctcgcgccgtcgcggggaaatacccctgcagagacaccggcaagtggctaccggcggcggatgcggcgggggttccgcgtgtggacaagttcttgccggagcaaggcccgtcggactactcaccgccggcgtggcttctcccctgagattgctcatgttagttttgatcgtcctggtacaggtatgattcgctattgatttgttcgagatgtccttctcctcttgtttgggtggatgatgtagtcttcctgatccggtatgataattctcgatcaatcagtataattctccttgctgagtcagacttgcatgaacgcaatgcatgtgatgtgatctctggactctggtctgatgatttgtatgaatgcagcaacgttttggctttcagtacttggattgagtctatgcatcattgtttatgcagttaataataatgcaatgagaaaatgtgccc

SEQ ID NO: 13835 - DNA, 3082 bp, Oryza sativa
  ref <308>: DATABASE ACCESSION NUMBER: AK111183
  ref <309>: DATABASE ENTRY DATE: 2001-12-06
actctacacgtcggcctcgtcgtcgcatatacacaagaaactcctatccactcgcaggcagcacattccgccctgccttggtctggtaacaaccatggctcaccagtatggcagtgtgccaaatcccaatgacgcccactacgaacgcggctacggaaacggcaccagtggtgtctccgactttgcgactggtaacccctccgccagcatgacctcgcctctcggccagtcaatgggccagcaaggctttggtgggcagttccacgaggacttcgatgctgctgctcgccctaactctgccatcagtggcacacaggccgcaggcatcaaccgctcggcttcaagcgcctcgaccgccgtcgcacacggtcagaccggcatcccttccaggaacaacaccctcaagaagaaatcgagcatgcgccgcacgtctggagcaaccggcagcctgaagcgcagcggaagtcgcaagagccttgcggctggaagcatcaagagtgttggaggcggcaatgagacagaagacttcaacagcgcattctacactcctgttccaactcaaggatccccgaccgacatcctcgcaaatcgctttcagtcatggcgtcaactcctcaagtcattgatcgcctacttccgtgaaatccagagctcgtacgactcgcgcgccaaagccattaccaaggtccagagcgcgatcagcggtatctcgcaccctgccgtcatgctgtccaacgatggccttgccgatgcgactcgcattctcgaggacttccacagacactcgctcgccgaagccaacaaatcgcgtgagatcgagaacgacgtcatcagcggactcagtggactccgcagcgatctcagccagaagatcaaggagatcaagagcttgagcggcgacttcaagaactccgttgacaaagaaaaggaggctacaaggagggaagttgagaagctccaggaagctctgcagcacgccgatcacgaagacagcagcgcaaccggcaagaacgacccttacgtcgtcaggctcggcgtcgaccgcgcagtcgagaagcagattgatgaggagaactatctccacagggcttacctcaacctcgaaacttctggccgcgagctcgagtccatcgttgtcggcgagatccagaaagcctacaatgcatttgctggcatcctcaagcgcgagggcgacgatgcttataaggcggtcgagggtctgcgcagcggcccgatctccatgcccaaggatgaagagtggtccgccttcgttaccaacgaccctcacttcgtcgcgcccgatgtgcccctgcgtcgcatcgaggacatcacctaccccggcagagaccacccggcagctaccgagatccgtgctggcatgcttgagcgcaagagcaagtacctcaagtcctacagcccgggctggtacgtcctgtcgccaacccacttgcacgaattcaaatccgcagacaagatttacactcagccgccagtgatgtctctttccctggtagagcagaagctcggcacgcactcggaagccggttcctcaagctccaaattcatgctcaagggccgtcagtcaggcggaatgcacaagggacacagttgggtcttccgcgccgagagtcacgagaccatgcttgcatggtaccaagacatccaggctcttactgagaagactggtgaagagcgcgtagctttcctccgcaggcacgctaggagtgtcagcgggaacagcgatcgtcgtcgtagcttcagcagtgacggcctcgaggaggatgaggcggaccaagtaccgtactcagctgacgccgcgagcctctctgagcaaaaccccatcgaagcgagacctcagcggccgcagccaggcggacgattcccgtctgatctgaatgtctcgcgcgtgcgtaactacgacgcacctcagagccaatcaagcgaaagttccgatcgcgataccataaacgcagctcccgctgtcgctcccgccgttgttccgatcattcgcacggacgagcctggtcgcaagtactctcgcgacggcgaagatccctacaggctgcagggtatcgcttctcacagcccaggcatgacgcctggtgccgtcagctacgacgaggaccaagcacgctacatggcgaacccgcaatcgtcctccgcccagcctcgggaacagtcgttttttctcccgggccagcagcacttgagccagcggccggcctcggtctaccaacaggcagagcacatccagccggctcaacccaagtcaactagctacgagcccgaccagagctcgaactccaactggattgcgcccgccgcagtcggtgtcggagcaggtgctgcaggtgccgcagcctacaatcactacaaccatgacgacaagtctgatttgcagcgacaggccgccgccgaggccgctttggtcgatgacggcggtgtggaagttactccatctgctgctcccgtcaacaacgtttccagcgctgctgaaaacgcttcctttggcactgctcgcgacgctgtgtcagctcccgtaatcacggctgtcgggaacagcactacttcagctcctgtcatcactccagtcggcaatggcaccaccgacaccgctgacaacaaacccgttgctcccccagtgaccggcaacggcacagacaccaccttcctttcctacgcaagcaacacaggcagtggcatcgccggctcctcggatatctccgctcccaaactagacggcgggctcggcggcttggaatcccgcggcgcgcacgagaccggacaaatcttcccaaaggtcgtcagacacgatactgatatcagtgtcagccagctgcacgtccctggtgagttccccaagaaggcttgaagagatgatctatacggatacggttggcttggtttgctggctagatggtggggtcggtctgggtggttgggtataccctcggggtgatggatcggtatggactggaatggaatggaacggaggaccatgggttgatttctgcttttgtgtgttgatcttttggatatatcttgcagtaactacgcttaattcgatgttcatattaccatc

SEQ ID NO: 13836 - DNA, 3260 bp, Oryza sativa
  ref <308>: DATABASE ACCESSION NUMBER: AK111184
  ref <309>: DATABASE ENTRY DATE: 2001-12-06
gcgacagcaagagcagcaacagcattcagggcgcgctgtctcgcatcgctttgctcggtcaccaccaccttgcctcgtcgccaagcctcgacgacgacaaggccatggacccacccaaccacgtcccggcgccccctcggccaagaggcaccctcggcctcaaacgcacagcaccctcggcagcctttgcccgcaccagcttcgcaccaccatctcgagtcgcagccgcacccagtccagcggccacaacaaagagggctcgtctgatactcccaacacagaatctcgatcccgacgactcggtgccttcacccaccgccgccgccgaccccgtgctcgaatctcccgccacccacacgcttctgctcagccgcaatgcctccccgcacactcgcaccgcatcgccagcaccagacacctcggcccctggctcctcccgtcgtagcggccccttctacctctgcacatggagaaagccgcaagcgaaaaagcacaagacctgggacggcgatgccatcctcatcgtaaaagacgcaggcgagcgttgcgccctcatctgctcagagactggcaaagagctcgtcggttccgcacgcttcgcgcatggtcagctcgcctcgggcgatgaactcgctctcgggggcaaggagatcgaggtcgaccgccagatcgacgagccagaatatcgcaggctcgtcgcattcacccgtggcgaactatcacccgtcaaaaaaggtccgcctccgaccgcagtacgcacgcccaagccattcgtagccccgatcaagcgattcgccatcaaacccgtcgacatcaatgcgctagcacccgctcgagcagaaaccttttacggcaagcctgccccaaagccagcacgaagccacctccttgacgaatctcgcgtcagcggtctcatcaatccgggccagggcaggacgccacatccccgcttcgatcccaacgagcacggtgccatcgtcatgaagcgtctggacgaaggccaccaggagcgccacaatcccaaagggttacccgtggtcgatgtcgtgctcgatccgcagctcgcaaaggccctccgtccacatcaaatcgaaggcgtcaagttcctctacgagcgcgtcatgggcatgcatgccgacggcgaaaagggccagggcgccatcctcgcagacaagatgggccttggaaagacccttcagaccatcgcgctcgtcctcaccctcctcaagcagtcgtgctactacacgcccgcctcctgcaccatcgagcgcgccataatcgtatgcccgctcacgctcgtcaagaactggaagcgcgaattcaaaaagtggatcggcaccagcgccctcaacgtcctctgcatcgacgagggccgtggctgccaggacgtggcgcgcttcgtgcgctccaagtcgtaccacgtgctcgtcatcggctacgagaagctgcgcacctgcaaagacctcttcaaagacgctcccgtcggcctcatcgtctgcgacgagggccacaggctcaagtccaaggaagccaaaaccacccagatgttcgacgagctctccgccgagcgcaagatcatcctctccggcacgcccatccagaacgacctctccgagttcttcgccatgatcgactttgtcgcgccaggaatgctcaactcgtacgcctcgttcaaaaagatctctgaagagcccatcatgcgctcgcgcgcacagcactgctccaagcacaccaaggccaccggacaggcacgcgccagtgcacttatgaccatcaccaacgacatcatcctccgccgcaccgccgacatcctcagcaactttctgccgcccaagaaggagatggtgctcttctgcagccccagtcccgagcagattcgcatctaccagtccatcctcgcgtccaacgacgtacgctcgctcctgcgcggcgacgctggcaacggcctgctccagatcggcgtgctgcgcaagctgtgcaacacgcccgagctgctgctgcgagattcggaagccgacggtacctcggcgatcaaagcgctggtgggcgacatggcgcgctacttcccgcccaactttgtgcgcaacgacgccaggttcagcggcaaactcgtatgcgtcatgcagctgctcgaaaagctgcgggccgagacggacgacaaggtggtgctggtgtccaacttcacctcaacgctcgatattgtcgaggcgatgatgcgcaagaagcgctattcgtatctcaggctcgacggcaagacgccgcaggacgagaggatggacatggtgaaccagttcaaccgcgacggcgtcgacagctcgtttgtctttctgctgtctgccaagagtggcggtgtggggctcaacctgattggagcgaatcggctggtgttgatcgattcggactggaatccgtcgacggatctgcaggcgatggcgcgcatccacagggacggccagaagaaggtgtgctacatctaccggctgctgctgtccggcacgatggacgaaaagatctaccagcgccagatctccaagctcggcctgaccgactcgctcatcaagggcgacaagtcgtcgtccgacaccttttcgcaggaagagctgcgcgacatctttacgctgcatctcgactcgccgtgcatcagccatcggcagctggtgtgcgactgcgatcgcaggggcggtggtgcctcgttggacgggctggccgagggcatggatgccagtcagacgagtgtggcgagcagcgacgacgacttgcctggctttgtggcggcatcgcagcacgtggtggaccgcgcacagaaggacaagctggacaagcgcaagaggctgctggcgctgtacaagtgggcgcactacgactgcgtgcaacatcccgagtcatttgaggaggacgagatggtggctgcgctcgtgcgccagtcgaactcgagcgtgcgcgcgaatggcgcgaaaaagagcgaggacgaatggagcacgagcatggcggatcgtgcagacgacctcttcctcggcagcgacgacagcggtcgggatgaagacggtataggggagcagcagatggacggcggagaaggcttcaggctggataatatgcagacgggacgcatcctgttcgtgtttgccaaaaactcggacaagacgtcggacaaggtggagtccgagaccaccccgcctgcgtcggactagcctcgcatctctctcagcttctttgcacacacatagtgcaagcatgaaatagggtctttgtttgcattc

SEQ ID NO: 13837 - DNA, 2873 bp, Oryza sativa
  ref <308>: DATABASE ACCESSION NUMBER: AK111185
  ref <309>: DATABASE ENTRY DATE: 2001-12-06
agctttgctcgaaccccttgcagcggccaccacttcctcctcctcctccgaccaccacatcctagggaccaccacgccagtcgtacaccagcgtttgcttcagcggccacattctctccctccagccttggtcctctcggaagcaccccgcacaaggtccaacacctccccacggctccgcggcttctgcatgacgacaaacgcacgctagtcttatagcactgcgctgctccgcgcattcgctccttccgcatcttgtccacgcctccttggtctctttcatcatgtggatgtcgttgcggcctcgctcgctcgccgactcgccggctcaacagctgctcaaccgtcgacaagcgtcggcttcttcctcgacatcctccgcctccccaacaacaacatccgacaatggctcctcttcatccgcttccgcttccgcttccgcatccgcatcttcatcctcctcatcctcgggctcctcctcgggcggaatcgcaaatggaggcatgggctccccagcttccggcaccctcaacagcactcgcatcgtcctcggccgcggctttgcaaacggtcagctcacctacaccgttcccatcgccgtcgcaaatcagcagataaacgctcagctcgacaccggcagcggcgacctctggctcgcaaaccaggattgcgattccgactcgtgcaaaggtcaccagggcctcagtgtcctcaagttcaacgaccgtgcaggctcggtcgtagaccaggacacacccttcaacatcagctacctcctcggttccgcctcgggtcaggtaaagaccgcctccatgctctttggcgaccccgacacatcgcgcctcatcgtcaactcacaggcatttggctcctgcaacgacgtatccaacgaggacatggactcgggcaacttttccggcgtcatcggcgtaggccctcccgccaacagcctcatccaggccgacctcaacgccaccagcaacaccgccttcctcaacgtcggcgttcgcccacccgagaccggcgccgtcctcgcaggcttctggacaaacgcccgtcccggtcgcagattcatgggcatcggcctccagcgcctcgaagaagacggcggcaagggcgacagcctcctcaccatcggcaaccacgaccctgcctacgccggctccaccgaccctcgcatcaacttcaccagcgccgtcggcgacgcagacggcgtcgtccgccactggcgcgtcccgctcaccgaaatcagcgtccagctccagcacggcgtcgtagaacccattcccatcggcacatccagcgtcatctccggctccaaccccatcgccgtctttgactcggccgccagcatcaacctcgggcccgaaggcactctcaacgccctctacggcgcctggggcatcggtccggcctccgacggcggctactacgtcccctgcgacctccagatgaacgtcacaatctccctcggcggcatccgcgtacccatccacccgctcgacgccagcctccagaccggctcgggcaacggcccttccaatgacggctcctcctgcctcggctccttccaggcgcttcgctcgctctccggctcctccaacggcgccaacctcaactcgagcttcctccccgccgactttgttctctcgcccgcctttatgcgcagcgcctacaccgtcttttcgtgcgacgacggcctcaacaccacgcaggctcaggcggccaacatgaccgtcactagcccttgccaagccgccatcggcctccgaccgctcgtcaacatgaccgccgccacccagcagttcaccgccgtgcgcatcaagaagcagagcctcggccagtccggtctgcacggaggacactccagctccggctcgggcaactccaagggcctctccgaaggcatcaaggtcgtcattggctgtgtgtgcgccatcatcgtcattgccgtgctctttggcgtcgctctctggaggctgcgcaggcgccgacgtcgcatcgccgctgctcgtgccgctctctacgccaatcagggtgaaaagggcgcaggccctgccgcaggtactggtgcagcgggcgccggtggagcgctgggccacgccaagaagcagagcaatccgtacagcgtggtcaagatcgacggcctcaccgtgcccatggaggtgctcggtaaggacgacgacagcagcagccaggtggtgctctcgcccgcccagcgtgtcaaggcgcgccagctccaccacatgcacggcgtctttgacgacgagctccaggacgacgagctcggccgcggcgtcgatccacagtggggcgaggaggcgccgcccaacccgcaacacctgcacgccgccggcctgctctcgtgggacgtctcgtcgaccggctacgtcgatgcacgtcaggtcaagaacgcctacctcgcgtcgctgtccgaggacgagcgcaaggcgttcctcgaatcatcggcgcggcgccctgccgagcccgaattcgcgcagacctccgtgtcgtcgccgctgcagacgctggatgaccacagcgtccagttgagccagacgcaccacgacgtgcgctccgactcgcagcgcagctcgcagctctactcgcaaaatcgctcgagcgcacgcgcctcgtcccccgcacccctgctgcagcacgacgaactgcgttgatctcgctttgcctacaattttttatacatcgtaacggacactctctgattctattccagctgtttggttcatggatttcattcctcgcttcatcgcctcggtcttggttgctcctgctatgtaccatttgcacacggtcccgaagggccccacattcagtcgctcgcttttgcactctcaattacccattgctcattg

SEQ ID NO: 13838 - DNA, 2746 bp, Oryza sativa
  ref <308>: DATABASE ACCESSION NUMBER: AK111186
  ref <309>: DATABASE ENTRY DATE: 2001-12-06
attcaacttcctcgtgcatgggaccatctcccgtcacaacatacccgcaacttccaatcccagccttgggcgacgacctggttcgtaggctgactgctgctcacttgcacatcatcattgccactcatctcgggtggtgtcgtgggaagttccacgacggaatccgctcacagccgtcatggcgaacgagagtcaggcggcgccgcccactaggcgcgcagaggaaagaacgcctttgctaaggccttccgactcacctggcgacaacggaggcctctcccatataaaccaccgggtgaaaacctggagacgtcgccgatggatttctttcgctgccagcatcttcctcctcctcggcttcgtggccattctcattcttagtggggtgctgtctcgtgctagcggtaagccacacatggcggctgcgctctgcttgacgccagcgtgcgttcacgcggcttcagagctcctatacaacctatcgcccgactacaagaacattgatgcttgcaccaacttcgatacgctcgcttgcgatgggttcaacgtccatcacgacatccccccggaccgtagctcgtactcgacatcgacggtcatgtccgaaaatggtcagataaccctgaaacacatcctggagtctccctacccccgggaatctcgccattcgttcctctcgccgaagatgctggctgccagcgtgacttccaccgatgaagaaaacttcaacacgatgcaggctgcctacaactcgtgcttggacgagacagctctcgcgaagcttggtgtccaacctctggtgcagctggtccagcaggtcgcggacacatttcccgtgacgcacgcggacatcgaggccgatacgctggtcactgaaaaggaccacgcagctctgagcgatactatttttctcctagagaaactgggcgtcaccacattcgaggacctgggaacaggtgccgatgacaaaaacccggacgtggtcattatccaggccacccccgccggcctgaccttgccctctccagagtattatcaaaataagaagatcgtcgaccaatatgttgatatgatggggaaagtccttgggtctttcttgccgaaaaacgcctctcggaaatcggcaagcaaactagcacaggccgtcgttgactttgagacaaagattgctgctgccaccccgcccacggaggatcaacaggatgtcacaaaatactacaacatcgccaaggtttctgagcttggaaagatagcaccggctcttggcttggactctgtcatcaagaagctcgtgccgcagaattacgccgtggacaccctgctcctcgcattccccaatttcacagccaatgtttcacacctggtggcccagaccccgaaatctacggttcagaactacctgatatggaacacagtcaacacttacgcacgctacgtgaaaggggcagaggttgaaccggtttctcagttcaacaacatcctggcaggaagagaccccgatactaagcccgagcgctggaagacttgcattgccttcaccgatgaaaccgtcggttggatactgagtcgcttttttgtcgaagccgccttctccgaaagcgccaaaaagtttggcaaccagattatcagcgatatcaagcagcagttcatttcaaaactcaaaggtctcagctggatggacgacagcgtcaagtcactcgcgataaacaaggtccgcaatattgaccagaaagtgggttacccgactacttcacctaacattacggatccgaatgcttttgccgagtggtaccgatccatggtcatcaccgactcctacttcaataattcgctttcaagcactgccttcagcgttaatgagagctggaacagcctgggcaagcccgttgaccacggcaaatgggaaatgcaagcggatataattaacgcttactacagccctgttggcaatgaaattgttttccctgctggtatcatgcaaccgccgctcttctcggacgagcttccagcttacgtgagctacggtgccttcggttccgtttcgggccacgaattgagtcacgcctttgataactcgggccgtcatttcgacgagaatggtaactataccgactggtggaccaattctactgtggccgagtttgagaaacgcgctgaatgcttcgtcgacgaatattctaaattcacagtcgagggcaacaacggcgagccgctccatgtaaatggacggctcaccctgggcgagaatattgccgatgccggcggtgttgctgccgcctttgcggcgtggaaagagcgccagcaggccatgcctgaccaggatcttccaggcctcgaccacttcagccatgcgcaactattccatgtcttctatgcgcaattctggtgtggcaaaacgagaaaagaacaggctattaggtatatctacacggatccccactcgcccgcctttgcccggattcttgggacgatggccaactcgcgatctttccgcgaggccttcagctgtcccgtgaaagagccgacatgtgagctctggtgaggctgtgggccttgtcgttaaccccacgctcgaaaccatgctcagattgtacgggaacgaagtttcactcgtgataagccgatttactggtatcggtttattggggaatcggttggttgaccatgattggtcgtgttgccatgcggtagtattcctagcataaagattgtagcatcaataggattgtaacgtttttcgttggct

SEQ ID NO: 13839 - DNA, 3227 bp, Oryza sativa
  ref <308>: DATABASE ACCESSION NUMBER: AK111187
  ref <309>: DATABASE ENTRY DATE: 2001-12-06
aagctcgcagccttttgagcaaagcaccgcacgtgcgagagccaacacacacaacaatggctggcccaaggacttctctggatgccgctggcaagaagcgcaagcagagcgtcgacgaaagccctgctgccaccaaccagaagcgcctgaagaaagaggcttccaacaatgcgacgcccgtcaagactggcaaaggcgccgtccaccctgccgtcagcacgcccgccactggatccgcgaagaagggtgcgaagaagcaaggcgatgacacacccaaagagcaacggagcctgagcaagaaggagcagaagaagctgaagcaggaggctcagcagacgccggtctctgcgaagatcggcagcacacaggacaagaaacttgcggcatcgaccccgtctaagcaaatccagtcgccctcagtcgcggccgtccaggagacacccatggacgaggagcgcaggcgtcagcgcagagcggagaaaaaagcgaggagacatctcgagcacgaggcaaaggttgccgaaatcgccgcgacaccacagaccgccgccaagttcaagtccgcgaagaagccttccgccatcgctaagagccagaccggcaagtcttcagcgtggacactgtcggcggcttcggcgggacgatacatcgagcgcgaccctatcttcgtcaacgactcggccggcgaacaatacattgcagcggcgaccgcccgggaggtccaggtgttgtctctagagacctcgctggcagttcaggcgctccaggtcgagggcactgtggtgggcttctgccaggagcctggttcgtccgccatcagcatcttggacagcaccggaaacattagtacgtgggactgggaacaaaacaagaccaaggtcgtcaaggcttcaccggccaacgccttgaagtcctactccgcctcatacaccgaatcacctgatgcgaagaagcagagcatcgcgcgcgtcatccttactgtgtccaataaggccagcaacatctacatcggagacaagattgttcacaagacgaagcatgtgctcgaagacgctcacatcattggcaaccttgagtttgtgttggctactggacccagtgccgttgtgcttggaaggcggaaagcgaactctgtcgacgagttcatctgggctgagcttgcgacttctggatctcttacctgcgcacacagcgcgctaaagcgtgacggtcaacctggtacacccgtaggattgcgtcttgctctcggtaacgcggatggtcagatctacctgtacgaggatgtgacccgccttttcaatggcaaggagctgccgtcaccacgtatcttgcactggcaccgtgacgccgtttctgccgtcaagttcacacccgacaaccaatatctgatttctggaggtaaagagacagtcatggtgctatggcagctcgagactggcaagaagcaattcctgcctcatttgacttctgaagttgagcgtcttgtcgtcagcccagagggcgacaggtattctgtgcagatgggtgacaactctatcatggtgttgtcaagcagcgaattgaagcctgtggccaacttcgctggtctccaaatgccagtgccaccgcaagagttgggcgcatcctacgaggctgccgatctggccgatgtcaccgctgtcttgcacccacaacacaacgaccagctcctgttgaccgtccctgcaactcaacccaaaaccagccaagacgttgcagcgaggccgttcttgcaggccttcgacttccacaactcccgccacatcagccgacaagctctctccagaaacaacgtcaccgacttcaaccttggtcctgaacgcactgctatcaaccctcccgatgtcgccttcctagccgtcagccaggatggtcagtggctcgctacagtggacgagtggctgccgcctgcgtctgatgtgcaatacttggcggcggatgaggaccagattgaagaagagcagctgaagagacgtgaggttcacctcaagttctggcaatgggactccacacagagtgtctggacacttactacaagggtggacgctcctcactctcgtgctgctgaagatagtcttggagcaggtagcgtgttgggtcttatcgctaacccagtttcacgcggctttgtcaccattggcgaagatgctgctgttaagacctggaggcccaagactcgcatcagatacggcatgccgttgaaggacgagtcgggcaatgacgtgaccgagtggacgtgcaggcacaacattcagctcgagaagcagcttgcccgtgttgacagcccgatggatggcgaggatggcgttgaggcggagcttatgggacccaccagcgctcatctcgctttctccgaagatggctctacgatcgctgctgctgtgtgctacgacttcatggccgatgctcctgtggctcacctcattgatgcacacgctggtgaggtcaaggtttccaaggacaacgtcttcgccgccgatctctccggcattggtttcatggatcgctaccttgtcgctctgtcacgtgagagcatccgtgtctgggatttggtacaggacaagatgcaccaccacgtcactctgccccagatcgccgaagagggcgaccgacccctgctagcagtcaaccaccaggagagcacattgcagtcattgtgccgcaaactaagagaggccgaggaagcgtggaagtgttcgaacctcacagcgcccagagtctgcacagggaaaccttggcagcacctgtcgccgctgtgctggccaacaagggcaccagaggctacgtcctcctgttcgcagacgccaccgtccgcatgctgatcaagacgggcgccacccgcaagaccggcatgcagtcgaagctcgccagcgctgctgccaccgctgaatccgagaaggccatttctgcctcccagaagaccgccgtccccaatctgctcgtcccgaccaccggaggcgtccagcaaggtgtttccctggacgagactgaagacgatcgtccagttgttcgccctgaacagctcgctggcatcttcgatgttggccagggtgtcgctttgccttccgtcagagacatgtaccgtgcggtcgcggaattgtacagcaggaagccgagagcgaaggccgaggcgatggagatcgatggctagtcgtgccacagttttgtttgtagatattaccatcatcatgaataatcattttctttgc

SEQ ID NO: 13840 - DNA, 2519 bp, Oryza sativa
  ref <308>: DATABASE ACCESSION NUMBER: AK111188
  ref <309>: DATABASE ENTRY DATE: 2001-12-06
aagcgaaaaaccgagtttgtatactcaataaattaagatggcgctgaccgcaggtgcgcgacaacgcacgctggcggtggggcgagagtatgcggtgtggaaaggccaggtctcgtcgctgtatcagtggatgagcgcccacaccgtggcgaccggtacggtgcaatggttaccggaggatgcgcccacgatcgcgcgcgaatcagaccgactgtcgcgcacgcggcaggtggtggtgggcacgcggctgccggcgtccaccaaaaccgggatcgacggcggcaacactctgcagatctgggagatggcgctgccacccacgcgtttgggcgatgatgcgcccgcagcgagtgcgcgcggcgcggccgcactcttttcagccgctgctgcgcctgccattgcgcccgctccggcgcggcggccagcgcttcagctcgagtcgtcactgttccgcgcgtcgcagcacgcgatgtaccccgtcaaactcacgctcggcgctggcattggcgctgccgctgcgtctacggcgatggctaatacgcagccaaacgcttcgagtgctgcggcgccggcggctgcggcgaactccagctctgcagtgcctgctgtagcgccggccgcagcagctgcggcagcggcagcaaacgatccgctgccgttcgaagggacactcgggcgcgtggttgggtacggcaattgggtgctgcggcgcagcgtgcggcacgtgggggaggtgtggcgcgcgcgctgcatgccacagcgaccgacgctcgtggccacgcgctccgccgcgcccgccgttaaggtgtacaacatcgggcagcccggccatctgcccgtggacatgcgcgacggatcggccgcggcggcgatcagcgacgcagagctgcaggcgcacccgcgtgagcgcggtgtttataaggagcgcgacgaaacgtgcattgccacgctctccggccatcaggagcacggcttggccatgtcatggcatcatcacgcggcccgcacgggccacattttgagtggcgtcgacgacggacaaatctgtctgtggaacatcgacgacaagccgcagcagtcgcaactgaacttcaccggcgtcggctcccaattgaataccatccctgcgcgcatgaccttcacctctcacagcggctcagtggaggatatcgcgtggagccgggatccgaacgcgccgaacgtgtttgcttccgtcggcgctgaccggcagctgatgctgtgggattcggcgcgcaaaacgccggcgagccgatggacagcgcatgtgagtgaggcgaacgcgtgcgcgtggtctccgcacaacccgtattggctgttgagcggcggcagcgacggcgacatcaaactgtgggatgtgcgtaaagcgtcgccagactgcaagcccatgacagtgccgcgtgccgggcgcgaagtgttcggcgtgcagtggctgccataccgcacccgcgctgctgcgtcgacgactgctggcgacggcgtgttcggcggttactgcttttcgtcgtttggtgcagagcggcgcgtgatggtgtgggacgtgagccgcagcggcatggcgcaaacgcagcccgaacagcgctgcggtccgccggagctgctgttcgtccacggcggtcacaccgggcgcgtggcggatatggactggtccgcggacgacccgtggtacgccgtgagcgtgtgctccgatgaggtggtgcacgtctggtccatcgccgacgcgctgcggccggtcacggattgggactaccgcgtatccccgtcgacgtgcattgcagccaccgcggcggcaccgacggcgacgccgatggcactggagaaaccgctgccgaacggcgccgccgcggcagcgacgcatccgaacggcgcagcggctggcagcagcaaacgcaagtccaccggatccaccgccgcatcggcagcagccgcagcagccgcagcagcagccgcagcaaacgatgaaactgacagcgacgatgagtcggtagccgcagcggcagcacccaaaccgccgggacgcggaaagggctggcggaagggcacgggcaaaggcgccgcagcggcggccgccaaatccgatgcgcccgaagggaagggcaaaggcaaaggcaaacgcggtgctgctgcggcggcggctgctgcggctgccgcggcggtggatgatgcgccgatcaaagccgagccctcagcgccagcgtcatcgtcctcttccgccgctgacgccgccgtcgggcacaagcggacccgatcgcccccgccgccaccggacgccactgctgcggcagccaccggtgcagccgacgaatcgggaccaccagcggcgaagagagccaaagccgaaccctcggaacccgccgcagcgccgtctgttgcggcacctgttcttgccgccgccccagcggcgctcgcgccgtgatgcgctgctgctcgttcgctggttaccgtttttgtgccatggcgtttgatcgatctgtttttcgatcgaacgaaaggaacttatg

SEQ ID NO: 13841 - DNA, 2324 bp, Oryza sativa
  ref <308>: DATABASE ACCESSION NUMBER: AK111189
  ref <309>: DATABASE ENTRY DATE: 2001-12-06
aaaaaactcgcggcctcctttcgcagccttgacatctgccctcaccgtccagcgcccgcccagcgagccccaagccgccgcccgcttaattctccgcgcgcccgctgccattgaggcctcgccgtcgcccgctgcacccgccagagcacctttgtcccccgcgcccgcctgccccagcagcccagcaccgcagctcgtcgaccccgagccgccgccgaatgcctgcgtgaccgcccgcactgccctcccgccggccgcctgccaccgcagcccaccatgggacagaacaacggcaagcccgtcgtcttcaccgaccaggtgaatctcaaccacttccgcctgctgcgcgttgtcggcaagggcgccttcggaaaggtgcgcatcgtcgagcgcaaggacacgggcctcacctttgccctcaagtacatacggaaggatgaagtcgtacggtccgagaacgtccgcaatatcatccgcgagcgccgcatgctcgagcacctcaaccaccccttcctctgcaacctgcgctacagcttccaggacatcgagtacctctacatcgtggtggacctgatgaacggcggcgatctgcgcttccacatctcgcgcaagaccttcaccgaggacgccgtgcgcttctggattgcccagctcggctgcgcggtgcgctatatccaccagcagggcatcgtgcatcgcgatatcaagcccgacaacgtgctgctcgactcggagggccacgtccatctcgccgactttaacgtagcgtccgacttcacaccgcacaagcccctcacgagcaagtcgggcaccctcgcctacctcgcccccgaggtgtacgagggcaagggctactcgtgcgaggtcgactggtggtcgctaggcgtgctcttctacgagtgcatatacaacaagcgccccttcgaggccagcagccatgattccctcgccgccaagatctccaagggcgagcccacataccccgtcacgagcccgcccgtgtcaatgccctgcttacacgccatcagctcgctgctcgagaagaacaggaagaggcggataggcgccattggcttcgagagcttcactgacaaccccttcttccggccgctcgactttgaggccctggaacgcaaagagataacgcccgtcttcatcccatcgagcgataagacgaatttcgacgctacgtatgatttggaggagctgctgctggaggaggcgccattggaggcacgcgcaaggaggcagaagccccgagaagctctgaaagaggatgcgacggaccaggagatccgtgcggaggagctgcacaagatgatcgagacgctgttcgagccgttcaactacacaaccgccggagaccagcgtcccatcgccgtcgctgttactgataccgtcgactccgtcggcggatcacggacgagcaaccagagcaacagcgagaacacgccagcttccgtcacctcacaacaagatccgtggggccgcccggtccccagcaatgcccaggactcggaactccagccaacacgttctaccacgaccgcacggtctaacacgcactccccgagtggaagccccccactcccgacagcaccgctgaaccacacgcaagtcaccagctcgccccaatcacaacgcggcgaacgcgccgagcgagccgactacttccccaacgatggctccgaggttccaacaccgtccttctcccgtcccatgaacagccggccgcgcggctcacatcgcagcaccagcatgggcggaggcgtacagaccccacaagctgtcgaaaaaccctctggcatgctcggtttcctcagccgcaagaagggccgggacaggagccccaaggccaaggagaggggtgtgctaggcaaagagggagcgcgagtcatcatcagcaatacttgagttctcctcccacgcatacggctcgacgaactcccttgccatcaatactattcatacccggcttcgactatttttgcacggcgtactggcgtttgaacggcaatatacaacatctggttcgaacgttggcgaggcgcctcgcaattcgaatctgcatatatctgcatctaccactacctgagggtgtgcgagacggcgttggtggcagattgattttaccttgcatgttgggcgcgggcagaatagatgcgcttgatacagtgctgtacttgtacatgtggaagtggaggtggaagcgcttggcatgagtccacgctgaggatacagcggatctgacgctgcttctggggttcatgaacttagcttaatcatgctgcgcgatacgaaattatacaccgttctactcagcc

SEQ ID NO: 13842 - DNA, 2425 bp, Oryza sativa
  ref <308>: DATABASE ACCESSION NUMBER: AK111190
  ref <309>: DATABASE ENTRY DATE: 2001-12-06
cagcgttgaacgctcccgtggcgtctttcaacaccgctgctcagcagtccgcgtcgccggtgttggtctcggcgctaccgagctggacggcggaatccacagcttcaccgaatactgaagctaccgtggactctccgcgacgaagcaaaagcgttgtgaagaagtcaaccgcagcgagctccgagtcatcgcctgcaccgcaacgacgtaagaagtctcgaaaaccgagaaaggcaggtgtcaatgcaacggccactaacgctcccggcatcagcgctgcaaccggcgtagaatccgagtcgggctctgaaagcgacggcggtgaagacgcgagtgaagttctccccccgacgaacgcaatcactgttgcgccgcccactgcggttgcaagcccgactccagcgccgccaaagtcgatcgcgaaagaccccgttggcctcccaccgcgtccctcgcgagggaacttaaagtctggcgctgaaccatcgaacgaagccgcttctccgaacgcggtgccacccgcaacgcaactcaccacgagcgaaagcaccgcgcccaaacgcgcagtgagcaacgtcaagccagcagcgccgacggcgacagtaacggaagctcaaggtgcggccgttcgcactgctgacgtcgaactagttcacgcgccgcccgcgagcagcggtgacattcgcgccgtgttcacgccggacgcgtccggtcggcgcatcgggaccccgcgcaacggcgagcgccaaggcaactcgcggacgacgctaattatgagtcatgaagagatcgattccttcgtcgccgtgccactacaaagtgcgcctcaaccactgtctcccgtgaaggctaccgctgcaacgataggaacccaaacggtcgtcacgggtcgccctggtgtcgaagccttgccaccgacggtctcgactgggaaggcgcagagcacatccacaaccgcgtcgccggtgcttcttaagccagtgtcgcgggacgtggaaacgtcgccgcttgcgctggcggcggaagatgcgtcgaccagtgcgcttccttcacctcgaaccaagtccaccgacgcaggcaacagcaaaaacgccacacctgcggtcgtcgtcgtcgtggaagagcctgaccctgtgcttgtgcagcatgtgcactcgggtgggactccagactggtgccacaatttgctcattccgccggcgtcgctcactgaagacgaaagcgcgctgttctcgtacctgcccgagcactggttcgcgttccataacctattgcaccaattcctgaccgagacgcgcaaacggcttcggatcatgacgcccatcgcagaccctgccgtgtacattggtgacgctcacgagcgctcgattgcagatgttcacgccgccctgcggttcgacgtcgacgcgctgtcagcgctgttatcgctttggcgtgcgcaggacaagcgcagcaagaccgaggctacgcggaagctccacgagtaccacgcatccgtgaccaatctcaagcttcaccagctcgatgcgaaatgcgctgcgcacgccgccttcatgtcgctgaacttggcggaccgtgatgcgttgcagcggtatcgcatcgagaaggcgcgtcgagcagaggctctcgtccatcagatgacgcaccctgacgatgtcgtctctggcctcccggggatgccacgcctcgaattgtcaggcgacgaacctaccagcacctttgcagcggcgacgcaccacggcgcgacctcggccttcgttaacgcggtgtcctcgagccggcggtcgagcgtggcgccggaaagcagccggccggggtcacgctccgagccactttctccagcgacggccgcgctggggcaacagcatcagcagcagcaacagaatcgaggctcgatagcgccacttcaaacgacgacgattctgcctccgatcgcgactcgccgcccgcgtgccgttcagttcggcgacggcgccgcgggtacagccagcccagccacgagcgtcctgcccgtatcagaacaacagctgccgctgcaaccctttggtgcgatcggtgtgcacgtgaaaccaccggttggaagtgcttctggatccgcacaccaccgccagagtctcgtcggtccatttggcatgggaaatgcatcgattcggcgcgcgtcgcagtctgccctgcatatcgatttagggccgcaaacagccccaagtgggccgcggcgacagcgatttcggtgtcttccctgtctcgaaaacagtccgaggcgggcggtatcaccatcacttcgcctctcaccgcgcgtgccgttccacgaacggggcaccgtcagagtgttcgatcctgaggaagctgagtcagctccctgtcaattcggttcgtgtgtgagaaggatgtgtgttgatgagtcttaccggaatgtattgaagcc

SEQ ID NO: 13843 - DNA, 2362 bp, Oryza sativa
  ref <308>: DATABASE ACCESSION NUMBER: AK111191
  ref <309>: DATABASE ENTRY DATE: 2001-12-06
agcttgctagctgctgcagcctctgctcttcctgcagatgcaatcagtgcagtaaactaaattaagcagagcagacactgcactgacatggcacagcactagaagcagcagaggcagagcaagcagaggaagcagagctagtgctctccaagctcagcaaaggtgcttccatttttgttccaatttccaatggaagctacagtgccagtgctgctgctagtgacagtgctgtctttgatcttgccctccggcattggcgccgccgccgccggcgacgagcggtcggcgcttctcgccttgaaggcgggcttcgtcgacacggtgagcgcgctcgccgactggaccgacggcggcaaggcgtcgccgcattgcaagtggaccggcgtcgggtgcaacgccgccggcctcgtcgatcggctcgagctctccggcaagaacctgagcggcaaggtcgccgacgacgtgttccggctgccggcgctcgcggtgctcaacatctccaacaacgccttcgccaccacgctgcccaagtccctgccgtcgctgcccagtctcaaggtgttcgacgtgagccagaactccttcgagggcggcttccccgccggcctcggcggctgcgctgacctcgtcgccgtcaacgcctccggcaacaacttcgccggtcccctccccgaggacctcgccaatgccacgtccctggagaccatcgacatgcgtgggagcttcttcggcggcgccatccccgcggcttaccggagcctcaccaagctcaagttcttgggactctccggcaacaacatcaccggcaagatcccgccggagatcggcgagatggagtccctcgagagcctcatcattgggtacaatgagctcgagggtggcatcccgccggagctcggtaacctcgccaatctccagtacctcgacctcgccgtcggcaacctcgacgggcccatcccgccggagctagggaagcttccggcgctcacctccctctacctctacaagaacaacctcgagggcaagataccaccggagctcggcaacatctcgacgctggtcttcctcgacctctccgacaacgcgttcaccggcgcgatacccgacgaggtggcgcagctgagccacctccggctgctcaacctcatgtgcaaccacctcgacggcgtcgtgccggcggccatcggagacatgccgaagctggaggtgctcgagctgtggaacaactcgttgacggggtcgctcccggcgtcgctcggccggagctcgccgctgcagtgggtggacgtgtcgtcgaacggattcaccggcggcatcccggccgggatctgcgacggcaaggcgctcatcaagctgatcatgttcaacaacggcttcaccggcggcatcccggccgggctcgcgtcgtgcgcgtcgctggtgcgggtgcgcgtgcacggcaaccggctcaacggcacgatccccgtcgggttcgggaagctgccgctgctgcagcggctcgagctcgccggcaacgacctatccggcgagatccccggcgacctcgcgtcgtcggcgtcgctgtcgttcatcgacgtgtcgcgcaaccacctccagtactccatcccctcgagcctcctcaccatcccgaccttgcagagcttcctcgcgtcggacaacatgatctccggcgagctccccgaccagttccaggactgcccggcgctcgccgcgctggacctgtccaacaaccggctcgccggcgcgatcccgtccagcctggcctcgtgccagaggctggtcaagctcaacctgcggcggaacaagctcgccggcgagatacctcgctcgctcgccaacatgccggcgctcgccattcttgatctatcgagcaacgttctcaccggcggcataccggggaatttcgggagctcgccggcgctcgagacgctcaacctggcgtacaacaacctaaccgggcccgtgccgggcaacggcgtgctgcgctcgatcaaccccgacgagctggccggcaatgccgggctgtgcggcggcgtgctcccgccgtgctccggcagccgttccaccgccgccgggccgcgctctcgcggcagcgcccggctcaggcacatcgcggtggggtggctggtcggcatggtcgccgtcgtggccgcgttcgcggcgctgttcggcgggcactacgcgtaccggcggtggtacgtggacggcgcgggttgctgcgacgacgagaacctcggcggcgagtcgggggcgtggccgtggcgactgacggcgttccagcggctggggttcacgtgcgccgaggtgctcgcgtgcgtgaaggaggcgaacgtggtgggcatgggcgccaccggcgtcgtct

SEQ ID NO: 13844 - DNA, 2425 bp, Oryza sativa
  ref <308>: DATABASE ACCESSION NUMBER: AK111192
  ref <309>: DATABASE ENTRY DATE: 2001-12-06
aacgaacgctaaaaaagtaacagtttctgtactttattgcctacgtcgtcacatgggcaagaagacgcgatcatcgtcgaagaagcgtgccgcctcccagcacgaaagctctgccgcggacgacgagctcgagctgcacaacgttggcccgccgctggactccgagcctgtcgacgcagccccgccgccgcctccgccaccggtggaggaggcgccgagctccccggcggagaaccccttcttcctgcagtgcggtttgggcatcgtcctcttcctcgccgtggtctgcgtatggtccatcgtcctggttcccgtgtggatcgtgtcagacgacagcgacaagccggcgcacttgaccgccatctacgacgcgtccaactgcatcgtcaccgcacggcgtgctcagatcacaacgtcgagcgcggacgccgccgcggtggtttcgtgcgtgcgtcacctctcctcgcagatttcaagcgcagcggtgtcgctcgcactcactgcagcaaactcgaaggatttcgcgaccgctggcgttcaactgaaagcagcgctttcggctctggtcgccgacacgttcaacggtgtgtcctccaagtcgaagaccgtctgggtgcctgtgctccgggccctcgcggtcgaatcgacgcgtggctacgcggtgagcgcggcgcaggtcggaaacgcgcccaccagccgccgcttctccgacgtcggcgccctcgtgtcctccgccgttcgccccttgtccaccttcggcatcggcagccgtatcaagaccgtcaccgacgctcagaacgcgctgctgacacgcaacgtggcggaggcggtcgacgtcgcagcaaccatgcagctcaccggcgttgcgccgctgggcgcggtggcggagatgaagctggaggcgctgcggggcctcgacgccctcagcgagctcatccgcaccgccaagtccgactccgattctgtctcgcagcgcgcccttgcagacgccatcgtgagcgggatccttctgtcgctcgccgcctgcgtgtgcattggcggcaccgtctttgtcggcgtccttacgcggcgctactcggtcgccgaaggctatcgccgcgtcgtgcggtccgacttcgaagtggtcgctgacagtgcgcacgccgtcccgaagagcagcgtgttgcgtgcagtgagtctcgcctgcgccaagctgtcagtgatggagtccagccccgatcccggcatcgacgacaatgaaggtcagctcgtgctgcacctgcgacgtgtcaccaagagcatggaggcgcttcggcccttcgtcccagagtacgccttctcgcgcaccaagaccttcgatgccttcggtcgcacgttccgccgcctcagcatgggccccggcctggagcgcgagccgcggtgcacggtcgtcgtggtcggcctgcgtgacttccacaaggaaggcgcggacctcagcgcccttcccgagttcatcaacgcggtgcacgccgctgccctcgcgggtggcggtacggttgcgcaggtgtcgccgacccacatcatcgtcgtcttctcccgcgaggccgaggaggcttccggcgaggagtccattaacatggaccgcgtcaatggtggtgtcgaggccgtgcgcaccgcctttgccattctgtcgtcgggtgtgctcctgcaaaagcagtacccttcactgtccatcagcatcgccatctcgcagggctgcgcgctgattgggccgcttacaacgcactccgtcaaggtgttcgccgccgcaagcaacatcgtcaccacggccatccacatggaggcttggacccgcgacttaggcatctgcgttgtctgcgacacagcgaccgcgaccgcgatcgaagaggaaatcctcacacgcccggtaagcctgtgtaccgcccgcagcactaacatgcacgaggtggtgctggactaccgcgtcggcacgagcatccccggcgtcaaggaacggtgcgtgcggtggacgcaaagcttcgagcggtatgaagaagccgttcgcacactctcgcccgacaagctcgaagaagccttcagcgacctgcaagcgtatcggcagttcgccatcgccgcatcgggtagcgccgagctcgtggaagacctcgtcttcacgcgtatcgcagagcacctgcggcgcctgatggcggatattggcgtcaagttgtgaaaacccaacgtctcaatgtactggtagagtgcccccctcccgcgtgtaacgccccccaacgcgtccaatagggggtcaaacctcttctctctcagtttcggcggccttcgccgaaaatggaaatgtgccatcgaaccgcctgcggctttgagtaatgcatggccctcttctgtcgttcgttgtttcgctcacgcgaagtgttacccctttcctgatgtgtgatacaccacccacttc

SEQ ID NO: 13845 - DNA, 2777 bp, Oryza sativa
  ref <308>: DATABASE ACCESSION NUMBER: AK111193
  ref <309>: DATABASE ENTRY DATE: 2001-12-06
aacaaacgctaaaaaagtaacagtctctgtactttattgacttcacatgcagactctcgcggctgagtacgcgcggcgccgtgtgcgcgtgcgtgacaacttcaagacttcgatcggcttcgatcggggttcgtctcgttcgatcaattccgccgcgtgctcggcatcacggagtctttcaagatcatcacgcctgaccaagtggaagagatgatcaaccgcttcggatccgagaacaagttccgctatgacgaattcctcgctgaaatcgatgccctccagcagtcaggcgtcgctgtgcaagaggccgcggctcagaacgtgccggaagctggcactgctctgtaccacatcttcctcgcatgcgcgcagcaagccgctgctacgggcatcgatgcgcgccgcagcttccagcccttcgacaagcacaacaccggcaaggtgtccgcgtctcaatttgaccggtcgttccctttccgcctagatcacaaccagatcacggctgtgaagcagccatacatcgtggcgggcggcatcgaagtgaattacctgcgcttctgcaacgacctgcttgcgttccgcgccaatctgactcagacgcagctgaacgcggcggagtggggtgacaacaccatcggtaagtccgccaccctcgagtcgccgttgcgccaccgcgctgccactgcgtccgatgtgtcgacgacgctcagcgagctcaagttcaacctcctcaaggagcacgtcaacatctcggattccttccgtgagttcgaccggctgcgcagcggcaacgtcagctcaggccagttcacttctgccctcggccgcattgttttgcgcggcttcaagctgtctggtgacgcgcttgccaagctcatcgatgcgtaccgtgtggatggctcggaccgcgtctcctacaatcgtttcctgcgtgacctcgacgccacggaacgtggtggtccgcagctgaacgacctcggcagcgctgaaatggcgcgcttgaaccttgttctggacaaggtgcgcaccgccgttcgcacgcgccgtgtcaacctcaagccgacgttccaagacttcgatcgcgccaataagggcatcttcctcggccttacatgcactcgcaaccgcttcgagcgcgttctcgcggtgatcaacatcacgctcagcgtggccgagattgaactgctcgagcagcgttattccgtctccaaggccaccgaagacgattcggactccatcaactacatcgccttctgccgcgacgtcgacctgcaggacacgcaaatcgagtcgccggccacggtgcgaccgctgcccacgttcggcaccggcaccttcaacgccaccacgggcacgacgctcgtgaagaaggacctcggcctcgaggctgtcatcgacatcgccttgattcagatcgccgaccgaagcattcgcctccacgagttcatccgcgatcacgatccgctgcgcagcggcgtcgtcgcgcgcgacaaacttgagacggcggttagcgtgtccgggctccgtttggagccggatcaggttaagacccttctcgacgccttcgcgatcgacgacaagaagaagcagatcgcatacccccgcctcctcgcggcgctcgacatcgacgcaccaggggagaacccggccatgcacaaggttgatgaggcccgcgcccgcgttacggcagaggttcaagccgcgacggccgctatgcactcggagcaactggatgctatcctgcagcgcatccgcgacgacgtctctgcgcggcacatccttctgcctcccttcttccaggactacgacaagcaccaccgcggcaccatcaccgctgcccagttcgagcgcgtcatctgccgccaccgccttcccgtcagcaccgctgatattggcgtcctgaagcagtacttcgcggatcccgccgacgctaacaacgtgcgctgccgtgacttcatcgcagctgttgacatcgcggaggcttctcgcctgccgaagcacctgcgccagcagcaggagcagcccaccgctgctcaggctccgtcccccgtgtccgctggaaaggagctgccggccctcggcgcggttttggccaaggtgagtcggttcgtgctgagccgcagcctccgcgtctcagagttcttccgtgacgccgaccccctgagaaagggcttctgccacgagtcgcgcttcagcggtgccctcaacgcgcttggcatcggactgacggacgccgaacacgagacccttcgcactgcgtaccgtagcgagcgcggtcccaacgccgtcgaccacgatcgcttcaccgccgagatcgacggcctcgagttccagaaggcgaccggcgcactcgacctcacggtcagcgacggcaccgtcctgaaggcgcctccgccgctgggtgactttgaggcggcacgccaagcggccaacgacgatcccttcctccaaaagttgctcggaaacgtccgatccaccgcttcggcttgacgcatgagcatccgcgcgacggtgcaggacttcgaccgcctgcgcaagggacgcatccctcaatcccagttcttctccgccctcagcgcgaacggaatcatgttcaactcgttggagacgagcaagctcgtggcgctgctgggcggcgagggcaactccatcaactacaccatcttctgccgcctggtcgaggagtcgccgtagaacctgtaccaacgccccgttcgctgtattcaactttgatcaaagaagcggagtgtgaatagccaccccagttcatcccccac

SEQ ID NO: 13846 - DNA, 3471 bp, Oryza sativa
  ref <308>: DATABASE ACCESSION NUMBER: AK111194
  ref <309>: DATABASE ENTRY DATE: 2001-12-06
aagcgaaaaaccgagtttgtatactcgataaattaaggcaggatcgtgtgcagcgacgatacgacgcgatgtttcagtggcggcgtttccagttcttcgaaaaagagctgctgatggaagaggacggcaaagaggagatgaagctttttaaggacttcaaacccacgtgcagcacgtcagggcgcggtcacttggtgtttggtgacggcaaaggcgtgatccgtatcgtcaaccgcgactttttgcaggtgcagtttccggcgtatgagatcgatgtcgtggcggtgcaccagctcaagcgctcgaacctgctcgtcagcatcggaaacgacgtcatcgatggtacgtctatcaagatttggcggctggacaaagaggatcagttcggcaacccgttctgcgcgcgcactatcaaagtgtttaaccaaaaattcccgcccgttccggtcacgtgcttctccgttttggaggatctgacgcaactcgccattgggctggggaacggcgctgtgatgctgtttgacggcaatattttgcgcgatcgcgcgtgcaagcaggagctgattcagaatttggggccgtgcgtgacgggcgtgcacttccgcgaggtggagagtaagcacaatgcggtgtcgctatttgtcgtgacgtctgagaaagtgatttcgtacttcaccaaagcgaagccgacgaaagacggatatccaaaggtcgtcgtcgacggcgaaggcggcagcgaactgcgctgctctgagctgacggatgacaagaaactcgtcgccggtcgcgataaggcggtgtacttttatgaggccgaagagaagagcatttgcttcgggtttgaggggatgaagaagtcgctgagttggttcaactcatatctgattgtggtgtgtgagagcgggaaagacatcaaaaagaattcgctgacgatttacgacctcaaaaacaagttcatcgcttatgccgcgaagtttgagagtatcgtgaatctcgtgagtgagtggggcagcatcttcgtgctgaccgacacgcagcgcgtgtatcagctgagcgaacgcgatttgcccaccaaaatggagatgctgttccgcaagaacctgtactccatcgccatttcactggccaactcacaggactgcgacaaaagctatatcatcgatatctttcagatgtacggcgatcacctgtactcgaagggcgactacgatggcgccatttcgcagtacgttgagaccatcaaatacgtcgagccgtcttatgtcatccgcaagttcctggacgcgcagcgcatccacaacctcacgcgctacctgcaggcgctgcacgaacaggagcgtgccaacaccgaccacaccactctgctgctcaactgctacacgaagctgaaggacgtcaagacgttggacgagttcgtgatgagcgacgggtcgcgcgacaaaaaggtgaatttcgacgttgatacggccattaagacgctgcgtcaggcggggtacttccggcatgcgctgtatctggcggagaaacatcgcaatcacgcgatgtacctcaagatacagctcgacgatgagagcaactttgccgacgcgctcaatcacatcgccagtttggacttcgtcgcggccgagcgctatatccgcgaatacggcaaaaaactcgttaacgcactgccggaggagaccactcagctcctcatgcgcctgtgcaccacgtaccgacccacgcccaagcccacgcccccgatcacgctcggcgatgcgtcggcggcacgggacggcaaagacgcgaaggacgtgaaggacgtgaagggcggcgacagcaaaacgcgcctcgactttgcgggcggcgcggcgggtggcatcgcagcggccactccgttgggcggcggcagcggcgccatggggtcggcactgggcactgtgggcggtgtgacggcggacggacgtaacgcgatggtggcggcggcgttcgcgagtgtgggtatggcatcggtcaaagcgggcgctgtgatgaccggcgttttggaggacaaagcggacccgcagctgcgcgccaaagcggaggagttcattcacttcttcgtcgatcgcgcggactacctgcagcgctttctcgaacacatcaaagacaccgatccgaaggcgtcgaacgtcatttacaacacgctgttggagctgtatctgcggcctgacgctgaggggcccactatcggcggagcgtcagcggcggcgggcgcgggcgcgggcgcgggcgcgggcgcgggtgcggatgcaaaggacgtgaagctgtcgagctctccgtcggacgataagagcggcggcgcggcggccgttgcgggtgcgggcgcatcgggtgtgatggcgaaggagcacccgcggcaccacaagatcatggcgctgttgaagtcgtcacaggcgcggtacgacacggaccacgccctggtgctctgtaagatgtacaaatttttccgcggaatggtgtatctttacgagaagctgaagctgtaccacgagattgtgcagcattacatggagaatgacgcgcgcaacaaaatcctcgctgcgtgcaagaagtacggccccaacgatccgcagctgtgggtgcaggcactcacctttttcgcagccaaagcggaagtgtgcgaaaaggagatcattcaggttttggagaatatcgagcgccacaacctgctgccgccgcttatggtcgtgcaaattctctccaaaaaccacaccaaaccgctctctgtcgttaaggattacatcatccgcagtctgcaggcagagaacgccgttatcgtggccgatcagcgcgagatccagcgctatcacgacgaaacggcgcagcaccgcgacgacatccatcagctcaagacgcgcgccaacacctttcagggcactaagtgccacgcgtgcacttcgtcgctgtcactaccggcggtgcacttcctgtgtctgcactcactccacgaacactgcgtgtcggacaacagccgccagtgcccgtcctgcgcgccggagttccgcaaagtgatggacatgcaggaagccatgcgcgcgtcggcctcacagcacgacaagttcttcaaacagctcgaagacagcgccgacggattcagcactgtcgcggagtactttggccgcggcgttttcaacaaagcaaagcccgaagacgcaaagtccgccgcggaaaaggcgcgcactgcgtcggctgcggctgcggacgactaagtcctgcgtcggccgcgacggcggccggttgcgtcgatgcggctcttcggtcgcgtctgcgccgctctctgctgcgccgaacaattgcaacacaccaaactctcatcgtttttgtacagctctctgcgtgcgcgtgcctgtgctgcggtcttctttgtctaccgctgcgtgcgtctctgctcgtgcgcgcgttccccccgcgattcggtttgttgaaaccaaagaaagaccttcgttttac

SEQ ID NO: 13847 - DNA, 2539 bp, Oryza sativa
  ref <308>: DATABASE ACCESSION NUMBER: AK111195
  ref <309>: DATABASE ENTRY DATE: 2001-12-06
tcaagacggcaggcgccccgaccaccagccaccagccaccggcatcggcacccccgatcgcgaccaccccgccgccgaacgccgccgctgccgccgccgcctctctccgccaccgccccagctcgccgccccaccgtcgagcgccaccaacccgccgccaccgtgcgccacttccacgagaggaaaaaggaaaccctaatttccaaatccaccgcttcttccgacaatgtcccgaagaatcatgaatcgcgaatccttcaatcccccctccctacccaatctcgccgcctcccgctgctggccggagtcggtaattctggctaaccgggcgtacatcgccgactgcaagaaccctacaaccgcaacagcacagtcaagagatggtcacaccgtgcaaatctctttctgcttcgccgaggcgcctgtgatctcatatttctgtgcgcactgctacaatcccagggttaaggttgagttcttcaccgagcccatcatagtggccggggaaggtgcttttgtcgtcctccgcgttcacttatcctcgccgttgctctctgaattcttcatctacagggcgggtccagggttgccatcactagagcgggttcaagatcccacaggttataattctcctatcttttacctttctttgctaggcatagcatcttgtgacaatgatgatgggggaagctgtttacttgttggttttcgcaaccgtttgacccactatgaagtttacgtctacacttccaccaccaagacttggagcacgagaaagttggatctgtctcctggaattagggctattcgacctcaaaaggtgatcaatcttgggaggggtctactaggttgggttgatctttggcatggaattttaattttcaatgcacgtgatgaacaacctcagattcagtatgtcccgttgcctgagcccatgccactcaacaaggaaagttttcgcccatccaatcgctcggaaagctgccctatgttgtttcgggatgtcatttgtagcagcagcggtgagatcaagtttgttgagttggaacaacgacagagggaaatacaacctattcctcaagagctagaagatgtccgtcaagaatctaaagaagatgtttgtgacagggatgttttagatgattcatacctgatgtcatgtgcacacatggacgatttgcccaaagaggagacaccatcctttgttggtgatggttggagggcagtgacttggagtagattaatttcgtcaaattgctggcagaaaggttacgtgattgacagtgatgacatgcaatcaacatatgaggtgttgacatctacacaaagagacaaaggtgttgagatgttaagattcagggatctcttctcagtttttcccaccctgagcctgaatggtgctggtgatcttctttacctcaggagcactgtgaaatttaaagatttaaatggttgggtgtcttccattgacattggaaaaaagacaataaaagttctcaaaccgtattgtaatggaaggcatatcccatttgtgcagatgttccggtcttgtgtattatgccaccatctgacagtgctacctggtcctgaaaacataggtcggttcatcgaaacaagcagtaatgagaatcatccaaaaactatagcagctagcattatgcctgagtctaactgtttggctggaaacaaaaggtcaagatcagccacgagatggtctcctgcacttcgtggctggccttctgcgagagttgccaaaccagctctgagttggaggtcatgcccaccatcactttctccagtttcgtcgacttatggccttagaaacacagctggttaccatatggcacaaacatgttgctttgaaaatgatccccgtgcaactgcgaacacaaccccgaggcatcctgagaatcaattcactcagcatggatatgagcagcgggaaaatgatttcattttgtctgcacccaactttgttcgctggcataggccgccattctctgctggtggaactctgcctccacctcccccaacgcagcagccctcagcttttggtactctgcctccgccacgcccatcgcagcagttttctgcatgtggtaccatgcttccgccatcctcatcgcagccattctgtccttcggttcgatcgctcgcaatgcagacgttcgctactcctggtccaattctgcctggacctcctgttactccaatgcagtggcctgtttttatttctcctccacagcagcagctttctgcctgtgctgtatggccgcaggcaggtaccctgcagcaggaactgccaccccatatcccgttcagagctcatcagtgcccgtgatgatcctattcttaatgaagctggttgaatagacgggcatcttctcattgcaggagaaaatcttctcgtggaccttagttactttatttgttaaatccagaattcagtccgtcttgtgataactattgatatacgaacctttctacgtggaccattgctgatgtgttcttgcttatcatgagttctgtgatgttgtgt

SEQ ID NO: 13848 - DNA, 1982 bp, Oryza sativa
  ref <308>: DATABASE ACCESSION NUMBER: AK111196
  ref <309>: DATABASE ENTRY DATE: 2001-12-06
gaatcctcgccttccactcgcgggaggctcttatcgccaaaaaccctctcctccccggcggcagcttcgtggcggcgggttcgatgaggccgtcgcccatggcggtgcgggcggcgggtggctgctccacggcggcggcggcgacgctcgccttcttccgcctccgtcccctcggccgcgccgtccgcccggactccgctcgcgccggctggcacttctccctgtacggcggatgccggggacgccaggtccatggcctcgtcgactccgtcctggaggagctccgatcacagaggcgtggtcgggtttcggcaaagataggattgcaggggacaaaggaactgtctgacaataagatagataagagaacattgcagaaaggcctgcttcttgaatttcagaaagattctgagagatttttgcttgctgttgtagaaaggcccgatggaaagaaaagctggaaggtgactgaccagaatggtatattgtcttctataaaaccccagcaggttacatatgttatacctggtatcatcaattacaatcattcaagaatagatgaatttatcaagaaagcacaagatcttttggaccctactgttttggagtgtgcttggatggagctttctgagaatgataaatcagtaacagtagaggagttcgcagagatagtttatggtagcaaggagtctctggaaagctactgtgcacacttcttgttatcaagggacatagtctattttgtcaaggtcgaaagccgggattcttctgtgtaccaacctcgcccacctgctcaggtggaggaactcttacgacggaaacttgctaaagaggcagctgagaaggagatggaagaatttgtccagttaatcaagtctgccaaagcattgcctctagatgctaaaccttcaaaagattcatggttgatggaggagaaagttaagcgaaaaattgagtcacttcaggcatatgcagttgatgcatgtgatgatgaacaaaggagaacggcaggaaacattctcaaggctatgggcttttcaaagacttcatcagctgctctaaagatccttataaatattggatacttccctgtgcatgtcaatcttgatctttacaggtatgatgttcgcatcaggtacactgaggaagttttgtcagctgcagaggaacttctggtagactgtcctgactcagacaaggatatcaggaaggatctctcaactttgaaagtgtatgctattgatgtggatgaagctgatgagcttgatgatgcactaagtgctgctagattacctgatggtaggataaaggtctggatacatgttgctgacccaacaagcttggttcaaccccggagcaccattgacagggaagcaatgcacagaggaacctcgatctttttaccaactgctacctttccaatgttcccagagaggcttgctatgaatgctatgagcctgcaacaaggcaggggttgtaaatctgttactgtatctgtgattttgcagccagatggaagtattgcagaatatagtatagagaattcaatcataaaacctacctacatgttaacatatgagagtgcaactgaactactgtatatgaacctggaagaagaggaagaactgagaattcttcaagaagctgcttcccttcgtgcacagtggcgtcgtagtcaggagagccaaatgacttgtgctcctccatcagcaggacttagcaagtcataagcggaagttgcctccttgtcaatgtcaccatccagcatgttctcaagtgtagttcaaataccattggactttatttataggagccatgtgaaccattcaaagagcctagtattcccttgcctagctgggagtgataaacattcaaaagttatcaatacattgtctttttatgagtcatctgtgattagcaaatgaaagcagaatgaaatgcaactgtaattttcttataaagcgagatacacatggttttct

SEQ ID NO: 13849 - DNA, 2992 bp, Oryza sativa
  ref <308>: DATABASE ACCESSION NUMBER: AK111197
  ref <309>: DATABASE ENTRY DATE: 2001-12-06
agcagaagcaatgtcgtggctctaaccgggttgggtgacgcggctgcacagcagctgctgtccagctgcaaggccatgtttgagctagggttaactgcagcagctgtaccgccatcacaggtggtacaggcagtacaacacatcagcagcagcagcagcagcagcagcggtagcaatgatgaagggacactgtggctggtttgtcctcctgctgctgttgtcaacttagtggcttcagctgaagcgttggggctgcggctcagcagcaggcaggagcagcagctgatgatcccggtcttggctgcagcaattggcagcagcagcagccgcagcaaggggttgagttaccctttggccatcaagctgctgtgctgttgggcgtcaagtggtgcaggagtcccaagcacactactgcagctgctctctggctgcatacagagacacctacagcagcgccctgagctgctgctgcttctgctgcaccgcatgcagcagctagacaagcaacagcgccagcagcagcagcagccgcagtggcagtggcagcggcagcagcagccgcagtggcagcggcagcagcagccgcagtggcagcggcagcagcagccgcagtggcagcggcagcagcagccgcagtggcagcagcagcagcagttggacgctgacccctccaagccggatgtgcttgagcaggtccgtcacacagtgctcagccagctgccgggacatgttataacagtgttacaacagcaggtgcagcagcggctgttgctaaagggtctgaagcctgaagaattgcagtggacggctcaggatctgctcaacctgtcggccgccctgactcagctgccgctgcacctcacaaccgaaattgcagcacagcagctgctaccggctggtcgaaagctgcttcgagcagcaatcagccaactgaatgatgcccggcgccccctttacgctaaaggcagcagcagcggaggcagcggcagcaggcagttacgcaatgcagcgtacagcagccgcttcacgcccgtccagaccagcgtctggatgcacacaatggcaaagctgctgccagcctggcaccagcgcggcgtcgtaaccccggacgaaaagcggcggctggcagcagcgatcttagattacaccggcgaacttcgcggcgtgaagggcgtctggacgccttcagcacttgtaccgctcgtgcaggcagtacaacagctggggctggcctcggcggcggggctggagtggtgggcggcagtacaagaggcggtactgctggagctggatctgtactggcctgctcagctggtgcgagtgctgcagtgcatggctacagccggggctctgcttgatcctggtgcgctcgagcttcactggctgccagcaatcagcagctggtttgtgggcgagccgctgccacctgctgggcagaacagcgcagcaacagcagccgccagcagcagcagcagcagcagcaaggttgtgggagggcagctggcggcagcagtgccgctgactgtgcctcggctgatcgacctgcttgaggttctagcagagctggggcataaacccaaggacagccgctggtggagcagctaccaggcaacactgcagcagcagtgtgatgcagtgcagcagcagcagcagcagcagcagaaacagcagcagcagcagcagcagcagcagcagcaacagcaacagaaaccgttgtctgctcaacagattgttcgtatcatctggtccacaggcaagctgcgcttagaaccagaaccatcactgctgtcctggctcttgcgtatgcttgaagagcagcagcaggagctctctcacctcagaccaaagcagtgtgttgaccttttcgtagggcttagcaagttgctgccaaagaacccaggggtgatggaccctgggttttatcggcagctgtgtgagctgctgccgtcaaagcagctggtggctggggatgtcacaaacctggtccgctgcctgggcagcattgctgatggcactgccgagggggcagtatcaggggcactggtggcagccctgaccaccagcagcagcagcagcagcccggcacagcagcagcagcagcagcagcagttgctgccgccggagaatgttgtgcagcacctgctgtctgtttctgaggcgagcttgggcagcctgaagggtcgggcactgtcaatgctgctgtggggtgtcaggaagatgggctacaagccaccggagggctggctgcagtggtaccaggaggctgtgatcgccatcatgccaaagctggcagactatgaagttgccatcgtgttcagctgcctggtgcacacggggtgcgccatagcccctcctatcctgcagcagctgctgtcccgggagccgcgagaaagcttcagccccggcatcatggcagacctgcagtcagcactagagcttcttgagaagcagcaggttgaccagcttggggctgctggggtggagctgcagctgagactgggactgaatggctttgcaggacagcatcagaacagcagcggcggtctcaatggcagcaggtggtacgacccttggtatgatgcaactgtgcaggtgcaggagggagatgaggagcaggagcagcagcagcagcagctgcaggatatatctgaccaggcagagggggacggagcagcaggtgatgatgtgctgctggacattgacagcttgatagatcaggcgcgctctgaaattggggcctttggcagcgtgttggagcagcagcagcacccgcctggggatgactcagctgccggaaacagcagcggctctgctggcgaggagctaggtgatgcaggggagcagctggatgcagctactgctttgcggattcagcagcgcatggatctgatccaggagctgttcagggacgctcagatgggctgaggccgccgttgtgatccaaggagtattgttgatagaaaccaaaaagcctgttgcaacaaggctcatg

SEQ ID NO: 13850 - DNA, 1666 bp, Oryza sativa
  ref <308>: DATABASE ACCESSION NUMBER: AK111198
  ref <309>: DATABASE ENTRY DATE: 2001-12-06
tggccggacgcaacaaactcgtgcgcgccactctgctcgacacctccaccaatcgcgtcattcagtatcgcgtgcgcatgaccagcccgcgcacgtgcacgggcgatctgcacgccatcggtgcgctcttcgcgcccgcacccaaagtggccgacctatcagcgctggtcgacgccatcgccaacgccgccggtggaagcagcagcggcagcggcagcagcagcagcggcggcagcagcagcggcggcggcgatgcagcggagctgatgctcgccgacgccaacaccattgccgcaaccggtgccgctgctgacagcgcgactgcagccactgcggcgggcagcgaggagttggcgcgccgtacgctgcgcgtgcgcaacggcgagagctggatccggtacgagatcgtcgctgcagagccaccactggcgtgcacggaagtgacgaatgccgccgcagtgagcggccgtatcgcgctcgtgtcgcgcgggcagtgcacttttatggataaagtgctggccgcgcagcaggccggtgcggtgggcgttgtcatcacaaacgacattgagaacgacaacatcttcctcatgggcggtgacatgtccggtcgcgagaagtcggtgcgcatccctgtggtgatgatctcaaagggctcggcggcgcgtctgcgtatgtgcatgcagcggcacgcgacggagtggaatgcgcagaacgagcgcgatgcgcgcccgccatcgtcgccggcgccgccgctgtcgccgccgccgccgcacaacgtgcatgagctcgccgctgagcgcgatcagcggcgcgtgcagcgggagcgcgagcgcgctgccatcgagcaggcgttcgcgctcaaccgacagcgcttggacgagcagtcgctgacgttgggccaacacgtgaaggagagtgagttggcgcggcaccgcgacgtgcagatggcagcattcgaccgaacgcgcgccgacgcgatcggcaaattggaagccgccatcgcgcaagacagcacactgcacgccggggccatcgcagcggccgtcacagcagccaacgcgtcaccaccaccaccaccaccaccactagcaccggcggcggcaacggccgacagcagctggcggctgagcggtgagtacctgccggtggagatcattcaattcgaatacgacgcgcagccgaagcaacagcagcagcaaccagcgaactccaattgggcgtcggctccggcggagccacagccgccggcgacaccgatggcggctccggcgagcaatggcggcggcagcggcggcggcagcggcagcagcagcggcagcggcaaatcgaaaaagccgaagaagcggttggtcgcagagccgcggataacgggcaatcagagccgcttttcgtaccacgcgctgggccgttggtcgctcgatgtcgaggccaaagacggcaacttcatgctgcggctaccgtaaggtggtggtgtgttgtgcgcatggactcgtactaaacgcagcagcgcgcagcgcacgcgcggcggatgccgtaacgtttctcagttcttcggccgcccacgcgttcgcatctgcgcgctgtgctttttgctttgcatttcacacatttcaattccgcgcttttcgtttcgttccgtcgcgtccgaaacacactcttttccatc

SEQ ID NO: 13851 - DNA, 2351 bp, Oryza sativa
  ref <308>: DATABASE ACCESSION NUMBER: AK111199
  ref <309>: DATABASE ENTRY DATE: 2001-12-06
aagcgaaaaaccgagtttgtatactcgataaattaaggcggaatggcggtcgcacagaaggcgctgttcgttgcggcactggtgctggccgtcgtcgcgcacgtgcgcgcggccgacgccgatgcggatgcggttgcacacaccgaagccgtagccgaggccgagcgcacgcgcgggcagacggtggtggccgccgacgtgtcgacgtggcaacacctctcgcacgagcagctgatggcgctgagtgcgtggggcgccgacccgtgcactcgccacaccgttccgggcttcgactatgcacgcggctttgcggagttctgcagccgcttcggcaaagtgtacgccgcaaagacgcaaccgttgcgcttcgccgtgtggacagcgtcgtttaactgcattcatttcaaaaaccgaaccgctccaaagcgctcctatttcctgcgaatgaaccacctgttcgaccacacgtcggaggagtttctcaagaaattgggcgcccgcgacagccccgaattcgtcggttcgcctgccacagcgccgggccccgacttccacctccgcaccaccacacccaccgtcgacgcgcccggccacggaccttccgcggcttttgcgttccgtcaaacctctgccgatgccgatgccgacgccgatgccgacgccgacggcgacgcggaggcggacgcggatgcggacgcggaggcggatgcggattcggacgaagacctggcgctgctgcagacggcgaagcggacgcgcgcgcgtgtgtggtcgaaagcggacgcacattcgggtgagtcgttcgattggcgcgccaaaggggtggtgaacgccgtcgggtatcagcagaactgcggcaactgttgggcgttcagcgctgccacagtggcggaggcggcgtgggccattgcgggcaatgcactgcgcaaagtctctgtcgctcacgtgaccgattgcgcacccaaaccggcgatgggctgcgccggcggtatggccggagaggcactcaattcgctgatgaaagccggtgggttctgcgccgactcgcagtatccgtttcgcggatacagcgacacgtgtaaggcgtgcgataaagtggttcagctgtctgatgtgccgcgcaattacttcagcgaaaaaaatgggagcgctctgttcgggtatctggcggtatcgcccgtctccgtcgcgctcgtggcgtcgcccgtgtcgttcatggcctatggcggtggcgtgtacgacgcggcggagtgcaatgccgctgaagtgcgtaccaatcacgcgctcacgctcgttgggtacggcactgacccggaacacggcgattactggatcgtccgcaatcagtgggcggcgtcgtggggcgaacagggctacatgcggctgcggcgcggccaaaatcagtgcaaaatcgcgtccggaaaatgggccatcgcaaagtcaaaacctgccgcagagctcgggctcgtcaacgcgccgtccaccacactgccgccgggcccgcccgtcgcgccgctcagcccctgcgccgccaccgatccgaacagcaaagtcacgttccacggtacgtgtcaggacgtgcagtcgtgtacggacgccaaaatgtaccctcagcccaagttgtgccccggttcggcgtcggtacagtgctgcctgcgcgtgccgctcaccggcccggccattcccgcgccgcccacacccacgcccacgcccacgcccacaccgacgcccacggcaccggccacacccgccggtccggtgacgccgccgcgccccgcgcagcagcaggcctgtgcggcgctgcacccgacgaagcggatggtcgtcgcaggcgcatgcatcgattcgggcatttgcaatgcggcaaataacctgcccgttgctggcgcctgcccgggcgcaccggccaacgtcaagtgttgtctgtcgaagtaagccgcaccacagctccggtcatatcacacatgcgcgcacgccccacgcgctacgcgtgttctgcatccgtcatcacaccgtttcatcgccatcggcatgccttcgcatcaccgttcgttcaccacttcaccgcttcaccgcttcagcgcttcacccttccgagtgccgcgtccacctccccaccaccgtcacctccgcgttttgctccgctccgaccgtccattggttgagcccgcgatgctgttttcgggcgtttggtccgtcgcgtttcgttcgttcgtttggtgcttttgctgccccccaagcgctcagcgctgttgttcgcagccgctgctgcgcgctttgcctgacttcgcatctgtttcgcgtgtctttcgaatgtccctttgactgttcaccgcaccgcaccgcttcac

SEQ ID NO: 13852 - DNA, 3416 bp, Oryza sativa
  ref <308>: DATABASE ACCESSION NUMBER: AK111200
  ref <309>: DATABASE ENTRY DATE: 2001-12-06
aagcgaaaaaccgagtttgtatactcgataaattaaggcgaccgcgatgtcaggcgctgcttctgccggcagcaacgggatgcatcacgtggtgtcagaggcagcactggccgctatggacgacgaagacgctgtggtggtcggcgctgccacggcgtcgcacgacgcagacgccgtcgacggcggcgatgtggccgacgagcgcgcgcctccgtctggcgattggaagcagaacgagctgtatgcgcagtttgcgggtgcggacttcaacgactctgcgtacgccgcgcgcgctctgaacgacgcacagtcggcggcggctgtcatcagtcggctgtcagacggcatcgcgtcactgcagcagctgatccgcgcgcaggtggtgtcggagcacacggcgctgctggcgtcggccgcgcacatcggcagcgtcgagcagcgcctcgtagcgctgcacacgcagatcggcgcactgcacgtcacgtgcgccaagctcaacacatcgctgcgcgcgccgtatgagcgcatgcaagtgtacgccacgcaactgtccaacctgcaggtggtgtcggatatgctgcggcagacgctgcgcttcgtcgcactcgtccggaagctgcgctctcagatggcgcagtgcgccggtgcgaatccaaatacgcgcgaactggcaaaagcggcgcagagtgtgagcgaaattcacgccgttttggcggagagcgatttggacggactcgacgctgtgtgggaggagatggcgttcgtcgccagcagcggcacgcgcgtgcgtacgttgggcgaacgcgcgttggcgcgtgcgctggagaaccagaaccagtccgagttggcgggcgcactgcaggtgttctacaatttgggcggccgcgagctgtacagcgccgtggccaacgccgtggccgacgcgcgcaaagccatcgttgtggtggtgcggcacacgttcgatgtcggcgccatcgcacagcaggtcgctgcgcggaaagcgccgctaccgactgacaataagacggcggcgatgctggccatcggcggcggcggcggcagcggcaccggcgcggcggcgggtatagcgggcgtgacggccggtgccgcgtggcgcgcgacgctgtgggagcgcatcgacggtttggcggacaagttctatgcacagataatgcgcatttggacagtgcagcgggtgttggccaaagtgcgcgacccgcagtcgcatcagctgtttctgcactcctacaacgcgcagctcgcgatgccgtcggccgtttcgtcctctgcgtcgtcttccgcttccaccggaccgggcaaaggcgcggcggagctgaagggcgacgggaaacgcgacagcaaaagcgcacaggcagctgcgccggctgcggccggtgcgaccgcgagcgcgtcttcggcgggagcgaacccgaatcagtccattatgcatgccttttgggaggacgtgtgtactctgctcaccgccgaactcgaagccgtctccaaaggcgtcggttccagcgcgtcgtccaccggtggcggcggcggcagcggcttcgtacgcacacaactcacttcggacttcccgcgcctcagcgtcacgtgcaatgctctgctgtcgcgtatcgcgaactcgtgctcttccggttcacacgctgacgccgcggcttcacccgtcgccgctgccgctgccgccgcggctgccgctgctgctgccgcggctgccgctgctgctgccgcggctgctgccgcggcagcgcagaacgcggcaccggcggaggcgatcaacggcggcgccgcgtcgtcatcggatgcggcaaccgacgcgctgatcgcgttggggccgcgcagtcgcgcgcagttcatgcgtgcggtgcagccgtttcagaccggatttttggccaaatcgttcgcgcgactcagtgatccggtcaacagcatgttcggcggtctgcagagcgcggtaccgactctgtcggaggtgtcgagctttgtgttgggcgtccatacggtactcgagctcgtgcgcaacagtgacgccgacctgcagctacagctgtgccgcaatgccgtggccaaagccatccaaacgtttgcggccaaatgcgaggatctggtctctatggacgtcgaccccgccatattcagcacgcagtcggccatttcgtctgcgctcagctcgctgtcgtcgtcgctgtccacgagcctgtcatcggccggttcgtcaatcacctcctctttgggtggcggcactgtggccggtacgggcgcgcaagccgcagcggcagcggccaacgcgtcagccgcgcattcggtgctgtcgtcggcacagcggcgcaacgccgagatctacgcgttggtgtgtcacgtggagcgcgaactgagcgtcagtgagctgaagcgtgcgctgccggagctgtcggcggcgagcactgcggcgctgcgcacggcacatgccgctctcagtaacctctcgcaggaccttatcaacgtgtggcttaacagcgcgtcgcgtgcgttcgaaaacaccctcttcgcgatgcacagcgacgatttcggtgaaaaggcacgtgtaatgggcgacggttcgggctatatcgtggcgctgcgcgggcagtgcgccttcttctcgcagcacctgtacccggtgtatcacccgccctccgccgacctcaatcggcagacgtatatcgcgcagcgcctgcaggccctgtgcagccggttagtgagcgttttcgtgcgcagcgccgtgctgctgagcccgctcgcgcaggccggtaagctgaagctgaccagcgacatcgcgcagttcgagagcgtactgcacgccctatcgcaggccaaactcaagtcaaaggccgcggcgctcggcgccggcgcggccgtcacgggagccgcagcgggcgcggccgctggtacagcgggtggcaaaggcggcggcgcaaacgcgaacgcgaagaacccgttcaaaccgctgttggacctgaaagagctgctgtttgccgcgccgtcagtcggcgcaaaagccgttgaacttgtcgaagtgaagggcgtcgaccggctgacggccgcgtcgtattgcctgtcgcagtgctcgttgggggcgtgtgcaccgcacacgctcgcgggcaagcgcgtggacgagtactcgcgctggatcgacggcctcaaacccgacaccaaagaggcagaccacgcggcggtgctgctgaagctctatcagaaggccgaagcgcgcgtgcggctgcccaaagggccggcgggacgcaactttttggcgcaaaactatcccgaactcgcggcggcgctcaagcttctgcccaaacccaacgccaactgaccgacgagcagacccacgaacctgatcacagacctgttgtttttggcggcgcatttcggaaacttctcgcacttcc

SEQ ID NO: 13853 - DNA, 3312 bp, Oryza sativa
  ref <308>: DATABASE ACCESSION NUMBER: AK111201
  ref <309>: DATABASE ENTRY DATE: 2001-12-06
atctcactccgtacaaacatggagaaccagaacatcgacttcgacggctccctctacaccaacgagggtgtcttcgaccctaattacgacccgaatcgccagacgtacaatttctcccagacctggcccattcccgtctcgccagccaccatgtcgcagccgcaccaacaccaccaggcgcagaaccaccagaacaacaaccagatgcaccagcagcacgatgccacccagcaaaatcagcagcaaacgcagcagcagcagcagccccgccgcgtgcaaaccgtggccacctcgactgccatcccgagtaccacaggcaccattgctccgctgcaaacaatgggactcggcttccccaccgccatgcagcccatgaacccaatgctcgccaactggatgaacgtccacacggacggctttgccaccgatgcattcacccagaacgccatcagcatgggcatgcaagcagatttcaacgcgacctacggcacccagctgcaggcctcgcccgtagattttgccatcaacacctcgtctgccgcgatgatgtcctcgatgagcatggcccccttcaccatgatgcccaccaccatcgacatgcccaacatgagtgccgcgccgttccagatggccgatttccagcaggagttccacaacacgaacctggcaaacgccgacttcaccgcccattccgccggcagcgtatcaacgggctcgcccagcgaacagtggctcgagatccgatcgctccccagcagcgacaacggctgggtcgacctcggccaccgcaactcgtacgatttctccgacaactccgccattgtcttcaatcctgcgcagtcactacacatccgcaccaactcggactcgaccaactcaaatcagtcagacgtcccacggtcggcccactctttcagcagtttcgaggagatccgctccttcatgaactcgccccagtcagagactgacaaccacctggagctgatccactcccacacacactcggacagctgcaatcacggccacacccacggtctgcccctcgagcacgactttgcaaactacatctcaccgaaccagtcggtcagccctccaattgcccgtgccgagcccatcatcaagcagtctgcttcaagtacagcctcacccacatcctccgccgtcagctcaccgccggccgcagcacgtcggagaaagtcccccgttggagccaagccagccaagacgattgtgaagaagacgcccgcgcacaccaccaagaaagacaccactggcgagaagcgcgttggaaggagacggggtcctctgaagcccgagcagcgacagcaggcccacgaaatccgaaaacttcgcgcatgtctgaggtgcaagttcctcaagaagacctgtgacaagggcgatccgtgcgctggttgccagccatcccacgctcgcctatggcaagtcccctgcacgcgcattgacatcaaggacatcgcgtactttatgaaagactggaaggcggattatgaacgccacgtgagccttggcttctccatcggcaacatcaagggtttctcgcctcaagaacgccccatctatgtcacacacggctatggccactacctgcccatcatggctcgtgaggtctacgtccgtgacgagaagtgcttcggtgtcgactggttcgagaccctcaacggccttcacttcgagatcaacactgccaagctctctgcgggcatggaaggtgtctcgcgagccatgctctccgactatctcgaccgccacattgacggaggcttcgagaactttgtcgatgagtacttcgagggtacctacttcttgactgaattgctcaagacagcataccgctactactgccgcgagaagcttcccgtcatccgcaaggcactgaagctcgtccttgcctacaacctgaccctccacgtcaccatggttgaaggccttggtggtgaagaggaggctaacctcggcaaggtcgaggactcacaatccaagttctgcggaaagactgtcgcacccgtcatgatcaacttccaagtcaaatgtgctcttgccgacatgtggcgtgagctgcaaaaggatgttctcgaggagctctcctcgttgtaccagtcggtctacagtggcgacaagcttaagaactggcccaccatcttcatgcttgctgccattcttctcgcagtctgggaactgatccagttcgactgcaattaccgtgttcctgatcttggcgccgtcaacagcttctgctccgagatggagggcactccagtaggtgtcattgttggccttttctctgccatctcgcagaagcttccagctttcaccgagtgggactccaggaaacaccaccacctgctgaactccaacccggcggtgtgcgatgcgatgactgaggtccgagcgcacgtcaccaagtatgagggctacctacgctcccgaagtgactgcaagttcgaccgatcggacttcgattcgctgtcgaacaagttcctctccaagctcgtcatccgcgccaactagagtctcactgctcgagtgtcgcctcttcgccacccttacctaatcttttatcctcaccaggctgcaacataatcttccgacaacacatcttttatccttcaccatccgaacaacacgatgcagcacgctcaacgatatcacgagacggtcttcacgcgaacgaacgtatctgatgcctgcgctataatggatcacgactcctaccaaaaaaagacgacgaatgacttgaccttgcatttttgcgattccccggcgcctgaggacgccaagttagcaaaccaccgcctggttcccacatcccaactacacgacgctctttccgggacactggcaatcttctctttcctgttcactttatgaatctattgaatgtatctcatgtctggcgacgaaggcacacgaatgatggccacgagctcacttgctatttgttgcgaaacagaacaccatgttctgccaagaagtttttttgtttgacgttttggatacaacaagcgttggaacatcagccttgatgttttgtatcaacttgttgcagaaaacaaccattttcatgtttatcatgcttttccacgattgtgttattggcatagcgagcgagcgagcagagcgattttcaccactgcatcagtgtgaggtgcgcttcagcaaaatttttatctcagaagacagcgtagaactcagaattgagacctgtcgttcaccatttcctttcgatcgacaatgattgtgtatttatcagataaagtgttgcaagggattggaatggaatcatcattgttc

SEQ ID NO: 13854 - DNA, 2886 bp, Oryza sativa
  ref <308>: DATABASE ACCESSION NUMBER: AK111202
  ref <309>: DATABASE ENTRY DATE: 2001-12-06
caaatttaggccgcattttcgttgcgtacatagagaatcgaggcttacaatagggacccatctggtgtgtgcagcggcgctcgtgtaccggtcgccatcagcatggacgccgccgcgagggaagcgcaggtgcagggcagtctggaatggcgggtgacggtgccggagggctcgtcggtgacggtggagcacgaggccggcgtcgccgagagggcgtgggcgtgggtggtgaggatgctggtcgcggtcagggcggcggtggccggcttcgccaggaaggtgtggaagatcggcgccgacgatccccggagagcggtgcacagcctcaaagtcggcctggctctcaccctcgtctccatcgtctactacaccaggcccgtgtacgacggcgtcggcggcaatgccatgtgggccgtcatgacggttgtcgtggtcttcgagtgcaccgtcggtggatgcatgtacaagggattcaacagagccgtcgcgacggcgagcgccgggctgctcgcgctcggcgtgaactgggtggcggacaaatccggcgacaagctcgagccgttcatcctcagcggctccctgtttttactggctgcggcggccaccttctcgcggttcataccaacggtgaaggcgcggttcgactacggcgtgaccatcttcatcctgacgttcagcctcgtcgccgtgtcggggtaccgcgtcgaccagctgctggacctggcgcagcagcggatgtccaccatcggcatcggcatcgtcatctgcctcgccgtctgcgtcgtcatctggccggtgtgggccggccaggagctgcacctcctcacggtgcgcaacatggagaagctcgccggcgccgtcgagggctgcgtcgtggactacttcgcggcgaagcccgccgcggccaagtcggaggggtacaagtgcgtgctcaactccaaggcgtcggaggactcgcaggccaacctggcgcggtgggagccgccgcacgggcggttcggcttccgccacccgtacgcgcagtacaccaaggtgggcgccgcgatgcgccactgcgcgtactgcgtcgaggcgctcaacagctgcgtccgcgccgaggtccaggcgcccgagcacgtcaagcggctgctcggcgacgtgtgcacgcggctggcctcgcagtgcgcgcgggttctcagggaggcgtccacctcggtcgccgccatgaccagccccaagacgctggacttcgccgtggcggacatgaacacggccgtgcacgagcttcagggcgacctgcgcgcgctcccgcccgtcctggccttggaaccggcggcggagatgtcgctgatggacgcgatgccgctcttcaccgtggcgtcgctgctgatagagatatcggcgaggatcgagggcgtcgtcgacgccgtcgagacgctggccagcctcgccagcttcaagcaggtggaggatgatgacgacaagaagggacaaaccgagatgaaagtgcacccgctgaacgtgccggatgatcacgacgcgtcgacacatgaaagccagactacaacgaagcaccctgaacaggtctaaactttaaaaacgtccatcaaatcaaaccgcacaaaatcaaccagcgggacgagtcagaccggaagaacacacgaatacatgattgaatctaaactggctgagccaccgctctttgctagcttcttctggtgattaacagaataactctatcgatttacagtggagagaatcttggcaacttcataccacggcttacacgacgaataaaaccggcttaccactgtcataaaagtcggcatgtatcgtcgcattcatgatgtactactaccttgtacatatattaacagaacattatttgatatttttacaggaacactgcaaggcatatgagctcagatgttcccctctccttaaacgccatgcactcgaaattcagagaaattttgagaacatcattatctcataaaaactcaatctactcaactgatttttattctttctcggtttataaaacgagttttatactttggttttctttttcttcttctttttttttttgaaaactgtcggtagtagcagcagtacgtaccagaagcaggtaccgcttgtactctaccagaaaggacccaacatacgcacaagccgataaggtcgcttacagggaccgagggacaggccacgattaaacatttccaaatacactttcgtccgcgcgttgctgccattgcttttctttctctggcagtatgcacggtttttgctctgttgcagtacagcagcgccacgcactagggggattttgtgcgcatatattgcctcatgtttctgatcgcatcgctgcggatattgattttatcttggatttaatttgggcaatggacattggacagcccgtatggaacggaaaagttgcccatgtctgcctgatcaacggcggcgtgctgcaaacccatacaatgcactacctccctccctgcactgcacctgacgagatccagagaaaaccaggataggagttggcccagccggttcgtggctagtggagtacaaaatttgtgcactgagtttggatggaagaaataggtagatgatgataattcggtcacacacatgcatgcacatacaagtgtgaaatggcagcagggagcactagctcgaccgatcattgatcagtttgatgatctttagcccgacccgactaatgaagtgatgagtgataagtgatgacaatgagataatgttccgcggcatatccgctgggtaatgcataagcattagccaaagtggtttgcgtgtttataaagttctgacgatctctgaacattatttcgaggagatatatcgtgcattcacgcggggatcgatcttatactttcc

SEQ ID NO: 13855 - DNA, 2596 bp, Oryza sativa
  ref <308>: DATABASE ACCESSION NUMBER: AK111203
  ref <309>: DATABASE ENTRY DATE: 2001-12-06
caagaaaaagaaaaaaaacaaagcaaatttacaagagaagctcaagcagttgaatgaaaagttaaatatgctgaacgcgctgaacaaaaaaatcgagagcaagacaggtgtagcctcgagccctgtcttgttgcccctcgctactcccgcactgcccgcgcagagcagtctagcactcagtggcacgggcgaggacgagctcagtgactcgaagaagcgcaagacacgacccaacacgttgtacgacgactacgagattgacgcgacctctcgccccttgaagaagattggagtgccagtgggtgcttcaccaccacccatgatgccgcagtacgttgcacccaccacgccaacacccgtgccacccaagaaggcgcacacaccgcgcggacgaggccgacccgtgggcagaccacgtggcagtggtcaacacgctgcgaattacgcccagcccggcacatacgagccagagtgggacgaagactacgaggactacgagattgacaacgactcctttgcacccaagggcgtgggcagacctcccaaagccaagcgacctcctcgtcctcaaccgcgtccagtggtgcccgtggtgccctacacacctgtcgcagccacgctcacccctccacctggtcgcaagcgtcgcacgggtcagtatttgccgctgagtgcaccgctgcaacagtgcgcacagattgccaccgcgctgatgaagcacccaatgtccccgcccttcaacatacccgtggaccccttggccctgggcatccccgactactggaccatcatcaaagagcccatggacctcggtaccatcaagagttgggtcgatggtggtgcttacaaagacattcacgaattcgccgatgacgtgcgactcgtgtggcgcaatgcactcacttacaacgcccctggctcgcagatcagcgtgatggcacagacactggctgatttcttcgaacaaaaattcaccgtgctgatcaacagaatcaacaaccccgaggccgtgcagtcgagtcccgtggccgtggagccagtggtcacgacttcacccttgcccgtgacggtgcagcgcgtggaagtggaccctgctgtgttacaacgtcgcaaagagatgcaagagacgctgaatgatctccgcggactgttgcgatcattggacaagcaggtcactgagctcaagaagcagactgccaatctgccacagcccccgagtgccaagcccaaggcccgctctactcgtgccagtgccacgcgccctcctcccaaacgtcgtcctcgtgatttgaatctcaaacccatgagctacgaagagaagtgcaagctgagcgaggacattaacaacctcaactccgagcactgggctggtgtgatggcagtgatcgaagaagagatgccgcaagcactcaagaacgacacggatgaagtggagctcgatattgacacgctggacattgtgacactgcgtcgattggaagcattcatcgccgagtgtcaaggcaagccagcagtggtcacggtcacgcaagcaccgactgcagcgcccgtcgtgtcctcaccccctgtgccacctcgcgagcccaaggtgaagaagcctaaggacgatgaggccaagcaaaagcccaagcgacaaccgcgcaagaagactggtccaccgcaaggcatcaccgaagagaccattcgcgagactgagcgtcagttgaaagcggtgaatcaatcgctcacttcaggcaatgcctcgctcaagaacattggtgacttggagtccaagcagcagtccaacaaagaggcgctgacacgtcccaagaagggcagtcacagttcatcctcttcggactcctccgactcctctgacacggacagcgacagctccgacgatggctcgggtgacgaaggtgtcaagaagaagaagaaggacaagcatcacgcgacaggtggcaaggcacccatgaccagcaaagccaccgaaggcgagacagcaggcgaagagacagcagcccccaagatcttgacccccacctcaccgctcaagaaggaagtggtgctgcagaatgtcgagtcgtggactgcactcgatgaatccaagcccgaagagggtgactcgaacagcactggacccaacaacgactcgttgtggtctgagttccgcaccaagggccagcagaacaaacagcgcatgaaagagcgcgaggacttggaagagaaacaacgcctggagcgcgagaagaaagagcgcgagttgaaagaagaagaagagcgcttgaagcgtgaacagcgcgagaagcaagaggaagaggagcgcaagcgcatggaagagatgcagcgcagacgcgaacaagagcgactgatgcgcgaacaacagagcggtcagacaggtcccgagagcagcagcgagagtgcgcatcaatcgaccatcttgcagagcatgaccgaacagagcgagatgttgcactcgtttgagcaccagttgatggggcacagcatggacacggagaacaaactgcccctcaaacccgtcgacgatgaggacttgtaatctgcactacactttgtactgtaatctcctcttagtaaatgaacggtactcccgtag

SEQ ID NO: 13856 - DNA, 1207 bp, Oryza sativa
  ref <308>: DATABASE ACCESSION NUMBER: AK111204
  ref <309>: DATABASE ENTRY DATE: 2001-12-06
cttacttgtctccgccgccgccgccgccgacgccgccgtctcgacggcgacacggctgcgtgccgggctgttacgtaggctgcgcctgcctgtgagtccgcaggagccgcagtgggcggccgccgcgcgccgaccgtaggtggggtttgtggacgaccatggcggcgaccgcggatccgagggcgaagccgccgacggcgcaccacctgaagccgtgggtgcccaccccgacgcctcgttcccaccgcgtgccgtccttgccggcagtctccggaggaggcggaggcggcgctaggcccgcccgcgatcggcgccgctcctcctcgtcgtcgtcccaccgacggggcggcaccaccaccgacgccggcgccgtagatgaggaggaggtggtggaggcttacgacggcgggctagaggatctacgagcgaagctcatgggccacatcaaggacgtcgccgaccgcctccaccttcctcaaccgaagccgcagcctcggtcgccggagcccgagacgcctccggcaccggcgccgctcccaccgcctccgcctcctccacctgatacatctgtggcggcggcggcggcggcggccaggccgtggaaccttagagagcggaagcgccgtccctcggcccgcggtagcacggcggcgtcgcccacgacggcgtgggcgagacgagcggacaccacacggggtggcggcgagcgaccgccgttcgcggtggcactcgcggcggaggagatcgaggaggacatgtacgccctgaccggcggccggccgcggcggcggcctcggaaacggcctcgcgtcgtccagcggcagctcgattcgctgttcccggggctgtggctgaccgagatcaccgccgacgcctacaaggtccccgacgactagcaccaccaccccagcaccagctccggctggccagccggccagtcagctccacactttcttcatcacatcctcctagctttatgaattgaaaagaaaaatgtaactaggtttagtgcgtcgagttgatgataggtacctgtgctgtgcttgcaatgtcccatcttttgaactttctcctcctacgaaaaaagatctgatcgatcagggctttggtttccagctgatgtatttatgcacagtggagcgcatgtgtgcttgtattgttgtaatctagtcctaatccatcaaaaggctgccatgccttgcactgt

SEQ ID NO: 13857 - DNA, 2756 bp, Oryza sativa
  ref <308>: DATABASE ACCESSION NUMBER: AK111205
  ref <309>: DATABASE ENTRY DATE: 2001-12-06
aagcgaaaaaccgagtttgtatactcgataaattaagcggcggttggcggtcggtggccgcgtccgaccgaacgcgcggcgggtggacacgatggtgtgtctgcacctctggccgttcgcatcgccatgcagtggccacggcgtgtgtatgatggcggatggcgtcacgcccgcggcagacccgaatgccgcgggcgcgttctgtctgtgcgacaacgggtggagcgggcgcggggactgggtcgaccgcgtcggcagtgactgtcagatgggcgacttaccgtttacggttttgtggtccattgcactgctgttctgcttcacgtgctttgcctatgcgctttacagcctcatcaccggcatcgcatcgtacagccctgcaaaagccaaaggcgtgtcacgtgtcggcgctgacgcaggcgttggtgcgtccaaactcgccgctgccaatgccaatgcgaatggcgtgggcgccgggtcgcccacacaccagcggcagccgcagtcgccaccgcaggcgcagcagcctctgcagcagcggatggcgagtttccatccgaagctgaacggcgccggcgccggtccaggcgctgcgtacgccttcggccgcacttccatcgctgtcgtcgccgtcgccgtcggccctaccggtaccgccggaggcgtcaacgccgccggtggtggtggcatcgacagcgcgtgcaaccggcggtgctgtgagtcggtgtcggcgtgtgtgacgcgcacgcgcggcgcgttcgctgcgtcgctggcgacgcggcacgcactgaacgtggtgtttgccgcggcattcgccacagccgtgtgcgttctgcgcatttcgcgccgtgaaatgggcggatgggacgtgggcgtgacggtgtgtcagagcattgcgtccattggaatgggcggcggcgtgctgtatctgcagtacggcttcatccgcctgcaactcgcactcgtgcagttccaacgcgccgaacgcgatcgaatcgaacacgcactgcgcctactgcgcgcgctgctcatcgccatattcgtcctctgcgcgtgtctcggcacttcggtggtgcgcatttcctatctgttttgggcgtacgacaacaaccgcaccggtcagtccacatcgccgttcccccatacggcgctgcagtcagtgctgtacgtatgtctcggctgccagtcgctgatggtcgctgtgagcagtcacatcaccacgcccgcgctcgtgcgcattctattgcccgaacacgccaagcgcgtggccgcgcgcaaacgcgccgccatcgccgcacgcagcgccgtgttcgtgccggacgcacagaagttcgtaccaaacgcagcggacgacgccgccgccatcgccgccgccgaacggcccggcggcggcgacgaaaagagcgtgctgcagctcgagtctgtgaacgactcagtgcacgccgcggcggatgcagcggacgccaaagccggtgtgacatccaaactcagaaccactcccgacgcgtcggtgctcgcgccgctgccgctgcccgccggcggcactaccgctccgaccaacaccgctgcaggctctcaggtggccgcttctgctgctgctgctgctgctgcggcggcggctgttcccgcggtcatgtcgtcgccgccgcgcccgggtcacacgcgcgtcctcactgttcgcatcgaaccggccgccacgcaagcgccaatgccgcttacggccgcggcgcctgctaccgctcacaccaacggcagtgctgcgaatgcggtaactccgactgcggctgcggccgctacggctggccgttcgtcggtcgccgtaccgcgcgccgtgtcgtcaccgcactccccgcactcctcgcattcaccgcacgctgcgggtccggcgtcgccaatggcgcagccccaaccacagctcgaaacgggttcactgccacaagtgacgcagcagcagcgagcgtcagcgcaggcggagcgcgccgctcgcgagcggcacgcgcgcgaggacgagcgcgcgattttggccacaaaactgctgcttttggataagcgcgcattcacgtttctgcgttctgacccgatcatatacttcagcttcgcattttggccgttgcttcagggtatgactgcttatcacgcagcaactcagtggtgttcaaccactttcgccgccaccgctgcgctctatctgctcacccgcaccactccgtcgacttccgccaaagtcgcgcccgcgcccaacggcactggcactggcgcggtggagccgaccggtacagaggccacgctcttgcgctcgagcctgaaacccgacgcgccacaacccccgtcgccgtcgcccgcaccggctcccgcacagtccgttcgcgcagcgcccgcaccacccgctgcgtcctcccgtccgctgccccgttcgtccgcttaatatgtcgcgcgctccaccgctttgcagtcccctgcccgcccgcccccacgctctgagtcttccgcacttccgctgcctttcgtgcgcattttgttgccctctcaagcgccaacatcactgcgtttttcttccttcacatccgcctgccgttctgcaaagcatcactcaatctctatcgcatatccgctgtcaattaccgcagtccgcagttcgctccgcgacatcatgtgtcgcgcgcatagcattgtcccgcatccgcgcttccccttcagtcgtaccgcatgtgtgagcaacgaatgggcggattcctgttcgcggcacaactcgcagt

SEQ ID NO: 13858 - DNA, 2430 bp, Oryza sativa
  ref <308>: DATABASE ACCESSION NUMBER: AK111206
  ref <309>: DATABASE ENTRY DATE: 2001-12-06
ttctgtgaagggttcgagttggagcacgcctgtcgggacccgaaagatggtgaactatgcctgagcggggcgaagccagaggaaactctggtggaggcccgaagcgatactgacgtgcaaatcgttcgtctgacttgggtataggggcgaaagactaatcgaaccatctagtagctggttccctccgaagtttccctcaggatagctggagcccattacgagttctatcgggtaaagccaatgattagaggcatcgggggcgcaacgccctcgactattctcaaactttaaataggtaggacggcgcggctgctccggtgagccgcgccacggaatcgggagctccaagtgggccatttttggtaagcagaactggcgatgcgggatgaaccggaagcctggttacggtgccgaactgcgcgctaacctagaacccacaaagggtgttggtcgattaagacagcaggacggtggtcatggaagtcgaaatccgctaaggagtgtgtaacaactcacctgccgaatcaactagccccgaaaatggatggcgctgaagcgcgcgacccacaccaggccatctgggcgagcgccatgccccgatgagtaggagggcgcggcggccgccgcaaaacccggggcgcgagcccgggcggagcggccgtcggtgcagatcttggtggtagtagcaaatattcaaatgacccggcactctctttgtttcgctgagatgcctcattctagcaatatctacgctagcatcgaagctagggaactgtgctccgagcaattcgcaaaggaccaagacagcaaagatgaattgagtaaacttcggagcgagttcataatccctaccaagaatgatctgcggaacagaaaatttggcttccagcagaacaacaactcatctgcgcaagagaagagcaatgacgagtccatatacttctgtggaaattctctaggcctgcagcctcggaagacaaaggaatatgtcaatcgttatcttgacacatgggcctccaaaggagtgttcggccattttacggattatgaaggaggcttgccaccatggcttcacattgacgaagctatcaaagaacagactagcaagattgtcggagctacacctagcgaggttgtcatcatggaaactcttacggcgaacttgcatttgctcatgtccagcttctaccggcctaccaaagaccgctggaagatcattatcgagggcaaggctttcccgagcgatcactacgccgcactctcgcagattgctcatcataatcttccaccttcatctctcatcacaatcgagccaccttcagcatcatcaccttacctttccaacgaacacattctgtccatcatctcgcaacacgccgccacaactgccctagtgcttcttccaggcattcaattctactctggtcaattttttgacatcgaactcattacacgacattgccacgcgctggggatcacggtagggtgggatctagcgcatgcggtaggaaatgtcccactcaagctgcacgactggaatgtcgattttgcagcctggtgcaactacaagtatatgaatggtggacctggcgtgatcggtggtttattcgtacacgagcaacacggcaaggtcgaacagctatccccacccgagggtactgagaagtcggacagtgtcgttggtgactccaagcacaacaacgatacccagctcctctacagaccgcgcctcagtgggtggtggggaagcgacaagagcagtagataccgtatggagaaccagtttgttcccattcctggtgcaagtggcttccagctcagcaatccaagcgcactcgacatgacttctgtcatggcaagcttggatgttttcgccatgaccacaatggacgcgctccgagacagaagtctccgtcttacgggatacctcgaagcacgactattgcgatatgaaggcggcgacccgccctacaccatcatcacgccggcgaatccagcagaacgaggcgctcaacttagcgtgttactcaaacaaggactacttgatcgtgtgctccaccatcttgaagagaacggtgtagtcgtcgatgagcgcaagcctgatgtattgagaatcgcccccgcacctttgtacaactctttccatgacattcatcgcttcatcatcatcttccatgaagcatgccgcagagcgatcgagcggcctgaaggagccgaacagcacagtgaggatgtgcccgatggaattgctgcgacgtaatgcctgtgacgccgtcgatttaatcgagggcatgatccattttcctttaattctctttcatgaacacatatacccaagcaacatgacatttttccgtagtgcattatactgtatatatacaggactgaagctgagatagtaatcgtaatggaaatttgcttggaagtatg

SEQ ID NO: 13859 - DNA, 2754 bp, Oryza sativa
  ref <308>: DATABASE ACCESSION NUMBER: AK111207
  ref <309>: DATABASE ENTRY DATE: 2001-12-06
tctgcccagtgctctgaatgtcaaagtgaagaaattcaaccaagcgcgggtaaacggcgggagtaactatgactctcttaaggtagccaaatgcctcgtcatctaattagtgacgcgcatgaatggattaacgagattcccactgtccctgtctactatccagcgaaaccacagccaagggaacgggcttggcggaatcagcggggaaagaagaccctgttgagcttgactctagtccgactttgtgaaatggcttgagaggtgtaggataagtgggagccctcgggcgcaagtgaaataccactacttttaacgttattttacttattccgtgagtcggaagcggggcctggcccctccttttggctctaaggcccgagtccctcgggccgatccgggcggaagacattgtcaggtggggagtttggctggggcggcacatctgttaaaagataacgcaggtgtcctaagatgagctcaacgagaacagaaatctcgtgtggaacaaaagggtaaaagctcgtttgattctgatttccagtacgaatacgaaccgtgaaagcgtggcctatcgatcctttagaccttcggagtttgaagctagaggtgtcagaaaagttaccacagggataactggcttgtggcagccaagcgttcatagcgacgttgctttttgatccttcgatgtcggctcttcctatcattgtgaagcagaattcaccaagtgttggattgttcacccaccaatagggaacgtgagctgggtttagaccgtcgtgagacaggttagttttaccctactgatgaccgtgccgcgatagtaattcaacctagtacgagaggaaccgttgattcacacaattggtcatcgcgcttggttgaaaagccagtggcgcgaagctaccgtgtgccggattatgactgaacgcctctaagtcagaatccaagctagcagtatgagtactctcttggagcggcttaaattctcacccaactttcgaccatctgtctctcttcttcctccaaagacaattcctttttgattgttcctttcattcaattcatcttcacaatgtcttcgtacgctcttcccaagtcccaccaggacctcatggagaagtccctggtggacaccgacaatgaggtcgctcagattatggagagggagattcagcgtcagcgcgagtccatcctcctcatcgcctcagagaacgtcacctcgcgcgccgtcttcgatgctctcggctcgcccatgtccaacaaatactccgagggctaccccggtgcccgctactacggtggcaacgagcacattgatgccattgagctgctctgccagaagcgcgccctcgaggcgttcggtctggatgcagagaaatggggcgttaacgttcagtgccttagtggtagcccggcaaacttgcaggtctaccaggccatcatgaggccacacgacaggctcatgggccttgacttgccccacggtggacatttgagccacggctaccagacaccacaaaggaagatctcggccgtctccacctacttcgagaccttcccctaccgcgtcaacctcgagactggtctcatcgactatgaccagcttgagcagaatgcgctcatgtaccgccccaaggtcctcgtcgctggtacctccgcatactgccgtgggatcgactacgcccgcatgcgggaaatcgccgacaaggtcggctgctacctgatgatggacatggcccatatctccggtctcatcgccgccggcgtcaacaagtcgcccttcccatatgccgacatcgtcacaaccaccacccacaagtcgctccgtggaccccgcggtgccatgatcttcttccgcaagggcgtccgcaagaccgacgcaaagactggcaaggagaccctctacgacctcgaagggcctatcaacttctccgtcttccccggccaccagggcggcccgcacaaccacaccatcaccgcgctcgccgtcgcgctcaagcaggcccaatccgacgacttcacgctctaccagcaacaagtgatcaaaaacgccaagcagctcgaaaacaccttcaaggagctgggcttcaagctcgtcaccgacggcacagacaaccacatggtcctcatcgacctcaagcccttctccctcgacggcgcgcgcgtcgaagccgtcctcgaacaagtcaacatcgcttgtaataagaacaccaccccgggcgacaagagcgcgctcacgcccatggggatccgcatcggcgcgcccgccatgacctcgcgcggcctgggcgaggccgactttgcaaagattgcaaactacattaacacgtgcatccagatttgcaagaaggtgcaggccgagctgcccaaggagaacaacaagctcaaggactttaaggccaaggttgcgggcggcgaggtggaggagattaatcagttgaagaaggagattgccgcgtgggctgtcaccttcccccttcccatctaagcagtgtgcatgatcttgggtggcgtacacggcgtttttttaaatgggtaatttcaacaaaaggaatggatgggtgttggcatatttcaacattttcacgcggcatgagttggatgggatgacaaaatgatacctggagattagggaagattggggaggagatatcattctgctcgatgagtgtgtatgcttgataggagctagattgatgcttaaccattaatcgggaagaatacaagcaatttcaaaatgaatatgtacatatc

SEQ ID NO: 13860 - DNA, 2395 bp, Oryza sativa
  ref <308>: DATABASE ACCESSION NUMBER: AK111208
  ref <309>: DATABASE ENTRY DATE: 2001-12-06
tagcaaatattcaaatgagaactttgaaggccgaagaggagaaaggttccatgtgaacggcacttgcacatgggtaagccgatcctaagggacggggtaaccccggcagagagcgcgaccacgcgcgtgccccgaaagggaatcgggttaagatttcccgagccgggacgtggcggttgacggcgacgttaggaagtccggagacgccggcgggggcctcgggaagagttatcttttctgcttaacggcccgccaaccctggaaacggttcagccggaggtagggtccagcggccggaagagcaccgcacgtcgcgcggtgtccggtgcgcccccggcggcccttgaaaatccggaggaccgagtaccgtccacgcccggtcgtactcataaccgcatcaggtctccaaggtgaacagcctctggccaatggaacaatgtaggcaagggaagtcggcaaaacggatccgtaacttcgggaaaaggattggctctgagggctgggctcgggggtcccggccccgaacccgtcggctgccggcggactgctcgagctgctcgcgcggcgagagcgggccgccgcgtgccggccgggggacggaccgggaacggccccctcgggggccttccccgggcgtcgaacagccgactcagaactggtacggtcaaggggaatccgactgtttaattaaaacaaagcattgcggtggtcctcgcggatgctgacgcaatgtgatttctgcccagtgctctgaatgtcaaagtgaagaaattcaaccaagcgcgggtaaacggcgggagtaactatgactctcttaaggtagccaaatgcctcgtcatctaattagtgacgcgcatgaatggattaacgagattcccactgtccctgtctactatccagcgaaaccacagccaagggaacgggcttggcggaatcagcggggaaagaagaccctgttgagcttgactctagtccgactttgtgaaatgacttgagaggtgtaggataagtgggagccctcgggcgcaagtgaaataccactacttttaacgttattttacttattccgtgagtcggaagcggggcctggcccctccttttggctctaaggcccgagtccctcgggccgatccgggcggaggacattgtcaggtggggagtttggctggggcggcacatctgttaaaagataacgcaggtgtcctaagatgagctcaacgagaacagaaatctcgtgtggaacaaaagggtaaaagctcgtttgattctgatttccagtacgaatacgaaccgtgaaagcgtggcctatcgatcctttagaccttcggagtttgaagctagaggtgtcagaaaagttaccacagggataactggcttgtggcagccaagcgttcatagcgacgttgctttttgatccttcgatgtcggctcttcctatcattgtgaagcagaattcaccaagtgttggattgttcacccaccaatagggaacgtgagctgggtttagaccgtcgtgagacaggtctatcaacctccacaaggaaaagaacccaaagctcctagctcttatcccactcatcaagaacaacgtcggtttggtcttcaccaatgaagatttgactaaggtcagagacgtcattgtctccaacaaggttgctgctccagctagacaaggtgctatctccccaattgatgtcatcgtccctgcaaacaacaccggtcttgaaccaaccaagacttctttcttccaagcattgaacatcccaacaaagattaccaagggtactgtcgaaatcattgcagattaccacttgatcaagaagggagacaaggtcggaaactctgaagcaaccctccttcaaatgttgaacatcaagccattcttctatggtctcaccgtcaacaaggtttacgatgatggaaacctctacgaaccatccgtcttggacatcaacgaccaagtcttgtccgagaagttctacaaggcagtcaacaatgttgcttccatctcccttgctctcggtatcccaaccgaagcttccttgccacacaccctcatcaatggtttcaagagcttgttggcactcgctgcagcagaagaaaacatcactttcaaggaagcagaagaagtcaaggcttacttgaaggatccatccaagttcgctgttgcatcctcctccgctccagctccagcagctgcttcctcctctgcacctgcaaaggttgtagaagagaagaaggaagaagaagaagacctcgacatgggttccctcttcggataaattgaatcgtcaacaaatcacaatctctaaccagggattggggttaattagctgttcattcagctaggacgaaacatgtttgctgtgtgattcaataaactctatccatcctc

SEQ ID NO: 13861 - DNA, 2313 bp, Oryza sativa
  ref <308>: DATABASE ACCESSION NUMBER: AK111209
  ref <309>: DATABASE ENTRY DATE: 2001-12-06
aactaacgctaaaaaagtaacagtttctgtactttattgggagaaagagagcccgacgccggcaccgtagaagacaatttacaagaacaaaacacagaagacataccattcatgatggatcacgattccgaagcggcctcctccgtcacagggagtgaaggtgccgaaccgaccagcctcgccgcgatcctgcaccgtatggttcgccccaacaccacggaggtaggcagtggtgcggcagcggaggttctcactccggcagacagtggtgacgttgaaattatcgacgcggctgccctggcgaagggcggcgctgcagatcagcagaccgccgccacagccgccgtcaccgctgaaggtgaagcggcggcagccgcggagcctccgctcacacgggaggagcgcctcgccatggcccgcgccatggacgagaactgcaagtcgctcacggccctcctcgagcacatgcgggatgaagagcaacggctcaaggacctctgcaaggagttcatcatccgcgacatcgccgaagagaacgcccgcatcgccctcacgcgccgctgccttaaggagcaaaaggcgaccatgcagagcgcggcctacgtccgatgggcggccgacaagaagaagggcgtcctcgcacatggcgctttcccctctgagaagagcgacgacgacaacgacgaagacggtgacgaagtcgttttgcacgagtcagcagacgatggtggaagcctcgccgttgccaagaagacagccggcgcctatgcgttccacgaggaggggcttgacgcgtggtacatgcagctggatggcctcgacacggaccatcacttcgtcaccgtccccggccgcgtgtttgtcctctgcagcgcgctcgtgcagtacctccgcgggtggcgcagcagcaatgcgaacatcgcgaacgagattgaagacctggagcaggcgcgcgctgagcttcaggtgtctcatggcgaacccgtcgtgtgcatcatcaacggcgaactcgcgtgggccccgcccgcgcactccccagccgatccagggcaactcgaggccttctcgacctacgtgcagcgcagccgccgaggagcggcatcggcatcggcaatgcaatggccagactcgatcgaagagcgccacgcgctgtggttgggatggcgtctccagtgcgccgccctcacgcccctcgccgtcgtgctccccaagtgcacacgcgccgtcgctgcgctgcgagatgacggggctgatgttgtcgccttcgcccccctgagctggtttgtgaatagtgtgcagctccgcgtgctcgtccgcgctggccgcatcgtctgcgcggaatcaccgctgcctgatgcgagccttcacgtcgctgcgaacatcaagcccgccgaggtgttagagtacctgcagcagtcgctggacatggcgccttccttcgccgagagcaatgaactgcgcgtcctctgctgttcggcgagccggaagggagaagacggcgtcacgcacgtggccgtgcagggcggtggccgggcgggtcccgagagcgtcttcgaccggttcgaatggagcgacgtctgtggtgtcgcgcagcgctgcaaaatggccacggatgagggcaccgccttcaaacccgtcctgcgcgctccactcgcgcgcgtcgccgaactcgagtggaacgcggtcgaacagcaacggcctgaagaggagagtcccgaaggcgctgcggccgcaatgattcgtgcacaggaggctgaaatcatgactgcgtggtgccgcgtgctgacgcaaggcccgccaccgccgccttcgctgcccgttgctgcctcggccgccccgagcacttccccaccccaagacaaggtgccgacaacgcgcgctgcgcctgacgacggcagcagcagcaacggcatcaacgcgcacggaaggaggtcgtccaacttcgcgctttacgctgctgtcgccctgagtgctgcggcgtgcacaacgctcctgtggcgagcggcgtccgctgccctcggcaacaacggccgtcgacgcgggctgtgaccgaaacaaacgcgacgcgccttaccgtagaccaaaccacagatgcgagtccatacacacagacacaccgattcggcggaagacactcttcgtccgccgcttttgcttttctatgctccactcgacacacgcgtcgcttgctgtgccgtccacgggtggacagtgcaacgcgggcccgtggacagtgcactgcttctgtcaacaacaagtcaaatggcactgcagagactgccgtttcgccatatcggcgaatgctcacatgcg

SEQ ID NO: 13862 - DNA, 2493 bp, Oryza sativa
  ref <308>: DATABASE ACCESSION NUMBER: AK111210
  ref <309>: DATABASE ENTRY DATE: 2001-12-06
ttgaagaaattagagtgctcaaagcaagccatcgctctggatacattagcatgggataacatcataggattccggtcctattgtgttggccttcgggatcggagtaatgattaatagggacagtcgggggcattcgtatttcatggtcagaggtgaaattcttggatttatgaaagacgaacaactgcgaaagcatttgccaaggatgttttcattaatcaagaacgaaagttgggggctcgaagacgatcagataccgtcctagtctcaaccataaacgatgccgaccagggatcggcggatgttgcttataggactccgccggcaccttatgagaaatcaaagtctttgggttccggggggagtatggtcgcaaggctgaaacttaaaggaattgacggaagggcaccaccaggcgtggagcctgcggcttaattaagcgaaaaaccgagtttgtatactcgataaattaaggaggaaggaatgctgcgtgctgtgacgttggtcattggcgcggcgttgctcgcttcggtggtgccgagcgcccgggccgacctgcccatccactgtctgaacaaccaggtggcagggtcgtgggtgtttgagatgtcggctgacacgtacgacaagtcggaatcgtgcgggtaccacgccccggacgtgaacgcgctgcatttcacgaagaagccgatgaaatttgcggtggcgcgtaagatggagttcacgctcgttcagccgaatcaggtgcacgacgccacggggaaggtcatcggtcattggacgatggtgtacgacgaaggctttgaggtcgtcgtcgatggcatcacgttctttgccttcaacaagtatgtgccgaagaagcacacgtctttgaactccgaagaggtgggcgactacgtgtcgatctgcgacaagacgatggttggatggttccacaaccgcgaccgcacgcgtttcggctgttacaaaggctatcagacggccaaactgcgcttccgccagacggccgccgctgcggaggacacggagacggaggacgatcgcgtggaggagtcagagtcgacgaccgccgcggccgctgcgcctgccattgcgtttaacccgaaccacgtcgtgtcgccgttcgcgttcgaagcggacagcaaagacgtgcatccggtcggtaccagcgccgtggcggtggcggaggacagcgatgaggaggacgcgtcggaggacttggcgttctatgagttggagcagatgacgagcgccaaccgccatgacagccgccgcaatgtggtgcgccgttcgccggtgcgcggcgacgacgaggtgtttgcgccggacatgtcgttcgtggaagcgcacaactcgaactcgcagtcgacgtggcgcgcaggtgtgcacagcgagttcctgggcaaacgcatggcggcaatggaccagctcttgagccgccgccgcttcgtgaaggtacacgccaatgcggccggctctgactctggcgatgtcgggccgggtgtgccgcgcggtccgctgaacaagaagtcgcgcaaatacctgtctgagctgtcgaaaatgccgaaggaattttcgtggatcaaatacgactcgcctgtgcgcaaccagggagagtgcggcgcgtgctactcgctggccgctatgacggtgtatgaagtgcggctgcgcatcaaatcgcagatgaaagataagaccattatgtcggggcaggacgtgctgtcgtgttcgcgcacaaaccagggctgtgagggcggatacccgtttctcgtgggtaagcatgccactgagtacggtctcgtgccggaggcgtgtgtgccgtacaaagcgtccgacatcgactgcgactctgtgcgtttcacgtcgtcgtcatgcgccaaccgccgttactacgccaagaactaccggtatgtgggcgggtactacggttcgtgcaatgagcttttgatgatgaaagagatcatgcgcaacggcccggtcatcgtcgccttccaagcgccgtcctctctcttctattacaccggtggcattttcaccggaccgccgcccaagcgcgagggcgcgacggagcacggcgtgcgctattgggagcagacgaaccacgccgtcgtggccatgggctggggcgaggagaacggtcacaagtactggatcatcaaaaacacgtggggacccaaatggggtgagaagggctatttccgcattcagcgcggcactgacgagtgcggtgtcgagtcgatggccacaactttcgacgtcgtcctgtaaccccgcacttaccgaccgcatcggttcagcagttgctgccggtgcggctctcacgcctcgccgccgccgcccgccccacccgcggctttgctgcggcgctgtgtgccgcgtgtcctgtcgcgcgacgcgaccagtgggtcgcccgcgcggtggtgtatctggctttctcgtatcgtagcaaatcatagccgactccgtttgtcgaacaagaaatgctgtttatcc

SEQ ID NO: 13863 - DNA, 3129 bp, Oryza sativa
  ref <308>: DATABASE ACCESSION NUMBER: AK111211
  ref <309>: DATABASE ENTRY DATE: 2001-12-06
agcacacgacaccccccaccacacccgcggccaccatcttccagtctggctcgtcctgtccagcagtcgagtcggctcggggagtccgcacgccatccgcaccgccgcctatggtagcgaaggggaagaggaacccggcgaacgcccatgacaagcgacacgagaatggcaacgcagccccgggcaggcgcatcaccaagcagaagagctcgtcccagctcatccccggcggggctgcaataaacagcacagcgccaaatgcccgcaacacgacgccgccaccggtcccgagccatgcagatacaaccacggccgctgcccacaacaccacgcccatgacgcacccggccggccacgaccacggcctcgatcacggcatgtcgccagcccacaacacgcccatgtcgcccatggcccagcacgatcgggcgcgcgccgcctcagacgcctccttcgacaaccgtgaccctgtctgccgcctgttcgacccggccacgggctcgtatggcccgccctctgctccccgccgtcaagacaagtctgctcacgtctccatggccagcatcctcgctgtgcctgccaccattctcacgtcctgtcctctgcgggacgtcctcgccatcctcatcatcctcctccagctaccccccaccgtcctcacagtcgtccagttcctgtttgctactctcacttttgtcccgccccaggccgggacgcccctctccgcgctctccgcccttccctccttcaccgacatcttccagggctcgggcggaaccccctcgctctttaccaccatttttgcagacgccttcatactcgtcatttggctggtcctctgggtccccgtccagaacttcttcccggacctcgcccaggccgtcattgccattgcccttggaggcgctgccgccggtaagaatggcacgacgaacagcatattcatatgtttcttcatcattctttccaaccatctcttcagattcaggcctcttcgccagcacattgtccactttctgtggacggggctcgcccggggaggccttgattttctggcgagcccaccgagtacgccaaccacttcgctggaaggcttctcgtccccccacggatggcctcgcagcctcctgggaattcatattttagcccaaggcgtcgttcgcattatccggcgatctctctctcgacgagacgcgaccccatcgctgcccactggcaagaagacggaccccgaagctggcgtgcctgcgcgtgccaactcgactgccctcgatccgactgccgatgtgcccaactcgtctagtaccgatggccgacctcccgggccgtcccccgcagcacattcgaaaacagacaaagcgagtagttctagaaggaagcgaaagcaagctactcatgtccgcagtcagcagccgttttgggctgcacttgccagtacaaaagttacagttttaaaagagatggaaagtagccgggcggccaacgatgccgacgaggctaatgcaaaagacgcaaatcacattggaaacgctgtttggagatcagaagacgaccatgtttgggtttcagaggtcggttatgccgacatttcttttcgtgtcagtttatattccggggcagagttcagggagcagcttgagcaggattcgagtccaggatcaggaatcgacaaatcgaagccgttctacattcgtgtaaacggcgccgactggagctctaccaggatccggcagagtacgtcgcttggatatcagggtcaagagggagcgggtttctgggtaggcgagatatttggtcttacagctctctccaattactattgtgagtttgtgcggactgtcgacaatgaagtcttctactcagccagccttattacctcggccagcccggtagctgaactggcctctgttgcttctccacccccgcatcaaactctgcgtccctcatcgcccacgacgactttgaaaaactcaatcgccgcagccgaccagcagctccaggagcaccgcaatcgcttgaaacgcaataagaaggaccacaagaccgccatcagcaccattcgcaaagaggtcgatactttgagtaaccgccttgccaatgctggaggaagcgatgaacgtcaacgccagcgtgttctgcaattcacacagaccattcgccaggccgacgattctgctgctgattttgcccttcaggtcgacaaccttggagaaatcccagaagatgaagctcaggaagccgcagccaagaaagccgaatggaaaagggaacgtgacagcaagaatgctatttctggtgaatttgacaatatcaagaccgagatcgagcgccaaatccagagcatcgagtccgacgtggccgccacgcttcagaagagggaacgccttcagcagcgtcaaaccaggcttaacgagcagcacgatcgactcgttactgccaatgctgagggtttcactgccaagcaacgaagggagcaagagcgtgctgctctgcgagcacagcgtgcagacgtggagaaccaataccgtagcaacatcaacggctttgagcgacgcactgaagagcaccacttgtcaaacagccagatgatgcagacaatccaacactacgaggagctccttctccatcagtcccagcagcacatgtccgttccaaccactcccgaaggcccgctccccggcaccagcatgtctcctcacgccaacaccttcacaagcttcaccttcccctctctcaactcgcacatcaacagcactcctggttccctccgcaatggccgcggccgttcctcctccatgctctccaacatctccgggttcaccgatggcttcgacgagccgcactcaccctctggcttccaactcggtaacccgttccacgcaccccatctcaacgggcgcaacggaagccatggcagcggcagtctgagctccggaacttcgagccagagttctagccagcgggatccgatgagtcctgtgcaggctgttaaaccgatgatggtgcgtagtccgacagcggggagtgcggggctcatgagtccgatcgggacggggaggtagggtttgattgatcgcgttgttctgctgtctttaggtagtgcttccaatgtgattatgtttcttttgg

SEQ ID NO: 13864 - DNA, 2284 bp, Oryza sativa
  ref <308>: DATABASE ACCESSION NUMBER: AK111212
  ref <309>: DATABASE ENTRY DATE: 2001-12-06
aacctttgggcacgcactctttctccatcaaaaagagccccaatctcgttacttcgagatattatattgcgttccccacgactctcttccttctaataatcccttttctcccttccaagacgggctattgtaaccagctccgtcttatcctttactccttatcataatgtctggctacgacggcggatacggcggcggtggccgcggaggcggtggctacggcggtggtggttatggccgtgatcgcggcggcgaccgtggtggtgaccgcaatggtcacggtggtggttacggaggccgaagcaacggaaatggctacggcggcggcggtggcggctacggtggtggtggttacggcggcggtggttacggaggaggtgctggcggcgaccgtatgggcgctctcggctccggtctcaagaaccaggaatgggatgtcagcgctctgcccaagttcgagaagtccttctacaaggagcaccccgatgttgcaaaccgatctgatgccgacgttgaggctttccgccgcaagcaccagatgaccattgctggcaccgaggttcccaagcccgtcgagactttcgatgaggccggcttcccacgatatgttatggacgaggtcaaggctcagggattccctgctcccaccgccattcagtcccagggttggcctatggccctctctggtcgtgatgtcgttggtattgccgagactggttccggaaagaccctcacatactgccttccctccatcgttcacatcaacgcccagcctctcctcgcccccggcgatggtcctattgtccttgtccttgctcccactcgtgagcttgctgttcagatccaggaagagatgaagaagttcggtcgatcttctcgcatccgcaacacctgtgtctacggtggtgtccccaagggtcctcaaatccgtgacctttcccgaggagtcgaggtctgcattgccacccccggtcgtttgattgacatgctcgaggccggtaagaccaacctgcgtcgtgttacctacctcgtcctcgacgaggctgatcgcatgctcgacatgggtttcgagccccagatccgcaagattattggccagattcgacccgaccgacagactctcacgtggtctgctgcctggcccaaggaggttcgtgctctggcttccgacttcctcaacgacttcatccaagtcaacatcggttccatggagcttgccgccaaccaccgaattacccaaattgtcgaggttgttaccgatatggagaagcgtgaccgtatgattaagcatctcgagaagaccatggagaataaggagaacaagatcctcatctttgtcggtactaagcgaattgctgacgagatcacccgattccttcgccaggacggctggcctgcgctttccattcacggtgacaagcagcagaacgagcgtgattgggtccttgaccagttcaagaccggaaagtcccccatcatggtggccactgatgttgcctcgcgtggtattgatgtgcgcaacatcactcatgtgttgaactacgattacccccacaactcggaagactacattcaccgaattggtcgtaccggtcgtgctggtgccaagggtaccgctattacccttttcactactgacaaccagaagcaggctcgtgatcttgtcaatgtcctcactgaggctaagcagcagattgatcctcgtcttgttgagatgactcgatacggcggcggtggcggtcgcggttacggtggatggggacgtggccgtggcggtggtagaggtgggttccgccgtcgctaaagcagcaagacgcctatcgagctgactcgacctccagccaacgccaacaacatgcccatcggtaaccgtcgatggtaaggtatccctccatcttgggggttcgaccttttgcggtatgggtcagacagcctcgcatttcggatcttcagattctcaaaaagtacatgacatcaaggcgtttgtttgttagaggacaggtggctcgattagatttgactcgttatttgcgagtctggattcatggtttgactgcgccaatttggtcgcacttagttgcatttatgcgtttacatgtttacctcaaataatggctttagactaggttgacgatatcgtgctgagtggtgtgaaaacactcaacgacggagatgaggagaaaatatccatttattggaggcctcgtgctttggaggtcgatgacaattgggctgggtgtttacttagactttatgtagttcgcacaaaaagcagaactcaatc

SEQ ID NO: 13865 - DNA, 2495 bp, Oryza sativa
  ref <308>: DATABASE ACCESSION NUMBER: AK111213
  ref <309>: DATABASE ENTRY DATE: 2001-12-06
cttggtggtagtagcaaatattcaaatgagaactttgaaggccgaagaggagaaaggttccatgtgaacggcacttgcacatgggtaagccgatcctaagggacggggtaaccccggcagagagcgcgaccacgcgcgtgccccgaaagggaatcgggttaagatttcccgagccgggacgtggcggttgacggcgacgttaggaagtccggagacgccggcgggggcctcgggaagagttatcttttctgcttaacggcgcgccaaccctggaaacggttcagccggaggtagggtccagcggccggaagagcaccgcacgtcgcgcggtgtccggtgcgcccccggcggcccttgaaaatccggaggaccgagtaccgtccacgcccggtcgtactcataaccgcatcaggtctccaaggtgaacagcctctggccaatggaacaatgtaggcaagggaagtcggcaaaacggatccgtaacttcgggaaaaggattggccctgagggctgggctcgggggtcccggccccgaacccgtcggctgccggcggactgctcgagctgctcgcgcggcgagagcgggccgccgcgtgccggccgggggacggaccgggaacggccccctcgggggccttccccgggcgtcgaacagccgactcagaactggtacggacaaggggaatccgactgtttaattaaaacaaagcattgcgatggtcctcgcggatgctgacgcaatgtgatttctgcccagtgctctgaatgtcaaagtgaagaaattcaaccaagcgcgggtaaacggcgggagtaaccatgactctcttaaggtagccaaatgcctcgtcatctaattagtgacgcgcatgaatggattaacgagattcccactgtccctgtctactatccagcgaaaccacagccaagggaacgggcttggcggaatcagcggggaaagaagaccctgttgagcttgactctagtccaaagacaggctcatggttgaacaggttcatcggccgagcaaagaaaccagaaatgagatggccatacccattttcagaggggaagatgtttgttcttaccatccaagctggtatcgaaggatatcacgttagcgtgggaggccgtcatgttgcctcatttcctcataggatgggattctctcttgaagatgccacaggtttagctgtgacaggcggcgtagacgttcactctatatatgcaacctctcttccaaaggtccatcctagtttctctctccagcaggtcttggaaatgtctgataggtggaaggctcgcccagtaccagaggaaccaattcaggtttttattggcataatctctgctacaaaccattttgctgagcgcatggctataagaaaaagctggatgcagttccctgccatccaactgggaaatgtggttgctcggttctttgttgcactgagtcatagaaaagagataaatgcagcacttaagacagaagcagattattttggagattttgtcattctgccatttattgaccgatatgagctggtggttctgaaaacagtcgcaatatgtgaatttggggtgcaaaatgtaaccgcagagtatatcatgaaatgtgatgatgacacctttgtgaggctggatgtagtattgaaacagatctccgtctacaacagaaccatgcctctttatatgggtaacctaaacctgttacacagacctctccggcatggtaaatgggctgtgacgtacgaggaatggccagaatttgtgtatcctccatatgccaatggaccaggctatgttatttcaatcgacattgcaagagacatcgtatcacgccatgcaaatcactccctaaggttgttcaagatggaagatgtgagcatgggcatgtgggtcgaagacttcaacaccaccgcgccagttcagtacattcacagctggaggttctgccagttcggctgcgtgcataactacttcacggcgcattaccagtcaccttggcaaatgctgtgcctctggaacaaactgtcatcaggccgagcacactgctgtaactacagatgacgctcactcatccactccttcgatttcacaactgacagcaggcaacatcgatcgatccccccatgaaggcaatattttgtgccgcgcatacatggaccagggtctccatttgcttgacctgaattcgtcttgctcgactgacagcggataccatttcacaggagctcttctacgccaagataagtattatatcggtgggatatttactgcttcacctcccggagctcatgtggtatatatctaggagtaccatacagctgtgtttgggtgattgaggtgaatgcgaatgtgggtggggaaatgaaagcctgaggcagggacagaaatcacatttgcattttagctgctagaagtacggtacaggggcaaagcattttcttgtctgctatttatgcactaactggaggtggacagttttggatgagatt

SEQ ID NO: 13866 - DNA, 1783 bp, Oryza sativa
  ref <308>: DATABASE ACCESSION NUMBER: AK111214
  ref <309>: DATABASE ENTRY DATE: 2001-12-06
gggatggtgttaatggacgagaggctgttggaatccggattgaacccctaacgccaattgaggaccgtatctttcgacgctccgacacaaaacgacaagcgccagcatcgaatgtgccagtcccaaccgaagtcgaggtcgagagtgatagcgacagcgactccgaggacgagctcgaaggcggcacgccaacgaaccgcccatttactttgactccttctgctccgaccaggactcctgctttcgcgattgacaccggcttgcctcaccccacagatcgtgcccctgcgaacaaaggcccgccctctactaccggcgtgtcttccgattcttccgagtcctctgagacaatttccatgggcgagcgtcaaggaggtatctctcaaggcactgagcacttgctcattgctgctggttccattggtgcaactattgtcattgtaatgattgttctcggtctctacactatgcgaaagcgtaaattgtcattcgcggatgttatacgaaagggcaaagattctttacgaaacaggggcactccaccaccgccccccaagtatgacatggacaagaaacaaagctacgacgacgattacatgtatgttgggaaagatatataccccccacggccagcggccgctggctcacgatctggctcgctctctactcagacaccgctgcatcccctggcccagagcaacagcttcaacgccaccgaacttaacaggaacaactccaccggcaagtccttcgtcctcgcaaacgcgcctacccgccagccctcccaccgccgcgacatctccgcaaccccttcttcgcctctcctccccattcaaagtacccgccagagcgactccacccaaaacacccgctccctgcgcgacgaagaagaagccctcgaatccacctctcccccgcgccaactctccgcccagcccgcgcccccaactttccgacaattcctcagcaaccggccctccgcctcgcaacgccccggcctcggcggcggcgccatggccggtcgcttcagctggacaaactccaacgcgccccaaatgccgcacgaccccagccgcgatacagcaatggccgcacccgccctcggccgcgacagcttcatgacgtcccgctcgtcgatcccgcggttccgcacgatcaatagctgggtcaatcagcagagcacacgcatcgaggagcagaaactcaagcagcagttccgcatgacgacgtcgacgacgtatagtgatgatggggagaatgtgccggatatgccgcctgtgccgaagtgccccgagggaaccgaggggacgaaggcaactgaggcaaccgaggtcaaggaggcgaccgcggggaaggatgggaaagatggaaagaggaacgtaggtgtaggcacaggtgtaactggcgccaagggattaaagcaccaacgccacgacacagtcgacacagcgccaatcttcaaggcgcatccggggacggaagtcaggtttagcacacggagcacggtgccgagcgaggtgttggatatggggaggcggaatgcggcgttgtagaggggacgtagtcgctcatggtttgttgatgtatgtatgtgtatgttgaagagacgtgtgtgtgagtgattgagtgcgtggtggtaaagtaagaggggatgtgagagtggagggaaagagggggatcaatactgcattgtttgcgtttgccttttcgagatatctacctacctactgttaaagtatactagtacccgtccattatcattgacatcatcatcatttgttcg

SEQ ID NO: 13867 - DNA, 2890 bp, Oryza sativa
  ref <308>: DATABASE ACCESSION NUMBER: AK111215
  ref <309>: DATABASE ENTRY DATE: 2001-12-06
ctgagctggatgagacagcatcatcctgtgagggcagtgttgttgatgctggctgtgtgccctccaccagtctgcttgacactgcactgctggccatgtgggaggagcgagctgagcagggcctgttcaggtatgacgtgactgcctgccccaccaaggtggtgcctggcatgtacggctttgtggcacagctgaacgagggccgctacagcaagaagcgccccacagagttccgtgtggaccaggtggtgcaggccttcgaccccaacaagttcaacttcaccaaggccttcaagcgcgaggtgctgttcacctttgaacccgccccaccgggccgcgacagcagctttgaagaggcggggcgctgcaacgccagccccaacattgtgctgatcaacgtgtcccccatcgactacggccacgtgctgctgtgccccaaggtgctggactgcatcccacagcctctcacgccggagacctccctgacagcgctgcactttgcggtggaggtgggcaacccctacctgcgggtgggcttcaactccctgggcgcattcgccaccatcaaccacccgcacttccaggcctactacctgaacgcccccatgccctgtgagcgcgcccccaccaccccgctcagcggcatggtcaagcgccgccggcccgacagtgctgctgacagtgtgcggctgagcaagctgtgtgactacccagtgcgtggctgggtggtggagggatcaagcctggcagccatggcacaggtggttggtgaggcatgccaggtgatgcaggcgcacaacatgccgcacaacgtgctcatctccgactgtggtgcacgtgtgttcatcttccctcagtgctacgctgagcgccaggctcgtggtgaggtgcctgaccacctgctggactacggcgtcaacccggccgtgtgggagatcaccggccacatggtgctcaagcgtgccgaggactacaccactttcactgaggccaaggcctgggagctgctggctgcagtcagcttgagcgaggaggagctggctgctgcggcacagctgctgtttggtggtggtgcacacagtgagagcctggctggcgtcaccccggctgggcctgtggaggagcaggctgcagtggcagtgatggcctaggcagcttaggtgtgctggggtgtagagtggcactggtgcagcttgcagcttcctgtcatggtccagcatggggccttaacaacacatcaggtgtcaaatggtggtatcttgctgctgtagacatttatggtgtctccacccagctgcacacatgatgaaatgagtggtgtgcagtggtcattactgctgaacacgtgagggtgcgtagcgtgctgtgtgcgcagcttgccgcgttgatgtttggcgagagagacgcacggtcagcttggttggacccgtgcagccatgtcgcgcctcttctgggtgttgcctcataggcactggcgcacattgcaatgaacctgaccctgccaggtataagccttgtggcagtgcacctggcagacggcgttgtctggcatatacatctacagctgttgcgtgattgcatgccttgccttgctgcatggtccattggcagccgcatgttgctgacagtggggcagccaacagtggctcttggaggtgcataagagagtgtgaacatgtgtgcattcttcatggtgaaacactgagttgtgtgtgccatgtgctccacacacgcatttgcggagtgtgttgtacagatcgctgaattgttcttgttaagctgtcctgtacatagtttcaaagagacctcgtctgccatccctctttaatggcatatgcaggtccctcgcctagtagaatgtgcacatcttaggcatggtcctgcttatagccagtgcatcatattatgagctgccagggaggaattatccaactcagctgcttgctatcaaacagcggtctggtgcactgggagtggttggtcactcgatgtggtggcaagccatacactatcattatgcagcatctgtgtgtgcaagtgtgtgtgtgtgtgtgtgtgtgtgtgtgtgtgtgtgtctctgtctgtctgtctgtttgtgtgcgctgaagcagcacgtgtcgtgctgctgcatgagacaggagaagttctgcttgtgccactgttagtggcggtgtgaacgctagtgcttattgccagggacagcgaccccagttggctgcaagttccgtattgattgaaaaataactggcgggccaacagtacttggcttgtagttggcttttgtatctacaaaatgtaccaaacagttgccgggctaacatggtcgtgctgccaattgggcatcttgctctgcaattgagatgcgtgtgatgctgatgtctgctgtggcccatgatgcagctgtaggcctgctgtagcttgaagtgcgcagcggttgctgggagtgttggcttaccaggctgcaggcttgctgggttgtgaacacagtagcaatgcaacatgaaggtgcagtggcaacgcaaccgttgccttgtgtgacaggtgcgtagggcaggcttacaatgtgtgttggctgcctgacgaattggctctgcaatggcatgcctgacaacaagctcctggtttgttccttcacaggtgcatggggtgatggattgtatgtgtcatgatgcatgctcctttttgccttccggataattatgcatggtttgttctgggctgcagcgctgccatcattatcatgttgatttcttgtatcaagacatcattgtttgttatgttgatgtcttgtatcaggacatcactcaggcttgccacaacagtgtgtacatccagggtctgttcactcattttgcacgactcaggcacccaggcaactcaatggctactg

SEQ ID NO: 13868 - DNA, 2634 bp, Oryza sativa
  ref <308>: DATABASE ACCESSION NUMBER: AK111216
  ref <309>: DATABASE ENTRY DATE: 2001-12-06
aaaccccaagtgcacttgtgcacgcactcgggaatacaaggctaatggccatcgacactacggctgatcatggcggcggcgccggcgccggcggcgtggacattcccatgcaaatactagtgcagccgccgccgttgccgccgccgacggcgacggcgacggcgaggcaccggagaacgcacaccggcgactcgacggcgtcgtcgtacgagccgcagcggcggccggtggagcaccaggtctcgtccatgcacgccgccaccgcctccgacgacggcggcggcgtcgacgacgtggtgccggagcgcaaggtgacggcgttcgcgctccacgtcgcggtgctcgagaaggccgcgtcgcacgtcggcgccgtctgcttcgtgtgggcgacggtggtcatcctcggcgggttcgccgccgacctcgacgcccgggacttctggctcgtcaccgccatcctcctcgtcgaggggacgagggtgttcagccggagcaacgagctcgatctgcaggagcagccgatgcacctcccggacgccgccgccgccgccgccggagacgacgacgacgacccgccgccgccgcacaaggcggcggcggcggcctcgcccatccacctcctccccctcggcggctggctcgtcgaggcgaggaacgtgagctacgtcctctactggctccagctcctctcggcgtcggcgtgcgtcgcgctgtcgctgctgcgcctcgccacgctccgcttcgccggcgacaatggcggcggcggcaacaagaacgcgtactacgcgctgatgctgttctacgtgctcgcgctgtcggaggcggtgatcttcctggtggagcgcgcgtactgggagtgggtgctcagctatcggcgcctggtcgaggcggtgagcggcgagtgcgacctcggcgacgccggcgtggtgccgatcaagcggttcttctaccgcgccttctcgaggtcggtcgagggcggcatcctcgacgccacgcggacggacctcgtctccttcgccgtcgagctcctctcatcggactccggcgacgagcagctcatcggcgcgcacatcctccggggctccatcgccaaccgcgactcggcgaggcgggcggtgcgcaagatcggcacgtcggcggccaccgtcgagcggctggtggagatggtgagctggaagagccccagcaagcgccgcgtcaggtcgctcgccgccgaggtcgtcctccgcctcgccggcaagcgccgcaacctcatccgcgtcgccgccatccccggcgccatcgagtccatctccaccttactcgagacccccaccaccgacgccgccgccggcgacctcgccatgaacgagatggggctccacatcatgaagaagctggcgcgcgagcacggcaacgcggcgaagatctcgagcacaaggggtgtcctctccaggatcatacacttcacccggacgagcagggcggcgctgcagatctgcgccggcggcgaggggagcctgccggcgaagacggtgctccggtcgctgtaggtggtgaagaacctctcgagcacgccggggcacaccggcgaggcgatcaggagggagatctccgacaacgtgttcgtcctcggcaacatccgcaaggtgctccagcacggcggcgagcgccacggcaagatgcagctgacggcgatcggcgtcctcgccgacctcgccatcgacggcgacgccaaggagaggatcggctgcacgggcgacatgatcgcgcatctgctggacatgttcgccggctcgccggagtcggctccggcggtcgcctacgcggcgcagggggcggcgcacatcaggctgcaggccggcgaggtggtggcgctgctcgccctcgagagcgccgccaactgcgaccggatactccgggaagctgccgtcgtcgagaggctggtgatgacgctgcaccaccccgggctgcagatcacgtcatccagaatcctactgaacctgtgcaggtacagcaggagcgaccacttcttgcagctcagcagcctcactgcagctgtcccaatagtgttcaaagcaattatggttgagaagagcagcttgcttgaggtgtctataggattggcaatacaggttacaaggcttgcaacacctgaatttcacaaggaaatctttggaaaggcaggtgtaccagatacagacattgcagggaggctagtggagattctgaaagagcacaggacacccagggtgaaggttccgaggatgagaaggttcgtcatcgagctcgccatcgccatgatgagaggcgacgccgagctcgtccccttcttcaggagcatggagctggagaaggagctcaggagcgtcgtcaggtcgacgtccgagctcgagagcttcaacatgttctctggcagcattgggctgagcaggcacagctcaactctggcctcacttgtagatgatgccatggaaatcatgcaggctctgcaagacagttaacaaatgaccacaggacagactgaaaatggtaaatgcctgtgattggttgtatgttgggatatgcgatgaatctaattgtaaattcagaaataatctattcaattgatcagtcaaaactgtaaataacaaaaggcaagtgtattctcatctc

SEQ ID NO: 13869 - DNA, 2307 bp, Oryza sativa
  ref <308>: DATABASE ACCESSION NUMBER: AK111217
  ref <309>: DATABASE ENTRY DATE: 2001-12-06
tttcctttgttgtttgttgatttgttttcgagtctttttcctaatttttcattcagtgaacaaccgaaagaagaaaacaaaccaagaaaaaaagacaaaaaaaaggaaaaagaaaagaaaacaagcacagaacaagcaagaaacacaattctttgaagaaacttgattctttcaaagaaaacaagtcagagaagaaagaaacaaagaaagaaagaagagtaaacgaaaaggatgtcaactttgtcgccagaaactttttcgcctgttgaagatggacagaagaggttgagttgggggctgacatcgctgtttgaggatccgatttcgtacgacgtaatggaagaaccagtgatgattccctgcggccattccttcgagcgcagttcgatcaccgcttggttgcaacagcgacgcgcctgccccgtttgtcagaagaacaccgacccttccaaaatcatccccaactttctgctcaaacaaatcatcgatcgctatgcgcaaaaaagggaggaggttcgtcctgccagtcaatctgccccttcactttccgtcattcatgttgcttctgttccacattcttcttctgcaccatctgttgcgagttcagatagttctttaacagatagttcttcatcatcaacatcaacaacttcatcttcttcttcttcatcttcctcttcttcatcttcatcttcatcatcttcttcatcatcatcatcttcttcttcttcttcaacttcaacattgagttcatctaattcaccattatcagcatcaccattaagacatgatggagtgagaggacgtatattattttcagagtcagtggcgaaagcatgcgacattcggctgatttccatctccacctcagtggcatcgattgccttcatgggatcggcagcccaatggtcgacagtgcctgccttaccgccgctgagttccgggctgcatcggtgggagtgcaacatcagccgcacggagcggggcactatcatgattggcgtcatgacgcccgacgcgccgtccggtcgcggccgctatctgggcgactcgcccaacggctgggccattctgggagtcaacggcacgctgtggaacaatggacgcaaagaaaagttttcttcgtcttcgttccgcagccaccacacactgaccgtcattctcgactgcgatctgagaacgctgtcctacgagctcaacggcaatccgctgggcgtggcggctcgcgagctgccgctgcctctgtgcttcgccgtctcgctgtaccatcccggcgatcgcgtcgaggtgaccgccgtctccagctcccacgaggacgcggtggctccgctgcgtttccaggctcccttgctgcccagcttgcagctgcagccgccctcgggtctgacccatcgcggcgacagcgacggttgggccatggctcgcttggaacccgtggccactggcctgcacgagtggacctgccagattcgcgaaacggccaagggcaccttcctgctgggcttcatgaaccccaccgtgcagctggccgacggctactatctgggcagcgactcgcgctcctggggcgtgctgggcatcaacggcaccgcttggcacaagggcaacaagaccaagtttgcctcttcgctgcgcagtggtgacatcattacggtgcgctacaacgccgccacccgcagcgccgagtatctgcacaaccaaaagtcgctgggcacggccttcagcaacatcgacccgcccacttccttcgccatctccatgttccaccccaacgacttcatttccatcatgtacgacgccgactctcccgcgctgctgccctccttcgtggtgcccagctcacccttgctgctgctggaaggcaccaccgtgcgccacgggcccaaggaaggctgggccaccatcacgctcagcgacaccatcctgccaggcgccgtctcccgcgccgtcttcaaaatcaactccacgctcaagagtcacatcctcattggcctctgcgccaaggctttgcctttgcccgactacctgggcgccaacgccacctcctggggtctgctcggcatcaacgccaccttttggcgcagcggcaacaaggaaaagctgcccctcaaccgcttttccaccgagtccgtcgtcagagttactctcgatggtatccacaacaccctctctttttccatcaatgacgatcctcccgtcgtcgctttgaccggtttctcggcttatcctgctcactttgccgtctcactcttctcccctggtgattcggtttctcttcttcctgtgccataaacaagatcaacaatg

SEQ ID NO: 13870 - DNA, 3263 bp, Oryza sativa
  ref <308>: DATABASE ACCESSION NUMBER: AK111218
  ref <309>: DATABASE ENTRY DATE: 2001-12-06
agtccagtccacttagcaccacaaagtactcccggtacccgacgcctcacatcatagccttctagcttctagcctttcgctgtcactgtggtcactggtgcgtgatctgcgcttgcttgttacgcaacatgtccaccgccgtctggccgcccatcgaagacacccgccttgccgatgaacaggctgcatcacaagcgcgtgagctcgagtggctcctagtccagctgcgcgatacactgcagtctctcaaggccggcctggaagagtgcgcggctctgcttgcgccgacggagaatggctcaacgctggtgctgtcatcactcaggtccgaaagcttgaaaggtctggtcactcgcatcggcactcgcatcaccaaagggaatatcaaactccgtctggcaagccttccaccgcccaaaggatccctcgcatacgacttgaccatttcctctgtgccgcaagctcccactctcgtcatccctcagctcacatcggtgcgaacctctatcaacagctgtttggacgttatcgatgtgtcaatctggggcggggatgcgacaaatgccaacttcattgctggccagctccagctgctgcatgaccacatactcgaagcgaagcaagcgttgaagggctactcggacgtgcagacacagtggtgggaagatcccatggacgagaagacattcgaccctccgcttccaagtaacgtgtcattccatatgtttgtctttgatgccgccttggtcctcgaagtccgaactctggagccctaccatgcggcccaaagttcatccctgaccggcttcagcattcgcgacagtttcgcggcagcactgggcggttctcgagctccggctcacgatgaagcggacagttccttcacgtacagagggcatgaagttcgtgtcaaggagaaagtcagggttgaagcccaagacccagcactcatctctgcatccgcgaaattgaatgcgcttgagcacaatatcatgctcagtcgcaaagcgctcaacatcgtcatggatcgcgatgaacatttggattgatactgtatctccgggctgctctgcctttggttgttgcagccaatcagatcgcttattgatggattagtcggagacgccaattgcagcgcagctattctccgcggcatcgccccagcccagggctcgtcttagtggccgattccgcgatggcgcagtgcgggtcgtcgctctggtcggaaaagaaaggaaacccgcattatcatcgccgctcacaagtgctcgcagcagataacaactttcactttatagtaaagtaccagtcgttactgtttggttgtctttcaaagttacactcggcgaccctcttgttacgtccaggtgaggcaattggagaagcaagtcctcgcatcggactctcgcagatctacatcaagagtcacttgtaataattgcatccgcattcacacccacattaccgcctacaaagctaccttgcaaccggtgccccaaaatcatggcacccgcacttctcacagcagtcgatgcgactgcacaaacccatctcattatcggctcaaatcctcttgccggtgctcgatgcactcggtcgatcgaagtcggcgcaaatccaatcctcattgcccccgaggactcaacactacactatggcttagcgaagcgaattgaagctggagaagtaaaatggctgaagcgatccttccaagaggacgacttgactacgctgggtcgagcggaggtggatggtgtggtagatgcagtcttcgtgacttctggaggcaaacacacttcagctacacatatctccgatctctgtcgaagactgcggatacctatcaacgttgccgacgcgccgaatctttgctcattcacacttctatcctcacattccgacggtccgctacagattggtgttacaacttctggaaaaggatgcaagctttcctcccgtataagaagggagatcgctgcgtctctgcctccgcatctaggcgatgcagtggaaagattgggttctttacgaaggaggatatgggaagaggatcatgcagcggagttgtcgcatgacctcgaaaatgaagacgaggacagtggccaatctgctacattcaacaagttaattttggaggagagcaaggaagcagctcgagggagacgcatgcggtggttgacacaaatctgcgaatactggcctctccgccgtctcgcttccatcacagacgcagatattgataccctcttccgcgaatttgcagccagcagcccttcaaagataggacctacgtccacaactcccgagcgcaaatttggccgcatcatcctagcaggctcaggcccaggcaaccctgatctcttgacccgcgctgcctataaagccatccaatccgccgacctcatcctcgctgacaaactcgttccctccccaattctcgacctcgtcccccgtcgcgcgaccgtacacatcgccaggaaattcccaggcaacgccgacaaagcgcaggaagagctactagaactcggtctcgagggtctgaaggccggcaaagtcgtcgtgcgcatcaagcaaggcgacccctacatctacggccgcggcggcgaggagtacgacttcttccgcgcgcatggattcatacctagtgtgctaccaggcatcaccagcgcgctatcagcgcccctcttcgcagccatccccgccacgcaccgcggcgtcgcagaccaggtcctcatctgcaccggcacaggccgcaaaggcgcgccgctggatcccccagagttcgtcgcatcgcgcaccctcgtgctgctcatgtccctgcaccgcttatccggcctcgtcgacgacctcaccaagaagggctatccaaaggacctccctgtcgccgtcctcgagcgcgcgagctgctctgaccagcgcgtgattcgcaccagtctggagcacgtctgtgcggcggtcgaggaggaggggagcaggccgcccggcttgctggtcgtggggaacgcgtgtcgggtgctgatgaagcacgagcagcggtgggttgtcgaggagggctttcatgggctggatggactgggcagtgagggcgagcttgaggtggggagggtgagggatgcggttgttgcatagtcgatgttagagcatttatcgtcgatgatttgcatttgcatggaggtggatagagtgagaagacgcgatagaccacgcatttagaccggatggtaccaagcatcaatctcatcaaatcaaatgaattcaaaccc

SEQ ID NO: 13871 - DNA, 2621 bp, Oryza sativa
  ref <308>: DATABASE ACCESSION NUMBER: AK111219
  ref <309>: DATABASE ENTRY DATE: 2001-12-06
gttatcattgtcattgaacttgcatatgcaatgtgattactgattgcttcgtggtacgcaatgtcatccaagttggcagccagacagctgtccagtctgctgcaagccaaaggacagcagaacaaggacgtagcaaagagtataaaaaagaagcgtaggcatcacaaaaaaccgcaagcaaaggcacaacagcaactagagaagcagaagagcacctatcagcaacgcttggagtactacaaagcgacaacaactgcggcccaaggaaccgttgagattatgagcaagctgctaggccagccagcaccagaggacgactctgcccttgatatcgacatttaagagctttgtcaagtgtagtaactctatggcacttacttacacaagcagcagcaccgggctgcccagcaaccaaggcggcagcagcaagggtggcatcaggggaggcagcgccttggttagggctgtgatgcctccacgaggtcttcagcattgtgcagcccttgctgcggttcagcagcacatgagtgccggagcgttgctgcccttcacttgtgacggaaatctatggccgcagcagcggcgacatgctgcagttcagcagcagccaggacatgcagcgtcacacctcagttgcaagagcagcagcagcggcagcagcagcaggttaagggctgcgtccttcagcagagtggcggcatcagcaacaggaggcagcggcagcagcagcagtagtgtgccaggcgtgccccagcctcctggggtggttcctgcaaacctgcagaatatcgaccccagcagtatagacccaaacgggctagcaggcctgttcatggcttacgccatgcagatacagcagtccctggagcagcagcagcagcaggcggcagcgggaggctcaccaggtgccagcctggtggcgcagaacctcaccttccacccgccgggagcggagcagccgctgttagatgacgtcagttttaacttgaaaccgaatcagctggggctcatcatcggtcgcagcggctctggcaagaccacattgctgcagctgctggcagggttgagtgagcagacatcggggcagatattaatccaccggcctcagccaggcagccatgcatcaggcctgtttgtgcccacgcacatagagcagcggatgcagcaggtaggccttgtgtttcagttccctgagcgtcattttctgggtgatgacgttatgacggaaatgacattcacgtggccgagggaggttgcctactggggccagaggcaggccatggcagtgcgcatgcagagggtgattgaggctgttggcctgactgacatcccgttcaacatcagccccagtgacctgtcgggcggccagcagcggcgcctggcgctggcgctgcagctggtgcgtggcccgtctgtgctgctgctggacgagccactggcaggcctggactggcatgctcgcagggaggttgtcgcgccgctgcgtgagctgaagcgtgaggccacgctgctggttgtgagccatgacctggcagacattgcgccactggtggactgtgcctggcgcatgcagatgggtgggcggatggagcctgtacagtggccaccagacagcctgagcgacatggaggattagctgggttgagcaacacagggtttagggatttaagggttcaggtgttgccatccctacagtccgtaactacaccctacagttcatcactacctgagcaacatggagggttagctgggctggatgtggtgccagttgggcacagctgcagctcgtgacatgagggcttttgcatatgcgtttagcctgagcgacacagaggactgcagcgacaggcgcacagatggcattgcagtgtaatacacaatgcactggctgggttggtctcggattcaaatgggcagtgctgggcagtgctgcagctcgtggcatgtgcattgatatgcaaggtgtggtatcagtgtcaggcttgggctgttgcctgccatccctggacaggagcctgaggcagagaaaactgttacaggtacccaatttcagtgggaaaatacgcaaggaaagcggtttgcagcaggctcatcatgcccacttgacgtattatataggctctaacagctttgagtcacagccatatctcttttactgcatgtgactgggtctcagcagaggtcctgtccctattcggttgacacctgcccttctgaggctgcatgatgcagagcctgacacttgcaaatgcaagctaggtgaataggtgctgtgtgaggcaacagcagcagtgtgccacgaagaagcggcatccttgcgtgcaattgccagtttgcagctggttgctagtaacttactggcaaccagcccagtgggctcagctagctggttgaacgcgtgcaccgtggtgattgtgttgatggcaatgtcctggcatgcatgtcaggaaaagatatggtagcttttatactgccctggctgcaaacatggtcatcatgagcaatggcattgctgtgacggtccaggtggcccacctggacaacaccatgttgtggcagcctggcaagtggtatagtggtggcacagcgtatgcatccttcttcttaacagctgtgttaac

SEQ ID NO: 13872 - DNA, 2264 bp, Oryza sativa
  ref <308>: DATABASE ACCESSION NUMBER: AK111220
  ref <309>: DATABASE ENTRY DATE: 2001-12-06
aatggtattggtgtcgtaagatgtaatcaggggtcactgggctgcaccggtctggcgtgacccagtgctcatttcggctgcacaggatcgataacatgggagacattgaccccaacaacgaccctacggtcgtgagagacgacactccattcccagatcctaatctatattttaaggtgttcgacagcgagcgtgacgagccggaaagcaagtacagggaggatgtgttcaagctgtatgaacgctgggagaaaaagtatggcaggaagtggccagagaatggtctcaacaccgaagatttggtgtggctttacaatgaggcctacaaggatgaggaggagcagcagcagggctccatcatgcccaaaacataccccaatgaaaagcaggactatgaggggcagttcatcacggcgacggaggatgccgtagagcccgcgctggcgtcgctgccacaggcccccgccgcgcgccgcgctgccgtggccaaggccaaggaggaggcggacaacggggtgtgggtgacggacgagtttgagagcgaggcctacgagatggggaacatggaggccgtgcacggcatgtacctctgggacaaggagggcaagcccaccatcatgcctgaggggcccccaaaggaggagatgggggagggcagtgagggctggagcgacttctacggcagcgtgcggccgcgctacgttgagtctgacgacgtgcgcgacgcgctgtgggcgacggacgagtttgagtccgacgaggacaacaccgagtctgagtgggagcctgagtacgtgggtgctggcctgggcctgaagcgagaggaccccatgaactggcagtacagcctgagacacagcaaccacccgctggcacccttcccaggagaggcgctgaagtggagcagctacgtgtacgatgacggcacaacgtacgagggtgtcacccgtgaagccatccctcacggcatgggcgtgatggtgtttggcaacggcacgggcggcggcttccacttcagggaggtcaagctgggcgacaagtatgagggggagtttcaggcgggctacgcgcatggtctgggccagttcaccagcatcaactcaggggaggtgtacatcggggagttctttgcaggccagcgccacggctgcggcatgaagatcgacatgagccccttctactacctcgtggagcgcggcgtcgacccggtcagcgcctaccagcgcagctgcaagcacatcatgcgcgagatcgagttccgcacctggtacaggggccagcccctgggggatgcaggtgaggctgagagtgtgctggtggcagtgcgtgatgacgccgcagccagcccctttgatgttgtggtgaagaacctggctcatgagaccaagctcaagaactggagggccatgaccccagaggagaaggcactcagcaagctggctgacgtgctggaccagattcactctgacaagcacggctttggcagcgcctacaccgggtatggctccaagaccgccctcaacgaggttggggccatgggcatcgccagtgcaggggcgacagaggacagcattgacctcatggttgggcgtgatgaggatggcaagctgggccctggttggtttgacaacacagacagcgagctgttcccgctggatgagcggctgcgcacacaggtggcagttgaggcactgcaggacaagatcgacgagtccgaggacaaggagagcatcctgggcggtgacgtcctcaaccccaccacagggctgtcgctgaaggactacctggagggcaaggaggcagcgcacaacgagctgtacatgcgcgtgcatggcggcaaggcggccatgaccctggacgactcaacaacctaccttgacagcgaggagctgaaggctatcaacacagtgaagcttggcggtgtgactgaggacctgctactggagtctatgcggcgccatgatgcggtgtgggctgatgacgacccctacgtgcggcacagcaaggcacgcagccgcaactgggcagaggaggacacggacacgcgctttgagacggagagcgacatgatggagctgtgcgacctggctgagatccttggtacgattgatgaggttgaggaggttgtggccaaggcccgaatgtggcgctggaagccgtacggcgaggtcacactgcgcttcgcccaggacgcgaatggtgcgccagtggagttgatgcaggaccccctgcacttcccccacagcaccaagtggatggctccc

SEQ ID NO: 13873 - DNA, 1815 bp, Oryza sativa
  ref <308>: DATABASE ACCESSION NUMBER: AK111221
  ref <309>: DATABASE ENTRY DATE: 2001-12-06
tgagaactttgaaggccgaagaggagaaaggttccatgtgaacggcacttgcacatgggtaagccgatcctaagggacggggtaaccccggcagagagcgcgaccacgcgcgtgccccgaaagggaatcgggttaagatttcccgagccgggacgtggcggttgacggcgacgttaggaagtccggagacgccggcgggggcctcgggaagagttatcttttctgcttaacggcccgccaaccctggaaacggttcagccggaggtagggtccagcggccggaagagcaccgcacgtcgcgcggtgtccggtgcgcccccggcggcccttgaaaatccggaggaccgagtaccgtccacgcccggtcgtactcataaccgcatcaggtctccaaggtgaacagcctctggccaatggaacaatgtaggcaagggaagtcggcaaaacggatccgtaacttcgggaaaaggattggctctgagggctgggctcgggggtcccggccccgaacccgtcggctgccggcggactgctcgagctgctcgcgcggcgagagcgggccgccgcgtgccggccgggggacggaccgggaacggccccctcgggggccttccccgggcgtcgaacagccgactcagaactggtacggacaaggggaatccgactgtttaattaaaacaaagcattgcgatggtcctcgcggatgctgacgcaatgtgatttctgcccagtgctctgaatgtcaaagtgaagaaattcaaccaagcgcgggtaaacggcgggagtaactatgactctcttaaggtagccaaatgcctcgtcatctaattagtgacgcgcatgaatggattaacgagattcccactgtccctgtctactatccagcgaaaccacagccaagggaacgggcttggcggaatcagcggggaaagaagaccctgttgagcttgactctagtccgactttgtgaaatgcgattaaatcatgagttcctgtgaaacgcacaaggtagctggggagccagaaagcgcgatgaacaaggcactggagacgggtgctgcagccgtgcagaactttgcgcctgtaaagaggatatgtgcgcatctcaatgcgttccatgcttacgcccacgatcctatgcggccggctgtggaagcgaaccactactgctcgcatctgaacgaggatgtaaggcagtgcattttgtatgattccccggaacctccagcgcgcattattggaatagagtacatgattactaccaggctgtacaacaatttggatgaagaggagcagaagctatggcactcgcatgtcttcgaagtcaagtcgggcatgttgataatgccgaagcccgctgccatgcccgaggctgcgtgggaggccgccgagaacaaggagatggaggaggtaatccatttgtatggcaagatttatcatctttggcaaacggatcgtggagatacattaccgcttggtgcacctcaattgatgacgagctataccgaggcagggcagatgccgaattttgaggagaaggttaaggagcgggatgcgaggtttggatccgatttccaacggaagaaacaggctagagagtacatcaaagagccggtgattcataagaatgcagatgcggcatgggcgaaggttggccatggtttccgaggctgatcgaaataacatttgggcgggacgatgttgcaggcgttggtggagaaggaagtggagatatatagttatgactgctcgttgaaggcaggcgtgtagccaggcaacacgagacacatctctgaaatgcttactctcctctcc

SEQ ID NO: 13874 - DNA, 2566 bp, Oryza sativa
  ref <308>: DATABASE ACCESSION NUMBER: AK111222
  ref <309>: DATABASE ENTRY DATE: 2001-12-06
aaaatttgctgctgctaccgaagtcgctggacgctgcttgaagccggtggatcatgggttaaccctgctgtgctatgtagagatctcgtgaagaaccgacgctggcgtagggtggcaaggctacacgagcagtcgatatgaagtctgcagtgccctcagttgcccaaaaggcacgcctgttgctgcagaccggagaccgggtggtgacaggcagcagtccgtccggctatgcactagaaacagcagttagggcttcagcacattatgccacttccactccagcagcagctgcagcaggcagcagacacccaggagcagccactgccccaactcccgctggagctgcagcgccaactacagcaggcaagccccaagcagcagcagcggcagcaggccagccccccacatcatctacagcagctggggcacctacacccgaaacagcaggagcagcatcagcagcagcagcagcgcctggcagcagcagcagcagcagtggccaaacagcaggccctggggacggcaaacaaccaggcaagggcaagggcagcagctggctgaccgctgcattggttgtggcaatccctgctggtgcatactatgcttacgaccagagcaagcatggtaatgacacaggtggaacagtaccagagctgtcaaagctgccgcctcccagcctgagccccgagtccttgggctccctggttgaacgctccaagcaggccctgtccagcatcatcccaccacagctggctggcatcatggggggaggagcagccgataagaaggcaagcgacaagctgcaccaccagaagcaggctgatgtggcatccggcttcaccatgctgccacctgatgggtcagcagcaggagcagctgcagcaccgtcagatgctgctggtgctgccggcagcgacgctgcagcgaagggtgcgttgagtgcagcggctgacgagttccctggaagcagtgggcaagcagctgagacagggccgtttgctgacgcacacattgagcatgtggatatggcaccaatacacgcgctgttcagtgaggtggcagcaacaggccttcccagttccgcagcacgcagcagcgccagcagcagcacctcagcagatgccagcagcagcagcagcagcagcaacatctctgctgaggcagcagcagaagatgcaagcaggattgtggcggcaatgagtgccgtcgcggcttcccgcagcgcgcaggaggagaagcagcagcaagcagctgcaaaagcagcagcagcaccagcagctcaagcccgggctgccacacttgatgcagctcctgttgctgtgaaggatcggtcagactcagagctgcagctgctgagcaagcagctagggctgtcacaggatttaagccctgcagggttgattgctgcagcaaactctctgggtctgggatccagcagcagcaccggcactcctttgcctccacagctggcccagctgaaccaggccactgcagatgcgcgcctgctgggcagcctgctgcagcagctggcgacacaacaggcgctgctgcagcagcaactggcaacagccaagcaggaggccgcctgggcagaggaggcagcaaggaagcgggaggactcgctcacggagcacttcaaggagctgatgcgggagcagtcacgcatccagcagcagatcactgctgaggctgtgcgggcggctgaggaggccgtcatggcggacacggccaaggcgcacaacgaggagcggcggcagcgcggcgcagccgttgacgagctgcgtgcaaaggtcaacgccctcagcctggcctttgaccagaggactgctcaggttcggtcagcccatgaggtcaataagatcagccttggcgtgcttggcctcagcagggcactggaggagggcaaaccaattggggagcagctgcagctgctggctgccgggtgtcctggtgatcctgtggtggaggcagtggctgcctccctgcccgcctctgcagccacagccgggctgccaacactgcagcagctgcagcagcagttcaaggcggtggcacggcaggcagcggaagcagcatactttgcaggagaggccgagggcggcatcttggcccgccttgtagccaagctggcagtgcagctcaaagtggatgctggcagcactgacgggggctttgacagcaacatcgctcaggcccggtcgctggtactgcagggcaagctgctggctgctgctgatgcgctttcagctgcagtagctggcacgcaagcagcagcagtggtggctcactgggtggagagtgccagggcaagggccgtggcagaccaggcaatgaagctgctgcaggcccacgccacaacaacagcagtgactgcagggcaatagcgtactcaggctaggctgcgtagcttctaatggcatgacaggagcttatcaagggatcctgcccagggtggcattaggcacaggcatagaccgtattgtgtagcagtgatggctgctgggagacataaatacaatgttgttggtgcaaagagcagaagggttgtgtgacacatgcaacagtc

SEQ ID NO: 13875 - DNA, 3069 bp, Oryza sativa
  ref <308>: DATABASE ACCESSION NUMBER: AK111223
  ref <309>: DATABASE ENTRY DATE: 2001-12-06
cgaaaaaccgagtttgtatactcgataaattaagaatgtcgcgcgcagtgctggcactggccgctgtggtgctgctcagcgcagtgctggcgccggcgccggcctctgccgccgcaatgccgtgtgtgtcgctgcccgcttcgggcccgccgaacccggtgtttgcgtgtctgaacggcatcgcgttcaacgcgacggtggcgctgaatgtgctgcagaccaacatccgcgcactcgaaggtgcgtacgcgttccgcgatattagcgtcaattacgctgatcgggcgggtgtgtacccgaccattcagctcgacatcgtctcgcagctgcagaccatcaacgcgcaggtgcaggcgtatgtggccaacccgcagctgccggcgccgtttgcatcggactacgcgtttcaattcgccgttcaggacctgttctcgcgtctgtacgatgcgcacacgtcgtacgcgctgcctgcgccgtactcatactttgtgttttatcagctcatgcgttttgaggagaccactgacaacacgcccggcgccgccgccacgcgttcgatcaaagtctaccccatcgccggctccaacgccgcgctctacgcgctgtacaacaccgtgttcggtggcgtaccgttccaagtgccggggtacagcacgaacggcccggccatcgacggttggacgctgcaggccattgacggcgtcgacgcgtacagctggtttgcgcgtgaggcagaccgcgtggcccgtatctcgcgcgacccgggcacgcgctggaacttggcggtgcacgggcgcggcactgacccgtacgcgccgtcgtcgtgggcgggccgctctctcagcaccgtaatgcccactcacgacaaccacacgtacacgctcgtcgacagcgccggtgtcacacaccaaatcacgctccattggctcgccattaaccgcgctgcgtccacgtccgtcgcagcgcacgacaacttggccgatgcgtacgccgcggctgatccggatgacgaccccgctccggtgcgtgcgaacggtaaaggcctgcgcccgccgcagttggaactgccgtttgagacggaacaccggcgcatggcgcgcggcaccaaacgcgtggtgacacagcacctgctggagacgacgggtcaggcagctgatgcggtgggcgctacgacgccgccgcaactgacgtaccgcgacatcggcaatggcattggtgtgatcaagatcttgagcttccccgatatgacgtccagtgacggcgccgttctgctgaacaacctgcagctcggcatcgcgcaatgggtggcggcaggcaataccaagctcttcctcgatctcaacggcaacggcggcggtgacatttgcggcggttacgccatcatccgctacctcttcccgcagctgttcgaacgggacgtaccgctggtcgggcagtacgactggcccgtcacgcccctcttctcgttgctggcgaacgcgtcgtttgcggcgctcgagaccgcgcccggcaccggcggacagcagctgtacccgtacgtgccgtggtattggaaggaccctgtgcgggcgcgcggcgagcacttcggccaccgcgacaaccgcacgcaaccggacgtgtcgtacagcgccaaagtggaccgcgacgtgtggctggacaacatgtgggtgtcgaacgctgtcacgcgcacgcgcgtcagcggcgcatacgctgcggcgttcacgcagttggtgggtgacacgtgcgattcgacgatcaacctctttgccgccacaccggacatgttccccgccggcggccgtctcgacccgaccaatgtcgttctcatgtccaacggcttctgcggttcgacgtgttcggtgttttcttcgttcattcaaatgcataatttggccaaaaccgtggtgtttggcgggctcgcgagccagccgcagcagcagttctggtcgttcccgggcggtcaggtgggcgatatgaccgcaatttggccgctgacggactacttcggtctgagctccaacccgttggtgccgcccaagcccttgcccggcgccggctctgcgcgcatgacgttccgtgagatttacccctggaactgggcgccgcgcacgcgcgaagacgtcatcaccactgccccgctaccgttggagtggcacttcatccccgccaccttccacgcgccgtacttctccacttcgcgtccgtccgatctcatggctcagtacgagtttgtgcgcacaaactacttgacggcgtgtgtggacggcctgagcgtgcgcccggcgtgtgtcgtggcgcacggctcgggcgtgcagtcgtgttcagacgcttcgaactgccgcgtgacggcatgcgacgcgggcttttacgcgcccactgacgcgccgtacgcgtgcagcccgtgcccgaaggggacgtatcgcaacaacttcgacgcgctgttcaccccgctcacgcagtgcgtgacgtgtaccaacgccatggcgtgggccggaccggacagctcgttggcgggccacagcgtgtacacggccgaggcctggacctcgcccgagtgcccgtacgacgcggacaacgcaaagctgagcgctagtctggccattgtcggtgtcgtcatggcattggtgggcggactgctggtgggcggcggtgtggtgtggtacgcccggcgccgcggctcgcagagctcattgggagtgtacaccgacaaacgcccgctgccgtcgtccgtcaccggcacgccacagctgtggggcaccccatacccatatcgtttctgcttgctgggccgtgcatctgtgcgcgcacgcttgagcccgcccattgggctcgccagcgcccacagctgcgcggcgcacagacactggtgctctgcgctctgttttcgccgctgtcgctctgtcgctttgtcgctcgctgtgagtgtgatccactggccgctctgtccccttccctttgccctctgccctctgtcattgtcatcgctgcagtaccgcgctggcggctgtggcgcgcatcctctgcgccttcgcgcgctgtgtgtcccgttccgaatgcaacaacaaatgc

SEQ ID NO: 13876 - DNA, 2734 bp, Oryza sativa
  ref <308>: DATABASE ACCESSION NUMBER: AK111224
  ref <309>: DATABASE ENTRY DATE: 2001-12-06
gtttttcagtttcgtttacatcattgtctatgagtgtatctgccctccaggctcgtttcaatcaatgttcaggcggaagaatcgcaaaggttcgactccctctcctgacgtatacagaccttctggcgctcctgtgagattgatacctatgggaacagtcggcgaagagtcgatcgccagtcacgacgtcatgccccccaatccagatacacacgctcgctttgatgcggtaaacgaaccattagttcaagacttcgcttctatgcatgacgaaagcaatacacatgagggtaaaccaccactcacaccccctgcggacgggtctgagttggagcgtcctgccgactggctctccgacgacgaagcaaccgcccctgctccacccgactttacacgacgcggtatacatatcccgtctaggaccagctcgaatacgccttcggccaacaagaagcgcttgtccatgcaacgtcgattaagtgctgatgctgcttcattcaacgacccgccaataccaggaccacaacagaaattacgaagtgcttcgcatacccccgtcagtaccgcacgaatgggatacttctcgggacaagcgaagcgagtcaacggtactgcaccaaatggacttcggagttcatcatcagcctcaattaattcttatgaatcctcggcgcccgattctacaacgcaaccaattggacctctgcagcaaaagagtaatgtggaagatggagaccgattgtcgcctttgttagaagacgacccgaaatcattcgacctagttcctgctccaccagagaatgataaagggctgttttctctcgaggttcaatctgagcaattgttttccaaggaacacttagaagcgatcttcaaagacacgccttcactaatcagattcacgacatttttgagcgcaactagaccgaagttagtccctgttcttgtatattatctcgatgcgctcaaggcttctcgagctattgcctatgccaatgctgtggcggaagctctggagcctattcctgggctggcctttacggacactcctgccagacccaccatgaatgcagtgctagaagacaaggcaacaaaagcgttcgaggtgcttgttcgggacgcgttacctgccttcataacgcacgtcttcatacaagtagtcagcgtaagcatctcgaagcgtgtcgtaggaaatcttccacccatgctacgtgatgccagcgaaggattggcagaagtcttctgtttgactgatccgtcgcggacggataaccctatcatatttgcttctgaggcattccatcgtacgacgcaatacggcgtgagctatgcaattggacgcaattgtcgtttccttcaaggcccaaagacgaacagagccagtgtagaccggtttcgcgcagcggtcaagtcaggtcacgagcatagtgaagtaatgctgaattatcgccgcgatggttcacccttcatgaatctcttgatgacagcacctatactggattcgcgtggtaacatacgctacttcatcggtgcgcagattgacgtatctggcctcgtgaaggaaggaacagatcttgatgctttccgacagatgctcgaccagcaagagggctacggagagacacctgaggagaaggacgagttccacgtgctcagcgagatgttcaacagctcagagctggagacggtcaggaggcatggtggcaacatgcaccgtgaacatgtagacgacagcgacgacacggccagtatagcctatcgcccaagggtgctcattcgggaccaggacgcatacgaagaacagcctcgattggagaccgcttcgccccgagcagatggtcgattaagtggcccgtataagcactacctcctcatccgccctgccccatctctccgaatcctcttcacctccccctccctccgcgtcccaggcatcatgcaatcgcactttctcgatcgcatcggcggctcgcagcgcgtgcgagactccctcgccgacgccctctcagacggcacccgcggcgtcaccgccaaaatccgctggctctcgcatgccgtcgccagcctcgacggctcccacgaagaaggccgtccccgctggatccactgcacgcccctccttggccagaacggttccgtcggcgtctggatggtcatcctcatcgacgacaaggagtccacgcagcccacgcgccgcttccgccccgcgccgcccgttgcaaacgatattggccgcgcgcaccagcgccaggcggacgcggcgcgcagtatcaatggcatctaccgcacgaccgatttcctcgacgaggacacggatcattcgggatactcgccgcgcgtctcgctgaacgggcagggtatgcccaaacatgttgccatcgagggcctgcgtcagcccgagagtcccgtcgccaggggtcagcgctcgtcgggtagtcccagagatcagagggcgttgaggacgacggcgagtaatggtggcgcgaacgggagagagtcgggggcgaatagtgtgcggtcttttgcaatctagtttcgagtgtggagggcaggaggcatgggtgggcgaccttctatggagatgtagatgttgtttcaaacaagtgttagggtggccgagtttgtatttgtacaggccttttccggtcgatttgatacccttcttatggatattttgtagcatagaggcgcaagagcacacgcacgtagcatttagcaattgtacaacaacttc

SEQ ID NO: 13877 - DNA, 2740 bp, Oryza sativa
  ref <308>: DATABASE ACCESSION NUMBER: AK111225
  ref <309>: DATABASE ENTRY DATE: 2001-12-06
aagcgaaaaaccgagtttgtatactcgataaattaagatgcggtcggtcgcgctggtgttgctgctggcggctgcgtcggcgatggttttggccgctcaggagccgcgcagtgcacaggtggaggcgcagtttgcggaggtgtcggctgctctgcacgccgtggacgagctggaggcggaggcggcgctcgacgatgccgacgaagcggatgaggcggtggatttggatgcggacgcggacacggatgaggaggtcgacgcagaggacgcagacgatccgattgtggagccgacggaggagagctttgagtcggacggtgacgtcgtgtttgcgtcgctcgcgtcgcgcctgtcccgcgccgccgatggcctgccgtcgtggtggggcccgtcgcagcagacggtcgatgccatgcacgcgcgtgcgcgcgaggaacagcgcccggtggcggagctgtggagcgacgcggcggagcgtctgtacaccgacggcgcggacctgcacgacctgcacgacgccgagatcgacggtgtcagcgcgcacgcgcaccgctttgcggaggtggagcagggcacgtcgctgtcggcggcactgcacgcacagctggcggcgcaggccacgcgccgcgccgaagcagcagagcgtcgttcgcagtcgtcgctgtcgcacggcgccagcggtgccgacatttgccgcgccatcgtcgcggcggtacgcaaataccgcaacgccaacgcacgcggtggcagtgcggccatccctccgcgcgatgaggtgacgtccggtgtgttgacggctgtggctggcgccaccgaagcggatgtggagaagctgtggcccatcgtggtgcaccgcctgctgtaccgcggcggcgacctgacagagacgtgcagcggcaatgcactggggctggcgctgcgcgcagtggttcgcacgcacgtgccggtgggtggagtgttgcgcgacttcgcgatggggctggaggaggagtactcggacgtgcgcatgaacccggacagtgagaacgtggcgggtctggcggtgtcgggcaacgtaccactgccgcgtgtggcgccgtacgtcaaaatctgtccggaccatacgatgccgccgaagggctacccgccctccacgccttacggtatcattgaagtcgctacgggaccgcttcccatctcgtgggaggcgcgtgccgcacaccgtgccgtctccgatcggtggcgtgcgccgctgcagaagccgacggtgttggcggagggcaacccgatgtcgctggagcgtctgacgcgcgcgttcaaccgcgacattccggagccgttgaagtcgtatgtcatgcccgtggagaagctgcgcgacgatcacgaggaattcgcgatcacgaactatccgaatgagaatatgccgatcaactccattcagaccaacttcgaggtgtcgctctgtgcgctgtacaaaaacgcagatttcctcgccatcaaccagttgcccggtcagcgcgacctgtggctggccgcgcgtgaggcggctgcggcgtatgtgtccggcaaaggcgctcaccggatgcacagcattcgcgcggaggaggtggcggcactgccggcgcagcagcagtgcgagctgcacggcctgttcaccgtcatgttcctgcacggcgcatattggggcgcgcagagcggcgtgaaagtgggcggcaaagacgtgcagagcatccacccgtatggcggtacgccaaagaacttcttcagcataatggtgaagacgaatgtgcgcgacatcgtcgaccgcatgccgttccccgcctccgacctgctgcacgcgtggtacgagagctcgctcggcgccacgaaccgcgcgcgcgtacgcctggacatgcacacgtgtctggtcgatgcgctcaaaaccaaacactggacagtggccacgtacgcgggtccggtcattagctggcgctcaaaaccggacgccaaaggccgccgcccgcccgcctccccgctgcggccgtggctggcccctgacggtgagtatatggacgctgtcatccgcgccaccggcgcccgtccgctgtacaaacccacgtcgtcttcgcccatcggcgaccgcgcccctccggccgcggtgtaccgcgatccgctgcagaagacaccggagcaacagatcgtggtggtgtgtgaggcgcgtttccagaccgaaccgttgaaccgtgccatgacggcgcagggcgtgcaggggctgcccaaaggcgctgacgtcgaggcggccggtcaggcgcttgtggcgaagctcaagagcgcggtatcgcgtttcgaacgcgacgccgagacgcacagcagcgtgacaggcgtgcacgcgcgtcacgcgccgcccaaaccggccgaagcgtcgccctcgtcgtcgccgtcgccgtcgtcgtcgtcgtcgacggtgacgccgctgtcggcgccgccgtcgacggagtcagcgccggtcgtggcaaccgccaatgtggcgcagtaagcgctcacccgcgtcacagaggagacgctgaaacgcacgcgcgtttggcctttgcggacatacgatggagtcagtgcgatggcggggcgcatcgaacagcggagagtgccgaagacgacgaagcggacgaccaaaaatcgaaaggatcgaacgctctgttgctgtgcgttgctgcgctgccgccgccgccgttaggtgtttgatagagtttcattctcttgcgatcgaaatttttttcccattccg

SEQ ID NO: 13878 - DNA, 2493 bp, Oryza sativa
  ref <308>: DATABASE ACCESSION NUMBER: AK111226
  ref <309>: DATABASE ENTRY DATE: 2001-12-06
cttccccacttggaatccttcacttctcccacctaaaaccaagcatcagaatagtacgccattattgagagctccctcgtctctcgtctctccctggtgtccttccccttctctgattcccatagcgacagcaaatgggcaaacacatcacaccccttcctttctcccgagaaatgccttagctcatagcagagttttttttttcttcttcttcttttttcgccattgctgttgtctgcttcgttcttccaaaggatcacgagatgcaggggaggaagatgaagagcgcgagggagatggccagggaggagaagaatcatcatcatcatcatcatcagcagcagcagcagcagcaatcgagctccaaaggccaagcatggttctgcaccaccggactccccagcgacgtcgtgatcgaggtcggcgacatgacattccatctccacaagttcccgttaatgtcgaggagcaagaagctccacgacctcatcaccaacagggagtcgcgagctgcgggcggaggagagcaagatgaggaggaggaggaggatgccggcgagatcagagaggaggaggtggtgctggaggtcgacgaggactccgacgtgcaccgcatccgcctcccggacttccccggcggcgcggaggcgttcgagcaggcggccaagttctgctacggcgtcaagctggacctcacgccggccaccgccgcgccgctccgctgcgccgccgagcgcctcggcatgtccgacgaccactccgacgacaacctcatctcccgcgccgacaggttcatgtcccacaccgtcctgaggaaccccagggacgccatccgagccctcaggtcgtgcgagggcctcctccccctcgccgacgacctcggcctcgtgtcacgctgcgtcgacgccatcgccgccaaggccgccgcgtccacgcccaccgcactgttcggttggcccatcaacgatgccgccgccgccgccgccgccgccgccggcgaccgtccgcgccgcaagaacaatgccggcgccggcgcgacgtggttcgacgacctcgccggcttgtcgctggccacgttcacccgcgtcattgccgccatgaaggagcggaacgtcggcccggagatcattgaaggcgctctcatcgcctacgccaagcgctccatccctgggctgtcgcgctccggccgccatgtaggcggcgccaccgccgccgccgcggctgcgccgtcatcggacggcgagcagaaggcgcctctggagaccgtcatcgccaacctcccggaggagaccatcaagagcaacgcccacaccggcacggccatgggcgccacgacggcgcgcgtcctcttcggcctcctgcgcacggcgagcatcctacaggcgtcggaatccgcccgtgacatgctcgagcggcgcatagccgcgaggctccccgacgcggccctcgacgacctgctcatcccgagctactcctacctcgtcgagacgctctacgacgtggagtgcgtcgagcgcatcgtgcgctacttcctcgaaggccgagacgccgacgacggcaacgacgacggcagcgagctggagacaccgggcagagaggccagccgacgagccatgctcgccgttgggaggctgatggatgcctacctgggcgagatcgccgcagatgccaacctgaagccggacaaattctgtgacctcgcctgggcattgccggacggcgcccgcgtctacgacgacggcctctaccgtgccgtcgacatctatctcaaggctcatcctggattgagggaagaagagaaggagaaggtgagcggtgtcgtcgacggccgcaagctgacgctagaggcatgcacgcacgcggcgcagaacgagcggctgccgctgcggacggtggtgcaggtgctcttcttcgagcagctccagctgcgtcgcgccattgcaaggacaatcatggcgaacgaaggtggagcagctggtcaaggggaggaagaaggcgacagcgatgccggtggaacatggcgggtggcgacaagggggaaccaaatgctgaggctggacatggacagcatgcgaaaccgggtgcaggagctggagcgtgagtgcacaagcatgaggaaagccattgagaagatggaccggcgtggcggcggcagcacgccaggggagagaggagcaacgccggcgatggaaggacggtggggatcaatggtgacgaagcggttcgggtgcaagttcccggcgcaggtgtgccagtcacagcagcgcacggtggtggcgcggcctcgccggccacgaatcgagcagagcccctgaaattcttctcccttgcacatcatagcttccacttgttttctcgtgttgattctttacttagatttgtggaaaatggaggggttttccttgggagatattgagttttaccatgtttgatcattgaattgtagcggtgcacaattgctcagtgccatctggatggccaatgcatcaagtc

SEQ ID NO: 13879 - DNA, 2755 bp, Oryza sativa
  ref <308>: DATABASE ACCESSION NUMBER: AK111227
  ref <309>: DATABASE ENTRY DATE: 2001-12-06
tcgacctcatccgacgcacccaactcgcatcgccgcgacgaccacacgagacaccgacagagcgatacgacagttcgctgctcgtcaccgtctctcttcatcgctgcagtcccttccgccggacgaacagcccccgtcgctcgctcctgccgctgccccagcctcgcggccaaacgtcccttccatcctaccacctcaccaccagcgaccgctcatcaccataattgccgaccgcgactcaattgcttcgctgctttcgggtcattcgcagcattgatactcttccatcatggcgtcactcatcagcgtgcccaacgagacggagagctcgtccgtccgtaccaccaaggacggccgacagattcgctacaacctcaaggtcatccaacaacctgagcgtgctcgcgcctgtggcagtggagccaagtcaagcgctgaccgccgtcccgtcgacccgcccccgattgtcgagcttaccgtcttcgagaacggccaggacattacattcgcctacaatgccaacttcttcctacatgcgagtctggagaatgctcgtgcgattgctcccggccgctcagcccccaattcttctaactgtcccgtcttgactggaactcccgtggctggcatggcctacctcgaccgccccgttccagctggctacttcatcttccccgacttgtctgttcgacacgagggcaagtatcgcttgagcttctccctgttcgagaatctgagcgaggtcaaggacccggacccagacgatcctaccgtgatccacaacggcaatgactttgtttcccaccgtgctgaggtcaagtccgctccgttcaccgtcttctcggccaagaagttccctggtctgtctgagagcacatctttgagccgcatggttgccgagcagggctgccgcgtgcgtataagacgtgatgtaaggatgagacgtcgtgaaaacaaatcttccaaggagtgggacgaatacgacgaggaaggcggaggctatgagcaagctcgtcgacgcactgtcacacccgacaacttcgcgcagccacccaatatacctgttgacgaccgtccacgctccatgtccaatgcaagcaacgcatctttggctcaacaacgtcgtcccagcatagacgagatggcacaatcctaccaggccaacaacagttattcccagatgccaccgcctcagaccactggctatactcaggtgcctcagttcaatgccaacacataccagccgcagtacagcgcccctcctgccaacaacataatgcagcctcccaccgcaccctacccgcagcacacacaacaggctgcttacccaagtcagcagtccatgcaaatgaaccagtcatataactaccagaactaccagcagcctcaatatgaccagtcccagtccgcccgtcaagactcgaaccaggagtacaaccaccacaacgattacaaccgccgtacatcagtctcacagactcagcagcagtaccctggtccaagccagatgatgccaccatatagcccagtcgagcagtacaaccgaccgcagcagatggtccagcccctgcagcctttgcagacgtctcctcgcggacctggaggcgtacagtctaatggtcacacacttccaacgttgaagacactgcagccccctattgctgccgagaagctggagcccatttcacctgtctatcagacacctcccagtgccatgtcaatcaactcagacaattcccaccagaactacacgtataacaagttcgggtccggtagcttgccgcccatgtctgccacctccgctggtcagaagcggtcgttctctagctcctttgacaaccgccatgcgaacgagcgtctagtacaaggagccagacccaacccggccagctcaggttacggctatgaaacctgcgattctcctgacatggaagaacccatcgaccgtgcagctatgagctatcgccgtgctgatggcacccagcgtcaacgtcacgttcccgaagttggacactgaactgaatcctgatgactgcatgcactttcgaacggccgctgcgtttgttgtcttgattctggagttcggtgttgtctgaagtaatgtgcgctgatcatgtataccccaagaaccacgaattgcgaagcctcgcaaaccatttcttttacccttactcacttgttctgttctgctcccggcaggcgacttttccttaattccttttcagtagacagctttcttctcaaggctgtcgatcttgctcccaacgcatatcacgctccctctattcccttccgttagctctacatttcttgctcgtgttttttataccagtgttgcgattagctctactgtacatgtgttgtatggcacttctgacgagatgatgtcgggaatttttgctacagtagggcagccagagtccagcacataggacgtgcgattttttcatttttggtacattcacgcacacaatggcttacatggctctactctatcaatgggtggtttcttcttggctacagtggatacctcgatcctctacgtacacaacctgcaagggaaaacatacaaattgctggaggatgggaaagatacacaaagtgtttgttactcaccactgcacagtatgcgtacatgcagacttgcccacggcggcttgcttttctattttaactcaggcttttgattctcggagggaaagtggtataagttagtattaggattcaatatcgcactgccagtcagtcagatttc

SEQ ID NO: 13880 - DNA, 2639 bp, Oryza sativa
  ref <308>: DATABASE ACCESSION NUMBER: AK111228
  ref <309>: DATABASE ENTRY DATE: 2001-12-06
gtgctctaccaaccgctcacgctgctcgactgcctgcgcacattctgcggggcgtgtctgaaggaatggttcgcattccaggcgtcgacggcgacatcgatccacccgtacacgtgcccgtcgtgccgcgcatcggtgcggtcgacgcagccaaatgcctttgtgacgacgctgctggacaactacgtgcgggccaaccccgcgcggggcaagagcgacgacgagaagcaggccgacaggcacaagtacaggccgggcgacaatgtgctgccccggctgcggcgcagggaagagcgcgacgagcacgaacaccaggaagacgcgcgcatgctcgccgaggcccaggcgctgagtctgcgcgaggcgggcatcacgggcagcagtggcagcggcagtggcagtgcgctggagcccccgcgagatggccggcgcgacaggcggtcgaggagcaggagcagacgcagacactcgcccggcgcctcgccgtcgcgcatcgtcatccgcccgcgcgccattgagcaccagtcgagtctgcgctccctgctcagctcgtctgagattgactcggccgacgtcgacgaggagcttgtgcgccaggtcctggaagagctggtggccgagggcgtggacctgggccagattgggccctctcaggaggaggagatcacggagcgcattgcagaagttgtgcgccgccgccagtccgaccgccatgctgagcggcaacgagagcgcagggagcggcgggagcggctggcgagagaagggctgaccagctcgtcgtcgacgtcgctcgacgatgctgcacggcgacgaccacacagcggcacttcgaccccccagacgcaggccgcagggacaggcccgcccatctcgcgaccgggactcatcgatgcggcgaaccgcggtggacggggccagcaccagcgctcgtccagccaggggagctcccgatcagccaggcgcgcagaccgtccagcagccctctcggtgccaaacgctcccacagcgagacgccgtcaatctgaccaaggccagccgtctgggacagacgcccggcagcagttccgaaacagcctgcaaacgtcgacatctgccaacccggcctccccacgaggccttggctttggcttgcctgccagcgacagtcccacgagctctgttgccgtagtcagtactccagcccattccccgccgacgtcgacacccgctgtcacgcccttccagccacctggcgcacgccgcaccaccgaccccgcccacggtcgacaccgttcttcgtcaaaccagggcacccctcccatcacatctcctccgacctttccgcgttccatcacagaccctgccgccacaaccactccagcattacacactgagccgcaagtctcatgcaagcactgtggcagagaacacattgaacacgagctacactaccactgctcaaaatgcgacgacggcacttacgacatgtgccatcgttgctatcgagctggcaagggctgcaagcattggtttggcttcggttggacggctctggcaagattcgaacgtgaccgtccagaaggcggatatacctcaaactacgaactaccccatgttctgagtggccgtcgatatcgaacacccctgacgccattgaccgaatctaccagccctccgcatgtgctcatgagcgaggacgacccaaaacaccgacttgaagaaggcgtcttctgcgattcatgcaaagcattctcgaatgcatgctactggaaatgcgacttctgtaatgagggagactggggcttctgcaatgattgcgtcaatcaaggccgccattgcacccatcctttgctcccagttgccaatgaagcgagaaactcgacgactggcaatacgcttgcgacacccccgtctctcacaacccctccacttggcggaactcgcggtacacctcccaggacgcccaagtcggcctcgttcagtcgagctccgggctactccaccatcgcaaacctcgtcttccgacctctcaacttcacaacgctctgcaacgactgtcgaaactcgataccgcccaccaacacccgttaccactgcctcaagtgcaatgctggcgactacgatatctgcatggcctgctaccacaaactgaatgtttccggtcgcatcaccagagaagatggcatcaacggctggcgaaagtgtctccgaggtcatagaatggtggtcgtaggcttcgaagatcgcgacggcggacaacgaagaatcgtcgttcgagagctcgttggtggatacaccctcaaggaagaagagactaccaattccggtgcaagatcacccacctctactagcaaccccattcgcgaatggaagtggcgcgactttgacggaaacgtacataattaccgcgcgcaatccggcgctgcaatacctgcacaaaggtttccgcccgacggaggtgtagggttgcggctgaaagcccgctggaattattggcccgaagagggtgtcaaggacgaattggcgtttcctaggcatgcaggaatcagagaagcgacagatatcaacggcgattggtattggggagtctattgcggcatcactgccttgataccttctggatttgtcacagccgtataatgaagacgcatcgtacg

SEQ ID NO: 13881 - DNA, 2724 bp, Oryza sativa
  ref <308>: DATABASE ACCESSION NUMBER: AK111229
  ref <309>: DATABASE ENTRY DATE: 2001-12-06
cagatcgagtcgcagtggtgcaaggtgtccaggcaccagcggaccctgctcccctccagctccatcatcacaccatccccccacagctgtcgtgtccagatcgttgaaacaagcacgagttggtgcgaagacgcgctcctgggtcaacacggacggcagctaaccttggattcgtcccgtccccccacaccatatccagctacgtagtaggctaaagcttcatttgccctgcggatcagggcaccgattcactcatttcgcccttcttggccctctcgtttggtccctgcagctgtctgcgggacgactcgtccttcattgcagcttcgttttctgacacgcgccggtcgcccttcttgcccattacccgcgagtccctcaatcagcccgccgtccccccagggctcccgaccgccaactcaactccgccgcgcatgcccctgtgaagccgtgaagctgtacgctccgtcaccatggtcgccgacgatctgtatgagaaggcgctgcccgtgctgcacaatgacgcgctcgacgacgaggacaagacggaccagctcgaggagctgatgcgcaaggagacgaacctcacgggcaagtcgctggagaacatcgtcctggattgtctctggcgctatcgcgacgccggcagctcctcgagcagtcctccgcccagtcgacacactgtaatccgccgtcctagtccggcgccgtggcagcaaaacagagtaccgactcccgtatccaactcccctcgtacgatcaatccgccgccgggctttggcattgcaccgccagcgttcacgcgcgcaaagtcgtcgaccgcctcgccgttcacgtctccacgcccctcgccgcgcctagccttctccagcccgcatataccgcatagcccaagtctcagcgcgtaccagttcagcgagggcgtgagtccgaacaccgacctgtatggcgatctggacagccattccgtagactggctcgtgaacgatgggacgggcagcacggagtcatcattgctgggcgacggcacactgaatggcggcgcagcagaatgggtgcaaccgcagactatggacatgggcccctatgatatgctccggtcgatccttagggatgatcggtccgatgaagagctagagaaggtccttgaggccaatggcttcgacttgagcgccgcgttgctcgcattgatgggacagcaaatggagggtcaacaactctcttcctcacaccaagaccagcccggatacctcattggcaaatccatgaacccaaccttcccaccggccaccccagctggccagcagaagagcaatatcgtgtgcaagtactttttgtccacaggacactgcgcgagggcagactgcaggttcagccatgacaccagcaagacgctctgcaaatacttcttgaatggcaactgtctcgctggtgaaacctgcttgttctcgcatgatccttcagctctcatggctcgcatggctatctctgacgtctctactcccccattgcaatcttctcttccaaacttccagatgtctgactatgaattccccactctccaccccaacggctctcctttcggaactccacagatccacactccagaagcgacttcccttgagcagctctacggcttgacaagtagtgcgactacacggccgccaccaggtctgagcccattccccgtgttcacccctggggcaggcagtcggccgcagtcacgaacaggtagtcggcagccatctcgtgctacgactccctccgtgcttgcggtcgacgacaatgaagcatttccaagcttgggctcagctgctgcagcgaaggctggcaagaggcatcacggcaagcgaggcggtcacggacacaaagacgttgctggtcctaacaacatggctgatgtcgtgcgcatgtcacctgctccagcaccagcaactccagtacgaaaaggcctgagaactgcgaagagcttcaatggaactcgtgagaacagtgcggccgcgcaagcgattcctgctcctcagcacattccatggctagagactggagagaagggcaatcaggcttatctcaaggcgcgagcggaagctttcaagcacggcagtttacgtaacaagtttctgcaaagtgctgctcaagcttggaaccgtagcgattcacgtgcagccaaagctctcagtctccgaggtcagagcgagaataatctcatgcgtgaagcgcatcgtgaagccgctcggatcttgtacgaggagaggaacaaagacactgacaacgccacggggttgtacgttgatctgcatggcctgcacccggatgagtcagtatcgtatctcgaaggcattctcctcaagcacagctcctcatcgcgccccgtctatgccatcaccggaaccggccaccactccaagaatgggaaggacaaggttggcaaagccatccgcggctttctcaacgagtggcgatatgctttccgcgaattctccgtcccaggtgaccgcaacaacgttggcggcatattaggcattgacccgagcagctatgataagagcgttgcggagcggccgaaggactcagacacggagcaagagagtgcgaagaaggacaccaagatccggataatgaagagggacgagtttttagtcgcaccgaaaggaccgaagcgcgctgtctgagcaggcgcgtggactgaataggtagcgaagaaataagaaagagctttacttc

SEQ ID NO: 13882 - DNA, 2705 bp, Oryza sativa
  ref <308>: DATABASE ACCESSION NUMBER: AK111230
  ref <309>: DATABASE ENTRY DATE: 2001-12-06
tcatgcagcagctcgacccgtacgctcaccgcatggaagagctgccgactgagaaggagctgtacgaatcgctcaagttcatgtacgtaacgaacgacgtgatggaggccatgttcgcgctgcactaccgcgatccgtcaaagtaccacccgcgctacctgtcgcgcatgttcaacttaggccttccgcgcacgcacgccattctgcgcatcaaacacagcgagaagaagctgctcgccacacgcgacgcgcacaagccgccgcactcagacaaagcgccgttcgccgacccgcgcttcaccgcgcacatccgccagaacctgcaccgcgccgcgcaggacccggagaaccagctgcatctggagcgcgcggagaactacttttggatgcgcatgtcattcagcgcagacccgaactcgtacgcagtgctgcaagacgccacgcgcaagctcgagcgcgatctgttggccggtaacatccccgccaaaccgccggcgccggaggagctgctcgcggacgtgctcaaactcgacaccaaactcgtggaagaggcacagcgccagaccactcccgaagaggacgacgcacagctcgaggccatgggcaaagccgaagacgccgccgctgacgcgatcgagaaagccgccgctgagccgtatgacgcagccaaagcggcggcgcccggcgcgccggcgtctgctgacgccaacgccggtttggacccactcgaagccgacgagtggctgccgctgcgcgatcaggccgaccgctacacggcgctgctcaagagcaagcgcattgccgtcaatgcggtggacctctccggcaccgccgccggcgcggcgcttcccggtgagacggccgaacagcgcactgagcgcatggcgcgtgcggcggcgatcgttgacgcgcgcaagcgtgcgctcaaggccgtgggcgcgcaatacgccgacgatttggcggaaaacacgccgattccgtcgaaagaggacgagcaaaagcacgcggccactctgaagggccgtgtgttcggcatcagcgccgacccgctcgtgcgcttctatcagtccgaagcagagatgctcgcgcacgtgcgcgaaccggatcaggagaagcgcctcggtatgctggaggcagcggcggcgcgcgatgctgcccaccgcgacggcttggacgtgtctcaggacccggagcacgacttctatgacagcggtgtcgatccggatatcgagaactctgaggactatgatccgagcgcgcagggcgtcaacttccgcagcgacgtgctgcacccggagttgcaggcgggccgtttcttcgcgttcgatccgccgaacatgcagatccgcggccgcaacctgcgccaacacttcctgaacgattacgacgcgtaccacttcgagcagacggagaagaagcgcgccgacctgttcctcgaccggcggcaaacgctgggcgcgcgcgagtcgcatctgttgggcaaatacggcccgttgggggccgacctgccgccgcccaaaccgccggtgctgttggagaagggcaaaggcgtcaagggcatgagcgcgcggcaccactgggtgttcaccgatctcaaacgcaagaaagacgcacagtacgagattgtggtgcgcgataagagcggtgacctccgtacgctgtcgcatcgcgagtacgtgcaaatgcgcacgtccacggcgccgcgcatctccggttctgcgtttacgtataccaacaaacccgccggcggctattggatgaccgacgccgagcgcgcggtgtgggctgcgtcacaggaggacgcgcgcgtcaaagcggtggagctgtcgcgcttcgagtttctgacgcgtaaagcggtggagcgcgggttggagtggaaacagtacatggaagcgcgtgcggccaaaggcgatgcgcgctgccgcggctcactgctgcgcgcgcgtgtgttcccggagtcctccgaatacgccgaatacgcgtccaaaacgccgtacgcgtgggagacggagtaccgcgacagtgccaacggcaaggcactgctcgaacgcatcgacggcgaacgcaaaaacgtcaattgggagcgcgaccgcctgcatgagcgcgcgcagcgcctcgcggagcgcgccgctcgcgaccgccagcgctatgcggcggagttggcgacgcgcgacgccgctgcggcggaggagcgcgcggttgaggccaaactcgacagcgcgttgaagcgcattggcgccgaatacagcgtgcagcagcgcgcgcgcgaagggttggaaatggccgaactcgtgaagtccgtcgatcggtttgccgaagaaaacccggacgagccgtacccgtcgctcgcgatcgacggcgcgtcacccatcacctttcgccttgaagtcagcacgtcgctgcgtgacaccgcggaagaatccgaagacaccgcggacgaaccggacgacaccgacccggaggcggcgctcaaaccccccgctgcggtggccgcgacaccggcatcatccaccgcaccggtgtcataatcgctcgctgctgcccgcgcgacaccgaaccacacacactgcgctctgcttctgacatgcaaatcatagcgcatctccctgctgctgcagccgctgctgccgctgctgcggtgctccgctgccactattctcgctgtgacgatttcgtcgcgttggcgaacggaattttcgaatccc

SEQ ID NO: 13883 - DNA, 2706 bp, Oryza sativa
  ref <308>: DATABASE ACCESSION NUMBER: AK111231
  ref <309>: DATABASE ENTRY DATE: 2001-12-06
gtgcaacctgtgccgctcctcatccgcagcatccattggcctgccgcaccattcgctaaggccgactcacccccgcccgcaacgttgccgtctgaaccagcagcagcagcagcttgggccctctgcatttcccccataccagaacatcgcattcctggctctcgtattgccgtttgctcggtgcaagctctctccagattctccttcgtccgggctgcttctccccaccacccacgcccacgcccacgcccaatgcttgccctgctcggcacggtaaccatccacatccacatcctcgctcatccgctcgaatgatctccaccataaacttcggccagccgccgtcggccgcacacgctcgcctgagcaccagctcctccccccagccttccatgtcgtccagcagcgagtctccggcagacaccccaaccttcgacaccaccggcttctccactgctgattccctgtcggaggagcgcgtcgtctcacgggatggatccgacgagattgtgcccaagattgaagagacggagctccacctggccgacgtcaagcccgaacccgttggtgacgacaccccgatatctcccaccgaacctgtgcgactcaggcgcgctcgcggacgcccgcgcatccaccctccacgttcccccaccgccgcctcgaaacaggcgaaagcacggtccaaaacgggctgtacgacctgtcggaaacgaaagaagaagtgcgacgagacaaaaccattttgcctatcatgtcagaagaacaacatccattgcgaaggctacaaacccgtagagatatggcgaagcggaaaggagaaggctgccgaggcacggcggatgagtgtcgagctgaagtttgagcttcccccgctcatgagtggtgttgagactgacatcgaccggaccctgctgcaacatttcgtcagcagggctagcgcagtccttagtctgcatggcgatcaaagcacgaacccttttacaagagtgctcctgcccatggctttacagcacgaaggcttgatgcactcggtgctctgcctgtcggcatcacatatgtgctccatcacaccatcgcaagatttcgaagacagacaggtgttccatcgaggcaaagccctacaactattaaaccaagatctacaacgccaaaaggccggagaaggagggacaatggtgtacgaagactccaatgtagcccagatcctcatccacctcctccacgccacctgcgacggcaacacctcgggcgaatatcgcatgcacatggtcgccgcccgcaaaatcgccatgagccagaaactcaaaaacccagagtttcaatccctcttcgacgaattcttctactaccactggatcgcctcggaaatcacctccctcgacggcaccgaggtccccatgatggaaaacttcagcctccccttctccatcaaccccgaaaccgcaggcctcatcggcgtctcagacggcctcttcggcttcatctccaagatcagcaatctcagacggaaactgcgtacccgcatcgatgagaaaatcgaacccaccatggactacgaggctctgcttaccgcccacgccatcgacaccgggctcaggacttgggtctgcccccagcaacagggtacaccgcggtatacgccgtcgatgctgtaccgccaggcaacatgggtgtatctctaccggacgacaaagaaatctaaacccgaccctttcatccgctctgccgtcgacgatggcatcaggtacatccacgaactccccgccgagggctggatccaaagcaacgtcctcctcccgcttttcctcatgggatgcgccgcctttgaggaagaccaacggctagaaattagccgcgccttcagcgggttgatggccgttaccgggctgggcaacatcacgtttgcgaaggaggtggtggatcgcatttggcatcttatggatatcgatgatccggattcgtgggactgggagcgcattattaatcagcaggggtgggactttttggctacgtgagagacggatcactgctttttacatctgcaccctcgcttgtgtttctccgggtttctctcgacaggaaaatcgcagacgtatatatgtggggggtggggggtgcacacttttttctcgagtgcagggacgcccgatgaggcacgacgtacatgactgagttccctttcccttctttctttgctcttcgaaaaaataacaggcgtttttggcgggatccggggttcggatctgcttcggttgagtttcccctcttccatgggtttcctatcgtatcgtatcgtattgttcggggcatgtatggctggatggcacggctggtatggacggttgggtaggcatgaactcggctttaccatttcctctcaatcttatttttccttgcacaataggtggggtttgggctgggttggtatggaacgggtgtttttcgcgccttttttttcatcgcattttggtagttgagggtatgctttttgtacatgcgatgagggggtttgtctatctagctagctatggacgagatgtagaggtttacattacctcgctttctttatttggagtgtggatgggcgtatgtatggatgttggatgagtgggcttcggctgctttagctaacggttcctcttatgggaagtgcgaggggaatgagtgtgttgggatgaatacacagctctgcttccaccctcc

SEQ ID NO: 13884 - DNA, 3375 bp, Oryza sativa
  ref <308>: DATABASE ACCESSION NUMBER: AK111232
  ref <309>: DATABASE ENTRY DATE: 2001-12-06
cagacagcacacaacgccaacatgtctatcgacttccccaaggaggaggagcgcatcctcgcgcgctggaaggaaatcgacgcctttctgaggcaagttgagctgtccaagggaaagcagccatacaccttctacgatggcccgccgttcgcgacgggcatgccgcattatggccatctcctcgcatcaaccatcaaggacatcatcccgcggtactggtccatgaagggccgctatgtcgagcgtcgctttggctgggacacacacggcgtgcccatcgagtacgagatcgacaaggagctgggcatgtctggccgcgacgccgtgcgggaactcggcatcgccaaatacaacgagaagtgccgcgccatcgtcatgcgatatgcgaccgagtggaggtcgacgattgaccggctcggccgctggatcgacttcgacaacgactacaagaccatggacacgagcttcatggagtcggagtggtgggtcttcaagcgcctgttcgacaagggcgccgtctaccgcggcttcaaggtcatgccctacagcaccgccctggccacgcccctcagcaacttcgaggcctcgcagaactacaaggacgtccaggaccccgccgtcgtcgtctccttcccgctggtcgaggaccccaacacgcagctgctggcctggaccacgacgccctggacgttaccctctaacgtcggcctctgcgcccaccccgacttcgagtacatcaagatcctcgacgaggcctcgggcaagcactacatcctcctcggagccctcctgcgcaccctttacaaggaccccaagaaggccaagttcaagattgtgcagaagctcaagggcaaggacatgttgggctggaagtacgagccgctgttcgactacctctacgacgagttcaaggactacggcttcaaggtgctgaacgatggctacgtcacggcggacagtggtgtgggtatcgtccaccaggcgcccgcatacggagaggacgattaccgcgtcgcccccacccacggcgtcatcagcgacagccgaccgccgcccaaccccgtcgacgacgccggctgcttcacttcggtggtccgcgacttcgagggcctgcatgtcaaggctgccgacaagggcatcatcaagcacctcaagagcaccggacggctcgtagtagactcacaactcacccatagctaccccttctgctggcggtccgacacccccctcatctaccgaaccgttccttcatacttcatcaagatccaagacatcgtaccgcagatgctcgagaacattgcaggctcacactgggtcccgtcattcgtcaaggagaagcgctttgcaaactggatctcaaactcgcccgactgggctgtgtcaagaaaccgcttctggggtactccactgccactctgggtcagcgacgatggcaaggagatggtgtgtgttggcagcgtggaggagctcaagaagctgagcggatacgagggcgagctcaccgacatccaccgcgacaagatcgacgatatcactatcccaagccagcaaggcaaaggcgtgctgcggaggacacccgaggtcttcgactgctggttcgagtctggatccatgccctacgccagcgggcactaccccttcgagaatgtcgagcagtttgagaagtcgtttcccggtgacttcatcgccgagggtctcgaccagacccgtggatggttctacacactgactgtcctcggaacccacctctttggcaagctcccattcaagaactgcgtcgtcaacggtatcgtgcttgccgaggatggcaagaagatgtccaagcgcctcaagaactaccccgacccgtccctcatcatgaacagctacggctctgatgcgctgcgcctgtacctcatcaactcgcctgtcgttcgtgctgagactctccgcttcaaagaggctggtgtcaaggagatcgtgtcgaaggttttgcttccactgtggaacagctaccagttcttcgagcagcaggcgacattgttgaagaaggttgcgaatctagattttgagttcgacccgtcggccgagaagaccaacaaaaacatcctggaccgatggatcctggcgtcatgtcagtcgctgctcaagttcgtcaacgccgagatggccgcctacagactttacaccgtcgtaccgcgattactcgagctcatcgacaacaccacaaactggtacattcgattcaaccgacggcggttaaagggagagtacggcttggatgacaccaagcacgctctcaacactctcttcgaggttctctacacgctctgccgcggcctcgcaccctttacaccattcatcaccgagaacatctacctccgccttctcccccacatccccaagtcgctgcacgccgaagacaaccgcagtattcacttcctgcccttccctgaagttcgcgaagagctctttgatgaggtcgtcgagcgccaggtcaagcgcatgcaagctgtcatcgagctcggccgtgtctgccgtgaccgcgcaaacaagggtcttaagatcccactcaagacgctcgtcgtcattcaccccgaccaacaatatctcgacgacgtcaagtcgctagagaactacattgtcgaagagttgaacatccgcgatctcgtcctctccaaggacgaggagaagtacaacgtacagtactcggcgaccgccgacttctccgtccttggcaagaagctcaagaaggacgccgtcaaggtcaagaaggcgctgcccaacctcacatcgcaagaaatcaaggacttcctcaagaatggagaattactggtcgatggcatcaaggtcgaagccgaagacctaatggtcaagcgcggcctcgccaaagacgacgcaaacaaagaccaagaattcaacacagacaacgacgtcctcatcattctcgacgtcgcctcatatcccgagctcgaacaagagggtctggcgcgagaggtcattcgtcgggtacaggatttgaggaagaaggcgggtctcgtccccacggatgatgtgggcatggagtatcgcgtcctgagcgatccggataatctgggtctggaagcggcgtttgagaaccagggcgcgctgtttgagaaggcgctgcgaaggaatgtggacaagcatgttgttacggaggtggaggggaagattcccgagaatagtaaggaggaggtgattgtggaggaggagcaggagttgcataaggcgactttcttgctgaggttggttaagttgtagatggagatggagatgctgaggcgtgggagtaggagaggtggaggataagggaaattttcgccgatgatgatgatgttgcggcaccgagatgaaatgcaaaatcaatcatattct

SEQ ID NO: 13885 - DNA, 2486 bp, Oryza sativa
  ref <308>: DATABASE ACCESSION NUMBER: AK111233
  ref <309>: DATABASE ENTRY DATE: 2001-12-06
aactaacgctaaaaaagtaacagtttctgtactttattgctcgaacagcccccacacacacatcacacctccctttcaggcattttcgccaacatactacacccccacccacacccccacacacgcactgcgatcctcgtcgcagtcagccctctttcttctccatgcacaccaacacccctttttgttctctctcatccatccatccatccattcatcatggcccagacggacgcttctccccgctcggactcgccacgccagctcctcggcgacatcaccgagtccgcccacaaccaggcgaacgtcgcgcggtcgcataacgcgtacgcgaagaacacctcgccgaccatcgacgtcaactactaccagcagcagtaccactcagcagtcctgcaggacgccatcaacgtccacgcgcagtacgtgcagctgcaggagcagggctacgcggcccaggcgtttatgcttcagcagcagctgatggcgcaggccggcgcgcagcggcagtcctccgctcctcagcaccagtcctcccggcgcaagagcacgtcgccgaacaacgcgacgcagcagcagcgcgtgtctccccgcccagctgcggtcagcagcagcagccgtcgcgcctctccagtgactcatcaccacggagatgacgagacgtccccctgcgactgccccgattgcaacctgcgccgcctgcaggaggtgatgaccgaggccactgtcccttatgctgccaccgccgctgttccgacggcccgccgcttcacgccgcagcagcagccgatgccgctggacttcgacgccatcatggcgatgaacgcgatggcctaccagcagcacatcaacagcccgctgatgcgcgggtcgatgcccaccagccctctcatgatgggcgccgagcacatgtcgccctacggagcgtacgacagcgttccaatgccgacggcaagcgtgacgaggcacaacccctacgcgccccactcgccaacgtccgtcccgatgaacgccagcgttggctatgaggttccctacatcccggcccgcggcgactacgcccactacgccactgacgccccggcagagtcgcgtgacgcctcgacagaggcctccctggaagagggcgagcgcgagatcccgaccggtaagccccagcagaacgtatcgcccattcgccgcaccgggcccccgaagccgtcgccgaagcagcccgctcgccgttcctcgccgagcctgttggacaacctccagaccagcaacgccactgctgcgacgagcgaacaagccagtgcccccgcacccgccgccgcggtcaccgcccctgccgcaccgacaagcgtcgttgttggagccaccgcgccgcgcaaccagccgcacgccaaccctcgccgttcgtccccgaaggacaactctcctgcccatcaccaccaccagacctcgccccagcagcactcatcgtcgtccgctcccgccagcggcgcctgccccttcctgctgcggttgaaggtgtctcagtggcacaccaatgtcgcggtcgcctcgtctgagagcgtccctgtcggcacgcacatcaagttcgagggtgaccgcggtgaggatctcggctgcgtcgtctcctgcacccaagtccctccggaggagacctccacgctcccccgcgtccgcgctcgcgcgacggcggccgaggcggagaaccacgccgcgtacgctgccgaagctgctgctgccgtcccggccgctcagaccgccgtcgaccgcgccgggctgcacatgcgtgtggttggtgccgtgtatcagttcaaccgcgagaagttgacgttcatgtacgagagcactgagcgcatcgatttccgccagctcgtgcgtgatctctatgccgtcttccgttgccgcatctggatggagcccgtcacgcccatcgtcccgacgagctcgaagggctctcacggcggtggcaagcgcacaacctcgcctcctcagcactggtggccatgacggtgcggcgccttccatagagcgtgtgcgtggctcgcccttgacaccgtccactcatctgttttgtggtatgggtcacgtgcagccgctgattcattgtttgctcccctctcccccgccctctctttttttggtcggaaaccatcccttttttttcttttcttttttcggcagcaccggcctctgctctaagcagagagacacgacacatcattcggagaacccccaaaacataccccacaaatagcgttgctatagacatagacccgccaccaccccctcctaccatgtgtgtctcgaatctcagtgaaaaaaacacagaaaaagaaactcgcccaaacaggtggtggggacgccaacgcactcgcttacacaacactaccccaatccagagacgtgcaaccgatagagctctcttggacccatccccgttgcgttgacccccacccctgaacttgttccgtcggatacacacatcccccacttgg

SEQ ID NO: 13886 - DNA, 3110 bp, Oryza sativa
  ref <308>: DATABASE ACCESSION NUMBER: AK111234
  ref <309>: DATABASE ENTRY DATE: 2001-12-06
aactaacgctaaaaaagtaacagtttctgtactttattggatcctttccgaccgacacttcgtgtgcagtgaagcgaacagctttctcccactcagtgttcaagcagccttccaccaccacttctacagcgaccccccgacgtttatttcttttcctttcttcgaaatccctctcgacatgcgcaaggtctcctccctgctcctcgcctcgctcctcattgcgacggtgatggcgacggacaccaagctgaccgagcccctcttcgacatgaaccacgccccgcacgccaagaagacggtgatgcacgccgcccagacggtgatggagcacctcgccaaggtgcaccagaacaccttcatcggcgtcgcgctgagcgccgcgaagacgctgacggagccgcgctcgttcgaggccaaggccgacaccacggcggctccctctgccacgtgcgaccaagaaggttactcggcggcgcaggttgtcgtgctgcaggcgtgcccgtcgctgagcggcctgatctctggcaccgtcgcgctgacggacttcctgcccgggttctgcgggtcgaactgctacaaggtgatcgcggcgaacctgcccaagtacggcgtctgcctggacgcgtcgacgaagcctctcgtggagttcgtcaccggctgcgcgacgaagccggagtgctacggcgagactgcgctcaagacgggtttgcagatctccgctgcttgcggcagcggtgccaccaacctgttcaacttctacgccgcgacgtcgagcgccaagagctcgatctccgagctctgcacgacgtgcctgcctatcgagaccgcgtacatcaaggcgtacccccgctgcgtcgctgctgacgcgaccgccgcggctggtctgtcggctgcactgacggcgatgtgcacgcagacgggaggcacgacgggcgactactgcgcctggaacctgcgctccatcggcaagatcgactgcaggaacaactgctacagctctgactggtgcgacaacagctgcaacctggccatgacgacgtcgcggcttgacacgatgtgcaacaacaagtgcctggcgagcctcgccacggtcgcgcccgccgtgggcgccgacaaggtgctgatcaccgcgctgagcgacctgttctgctccgctgcccccaactcgacgcagtactgctacatgaccgcgcagtccgccctctcgacgtacaacccgtcgtcttcgtcggcgatggcgaccacgtgcgccggcaacaacggcgtgtgcctgtcgaccttcttcacgctgtcgtcggccctcgcggcggcaagcgcgcgctccacgttcacgacgtgcgccgcttcgctgagctctggcacgtacctgtactcgtactgccagtcgtcgtacgagcgcggcttgggcaacgccgagctgctccgcactcagggtaacttggtctgcgcgacgaacactgcgggcggctactgcgcggtgtcggcgacgacgttcggcagcagcacgtgcttccagtacgccgtgggtggttcctgctcggcgagctgcgcgacgacccttgctggctacacgagcactgctgggtgctgcctcggcctcatcaacgactacctgcgcgcagccaactcccgcttctactcgtcgtacctgccgaccggcaccttcactgccaccctcaagagcggctcgacggtgagctacaccttcagccccgaggacgccatcgcgaaccccgaccgctcgctgcagccgctgaacgcgctcgccgtgtgctccaacacgaccgacctgtggacctccatcgagaccccgtgcgtggcgtccagcaacgccgtggcgcgctcgttcagcgtgcgcctgtcgtacgccgcggtcaccgccaacgccgccacccgcaagcgcatcctcggtggcctcaaggcggacgccgccaacgctgccaacgttcccccgtcgagcatcaagaacgagactctctcggaggataccagcatcacgatcaccacctcccgccgcgcgagcgcgaccggcgtcaagttcagcttcgtgatcgacggtgcgtcatcgacggacgtcgcgaacgccgctacgtacttcgacacggcggccaagtccggcgttgcgacggcgaacaccggcagcgctgcgtcttcctgcactggctgccttgccagtgggcaggacgctgcgtcgctctcgagcgccggcagcagcggcggcggcggctcgtcgagcgcgtccttcgcgacggccgccttcgccgcggttgctgccttcgcagctctgctgctctaaacgaagggttgaaatctttcccgacgacccaacctttctttttcaaaaacacaaggtactgagctcccccggtagatctctctcaacggacaccgcgcagtatatcgcatcctctcggccatcgccgccatgcctcctccaaaaaaggcagcatcgcgcggtgagctctaaacgcccgctgctgcaccgcgcggctcaacccgctgatgagaccaatcaaaaaaagtgaagagggctgccacaacgactgctgttgtgtgagactgtccgaacgcctctcccccaacacccctttcctttttggacttctttccgtgcttctctccccctgcccacacccttcagtgaaagcgtcctgacccccccctttcccacccacgcgcgcagcgccgtctgcgatgttagactgagcatttttctcacccttcttctgctttgcgacggtgtcgtcgtatccttccaatacgccggttaccgcaccgcgaaacacttgatgggacgaatggttcggagcgactccagggcggaaaaaaaaaacatgccctggctcgcgcggccaaaagcttcttggtgttggtggggggcgcgaccccaagccccttcaatcccctcatctgttgtatttaagcgagactacttttcggtgaaacactttcacacacacacacatacatgcgcggccggctgaacaccagaaaaccccccagacaagagtaaaccgatctctcgagcccttcgagaacaactctgcaacgctctccatccgccgacgccaaaaatcaagaaaaactcttcgaaaccgttcctaaaccac

SEQ ID NO: 13887 - DNA, 2248 bp, Oryza sativa
  ref <308>: DATABASE ACCESSION NUMBER: AK111235
  ref <309>: DATABASE ENTRY DATE: 2001-12-06
aggcgctgcacgcatccacacgcgctgccagcaacagctgttcgtccccagaccagccagctatccgcgctgccccgcattgccgcgctgcaatactgctcatcgccggggctccagtccgcttgcagtcccagtcccagctggtgtttctcggctaagccaagctcatcccgggccgccctcgtacctctcacgtctccagcactctgttactacatagcatccaatccaacccagccttcccatctcccaatcccccatcgaccgtcgcacgccgccgccgctgtcgctgtctctgcgcgagcaattgcctctgctctgcgcgcactcgcccgccgtgctgcatccccagtcctcgcctccgcgctagcccatccctcggcgccccggcaactgcgctcgctcgctcgctccctgcgaggcccctggattcgcccgtctcgccgcctcgcgctcttcgcgaccctgcccttccaccctctggcagcaacagtgtagcatggccgacatgaatcaagaatctatccagcagaagattcaaatcgcccgtcgcgatgccgaggccctaaaggacaggataaagaggaagaaggacgaacttgctgacacaaccctccgcgatgtcgcccgcgaccgtgtcgaggctctgccgcgcctcaccatgaagacgaagcgcaccctcaagggccatctggccaagatctacgccatgcactggtccaccgaccgacgacatctcgtctcggcctcacaagacggcaagctcatcatctgggatgcctacactacaaacaaagtccacgccattcccctccgctcgtcgtgggtcatgacttgcgcctactcgccctctggcaactacgtcgcatgcggtggtctcgacaatatctgctccatctacaatctgtcagcacgagaaggccccacacgcgtcgctcgagagctgtctggccactcgggctacctcagttgctgccgattcatcagcgacaagcgcattcccacctcgtctggcgatatgacctgcgtactatgggacctggaaactggctccaaggtacacgaatttgccgaccacctcggagacgtaatgagcttgagcatcaaccccctcgatcacaaccaattcgtgtcgggtgcatgcgatgcttttgctaagctctgggatatccgccaacaaaagtgtgtccagacgtttgccgcccacgactccgacatcaacgctatccagtttttccccaacggcaatgcattcggcactgggtctgacgacgcatcctgtcgcctatttgatattcgcgccgatcgcgaacttgcctcgtatcagattcccgagcctgtttgcggtatcacgtctgttgccttttctgtctctggccgattgctctttgctggctatgacgactttgagtgcaaggtctgggacgttctgcgcggtgagcgtgttggcacactgcaaggacacgacaaccgggtcagctgtctcggcgtaagtaacgatgcactcagtctctgcactggatcctgggattccatgctccgcatttgggcataatggacgacccacagataatatgcgacgccatgccacgacgcgaatatggacaacgaccgggtgtgtacttgactaattcctggtcataacaccattacaccatctctcccaagcttgactgtcttaccatacccacctgcatactacttttatttgggagagcttagtacaccgcggccttgcaccagcataatacaccatttttgggaaacgatgcaattgcagcatcatcgatggacaggcgcccgggacttattgctcaaattctttctttacataccactgtgcccttctacctttattgtcatcattcgaggcaaaaacttttgtcatttcctgtgtcagttgtcccggtcggctattttgcgtcccataacgacaagtgccctgttcatcgaaatactcgagatgacgcatacatcatatcctgtttgagaagtccccttttttctgccctatcatacttaccacctctttcttgactggctattaaaagcgacccttgtgcgcgttaggattgtaggaaggatcggtgtgcaagatgattccctgtacgttccggatttatggcggtgattttgtgttgaggcgatgggtgggtggatgaagtgcccatgtatgattctctgggttgtgtaagcacgtgcgtggtagaatagttggtacctagtcaatcagcgagttcccttttcc

SEQ ID NO: 13888 - DNA, 3778 bp, Oryza sativa
  ref <308>: DATABASE ACCESSION NUMBER: AK111236
  ref <309>: DATABASE ENTRY DATE: 2001-12-06
ataatcgcgaccggagacctttccgctaaatgattgtacatatcactggcaccatcactggcattgttcacacgtactccgcagagggttaacctacgcgggcaatttcattattcatgcataggtctaccaaatgaatcagccgaacgcgtgatctatgccgtcaagacggcgagcgagccaatggggctagcttggcctcctgcactgcacatgcgccaccacaagttcaccacaaaggttgtttgacatacatagatgatcacgggaacgcaaattcgagcgttgctggcagtgaccgtgttggtcccatgtctagcaacagcccaacccgcatcacacggtgcacggaagccgccaatcttcatctttacaggttttatggcctccgcattgcttggggagtacaacccaccatccagtgcactgggagcaaaccctgcccctattttaaccaacagccactttgaggcactgctgctgtcaacagctggcagtgatagccgaaaaggcagcagcaacttctttggtgacactgggtcatccaacagcagcacagatgctgcttctgcagcaacaggccctgctgcttcacaaccagcagcggcaacagcagtggcagcagatccaggcattgacgcaacagccgctgcatcagttgatgctgtcatgcagcctgctgcatcagcggcagcaggagggccagctgctgctgcattgaggcctgcagctgcaggggggatcagggcgcgtggcgcagccaccccgaagactgttggcagcaccagcacgcccgcagcccccacagccaacgtggctgggccttcaggctgcccagtgacgcggttcaaggatgttgacatctggctgccatcttcaacgctggctggcctggcgccgcgctgcttaatcagtttgatgcgactcagctacagcaactccgcgagggcgaccggcaggccaggcttccagaacaacaccgacgtgggtgtgtcggtgtaccggcctggggcgtcaggcatgcgctatcctcttttcaacttggctggctatggcaagctggtggacttcattgaggcccaacttaattacaccagaggcgtcaacctgttcgtactgccctacgacttccgcttggacacggagacactggcctcagccggccagctgcagcagatggcgaaggaggtgtctaagaaggttgaccgcagtgggctgaaggccatacttattggccactcatctggggctgcagtggcgctgaggctgctgcaggattcagcaatgcggagcagggttcagggttatcttgccctggcaccgccatttggtggctccagctccacagtgctggcgcgggtgagtggtgcgtttgactacttgctgccctggctgtctgacgaggtcgccgctgtgctcagttcgggcaatgctagtggtggtgctgctgagaacgtgaaggggtggatgtacaacttgacgctgggcatgccaggcgtggctatgctgatgccatatgcagaagctttcggtggacaaacggttgtggtgactatagccagcaacaaagccacatacacggtcaatgatatgccgaagctgtaccgcgacattgggcaacctggcgtggccaacagttatgccaggatacacgttgtcgcctccatgctcaagagcgggcccatcccgggcgtacaaacgttctgcatttatggcagcaacagcgacaccccactctcttggcggtatgagaagcccctcgtggctggtcaaccaaacgacatgccaactgtggacaaaatgggcaaaggggacggcgtggcaaacctggagagcttgcggctgtgcaagagcattgccagtggtccaacgtacatttcagagctgaaaggagtgacccaccactcggtgcacaccaaacgatcgtcactcagagtgataaagaaggctctggaaagcatcatcaacaagtgacaaagactatcactagcaacctgctgcgactgtgaacgagggtgccggcatttcccatgttgctctcgcttgatgcagcaacggtgctggagattacatgcagcaattgcatccacaggcacccgttggtgctagcaggcgattcatttacacatgttaatacctgctatcacaatgccctcagtgcgtcatgcagccactgttgtatggcactgttgtggtcgggggctcattggtcaagtgccaagctacagggttgaaagtggccatggagcagcaggagcagcagaggtgactcgtgttgggttgtgcacactggttgtagttccgtgcataggcgtgtgtgtgttgcttgcactgcgcgcaaggcgtgccccggcacgactgcaaattggcaggctacccgctgcgcgtggcatgccatgcctggaggaatcaagatggaatcattgcagcggtgtgcatggtgctcttgtgtggtgcatgcaaggcatttatactggtgtgcagtgccagtgctgtcagcccactagcctcttgaagcccctctctggcctgcacaccacaaatagcagcacaaggggaattgcgtgccacaggtgcgcacgccattgtctgcacacatgcatgatactccgtccacccgtgtacgggtcgcatatggtattgtatgtccagcgatgcagcacctgcaagttattccagtgcaagcagctgtgcctgtacagcgctgtgtgggttatgtacagggtggtggttggttatgtacatagatgcaggttttgcacatcacacagctggctgctggttgtgctgcatagatgcattgcagcaggggctgttatccgccttcgaggcttccgactgccaccattctcccactggcaggtttcatgctgcttgcacaacgtgcatgaagtgtacgcactgccatgtatgctaatgatgtgcatgtggcaagcagcggagttgcacatgccccttctgctgaggctttggccagcaagcacaccaggtgtacagcgggtgctgcctattgtatagattccttaattcattctgcattgctctagacaggatcacgctgcatgcacgtcgtggatgttggatggaccgcgtgatgattgggcgtccgttaatctatgtcaccaattgacactcgttgaagcagacataggcacagggctaggctcagggtttcctttcctgtgtggcatatgtgcagagcagtgctatacaccgattttgttgtgttgcagttaatcggttactagagtgggtgtgcaagtgcacccatgcagggccagcagtgacatacgtagcactgcattgctgcatagagtccgtgcagtggtgcattggctcactcttctaacacgtgaggcgactcggatcgcctgcagagttctgtcgtgtgaaggggtatgctgtggtgtgcaaagttcgtagtgtttttgtgtgttaggcgggtgcatcatcccctgagtggcggccaaataactggctatcacaatggttgatgtgttcttactgcaggcagtgtgccgtggtgctgaatatcactggtgcaggatttcagtagtatacatgttatggtcaaggcacataccttactatgggtgcctaagcattgtttcatatgtatggtgttacagtatgtgcaaggacgatgttcagtttaaggattggctgtggcactcccttttttggctgcaatctgttgacaccaaatttggtgacaagcttcaaaaacgttaggtttgcctgggctggagtgtgggtctgggtaacaacaacaagcact

SEQ ID NO: 13889 - DNA, 2688 bp, Oryza sativa
  ref <308>: DATABASE ACCESSION NUMBER: AK111237
  ref <309>: DATABASE ENTRY DATE: 2001-12-06
agcgactattagcctagaaattttgaattggatattgatgagagaacacaacaagaaacacaggcaagagaggccaacgtagaagtccaaaagtccaagctggggagggtatcatacaaacggtgcgtttgtttgttcctcaccaactcctcccttccagatttgaagccccccatgaccaaggccaaactatttcagctcttgctctgcaacattcatcctcttgtactcgctacccctttcttcttcaacatctgagaataaatttcgttttctcccgtggcagccaaacttttaatgcatcgattgcattagttacttccaggcgtgtccacttcgacccaaccactccccacgctttggttcgtggttgccaaaacccaactcgtttcctccccttcccatccatctctcccctgtttgtttcttggccctgatcggcctccccgtgttccctccgatccgctggtcaaaatttggtgttgagtggcacggcgggatctccatggccgggaacgcgagcggggattcgccgtggttcttggcttgaggccttggggtgggtcagcggtcgccgcccgcccggtatggccgaggaacacgaccaccatgggtcgtcgcggcacatgtcggcgtcgcagaaggagctcggcgacgaggacgcgcgggtggtgcgcgtcggggacgccgagcgcaccaacgagcagctggagttcgccgggaacgcggtgcggacggccaagtactcgccgctcacgttcctgccgcggaacctgttcgagcagttccaccgcctcgcgtacgtctacttcctcgtcatcgccgtgctcaaccagctcccccagctcgccgtcttcgggcgcggcgcgtcggtcatgccgctcgcgttcgtcctcaccgtcaccgccgtcaaggacgcgtacgaggactggcggcgacaccgctctgaccgcgccgagaacggccgcctcgccgccgtcctcctatcccctggcgcgggcacccacttcgccccgaccaagtggaagcacgtccgcgtcggcgacgtcgtgcgcgtctactccgacgagtccctcccggctgacatggtcctcctcgctaccagcgatcccaccggcgtcgcctacgtgcagacgctcaaccttgatggcgagtccaacctcaagacgcgctacgcaaagcaagaagcgctcatcacgccgccggagcagctcaccggcgccgtcatccgctgcgagcgcccgaaccgcaacatctacgggttccaggccaacctcgagctggagggggagagccgccggataccgctcggcccgtccaacatcgtgctgcgaggctgcgagctcaagaacacgacctgggccatcggcgtggtggtgtacgcggggcgcgagaccaaggcgatgctgaacaacgccggcgcgccgaccaagcgcagccgcctcgagacgcagatgaaccgggagacgctcttcctctccgccatcctcgtcgtgctctgctcgctcgtggcggcgctctcgggcgtgtggctgcgcacccacaaggccgacctcgagctggcccagttcttccacaagaagaactacgtgagcgacgacaagaacgccaactacaactactacggcatcgctgcccagatcgtgttcgtgttcctcatggccgtcatcgtgttccagatcatgatacccatctcgctctacatctccatggagctcgtcaggctcgggcaggcctacttcatgatccggggcacgacgctgtacgacgcgtcctccaactcgaggttccagtgtagggcgctcaacatcaacgaggacctaggccaggtcaagtgcgtcttctccgataagaccggcacgctcactcagaacaagatggagttccggtgcgcgagcgtcggcggcgtcgattacagcgacatcgcacggcagcaacctgttggtaggaggactagctctcttctctcttatcctgaattctttccattcggggcgggaagccatggatggggagctgatggcttctgatacatggcagagggtgatcggatttgggtgcccaagattccggtgaacgtcgacggggagatcgtggagttgctgaggaatgggggagagacagagcaaggaaggtacgcccgggagttcttccttgctcttgcgacgtgcaacaccattgttcccttgattcttgatggcccggacccgaagaagaagatcgtcgactaccagggcgagtccccggacgagcaggcgttggtctccgccgccgccgcgtatggtttcgtgctagttgaacgaacctccgggcacatcgtcattgacgtccctggtgagaagcagaggtacagatcgagaccacacccttgttgcgattaaaatttttggcgcttttggtggtgctccactgagattaacagcttgaggaatagggacaaaagaggcgtgcggttttttattctcgtggtattggtaggagactttgctgttagttcatgtctgttagtagttgaaactttgttggtttgtggctgttgcttgcattctctttttttggttctagtgcataaatgtcaatgctatttgtagtagtagttcagtaactgaacaactgcaggaagtgcttcattttggttgacttttgtaggtggatgcaattggttcagttactattgtttgttgctgc

SEQ ID NO: 13890 - DNA, 4094 bp, Oryza sativa
  ref <308>: DATABASE ACCESSION NUMBER: AK111238
  ref <309>: DATABASE ENTRY DATE: 2001-12-06
cgcatccttggcgttccaactggcctcgcatccttccttcgaggcttatcgcgcgtatctggagagctctgatcaagtggagcaggcgctgtctgagtgggagtcgctgtcgctgcaggacgtgttctcggtgctgatggtcgaagcgttacgcgaatgctatggcgagaaagccgatggcaaacaaccgctgccggttctgctgccccgagcctctctctcctcgggtggtggcggtgatgacagcgctgggtcagtggaggtatcattcagtgcacaacacaaggtgattctagtgatcgatgcaatcaacgagagcgcgaatggcgggaacaacttgctgctggagctgctcgataccaagtcgcctggagccaacatctcacagttgcctgacttcctcggcctgctcgtcaccagtcgtcccgagacccccgtctacactcgtctcgtgcgtctctgtggttacccggtgatggagctcaaagccgatgctgagagtaacaaggccgatgtgcgacgctatctgcgggcgagtctgtgtcaactgatggcctcggaggctgaggcggagcaggcggctgaggtgctgggtcagcgggtggagcattacttcctcttggcgtatgtggctgtcagcttcctgcagcagttgcaacgtgagcagggtggtagagcccctcccattactcttcagcaagtgaaggagacacccgtgagtccgcatgaccgctacaaggcggcttttgaccgactcacgggcatgaaagacgagcagcgagcagcgctgatgaagattctgcaagtgctatgtgtggctcgtgaaaacctctccgtgcggggcatcgctgcgattgtcaacctctcgcctcgacaagtcatttccctcacggacattatgcgccctctgctacctctcaacccttccagcagtatctcttcatccgagtggcatctgatcggtgccggcagcaatgacccagtggaaaaagagcaacagcaggaggagctgagcgacatacgtttcttccacaagagcgtggccgactggttgatggataagcaacgccaccatctcgccctcaagtctcaatcgccagcagacacgctggtgtgggtggacgaacgagaagctcatgcgatggtgggtcgagctgcagtggccactctgctgaacctcccgacatcatcttcatcctcttctccttcatcttcggagtcgaagggttctctttccctccccagcgaagctgatcctcaagtggtggtgtctctgcaagcccgactcaagaagttctacgagaccagcgccgccacaggtgatggtggtggagtctccagaagccttacccgtactgccttactcaaccagagaggcggctctccgttgtctctatctcctccacttcccacgggtgccgaagccacgctcacgtctgaggaggatgacgtgttgcaagctctggctgtgtgtgtgcctctcacttccctccctcaagtcgtagctgctctgacgctctctcctctcaaggctcaaggaactcaactgctgctgagttacgccatctatcacgctgcctggcatctggtgctaggaaagcagtgggtgctggctgctcagctgtgctgcaacatgagaatgctggatctcgtgtgtcaggtggacacggcgatgcaacagcacgcccaggccgactctaagagcggtaaagagtcttcgagtggtctgggtatgtgcgcagagctcatgagagtcaccaagaagatggtgttggagctcgccaagctactgcactccgacagcctcctgtcttcgcctcagctctcagccgctgacgccatcatctggcagctcggtggggagtttgtgcgcttctacgacctgcgcatgaaagacatcggtgccaagtggtggctcgcctatcaatacgcgctggccatgcccatcaaatacgccccgcaccaacagacagtggcgctgcagccctggtggtcgactcgctgtcgtcaagaaggacgagtgtgggtggagtggcgcaatcgtgtggagtacctctctccttgcactcagactctgcgaggccacacggggcccgtgttcggcgtgacctactccgcggacggacagcggctggtctcaggaagctccgatctgagcgtgcgcgtgtgggacgcctcgacgggtgagagtctacgtgaactcaagggccacacagcggacatcagagccgtggcgctgtcagcagatggacagcggatcgcttcgagcggtgacgatcagacggtgcgcgtgtgggacgcttcgacgggtgagtgtctacgggagctgaaaggtcacactggctgggtgcgtgcagtggccatctccgctgacggacaacgcgttgtgtcaggcagttacgatcagacgttgcgcgtgtgggacgcggcgacgggtgaatgtgtacgtgaactgcagggccacacgagtctggtcttcgctgtcgcgctctcggcggatggacagcggatcgtctcgggcagctctgatctcacggcgcgcgtgtgggatacagctacgggtgagacactgcgtgagctcaaaggtcacactggctgggttcgttcagtggcgttctcgaccgatggacaacggattgttactggtggtgatgaccaaagcgtgcgcgtgtgggacgcctccactggtgaatgtgttcgtgaactcaaaggttacaccgcggctcttatctccgtggcgttctcccccgacggacagcgcattgtgtcaggtggcggtgatcaaacggtgcgagtctggaacgctgcgactggtgaatgccaatgtgagctcaagggccacacggagcaagtggactcaatcgccttctcccccgacggacagcacatcgtgtcaggcagcatcgaccagacactgcgcgtgtgggacgtctcttcttccctctccccctcgtcgtcatcctcatccggtggcgcagggcttcgcgagcggcagggtcacaccaaagacgtcaactctgtggcgttccctcccgacggaaagcgcctcgcctcaggcagtgacgatcaatcagtgcgcgtgtgggacgctgtgagcggtgagctgctgcatgaactccagggtcacagtggctgggtccgctgcgtggtcttctctcctgatggacagcgtatagtctcgggcagcgatgatcaaaccgtgcgcttgtgggacgcctcgacaggtgaaagcctacatgagctgaagggtcatgaaggtctggtctcctctgtggctttctccgctgatggtcaacgcctcttctccgctggtggtgatcagaagatgcgcgtgtgggacgcctcgaccggggagagtctccctgagctgcaagtgcgggctagcgacatcaacgccgtcgccttctctcagcccctaggacaagcgcatgtgaacgtggcagcaggcagcttcgatcagtcgctgcgcgtgtgggatggttccacgggtgagaacatgcgtgtcctccagggccacaccggcttcgtcttcgccgtgactttctccacggacggacagcgtctcgtgtcaggtagcgacgatatgacggtgcgtgagtgggacgtgtcaacgggtgcggcggtacgtgagctgaagggtcacactggcatgatcttctccctgggtctctccgcgaacggacagcgtttggtgtcggggagctctgacaaatcgatgcgcgtgtgggaagctgcctctgcgagtgagagtctgtgtgagctgaagagccatacggggatgattcgttccgtggcgatttcagctgatggtcagcgcgtggtctcgggcagcaacgacaagaccgtgtgcgtgtgggacttgtctagagctccttgcccttcgccctcgtctctggatgtcgccgatcctcgcggctctgtttcgttcgtgactgaaccttttcacacattttgtggcatgtttcagctcagtttgcattaggaagacggctctgttgtttctcgttcttcgtttgttacagaactgttgatttgtattcaaaatgtgtcttggtcaatcaaaacagtgtcagaaaaaaaaaagacttctcgtt

SEQ ID NO: 13891 - DNA, 580 bp, Oryza sativa
  ref <308>: DATABASE ACCESSION NUMBER: AK111239
  ref <309>: DATABASE ENTRY DATE: 2001-12-06
atcacatctcacatcttaattcctcttctgaccaagatccaaagaaagttacaaagcccatatgatggtggcctcccctgtgaaggtggccgtcgtcgccgccgtgtgcgtcgtgctggtcgtgctgtcttcttccccggcgccggcggcggcgcagatgatctgcagcaagtgtgaccagtactgcaactcgtcgtgcgccggtgggatgggtggctgcagcggcgcctgcactgacccagcgtcctcctcatgcacgagctgcaagcaggcctactactacaagtgcatgaactactgcggctcctactgccgctccaactgcgtcaacagctgaaccaaatattatatgcgaattctccccctgaattagaagcttgttgctatggctccatgtagataaataagcgaatgctagctgcatgcgcgcttgtgcttgcatatggtggatgtatgcccctactatgtacaacttcatatatatatgtgaaagttgcatgtgtcttctgtcgaaaaatgttccgtcgtttcttgtacgtaactcggtcaatcagttatgaaagatcgaatgtaataaaat

SEQ ID NO: 13892 - DNA, 903 bp, Oryza sativa
  ref <308>: DATABASE ACCESSION NUMBER: AK111240
  ref <309>: DATABASE ENTRY DATE: 2001-12-06
gagagccaaactatcccacccccaacccggtaagctctgctctgttcacctcgtcggccggcgccgccgcgtgtttgctgcttgcttcccgtcccctcgtcggagaggatgctggcgacggcggcgcggtgggcggcgaagaaggggaagccgaagatggcgccgatcgagctcccggcgccgccggagcaggcgcagtccatcacgcgcaccatcttcgacgtcgtcagggagcacggcccgctcaccatctccgacgtctgggaccacgtcaaggacgttgggctgaggggcctgacgagcaagaggcagatgaagatcatgatgcggtggatgcgggagaagcagaagctccgcctcatctgcgaccacgacgggccgcacaagcagttcctctacaccacctggttcaccaatcccaagaacgcgccgcagaggcccaagagagatcatcatcggcagcagcagcagcagcagcagttcaggggagagcctcgcaaaccatgaaggacgggacggcaagaacaatgaagctgatgaatgcaaagcttgccatctgccgtccagtgagattcttcagcacttgtgcttctctgtgtccttctgcttgagtgctctcgtttgggcgaccaatgcatagtttattgggatcttcgaacacaataattttgcagaattttcaccggataacaggacttagttcaaatcttccaaaaatcctgtaaaatttcctcaggggccaggtgactagtaccgcttttgctaggcaggatcttttctgtagtttgcttggggaaagaatttcagcacatgtttttgtaccctcgtaacctcgcccttaaaaggtatagtaactttgtaacagtgatgtagaactagatagtacagcatccttctgaatct

SEQ ID NO: 13893 - DNA, 674 bp, Oryza sativa
  ref <308>: DATABASE ACCESSION NUMBER: AK111241
  ref <309>: DATABASE ENTRY DATE: 2001-12-06
aaaaaccgtatcacctcacactcacagcagttcggctgaccatggcgagagcggcggcggcggcggccttcgtcttcgtctccctcgccctcctctgcgacgccagccaaggcgaaggggcggcggcggcggcggcgtgcagggcggcggatttggtggtgaggcagagggcgacggggcgggtggtggaggggaagccggagtacgcggtggaggtggcgaaccggtgccggtgcgcgcagtcgagggtggtgctgcgatgctacgggctcagcagcgtcgagtcggtggacccgcgcgccatccgccccgtcgatgacgagcgctgcgtgctccgcggtggccgcgtcatccgtcgcggcgcgccgcccgtgcgcttcacctacgcctggatgacgcccttcgacttccccctcgtaagctcgcaggtccactgctagtgcttagctagcctagcaagcactgtcacccactctatcatcagctcgtcgtcaaaacggcagaagcgaaaatgaattagctagtgcagagtgtatcatatgtaaaccccagtactgcaccgtgttagtgctgggtaatttcaaacttctgatattgtttttggttttggaaaaaagaagggggaagcagtggagcaccctccagaactgtttgtgatcaactaagttaaaatc

SEQ ID NO: 13894 - DNA, 706 bp, Oryza sativa
  ref <308>: DATABASE ACCESSION NUMBER: AK111242
  ref <309>: DATABASE ENTRY DATE: 2001-12-06
gagagagagagagagatcggagcagctagctagagcatcaaaagcggccagccatggcgttggaggccaggttctttttggcggccgtgttcgccgtcgccgcgacgtgcttgtgcctatcggcggtggcctctgctttcgccgtgccgagcgtcgccttcgacgaagggtactcgccgctgttcggcgacgacaacctcgtccgctcgtcggatgataagagcgtccgcctcttgctcgaccggcgctccggttctgggttcatctcctcggattactacctccacggcttcttcagcgcgtccatcaagttgcccaaggcttacacggccggcgtcgtcgttgccttctacgtgagtgcctgcctctctcaccactgctccgatctgagaacattccttacactcctacccacaaaatccgcgttgtttaggttatcttcctgcggtttgttttgagccgttgctgctgttgcctcctcacatggcgtgtcaacccggaattcagctagtactacagtagtagtacaaaccatagcaagttgcgtaccagccccatgccctggtggcgcagggtagacagcagggcgagccacatgggctgtttggactttcaagcccaaaaaggctgcgccgcctgcacccgagaataaatgtacccctctcatgtcacgcgcactcaacagtcagtcaccagttcaaccacc

SEQ ID NO: 13895 - DNA, 671 bp, Oryza sativa
  ref <308>: DATABASE ACCESSION NUMBER: AK111243
  ref <309>: DATABASE ENTRY DATE: 2001-12-06
gagtctccacctaccactcgagtgctccggcgcacgagcggcacgcgcgcaccgccaccaccaccgagaataatggcggcggcggcggcagcggcggcgaacggggcggggggcggaggaggggtgccgcggccgacgaacccgatggtgacgccgctgctcaccgacctctaccagttcaccatggcctacgcctactggaaggccggcaagcacctcgaccgcgccgtgtcaggatccctcattcccttcccctcctcgatcccctctccatgaatccatccttttttttagacgcgtgtttccgctgctatccgatccgtcgtgctcgtcagctcttaagctcgtgcgacggggtggtgatttagggacagtggaggaggagagggacgatcggttttggtgaatgctcggatatggcgtggaagaggcccaattggttattggtcctgagttttcgatctgtgttatgtgaattcatgtgcggtgcggattcgagatttccaactagcttttttctcaatttgatgatccacttaactgtaaccacgggtatttcgattcgagatttttctgtatgcagatgttgtttgaacaacatgtatgtaaagtggtagatatatgtcatcatagctgatgtaataaagtgaacatagtgtcctttttaacct

SEQ ID NO: 13896 - DNA, 878 bp, Oryza sativa
  ref <308>: DATABASE ACCESSION NUMBER: AK111244
  ref <309>: DATABASE ENTRY DATE: 2001-12-06
ggacacagctccgcaccacaaatttcctcttccaccctcaacagcgacgacgacaaccctgcgacggagacgaccccgcgacgacggcgaccatggccgacagcggcggatctcgctccgccgcgtcctcctcgctccgcgcgccgtcgatgccgccaccgctgttgtgtttgccgtcgtcgcccttgccgtgcgttgtggaggtcgcgatgacctcgagcactccagatctggcctcgagctcgactgggcggcgtcctcgatgcggccaccgccggcgctgccaccttctcctcctcgatgcggcatgggaggagggacgccaccgtgcgccactcgggggcgcagccgtcctcagcgtcggtgtgggagacggcgacggcccggagctcctactcccccgcggtggccgcgttgacgacgaggaactcgaggttgacgccagcggaggagacgggaagaggagaggaagagacggcggcttgaggcggtggccggggatgacgaggaggaggaggagcagctctgctcgacggcatggaggctgggcgtgccgtgcgcgtcctccccggatgtagcggcatggcgaggaggaggagcagctctgctcgggcatgaacggcattgtttatctcaaggtgaaaagagagagagcgagcaagctagctctatttctctgtgtgtgtgagagagagagctactagactagtacgatgaataaattccccctgtactagtttgtgtgagctactagtggttcttttgagaagagttattggttttggtttctagggccaaaccaaagaataaatgcccccaaactaaaagctacacaaacacaatgaaaatatggagcctcttgaataaaacttcatgtc

SEQ ID NO: 13897 - DNA, 1348 bp, Oryza sativa
  ref <308>: DATABASE ACCESSION NUMBER: AK111245
  ref <309>: DATABASE ENTRY DATE: 2001-12-06
agctagctagctgccatggatccgtactgcgacggtaagagcaagaagtcgccggcgatggggaggcggcggcgctacttccggtgcggcacgaccatgctgacgatgctcctcttcgtcgtcaccaactccgcctccgtcctcctctcctccggcgccggcgccttcctcctccgccgctacaagccggccaccgcccgcctctgggcatgggacgactccgccgcgctcctcgacgacctcaacgccacgcagtccgcgctcgccgacacccacgcccagctcgccgacctccacgcccgcctcggcaccgccaactccctcctcgagacgctcctcgccgccatggcggccgagcggcgggacggcggcacgccgtgggctcgcgagctctccggcgagctcgagctcgccgtcgcgccccaccggaacgtcaccggcaaggcgacggtgttcccggcgctgggacacgcgtgcgcccgcttccaggacgacctggaggcgtacatgaggtacacgcccggcggcgagtgcccctccgacgagcagctggcgcgccggctcatgctcaacggctgcgacccgctgccgcggcggcggtgccggccgcgttcgccggcggggtacgtgcagccgtcgccgctgacgaagagcctctgggccatcccgccggacaccaccgtcgtgtgggacgcgtaccggtgcaagaactactcgtgcctggtgcgcggcggcggcggcggcgagttcgacctgctcggccgggagaagcgccggtggatgcgcgacgacggcgcgctcgcctactccatcgacagcgtgctcgcggcgaggccgaacggcacggtgcgcatcgggctggacatcggcggcgtgtccggcacgttcgcggcgcggatgcgcgagcgcggcgtggccgtggcgaccacggccatgaactccggcgggccgtccggcagcctgatcgcgtcgcgggggctcgtgccggtgcacgtcggcccggcgcaccggctgccgttcttcgacggcacgctcgacatcgtgcactggacgtcgccggagcacgtcgccggcgtgatgctggagttcgcgctgttcgacatctaccgggtgctgaggccgggaggcttgctctggctcgaccacttcgtcttccccggcgagcagctgaacgcgacgttcgcgcccatggttgacagggttgggttcagaaggctacgatggagcaccggcaagaagccggtctccgcactgcttgagaaaccaatgacatgaacaaggagaagattagggaagaattatatgatgcgcactaaacaaacttgtaatcttttgtgacagaactgtg

SEQ ID NO: 13898 - DNA, 906 bp, Oryza sativa
  ref <308>: DATABASE ACCESSION NUMBER: AK111246
  ref <309>: DATABASE ENTRY DATE: 2001-12-06
aaacgccagatcgtcgggagaccactcagtaatttccgacgtagactgcaaaccagctagaaaattcagagcccacaatgaagaagaccatcgtgctctaccccggggtcgccgtcagccacttcctccccatgatgcagctcgccgacgagctcgtcgaccacggttatgccgtcgccgtcgcgctcatcgaccccgccttccagcagcacaccgccttccctgccaccgtcgaccgcgtcgtctcatccaagcccaccgtacgcttccacaggctcccccgcgtcgagctccctcccgccaccgccaccgacgacggcgacttcctcctcctcgggtacctggacctcgtgaggcgacacaacgagtgcctccatgatttcctctgctccatgcttcccggaggcgtacacgccttcgtcgtggattctctctccgtcgaagcgctcgacgtcggcgagaggctcaacgtccccggcttcgtcttccacccggcgaacttgggcgcctttgccatcttcctccagcttccttcgatccgtgcagagggtgagccgagcttcagggagctaggagacaaccctctcgagctccctggcctccctcccatgccggcatctcacctcttctcccaatttctcgaacacccagagagtcaagtgtacaaggccatgatgaacgtgagccgcaggatgttaccgacttggaagagaagcaagatattttcagagaatcagagagaattcggaagaagaggagaagaaacagagagaaagacagagatgtagagagagagagagagagagattgagtttgtattgagttggaaattctgtctttacatgtcatcctcccgattctctctccctcctttatatacagctagttaacccagtttccaccctt

SEQ ID NO: 13899 - DNA, 1281 bp, Oryza sativa
  ref <308>: DATABASE ACCESSION NUMBER: AK111247
  ref <309>: DATABASE ENTRY DATE: 2001-12-06
aaaaaaacccaaaataattaagaaaaagaagaaattaatcctcccctcctcgatcccgagctcgcgcgacaagtccgaccaccgcggcgatggatttctccggcggcggaggcggcggcggcggcgcgacgctgtcggagatgtaccagagcgcgcggcggctgctgctctcggcccgggacggcgtggcccgcgtcgagcgcctcgcgtcggcgcccacctcgtcttcctactcctcggcgccgctcgtcgggggcggcggcggtgccggggattcggcagccgccgaggaggtgcggcgggaggtggcccagatccaggggctgtgcgcgcagatggaccggctctggcgatccatccccgccaagggccagcgtgatctctggaagagaaaagtggagcagttgtctgaagaggttgattcgctaaaggaaacccttgacagacattctctgcggcaaaaaaagagggttctagaagcaaaagaaagggcagagctatttgagagagctaatggtgagtcttcacatgtccttcggatatttgatgatgaagcccaggcaatgcaatcagctcgtagctcctctcgtatgcttgatgaagcatatgaaacaggagtagctatccttcacaagtatgctgaccagagggatcgtctaaagagtgctcaaaggaaagcgttggatattctgaacaccgttggtctatcaaattctgttttggagcttattgagaggcggcaccgtgtggacaagtggattgcatatgctggtatgatgatcacagtggtggtgatgtttgtgttttggcggtggacgcattagtgctgcagtgtgtcggaaacagcatatttgtgtttggaagttgacagttgagacaagtggtagttctgaggatatatcaacaactgaatggcaagagattggatcccctttttgttcatgctcaactctgattggtaactagcgttacaagggctttctctgggggggcataaaagctgcttttctttttcaacgcgggtttccggcatgccagtatatatgccactatgtctatgtggatcaaattcttttctgtatgcacatcacagtaagtctatcactataattctgattcaagtgtatcctatggtcggtgcagatatatatactgcacatgtacagaaaaactgatagggttactgtctgcggattctagttcattctgtacaaacatagtatgcttaatgatcttcctttccttttcctcttttatataactggagtacggtttgggcac

SEQ ID NO: 13900 - DNA, 583 bp, Oryza sativa
  ref <308>: DATABASE ACCESSION NUMBER: AK111248
  ref <309>: DATABASE ENTRY DATE: 2001-12-06
tcttcgtcttcctccttgccatctcgcccaatctcgagattctccgctgctattatccccgatccaaaccctaatcgatcccgccatggaagcggcggtgctcccgcgacccgcggacatcaccccggagctccgccgtttcctcgactcccgcttccgctcgcaagcagacctcgccgcggccgccgacgtcgaggccgagatccgcgggcgctacgcggagctcgaggcctcggtatccgacctctccgtccgcctagcggccgccgccgcagcttactcctccagctgcagcgccgccggcaccgctctgagtaatgtccgcggctgcctcgctgccctgaatgcctccacctctgaaccaggggtcacagaagcggtggaggttgggagcgaggagatgttgtttgagcaactttcttctctggccaaagaggtggcgagagtggagttggtcagggattacgccggtgagtgtgaaattagtttcctcggaccttgtatccgtgctttgtttgatatttgatatttcggatgattaaaagctgacaatgagatcactcctatgacaactcttaacgct

SEQ ID NO: 13901 - DNA, 871 bp, Oryza sativa
  ref <308>: DATABASE ACCESSION NUMBER: AK111249
  ref <309>: DATABASE ENTRY DATE: 2001-12-06
actgcaagcaaagctagaaaaaccaagtgaaaacctcaaagctaggcaccacgcgtcaacgcatcatctccttcaatcgtctccttgtagtggctagtgtgctcgatctgagctagctttggtctctttgccatgggaaactgcaactgcttggagagggcgagggcgaaggtgacggcgtggggcgcggaagagggcgacggcggcgaggacgagttctggggcgccacggcggcggagttctccggcggcggcggcggcggggcgcgaggtggtgtaccgtcgacgaggaagaaagagatcatcaaggacggcggcggcggcggcgagggttcttcttcgccgacgaggcgcgtgaagatccggatgaccaaggggcagctgcggcggctgctggccggcgccgggaggggggcggccgtcgaggacgtcgtcgcggagatcatgagcatgggcgacgtgcacgtcgagcccgtgaaggcggaggagggcggcggcggccgccggccgccgccgtcgccgtccaagctggagccgatacaggaagacatggacgagtagcaggagcagccatggaggaggatatgatggagatgagcgtgagatcgtcggatggatcgatcatctggagatggacggtggatgtttcttcaccgattttgcatgcatgctggcctgcctgtttgttttggatcttgtttgtatcttttctttgctctagttaagttttgtaggacgtacgtatcatgctatattagaggtagaaattaggggatatgtatatactaatagatgtgtacgcgactacgcgtgcacatgtacatttttgtactggtatatgtgatgatatatactacctccgtttcaggtt

SEQ ID NO: 13902 - DNA, 1029 bp, Oryza sativa
  ref <308>: DATABASE ACCESSION NUMBER: AK111250
  ref <309>: DATABASE ENTRY DATE: 2001-12-06
ttggtctcatgctcctaggaacggagcaccgccgactccttcgtcgctggccgtcgccgccgcgaccaagaacgtctcttcgccgccactgggccgccccatcctcgcgctcccctcttcttccccggccacgccgtcttggcgccgtgccgctcccgtcgcggtgatcatctcgccacgggcggacaactccatcagcccgcctcggcgtcaaacccgccaggacatccttgccgccggcatcccctttctcgcttccgagccctcatcaccaacgccgtctcgcctcgcccgtcggtttttgattgtttgcgcctagttgtggttaccggatatttttcttcaagcggatttctcgaagatttgtgaagcttcgtgaagactctgagcaagaactgctgaagatgtgaccaaactgaaagcagagtagattaatccggtgccatgcttgagaataccagcgtcgtggtgatgatatgagtaagaagagaccctgcgagtgttggtaaatcgacgcagttatagttgaagtaggcaattgatagcggctgttttttctagtttaattggcagtgattgatgaagaggaaaggatgggtggagcgcaggatatgaacggcctctgtcgctccgtctcccaagtatgtgaggattgcacggtccaggaccaggaagcaagccgatcgaaatccccgtcaatgcgtggcttcgcggagtgtgtccagcagaggtttgcaggagttcggacgggcttgacagggcctgctaaccaacttgggcctgatttctgtgtccagccgagaataagatctaacggtgtttggcatctgacaatagattgatcagacggctctacggctctaaagtctcaatgacgtggcttaacctggtgcttcctttataggagctaatgttgtagttggtaccaactatataggaagaagggattatattgcttgtaaaatattatgcattgataggattgcacttaatctgtttgccccgtctacgaggtagaccggtgggcct

SEQ ID NO: 13903 - DNA, 570 bp, Oryza sativa
  ref <308>: DATABASE ACCESSION NUMBER: AK111251
  ref <309>: DATABASE ENTRY DATE: 2001-12-06
atggagaccgcctccgcctccgcctccgatccgccgcctctccgccgccgccgccagcgccagcgccgcctcgtcttcgaccgccgctacggatggatcttcgacgagtggacggaccccgcagacgccgccctcgccggaggcagggggatgttctgcgtgctgccgatggcgcggtcgctggtggacgtcgccgtgtcctcggttacctatgcagcagactcagttagtcaagctctcgagcgctgtggaacctcatctcccatagcatatcttccgcccctatcattgcacaggaagcaacaaacatggtttcgtgaacttgagcatgttggagttatagctgatacaaagttaataccctgcagaactatgtgcagcttggggtgtatcagcactgatggccactgattgacaaggcagtggtatcaccaattgaatgccgagcttctgtttacaatacgttagttcagtttcggaaatgtcaaattcgtacaatgtcatcgtggagccctttgtctgtgactctcttttgtctcctttttgaagaaagcatgaagtttgagattg

SEQ ID NO: 13904 - DNA, 1185 bp, Oryza sativa
  ref <308>: DATABASE ACCESSION NUMBER: AK111252
  ref <309>: DATABASE ENTRY DATE: 2001-12-06
gaggggagggcgggacgccggccggagcacgcaaaaatctcgctcacctcgtgaagagctgagatcaaggggggagagatcggaggcggccgtagcgtggcggagatggaccctgctagcgtcagcgccagcgccagcggcgacccgatggcggagtgccctccggcggcggctgccgctgagggcagcgacgccatggactgcggcggcggcgggcggagcaacgcgagggtggccggagtgctccgcgggttcctcgccgtgcagcagcgccgcgccgaggcgtactccacgctccgaaggggtttttctgaatacatggctaatggaggtgaattagcttttcaacaactatgcgcgagtgttacggcggagttcaatgattgctcgaaacaagttctcgaaatggtagccctcctatcaacgccagaaatttgtcgtggcgatcttgccaacttactgaaggatgtgcaggcacacgagaaagagaagttgcatctgacggcaagaattcaggtgttgaagaaagctggtcgtccttcggaacgcctggtgaaccatgcagattgcaggtcaagcaatatggctcaacatgtctgtgtgcatgtcaaagagataaccgaggctgctggcacggaggatgcagaggcagatgctgagtatgatggtgctcttaaagaggccatacaaggtgttcaagaggcagtgaccagcataaacgagcacatggaggaggtgcgctatgagattgatgcccttggggcagaaataattggtaataacttggctgaagttgaagaagctttccctgatactctattgataaaatagaaaagttgcctaggcgctaaaaggcagagtgaaaacaaacaattggcacaaatattttggactaacaaacaagctattcgtgtccctttggggatttattaaaaaaaaggagagagaagagaaccggaagatttgtttatgccagcattgcttctttggtgttctgctattcactagaattcagaggaatgtggcatgcttttggtcccttgttattcactagaattcaaaggaatgtgggatgcaatctttatgggatcgatattcgatagagaatgtgatctgaaattgttgtgaatattgttatactaatttggtatactcatgccaataagattttctaaggctcaagct

SEQ ID NO: 13905 - DNA, 684 bp, Oryza sativa
  ref <308>: DATABASE ACCESSION NUMBER: AK111253
  ref <309>: DATABASE ENTRY DATE: 2001-12-06
acaaccaacacacattcacaattcacaaagtgttagcaaactcatcatccagagtccagactcatctctacttccaagatctcaagaactgaattaagacagtttcatcaggctttcagttagatcgattttgcagtaattacaggttataagatggccaccctgaaggtgtacctgctgctgttcaccgccttcttcctctccggcctcatgcagctgtccacggcgacgcagacggcgccggcgccggcggcggctccggcgagggtgatcgacgccaaggccattgatcaggcgatcgcctacctgctcatgttcgcggcgctgttcgtcacctacttttcgcactgaagcattactgtggacggtctggaaaaaaaaagatgagattgtcgctaagagaacgagagcgccatggttctggtctctgttcaagtatggttcttacttttttttttagcgttttgtaattttgttgtgatttgattgggtgttgtaagaatgcataattgcatggtcaagtctagataaaagtctatcatttctttagaagcatgcatgcctctagctctgaagtgagttaaagaaggtcatggttctgtatctgttgatgtaacaatagcagatacttataatttaagtttctttgtaaatttgtttgaatactactatatttgttccatc

SEQ ID NO: 13906 - DNA, 1004 bp, Oryza sativa
  ref <308>: DATABASE ACCESSION NUMBER: AK111254
  ref <309>: DATABASE ENTRY DATE: 2001-12-06
gactccaatccaatccaacgcttccttcctcgcaaagcctctgcgaatctcgcgcacgcagaaaccgctcccaaaccctagacgcaatggtggtcaccatcgatctccgggaggtcaccatcgatctccgggaggaggacgaggcggcggcggcggcggcgatgaaggccatcgctgggaggagcgacgaggaggtcctcgcggcggtgctcgcgcgcaagggtggccctgtcccgttcctccaggcggcgatcgacgccgcggcggcggcggcgacgaaggccatcgctgggaggagcgacgaggaggtcctcgcagcggtgctcgcgcgcaagggtggccctgtcccgttcctccaggcggcgatcgacgtcgcgcagcggcgatccgacctgttcctcgacccctccgcaccgggggtggtggcggagatggcggtggaagcccaggccaaggcggaggcggaggagaggcggaagagggcgaagggggagccgaggaaggcggaggagatgctgaaggaggaggagccgatgaaggcggaggagatgctgaaggaggaggagccgatgaaggcggaggagatgctgaaggaggagccgaggacgccgatgagagaggcggggagggacaaggtggagagggcagcggtagtggagcgcgtaagaggtgggtgatctcgcaccgtgaccttctaattgttcatcgtgttcgaatgcgaaatgtttgcgtgcttcggtgacctgtatgctcttattcgattatagattgtcatttcgcctgttgatctctacctcttatgcggaattggggcagatatagagtttgaatcagcaaatgtgctttcccatcttgtgccaagctagggccacttgtctagacttcgatcagttctcgatctgtagtagttctatagtggagctataatcctcagatttcgaggttgcagatatggcggagtataaaattgccatgtagtagttttttattttcaggtccgatct

SEQ ID NO: 13907 - DNA, 974 bp, Oryza sativa
  ref <308>: DATABASE ACCESSION NUMBER: AK111255
  ref <309>: DATABASE ENTRY DATE: 2001-12-06
aagcctccatccatccatccattcatcagagctcaagctcaagcaagcaagcttgctagctagctgctgagcagcattccagtctgctccagctagctcagctctctctgctctgctctttgctcgataacgaccatcatcttcttcttcttcttcttcttcttcttcttcttcttcttgtacattctatttgctcgatagatagatagatagatagataggtagatagagatggagacgaaggcggcggcgatggcgatgaggaagccgggggactggagctgcaggtcgtgccagtacgtgaacttctgcaagagggaggcgtgccagcggtgcggggaggcgaagctcggggtggagcggacggactacgccgccatgggcggcgggtgggaggtgaagcccggcgactggtgctgccgctgctgcgccgtcaacaactacgccagccgcggcagctgcttcaagtgcggcgccgccaagaacgactccgccgccgccgtcgcccagggctggggcttctccgtcgcctcccaggccggctggaagaacggcgactggatctgccccagaatggaatgcaacgtgcagaactacgctaacagaaccgagtgcttccggtgcaatttccccagatactacgttgattgatctgacatatatgatatatgccttgcactgagaagaaatgaaagggaaataaaatttacgagatcgaagatcgacggacaagattgatcggccaccggtcatgcccttcagggttttcttttttctatttttttttagaataaccctcgataacctgagggttttttttcatttgtaagagcggtaacggtactaaaaaaacacaaaaacggcacaaaattgtggctgatgactgatcagtcttcctcttttttttcccaataaaaggcagataattaagaaagcaaaaaaaaaaaaaaaaaaaaaaaaaaaaaaaaaaaaac

SEQ ID NO: 13908 - DNA, 997 bp, Oryza sativa
  ref <308>: DATABASE ACCESSION NUMBER: AK111256
  ref <309>: DATABASE ENTRY DATE: 2001-12-06
caatagtaacaattgtatagttttgagaaaatccatgaaatgccatcgacaagcactctaatcctagaaatgccatcgacaaaagcaacttcccagaaataccattgtacaagcctctttctcccaaaaataccatcatagtcaactctacaccgttacaaccgttattttttttgataatgaccattttaccctcagtgcaggatataccagttttcacggtaaaagaaaaagaaagatgaaacggtgaaaatttctaacgctaaccctaaaccgaacccaatccaggcggctctcccggcggcggcgcggcggtccacggcggcggtggtgcggggctcggcaacggcggcgaggaggttgcaggcgacggcgaggcggcggtccacggcggcggtgcggcggtccacagcggtggcgagggagaggcgggtttccagcggggtgcgggggctcggcgacggcggcgtggcagcggtccacagcggcgacgaggaggttgcaggcggcggcgaggctgtccacagcggcggtggcgcggggctcggcggcagtccacggtggcggcgcggcggtccacagcggaggcgagggagagacgggtttccagcggtgggtttccagccttcctggtagtgggggagaggcgggtttccagcggcggaagccccaccgatggctccatccctgctcctcctcccaaagaatagctaccggacctcggagtggagatggcgctgtcgccgttcttgcctcgcgacccgggagcagtggacattggcctcggggttttttctttctcgctgtgctcacttccccaccgcatcgacgctcctcgccgacgaccagtggtaggtgaagtttcttttggatttctcttacgatgcagaaatgctgagttgctgcatgtgcagtgagtccggaagcggcgaatgtgtgaaattttttttgaatctgatttctgtgaatttaattctgaaatgatttgattgatagc

SEQ ID NO: 13909 - DNA, 582 bp, Oryza sativa
  ref <308>: DATABASE ACCESSION NUMBER: AK111257
  ref <309>: DATABASE ENTRY DATE: 2001-12-06
taccacgtcgtcgtcgtcgtcgttctcccccttcctctcggctcggtcctccgctccgtgacgccgcgattccaacccccctcatcctcgcctccggtccccagtctccgacgccacgagatggccgagattgagataaaaacagcacctgctgatttccgctttcctacaacaaaccaaaccaggcattgtttcacacgctatattgagtaccacaggtgtgtgaatgccaaaggggaagcaactgctgactgtgagaaatttgccaagtactaccggtctctctgcccagcagaatgggttgagaagtggaatgaacagagggagaatgggacatttgcaggaccactctaaatctcctgtttgagagtcttctcagatcagtccactgccctcgtcggtgtcactgctatcatctggtttgaatttatgctgctgcttttgttcttcaagcttgtgttgcaaagcaagagatccttttatatgtgttgcactaataatttagcatggttgcttgacatgatgtttcacagatctgtttattcacatgattttattcaaatataagcattttgatacttc

SEQ ID NO: 13910 - DNA, 751 bp, Oryza sativa
  ref <308>: DATABASE ACCESSION NUMBER: AK111258
  ref <309>: DATABASE ENTRY DATE: 2001-12-06
acacacacacatagagagttccaaagtaccaaaccctcgccgccggggatgtcgccgtcgacgccccacccgggccgcgcgccggctggccgttctccgggactcttgggcacttacctccatccagctccagcctctcgcgcagccgtccattcattcaacgccagtatgagaaagaagaagataatttctggatgggccaaagctaattgagatggtgacgaccgaggtgtttctaccatgaaagttacaaccatgaagagggtagaaacctcaagtgccatgaatggaagttcgagctgaaatgggaagtgatatgtctaactgacaataggactgccctaggcactaaagggcaaggaacaagggagtagtacatggaatgtttgtgttgaataaggaggtgtttgggtgagagggactaaataagtccctccctaggcactactccaaggaagttggaactagtaactatatccacagctgtatatggaaagtctttggtctctgcagaggaccaaaatctgtacaaggattgtgtgggtgggggttcagtttagtctctctccctctctcctttttgtttttcagtttttgaacaggagttttaagccctgtttggcaaatgctctctgttttaactgctatgcaagccattttcatgcctgttgtgcagcttcaggttttcactgttttattgttcaggatttatgtagacaacctcctgagaaagtgtaaaatgttgtcactt

SEQ ID NO: 13911 - DNA, 815 bp, Oryza sativa
  ref <308>: DATABASE ACCESSION NUMBER: AK111259
  ref <309>: DATABASE ENTRY DATE: 2001-12-06
attcagatgagatgtgatttttctcctgttttttgttttttggggttggtttcatctggcgttggataggaatttggatgtttacctgttcatgggagcactgtcccaaaggccggccaccgtcgtctagggtggatctcggtctcgtttcgatttgaaagctcccgagatgaaatcaggtggcgcttagagccctcatccgtgggttttccagttggatattgggttacgctcgcctccaaattctcttctatctttaaattcttggggtttgctgcattttgtctgtttggatcttgtgcgattgatttgggagatggtttggttgtggtgcagtgattataaaatcattcctcgtcctgatgggagatctacgtgatcgactcctatacacccatagaatctgagcaccaaaaaccattcctttttttttcaatcaatcatctgctttctattttggaatccagttttctgtgttatgtgaatatccgatccttgcgcggtttaaactccattggtgtattctatctctaatctacaaacctttcttttttatggaaataggaatcttcgaaccttgcgcgatttaaactccgttggtgtattcgaattcaaatctacggacttccctcttgacggaaatctgaatctgcacaaactcgcccattagaggaaatctgaatctgcacaaactcgcccattagtaaaaacatttgtattgacggcttgcaatgttaaatctcctaccaactatgtaaaattacaattttgtaagttaaatcaagtttcgaagagaattgaatgaaattcggtgg

SEQ ID NO: 13912 - DNA, 820 bp, Oryza sativa
  ref <308>: DATABASE ACCESSION NUMBER: AK111260
  ref <309>: DATABASE ENTRY DATE: 2001-12-06
gtagcagcagcatgccagtattgtagaagtatttctcatcgaagcgctgacgcggcgatgagaagaaacgaacgatcatttcgcgtttcgccgatgggaacggcacttcaggcgtgctacgcagatcttgggcagcgtccacgtcctcccccaattcatttccgccccccaagaaacccgcaccgcgcgtcacgtctctcctctccccgccgcggcatgtgcgtctccccagatccgcgcatgcgcatcccatccgcgacaagtgcccatgcctccgccgcgacaccggcacaccgcgccccgcccgcccgcgaccgcgagggagcgctcgtcggtagccggcaacctgccggtgcgtgtggcttgcgtgcggctcgtcaaaaccgcgcgtgggggatatgcatgggccgcggccggttgcggtgccgccgcgccgtcgcggtcgcggatgcatggtgcatgcagttcttcgatcgtgacacggtgggagggtgggagcagctcggatctggggaggtaatgatcgcacgggggcaactgggcaaaggacggatcgccctccacggcttggctgtcatctggttattctggccgggtagggcagctagggacgggagggggcagagggctacgaacgttagcgattgaacttatccatgcgtgagggagagtattcactgttgttgcctgtggagcgtggagtactataactactactccctctgtcctctaatacaagagattttaatattttacatgtactgtttaattacttatcttatttaaaaaaaaaaaaaaaaaaaaaaaaaaaaaaaaaaag

SEQ ID NO: 13913 - DNA, 506 bp, Oryza sativa
  ref <308>: DATABASE ACCESSION NUMBER: AK111261
  ref <309>: DATABASE ENTRY DATE: 2001-12-06
attccgcacgcctcgcaaggcgaagggaggggagagagagagaggaggggacgagaccgcggcgatggtgatgcagcaggtgcaggtgctgaaggaggtctccgccctcctacgaggcaaggagacccccgtgattctcgacctggaggaatcgcttcgggccaagggcgacatgacccagggtgaggaggtcaagatctatgcaagtaaggtgaccgcggtcctgtgcaaggccttcgccaccgcgacgtccgctttagtcgggtatcatgttctcggtgtcggtgagcgcgcgctcaacctgtgaatctgtgatgagatgccattatttttgcggtagctgtaaatgagaaaataagtagtatgtctggtgtcggtaggagacaccaattggcacgtcgaattctacgtgaagacgatagaatttgagtagactgaccatctaattgtgtacagtggatgtctcctttagctattgctaaatgatattttggattggaatgggt

SEQ ID NO: 13914 - DNA, 872 bp, Oryza sativa
  ref <308>: DATABASE ACCESSION NUMBER: AK111262
  ref <309>: DATABASE ENTRY DATE: 2001-12-06
atccaactacggaagcaatcaagctagccacgccggcggctttgcaagttcgcatggccgcattcccaactcgacggcgggaactgactgctcgccgccgcccggtcagcatctagccatccagggtaatggtagttggaaaagaccgatcaatcttgcttgctgcggctgtaataacccaaggagctgtattgaaaataacttgtggtcgagggccatcgtttcccccagcataaacaatggtaatccccttctggactgcatggagtgcaccaaatgaatcctcatcagcatgaattgagagggacaggatatcaactccatcatgaattgcatcatctagagctgctagcactccggcactagcaagctgtaggctattccctgtgttccatatgaccttatacacagcaagacgtgctcggggtgcacctccacgggctactcctgttgctaggccatggacgctgactccatctaccactgcaccagctgctatggatgctgtatgcgttccatgccccatcatgtcccgggcagacatgtaattcttcttaaagtcagctttttctatacctgcagcatagtaccgtgcaccaatgattttcctgctgcagttggttggcccccaggcctgtcctagttgacacacgcccttccatcgtgatggtattggtccgtatccatgattactgaagcttcttgattcaggccagatacctgcatcaattgcatatgttttccaatttacgcattaaggattttgcaagaatttgtatggccaaggtcttttcagatgatttggtgatattgtactaaccagtgtcaatcattccaataattacatcttctccatatttgctcctctgcag

SEQ ID NO: 13915 - DNA, 568 bp, Oryza sativa
  ref <308>: DATABASE ACCESSION NUMBER: AK111263
  ref <309>: DATABASE ENTRY DATE: 2001-12-06
ctctacatcctccaaccactccgtcggcttccacggcaacggtgaccaccgaccaccgcctcccgcttcatgcccaagtacccaatctggagactggagccactggacctcaggctcatctgtgacgaggagccagtcgagagagttggagtccgggagagcccccatgagaaggtattcgagcggctaagccgggatggtgccatctccaccgtcgccgccaccgtcaccgtcaccgtcaccgccgctgccagtgttagcctcgacgttgcctgggtgtccgacctcatcaactgaggctgtatgtctgatgtcactattggagcagctccaatgtgtgcagaaatcgaactgagtatatcggagacagcacactgggagagtcgattgttgtgtgtcagatagcaaaatcgatctccaaaattgagttagtgttagacaattaaagtattatttgttgctgatggggttgaacatattcgagcccaatcaaataatttacattctccccttaacttttcttgctgtatgtgagtcctataaatcgatgtgcacactgcagccaccg

SEQ ID NO: 13916 - DNA, 705 bp, Oryza sativa
  ref <308>: DATABASE ACCESSION NUMBER: AK111264
  ref <309>: DATABASE ENTRY DATE: 2001-12-06
aagcgacgcggattcgcgaggcggtattattcgttgtagagttgtactggcggttcggtcaaacagtcgtggaccgttagatcctggacggacggtcaggatcggacggcgcagggggtctcttccttttcttcttctttcttcgggaaccctctcgcgtgcggcggcggcggcggtctcggctcggcctcctcttccgcaccctcctccaggagcgcgagatccgagatggggaacactgcatctggggcgactgaagcttcagattcgacggaaaaaacagaacaagctcctccagctgacacaaaaccaaaaaagaagatctgctgtgcttgcccagacaccaagaagttgagagacgaatgcatcgtgcagcatggtgaggacgcctgcgggaagtggatcgaagcccatcggcaatgcctgagagccgaaggtttcaacgtctgatgccatgcccccatcataggcatagcaaagtgatattttgctcttgtcataatccgctttcgatcctgaaccaacatgatgaataaaagattctgttagatctctaggatgaactcgctgtttcactttcggaaaaggggacaagtcactgaacatgccaatttgcaagagggcatatgtctttttcctaagcaccattgatgtgcaattgcctcaattgatactgtacgaaagaaagcatgcttcttcttgtcc

SEQ ID NO: 13917 - DNA, 825 bp, Oryza sativa
  ref <308>: DATABASE ACCESSION NUMBER: AK111265
  ref <309>: DATABASE ENTRY DATE: 2001-12-06
aaagccctcaccatactgtgcgatggacttaaatgggccaagctgctctgcctctgtctgaaactgtgaaccaccaaaaacagagtgttcttctcgttccccatggctcttggccctagtgagctccacgcctccacctcggcgccgcaactctgcacgtctattcgtcgctggtagtgatgccgacgaaggagcccgtacattctcacctcaccgttggtcttgcctcccttgctctcctctctgacgggcgtgccgccgctgctctcctcacggtgggcttcgccgtcgtccccgtgtcctgtccatgggtcgcatcaccattgctcttctcgtcgtgaggatcctagagcgagtttactgcagatcaatgacatcacctgaagtatctgttggacatccacaagactgctctaatcaatctgaagaatgggacacagaggaagagtgctgtttttgatgcatcagaactagaattttgataattgttgaatggttcttttatggaaagctcagaagacttccttttttcaagtggagcttgcttcatgagtggccaccgaaggctgcttccctctattctatggcattatattgggcttgtcacttcaagaattattagactgatacaagacttgtgtagaaatttgtagtgcataatcaaatactgtttttctatgaattatgtaaggactcacgatgttcattgctaatatatgcttttgtgagtttgaatttggactcgggtaaaataagtgattttgttgtattgtatctgaactcactttctagcatatgaggttgatttacatgaattttcatatt

SEQ ID NO: 13918 - DNA, 1032 bp, Oryza sativa
  ref <308>: DATABASE ACCESSION NUMBER: AK111266
  ref <309>: DATABASE ENTRY DATE: 2001-12-06
agctgctgcacgagcggatgagccgataataatagacgagcgcgcgggcggcaaatcgatcggcatcctaggattcttggcatggcgatggggaggaagaacaaggcggcggagggtgcgaggtgccggcggcaccggcagcgtggcggcggcggcggcggcggcggcgcgggggtctgcgcgccctgcctgcgggagcgcctgtcccacctgatgtccgcctcggcgtcggcgtcggtgtcgctgccgtccgtcgtgcgcggcgaggaggaggaggcgtcgtcctgctgctcgtcgtcgagtgaggcgtccagcgacgcttcatcgtcggccgcgtcagggtccagcagcccgtgggcggcgcggttccaccgggagatggtggcggccggcggccgcggcggcgggaggctgtcgcttctgatgaggaacgagcgggtgttgctggacagcgacgaggtggcgagcgtggtgaggcggatgcgggagaggcggcggcaggcgaggagcttctgggcgaagctgctgcacgcgacggtgggcggaggcggaggcaagaaggaggggtgctcgatggcgcactccaagacgctggaccaggagaggagcaccacggcggcggccaagtggatccttttctgaggccgtgcaaatgcatatgcatgcatgcagcgaagcgatgatgtcaagatgatgagatcgtcagcgtgcgtcgctgtaaattcttcttggctttctagtttggttggaacttggaaaagtagatttgttgatgcggttttctctttggttgttttggttcatttctttgtttgattttggtctatcctgtacaggccggtttgaagcaaaatgacagtgatcgacattctttggttagctcttgctgctgtgtatagcaaaaaaatgtttctgaatattgtggctatttgttaacctgcttatacatacgactgttacgcctgcaccattatagatcatggacctgaagttaatcatagctgataagcaaataccaaaagtaatttgtag

SEQ ID NO: 13919 - DNA, 1328 bp, Oryza sativa
  ref <308>: DATABASE ACCESSION NUMBER: AK111267
  ref <309>: DATABASE ENTRY DATE: 2001-12-06
gcggcaagatgttggacgggtgcggcctcttggcgtttgcccgctgctgctgcgtgagaggcggcgagatggagagcgatgcacgcgtgtcggacgagccgggctgcggcggcggcggcggcggcggcgcggggtcggtggtggagaagggcggcggggtggtggcgaggcggttcgggtgggcggagatcgagtcggtcacgggcggattctcgtcccgggtgatcgggcagggcgggttcagcaccgtgtacctcgcgtcgctcacctcctcccgcctcggcgccgtcaaggtgcagcgcagcagcgagcgcctccaccgcgccttctgccaggagcgcgacgtgctcctctccctccgccacccccacgtcgtccgcctcctcggctactgcgacgaacgagatgagggtgtattggtgttcgagtacgcaccgaacggcgacctccacgagaggctccaccaccggagcggcgggaagagccggacggtgctgccgtgggcgcggcgcatggccgtcgcgttccaggtggcgatggcgctggagtacctccacgagagccgggaccccgccgtcatccacggcgacatcaagtcctcgaacgtgctgctcgacgccaaccacgacgccaagctctgcgacttcggcttcgcgcacgtcgggttctcggccgcggtccgcccgccgtccggcgccaccagggcgtggggccgccccgtcatgggctccccgggatacgcggacccgcacttcctccgctccggcgtggccaccaagaagagcgacgtgtacagcttcggcgtgctgctgctcgagctcgtcaccgggcgggaggccatctgcgcccagacggggcaccggctcaccgccgccgtggggccctcgatcggcgagggcaagctggccgacgtggtggaccggaggttgggaggtgactacgacgtcgaggaggccgccaccgtggcggcgctggcgctgcggtgcgtcagcgacggcaccgggctccgcccgtccatggcggaggtggtgcgcgagctgcaggagaagacgacggcgttgatctcagccgtcggatccaaaccaagcgataagatggtttcatgagttacccgtcgaaaggctgtaaatagcatgttagggaggctccaaaagttcatttttttttaccttatctcatcatcatcagtggattagttgaaactttgggatcaagtagaaaaattttgtgatgtcatgcatggatgcggttattgtaggcatgtagtggcccattaacaagggatcttgtacatgttgttgaaaagatatacatgatttacctaatct

SEQ ID NO: 13920 - DNA, 724 bp, Oryza sativa
  ref <308>: DATABASE ACCESSION NUMBER: AK111268
  ref <309>: DATABASE ENTRY DATE: 2001-12-06
ctagccgccgccgcttcatttctcccaggtaaggtaagccagccgccgccgccaccacctccgcctccgatctgaaaccctagcctctctcctccctcggcgccgctcacgtagatcttctcccgctgcttgttcgtgcaggaaaaagggctccccgatggcgccgtcgcagccgaagtccgggctcttcgtgggcatcaacaagggccacgtcgtcaccaagcgcgagctgccgcctcgcccgtccgaccgcaagggggtaagcgcctctgatcccgtagcacgagctgtttcagcccgacgagctgggcggtgatgcttgtccgtgtttgatctgtgtggatttagtgcgtagcttcgtttctctccgtagattcgtgttgtaggtcgagatttttgcatggatcctatgtatgctgcagagggcgtgatgcctgctagtattgactgatatagttgacccctcaaccttctcaatcctagtatgcatttcatttctgtctttttttccagtttgtatttagaaatggcggtggtactgtattttttccccttgtactattcttgctttgcctttgtatttgtgggggagcaagttttttttttatttcagcaattagtctacatgtgtaagcctagatattcattaaaatgatgggaatagtggttttagttcgttacaagtggtgatgatatgatgattaatcaaaaggattatattgct

SEQ ID NO: 13921 - DNA, 719 bp, Oryza sativa
  ref <308>: DATABASE ACCESSION NUMBER: AK111269
  ref <309>: DATABASE ENTRY DATE: 2001-12-06
ctctttgtaaacatctgcctctttcctctttcctcccctccccttcccttctcggcgacgccttcgagaggatggacggcgagacgctctcctgggcggtgccggagtgcggcgacgagttcgcgctctgcttccttgacgaggccgcctgcgccgccgtctccggcgccatctccacggtgacggcctcgcggacaggctcgccgagctgcgcgtggcgaggcaggagggtgcccccgccggaggtgacatcgccggccggcttgctgcgctcagcaggctcgccggagctatgcttgctgcgctcagcataggccggaggcgacgatgagcagcggctgcgcgacgacgggagcggcggcgcgacgacggcaacgacgacgggagcggcggcgtgacgacgacgaatgctggcggaggcggagcggcggctgcggcgacgcggctgctggcgacggcgacgacgagcggcggctgcgcgtcgacggcgacgacgacgggagcagcggcgcgacgacggcgactgcgcaaccacggcgacgatgaccatggatagtgtcagtgagagcttcaatggcatgaacaaggccagtgccatcgcccactgtccaatgatcagtgaaccacgtgatttctatctataatttcagtttttttagaattttccgttgtaatttgcgaaaacgaagggaccattaattatgccgatttgctgctgc

SEQ ID NO: 13922 - DNA, 829 bp, Oryza sativa
  ref <308>: DATABASE ACCESSION NUMBER: AK111270
  ref <309>: DATABASE ENTRY DATE: 2001-12-06
agatcgattcctctccttccttcggccttttctcgctccccttcctcctgcgcacgcgttctcccgatgcgccgccgcctcctgctcctcacgccaccgttctgtgccgccggccccgcaagggaccaccgcgccgccccgcctcggaaaccgcctgggcgccgccacctcctgccgccgtcacctgcgccgacttcgcgaggagccgccgcgtcgcctgccttgggaagccgccgcctgccacctgggagcacccgccgtcgaagtccggcgccggttcctcgccgggaaccgccgccgccgccgcaagctcctgcccgagctacgacgaacgccgcgccgagcaccacgccgctgcacgccgcctgcaatgacgcctccagccgcccgtgaactcgccgccccaaaccacgctgcccacgaaatcagagagaacgcagaacaaatctttgaaaaggcaagcaagaagtaggtgtacgtgaactatcaggtaattaggaaaacacatatggggagcattgatcaatgatctcctcgtcacccacaaatacctttaggcttggaagacatcaagaatacagtagggacacttgtatccaagggcggagacaagggtagagcagctagagcttgggaatttgatgaaactactactggctcagtataacggtgtttaggcatgtgtcttagggtttttaatggaacttcatgggttgttagatggcacgaacattgagtttctaattgttctatttgtatcagaagctacaacatgtaaagttgagttacattgtttgtcttcaaagtaaaagagacagaaaactgcccc

SEQ ID NO: 13923 - DNA, 661 bp, Oryza sativa
  ref <308>: DATABASE ACCESSION NUMBER: AK111271
  ref <309>: DATABASE ENTRY DATE: 2001-12-06
atacacacgtttgtagctcgctcacatggatgagtcgagtgacctccagtggcggcagggatggctcgccgtcggcctgccgccggcgccggtggtggcggtctccgccatcgtggggttcttcctctacctgacgtggcagatggacgagtacgaggagcagctacggcggcgcacgcaggccgggctgtgggtgctgctggtgctcggggcggtggcactggtcctgctcgggagccacgcgctggtggacgccggagggagggtcgccgtgccggtgtcgtggcggtggggcggcggctacggtggtagtagcggggacgacggcggcggcgcgtcgccgtgggccgtcgcggcggtggtggcggtgctgctggtgttggcgtcgcacaagccgtcgttccagatgttccggccgccgtggcactacaagtagctgcttcgcttcacttcctcaccctccccggctggcttaccctcgtcactccttttcaattttctgtacagaaaaggatttagttttctttttttgagaaggctaccacataattaagagaatacacgtgtaatagaagagttcatcttattttgcgtacgtatttgtagcatctagaatgtataatattattgttaccgataagagaatgcatatgttttatcg

SEQ ID NO: 13924 - DNA, 718 bp, Oryza sativa
  ref <308>: DATABASE ACCESSION NUMBER: AK111272
  ref <309>: DATABASE ENTRY DATE: 2001-12-06
atctggcccatttggtgccctaaaggcccgacctgacaaactatctcttctcttcgccctcgccctgccgtcgtcccgccgttctcccgccccgcctccggccgccctccgccgccgcctccctccccggccctccgcccacccgcccggcgaccgctgagcgcagtccacaggcccccgctccggtccctgtgctggtctcccgcgtcgcctggacagcaaaggcgccgccgaccggccaggcggcagagccgaaagcaagggggagtccatcggcggaggaagcagccacgccgcgggagaacgcgtttccagtgagaaaaaggtggatggatactcttcccccttagccaaatgcctcgatgtttttgattcgactgacggagctctgtacttctcgtcgtaaaatgagttttactggtttgattaggtgctaactttaacacctgatttccgctattgtggagatttattttttatcttttgacatgttgtaaccccgtctccaaattcctgcactagttatggcttgcttggccatcgagcgtgttggggacaatggagtgattggttcttgcttagtgtgggagtaatggacaatgtatagcaagagctgagctgtttcaatttctgttgattatcttcaaaagtgtagcggtgatatgtaaatagcttgaactgggaatgcttttgaagattcacttgcctgttactgtcc

SEQ ID NO: 13925 - DNA, 1012 bp, Oryza sativa
  ref <308>: DATABASE ACCESSION NUMBER: AK111273
  ref <309>: DATABASE ENTRY DATE: 2001-12-06
atcactcgcaacaccaaagcagagttagctagtactactacacttgcaacgctccatcaaaagttttgcatggacatggccatgtcgtcgcggctggctctgtgcctcgcggtggtcgcggcgtgcgcggcgggcggcgcggtggccgactggtcaccggcgacggcgacgttctatggcgggagcgacgggtccgggacgatgggcggcgcgtgcgggtacggcaacctgtacgaccaggggtacggcgtggacaacgcggcgctgagccaggcgctgttcaacgacggcgcgtcgtgcgggcagtgctacctgatcgtctgcgacacgagcagggcgccgcagtggtgcaaggccggcacggcggtgaccgtgacggcgaccaacctgtgcccgcccaactgggcgctcccgagcgacggcggcgggtggtgcaacccgccgcggccgcacttcgacatgtcgcagccggcgtgggagcagatcggcgtgtaccaggccgggatcgtgccggtgctgtaccagcgggtgaggtgctggcgccagggcggggtgcggttcaccgtcgccggcctcaactacttcgagctcgtgctcatcaccaacgtcgccggcagcggatcggtggccagcgcgtggatcaaggggaccaacaccgggtggatccagatgtcgcggaactggggcgccaactggcagtcgctcgccgggctcgccggccaggcgctcagcttcgccgtcaccaccaccggcggccagtacctgcagttccaggacgtggcgccggcgtggtggcagttcggccagaccttctccacctaccagcagttcgactactagatgatgagtaaaatggttcgtcattttaacggagcttagctagcaatagcaaagctgtacttccttccaccgcttattcctttattcctgtgctgctcgatcgtcacacgatcgatgctgataatctgtttcctaaatttttccttgattctattgccaatattaattatgt

SEQ ID NO: 13926 - DNA, 884 bp, Oryza sativa
  ref <308>: DATABASE ACCESSION NUMBER: AK111274
  ref <309>: DATABASE ENTRY DATE: 2001-12-06
agaggaccagacgcaagggcggcgctgctgccttctgcacgctgcggctgcgacggccgacggcgacgggcgaggggcgctcgctgcttgggcgcctgggtggtcggcgtgacgccgccgagccgaggtcgccaagacgccatcgccgacaccgaggctgccggccgcagcgccgccgagcagccgaggtcgcgaactcgcgaggcgtcgacggcatttgccgatttgcggcgttggcggcgagccggcgacggcgcgatggcgttcaggcattggcggctggtctgctactgctacccgtgctgctgcctgctagcccgtggtaagatttctaaacacggagttgcttctttgcatggcatccttcaatcctatcgattcatttgctgcttataacaaggaaaacttggttagcttgctcagttttatccaaaggacttcacagaaacagagttgttacatcttccctttcagcttactctctttatcaattttgttcgtaaagatgaaaggtttaaaaatgtgaaaaatctggttgagctttccaccatgcttgttgcaacaaagaagcacaccgcttatgaatttgtttacaagcttctcaaattggtcttaattcttcctgtggcaactgctagtgtagagagggtgttttcttccatgaattatgtcaagaacaagctaagaaatagaatgggagaacaatatttgaatgttgtttagtaacctttctggagcgtgatctttttgtgcaagtaacagatgatgacatcatttctcgcttccaagccatggctacccgcaaagttaaattgtaatttgtttcagttttcatgtaattcattcaaaccattttataatttagacatttttaccattgtgct

SEQ ID NO: 13927 - DNA, 579 bp, Oryza sativa
  ref <308>: DATABASE ACCESSION NUMBER: AK111275
  ref <309>: DATABASE ENTRY DATE: 2001-12-06
atcggtcacccgcccccgcgcgcgcgcgctgacaaacgcacgcacgccgctggttgttggcaatcgagcgtgcgagcgagagagaaacggaggaggaggggacggccggagaagacgacgacgacgaggtggagagatcggatcatgatgatgatgaagaagaaggtggtggcgccggtggagcgggtggtgttcgcgctgaacggtgagcgtcaggaggtggccgccgccgacgtggacccgtcgacgacgctgctggagttcatccgcaccaggacgccgttcaagggccccaagctcggctgcggagaagaagaaaaggacaccaccaataattaggaaaaaaaaagttctggctgatctaaagctgattgtattttgtcgcacaaggggcaaacaaaagcaaattcgatcagttgggacagcttgagattggtcatcagatgcaattttttctttgcaaacggatccagaggtaacgtatcatttgtgatcgtgcatgtgacatgctcctgtgccatgtgtgtgatgtgtcgataatggccctttttccgttggactttcagtgcatgtccagtc

SEQ ID NO: 13928 - DNA, 1010 bp, Oryza sativa
  ref <308>: DATABASE ACCESSION NUMBER: AK111276
  ref <309>: DATABASE ENTRY DATE: 2001-12-06
ctgctcgctcgtcggcgattctacgccgccgccgccgccgccgccgtgttcttgatttttgtctgccgcgcaaggtgaagttccagcttccaaggctcggctcgatccggaagccgccatgctgcgccacctgaagtcggccgcggcgaggagccccatgcgctcgccgccgccgcatcctccctccgcaccggcgccgagggacgaggggttcgaggaggaggaggaggaggaggagagcgcgagggccatcgccgtctccgaccagaggaccatctacctggtgaacatgttcatagcgaacacggtggagctcctcaactcgttcgcggcgcaatgcaatgacaagctttccctcctccacaggaaaatagtgaaactagactcatctctcaaccttctggaagcaaaactacgcagtattgatgacactaatgcatttggacattcaacaaaccaaaaggcacatggattattcacacaagatggaagatttgaacctacaaatttattgggtgaatcctctaggtctggtgatgcttgattatgctacactggaaggcaggcagcgtgaggaatagcctacctgctgaaggacataagggagctgacatgaaaagcatggaaaaagatggccatctgtgttggatcttttggagcaacagataattttatgcacaaagaagcttactggtttggtttggacaagtcatgttcaccttcagtctgtaaccatgcataagcttatccgggaattttgagatgctgcattgctctgtcctattttatcgtcctggggaggtttgcccaaaggtagtgaaattgaagggaagagtccaagaaaaatttacaggcattttgcctccctgagagagactgataccaaaagtttgagatgcaacatactaaatttatactgtactaactagtttttgactacggcatgtaaaaaacattttagctggacagaagtcatcaaattgctttagttttgccctcgttacagaggt

SEQ ID NO: 13929 - DNA, 941 bp, Oryza sativa
  ref <308>: DATABASE ACCESSION NUMBER: AK111277
  ref <309>: DATABASE ENTRY DATE: 2001-12-06
atcaaacaaacacgacctcaacaatggcgatctctagtggtagtagtagcagctccagtgccttcccctttttcctccttgcgctcctgtgtgttacggcggttgtgttcccgcctgccgccgcgaggaccttcccggatgacaagagcggcggcgccgtcgtcagtggcagcaagttctcgctgccgttcccgagtaaagccgccgggtccgggagtggctctggcagtggccatggtttcggttggatggtgtcgcacaacgggtccgacacgaccatcgggttcggcggaggtgttggcggcggcgtcgggaccagccgtggcggcggctcgagcgccggtggaggcgtcggcgtcggggtcggcgtcgacgtgggcagaggcggcgtcgatgtcggcatcggcgttggcggaggcggtgccgcaagctcggccgacggcagcgtgggtggcggcggcggagaaggcgtaggcattcacatcggccctggcggcgtgaccgtcacccacggtggcggtggcggcgcaggtggaggatccggcgggggtggtgcttccggcggaggtagcgggactggacgttccggcaacgccgtgggcaccgggcagggctctggaagcgcgaacggcggcacgggcagtggcggagggagtgggtccggctcagggcagggaggatcggctggcggcggtggcggcggtgccggaagcggcggcgctggcgggcatccgtgaggactatgtggttgcgcgcattgccatgtgtacgtgcgtcggaagcaaaagcttaatatgatgacgtcgtagttgacgtgtgctgtgttaatgtgtgagcttaattaattatatctgttaccgtgtgcagcatgttggtaggagtatgaattaagcgatgatgttatgttattagttagttaattaactgttgttcaataaatt

SEQ ID NO: 13930 - DNA, 722 bp, Oryza sativa
  ref <308>: DATABASE ACCESSION NUMBER: AK111278
  ref <309>: DATABASE ENTRY DATE: 2001-12-06
atctcctctcaacatattttcaatcctctcctccactcctctcttcctctcctctcaaaatcctctcctcaatctctctatctctctccctccgagtgggcggcgatgggcggtcagcagtgccaccgtcatccccttcctcaccgccaccgacgacgacgaggaggaggcgatcggctccatcccccccgacgccgccgccaccgacgaggcggcagcagcggttgatgccatgcggcgggcctcctcctgcccatatctggtgatggcggcgggagcggtcggtggctcggcgatgggagcagtggcggtgggagcgaacgacggctcacctcctcccgcccacatctggcgacggcggcaggagtggtcgacggctcggcgacgggagcagcggtggtgggagaggacggcggctcacctcctcccttgcatatctggcgacggcggtgggagtggacggcagctcacctcctcctgcctagatccagtggcggcgggcctcctcccacccagctccgatagcaggaccggacggcggcggaagcagcggtggtgggagggccttttcccacgatggcggcttgcctcctcccgcctagatccagcgacgcagtgggaaaaacttttgttgctatataaaatatcctaaaagatccatgaataaataggtatgatcgtgagtgatctacgaataaaatctatattgccttgtcttgcac

SEQ ID NO: 13931 - DNA, 575 bp, Oryza sativa
  ref <308>: DATABASE ACCESSION NUMBER: AK111279
  ref <309>: DATABASE ENTRY DATE: 2001-12-06
ctgggctccattgccggcccattgactgcgcgtcgatccccattccccacatggcgccgccgccgtcggggagcctcgccgcggcggcgaggtgagctgctgcgcccgcacctcctgcctcacgccccggcgacgcggcgtacttcgccgccggcggcaagcacctcgcgcgttcgatctggccgtgctcgccgcgctacggcgtgttcttcttggtcgccgacttgccgccggtggaagcaattgaattgtatgacggcgcctcctcgatcgaccatgggggtgaggtggttaggcgatcatcatcagcctaattaagttcgttgcaacttttgattcatacatgtatgttttggttaaaatttagttagtcactagtttaattctgtttgtgaatttcagttacaaaggtataagcatcattagcatatgacaatatgatattaggaggctatgaatctcagttccatgcacttttcattaattatatatgatttgtttcaattgtcaatcattagacagttgtttcagataggatataatcaagattatatatatgttttgtttcaattatc

SEQ ID NO: 13932 - DNA, 1499 bp, Oryza sativa
  ref <308>: DATABASE ACCESSION NUMBER: AK111280
  ref <309>: DATABASE ENTRY DATE: 2001-12-06
atcacgagctcccctccccacacaccacctcactcccactacgagagaggaggaagctcgcaatcatcgaatcaatggcggttcgccgccggcgacccggccccgtggcggccgccgtgctgctgctactcgcggtggcgacccaggcggcggcgagcccgataaagacggtggtggtggtggtgatggagaaccggtcgttcgaccacatgctggggtggatgaagcggctgaacccggagatcgacggcgtgaccggcggcgagtggaacccgacgaacgccagcgacccgtcgtcggggcgcgtctacttcggcgagggcgccgagtacgtggacccagacccgggccactcgttccaggagatccggcagcagatattcgggtcggacgacgcgtcggggccggcgaggatggacggcttcgtgcagcaggcgcggtcgctgggggacaacatgacggcggccgtcatgaacggcttctcgccggacagcgtcgccgtgtaccgggagctcgtcggggagttcgcggtgttcgaccggtggttcgcgtccgtgccgtcgtcgacgcagcccaaccgactgttcgtgcactccgccacatccggcggcgccaccagcaacaacccagagtacgtgcattattattaaccttctcctactatttccgcgtgatatcgcttttgatgattcgatatctatctttgggctggccgcgacaaatgcgttctgattcgatcgatatatcgtttgcgtgtggacgtacgtgatcgaattccaaccatcgtagtatagttatttcaatctgctgggtttggtggccaaaattattgatgatggatcaatggtgttcagactcgagatgagctgttgttgcacttgcacactaggatacgcacaaactaaatgcggccgtagtagttaaaagagttgcattttgaaccaaacagatgccatcttttgcttaatctgttcaattttggatagtggtgatagttatttttccttttagccatagtactgatagttctgctagcataattaaccttgtagaatctgaactgcggttgtacgtacaatatactgtgggtagtatctgaattttgaaatatatatactgcgggtagtatctgaagtactcactaagttcaggtatcagttgtcaactagcggtcaaattgcaccctttttttttttcaaagtcacgtggcgattttacgcctgcgcctctacacgcaattaaggggattctctgctgcaagcacaagctagcttcttctgctgacgtacagtagaaacattgctagagttctctctgtcttgttcctttccattcaaaagtacactaggatatcagagtcacacagagcagtcactgtatgtaccatttttgggcggtgctttgtgcttccctgtacaaaatctgaaagagaaagattgtactaggcagaaagccgacctaccaataccatagtaaagtttaaattcttgtggtcgctc

SEQ ID NO: 13933 - DNA, 982 bp, Oryza sativa
  ref <308>: DATABASE ACCESSION NUMBER: AK111281
  ref <309>: DATABASE ENTRY DATE: 2001-12-06
agcttagccattaaccacacttcactcactccacttctccaagaaacccacacgaacgacgatggcagcaagatcgtcgctgccatccttctgcctccaccagatcaggtcagacagccgccgcggcgcgccgccgtcgatacgcgcctcctccaccggcgctgccaatgatggtggccgcaacgacgacgtcgacggcaaggaggaggaggagaagagcgaggtggggaggaaggtgatggtggtggccgacggcggcagcgacgaggcgcggacggcgctgcagtgggcgctctcgcactccgtccgcccctgcgacaccgtcgtcctcctcgacgtcgtcaagagcggcggcgacggcggcggcaagaacggggatgatccaagcagagggtgccaacatctggagacaatgaggagtatttgcccggctaaaagaccagaggtacgcgtcgagctttccttggtggaagggaaggagagggggccggcgattgtggaggcggcgaggaagcaaggcgtgtcgctcctcgtcatgggccagaagaagaggtcgatcacatggcggctgctggtgatgtggatgaccggcggtaaaggcggcggcggaaggggcaccgccgagtactgcgtgcagaacgcggcgtgcatggcgctcgccgtccggcggaagagccggcgagggggagggtatctcatcaccacgaggcgccagagagatttctggctcctggcttgatcgaggtgtcccaagagcttacagtattgcatgtgtgtgacctaactatggcgtgttgtaggtgtctgttaccggagaggttaagttaattatagtggaataggcattcatgatatgagaaataatgcacaagatgagtgatggtgtttggcgttggattggtcgtttctctttcgctcaatttcaactctcttacaattcacacaaaaagattgagaatatatatagcttggtgaccattgg

SEQ ID NO: 13934 - DNA, 727 bp, Oryza sativa
  ref <308>: DATABASE ACCESSION NUMBER: AK111282
  ref <309>: DATABASE ENTRY DATE: 2001-12-06
tgcccaaattactacgcaccgcgtactgcaaaagaatgagctcggtggtgaagattggaccatggggcatgggccggggctcccagttgaccgagaactgtgacatcgcggtggctcctctgcgcctggaaagcatcaccgtgaaacatggcgaggttgtcgactgccttagcttctcctacagggaccgcgagaagctaccccacaccgccggaccctggggcggcagaggcggccaggaaatcacgataaatcttggcccgtcggagttcgtgacggaagttcacggggagtacggatcctactacggccacaacagcatagccaacctcacgttcgtcaccaaccgcggacgccatggaccctttggaatagtggacacatccggctgggatcgcttcagcgttcccatcaagaacaacagcagcatcgtcggcttctttgcccgcaccggcgattcctacctcagcgccatcggtgtctacgtcaggccattctgaatttctcatcgtcgtcaacagatgcctgccctggatgctgtgaatgtatcgctgtaaaatatgaatatccgcgttaattataatgccgggctgcgtccagggctttcccatttattttgcgtaggctgtgtgtctggttgaagttggaactgatctattgtagtacatgtaagttggaactgacctttgctttcagtaaagcgggaccaatttaaaaggtctttggt

SEQ ID NO: 13935 - DNA, 987 bp, Oryza sativa
  ref <308>: DATABASE ACCESSION NUMBER: AK111283
  ref <309>: DATABASE ENTRY DATE: 2001-12-06
atcagctgcaacaacaccactaccacctcccccataagcagaagcaactcgtagagccacagcagcagcagcagcagcagcagcaagtgtaagtgcaggagagtgagagcaagaagaagaagaagaagaagaagaagagagtgagaaaaccaagaaggccaccggttgctgctatgagacggccggccgggtcatcatcggcggcggcgttggcaatggccatcttgttgggggttcttgtgttgatggcactggtcatggacggcggcgagaagaccggtgcgccggcgatcgccgccgggaggaggatgctggtcggagcagcagacgcagggcagatgaggactctggaggatttcaaggccgatgatcctttccaggacagcaagaggagggtgcctaatggccctgatcctattcacaacaggggaaccggcaagtcaggaagatctccgggccgagcgtagcggcacgcatcccgaggcatggaaggttccgattcaaggaaggcaggcatatctgtggagcaaagagatggttgcattgcaaggaggaacaaaacaagaacaacattatgatggggtctggctgtggatgttggtgtaactagggggaggtggcctatatcttctgtaagcactgctatttaagacagttttaagcataaaaactttagctttttgcaaacaaaggctgttctagtggtggggaaggtttttttgtaaagagagcagtgagtattaagcttccctctcacaacaaaacaagcatcaaagattcttggcaaagggatgtgggcaagagctcccttcttttttggcactagtaactttagacatctaagtagtactttgtttcttttcttttttttttttttttgttccaggcattcattcttttcccttgtcactgtgtatcacttacaacatcatatcataagtttgcaacagagaaaaaacaggtcaggaaaggaccagcatttttttt

SEQ ID NO: 13936 - DNA, 619 bp, Oryza sativa
  ref <308>: DATABASE ACCESSION NUMBER: AK111284
  ref <309>: DATABASE ENTRY DATE: 2001-12-06
aaaaaaaggaaaaaaatccgcacacagcaaaagcctctccactacctctccctccacctgtcgcctaaaccctagctcgcatctcgaggcatctcgcttcacctcgtcgtcgcggtcgccggagccggagccggaggcggcggaggagatgggcaccggaggcggcgagggggacaagtcggccgtgctgccgctggaggcgctgctggcgctggggctcgaccagcgcacggcggagaacgctctggtcaacagcaaggtcaccgccaacctcgccgccgtcatagccgaggtgacgcgctgacgcttgctaccatcgctcgtgcgcttccaattcgattcgatgatgtgtggggtttttttcgcgtttgatatggcgtctatgagtatgggagtgggatttaagtgacttgatggttggaattatgctgaagcctgaagagatgtgcacaatctcgactaaaattatcttaaaagcacagttgtttagtcaatttccattccaattgggacattttgaggttaattttgttctggaggcgcccaaatctagtaatctactttctacaacattataatttgtttgcgctgacaaaatttaactgtctatatttacacc

SEQ ID NO: 13937 - DNA, 1057 bp, Oryza sativa
  ref <308>: DATABASE ACCESSION NUMBER: AK111285
  ref <309>: DATABASE ENTRY DATE: 2001-12-06
cagtttgtgaccttcatgaagcgctacatcaagaacctctccgccaagctggatgcggaaaagcaagaggaattcaagaagaacattgagggtgccaccaagtacttgcttggaaagctcaaggaccttcagttctttgttggtgagagcatgcatgatgatggcggcttggtgtttgcctactacaaggacggagccaccgacccaaccttcctttacttctctcatgggctgaaggaggtcaagtgctgagcggttccttctgctcgacactgatgttttatctatgcagtccgccgtatttttggtctagtctatggttgtcagttgactcgatatggtctaatgttggtgtcggaaacaactatcgtttgcttgttatggatgttgagatgagtccttttaaaaaaacctccggattattggattaaaaaaaaaaaaagaaaaagcccaaccctaaccctaaaatcatttccccgattcccttcctctctctcgtgaaaagcaatggcggcggcggcgattcgggcggagcgacggtggcggcgacgattccggcggagccacaatgattccaacaagcggcaacagcgcgaagtcccttcctttctctcgtgaaaagcggcggtggcgacaattccggcgagcggcgatggcgcgtagcgtgaagccacggctgtctgagccactcggatatcgtgcagcgaactgatgccacccgagcccggtctgatgtcatgcgtggcgccgtcctggttctcctccgcacgcagccaaggccgcgatgacgagcctcgacctcacacgacccccaaaagacgggcgcaaggccggtccaaggcgatggctagggtgcgtgcacggcggtgctgatgccgtgctcgcatcacatgatggcagcaatttgccaaatcggtaagtcatcaatccgattcgcttgccgaggttctaattttggggacttttcgatttagggtttctgaaatcatgccagtgtggaatttttgtatgttgtatattgaagttctcatggtgtaacacgatgtggtttaaattt

SEQ ID NO: 13938 - DNA, 657 bp, Oryza sativa
  ref <308>: DATABASE ACCESSION NUMBER: AK111286
  ref <309>: DATABASE ENTRY DATE: 2001-12-06
atctccacacactaaactagaacctgcttcacaacacaacacaactactacctgttcaactgctactactgcaacgagagagaaaaaacaatttcagtttcagaagagagaaaggagcaactgagcaagaactgaagaaaatagagagagagaagccatggagcaggggtacggctgctacagctactaccagcagtacaagagcagcggcagtttcatcagtggcaaggagaagaggccgccgctgaagagggggcagctgaagcggcagattgtgaggacgctcagcaacctcatggcgccggcgacgaggagcagcggcgacgctgctgctgctgcagactccaagaagaaggcagcggatcgcagcagcttcaggagagaagccagctacaactgaatcgatccaatcgaacagcaacatcatcatcatctgatactcagattgatatgcatattacttgtagtatattgcttgtgtacgtgtgctgtgcagtaggagtattccgtacgtagatgtgtatggatcgatgtagttgacatggtgacaggaaaagttgctgctgctagattgtagatgcccttttgttcatctttccctcaattttgttcggacctttcggagtattagtaatgaagatcaattttcttttgttg

SEQ ID NO: 13939 - DNA, 821 bp, Oryza sativa
  ref <308>: DATABASE ACCESSION NUMBER: AK111287
  ref <309>: DATABASE ENTRY DATE: 2001-12-06
attctctccccttctattccccgatccccttctcccagcgagcgtgagactgtatggcggcgatgacagagatggcggttcggtgaggtgtagcacgcgtgtgacgatgagcgccgagtagagtggcacatctgtgctagctggagggtgcgcccgtgggcagtgccaaaccatggcgtggcgtctgcggtccagcgaggtggacgcgcaagcggcgccgagcgtcacgtggcccggaccttgtcggcgggggagcgaaggccaaaggcggcgccaagctgatgcttcccatcccggttagtcggcgacggtgggggatctccaaggttgcgtgcgcacagcaaccgcgaggaggagaaggcaagggcacaccgaggagacgcatgggcaagcccgtatggcgccgacggcggcgataccgcttctcgacgagaccaacaccgcagtgaggtttcccggtagaattagggctccaagtccggaataaggttggtctgcatcggcacgaccaacagcccacaaagaggtgtgtcgattcctaaggcacaacacaacaacgccttgtacggttttagtctggtcgtcaatgttttctctcccagatcgtggttatctcaactcaccgaaaggtcgggccaatcagagctttgagcgtgtcaagtcgaactcagagtttatcaagtggtatcagagcaggaattctattcacaccctcccccccggatgtctttgatcctacactatcctagtccttttttgattgggtggtatatttatggcactgattataagccatggaagaagaaaaataatttatgggc

SEQ ID NO: 13940 - DNA, 799 bp, Oryza sativa
  ref <308>: DATABASE ACCESSION NUMBER: AK111288
  ref <309>: DATABASE ENTRY DATE: 2001-12-06
ctctccttccctcgctctgctatctccatgcccaggcccgcctcgcctcctcacgcgagccaccgctgtcgccgcaccatcatactgtcgtcgccatcctcctctcgctccggtcgatgcatccgccaacgaggaggccgggaccgtcggatccggtgaccccggcctcattgtcggtggatccggccgcccggaggcgaggggagaccggctatcaccctctctactcttctccttctacgtccggcaccgctacaacgacggccgcgcggatcgcgtgaggcaacgggtggctgctcccttctcttctcccttctatctccactattcctttgcagatcggcggaggcctgcaacaacaacggccgcgcgggcgagcaatcgaggaggccgggaatcaccagatccggaaggacggcggcccgattcggagagggggcaacccgatctgtgtcattgaggctcattgtaagtgtcgacggcggccgttccttcacagtgatccagggtcgttgggtctgttgagctcggtatcgacggcagcagtagctcgggcaagatggaagaaacgtgttagacacggcctcctccgagagcatacaccagcgacgtgcaggaggccgaggccaaagccgatcttccccaaccccatctggcattataacttgtaagtttttgttctttttggtgttcttggtagaccaatgaaaatggtgatggtctatcgtgcaaattgatgaaggtagggatgatatgatgtgtatattgagtatgaatgcatatgcacttttgcgtgtgt

SEQ ID NO: 13941 - DNA, 638 bp, Oryza sativa
  ref <308>: DATABASE ACCESSION NUMBER: AK111289
  ref <309>: DATABASE ENTRY DATE: 2001-12-06
caagacccgctattttcttctccagccgtcgtggcggcggaagcatgctcgatccccagccccccaggacctgagggtgggggttgggacgccgttgcatgtgacactcgatgaggagtgtccacgcgccgtggacgcattcgaccaccacgcttcacggctgcttcataccatggagctcctcggtcgccacaggaatcatttacctcttatggttggcttcaagctctacttcgctagctaagctattttcccaatcccatggaaaataaggaagcagagtacagctaaaggtccaagcagaggttttaacaccatggctggtagcaaatagtggcatgttatttttgagtgctacagtgatcttacaatgacggaaatatacctggttcatgggtatcaaaattaaccggctactggtaatcatccgaggtgctgtcaaatgacctacgacgccatttgtcaacatttttctagttgcatggcctcttggttgcccaaggatgtactcatatgtaggaagtattgttcagattcatctcagttgtagctgttcccgagattggtattgctagttttagattacattgttgtcaaattgattaattcaacatgatggtaaatgcattcagaaaacc

SEQ ID NO: 13942 - DNA, 900 bp, Oryza sativa
  ref <308>: DATABASE ACCESSION NUMBER: AK111290
  ref <309>: DATABASE ENTRY DATE: 2001-12-06
accgataggtgtgacacgtccccgtcgccaagcgccaccaccaccccttcgcgccgccgccgctgcagagcgccgctgccacccgctcgctctccctctcccacgccgccgcctccgcctccccctcgcgccgtcctcgtcgccgagcaccgccaccaccccctcgcgcctccgccacctcctctgtcgccgccatcgccggtcactcttccacctgcacgacatcgacctccacgcctgccggccgccccaccccgatgaacccgcctcccgtgtcccccaagcccgcgccggcggcactcgcctcagtggcgcagggggtggaggacgacgaggaaaaggcggaggtggatgacggcggtggcggcggcggctacgcgcggacgccagatttggggtgcccctactactacgctccaccgaaaaaggaggtggccgcagtagccatcagcaacgaggatatgcgcacgatgagggagcgggaggggatcccggagctggaggaagcggagacgagggggcaaagacgtcggcgaacgccgagacccccaaagcagcagaaactccgctcggagtggccaatcaagaagaggccaaagacgtgtgcgggctaggtggcggcaggctgtaggtggccgtgacgcagcctgggcacgagctgctcgcggtgctcaaggagatcgaggagctcttcgcgcgcgccgccgaggccggcaaggaggtcaccggcatgctcgaggccgcctcccgtgtcccagagctcaaaggtctcaccttaactgcgtctcatagcattttctcacatcgatttctctctttcttactgccacttactctatctgttagaaaacgatagatgaacggtgaaaacagtgaatcccttcaagttttattgatctc

SEQ ID NO: 13943 - DNA, 794 bp, Oryza sativa
  ref <308>: DATABASE ACCESSION NUMBER: AK111291
  ref <309>: DATABASE ENTRY DATE: 2001-12-06
acttactggcttccttccggcgagggcgaggcggagaggtgggcgcccgcctctgcctccgcctccgtctcgccgcgctccggcgggtggccgggccggggtgcctccacggcctcgtggaagccgcgctccggcgccgccggcagcaacgtgtgggcgaggctgttgctgcgagcgcccgcagagaccactccgcttttgaagggtatgttgatctcccccatttatggcagcggtttctgtttggttccgcgttgctgttcatgcgccagtgatggaggatgtgttattgcttattgaatttgattgtgatgtccattttgctatttactttcacgtgtatgtttgatagtagtcagcgcaagtaaacctggcatctacaaatgcagaagggaatcaagggattggattttgggatctcttccttttggggaatttttaggtgccacaagctaacatgtcctaggagctagaatgtctcagtgattttttttcaatgcataaaatcgatggttcatttctgcaattggacgattcattacatttttagcttagagaaatagttaatacatgaggtacaagagcgaattcctttggtttccataccgtgactatgattctgctttctgccatccgcaattcagtctaggataaaccgaatggctctcatattgttctcccatgtaaacatattagctgaaataggcactatctgaacccaatggccattgtctatcgatcccaatatctttatatagatgcagttatgattggctgcatggctttaatttctc

SEQ ID NO: 13944 - DNA, 983 bp, Oryza sativa
  ref <308>: DATABASE ACCESSION NUMBER: AK111292
  ref <309>: DATABASE ENTRY DATE: 2001-12-06
ctggcatattatgagaatatggtgaaatgcgttgaaatgatatggtgttttgcttgcatggtatgctcgtatggtttgattcggtaagagtttggtgcccagtccctctgtggctgtatatacagttattactgcctagtgtaaagtttcgaaattgaatgatgaatttgattcatttgttaattttctgtttatccgagtggtgaagttgcctcaggtttgctggttggcaaaactacagacgcgttggccgatttgttcgatttgcagaaatggatgtgtgcattagtagcagtagtgcgctacgtttagcacacgtagcagtgcgaactgcaaacccagcgaagtttcctctcgacgcggttgccatcgatcatcaaatcggtcgtttgtttctgttctttctttgcacttgcactgccactgcgggatgcgtattatttggctgccacatgcaagttcagacttcttgattccactgcggtcagattcggtaagttttcaagaggaagttatctgaagctaaaccgatttgaacatctacaaatgtcagtgatcggagccatccctctctacaaaggtataatgcattagtgatcggagccatccctctctacatagatataatgtattatgggccgttctggattgaagcctaaacgtgccctaccaatatttttgatagcttgaagagtaggcacggttgtttagtttgaagccaaataattaacattgccaatgttcaatttggcaatttctaaattctaatcaaagttttggcttctaatttgtatgaaaccaaatacaactttaccctaccaaagaaatgttagtgctaaaatttgctcaggttttggcactaccaatattttgattgggcattgttataactgtttgtatatacttgtatggacaatgttttaggaagaagctaagctaaaagaacatgtggttccaagtattaatattctttcctatcactc

SEQ ID NO: 13945 - DNA, 530 bp, Oryza sativa
  ref <308>: DATABASE ACCESSION NUMBER: AK111293
  ref <309>: DATABASE ENTRY DATE: 2001-12-06
acctcctcccccgctctccgcggctgctgtcccaatgcgcctccgcgcacccgtcggcgctactgcgccactacaggtgagggccgtccgtcggagccgccgccggtgctcccatcctcatccttcctttacttgtggggacggcggtggcggggagaggacgaatgcggtgcctgtcggagccgtcgccggtactccctacctcctcctcctacttgggccggcggaggcagtggtggcgaggggagggcgggtgtgccgccgccgccgccacattcagtaattaagatcaaatccgttagccttaaggcgttggatgtggtatatctagcatacagatgtacgaagtaggtagattagctactactggcgaaactggttatctagtcatgcgtactagtacatctctaaactatctattagtctctgcctaatgcgacgtgtatatatatatatattcgagagacaaccattatgtgtactagtttggcaccatgatggatgtggtatttctagcttacagatgagcg

SEQ ID NO: 13946 - DNA, 770 bp, Oryza sativa
  ref <308>: DATABASE ACCESSION NUMBER: AK111294
  ref <309>: DATABASE ENTRY DATE: 2001-12-06
ccccaccaagcatcacgaattttggacgctgagaacacgcagaaacgcatcagagaatccagggaaaccacgggcgattccgccgcaagcgaggggaatccgcaccggatctcgccggaggagtcagccggccgcacggcctattctacggcaccaccggatctcgcgccggagtagtcaggtcgacgcgcggcggcggcggcggagaagctggtgtggtgtggctgcgcgcggcgatccgatcgatcgaggagatggggaggggagggcacacgcatttccttgacgcgtgcttcctctgccggaagcggctcgccggcaaccgcgacatcttcatgtacagaggggacacgccgttctgcagcgaggagtgcaggcgggagcagatggaggcggacgcggcggcggagaggacggagaaagcccgccgcgccgggaagctgacacgtggggccccctcctcacgcagggaggtggagggcccacaggagcggggcaacagcgtccgggccgggtccatcctagccctatgatgtcgccgccaatgtagaagctaaatttgcctataagatctctcacctttttctttcataaaaccccatcaaatatagtcgcttttttacgtaaaaacgggtttgtgtttttgttaaaccctttggattgtttggtggcgtgttagtgtgtttgatgctgtatcaatcccgtgtgtaaagataggagaggaatttagagataataaaaatctccccaggttggtaaacagatcgttg

SEQ ID NO: 13947 - DNA, 859 bp, Oryza sativa
  ref <308>: DATABASE ACCESSION NUMBER: AK111295
  ref <309>: DATABASE ENTRY DATE: 2001-12-06
aaccacaaggaccagcaaacgtggcgtgacagagagatcgaccagcctccgatcaatgggattatttagttcagcgatggctgctcctggtctcgtcgctgtacagcctagatgatgagaagatgaacaggtcaatatgatgattcagttcaatttaccaatcatatatatggagatatagatcgatgcagctgtggaatatatggagtattagttcggtcgaaatttttcaaaatttttaatttttttcgtgaattttgataatatttgttcaaaaatttcggtgagatccgatcaaaccggctaaaccgaaaggtttaaccctgtgcagctgtggatgagcaaattataagcaaagcgatggataccagtcgtagacggtgggggagttgggctgcgggcggtcgaagaggttggcgccgaggctcttggtggcgaggttgctccccgggtggaacacgctcctccacacgttgctgccccgcggcgtcaccggcgtcgtcggggtcgtcggcatcgactgcgtccgcttgtacgccgccccgctcgcctcgccgtcgccatctaaatattcagaggtttagtgatggatcggagtcagaaattgttaagagacagtctaagatttctacgaattcatacatggtaatttaaaagaaaaagagcatgatttcgaaggtacaaatggaacactccggccggccagagtccagatcttaacactcgttaatatatataagcaatatttctggttacgacgctcttttaaatttgttgccgtccctgcttgtttgcttaataaaggtaatatattttctctgtttcatgttatgagaccgttctttattttgaatatctt

SEQ ID NO: 13948 - DNA, 975 bp, Oryza sativa
  ref <308>: DATABASE ACCESSION NUMBER: AK111296
  ref <309>: DATABASE ENTRY DATE: 2001-12-06
aaatacactcttctctgagcttcctcaagcttctgaaaacagcaagagattaaattatcgtaattttaagcatccaaggtgtttggtgccagtgctcgaggactggagatggagacccaggaggcgaagagagcagatgtggcggcggcgccggcgacggcgaccggcggtgaggccgtcaaaccggccgccggcgatgctggcgcagtaaccaagacgaatggaccttcagcaccagcaggcaaagctgcaactccaacgggttcggttgacagagacgccatactcgcaaacgtggagctggagaggaaactgtcaatgatcaaggcgtgggaggagagcgagaagagcaaagcggagaacaaggctcagaagaagatgtcatccatactctcatgggagaacacgaggaaggcagctatagaagcaaaactgcgaacacaagaggagaagctggagaggaagaaggcggagtacgcggagaagatgaggaaccaggtagcggcgatccacaaggcggcggaggagaagagggcgacggtggaggcgacgcggcacgaggagataatcaagtatgaggagatggccgccaagcacaggtccaaggggactacacccaccaaattcctctcttgtttcggctcctagaaccacaaaaaacgctcctgcagtgcagtctcctgtcctgtgtgctgatgcttctgtgtgttgatatggtgatcagtttgcagttttgggcttgtttctcttctttaatcttctgtgttgaagttccggatttcatggctctgtcatgctgctgctgtgttttccttttcgctgaagatgtgatcatcatgtttggtgagtgtaagcatactcaaaacacttgtaaacagtcagtcacatgtaaacataccaccttttttgtgaattttgcgcttccagagattaagaaaaaaagcgtgccaatttgttttgttggtgctttgtatc

SEQ ID NO: 13949 - DNA, 940 bp, Oryza sativa
  ref <308>: DATABASE ACCESSION NUMBER: AK111297
  ref <309>: DATABASE ENTRY DATE: 2001-12-06
ccaatgtgtgcgcgcggcacgctcgcacgcacccccgtgcgtccccgcctcccttcgcggctcacgcgggccgcccgccttcaccaattgcagcatgcgcgcatcttgcctcccgccctctcctcacaccgcccgcctgcgccaagccgctagtcgccacagccatgcctgccaatagtgctagtaggcgcccgcccgtctgcaccaatccagctgagaagatcgttggagcacaaaaaaaatataaaaaatgcgaaaaatatcagaaaagttctattttttttacaaataggacactcactatggagattttgaatcatccaaaccttccattttgtgctatcttttgttcttttgtgtgctagttcaattttcttatctaaacaaaatttgttcaaaatcaaaaatactttgtgaagtccacttttttttagcaaaactgcatgcacaaggtgtaaagaaggtaagaaagaattggagaatcccttttttattattcgtattttatgttatatgtatatttcttttgaaattccgtccatgtggttataatattcagcatggacgatccgagcagtctgtcattcaatttgggtgactttgaccctaattacctatcagcgtcatacataaataacgagtatgatgcctccggatcggttccaacaccgtcagttttggacgaggtaccggtggcttcagatggatcaggaactatgagcaggagtccatcgacgaacaccagctcaaagagatcacgaacttcggccgtttggcaacattttgatgaggtggctgtgacatgccctggtggaaggcaagtaacgtatgcgaaatgtaaaatatttaaacgcgacaaataatctgctacagaattttctactcctttatatctttaatttcaaaatcaaattcttggagtggaagaacccatctaatt

SEQ ID NO: 13950 - DNA, 775 bp, Oryza sativa
  ref <308>: DATABASE ACCESSION NUMBER: AK111298
  ref <309>: DATABASE ENTRY DATE: 2001-12-06
ggctccggcgggcgcgcgacgagaggatcgccgaagaggttggtcgcgccccccccccggcgcaaaatcgctccgatcgattccatttcaccccgatttctgcttcggattccagtctgttggttcccccgcttgaactcgcaggaatggtgggattgggggtttcgagggggcgcggggattagtagtcccagggtttagtggagatgcggtgctgagggtcggaggatgctgtggcgggggcggttgaatcgcgttgcggcggaatcaacagcttggtgcggcgtggtagcattgttctgtgttggctggggataggtgcagggtggttttcagtggaatcacgtattcaaggctttttttatatataaaaaaacgtggtcatggaatcaatattatcagcactttgtagagtctatgccgaatcttttgttgcttttggaagaatatatgatgtcagttgttagtgattttgcactgaggtgactggttgaattaggaaaggtctaagctgcctgctatgaggtaggcaagaaggctgcatgaatgatgaatcagtcaatatcagatcactcttgctggctatttggtcccaacttttactagttagataatgtcttaacgaatgcttccatgtgtaatctatttgccatagtaacagggcactaaccaatcactttagctgcaactttagggtttattatgtttccatggcttgatggtaatattgtcaaactgatccttcgtgttgtgcaatataagctgaactgttgct

SEQ ID NO: 13951 - DNA, 542 bp, Oryza sativa
  ref <308>: DATABASE ACCESSION NUMBER: AK111299
  ref <309>: DATABASE ENTRY DATE: 2001-12-06
actccatcggttgccacttctctcttccctcagcactactacgccaaaccgacggccgccgcctcctcctcctcctccccctcatgccgcgccgccatcgccgccgatggtcccggcgccgagccgtccccagcagcctctccacctcgtcgttgcgccgctgtgctggtcaaagctggcggtgtacgatgagggcgtggcccatgagcactgggccacgcccgagccgccggtggtcgccctcctcctctccattgtcccactgtgcccagtggcatgagatgcgggtgtagattatgagcagtacaaccgctgccgatgtttaccgtgctcacacaggtcacagcctcctgagtcctgacctacttattccttctgccggctgcaattcgtgtttgatttatgtgagttttttttttatctgtgcgatttctattcgtctcccttttctcttttccgttttggtttctatctctcagtccgtctgtgtagttctaaacctctcatatttgtaatatctgattttgtgttttctccgtttt

SEQ ID NO: 13952 - DNA, 768 bp, Oryza sativa
  ref <308>: DATABASE ACCESSION NUMBER: AK111300
  ref <309>: DATABASE ENTRY DATE: 2001-12-06
atccccattgcagaacctctctcccttcttggttcttcttctcatctcctcccactccagctctgcccctgagccaagaactgagcagcagagagctcgtggtctctttgccagcttctcctcagtcctcaccaagctgttcttgcagagaaaacatagccaaagagctaatttgagctcccaccatgaagtacgtgctggtgacaggaggggtggtgagcggcctcggcaagggcgtgaccgcgagcagcatcggcgtcgtgctcaaggcctgcgggctccgcgtcaccaccatcaagattggttagccattggttcttctccccctccgtttcgttcatgccccgtcttttttttgggggcatttctggcgcgagaatggcccgccgcgagcgtagaaaccaacaagggcggatttattttctttttccccgcggaaaagtttggatttttacgccttccctcgtctcgattgaaatttggaacccacagggttcagaaaggaacagtactactaccttgtttttgtcgttgcagttgtggagcaagtgttgtttttggggaaaaggaagcagcagcattcccgaatactttgggcgctgtctcctgtctgtggccgcgtggcaactgccagagtgaacacgtttggttgctggcgagcttatacatcgtgatgttaattaagctggaaatttttctacaaattaagctgaaatttgtctaaaatattatgctgaaataaaatgggctcaacgagcggctttgtgc

SEQ ID NO: 13953 - DNA, 763 bp, Oryza sativa
  ref <308>: DATABASE ACCESSION NUMBER: AK111301
  ref <309>: DATABASE ENTRY DATE: 2001-12-06
ataattggatggttagtacttcatatatactaacgtggaggatctcatcctggccggcgtcgtggcttcttggccggtgaagggctctccgcctcatcgtcgtcgtcggcctcctcgccgcaccgtcgttgctcgccggcgatctccttgatgggcgccacgtttaggtcgaaagcggcgcccacgctcgccgccgtcgctgcactggagaccgtcgccgacaccgatgggccatgcaagtagtggaacctcttgtgcccgcccagcgcctgcccggtggcgaatcctcgccggcacagcgagcagacgtgccgccgccgccgcccgtccgcctccgaggcggcgtcggcgtcggcggcgacgcggcctgatgatgccggagcagcagcaacgacgacgtctctgtgcgcgggcggcgccgccgccgccgccgatggcttgcggtggctcgccttgtgtccgccgagcgcctggtacgacgcgaacgccttgccgcagagcgagcaccggaagtggagctccggcggcggcggcgccagcgccagcgccagcgcggtgctctccccgcgcgccgcggcggcgagcgccatgaggcacagggagatgaggtcgccgccgtcggcggcgccgccgccttgctccatcacgtcacgctatccaacacacacagctcgtgtcgtgaaaattgaaggcgatacgtttgcatgcgattgcgtctgtccgtggtgtgtgctcttatttatgcgtgtaaaaaaacacgaat

SEQ ID NO: 13954 - DNA, 1078 bp, Oryza sativa
  ref <308>: DATABASE ACCESSION NUMBER: AK111302
  ref <309>: DATABASE ENTRY DATE: 2001-12-06
agtgcttagcctatattatccccctttactcgctcgatcctccaccccctcttctccacccggtggacgtgaggggagagataattctgcggagctcgccatgttggccatcctggtctctgtcgccttcgcccagatcctcgcgatcctgtccaacagtttcgcggtgggcgacgccgccgcggggtacgagtacgacggcgcggccgaccaccccgtcctgcgcatggctgtctccaccctgaccgtcgccgtcccggcgacgttctacgtcggcgtcatggagctctacgcccgcgtcacgccggtggcgccgccgcttcggcggctcctcgccgttcttgcgccggggatggcgtggatcacactctttcttggtatgccgccactcgtcgttctgctcctcggttgaagctgccgatcgaggcgcgtgacatggaggaggcaaagcaaggagagagagatcaacaccaaccactccttcgtcaacacgctctgcggttcggtgaaaattcttatcttatggctgcaccatttgcaactatgcaagaacacaataattctcgctcaacctatgttgagtctgggtgaattagcactgcatctacaagaacgggtcggctggctgccgttgcttgctattccatccatcccagtgtaacttagtacggctgtaacatattctaccactacgaatctagataggtagctatctagattcgtagttctaaaatatatcatattcgtgctaggttgcacttatattggtatggagagagttgcgtgtagtgctgcagagtctactggcaagccatagaacaaggttcctgagtcagttcaagtgtactactactgtactttcattgctagagtgagtccatcggtgtccaagctcagacatgcagacaagagtttatcctggcatcctgctgcctgctgtgtactaaggatttacagatagtatatgctcatacagcaatagaagcatagaactacagtacgtaaagtcattaaacagtgtgtaagtcattactattataccatcaataaaatcttatgccccaaatttactcttgtg

SEQ ID NO: 13955 - DNA, 580 bp, Oryza sativa
  ref <308>: DATABASE ACCESSION NUMBER: AK111303
  ref <309>: DATABASE ENTRY DATE: 2001-12-06
actgctcatcgatcgatcctctcctttgactgtagctttgcctagctaggctcacaagctcaagctctctctctctctcgattagcaatgtcgtcgagccggcggagccgtacatcgtcgagattggcggcggcgccgccgccgacggatgagcagatggcggagctcatctcgaagctgcaggccgtcctccccacccgcggcggcgaggccaatgccaagcaggcgtcaagtgccgaggtgctgcaggaggcgtgccgctacatccggaggcttcaccgggaggcggacgccctcagcgagaggctcgccgagctcctcctcctccagccgtccgatctcgccatcaacggcgcagatgtgcccgacctcatccgtagcctactcatgtaatgcatcaatatatatgctgtcggcctaaaatgttctctagcttcttcatctgtagtagcacagattaattcagcaaatgaaaccaaaaaaaaaaagagagttactcagagtaagccttgtcatctactatgtaattataagcaagcataaatcataattcatgtgttattgatcatttttatggagt

SEQ ID NO: 13956 - DNA, 1159 bp, Oryza sativa
  ref <308>: DATABASE ACCESSION NUMBER: AK111304
  ref <309>: DATABASE ENTRY DATE: 2001-12-06
caaaatgcggtgaattgagagagtctgtccgggtgtttgatgaaatgcccagtaagaactcagtttcatggaactccatcattgcagccttcgccagacatggacatggttcagaggtctatcagctgttcgaatccatgaaagctgacggtgccaagcccaccgatgtcacattcttgtcgctgcttcatgcttgtagtcatgttgggtcagctaagaagggactggagatcttgaattctatgtcatcacagtatggagttcttccaaggatggagcattacgcatgtgtggttgatatgcttggccgagccggcttgttagacgacgcaaaatcgtttatagaagatggacctttcacggacaatgctcttctttggcaggctttaatgggagcttgtagcttccatggcaactccgaagttgggaagtatgcagcagagaagttgctcctcctggaccctagttgtacggctgcttatgtgttgctgtcaaacatctactcatccgagggaagatgggatgatcgagccaaggtgatgaagaggatgagcgaaatgggcttgaggaaggacactggcaagagctggatcgaactcgagaaggaggttcactctttcgttgtcagatcaacatctcatcctaattcagctgctgctgttcgttgatgatgtgctgcatcatctgtccagtgatcaagacctgatggagaacaccgctttgtgaggtttcagagtaccgaaagaagtatgcaccctcaaagtcaaagccatagagattcgccgtctgagatgtgaacgactcaactgtcatcttcctccggtgtcgcgcgccgccgccgcaccatggacgtcgtcagcatcgtcgggctacaggacgacggcagcgagccggcaaccggagggtagcaagaacagcttcccggcggccagttcacgccggcgaaggtcgcagggtgaggatggcgtgacacgtacgccaactggaagatcatttctgcaccaacatcactgagtgacagagaccaggaggagccatatgtaattgtgtgacaacaacgtttcaatgtacaagtatccagagtgaagagcctcatgaaacaatccatatattttgccacaagtataattatcagagcagtatgaatctccttccgaac

SEQ ID NO: 13957 - DNA, 688 bp, Oryza sativa
  ref <308>: DATABASE ACCESSION NUMBER: AK111305
  ref <309>: DATABASE ENTRY DATE: 2001-12-06
cgctccacccagcgccgctgcttcccaggcagtgccgtcgctctcccctgcgcctgctgccacgccccactccggcgacccttctagccgccgccccgcaaccgtcgccggcctgaatcggtttcttggctcctcgcttctctgcccctaagctaatcccagccaccggtctcttgctgctgcagccgccgtggagatggccggtggaaacacagcgcacgcaactccggtggctgcatccctttcccccatagattaccttgtttgatggtcctactgtggctgtggaagactgatgatcatgtgactctctggttctacagcttcttctggaattggaagaatgcatgcttgaatcctgggcgtgcgtcccgtcgaagcgacagatgaggcactcttggtggatacctgcgaagaacctttacctgaatttgcaagtcgtgggggaggtggttttggcgctgtaaaaactccggacgcaactggtcgcttgctcgttggtggaggcgcccagaaagagataggctcgggtagcctctaagatggcttcgcccgcggcgtgtgtgtgctcgccttgttcttaacctgttgatcaccccctgcaattacttctctgcaagcatagcaaactgaaacaactggttgacagttttaaattccttattatcaactatgtcctgaatttcgc

SEQ ID NO: 13958 - DNA, 864 bp, Oryza sativa
  ref <308>: DATABASE ACCESSION NUMBER: AK111306
  ref <309>: DATABASE ENTRY DATE: 2001-12-06
aggtgccatgggccctctcctcaggaagctcgattcgcttccggtggctcccgaaatccggctgcctgagccactgaaggacggaatcgagctcctcaaggaagatctagaagaaatcggtgccgccctcgtggagcagtccatggtagattccccaagccacagggcaagatactggatggatgaggtgcgtgacctctcctaccacatcgaggactgcatcgacaccatgttttcgatgcgctgcggcggcgacgacggcaagcccagatccgttcgccgccacaaggttggccgtgtgaaggttgacggtttctccaagacgcagaagccgtgcacgaggctcgccaggatcgcggagctcagggctctggtgcgggaggccagcgagcgccacgaaaggtaccagcttggtgacggccgcgcctcgagctcgagctcgagctctcaccgcgtgttcactgcgcacggccaggttcctgcgccgtgcagaaatctggttggcatggacgaaccgaagacgaagctcaccaatatgctcaccgacgaagcagagctgcatatgaaagtggtatgcattcttggatcagccggtattggtaagaccacgcttgctgaacaagtataccgtaaacttagatggcaattcgattgcaatgcttttgtgcgggcatcacgaaaacctgacatgaggaggcttcttggggccatcctctctcaagttcagctgcgtatacggatatctgataccagcacggtgcagagccttattgataatctctgggagtatctacagaaaaagaggtaattaattaacgctatattcactgctttttaatactagttcagctactgagcatcacc

SEQ ID NO: 13959 - DNA, 743 bp, Oryza sativa
  ref <308>: DATABASE ACCESSION NUMBER: AK111307
  ref <309>: DATABASE ENTRY DATE: 2001-12-06
acatctccctacaaatacatatgcaagcatcgctcaagcactgatcgatcgcaatggccagatcgtcgccgctgttcctgctgggagccgcgctcgccgtggtcgcggtggcggcggcgacgctcccggcagcgacggaggccgccgggtgggcgccggtggcggacgtgcaggagctggtgatccagcaggtggggcggttcgcggtgctggtgtacagcctcgcgcaccacacggacctggcctacgtgggcgtggcgcgcggcgagacggaggcggcggcgggcggcgccggcggcaccaattaccggctggccgtcgccgtcaccaagcccgacgggagcgccgcgcagtacgagtgcctggtgtggggcgtgcccggctcccgcctcgacacgtggaagctccgcaggttcaggaggatacagttgccctgaagtacgtacgctgtacacacgacccgatcgatcgaacgacatgccaaactcaaatactcaatacatacaacccattacgacctcattatacatcgatatcggttaattcaagcttggatgagccgaaattaaactgtactagtagctagcatgatcgtgctctcttttcattcatgttccggtgttcgtggccatttctcgcacaagaggtgggcatgcaataaggtttctcctttgtcaggaggtcacatatattttttagtagtatcattttcacactcgagttatatatttgcataatgaact

SEQ ID NO: 13960 - DNA, 870 bp, Oryza sativa
  ref <308>: DATABASE ACCESSION NUMBER: AK111308
  ref <309>: DATABASE ENTRY DATE: 2001-12-06
aatcgccgaacttaccgccgcgccggccatggacgggcacgtccggcggctgctgaaccgcgtgtcgatcgccctggcggccgtcgccaccgccgcgctgctgcagctcttccgccactcgtcctcctcctgcttcgtcggctcccctgcctattcgtccctatcgctggcgcccttcccgcgcacctcgtgcgacgctgcgtcccgccgcgtcgtcgaccccaacctccgcctcgccaagctccggtcctcgccgcggtggcggcgccgcagcgcagccctctccacatccgtgttcccacgactccgccggctgcgcctcctccgcagatcgtcccgcgtcctctgcgtggccgcgggcgcggggcaggcggtcgacgcgctccacgtggccggcgttggggacgccaccggcgttgatcttgttgacttccctcccctggtaaggcgcgcggacccgcacaatctcccgttcttcgacggcgtgttcgacgtcgtgctctccgacgaaccgatggcgctcaccggcgcgctcttcccgtcccggttcgtggccgaggccgagcgcaccgtccggtggggcggcgcaattgctctcgccatcgaacggcatatcgatctctctaccgtcgcctccctcttcaaaaagtcacgcgtggcggcggcttggaatgctaccttggatggctcagcggcgaccatggtaatcttaagaaaaaatagcaacaatacaaaacagcattgatccgcaatcgtttactcttgtttacattgcaagttaatgtggtattgtatggtctttatagatttgttcgaaattggacaggataacttacgtgaaattgccaagtgaactactagttgtgattc

SEQ ID NO: 13961 - DNA, 760 bp, Oryza sativa
  ref <308>: DATABASE ACCESSION NUMBER: AK111309
  ref <309>: DATABASE ENTRY DATE: 2001-12-06
gactcacagtctcgctcgtcggagcagaagcagccaagaaaagcggcggccatggcggcggcggcggcggcggcgagcaccacgagcatgatgacgaggccgcagctgctccacctcttctcccgcttctccttcctcacctccctcccagaggtcaaggcacggatcgccgacgccgtcagggacaagcagtcttctttgggggtgcgattggaacagatgagcttagctagatatgaggctgtagcggtgaccaccgagatacaggaggagattctccgcgagatgggaatcgatccaagttttggtattggctgccttggaaaggtgaacgttatgtatgaggatgacatggaattgatggttaagttctatcagtttgttgccaaagaagagatggctattgatgaagctgagcttgaccctatagagtttgctgaaaaaatacatgctcagcataaattacaggaacagcaactgaagatgttgattcagatgagaaaatataacccagagagccaatccgtcatactcgaaactttgcgcaaacagttggagagtgctaatttcgataccgacgcgtcgatcttgactccggagcagatccaagagattgttgagaactagatcaaaaaaccatatcaacagctattgtgcatatgttctgtttaaatctgattgctgtacatttctattgctcatacaagatataccagcttaattaagtgttactcagctctcgccatggtttatggcatcc

SEQ ID NO: 13962 - DNA, 826 bp, Oryza sativa
  ref <308>: DATABASE ACCESSION NUMBER: AK111310
  ref <309>: DATABASE ENTRY DATE: 2001-12-06
aaaaaacgagccgtcgccgcgcgcgcacgccagggcacccccgcccacgcccacgcccacccaccacccctcgcctctcgttgcccgccgcgtcgcgctcacgagatcccagaagaggacgcacggcggagcgggagcggaagctagcaagcaagcaagcaaagcaagcggccacgaagccatggcggcgccgtcctccctcgcgtcgtcctcgcacctgtcccgccgcgccaccgccgcggcgtcgccgtcgatccctcctccttctccccctcctcctccgcagcggctccggtgcggctgggtcggacgcgcggcgccgccgacgcggcgcgcgccaggtgtttgctccgtggtctcgcccagcaagccaggtgttgctgctgttgacgtgccggccgcgacgattcctgacgcggcggcgaccggcgtcggcgtcgccgagcgcatttcggtgtcgtcgctgctggaggttgtggcggacgacttgctcaagcttaacaacaacctcaaatcggtgagcttcaccttttcctcccaaagtttgcatcattctgttcagcttgttcatgatacaagtatgattgaatagcttctctttctcctagcacatttggtacaaggctcacggttgctacgacatagtccaatacaaaaaaaaaaaaaagttgcactgattttgcttggaaatgtatcgaactgtgacagtttttagtccataaattttagaataaaaaaaatttgcacttagtgataaagttgtggacaatttaagtacttggttggttggctggttgaacaatatgttaatggttgtaacttctgg

SEQ ID NO: 13963 - DNA, 802 bp, Oryza sativa
  ref <308>: DATABASE ACCESSION NUMBER: AK111311
  ref <309>: DATABASE ENTRY DATE: 2001-12-06
cgccggcgcgagcagcatggccatcggcgagtctgcgtccatccacgcgtaactggacatcggtgttgtccttcatagccgacgcggccatcgtcctgctcgcggtgtggttcgtcgcaaaaaagggtcggtatgattgtgaccgccgtcacgacggtcagtgctttgctagctcttcaaatctttaggacacagtgtttgattggctcaaagatgattaactaggctgaatcgacagcaagcattctcatgttttttttcctttgctgttaactgaatgcaaaagcttctgttttgacttgtccattcaataatcactggtttgtgttaactgacgcaaaccattatttgtcttactgaaagttgaactgcgaaatgcatctatttctcatttcttctcttgcgaaatgcatctatttctcaatgccatgaacgattggacaccaccgccgctcctcggccaggcagttgcgagcaggccagccggcagcgggagcacaacgctgcttgagctcggccagctctatgtccatgctcccggccaggccgagacgcgtactcgccatctttggtcctgccatggatttaggatctgcgggagctggacgagagaagaagaaaagaagcgaggggttaactgcaaaattgtacacgacatgcgggcgtctttctgaaaaaatgccccgcctgaattgtatcccttagattagaatcggaaggcccacagcacccgagtgcatgagtgcataatgagcagtgtgtacgtaggatacattgccatatactacctccgtcccaagat

SEQ ID NO: 13964 - DNA, 1046 bp, Oryza sativa
  ref <308>: DATABASE ACCESSION NUMBER: AK111312
  ref <309>: DATABASE ENTRY DATE: 2001-12-06
tccgcgattcttgccactcgccaatcgccgccacacccaatccctaaatcctaccccgccgctgccgtcgtgccgccactccaaatccccaaaccctaccccgccccggcactgcggatccccgatctccgcctcgcgttatggatgccactgcacctcctccattgagacgagccaccatggaggctgtcgtctttgctcccccaccagatcgccatcctggcactgccagcggtggaggcggaggcggccgccgctgctgcaccggggaggatggccgcgaatggcgtgagctcgatatccaagggcggggctgtaatgaggaggtacacccatggaccatgacggaccggtgtgtgcagcggatgcgggcaaggagggaattgtgcagctggtaaggagaactcggaacctctggggctccttgaggagagggacaaaatcatagagttgagcggaaatgggccagaagctgcggctcgctaactggcagattgcgcaggcaaattcccatatgctagcagagcgcaaccttgggagggatagagtcagatcatggctctctgatcattttgtaaatcccgttaagttactttgttattgatggcatctttagcatgcagctgatttgtacccatttttttcctattgaagctaaaatcattgcaacatcagtttgcttgctcgagacctataatcatagccaaaatatcagaattggaggtttggagatgctcctatagtggctggaaattcagctggtcacagattaccctgctccttgcaataaatcaatctcccatggtattagattttttttctactcttccatcaataaaaacggtggcacatgattgctggagctgtataggtgaacgacggcacatgtgttcatacttcatgccggcacaggggcacgttgcagaaaaaaagagagaagtagatctcaggttcaatcgccgctgcaccccagggtctcacgcttatttgtagtcaaactaatgcagctccaaggttctgatttgatttcatttggttggctcggt

SEQ ID NO: 13965 - DNA, 1014 bp, Oryza sativa
  ref <308>: DATABASE ACCESSION NUMBER: AK111313
  ref <309>: DATABASE ENTRY DATE: 2001-12-06
agcgcggaaaattgatcaccaaaaaaaaaaaatcccaaactccccaaccgccatgtctcctcaagctctcctcctcgccgccgccgccgccgccatcgtcgtcgccggcgccgcctccgcggccggcggcggcgtccagccgaacggcgcggcgaacgacctcctcccgaagtacggcctccccaggggcctcatcccggactccgtagcctcctacagcttcgacgaggccacgggggagttcgagatccacctggcggggacctgctacgtctggttcggctcccacctcgtctactacgagaggagcgtccgcggccgcctctcgtacggcgccatctccgacctctccggcatccaggccaagaagctcttcctctgggtctccgtcaccgggatcgtcgcgcacccggaccagggcaccgtcgagttccaggtcggcttcgtctccgaggcgctcccggcgtcgcagttcgacgcggtgcccgcctgcggcgccggcgcgcagctccgcggcgctgccggggttatccgggagcttggcctgctccccgtggctgaggtatagcttcagatacgagctggtattcggtttaatcctgctgattaggcaaggtatttgaattggaattgtgcctctgatgttagtgctaagagatgcgctcttgtttagttcttagatattggcagaatactgatgtctcgtatacgtggtatctctgaaaatcaaagctgaggctgctcttaggggatgaatccttacaggattgtgcttttgctgctgcttagatgttaggatgcgtcatggaaccaccaatttgacctttggcattaggataggaaggttttgtttttcaatattttcagccggttattcttgatgtgattaggcgagtagcgtcctcatgatgatctttgatcatgtgggtctgaatggttttggatttttgttcgatcaaagcttgttgggtcaatgtcaccatcgtcatcagcatataggcccatacttcacct

SEQ ID NO: 13966 - DNA, 649 bp, Oryza sativa
  ref <308>: DATABASE ACCESSION NUMBER: AK111314
  ref <309>: DATABASE ENTRY DATE: 2001-12-06
aacggccggccggcgtgcggcggccggccggcacggcggcccctgccctttccttgaccaaacctcgagctctagcaaccggtcgccagcaagcacccgacagctgccgctctcgacaagctcgacggagcctcctctctcaccacacgccgttgtctccgtcttgcataagttgtttcgatccaattttctcagctcctttcctctccttttttttcttcgtagcgtgcagcacaagagcgcactccagcaagcagcgagcaccacaaggttgctgatgctccagcctccatcatgatgctgaccagcaatggaagtacaaatccaagcaagggctggaagcattggagaacaaacaagattagttccacttcagttctttgcggatgcagtttttcaagtttccactgttgttgcagaagcacgctagtatcaagtggtttagattcgttttcaagaacatgtgttgtcttttatgtttttatcgtttcgatctgagcgatgatagcatcagctcatcagcacatctgaagtgtgtatcatatgtttgtgagaggaattttttgtcaacttttcagctccactttgtactacaaaagtatatgtaaactgaagaatcaatgtaattgagtatttttctattgataat

SEQ ID NO: 13967 - DNA, 675 bp, Oryza sativa
  ref <308>: DATABASE ACCESSION NUMBER: AK111315
  ref <309>: DATABASE ENTRY DATE: 2001-12-06
gtgcgcgacggcagccgaggcaccgtaatccgcagcgagatacgcatgtcgatctgctactccgacccgccgggtccggggcccctccgctagatcgatcgctcgctcggacgagataggccgggttcgctcgcctctcgaccgagcgaacggcgcatcggcgcatgtgggtgcgcgcgttaggtgcgtgcaacgcctcgcgcacagcggtacacgcagcgcatgtgcccggcgatggctggcccgcctccggtcggttggccgccggtttgaccgaggttggtagcgccactggattggggcgccccatccgccgcgcgcttggacctgtggtggtggttacatcggttcgagaccgaggtgcatgcggagggccatgcatgcatgggtggtggtcgttcgcgatcgggcgccggatgtacgatcgatttgcgtgatccgaaacgttctgggccggtcggatcgtgatgctcggtggacggctgcgtttcccaacaaatgcttcgctcgatcaatggtggaaggttgtgtgagacttgagagagcgtgcgtacgtgcaaccctccagcccgatccggcgattgtcgtggctgaccggtcgcagattggctgaggatgcggctgccgctttgtagttctggaaccgatctaatcagccagttctaagttgcattc

SEQ ID NO: 13968 - DNA, 624 bp, Oryza sativa
  ref <308>: DATABASE ACCESSION NUMBER: AK111316
  ref <309>: DATABASE ENTRY DATE: 2001-12-06
ataattgatgatgcatgtgggtgaatgcgatttgtggattgaaggatggatgtaaacgtttgtgagcgatatatattggatgcagggaatgaacctgaaaatgacttgtaacatttgcctggcagccggcggcttgatctttactgaggacggaggaggaattacgttagctcgagagatagagagactactcctgcagggaagtgaggcgaggaggaagaacgaagcaattaagcaggaaggaaggagagagcaacagcgcatgtattgtatgcagccggagcgccgaggatgcggcggcgccggcattggggcaggagaaagaagaggtcgtccaacggcggagacggagacgattgattgggttcccgatgggccgtttctgacattcagcccacggcccaaaaaccaccctccatcgtgccgctcttcttcctgggccgaacgctctcccatctcttctcttaaaagaaagcccaccgttatttgtctgtccatcgagaggattttagttttttttttgttttctcggagaaaaatgtagaattttttgtttcagaacaaaatgcttgcgaaagaacgaaaattgaaggagaaaacgaaggactgagacaattgaaggag

SEQ ID NO: 13969 - DNA, 1327 bp, Oryza sativa
  ref <308>: DATABASE ACCESSION NUMBER: AK111317
  ref <309>: DATABASE ENTRY DATE: 2001-12-06
aagacacacaaaaggaacgaggttcgtcgccgccgccactccaccccataaaccctaaccgatcgagggggcgcagccagtgacgggaagtccaccgccgcgccacgcctcgtcgttgacaccgtcgctgctgcaaccgcatcaccgccatcggaaccgagcacatcgtcgccgccgtccacgtcaagcccgcgacgacaacgacgatggccggccggacttcctcttcctcaacaacgactggtcacaaccctaaatcctcactccctctttgttcattcatctattgttgttcatccattgcaaatagaaccacccgactagatctaagcctaggtgatccaatagacaactctaacaatggtatcagagccatcctagcgtttagtttggttcggggatagacatccacagagaagaaagaaatccaaagagaaaagcaaacgatccaacggatcaaaaagatcgaaaccctaaccctaatcttacctcgtcgccggccgtcgatgacgccggccacggagggggggaggggcaaagaggcaccgccgaggagccactcgacggccgcgcgcgcacccgcgggtgcacgcgcgcgccggcgagggggcccgtggcggcgccgccatctccgtttttcggccgccgctctctctcacacggtgggggctagagacggtggggggagcggagaagagaaaaggaagagggcgcaagggccgctggcggcggcgacgccgctccgctcggccgctccgcccggcggcgcgctagagaaaaagtggacgcgcggcggcgcaagggtcgccggcgtagatgacgccactcggcgcggccgcacccgcccgcaagagagaagaggctagggtttcggccggccggcggctggggtcgggttttttttgtccctccgatctcagcgcccggccgtccgatcgaaaccctagcgatcggacggccgacggcggccgggccgaaagcggcccaagtggggagcgcgcggcggcggctttcccggcccaggcccaggttgcggcctgggggaggggagggggcgctcacccgcgcgcaaggtggccatgggccgaccggcaaaggccggaaaagttcaatttaggtccctcggggccgaaagaaaaagaaaagaaaagtttaataataggtcctctcagaagctttttcaattatgtataattattgtgattatttctaagcaatttgaaccaacgtgaaaattgtttagagaatagataaatgtgagaaatgcttctgaacatgtattttgtatattttcatgcaaattacaatagaattttgaattgttttt

SEQ ID NO: 13970 - DNA, 799 bp, Oryza sativa
  ref <308>: DATABASE ACCESSION NUMBER: AK111318
  ref <309>: DATABASE ENTRY DATE: 2001-12-06
gatcacatcacatgacggcacatgcgctcgccgccgggtactcctcgtacacgaacttgccctcctgaacgagccggcaacccttgcaccctctgcacgacgacggcccagggcagcacaccgcctgcatcggcgccgccgccggccacccgccgccgcggcaggtgccgcacccaccgcagtacgaggggcctccgcatggccacttcggcgccggaacgccgccccatggcgggagctggtggtggtggtggccagggacgaacgctggcaacgccgccgccggggcttcgcactgcggccactgcgggtggacgacgccggcgccccagtgggtggggtcgctgcacggccacgggtagcagatgccgcacatgttggtgaactgcaggttcaccgtcgtcgacgacggcgccggcgtggccttggtctcctccttcacctttggcttctcctccttcttctcttccttcttgccttcctccggtttcttctcgtcgcccttcttcttctcctcctcggatttcttcttctcctcaggtttcttttcctcaggctgcttcttctcctccttcttggcctgatccggcttcttctcctccttctttgcctctgcaagcttcccaaattcaatgtctttgatgaccccgcaggccttgcatcttagcttatgggcgagctcctctggcttgaaatggcccgatatgatcaccctattgttcgagttctcataaacgatgttaatgatcttctccttgtctgcttcatgttcgttcaattcaaaccacagcttaatcat

SEQ ID NO: 13971 - DNA, 701 bp, Oryza sativa
  ref <308>: DATABASE ACCESSION NUMBER: AK111319
  ref <309>: DATABASE ENTRY DATE: 2001-12-06
gtctcagccgccgcgccgcccccccgtcgaccgcgatcttccagtccgcaccccgccgcgatggccgacgccggcaagcccgaccccgcgtcgccgccggaggcgccgtcggcgaagaagggggtcttcatgcgccgcatcttcccgttcctcctcgccgccaacatcttcatcggagtttacgtatttgcaaagacctacaagagagaccaggaaaagaagaacgctcagactgctgctgctgcagctgcagttgtagcattgtcatccccagctgccccagctgctgagactgtagatcctactcctccaactcctccacccaaaagagtgcttccaccaatacccgaagacgaacagcgccaggtctacaagtggatgctggaagagaagcggaagatcaagccacgcaatgctgctgagaagaacaagatcaacgaagagaaggcgcttctcaaggagttcatcagggcagagtctcttccccgtttgtgattagcatctcactggctgccctgctggccttgtttttttttttcttttgcctgctgttccatggaaggacatgttctggattttacacttgtctcttgtttgttggcagaaacggtagcattttgtatggtgtcaagtaatcatttgttacccaaaatactgagtcaagtggctccagtttcagggaactctggcattttaacatc

SEQ ID NO: 13972 - DNA, 525 bp, Oryza sativa
  ref <308>: DATABASE ACCESSION NUMBER: AK111320
  ref <309>: DATABASE ENTRY DATE: 2001-12-06
aaaaaaagaaaaaaaaacagggggatcgctcctgcaagccctagccgccacatctcctgcgtcctaccaccgccgccgctgttcctgtctccgccggcgccgccgccgccgccggttcagccgtcgtcgtccttcgccaccccatccgctcgtctccttggtgagctgctgctgtgttcttccctgctgttcctgttttccctaatgctgccgccaattggatctgttctggtgttggtgccgctgcctgtgcatgctaacgttcctgctgctgctcatgctatagtgtggcttgctgcttgacgctgctgcatcgatcagagacgagaaggctccagacagcacaggaagcagttgaacaggagtaacaagggaaggaaaaggtagaacaactttggggaatttcagcgatttcgcagattagggaaatttgttgcaaagtagtgtttctctgcaattggaactttcttttagtctctagatgtaaaagatttcaataggaattaattcgttggcagtttgtgc

SEQ ID NO: 13973 - DNA, 865 bp, Oryza sativa
  ref <308>: DATABASE ACCESSION NUMBER: AK111321
  ref <309>: DATABASE ENTRY DATE: 2001-12-06
aacactgttcccccaaccctctcttcctctctcgctctctcccctgcccttgcgacggcgccgccctgtgttctcctcgccgccaacggcctcaccgccgccgccgccgcctttgttcccttccctgcttctccttgccgacgacggcctccccctccccaatctggtgctagctagggatgggatcgaggagggaggcggcagggaacgtagcagcgagaggcgtcagtgggccgcgaggcttgcgccgcgagcccccatagccgggggagagaagggcgctaggaaggggagcaggcggcagggagagcgagggaggaggaagggtggcgtgggagcagtcctttcaaggcactcaagacagcgccagctatgtccggtgacggtgtgctctgtctcgacggccggggctcgaggtcggtggcgaggcagtccgatggatttgcatctcaggggtcaggatggatggatttattgcagaacggatccatcaatatatttgccgtcaccttcatgcattcctctgtgattaggaatggagatctgagagttgatactatttgttgcgtactaagctctatatggggaaattttgcaaattttttggtgcagaaaacatgagcagaaggagatattggatgactgacgaactcacttcgttgccgaagtaacattatttgatctcttcaggttctctcccctctatcattctaccatttattctttgctattttgttaggctatctagcagtaaaaatttgtgcccttttataatttcctcaaaatgctggaaactcctattctgattctctgctgtttcagtggcaataatagatctgggtttggcaaagttccattttctact

SEQ ID NO: 13974 - DNA, 692 bp, Oryza sativa
  ref <308>: DATABASE ACCESSION NUMBER: AK111322
  ref <309>: DATABASE ENTRY DATE: 2001-12-06
aagacaaacccagcaacaatggccaagaagctcctcgccgcggccgccgccctcctcctcctcctcgccgccgccgcgcaggcgctcgcgtcgtcgtcgtcgtcgccggggagcgcaaacctcacggcgacgccgacggcgtacgagatggtggagcggtacggcttcccgcgcggcatcctcccggagggcgtggagtcgtacgtgctccgccccgacggctccttcgaggtgcgcctctccggcgacggcaacggcggcggagactgcgagttccgcgtgggcgacggcggcgcgtacctgctccggtacgggcggcgcgtggccggggtggcgatggaaggctcgatccggtcgctggagggggtgagcgtgaaggtgctgttcgcgtggctcggcatcggccgcgtcgaccgcgccggcgacgacctccggttcttcgtcggccctctctccgccgccttcccgctcgccaacttcgccgactgcccgcgctgccgctgcggcttcgactgcgacaccgccgccgccgccgacgtgatcgccgcttcttgatcgaacgtgttcttggcgttcctcgacgtgtgctcagctgatgcaagctcgaatgcttcatgccactgagaatctgtacaaattatgtgctctttgatccattaataatacagattggggaatggatttgatcgatc

SEQ ID NO: 13975 - DNA, 782 bp, Oryza sativa
  ref <308>: DATABASE ACCESSION NUMBER: AK111323
  ref <309>: DATABASE ENTRY DATE: 2001-12-06
aatctcccacacctcccaatctcctctcagccgccgcccttcctcccgggctcccggctcccgcgagacgccaccacgggggcggggcccgcgtgtggcggacggcgacggcgacggcgacgacgggggctgggccgcgtgcggcgaatggcgacggcgacatcgggggcggtgccgcgtagggcggatggcgacggcggttgctcggcggcgcgaggcgacgacttgcggcttgcggcgacgagcgtaaccggccgcgccgccgtcggggcggccgggtcacggcgacggccagcgcgaggcgacgtcgtgtgggtgcggcggacggcaacgccggcctcggggcggccggatccggggttggcggccctggagccgcgggatccgacgtcgtgaggcgacgacgacggagggggctcggcggcgcgaggggacggcgtgcggcggacggcgacgagcggatccggcgtgcgacgtgcgacggcaacggcgggaactcggcggcgcgaagcgacggcgtgcggcggacggcgacgagcttttttcaatgttttaatttggatttttctgtttattatgattcggatatccggcaaaaacggtcggatagtttccgaccgaatccgagttctgacggataccatcgctactgtatttgaattcgtatccgagaaaaactatctgaattcgtatccgaatccgaaaatatctgaaaaaatccgaccgcaacaatccgcatccgaaaaacaggatcggaactcggaaattatccgtaccacttt

SEQ ID NO: 13976 - DNA, 821 bp, Oryza sativa
  ref <308>: DATABASE ACCESSION NUMBER: AK111324
  ref <309>: DATABASE ENTRY DATE: 2001-12-06
agcactactgtctcgcgagaaaacttctttcattgttttgtaactaagcggtgtcactcctcaaagctacacaagctagctcatcctgaaattctcagacaacctgagctcagctagcgctgagctgagctccatggcgtccaaggaccaaaccgcatcctcgtcggagacgacgacggcggtggcggatgatacctccagccaacaagacgcaccgccccacccgctgcaggtgacttcgccggattcttcgttgccgtcgccgtcgccgcggcaacgccggtgcgtggcggcgtacatggacctgacgcgggaggagtgcggccgcctcttcccgtcggggcggctccgctcgcagccgctccgcctcgccgggcggccgttctacctcacggcgcgctgcaacatggaccagcgggacaccttccgctgcttcggcctcttcctcgccatggaggtcgacgacgaggaggaggaagaggagggctcgccgtcgccggcggcgagcgtcaccgtggaatacgacttcgccgcgaggacgaggcagcagtcaggggatgagttcgtcagcatgtacaaggggcactacaccttcgccgccgggaagtcgtgtggataccggaatctgcttgggatgccatgggcgtcgtttatgggtgatggtggtggtgacagcgtgttcttcatcgatggggtgctgcacttgagggctgaattatgtgtcaaagaagatgcttaattagatcgatcgaattaatatggatatattgtacggcgttcgtgaattgagaatgcttcatagccttttgaaaaaaaaaaag

SEQ ID NO: 13977 - DNA, 1000 bp, Oryza sativa
  ref <308>: DATABASE ACCESSION NUMBER: AK111325
  ref <309>: DATABASE ENTRY DATE: 2001-12-06
cttcaacaagaaataccggttgctgctgttgctgccctgcactcccatgttcttttcatttccctccctactgtctctggttctctgctcctccacttcagagcagcacaccggctgctagctagccaaagccactggatcgaacagtcaacagtgtgctagctgctgcctccttggtggtgtgtgtacttctcccatgtcgctcatgcgaggcggtttcggtttctccccggcggttgcggcgctgtactgcgctgctctcgtggtggccggcggcctcgggagccggccggtgctcggctgctactcgcgcatcttcagcttcggcgactcgctgacggacaccggcaactacgtccgactgacggccggcaggaagcccagcagcccctacggcgcgccgccgtacgggaggaccttcttcggccgccccaccggccgggccagcgacggccgcctcgtcattgacttcatcggtgagcgaaccgagctgccctccgtctggtttcagcatgcattcccctgctccgacgtgtcgatctgtccgtgttcccaccatctctgcgttgcttttgcattgtgcagcgtacatccctctgttttcctgccaactactacgtactgtgcgtctgtgcattgtgcaacctgcatgcatgctctgtttggaggatttttttttggaggcgcctcaaacacgtactcggtggcctcttgttcagttgtccgtcaataacatccaaacttattattgtcctgaaagacgggtaacatgcgaggcgagtggtgtgagcattagaacgccgacaatagctcattctccctcctgtcaaaaaaaaaacataagagtatcattttttatataggtaggttatatgtatgaaaattatatatgtaaatttgactcaaaaggtcctttcataatactattatactacctccgtctcaaaagactttattacttgctaaaataaaatctttttgagtggaggcagtaattttt

SEQ ID NO: 13978 - DNA, 1289 bp, Oryza sativa
  ref <308>: DATABASE ACCESSION NUMBER: AK111326
  ref <309>: DATABASE ENTRY DATE: 2001-12-06
tggccggtcctttggatccagcattccagtgattccgtcggaactgagaccgagacgacgcccgcactcctcctgcgggccaggggtgtcagcagcacggcggcggaggagcggagcaaggagggagggagccacctgatccacaggagcgccgcggccaagccgcccccgatgtgtggctctcccggcgcaccccgatttcctcgcccccacctcggtcctcgacgcgacaacgaccagtagcaccgccgcttctccgccgctcgctccgactccgagccttaaacccttctgccccccacttccgcgacctccggaactccaccagcagcagtcacgcacgtctctctctctcgccccgcgtcctccacatggcggcgtccaccacctgccctgctcgctccatggcgtccgtctcccgagccctccgcccgcggccgcacgccgctatcgcctccgccgccgtccgcacggctgctcgtctcggtacggcgctcgttggagcctgtttggaggagacttttgcttcttttttttttcccattccatccctctgagctggatgttggcttgtacgcagggggcggattggggatcgtttgttcgatgccaagctatggtaggaaggagaaggaagaatggggattgaccattgcgtccgcaccggcgaccactgctgctccggctctgaggtacgtgccgtatgagcacctcgtcgatgtttattgggtccggggaattgctttccttaggtcgtggattacccaattacagaagagatcagggtttgacttggtcaacacaaactgcgtttgttgagtgttcactagtcacgttgtgctaattggaagtaggtgctgcaacctttctctgctactttaaccaaaagtcccatctgaagctgcaaaggctgctgattgggggttcaacaactgcagcttattgtaaaaggagaatcctgaatatccttctggtgatgtgctccaaccaaggtcccatgtggtcacagaacttaaagtttttttttcattatgaacacttccctttggaagtataggtatcttaatgttatcatgaaaacacagtaacaactctaaaatactggctttagtcatttagtatgagtaatgcttttgaaggaagtaaaatgtaaactagaagggatgaaattgatgaactattcaataaccatatagaatgggtatgctgcatgtggtgaatttgaagtacatggtatacgctagcaactgatcaattctcaaatttcctctaaacattgctatagatgc

SEQ ID NO: 13979 - DNA, 867 bp, Oryza sativa
  ref <308>: DATABASE ACCESSION NUMBER: AK111327
  ref <309>: DATABASE ENTRY DATE: 2001-12-06
atggtgagcaggcacacgcgagcacgagcaaggaggagaggaagtcgctgtgccggctgatcgacgcgcggaagctgacggcggaggcggcggcgcacgccgtccagaacgaccgcctccccgtgcgctccgtgctgcaggtgctcttctccgagcacggcaagctcaaccgcctcgccgagctcagcggcggtgcctcctccttcggcgcgcccagcccggcgtttgacctccccggcgcccgctgcccctccaagcgcgaggtgctcgcccagcaccacgagctccgccgcctccgcgaggacttcgcccgcctccaggtccagtgcagcgcgctgcaggctcaggtggacaggctgagcacggagaggaggcggcgcggcggaggcggcagcggtggcggcggcgggttcttcaagtggagcacgttctggttcggcggcatgagcgccgacgtcgcgcgggtggaggactccgagagcggcatcgagcggcggacgccggcgagcgggaagaagggcaggggcggcgccgccggcgccgccgccgcgacgccgacgccgaaatggcgcaagtcgatgtcatgagaggatctgaaattctgaagccaaagctgatggctaagtgggtcgttaatctgttttactacctttaattacagtcagttacctttctgtctgaactattgtttgtggtgaaaccattcagataaatctgctcacttgagtgcataaataaatctgtgatgttctaaaaagagagggaagcatataagatttctggtttggtcgaggacgaaatggacttaagaatttagtttctcttcataaataaatcaacaaatagttgtacaacgccagtatgatc

SEQ ID NO: 13980 - DNA, 980 bp, Oryza sativa
  ref <308>: DATABASE ACCESSION NUMBER: AK111328
  ref <309>: DATABASE ENTRY DATE: 2001-12-06
tgacgcgtacagccgtacacccattcctccacgctgtttgctccccgcgcgccacgaagtagagtactccatctcccaacgattaatgccaagtcaacaagcaacaattctttttgtcgaacaccagcaagcaacaaatcatccagtcagcccgaacacagataatgcagccgtcgcaacgatcccgccggccaccgaggttgagccgccgcaatgccatccggcagtcggcgtacgtggcccggccggcgtcacagctctcgccgccgtcggagtcggaccaacccgccttctggtattcgacggaggaatccgttctggaggaaagggttgtggaagatgaggtcggagatcatgcagaggcaggtggagccgaggcggccgcattggtggtggaggaggcgtcgacttcgagctcgtctgcggtctctgtccacgcggctatggtgatcaggaggagcatcttgaattggagtaagctggatcttatcggggccggatcgtccggcagggtgtacaaagcggtggctgaggatgggtttgtatttgctgtcaaagaggcttcgttgattggtcccgaaagctatacgaagcaaaccgcatgtcagctaaagcaggaaatcttgcttcttagtcggttggagcacaagaacatagtgcagtattttggtgccaaaatgggagaaaccgtgctatgtattttccttgaatttgtgagtgaaggttctttggtatctgtatatgagaagcaacagctggaggaatcaactatatcatctttatacaagacagatcctcaatggattggcttatctgcatcatcataatgtaatgcataggtgataacacattatctccacaaaaaaattcttgctgctggcccggtcatttgaaaatgtacttgttatagtagtgatcaagttaagtacagatgtacaactctcgatcaaatgactaaatgagtgaagtacttctttgtc

SEQ ID NO: 13981 - DNA, 932 bp, Oryza sativa
  ref <308>: DATABASE ACCESSION NUMBER: AK111329
  ref <309>: DATABASE ENTRY DATE: 2001-12-06
ggcgatgacgacgccatggcgctgcagatactcaacgccatcacgagggccaaggggaggagatgttcgcgcgggagaggatgtgtgatggaacggcagcggcggtgggtgcgcaagggccggagcggcggtggtggcggtggcaatcgggaggacgggagaccagatggctgggtgcagacacgctcctaggcgacgcaggtgcggcaatagatgcctgggccattaccgagcaccaccgccaccccggatcaggacgcgcgaggcggccatgccacgggcccaccacacggagcgtcaccccagtcgtggtctctcacctccgcgccgtgcctgaggcccctcgaggaccgccttcacgcgcggggcacgccgcctgtgccgtgcccctccttcttacgtccttgcagcggaaacgaatagccgacgctcagtccacaacgccgagttcctgcatgtcaactatcgactctgtcttggcaagtgacgcccttgacgccagcgccatgggcgaccttggcaagctatccacctgcctcaacttcctcccgccgccgcggcccatcaatgacttctggcgaggaagctgcatatccgaccaatccccactcgcccgaccattctgccaccagtgacggggtggaaagggctggggtctgaggagagccccaccgtcgcccatcatcatcctggcgtcgtggatgtcacgccaagaaaaaagtggggcaagagagagggttgatcggatgagaagtgagatatattagtagagagaggaagatgacaggtaggcccgctttattttttagtttatgtgatgacttggatgccacgtggatgccacgtcagcaaaaccgctgagggagtcaaattgtacctgttttaagagtttgggggtcaagatatctgattttatggttgaaggtcaaaac

SEQ ID NO: 13982 - DNA, 551 bp, Oryza sativa
  ref <308>: DATABASE ACCESSION NUMBER: AK111330
  ref <309>: DATABASE ENTRY DATE: 2001-12-06
agcggcatccattgcaagagcaaaagcatcgtggtcgtcaagggagagagagagagaggtcgtcgaccccaagtcaatccggagctgtgtcacatggcggcggcaaatcgatcgagcttctccgtttctcaatttgctcagcctttccgcccgccggagtctatcgacgctggcgccgggagcagtagaagtggtggcgcgcggtaccagctagctgcgacgctcttgggcgccatcggcgtcctggtcgactctggcggggaaggctagcctagctttctcgccggggcatatccctcctcaatttccgcccggctccaccgccaccggttagcagcgacgggggctcttccaattactttgatgccaccggccagcggcagatggtcctcatcgtatgctctcggcggccactccactttgatcttcttctccatggtcaattttttctggatatatgtgatatacctattatttttttctagattcgtagaattgggatatatcacatcgatatatttttggacggaggaagtagcttatgttggctc

SEQ ID NO: 13983 - DNA, 619 bp, Oryza sativa
  ref <308>: DATABASE ACCESSION NUMBER: AK111331
  ref <309>: DATABASE ENTRY DATE: 2001-12-06
acggccaaaggtgcaagtggatgatgggtggcacaagcggagagatgcgagcggctgggatggcgatgcgagtgtgggtagcggggacgacaggagttgtgggcagagaagcttcggatagcgcaggcagtggcatggcacgagcggcggggtgctccagcgatctctctaccagatccagcgcttctctgtcttcactctggcaaatttccaccaccaaatccggtatgcagctcctctctactgttactcccctcatggtatgcagtccggatggtggcgtgagtttgattgggagctcgacacttggggatgatgggatggagtatttggtgaggatgctcttatggtctcaaaaccattccgtccctcaactgtagaactgtttgattgacgattggttttcaacatgccatgcaactatattttggaatggatctagtagagaattgacggggcccactttcatcctactgaaaatcaaataggagtagtcatttgcattgcaaatgggatcgctgttatagactgttaagactcaaaattcaaaatgctgccatgaaaattgatattggcttctttcgaatgcaagaatcacatgatatagcttaatttccat

SEQ ID NO: 13984 - DNA, 1221 bp, Oryza sativa
  ref <308>: DATABASE ACCESSION NUMBER: AK111332
  ref <309>: DATABASE ENTRY DATE: 2001-12-06
accgcgcctctccgccatggtgtcgaggacgcccacgaagcagccgctgtccccgctgccgagggcggccagcggcagccccaccaagccgacgccctcgccctcgccctcgccggcctccgccaggcgccgccgcgtgctccgccgcgggagccccgggaggatcaagtcgctcgccgcaacgttcgacacctccctccgcggctgccgccgccgcctcctcaagctcttcgcccgcctcgccgtcctcggctcccccaccaagcgccgcgccgccgccgccggcttccgccgcctccgctccccgccgcggtcgccgtctcctccaacgcccaagccgaatcaggtagcggccgtctcgccgcagctcccgctcccgctcccgccggtgtcgccggggaggaggacgctgttcctggacctcgacgagacgctcatccactcccagaccgacccggcggcgcgggcgcggcacgacttcgccgtgcgccccgtcatcgcgggccaggcggtcaccttctacgtcgtcaagcgccccggggtcgacgcgttcctcgccgcggcggcggccgcgttcgagctcgtcgtcttcaccgcgggcctccccgagtacgcctccctcgtcctcgaccgcctcgacccgcgcggcgcgctcttcgcccaccgcctctaccgcggcgcctgccgcgacgccggagacgggaggctcgtcaaggacctcgccgccacgggcagggacctccgccgcgccgtcatcgtcgacgacaaccccaacgcctactcgctccagcccgacaacgccgtgcccgtggcgccgttcatcgacgacgccgacgaccacgagctggagagggtgatggggatcctgtccatcgccgccgagttcgacgacgtccgcgacgccatcaagcgctacaaggaaatcgtcgaggcgagctgaagaagaagaagaaggtgtggctactagcctactactaaatattagcttcttaaatcagtttcatggcagaaattttccccctttcttgtaagatccttgaattggttagggatttgggattcatatagtggtggctacctgaacctttcaggatcttcctgaaaggcagattgtgggaatggattatgtggctcagaagcttcagcacaaactgaaactggaattgggaaattctagaatgctgagaatgttatgaaattggagaacaaattttgttttct

SEQ ID NO: 13985 - DNA, 811 bp, Oryza sativa
  ref <308>: DATABASE ACCESSION NUMBER: AK111333
  ref <309>: DATABASE ENTRY DATE: 2001-12-06
gtgcaataacgatcggacggtgaatccgagagctcccaccgcttcgagtccgtacgccgccgccgcgccggagttcgccgtgctcccgggcggagacaaccatggctgctccgcctcgcctcgctccctcgccggccgtggcgcgagcggggcagcagggtaggcgccgccgccatccacgccggagagagagagagagagagggaggcggagaggagagcccccgcctcccctacgacgctccgcggcgcgagaatgcgagatcgcggcggctccgccatcgatccctcatcgtcgctcgcctgctgctggcccgcccttgccggctaggtggctggctggctgaatccacaagcagccatgatcgatcgggttggtggtggaggaatggaggatggttttgggtgctctcggtgttgggacagagacaggaggaagaaaatggctggttcaccgggccatctgatctgacgattactggtatgtgttctacttcctgacagaaaaaatgaccaaacattaggatcatgagttcgtttttctgctctctggagtcactgcaaagatgaacaatgaaaaagaaagctcatggatggtctatttagctagattatgacatacggaatcaattcgatgtatgtacaaaattcaggtagtcctatgagaccatctaaacatgttctagattgtaccacctctgttccgaaatataagcattttttgttaggaagctggacagagggacgtctagatatgttgttagaaatgtttatattttggaacatatggattagaatatagtttaccagac

SEQ ID NO: 13986 - DNA, 1376 bp, Oryza sativa
  ref <308>: DATABASE ACCESSION NUMBER: AK111334
  ref <309>: DATABASE ENTRY DATE: 2001-12-06
cggtgcgcaactcggcggtggggatggtgcgccaggcgctcgtgctcggcggcgtggcggcgcccatgctcgtggcgctcggccgggagcggagcttctggtcgttcggggtgttcgggctcgccgtcggctgcctcgggctgttcgccgtctgcctgccggagacgagggggaggagcatgtcggacaccatggaggaggaggagcacaaggaggccgccgccgccattggcgacatggatagcaatgccgacctcgtgtagatcgatcgcctccaactcgcatcttggcgccggatatttgctcgatcgtgctggtccatgcgaagctgtcgctcgcgtgtaagctactgtccacttgcacaatataaacaatcaattcatgtccactggtgcatgcatgaaccatgagaaaaaccagtagtagtaactccgaactagtaaagtaagtcgattaggacaatataaatcatgaataactcttaagttattaagtttgaaaatataaaaagttatatgaatagatttgtcttgaaaaatacttttataaaagtatacatatatcacttttcgataaatatttttatataaacgagaagtcaaagttatgttttgaagaccgtgtcggtgtccaaaatggccttctttactaatatagactggggaagtaagctgctagtagaagtagtacggagggagtatttgcattacctggaagtccacatagcgaccaattcttgtctgcattgacttagatctgatctgatcccaaaatatgctgggaacatctctccaggattaaaatccatattctctagcgcatagtactgatcatatctatttgatagtagtggaatattcatttaggctgagttttttttatgacttccccaactcatctatctttgttttccacacaaacgctttcgaatctgctcaatgatgtgttttttttaaaaaaaaaatctacataaaagttgctttgaaaacatattgattcttttttttataaaataaactagttcttaactaatttatcatgtgctagtgagtcgtttcgctttgcggacgcgagtgattagttcccaatcccaaatgcatgcagtaagattagataatttatagtatccaaccctgcaagtaaaatgtgctttgcgtgaaagactatcggtttaagtcagctatgttgctgcgttaattaattttaggtcctgaactttcaggggaaaaaggggagaaactaccccaaaaagggagaaactaccccaagcagttgttggctttgttgctatgcaaggtttatttagttctgtatgacagccaatttggaatatgctcaaaccatttgtttaacatcaatgataagcaagttgcttc

SEQ ID NO: 13987 - DNA, 602 bp, Oryza sativa
  ref <308>: DATABASE ACCESSION NUMBER: AK111335
  ref <309>: DATABASE ENTRY DATE: 2001-12-06
gaatggtctggattcgcctcgtcgcgtgatcgccatcgtctctgtagacagaataaaaaaaaatcaagagggggaggaagccgagggaggttttcgctgagatggagatgggtagggacgtggatgcagggcagcagcagaggcggctggtggtggtgcacagccaggtgaggcggatcaagcaggaggagggggagaaggtgaaggtggacgagacgtaccagcaccaggtgtcggagatgcggcggatggtggtgctccgggacatggaggcgaggcagcgctcccgctcgccgctcgggagggccgcccgcccggcgatctccatcggcggcgactcgtgaggcgtacgtacgtgcgccaccccattgccggattggatggagacgtacgggcgccgccgcgatctccttgagttttcttctctcgtcatggttagacccgactgattgagcagccgaacatgagcagatgtttttttaggatcattctttggctgtactgcgtacattaatctttttattttattgtcgtcgtcgttgtcgttgagacaaggaaatttcagttcttaggattaatggaaagttatatcttggttctgt

SEQ ID NO: 13988 - DNA, 1362 bp, Oryza sativa
  ref <308>: DATABASE ACCESSION NUMBER: AK111336
  ref <309>: DATABASE ENTRY DATE: 2001-12-06
aaactttgttgctggtggtggtacagatattatgcatcctttgaatgaggcaatggcatcattgtcaagtgctcatgatgtgcttccacaaatctttcttatgactgatggatcagttgatgatgaacataatatatgccaaactgtgaaaacggagctcatcagcagaggatctaaatctcctcggatttctacttttggactaggtttgtattgcaaccactatttcttgcgcatgctggcatcaataggcagggggcattatgatgctgcatttgagacaggatcaattgagagtcaggtacttaggtggttcaggaaagcatcgagtacaatagttgcaaacatctccattgatgctacagcacatcttgatgaatttgaaatcgattctgaatacattccagacatttcagcaaaaagtcctttatgtatatctgggaaataccaaggcaagttcccagatatggttacagctaaaggttacttggctgacatgagagagatctcgattgaacttaaggtgcagcatataaaggatataccccttgacaaagttttggcggcacagcagattggccttctcacagcgaaggcatggctttcttctgacaagcaactggagagaaaggtggtgaaactaagcattcaaaatagcattccttcagagtacacgagcatggtcctacttcaaacattggagaaggtagatgcagcacaaaaggtcaagcagaaactgaaaggtcacaagggccccgacgaacctcgacggatcccgctccaatgcctcaagctcgggttcggcgaccgggccgccaccagggagaacctcgtcacgggtttcggcgacgtgaagccgctggagacgttcgagatcctcaacaaggccgccggctgctgcagccgcctcgccgactgcctctgctgcatgtgctgcatcaaggcctgcaacaagatgaacgaccagtgcgccatcgtgatgacgcaggtctgcgcggcgttcgcctgcctcggctgctacgagtgctgcgccgagctgtgttcagggtccgactcgtagccgtctggttttgtgtttgtaatttggggagagaggagagtattcgagtgtacatagatagagtttgcgaagaagaaaaaaaagcccgtgcatctccatactgtacagcttgatcaaggatggtcacttggtcaggcgatcaggtcggtcgttggttgtacaatttacccatgaaaaagccatcaggtttcaggtttggacctctccaaagtccaaacgttctggtgctggtttagagacatttgtgggttatttggttttgaggaatcaagccatttatgggatgatgggggcgataagat

SEQ ID NO: 13989 - DNA, 543 bp, Oryza sativa
  ref <308>: DATABASE ACCESSION NUMBER: AK111337
  ref <309>: DATABASE ENTRY DATE: 2001-12-06
gttagcttggttaattgttagctggtgcgatcgatggccggcacggcggagtcgccggcgagctcgtgcgtgtcgtcggacgcggaggaggaggcggcggtggcgaagccgatggtggtggccgggtgcccgcagtgcctcatgtacgtgatgctctcggaggaggagcagcagcccaagtgcccacggtgcaagagccccgtgttgctgcacttcctccacggcgccgccgccggcgccggcgccgccgccagcagcaagccgccctccaagacctagctcctccatatccggttctcaatctctcccagatggtcggccgccgtccgtcgtcttaattctaacgcatccatgtattatgtttaatttttctctctcgatcgctagctagctgtagttccctttttctagtagtagctgttatgtttttttctgtcattcgatctgtgtgtctttagttaatctgcacctcctctgtagcttggtcgatcgatcaggttaattttgtcaaattagcactattagctagctagtagctagacc

SEQ ID NO: 13990 - DNA, 932 bp, Oryza sativa
  ref <308>: DATABASE ACCESSION NUMBER: AK111338
  ref <309>: DATABASE ENTRY DATE: 2001-12-06
attcaaccacgctttcagccttccaagctctacggctcattatttttccatctccctccttaatttagccaagctctacactgctcgatcaatggcttacgggaagaggcctcggcagcaagccgaggaggcggcgttcagcctgttcgacagcagcgacatggcgcgcatcatgctgctcttctccggcgcccacggcggcggcggtggcgcggcggcggcgtcgccgccggagcggatgttcgagtgcaagacatgcaaccggcagttcccgtccttccaggcgctcggcggccaccgggccagccacaagaagccccgcctggcggacggcgacccggccgccgaggcgccggccaagcccaaggtgcacgggtgctccatctgcgggctcgagttcgccgtcggccaggcgctcggagggcacatgcggcgccaccgcgccgtcatggcggacggcctcgggcttggcctcagcctcggcctcggcatcggcgtcgtcgggcagagcgacgacgacggcggcaagaagaaggccgcggccgccgccgccgccgccgagctggtgttcgacctgaacgcgccggcgatagaggaggagccggatcgcgccaggccggcggggctcgccgtagagttccccgtggtggttgacttcccgtgctgacattgacacagagatttacttctccatacaagttttgaaaattaatttacagtttacatttatacgctacccgagaagtcaaccctggagacattagctagagagattccgtcatacatattttttccctggaaatgtattcggatgattataatgttttcagggcctatatattgtattggttgacttatcgtggtacttatagtcggttgtccttttccctttcggtgctacatattttattctacctgtagtggttgttttc

SEQ ID NO: 13991 - DNA, 911 bp, Oryza sativa
  ref <308>: DATABASE ACCESSION NUMBER: AK111339
  ref <309>: DATABASE ENTRY DATE: 2001-12-06
caatcttgttctggttttggatttgaatttgtggttaacttttgtttttgtttttgtttttgggtgacaggtgcactcggagatgagcaagagcgcgaggaagcggctgtgcagggtgatcaactgcaggaagctgtcggacaaggcgtgcgcgcacgcggcgcagaacgagctcctcccgctgcgggtggtggtgcaggtgctcttcttcgagcacgcgcgggcggcggcgatggcgggcggcgcgcacgccgcggccgagctgccgggcagcatcagggcgctgctgcagtccaagtcgtccgggtcggatcaggaggacgacgcggcggaccgcgtggacgagcagcggctgcgcgcgctcgccgcaggcgcgtcccccggggacgactggagcgtggagggcctgcggcgcgcggcgtccaagatcgccacgctgcggatgaagctggaggaggacgacgaccacgacggcggcggcggcgacgacgaggagttcgcgcgcaggcagcaggccgggctggcgcgcagcgcatcgctgcggttcagggcgttctgcgccatcccggcggcgaggccgaagcggatgctcagcaagctgtggccgctggccagaggcgtcaccaccgagcggcattagcgtcgcaaccagtagccattactactaggttttttgtacttcttcttcttgggtgtcttgcttgcattgcttgcccaaggcctgagaatgcaggtttctttgcttgtctcttcttcctgtttctcctttttaattacagtgtcaaggccaagtgtaccttccaggcttccatgtagttgtaatcttttctctctctccgttttttttttgggtgaggcatgtagttgtaagcttaattattaaaaataaataggaactgcacagtttatat

SEQ ID NO: 13992 - DNA, 658 bp, Oryza sativa
  ref <308>: DATABASE ACCESSION NUMBER: AK111340
  ref <309>: DATABASE ENTRY DATE: 2001-12-06
gtgctgctctcactatcgatcgacctctgctgctgcctcgctgtcctctgctacgtgagctcggccggctcgggtgtcgaggacgatcgaggatggggtcgctggggcggcggccgtgggttggtgggttgacggcggcgatgatttttgctgttgctgtgtgcggtttctgcttcagtggggcgtcggcggcggcggcagcgccgacgttcggcgacaacttcgagatcaccggagccgaggatcacgtcaagacctccgccgacggccagacgtggtacctctacctcgacaacaagactggcgtcgggttccagacgaaggagaggtatctcttcgggtggttcagcatgaacctcaagctcgccggcaacgactccgccggcgtcgtcaccgcctactacatgtgctccgacgtggacgcggcgccgcagcgcgacgagctggacttcgagttcctggggaaccggacgggtgagccctacatcatccagaccaacgtgtaccgcagcggcgtcggcggccgggagatgcgccactcgctgtggttcgaccccaccgccgacttccactcctactccatcctctggaaccccaagcagatcgtgtaagtgatcaaccgaacaatagtaatcaagcttctagttgtttcaagaag

SEQ ID NO: 13993 - DNA, 559 bp, Oryza sativa
  ref <308>: DATABASE ACCESSION NUMBER: AK111341
  ref <309>: DATABASE ENTRY DATE: 2001-12-06
gagctacgactcaggaatccggcgccgcaggccgaggcgatcgagccgggcgtatctatcttgtacacacagtaaagctgccagcaatggacgcggcggcgaacggcggcagggatggcaaggagaagaaggcgaagaacggcagggacggcgaggacaagaagaaggaggaggacggcgacgccgggaagaaggtgtcgttcacggggctgttccggtacgccgacggcacggacctgctgctgatggcggtcggcacggtggcggcgctcgccaacggggtgtcgcagccgctcatgaccgtcatcttcggccaggtcatcaacgccttcggcgaggccaccaacggcgacgtcctccaccgcgtcaaccaggtgagcctgcctgcctccccgccacagctagcgccgcccgtccggccgtgatccgcgcgcggctaactttccggtcgattaatcctctcgccgtcgatgtggaaggaaacgcgcgccgtggattagcggcgtgctcgatcgagctttggccaattcaatcaatttcactccctttcatttcattc

SEQ ID NO: 13994 - DNA, 1289 bp, Oryza sativa
  ref <308>: DATABASE ACCESSION NUMBER: AK111342
  ref <309>: DATABASE ENTRY DATE: 2001-12-06
agctacaacacatgatcatccaagtgttgaactgtgttgatacagagttattacagagtacagactgtccggccggctggaactcattctgcagatatggtcggattgagttagggcgcggccatggccagtagctgctggccgccgttctgtcattgacgtttccgtccgtcgagggaggccgccggtggcgtcaggcggcgggcgcggcggcggcggcggcgatggggtcgttcaggcagtggtggcgccgggtggccgcggccgtgaaggaccggaggagcgtgctcctggcgcgcggtgatccgcgcgacgagccacgacgagcggtgggtggactaccggagcgccgggctggtgttccggtgggcgcggacctcgccgtcgctggtgcggcccaccgtgtgggcgctcgggcggcgcgcacggcggacgcggtgctgggccgtggcgctcaaggccctgatgctcgcgcacggcatgctcctccgctccggcgtctcgccgcgcgcgcgccgcccgcgtcgggagcgtccccttcgagctcgccgacttccgcgaccgctcggcgccgcggggcaagtcacccgccttctccgcgttcgtccgcgcctacttccgcttcctcaactaccgctccctcctcgcggcggaagaagacatcgccggcgacggcgacgaccactgcgtcgcccgcctcgagagaataacgaagctgcagttcctgctcgagctgcttctccaaatccgcccgtactgcgacggcatggaggtgcccctcgtcctggaagccatggactgcgccctcatcgaaatcctccaagtctacggcgagatatgcaccggcgtcgcgcggttcctcgtcggcgtgcccgcgccgacgacgagaccacgacaaaccaaatcgaccgccgcggcggggataaaggtgctccggaaggcggcggagaagagcgcgcagctgtcgtcgtacttcgagctctgccgctcgctcggcgtcgtcaacgttcgggaactcgaagtacgacgacagcggcggcggcggcggagtgggtggtgttcgacgatgacaagggcggcggcgaggcggcgtggcgcggtggacagtaaaacccgttcgttctggcggcgtcggagtcggaggggcgcacggtggctggtggtccgagtccgaccggtgttgtactgttgtgaatagaaacttgacttgtctcgagtacactggatctactactactatttggcttctctgcaaagcccttcaagatactggagaacatttacacctc

SEQ ID NO: 13995 - DNA, 876 bp, Oryza sativa
  ref <308>: DATABASE ACCESSION NUMBER: AK111343
  ref <309>: DATABASE ENTRY DATE: 2001-12-06
accatattctggagtctaatgtatagttgcagttggtgaccatctgtttggcggcttgggcgaggcaggcgtcgcagtcgccgccggagacgtcgccgcggcactgcgcgaggccgtagaaggcgtcgatgcccctgccggcggaggaggtggcgaatccgccgccggcgcgcgccttggcggcgaggtcggagacgacggagttgatgctgcgccgcctggcgatggcctcgccgctgctcatctcgttgtagctcggattccagcagaaggtgccaatgggagacatcgatatcgtagtagccatggccattgggagcaacattgcagccaacgagagagcaactagtaccaggcagcaatggtgcgatcttctgcttggtgacgccatggatgctagctccaattacttctcacactctcacttcaccttcttgccagctactggagtagtagctagagatgtgagcagatgtgtgtggctggcttgggttcaatcgggagcagtggttggagcttataaattaagacgatcgatcaagcgcgcgcactggattggatgggaaattaattaagagagatcgatatcatgtgcttgcgatgcagggaatagtacaggacatagtatcataatccttattgcagacttgttttgactattctaatggtttctaatgtcgagtcagccatgagccatgctcgtccatgcactggcagcgtgtgggcacgaatgttactcttgcagacttgcgtcgcggacatcgtggactagctcgctgccgacctgcttttcagggactacttttgccacagggttttgaatagaaatttcggatatttctaacgattattttttaaaaaaattaatacattttt

SEQ ID NO: 13996 - DNA, 513 bp, Oryza sativa
  ref <308>: DATABASE ACCESSION NUMBER: AK111344
  ref <309>: DATABASE ENTRY DATE: 2001-12-06
ctctgaagtcccagtgccatctgctccatacttcgcaggtaggagggagcatggcggggagcggcggcggcgtcgtctccggcggccgccagcgcgggcccccgctgttcgcgacggagaaaccggggcggatggcgatggcggcgtaccgggtgtccgcggccacggtcttcgcgggagttcttctgatatggctgtacagagccactcacctgcctcccggtggcggcgacggcgtgcggcggtgggcgtggctcgggatgctcgcggcggagctctggttcggcttctactgggtcctgacgctgtccgtgcggtggtgccccgtctaccgccgcaccttcaaagaccgcctcgctcaaaggtacctcccggctctcgatagtaccagcaactgttatcaaggttaatctgtgtcgcaattccttctccttgcttggtttgttctttcattggatatgtactgattatcctttgctcaaaaaagatatgtagtattgattacgtttgctc

SEQ ID NO: 13997 - DNA, 1031 bp, Oryza sativa
  ref <308>: DATABASE ACCESSION NUMBER: AK111345
  ref <309>: DATABASE ENTRY DATE: 2001-12-06
gaacgatgtaaaaacagaattccccatctaattcaattcttctctgttctatctctgcttctctgagttcttccttttcccttccaatttcttccaaaatcctattgaatcctccattgttgcagcgcgaagctagggtgccgtgacaaattggtatcagagcttgttaatcctggagaagccatgctatatctctcgtttgcagcttcaagtggaggctatggagaagcaaaatattgattttggcaaggtgctgggtgagattcaggagtcattggtgtcgctgcatcgagctcaaggtgatacgcaggccgccatcatcaagctggatcaaggcgtgagtgcttggagaccacaagtggaggcggctgtgcaggatctgcatgaagaagttggcgaccttcgtcagcaggtggatctcctgaacaaggtgaagcaagctccaccggcggcgtcttcccctcgggtcccgttgacgggcgaggaaaggaaggccccattgctgccaacgccgacggctacctcgcctgcagctgtggcggagggcgcggagaaatgggccaatggccaccgtcttcatcaaaatttccggggaaaggcatcgggtgtagttactaccctgatccattctctgggcaaggatgccccagtgaagaatgtcaatcacttaccagtacagggcatagtggtgaacatttctattgtagttgcattagttccactggattgcatattccagaaggacatagatggagatgtttctataaagtccaagaaggcatgggatcagggactcagtttacaacaaaaacgctctcaggatcaaaatccaacaaaccctgataatagatacacccgttaacatagatctcttgagtaactcatagctttgtaaacccattggagaagatacagaagaacagtacttgcagtggtacgatgtcacgatacatgacagcagaacttgcaactgagttttctactatttcttcagtggtaatcttttactagtactaattttatataaagcc

SEQ ID NO: 13998 - DNA, 507 bp, Oryza sativa
  ref <308>: DATABASE ACCESSION NUMBER: AK111346
  ref <309>: DATABASE ENTRY DATE: 2001-12-06
aaccaagaatctccagtcacgctagcctttctgcaagcgtagcctgacgagatcgaccacaggacaacacaggagccaacggagcgggacgccatgaggcctcaagctctcgtgctcgccaacttcctggccgccgcgctgctgcacccgttgctgtgccaaggcgccgccgccgcctcgcctgcctccatcgccgggaagctcgccatggacggaatggccatcgaccaagggatcgatcacttgctcgtactcgcggcgatcttcgtcatgtgcctgttccgctgagtggagggctggaggcaactgaacagctcttccctgaatattagcttctttatttttcttaatttgtacatgtacatgcatgtgttctttaaaatcttgcccaaaggttgtagaattttatcatgccgaagttcaacgaagacgttgaaataagagcgaattatgatacgtgttgtgctccatataatttattactaacggaagaaatttctaaattgc

SEQ ID NO: 13999 - DNA, 678 bp, Oryza sativa
  ref <308>: DATABASE ACCESSION NUMBER: AK111347
  ref <309>: DATABASE ENTRY DATE: 2001-12-06
aaaccaaagcaaataccatcacagagagaggtcgagagatggcgacgaataggatggcagtggcgatcatggtgcagttgctggcaacggcggcggcggcggcggcgaagtcgtcggagccggcccttaccggcagcagtatctccgccgccgacgacgacctggcgtcgaaggtggggataaggaggctccttcaggacggcggcgactgcatccctaactacaatgtttgctgcagcaactgcggctggccgttcgaacggaccaattgctgcgacccggacaactacgtgtgccagtactggccggaaatggatccagcacatggccaggactggtgcattcctcgcaattactggagtacttcctccccataatgtttgttcagttttatatcttcacaatttgatttttttttgaagagagagtaagccttaaggccatggaaaacggtccgttctgttaacgtgatcgcccgaatcaaaactccatttttagctaataattggccgtatcccatttaatcgtctgaataatcattcacatgttatacttgatgggtagtatttgggaccttttttagtattatttttttctacatattttgttttacttattcaatataatataacaaaacatgtcgctgtttggtgaataaaaaaaaaaaaaaaaaaaaac

SEQ ID NO: 14000 - DNA, 1338 bp, Oryza sativa
  ref <308>: DATABASE ACCESSION NUMBER: AK111348
  ref <309>: DATABASE ENTRY DATE: 2001-12-06
actacagctagctagagctcgccgccggcaacgtactacacacagcttagtcctgctacctcgccggcgcaaacgcactcgatctcctcgcgatgacggtggcggcggcggcggcgagcggcggcgtaggggggaggaggtacgcgctgctgctggcgctgaacgactcggagtacgcgaggaaggtgtacggcgggtacggcaacgtcttcgtctcggcgctcggcggcggcggcggcggaggggaggaggagaggtgggactgcttccgggtgatcgacggcgagttcccggcggcggaggaggtggggcggtacgaggggttcgtggtgagcggcagcccgcacgacgcgtacggcgacgagcggtggatcctccgcctctgctccctcctccgggcgctccacgccatgggcaagcgcatcctcggcatctgcttcggccaccaggtattgtgtcgagcattgggtggtagaattggcaaggcacgaagtggatggaacattggggtgaagaagatgacctttgtgcgtgattttgaggggtccaagttatttggggatctcaaggaaattccccaaagtgcctccatcatcgaggttcaccaagatgaggttttggaggtgcctccaatgggcagggtgttggcctactccgacaagacgccggtggagatgttcgccgtcggcgacaatgtgttgggcatccagggccacccggagtacaccagtgacatcctcctcaacctcatcgaccgtcttgtcaataacaacaccatcacgagtggcataggcgaggaggcgcggcggacggtagaggccagtgagccagaccgtcgattctggacggggttgtgcaagggcttccttaagagaccgaccgccgccaccaccgttgacatgcctccacgggaggtggcgccggagatgatgagctgcagccatatcatcgctggtggccattttgtcgcaactactccgatcggcttgtagctagctgcagctaattaatttcgctggaaggcttatatgacgttggctagtataaatttgaactagccaacttcatttaaaaaaaactggagggagtaattgtcacctactccgtatgctgtgtgtactactgcagctaccgtttgcaccgttgctcgtggccatgcatacccgtacaagctagctagacaactggcagccattttttattgtctttttttcctccccctatatatatatatagaggaagatgatacatttgtaagatgtttgtctcttgccaactagcaagagatgctaaaggagttcagatctcacacaatatgataatcatatgataatctgt

SEQ ID NO: 14001 - DNA, 973 bp, Oryza sativa
  ref <308>: DATABASE ACCESSION NUMBER: AK111349
  ref <309>: DATABASE ENTRY DATE: 2001-12-06
gatcaaatagacatttactccgatatatcgcggtcgatcgttgtgaaaaatgtcggcccttgtcaggtccgtggcgtcgctctactgccaggggctccggcgaaccgtccgcctcggcggcggcgccaccgcggggacaccggcggcgcgagcaccggcgctggatcaacggaggccgttcttgtccagggtggatcgcatagaggccaccaccggcggcggcggcggcggcgcggcggacacgggaggatcaccgcgccggcatggcaaagaaggaacagcccctctcttcacctgggcaagattggtcgtcgtcctcgccgccatggcgccgttcttgcagtccaagtgggcgacgcttctccgaatccaaagcgaggtggagatggtgaaggacgcggcggagacggcggcggaggtggtggaggaggtggccgcggcggtggagaaggcgtcggcggaggtggcggaggcggagcagctgccggagcacggggcgctgcggcgggcggcggcgctggtggagcgcgcgtccagggaggtcgccgaggaggctcatctcgcccacgacatcatccacaaggttgacgaaatcgaagaggacgtgaagacgatgatcgagccgattatagataatcacaagcatggcacaagaggcaccattaagaagcactaaattttcagagaactcaacttcagctctgtacaaatgttcagattgtttgtgcaaaacctcttaggtctttagccaatattcgtcgaatcggttaattcaattgttaatattcccctgttaagcagagcaacaaatgggagaagaatttatcaaactttttcagataatgttctacgaaattacttcacttatcttctatgaagcatgtaatgataatcatttccgcttgaaaaaaaacccgaataatatctcattttcaatcaatctccctctcggtctcgaattaatcaaacaaat

SEQ ID NO: 14002 - DNA, 1096 bp, Oryza sativa
  ref <308>: DATABASE ACCESSION NUMBER: AK111350
  ref <309>: DATABASE ENTRY DATE: 2001-12-06
taacccaaagccatccagcactttgcgaggtcgctttcgtttcgcctccttcgtcggccccggaccggaccggacagaggcatgtcctgatggaattcaggggccatgacgaacccgtcgacgagatgggagtcgcgtacggcaggacgccaccctcctcctcctcctcccccgccgcctccgcctccgcggggaacggcgccggcgcggcggaggtgaggtaccacgagtgcctgcgcaaccacgccgcggcgatgggcggccacgtcgtggacggatgcagggagttcatgccgatgccgggggacgccgccgacgccctcaagtgcgccgcctgcggctgccaccgcagcttccaccgcaaggacgacgggcagcagcagcagcagctgcgcctgctcatcccgtccccgcccacgccgcgcgtcccgctgctcatgccgccgccgcagccgcagccgcacccgcacccgcaacacccctacctgcacccgccgttcccgtaccaccacaccccaagcggcagcggcggcacgacgaccgagtcgtccagcgaggagcgggggcctccctcctcgtcggcggcggcggcgcaggggcggcggaagcggttccggaccaagttcacgccggagcagaaggagcagatgctggcgttcgcggagcgggtggggtggcggatgcagaagcaggacgaggcactcgtcgaacagttctgcgcgcaggtcggcgtgcggcgccaggtgttcaaggtgtggatgcacaacaacaagagcagcatcggcagcagcagcggcggcggcagtaggaggcagccgcaggagcaacagtcacaacagcagcagcagcagcagtagccatgggaggagacaagcatttggttaatggtttggtaaatccccacctcattatttttatacgcccaagacatgaggagacgggttaaacaacgcaacggaagtgaggactactctctctgcgatctttatcctctctctctctctctctctctcttcatttggccttaaccttcattctttgtagtcacttatcctcctccataatttggttcttgattctagccttgtccaatttg

SEQ ID NO: 14003 - DNA, 1024 bp, Oryza sativa
  ref <308>: DATABASE ACCESSION NUMBER: AK111351
  ref <309>: DATABASE ENTRY DATE: 2001-12-06
aaatcaaccagcatcgccgcgcgccatcgcccacctgactacctgagatcagctaagctaagctaagcttgcttccgcgccatggcgaccgtcgggccgtacggcgaggccgagaagaacgagccggcgaggccgctcgcgctcccgtcgccgtccgtccacccggcggccaacgacgacgaggaggccgcccgcgcggcggcggcggcggcgggggacaccgccgccaacaagcgcccgcgctccccgcagtacctccgcaggcggcgctgcgtgatctggtgcggcggctgctgcgtcacctcggcggtcgtcgtcggcatcgtcatcctggtgctggcgctcacggtgttcaaggtgaaggacccggagctgaccatgaaccgcgtcacgctggagggcctcgacggcgacctcggcacgtcgaggcacccggtgtccgtgaacgccacgctcaacgccgacgtctccctccggaaccccaacgtggcgtcgttccggttcgaccgcagcgagacggacttctactacgccggggagaccgtcggcgtggcgtacgcgcccgaaggcgaggtcggcgccgacagcaccgtgcggatgaacgtcacgctcgacgtgctcgccgaccgcatctcccccaacgtcaacgccaccgacctcatcttcggccagggctacaacctcaccagctacacggagatcagcgggagggtgaacgtgctggggatctacaagaggaacctcgacatcaagatgaactgctccatcacgctggaggtcagcgccctgtccaccgtgcagagcaagagcacgaactgtgtcgccagcgtcagctgatcgctcgctcgctcgcgagatgggatttggggatccatcgatcgtgttctataattataatctcttggtggactgatattttcgtgtcacttagatttaattacttggggttttttttctgtattaattaaacttggactcttgtgtgattgactttttgagttattattatatgagttcaaatggc

SEQ ID NO: 14004 - DNA, 811 bp, Oryza sativa
  ref <308>: DATABASE ACCESSION NUMBER: AK111352
  ref <309>: DATABASE ENTRY DATE: 2001-12-06
ctccagggtttcttcaccctccatcgcatcacaacatccgctcttctcctcccccatccgcgcgcgccagccgccgtgctcggcggacgcggacgagcgcggcgacgacggcatcagacgcggatgagggaggcgacagcggtctagggcgcggtggacgcggacgagggcggcgacggtcgcggacgagggcggtggcagcggtcgagggcggcggcggcgacgacggcggacgcggacgatgacggctgcgttggtcacggcgaacgcggacgagggcggcagcggcggaggtcgtggacgaggacggcagcggttgagggcggcggcagtggtcgatggcgtggtggacgcggacgagggcggcggcggacgcggacacggacgaaggcggcagcgtcggtcacggcgaacgcagacgagggcggcaagccggcaacaacggtcgtggcatatgatttctgagatttatttgtttttgcagctctatgtgcagatgagtactctccgtctctccgtcgcatatcgagaatgcctattgcctgtgatgccttctatgtttcggttctgagcagcagttgagcaaataaggaggcaagattctaaggattcaaacttattgtgtttagttaagcaacacaacaaggtcagcacttaatctttttttgtgtatgtatggatatattccctttattcattgatttgcactactttagcatagcactagctgtcttatatggaaatgaattggttacatattggttcaatctaaatatatatatacagtagacccacccgattcattttgacc

SEQ ID NO: 14005 - DNA, 895 bp, Oryza sativa
  ref <308>: DATABASE ACCESSION NUMBER: AK111353
  ref <309>: DATABASE ENTRY DATE: 2001-12-06
ctgcacaaacgcaacaaacgaagcccaaaacgccaaagagagaagaaaaaaaacacgaaaaatttccccaaaaaagttagcgaccaagaaaccgcagaaatggaggagcagcagcatctgcatcccggcggcggcggcggcaagaagtcgaacaagatcaccgagatcgtgcggcttcagcagatgctcaagaagtggcgcaagctctccgtcgcgccgaaagacgcggccgccaccgccggcaatggcggcggcggcgagagcaaggcgaagaagttcctgaagaggacgctgtcgttcacggacggcggcgcgtcgccgggggggacgccgccgccgagggggcacctggcggtgtgcgtggggccgacggcgcagcggttcgtgatcccgacggactacctgaagcaccgggcgttcgcggcgctgctccgggaggcggaggaggagttcgggttccagcaggagggcgtgctccgcatcccctgcgaggtgcccgccttcgaggccatcctcaaggccgtcgagaagaacaagaaggacaacgccgccgccttctgctactgcagctacgagtacgccgccgacgaggtcgccctcggcgcccccaacaacccattgtgcagatgaagaggaacgtagtagctgctggtttttagcatggctgttgttcatccatccaaaagaaatggattttttttctttttcttttcttttcttatcgatttgtgtttttaagtgttgtggatggtgagggatgatttgatagtatctcccccctaagcttagaattactgcgtaatattttttttcttattttgttgagttgagctgatgatctgaattgggtaatgcagccctcatggatgaaattaatggaaaatatttatggttg

SEQ ID NO: 14006 - DNA, 821 bp, Oryza sativa
  ref <308>: DATABASE ACCESSION NUMBER: AK111354
  ref <309>: DATABASE ENTRY DATE: 2001-12-06
gaggcacgcgcgcgcgatgcgagagcaaagcaaaatcagcagcaaactacagtagtagtacagtaattaacaagcagaggaggcagtaggcatggcgtctgtggtgttgaaggatctgaacaagcggctgctgggcctctcctgctcctccgccgcctccacctccatcgtcctctccggccactcgccgccgcacctccgagacccagctcgcaccagcaacagcagcaagaagaagaagacgaaggcgaacaagagcaagcagcagctggttagccctgcaagctcgtccaggttccttctcaactcctcccggatgcaacccagcgcggatgagttgccgccgcccttcgtcatcccggttgctgtcgcggctgcggcggaggagaatgagatcgtagctgctgcagtggaaggaggaggaggagaagaggaaaagagagagtcatcgtcgcaggtggaggtggtggtcctgcgggtgtccctgcactgcaagggatgcgcggggaaggtgaagaagcacatctccaagatggagggcgtcacctccttggacatcgacatcgccaccaagaaggtcaccgtcgtcggccacgtcacgccgctgtccgtgctcactgccgtctccaagatcaagcccgcacagttctggcccatctcctcctcctcatcgcccatgcctccacgcgcttccgcttccttctgatttctcatccaccctgcttactgcttgcttcacccttaattttagattattatgtgcactagtatctgtaagtactactgtatacggaaatttataaaagccattttttttcatg

SEQ ID NO: 14007 - DNA, 521 bp, Oryza sativa
  ref <308>: DATABASE ACCESSION NUMBER: AK111355
  ref <309>: DATABASE ENTRY DATE: 2001-12-06
ggaggcgagaccaccggtgttagcggcggcggattccgcaggcggttggagtactacctgtacagcggcgagaagaagcacgtcgtcgccggcatcgccatcttcgccgccatcttcggcgttccctggtacttcatgagccgagggacaaagcatcaatctcaccaagattacatggaaaaagctaacaaggcgaggtcggagagactttcttctggacagtcatcagcaccaaaagcatgaagtagtaatccgtaactcagatctgtgaaacctcagcattcatagttttgatctatactctagctgagcactttatctattgggtgaaataagcaggccatctcttgaatattgaccctgatgacatgatcttgtcagtttcagaaaccatgtgtaaacttcacatgaaattttgtcaaatgtagcctttctgttcactttatgcgcaattctgtaggagatgatcaacaagcaccagatttttgtctatcaaatattcaaatggtggttctcgagcc

SEQ ID NO: 14008 - DNA, 891 bp, Oryza sativa
  ref <308>: DATABASE ACCESSION NUMBER: AK111356
  ref <309>: DATABASE ENTRY DATE: 2001-12-06
ctctacctttgcctcctttttctccaccttcgcctcctctttctctaccttcgccgccgctcgtccggagaggtgaggtgagaggggagctggcaagggaagagaagagagaccaatccatcgccggtccagatccacgttgccgcctcggcctcctcgccaacaagctctgctcctccacgctgctctccacgctcctctacgacctcttcgtcgcctccctcgccgcgcaccccaccctccgcgccgccgtcgtcgccgacctcctcgccgcgcgctccagggaccccgcctgcgtcggcttctcccactgcctcctcaactacaagggcttcctcgccatccaggcccagcgcgtcgcgcacgtgctctgggcgcaggaccgccgcgccctcgcgctcgcgctccagtcccgcgtcgccgaggtgttcgccgtcgacatccaccccgccgccgcgatcggcaagggcgtcctcctcgaccacgccacgggcgtcgtcatcggagagaccgccgtcatcggcgacggcggagagaggagggggcctagctcgtcgacggtgcggggatgacgagaagcggcgcgtggggatgaggagaaaagcggcgcgtgggcgtgacgcgtgaggataaggaggaaggcgtggggtcacgagactgcgccttgctggaatgggccggaggcacggcaagcgtgccttgcactgctattgcccttattcggcatgctgtggctatgttctttgctacgactctaccttttcatagtcttgatgacaaaaaaaatatgtcataatacttttggatggagggagtactaggaatctattcgtatcttgtaatgggctacgcccacataataaggaaagagctacgagactcactaaagat

SEQ ID NO: 14009 - DNA, 687 bp, Oryza sativa
  ref <308>: DATABASE ACCESSION NUMBER: AK111357
  ref <309>: DATABASE ENTRY DATE: 2001-12-06
aactaaccatcgccgatttttttctcactaaagtgacacatatctctcgcgatacagacgcggcggcgtgcggccatggcgcgatccatcggcgattcggccgcaacgccggcacgatccatcggcgattcggccacgacgcgaggcgcggtggctactggcaatccggcgacgacggcgtggtggttcatcggccgatcgtcctcctcatttgagccaggcgtacaagaaccgtatcaatcatggcagaggtttccgggcttccggccgtaacctggaggcaaaccgtccaacgatggcagctgctcacacggatcctcgatcgacgatggtgtctagtcaatgaatcacggccgcaacgcccggtagaaacgcgtactgcaccatgtcctatggttatttgatttcaggttcagagctaatatcgatctgccaaaaatcagaggcgacacctaaggcatttgttccaacctcccagagaactgaatagattctgaattttttagcaatatatatatctacctcttatttcttttttctttatttttcgatcgactagttgattttgaatcatgtgagcatgagctcatatatacctcttgttttttgtatttgtagatgaattttgtatcatacttctaaatttttctcgtgaaaaagcatataatactgcacacatgaaaagct

SEQ ID NO: 14010 - DNA, 1067 bp, Oryza sativa
  ref <308>: DATABASE ACCESSION NUMBER: AK111358
  ref <309>: DATABASE ENTRY DATE: 2001-12-06
cacaaaggttgcaggcctcttgctattgacagatgagtgagcaaacatggatggtgatggtattctgacatctcaatgtgagccagtcaaccagagttgatcgctaatccatgtcatggactctaaaagcaaatggattttatggcaggaaagctcccataagcttcttgggcggtgcctacttgaatgactgggagaaccatctaacaacaatatttcattaggttagactgcagcagtaatgaaaggtgctgatgatggatcatttaggatattgtgtgctttgccagcgtttcaggtccggatgcggcatccacgtgggcaggccgttaccatgaggatcatgccatcggattagttgtccatgtgcatagatcaaagaaaaaaaagaagcacgcgttcacctctagttatatataattttgagatactggtcaccaccgacgccgtcttcaccacagggtcgaaatggattggcctcgcgcccgtcatcctccctcgtcgcctcagccgccgccccccttctcgctgcctccaccaccctccgccgcctccaacgcctgccccgccctccccgactctgcgcccgtccccctctctcgccgcctccgtcgcctacctcgtcgcctccacgcccgtccccttctctcgccgtctccatggtcatgcgggtgttccgaccagagcccatcgatgagacaccggagcatgcccgcgttctcaccgccgcaaactcgcccaacagcatcagagcttgatttttggggggatggggctccatgagcctgctatgagtgaagccatcgtccaatgatctctaatgaattttcattagtattccccacaaaaaattgaggtgtttgttccgtcagtgtcctacctagatagtgtttgttgttttccatacacgcatggggatgtggctccgctatatcagttacgccagcatgaccttttggtgtgtatgcctgagcagtttgtggggcttcggatttggatcctagcttgcacttaatttgcttttaaacatttgacccccacctaaatgtgagcagatagatatccat

SEQ ID NO: 14011 - DNA, 598 bp, Oryza sativa
  ref <308>: DATABASE ACCESSION NUMBER: AK111359
  ref <309>: DATABASE ENTRY DATE: 2001-12-06
agctgcgaaagccaaacactgctcagctcagccgggagagtcagatcaccacatcagtgcgtgtgtgcacagtgttaagcatggcgaggttggcgtcgttggtggggtggaacggcggcggcgggtggagggagcggaaggcgcggcagaggctgcggcggcggcagtactgcggcgggacggtgtggctggggcggcggcgcaggccggcgggccggtgcaggctggccgtgtcgcggctggtgcggtggcggctggtggcggagctgctgcggccgatcaggaaggcgctgatggagatggcggcggcggcggggcggcggcagctggtcgcgctgccgcagctcagcttccccttcgtcggcacgctcgcgctcccggccgccgtcgcctgactccggtccgatctcctaacgcgagctagcgccgccgcgtcctcatctcatcatgtgtaataactttttttttttgccttttcttttctttttttcgtgtatgatttcgagctttagctttcaggctttcagctggacgtctaattaattagcttaattaattaactagctttcgatctatgcgacgtcaggacatttcaatc

SEQ ID NO: 14012 - DNA, 888 bp, Oryza sativa
  ref <308>: DATABASE ACCESSION NUMBER: AK111360
  ref <309>: DATABASE ENTRY DATE: 2001-12-06
tcactgtggtcacctgcagtttgccccacagccattccaagcacatattccctgcaccctgctagctaccttgagttgcaattcatccttttggcagtaaagttcttagtaatattacccagttgctacgtagcagctcgctgaagaacaaaggaaccaatcccacctatctgaatccacacataaacagtagatccttgttctcgcttggatagctacagcctacctctgcaggcgctatgatgaggctgaaagtgacgatactggtggtagcatttgttctcagcgccggcgtgcatatctcggcggcggcggcggccgccggccagagggaggaggtgcacctggtgccggcggtgtacgtgttcggcgactcgacggtggacgtcgggaacaaccagtacctgccggggaactcgccgctgcagctcccctacggcatcgacttcccgcactcgaggcccaccggaaggttcagcaatggctacaacgtcgccgacttcatcggtccgtgcatatttcgcctcaaattgtttggagcaatgtaaaatttctgctaataatggaactcacgatgtgtgtgcatggatgaacaattggttcagcgaaactggtgggattcaagaggagcccgccggcttacctgtcgctgacgccgcagacgagccgtcagctcatgcgaggctaccgcggcgccaattacgcttctggaggatccggcattctcgataccactgtaaggacatgcttggatacagcaagaaaatttcatcttcttgtagaaactgtgcaaggaatttactactggtagccttttcttgtactcaataattggttaatatagtatttgagtgagtgtagtagttgaatgaaaaaaaaaaaaaaaac

SEQ ID NO: 14013 - DNA, 604 bp, Oryza sativa
  ref <308>: DATABASE ACCESSION NUMBER: AK111361
  ref <309>: DATABASE ENTRY DATE: 2001-12-06
ccctaactaggcaagaagcttgattgtcaattacgtacgtatcacttggtgcgtgtctttcttttttctctttccttcatgtctcgagatagagatagggtgacgatcattagcggggtgggctaccccaatccccagtgcatgtggcttgattaaagcgggatgagataggctcacagtcacacaggcaggcaagcaagcagggtcaggccatgtgctgccggcaagcgcatgtgtaggtgagagagggaggggaagaaaagcctgcgcatgtgacactgcagctcttgccctcgctagctcgtccgtccacccgtccgcgctgtgcgcgcagatgggcggacgcagcgacggacccagccagtgcaccatccgggccaccgcgacacgcaaacacctccgggcagccatgtccaccgggccattactccgcatgcaccatgcgctgtatcataggattttcatctccgttccatcacgagctcgcgacgaccaagctggaaatacggcatctataaacgtcaccaaaatgtaccggccagcagggtggatccaggaacaaaattttttttttgaggggctcaattacactgtttcttcaacc

SEQ ID NO: 14014 - DNA, 500 bp, Oryza sativa
  ref <308>: DATABASE ACCESSION NUMBER: AK111362
  ref <309>: DATABASE ENTRY DATE: 2001-12-06
atcaatatccaattcttctctctcgttcgctctcatcattttgtccttgctccctctctctcgtctccccacccgagcttggttggtgagtggcggccggacgcctctgctaggcacaaccaccataggcacggtgatggtttttttcgctctccccggtgcaacagcgactgcgtcttcctccgtcgtcttcctctcccctatgcagcggccatccgattccaccaacacaaaaggttctccactcgtgcctccctctcctctcctctactctcatgtcccgtgaggtggagaaggatgcgcgggggctagatccggcagcccccgagctcggcaccaccacgacggcgaggaggaggactggcgaagagtggcgatggtgataggcttggccttcggtgagcaactaatggccgcgatagcctcggtggactatgattcggtttttgtagttaaccttttgtgttgaatgttgatattctatatatcattcggtgatt

SEQ ID NO: 14015 - DNA, 595 bp, Oryza sativa
  ref <308>: DATABASE ACCESSION NUMBER: AK111363
  ref <309>: DATABASE ENTRY DATE: 2001-12-06
tacgttttccggcaacaaaagcgactgttatcaatcaatcaatcaatcctcgcctcgtcgtcttcctccagcgacgtcgaccgccgccgccagctcagcacggcgcccatccgcggcagcctcaccaccgagttcacccgagccaccccctccagagctctccatacattcgtcccctcctccgcctcgccgccgccgccgcccaggacctttcggaagctgcccgtgaacgacacggcctgaggaggtttcgcgtccccgggggtgctctccgacgacgacggtgaaggcttcaagaagaggcacaccacggcgcagtcgtcgaccatcgacgtcgggaacttgcgccgccacgtgcgcaccgcccgctcgacgagctgcttggcggccttggaatggtcagtagccgacgatacgatcttgatcacctccttgttcgacagcacgtcccatatctgcacccacaacaatttgattggttgcattatctgaaaaacaacctctatccgctattctgatttataaattccctgtggatgaaattttgattggttgcattatctttaaaaaaacaatttgattgattgattgaggc

SEQ ID NO: 14016 - DNA, 988 bp, Oryza sativa
  ref <308>: DATABASE ACCESSION NUMBER: AK111364
  ref <309>: DATABASE ENTRY DATE: 2001-12-06
aacacgcatctaacatctgtacagctactcgtactagctaataacttgtctgtgtaattggcgctatggcgttaagcaggagaacgcgccattgcctggtattactacttgtctccttggcattgctcccactgggcatggctacggatcccattggcggctactgctcggagtcggggacgagcgatgctgaaattaacggcaagacgaggcggcgcagcatcaactccgtcgtctccgacctcgtcgccaaggcggcctccaacggtggctttgccacgtcctccgccggcaagggcaacaacgtcttctacggcctcgcgcagtgccgcggcgacgtctccgccagcgactgcaaggcatgcctcgtcgaagccgccaattacaccctctccttctgccactatgcatcggactccaggatgtggtatgactactgcttcatgcggtacaagaacgccaacttcattggacaggtggacacgagggtggacgccagcgtaagaattaggaaagaagaaaacatggacaaccctaagacgttccaaaaggtggtggcgaagacgatggacaaataccccaggcggtggcgaccgcggggagtgccgcattgggaagggtgaaggaaaaatacatgacgtttgtgaacatctacgggctgtcgcagtgcacgcgggatctagcaccgctggcatgtgcccaatgcctgtcgacggcagtgtccgacttcggcgacatctgcaacgccgcggagggatgtcagatcgaatacagcacctgttgggtgcgctacgagatttaccccttctattttccgctcaagactgacgggcgagccaccactgacatgacgaagtacaccaaggtcgttgtgcactgataattaagtttacaactagttatgtaaaggattatgttgtaacgcgtagcaatatacatataattaatttgtgggtgagatcttatatgacctctttgccacgatttg

SEQ ID NO: 14017 - DNA, 690 bp, Oryza sativa
  ref <308>: DATABASE ACCESSION NUMBER: AK111365
  ref <309>: DATABASE ENTRY DATE: 2001-12-06
tggtctcggtgtctcctccggtagaagcggagtccgctgcaatggatgtgaagggggagcggttgttcaaagggcggtcgcggaggttgtggtggtcgccgacgaggtttcaacggagaccttcgcgggggatgttgatgcagcgcgaggccgttctcgcggcgggtggcgaggtggctaatccgatccttgcctgtctgttccaggaatgaagctagtgacatctgaaccaccaagcaagggaggcacaccgatccacacagttctggtaaaaaaatcaccaataattttgtgatgtgctcagctagctacacagccgatgatctggtgccttcagtctttgaccctgtttggtagtaatatgtattctatgtactttttttaatgatgtattcatttgtgtaatttaaatcacaagttctcatgcaaaaattctattgcttagcctcaggaggacaccatgcttgatagtgttagattgttataatatatagcgcttccaatatttgtaagacagcttattttttaggattctaagatactttaattttgtgtatttttcactgataggaaaataagtacatgaggctgccctaaattgtgcttgctgggtgtttctaccagcattaaagacaagttgattcagacctatgtaggatttgtgctcttaaagatgcataatttttggac

SEQ ID NO: 14018 - DNA, 646 bp, Oryza sativa
  ref <308>: DATABASE ACCESSION NUMBER: AK111366
  ref <309>: DATABASE ENTRY DATE: 2001-12-06
ttgttcgctctgatttgattttggaaatggtggtaaagctaatggtaggaaggatggagggatggtagagcggccggcacgtgcgtgcggtgggaccagggggcgctttaacgcacacggccggagcccggcggtggggccaagccggtggtggttcgggtgtggccaaagtggtggtggtgtggtgggtcaaagagcgccctcgcggaccgtgcggtggcgagagttaccgcctggccatcacgtgattgatggggtgggcccgcacgtttgccgccgcgtggtgggggccgcgtgggtgggagcggtaggtggggtccaactgcctcgggtgggcaccacgtcgacacgtgttgggacgcgggtggtggggacggtgggcccttgtcctcctctcccctatgggtggggacctggtctggtggggcccgaggcgtgggtgccggtgacgtggttcccgcgaatatgcgcagtttcgcacgcgggatcccaactccgattaccgggatctaagacacagacagtggtacagctaatggcattagactattcctaatccaagacacataattttcataaattttatttcatcgagaaactagtgtactaaacactactctttcatgtgcaccacttgttcatattt

SEQ ID NO: 14019 - DNA, 834 bp, Oryza sativa
  ref <308>: DATABASE ACCESSION NUMBER: AK111367
  ref <309>: DATABASE ENTRY DATE: 2001-12-06
acagtgtatattagctagggccagccagttcatcaatggcgcccgccggttgttgtctcctcttagtactacttatcgccgccggcggccgcgccgctgccaactcggcagcagcagttgctactactaacaataagccccagcagcttgtgcagtccacctgtaactccacaacctactacgatgtctgcgtcgccgctctcgccgccgacccctccatctccaccgccgccgatgtccgcggcctatgcgccatcgccgtctctgccgccgccaccaacgcctcagccgccggagcctcgttactcgccagcgcggctgcttaccaatctcagcctcaggcgccgctgctccgcgcgtgcgccgccaggtacgccgacgcgcgacaggctctcatctccgcgcaggaggccatcaaggaggaggcctacgactatgccttcgtgcacgtcagcgccgccgcccagtacccaaccatgtgccgggcgctgttccgacgagcgtcgtcccagcagcgcgcgtacccgtccgacctggccaagcgagaggagggtctgcgccgcctctgcaccgtcgtcctcgacatcatctccctcctcttgctgtcatactagctaatagcctatccacccactagctaatatatatatccactccaaactagctatgtatcaatcgaccgacttgatcacactaggcattatatatgtatctttatgctcgttgcaattaattattttaccgatttgctaaatgccggtcgatgaaaatttggggatgaaattttatatatgtatcttttttttcaaaaaaaaaggtcattacaaatcatgt

SEQ ID NO: 14020 - DNA, 1107 bp, Oryza sativa
  ref <308>: DATABASE ACCESSION NUMBER: AK111368
  ref <309>: DATABASE ENTRY DATE: 2001-12-06
aaaaaaaaaaaaaaaaaaaaaaaaaaaaaaacggcccaatccagccgcgcctctccgtggcccagaagatgctgcgccgcctaccgctccgcctcgcgccgacgctcgccggcggcggcggcggcgccatcccccaccgcgtccttcgcggcgcgtgcaccaccgcgccagcctccaggcccccgccctacccgctctccccgtccgacctcgacgccgtctccgcgctcctcccgcgcctcgtctccgcggggaacgtccccgccgccggccgcctcctcaccgccgcgctcctcctcccgggctccacggagcgcctcccgttctccccgctcgccgcgcacctcgcctccatgcccaccctcaccccggccttcgcgctcctcaccgccatccgccaccacccgctccgcccctcgccgctgcccctcgccacgccgctcctcggccacctcctctcgcgccgccgcgcccgcgaggccgcctccgtcgtccgctggctctgccgcccggactccccgcagcggcccgacagcgccaccttcgctgtcgccgtcgcggggctctgccggctcgaggaccccaggaacgcgctcgccgcgctccgggagatggccgtggacgggatacggacctcggcgaagctgcgggagtcggtgcgggacgcgatgctgcaggacgcgaggatcgaggaggcgtgggcgctggaggcggcgatgaagcagccggactccggcaagctggctgagctggtccagaagcttctcgaagagtgggaggactgagacattgccgaggtcgaaggatattggttctcccttgcttctcgatcaaggcacaacgtgttgaaaaatggacttttttcagaacaaagaacagacagttctccctaaacagagagtacaaagcttcgggtttataagaacttgcaagattaggattacaaagcttctagtttacaaaaacttgcaagattaggattagcgattgatttatctatcaaagggatgtttataagaacttgcaagattaggattagcgattggtttatctatcaaagagatggtttataagagatgataagtcacctgtacaatgtcgtgattc

SEQ ID NO: 14021 - DNA, 587 bp, Oryza sativa
  ref <308>: DATABASE ACCESSION NUMBER: AK111369
  ref <309>: DATABASE ENTRY DATE: 2001-12-06
acgaccaaaccctaacccgcgatccgcctccgccgccgccaccaccaccacccacccggatccccacctccctccccgatctcaccacctccgtataaaggcggctcggtttgaaaaatctttgcctccggaggaggagggggggatggctgccgcggcggtggatccgatggcgctggggctggggacgagcggaggaggaggaggaggcgagtcggcggtggggggtgatggggcggagccggtggatctcgtcgagcacccctccgggatcgtccccaccctccagtgagtcccccccgccacccccgcgtcgcaggcttgacgagaacgatgggggttgttcttggatgatctggatctgggatatctgaatgtgggatgtgaacttgacggggcttgtggatcttgatgggtttggggtggtggtggtggtggggagtaacagctaaacttgacggggattttgtagatctggacttgcacgggttagggttgggggaaacctgcgggttcttgatctgatacgatcttgcattggtttggaggagtgcgagtttatctgatgtggaggccgattcgtgctc

SEQ ID NO: 14022 - DNA, 1236 bp, Oryza sativa
  ref <308>: DATABASE ACCESSION NUMBER: AK111370
  ref <309>: DATABASE ENTRY DATE: 2001-12-06
atcgagtatagtagaatcgcaccgccgtgtcgtcaggccgcgggcgcctcggcgtggccgtcggccgccgcggcgccggcgccggcgccgtagcggcggacgcgctcgtcgatccaggcgcgcatgtcggcgagcacgcggtcgcggttctcgtcggactccccctggatgagcgagtggtacatcccgtcgtagaggatgaggctcttgtcctcgctcgccgcgcgctcgtacagcatcctggacccctccggcgaggtcaccccgtcgtcggtgccgtgcaccaccaggaacggcgccgccacctccccgaagctctcccgcagcagcgccgtcacgcgtgcgagctcccgcatcgtccccacccgcggcgagccgcggtacagccgcgggttggacgcgatcaccctcagcttcgccgggtcgcggatcgatctccccaccatcctcttgtccggcatcaccgcccatgtgtcggctaggccgaagaggaggccgtacaggaagagccgcacgcgggacgggtacatgtcgtcggggaagacgagcagcggcgccgacaggatgatccccgcccacccggcgtcgggcggggagcggaggtaggcgagcagggtggtggcgccgcccatggactcgccgaagaggaacgccgggagggaggcgtaggcgccgctccgccgcacggagaggaagaaggagagcgccgccctcgcgacggcctccgtgtcgccgaggtagccgcggacgccgtcggagcggccgtgtccgagcaggtcggcgcagaagacggcgtacccccaccgcgcgtagctgatggcgatgttctggaacatccacgaggagtcggagccgtagccgtggctcatgaagacgacgcccttgacgtcgccgtcgctggcggcggagagcgggtggaacgagtgcgtgaagaggcggccgcagggggactggaagtaggcctcggcgtggcggagacccagcgaggcgtagtactcgtcgggctccggggagtcgccccagaagtacttcgtcgccgtcggtggcggcggtggcggcgccatcgccggagacggagacggcagcacgcgagacggcgagaagatattttttttctcctttatttttcgttgacgaaagccagcagaaatggaagatgggtgagcagtgagctcatttattgtacaaaggaaaggaaaaaaagggttgcttcctctatttaaatttgattatcat

SEQ ID NO: 14023 - DNA, 697 bp, Oryza sativa
  ref <308>: DATABASE ACCESSION NUMBER: AK111371
  ref <309>: DATABASE ENTRY DATE: 2001-12-06
acacatgacacattcccatctttccaatgtccacttccatccctctcatctagcaagccgctgccacttcaaataggtaggtagatagtgagagatcgagagcgagagagagagaggattgcattgagagctagcaagcaaaagggcaatggcgatggtggaggcggcgaggagggcgatggggtggtgcggggcggaggaggagagggagacggcgtcgcggaaggcgccgggggcgtgcccgcggtgcggcggcgcggtggtggccaccgacgtggagagctcccggcggatcctgtgcctcccgctctgcctccgcaacaagaagaagttctcctgctcccgctgccgccgcgccctcgtcgccatcgtctcctcctccgccgccgcctagctaattaaacccctgtagctaattagttagttaattaacccacactagctagctagctacatgatcgagttagtagcttctgctctgctgttgtttcattgattagctagttagcttggttgtgcgtgactaatctggttattactagctgattaattgcttactacttgttctgctcatctttgtttagtttgagtaagttgagccagctgttagatcgagtttatagctaagctaggtggcaaagcagggtatgttttggttgcgtccttcagagtctgaactggaatgtcgttttaattt

SEQ ID NO: 14024 - DNA, 815 bp, Oryza sativa
  ref <308>: DATABASE ACCESSION NUMBER: AK111372
  ref <309>: DATABASE ENTRY DATE: 2001-12-06
gaaccagccaggcaggtggcgtagaatgcgtgcgcgcagctgtggctgccgcggtgcgcgtcggacgtcggcacgtcatccatgcagatcttgcagaagaggacgggcagcggcacagttgatgaggagcaggagcacttgccgacgctagcgacaagggtcatggctgcaggatggagagcacttgccgacgctggacgagcactcggtggtggcggcgccggggacgagagcggaggatggagacgtctccgcatgagctgcagctgctgtgtcctcgctcgacgcgtggatggcgttaccgctgtcaagctctgccgccggcaccgacgaggaggaggaggatggcggcagcgcaacagccatcgccgccgtggtaggatctcttggcggacctgctagggctcgtgctcctccagctcccgtcccttccaaccacgtccgcctccgcgccgtctgctgctcctggcgcgcggtcaccaccgccagctacctcgccggcagctacaaaaaatttgtgatttcgggtgaaggaagatggcacaggggcaatctcgtcatttggaaaaaattctcacctcttttgaaccgaaaataataaaataatgcgaccggtgtcctatagccaattacacaatttttgtagtgtccatcagccgtgtcacgtttttgcgatgtttcatagccaattacatgttttttgagtgtcctgtagcaaattttgcccaatctaaaatatgtagtgataacctgaattaccgtaactaaaagttttactgggagtaatagttttacaaatggttaaatctacgagt

SEQ ID NO: 14025 - DNA, 1139 bp, Oryza sativa
  ref <308>: DATABASE ACCESSION NUMBER: AK111373
  ref <309>: DATABASE ENTRY DATE: 2001-12-06
gttgcgctccatgaacgccttcatctccttgacgagctcgccggagtcggcgagctccgggaagacgtagaaggagtggatcgccgccgggtactccaccacctgcaccgccttcccattccgccgcagcatcccggcgtaccgccgctgccagtcctgcagcgtgtcgtaccctccgaccaccaccatcgccggcgggaactcctccgccagctcggcgttctcgccggtgacgtgcgccgccgggtggtcgcggtcggcgccctccggcaggaacggcctccagcaccagtccgcgcgcgccatgctcaccaccggccccacgccgtccagcctcagctccgcctccgtccgctcctcgccgccgaagaacggctgcagcaggacgacgccggcgaggcggacgcggcggctcgaggaggtggtggcggcggcccatcggtgcgcgacgtggtgggcgatgttgccgccggcgctgtcgccgacgaggaagcagcgggtgaggtcgacggggacggccgctactacgtcggcggggaggccgacggtggcgaggtggcggagcacgtccacgccgtcgtcgtaggcggcggggtagcggtgctcgggggcgaggcggtagttgacggagacgacgacggcgcggagctcgcggcagagccggcggcacaaggcgtcgtactggctggaggcggcggtgaggagcgcgaagccgccgccgtggaagtagacgacgacggggagcggcggggattccacggcgctgctgctcgcgggggagaacacgcgcgcccacagcccgcgggacgcgtcgacggtgacatcgccggagcggacgccgtgggcgtccgggcgcgccgcggcggcgctctggcggtctgcgagggagaagaggaagcggttgacggtgccgtcgccgcgctgcacgatgtcgacggcggtgacgagggcgaagagctggagccgcaccgtccacggcaacgccggcggctcgggccgccggagctcgtcgccggccgtttcttgctccttctcgtgccccatttcgccggtttctgtgcgagtcatttcagtgtccagaggacactatatataggtgaaccgattaattttttttggaaataaagggggtgtttagt

SEQ ID NO: 14026 - DNA, 1151 bp, Oryza sativa
  ref <308>: DATABASE ACCESSION NUMBER: AK111374
  ref <309>: DATABASE ENTRY DATE: 2001-12-06
aaaaaagccccacacactcctcgttctccagccacctccagccctactatgcctcgcccaaagcgccgccggtcgcccttgccgccgccggcgccgcctggcttccccacggagcggaaacaccatctgccggagctgcagcctccagcggtggccgcggcgtctcctggcgtcgctggagttcccgccgatcttggcgacgcgctcctgcgctgcggcaagctcctggacaagctcctggagcacgaggacgggtgggtcttcgccgagccggtggacgcgcgcgccctccgcctcgtcgactactacctgcgcatctccgaccccatggacctcggcaccgtccgccgccgcctcgagcgccgccgctacgcggacccgtgggcgttcgccgccgacgtccggctcaccttcaacaacgccatgtcctacaacagcgcgggcgaccccgtgtacgagagcgccgccgagctctccgaaatcttcgaggccgggtggccctccgttctcgcggcgccaccgcgcccgcccgacgccgagcgcaagcggaggctcagtggtttgctcccgcggctgccggtgggtgcacaggtgacggtggccgagatcatgaagaagcgggacgggtgcctgcgggaggtgaacgggatgatggaggtggacctggacagggcggactccgcgacgctggacgagctcgaccggatggccgcggagcacggggccgccctcgccggcgtggttaaggtgaagcaggagccatgagtggtggataatcaaatttcagaaggtcctgcaagattctacctcagtgtcccttttttgtcgaggttcctgctctgtgaactgctgatatatctttgtttcagaatgctgttggcttcaacaggacttcgtgagaccatgagtccataacaccgtagttatcatatcctagatatgtcaactttgcattttgtcagatgtcataccgttgtgtttgtaagttggaacaagcgggggttgtatgttgggatcagggttttctgatactgaaacgtttggtgaactagaaggggaaaatatgcaaaaatatgcagtgcaaactcttatgtagtgtaaaactgaaaactattatatgatacataatatatgtctgaaatgtctatgtt

SEQ ID NO: 14027 - DNA, 877 bp, Oryza sativa
  ref <308>: DATABASE ACCESSION NUMBER: AK111375
  ref <309>: DATABASE ENTRY DATE: 2001-12-06
atcgtgagttcgccggctcgctcgtcgccgatcccatcctccccgcgagcgatccggggcgccgtcgctcgtcctgctgctgcttccgccgaatcctgtttggggggttcaatcggatccccatgtcccatgttagatccgcatccgccgctgccgatgcggcgtcggattggcagaaggtgagggcggagtggttcgccaggttcaaggaggagtacgagaggaaggtcgcggagcatcccgacgtcgactggtccgacgagctggccgtcgccgcccgccactatcgcgagagctgggaacgcatctatgcaagagcctacggccccttcgacaaatccacgtctatcccacctatgcgatatacggctgagcctgtgccattcgatgcatctgaacaatatacgctgcagatcttctgtgtaaaaatcaaagaattaaggcggggcttacagtggccgatccatgtgtttggtctcattgctgcacgggacacaattgatcacaatcgcaatatggtcttcgaccgcactagggatgactgccaaaccctcacccaagaggttcatccacttgattcccgttattcattaatcatcattaccatctaagttatgtatgtccttacttggtgctatctcttggtaaaaaaaaaatattattactgcccttgtttctccagatcaaatgacactagttaccccatgtaggtttattggttaccaccttaataggcttttagaagatacggagtagtgtattatacatggtgaccatgttccgtatttcctttatattgccattgccgtggtgcctaggtgaagaactgtcacgttcattacatatctgaataattagatctgaaattcagcttgat

SEQ ID NO: 14028 - DNA, 614 bp, Oryza sativa
  ref <308>: DATABASE ACCESSION NUMBER: AK111376
  ref <309>: DATABASE ENTRY DATE: 2001-12-06
agctcgaccaagctgcctacctagctcgcgtcggaattaatggccgcgaccgccggcgacgccgccgccgccgccgccgccgcctgccctgcctacccatggccgagcgacggagcccagcgcgggcgcaaggtgttcatgcagagcgactgcacggcgtgccacggcatgttctcctccaacgccggcctcatcagcgacgacgactcggcgtgggagcccaaggtggcggagatcgtcgtcgtggaggaggctcatcagccggtggcggcagcggcgacactccgcggcggcgcgtactacccggcgccggacctcaccttcattgcaaagggcctgcgaggcaataacctctactccggcggcggcgccagcgaggcggcgaggatgctggccgatgccgccgcggcgtgccaggagctgaagaagcgggcactggctagccccgtctggctctagtttcttcgatctgactagatctcaactctgaataatgcagcctgcataatcagcagttgagcgctgcttctgcaaataatgtccccatcgatcgatgatctcttgtagcagtagcttcctccgttggagctcaaataaaattaattactccgctc

SEQ ID NO: 14029 - DNA, 888 bp, Oryza sativa
  ref <308>: DATABASE ACCESSION NUMBER: AK111377
  ref <309>: DATABASE ENTRY DATE: 2001-12-06
agagctcgactactccgctccgcccggccacagcccaattcacgccacccgctccgcctctcgccgcctcgaccgcggccggcggccaccgctccggaggagggtgggcaagatgatcggcgtcgggaaggcgaagcagtacgccaacgtgctcgacaagcccctcagccgcggcaggcaggaggtcagtttgagtgcatttgcgttcctgttctcagagttggttcaatacaaccagacacaggttgataacattgctgagctggaaagaaggctggaagatgctggttatgctgttggtgcaagagttcttgaactactctgtcacagagagaaggggaataggcgagagactcgactgctaggtatattatcgttcattcacagcactgtatggaaagttttgtttgggaaggtggctgactcacttgagaaaggaacagaacatgaggatgaatacatgattagtgaaaaggagcttcttgttaaccggttcatttcggtgcccaaggacatgggagcattcaattgtggagcttttgttgcaggaatcgtaaggggtgtactggaaaatgctggctttcctgcggtagttactgcacactttgtgccaattgagggccaacaaaggccaaggacaacaatcttgataaaatttgctgaagaggttttacagcgagaagctagatttggctagattttatcatatgttcacacttctttctgatcaattggtgaagatactgttgaaatgtttttttgtggctgactccacatgatttgtgtaccagtagttgcgaatagaagcgaaggagaaatcgttttgtttggaactgtaaaacatttgcttggatttacctcgtatataatgaatattcaagaattctt

SEQ ID NO: 14030 - DNA, 2368 bp, Oryza sativa
  ref <308>: DATABASE ACCESSION NUMBER: AK111378
  ref <309>: DATABASE ENTRY DATE: 2001-12-06
atccacacaacgccatcgccgcccatcgctctccacagcgccactgcgcctccccgctcgctgcctctccgccaagtgccacgacctccgttccccgacgccgccccgatcccaagtgcccatcctccgtcgatccctcgtcgtcgctccacctccacctccctagcagtagcagatcccctccctttcccacaacccaggcattccctcctccggccgtcttcgtcctgccgccgccacatagctcttcctcccccatgccctccactccaaccccttctccccacctcaccgcctcctcatatccgcgccaatccccggcgccccctcaggggcacctcatcgcctccccatcgcgcgcgcccatccccggcacccccgcccccagccgctgctgtgccgcggcgcctccccatcgccgcctcaatccccggctacatgggagccagaggggaacccttcccataagcgctaacttaagggttgtggtattacgcctgatatgatttaacgtgccgatgaattactctcacgataactggtcagcaattctggcccatattggtaagcccgaagaactggatacttcggcacgtaatgccggggctctaacccgccgccgcgaaattcgtgatgctgcaactctgctacgtctggggctggcttacggccccggggggatgtcattacgtgaagtcactgcatgggctcagctccatgacgttgcaacattatctgacgtggctctcctgaagcggctgcggaatgccgccgactggtttggcatacttgccgcacaaacacttgctgtacgcgccgcagttacgggttgtacaagcggaaagagattgcgtcttgtcgatggaacagcaatcagtgcgcccgggggcggcagcgctgaatggcgactacatatgggatatgatcctcatacctgtcagttcactgattttgagctaaccgacagcagagacgctgaacggctggaccgatttgcgcaaacggcagacgagatacgcattgctgaccggggattcggttcgcgtcccgaatgtatccgctcacttgcttttggagaagctgattatatcgtccgggttcactggcgaggattgcgctggttaactgcagaaggaatgcgctttgacatgatgggttttctgcgcgggctggattgcggtaagaacggtgaaaccactgtaatgataggcaattcaggtaataaaaaagccggagctccctttccggcacgtctcattgccgtatcacttcctcccgaaaaagcattaatcagtaaaacccgactgctcagcgagaatcgtcgaaaaggacgagtagttcaggcggaaacgctggaagcagcgggccatgtgctattgctaacatcattaccggaagatgaatattcagcagagcaagtggctgattgttaccgtctgcgatggcaaattgaactggcttttaagcggctcaaaagtttgctgcacctggatgctttgcgtgcaaaggaacctgaactcgcgaaagcgtggatatttgctaatctactcgccgcatttttaattgacgacataatccagccatcgctggatttcccccccagaagtgccggatccgaaaagaagaactaactcgttgtggagaataacaaaaatggtcatctggagcttacaggtggccattcgtgggacagtatccctgacagcctacaaaacgcaattgaagaacgcgaggcatcgtcttaacgaggcaccgaggcgtcgcattcttcagatggttcaacccttaagttagcgcttatgggaacccttccccgcggccgccacggatggtactgcacgactcgctcggcggcgcggggttctccaccgtgcacgccggggtggcccgaccgggagagaacaaagcagcatgtcgggtagctcacgcggcggggcatgacaccagcatcgccatcaaccggtgagcggacctcgcacccgccgcgttctgcgtcgccgcagccgatgactagcttgctcgtctcccaaattcccaatcctgcgccgcaccccatcgaagccatcgtcgcgcccctcgacgacctctccacctgcttcctcgccgacagctaccttctggtttccacccaccgatgcgccgcctgaggtcttcttcaaccacgtcgactgttccatctagatccacattgtacagtactatatataagcacgattaagaacatttgcaacaagcacatatactatttttatagtttgacttcagattctggtagttcgattcctttattaaattcggaaggattgcagcaagcacatatattatttgtattgtttcacttcagactctgttagtttaaattctcaag

SEQ ID NO: 14031 - DNA, 990 bp, Oryza sativa
  ref <308>: DATABASE ACCESSION NUMBER: AK111379
  ref <309>: DATABASE ENTRY DATE: 2001-12-06
aatagcaaagatctgtggcgcgacaacccaatgcgaagcaaaccaagagggagaacaatactgttgcgctgaaggcatagcgcgcggctcttcactccccattccctgttcatttcatcagcatcatccaccggaccgcccatagcatcaaccacaaggtttgcaatcttctgcacgagctccggcgaagcgactccaccatgctccgccctatcctgcgcggcaattgccagagccctcccttcgagccgcttcagtgccggatcacgctcccgattgaccaaaactgccacgtacgcggcgtctccaccgacgggaaccgccctgagggtggtcagggaggggaatttggcctggaagtgcggatgcatcggcgcgccgcacacatcgtagaacccgtcggagagcctctcgtcgtagttgacgacgcagtggttccagtaccgcgcggagagggcctccatggggccccggtccccggcggcgccgccgaggctgatgcgctcggcggcccggatctggaccgagtcggcgtccacgagccccgcgtgatccgacgccgagatggccagcgcgagccgcacctggtactcctcctccagccgcgtcatcgtcgcgtccgcccccatccccctcggctccgccgccgccgccgccaccggagccgcaacaggagccatcaccggcgccgcctcggccgccgccgccgcggcgacgaccggaggaggcggcagcggcgggggctgcgccgacgaccgccgatctaccaatccattcccgcgctgctcgatcgcgcggcggccgctgtaaattcgttgcttcgcgtcggcttcgcctcggcgcgcggggggtagcagctgccaaggtgaagcgaggaagaagaagaagaaggcatcggcatcttcccctctctctccacttttttttttccttttttattatttttggattattattattattattattattattattattattattatt

SEQ ID NO: 14032 - DNA, 504 bp, Oryza sativa
  ref <308>: DATABASE ACCESSION NUMBER: AK111380
  ref <309>: DATABASE ENTRY DATE: 2001-12-06
attaacatacctgttcactctcccctagcatgcgcaggcggcggcggtggatctgacgagccaacgcagcgatgagcaccaggcgacggctcgtcggctcagtgacgcaagcagtatgcagagatggcgactcctcaatacacgagcaccacgcggcggcggcgatggcgattcctcgcgcggtgcggctacgcgagcagcagacagcggcggaggctgtgagctgtcatcggcgcgacgacgcaagatagagacggcgaatcctcaacacgagcacaaggcggcagtagctcctcagcgcgggtaagcgagcaccaggcggcggcagctcctggacgcgagctccgaacgggccccacacggccacacctcacctcgatggtgtttgttgagtcgatagtgacgtatgcagttgcacaaggcgagcatggttgaggggtgctgctccctattttcgcttataaaataaatgttgttctgacctcgttttggatgaaattgcat

SEQ ID NO: 14033 - DNA, 541 bp, Oryza sativa
  ref <308>: DATABASE ACCESSION NUMBER: AK111381
  ref <309>: DATABASE ENTRY DATE: 2001-12-06
gcgcggctgccagccgccactatcgctcactcgtgcgtcacctcgtctcctctccgcacgcgttggcggcgccggcggcgcctctcgccgcccgcattctgccggcctcagccaccgacggagcgtcgcctgccctcagcccccgccggccgcagccccgtgccacacgccgacctcgtcgaaagcagcagcgggagcagcaaaaggtccgcatggatccctgtaggttgtagtcaaggatctgcaagacttcttggctgtttgatttttttttttcgaggggacttggctgtttgattttgaccttctgtgtatccaaagccctgttttgatccctgtaggcgggagcgtgctgtttggccctaaagcctctgtgtccatggtgtgtatccaaattccaaaatctcttttatggttgttccaattatcctagacttcttggctgtttgattttgagcatcgatgatatgctttgtcaagaacaaaacatggatctcctaaaaattatttggtggtttataaattgcgagtaatatttccc

SEQ ID NO: 14034 - DNA, 904 bp, Oryza sativa
  ref <308>: DATABASE ACCESSION NUMBER: AK111382
  ref <309>: DATABASE ENTRY DATE: 2001-12-06
gcacgccacccgcgtcctatccattccacggttcgtttccaccgcgcgcgccacggcgagctcgccaacccagccagccatggcggcggccgtgtccgcgtgcagctcgcggtgcctccgcctgatcctggggcgccctcctcgagcccgcctcgcgtcggttgtggaggtcgtcgagaagaggaggaggggcggactggtggccgtggcggcgacggaggggtcggcgaagtcgtcgggggaggcggacgagcaggtcccctcgtgggcgcgcccgggctccgacgagccgccgccgtgggcacgcgagggcggcggcggcgggggccagcaggagcccggcgccgtcgagctccccttcttcgcctaccttctcgcctccgccatcaccgccatcgccgccatcgggtccatcttcgagtacgcgaaccagcggccggtgttcggcgtggtgagccccgacagcgccctgtacgcgccgctcctagggttcttcgtcttcaccgggatacccacctccggattcttgtggttcaaggccgtgcagacggcgaacaaggaggcggaggagcaggatcgccgggacggcttctcgtgactgattcagcatatgaacatacgcatttgcagagtaattaaagtttgtgaattactgcttgtgattcgtggtgttaattaagttggtgacgctgaagaggggagacggatctgcgtattgacgcaatgaggagatgaattagcaaggaagaaatggcgatgttcaattgtacatcaccgaagggagctagctgttgaagtgaaagtgtaaactctgccttgtagttgagaaatattgagtgtttcgagcgagtataattacagcgaattatctgaacactgaattatcgccaaaaaaaaaaaaaag

SEQ ID NO: 14035 - DNA, 544 bp, Oryza sativa
  ref <308>: DATABASE ACCESSION NUMBER: AK111383
  ref <309>: DATABASE ENTRY DATE: 2001-12-06
actcacgcttcctccggcggcggcaaggcgacggcatcggcggccaaggcgcgggcggcggcggcggcggcgagcaaggtgcaggcgacgtcatcggcaaccaaggcgcgggcggcggcggcggcggaagcgggaggcggaggagtgggagaggcggaagagggggaggaggaggaggaggcggcggagacgagaggaccccgtggatgtgctcggggaggaggtgatggggcgggtgatggagctcctggacgcacgcagcacttggcgctgggtcgccgccgacgaccgcctctgggcacccaaggtccccccccctctctctctcattacagcctgcacggctcctgttcgacgaattgcctgcgaggggcactcgattccccctcacgagtggttaatcgagcagtggctactctcgtgtcttctgttaggatcgagcataccgtattcgggagtggtgttgattaggagcttttatagaattctcatttattgattgtccaatcatggttgccaaaagagaaagagcgaacattcggct

SEQ ID NO: 14036 - DNA, 835 bp, Oryza sativa
  ref <308>: DATABASE ACCESSION NUMBER: AK111384
  ref <309>: DATABASE ENTRY DATE: 2001-12-06
ttttgctcttttttccctctttatttttccctggtggatgccgcgaacccgctatcgcgatcatgcttggattcttgttagtgtagcctttgatctaccagtgccattgtgatgaggatcatgccttgaaccattgattgacaatcagagatgttgggcgatgttgccgaacctgcatgcaatcaggcgagttcagacttcagattcttccatgtcgcattatgccttgatattccttttcagtttgattctgcattttctgctccaatacttcagaagagaggttatatagctatgaccactcagatcagatggcaatggcgtcaaaaaaaaaaaaaatctctccaaatttaccagggcagaatcaacaaaatgtgagtatactaagctgcatcgatccctgcacactgcatatcagaagtcagaaaccacactactgatctgaagcaaacaattcgagaggttcttgattacctcgattgattttagctgatatcaggatgagaaaagttcagagaaagctcgccgcagcctgcggcctctcagaactgcatctccaatccccgacaacggccaagcggttggagcctccgtctccggcatgcgatccgcgcgaaatctcaccctccgtcgcggcctgacgaaccctgctccgatcccctcccaggttcgccggagctccgccgcctcgtcgggggatcggagagcgagaaaccgagaaggagcctaattacaaacatggaaatgagagggatttttatgtaaatgtaactcgatcttagattcccatccaacggttaacacttaacacaagtccaatgatattatttttttc

SEQ ID NO: 14037 - DNA, 1202 bp, Oryza sativa
  ref <308>: DATABASE ACCESSION NUMBER: AK111385
  ref <309>: DATABASE ENTRY DATE: 2001-12-06
tcccacacttctcctctctgaccacagcacacacgcagcaccgggacgggcgatccggaaggttctggaaccttctagaggctcgtaggagcctccggcggaacccctctcgcctcgcctcgcctccgatgggctcgaagccgccgccgccgccgcagcccagcgtctccttcaagctcgtcctcctcggcgacgggagagtaggcaaaacatctcttgtgctgcggtatgtgaatgatgtcttctcagacaaacaggaagcaactgttcaagcttcatatttgacaaagcgccttgttgttgaaggtgtgcctattacgctctctatctgggatacagctggacaagagaagttccatgcactaggccctatatactatcgtgatgcagacgctgctcttttagtatatgacatcacagacaatgatacttttcttcgtgtcacaaagtgggtgaaagagcttaagcaaatggcaaataaagatattgttatggccattgcagcaaataaaagtgacctggttagatcaaaacacatagacactaatgaagcagcaagctatgcagaaagtattggggcaactctctttgttacttctgccaaagctggtactgggattgatgatatcttcagtgacatagccaagagattattagagagaagaaaaaacagctccgatggcttgtcactggctcatccaaagaaaggcattttaatcgtcgacgatgaacctgagaaagaacctccaccaaagtgctgctcatagcgagattccaatgcaaatcacgtgggcataatgtcatagaaacctgcaattgatatgtgaaggatcaaatccttgcattaactttgctcatgctcttttggagctcaggagcaatgcaagtgtatactggttgattatttttagcttgtgtaaatactaaactcagttcatgaaattgttgtcaaatatagttgttcgatgatgacgattcgatatgccgaagaagttcatggccctttgtatatctgtaactcacaggttgcttatttactagctgttgttttgagggggttattttgatcatgtgcgtcgaaataattgtgtcgtgttgactgctgagtgtacatgtatcgtggttattccatctgaacctgcaatgtaaagcttccgtcccaattcccaaaaaaacaaaaaaaaaaaaaaaaaaaaaaaaac

SEQ ID NO: 14038 - DNA, 756 bp, Oryza sativa
  ref <308>: DATABASE ACCESSION NUMBER: AK111386
  ref <309>: DATABASE ENTRY DATE: 2001-12-06
acgccactggcggcctggcgccggcgccatccctgctgccgcccgccgccgtccctaccgccgtccgccgcctccgccgccgccgtcgccgccaccgccgcaatccctaccgccgttccccttctccttttgcatcggcctcgggggaactggtggcgccgccgcaccgccgttcgtcttcactcacagcagcgccgccggtccgctgctctgctctctccggtctccgccacccaccgcctccgtcttcccttggccgaaggccaccgaagctgccgtcgacgccgacttcatcctgctccgggccgccaccgcgccaagccgagcgccgcccacgaggccgcctccctccctagcacgggtcgcaggccccgaagccgcctcctcactccgtccctgtccggccgggtcgccacctcgccgtcgccgtcattgtgccgtggctgcctccgccaaccgtcgccccgcatcgactccttccggcgcccccttgctcccgcctcctccgcatcaccgccctccaccgtcgccgcgccgaccgccgccctgatccgaccgccgtcgccgtgcccatcgccgcctagcgtggctccctcccggagtcggtaggagagaaggaggaaggggaatcgagagtgagaggagggggagaaaacgagaagagaaagaaaagaaaagaagggaagggagagaatgacatatggtacccactgttaaattggatattgaaatggagagactgttggagtgaaactc

SEQ ID NO: 14039 - DNA, 1219 bp, Oryza sativa
  ref <308>: DATABASE ACCESSION NUMBER: AK111387
  ref <309>: DATABASE ENTRY DATE: 2001-12-06
aaagagacggaaatcggagtaatggcagccatggcgtcgtccgctcccacggccgcgaaacccgtcgctctactgccagccccaatctgccgctgcggcggcggaggtctcagatcgacgctcctggccctgatgccgccggcggcggcggcggcttcccggttccgagtctccgcctccgcctcggacgtgcccgatttcctctcctccgactggctcgaaacacggaagaaaaagcctttcggccccaggttgaattttaatgcagaagaagcagtagaataccaacttgaggcattaaaatacaatgatcagccacgccaagattatgggatagaagtcatgtacagggtaataggctaatagctgcttgcaaattgctcatttttgcttagatgtggtaaaggtttgacacaacttcataagtctgaatctatatggccttatcagtttgcaggctttgatccttttgagagatcaacttattttgggcgacaatttgatctaggacaggtagaccagaagtattttccttctgacatatatggttgttcatgcttcatagctgtcttgctgattgccactagtgctactccagtttgaacgtttccggcggatatttcaccattcaacttatagggttttgcttgcccacaaagaaagaactatattgagcagtttatgggttgaagaggttggtcttaacccccttaatatttctgtctatcgtacaatgagacaaattatcttgatcttgaatctgatcgtgctaacagaacctatataagcaaagagtgtgggttcgaggatcacgtccggaggaagaagctatatttcagtttacaatggttcagagggttggtggctcatgggatgggtactggttaactgagagcttaatcaatgatgatggagatgcactctcaggtggtcttgcttactgaccgatatgtgtcttacactcaagcttctagcgtattgatgtactgatgaatctagaaaattatatagccgtgcaattatgcacggttggtccagaaataggttttctttttttttaaaaaaaaaagattgtccagttatatgtcacggaaagagtagcaatagtacatgtgctgtggtagaattgactgcgacactcccattctgggagcattcaatatgtcaatggtcaaacacgccgctattgtacataagtttggcggctgtatggttgctt

SEQ ID NO: 14040 - DNA, 1111 bp, Oryza sativa
  ref <308>: DATABASE ACCESSION NUMBER: AK111388
  ref <309>: DATABASE ENTRY DATE: 2001-12-06
agcgcatccctcaactcagcgtagaacccacgtgagttccaaatgtcagcctcttcttcccctccctttgttggatagcctccatagaccaagtccacagacccctcaagacttggcctctcactcctgctgcatagagaagcactcaagcaccggagagagagagagccgacggccaggggaccacgacccggtcagcggcggaggagatccggcgtccggcggcgtggtgagcttaagcgatggtggcgccacgagcccgccggatgcggtggcgagacagattcccccgggtggctatggagaccggtggtggacctctccctggagcaacgcgagtggaggtggacgctgaggtcggcgcagaggggatagaccggcgggagtcggcggcggtcggcgtggagttgtcgggacgcggaggatggcggggcggcaactcggcgggaccagcgagcgtggtggccaggctgtcaccgggcaccggccgacggtccaaggacgttgaggtcaaccagcccggggacgtgcgccagcggctgcggtggatttcttcggggggcggccacccgattttttttctcgtcgtcatcacccgattgcgcctcccgctggttgtcggcaacacctggggcgaggccaccccgacatcgcggctggagtccagccatcgccgagttcccattgatcacaggaccacctccacccaccgcggcgtcaccttgggcagcctccgccgcgccgctcctctcctcgttggcgtcgacccgcctccgccggtcgtctccgccaccagcgccggggatcgacgaggagccatggcggtgggatctggcgcccgcgccgtcggcgacggcggtggcggcggtgtggggggggggctcccgctcgtcgcccgtcaccgcgtcgtcactgccgctgcctcccccaccggcctcctctccacacgccggctaggctgccaatgaaaagaagaggaaagaggaagagaggtggagaagggaggggaaggagaggccaacgtgtggaaactatgtgggtccaacgctgagtccgttgttatatcggataaaatcaaaaaccaacgaggacctgtttacattggttttat

SEQ ID NO: 14041 - DNA, 634 bp, Oryza sativa
  ref <308>: DATABASE ACCESSION NUMBER: AK111389
  ref <309>: DATABASE ENTRY DATE: 2001-12-06
aggaggcgcaacgtcggcggcggcagcgcttttcacggcgacttgggcggcggcggcggcggcggcgaataggaaggggcggcggcgatggcgatggcgacggcggcgctagccagggcgatgcgcggcggatccggcgccggtgcgggactggcggccggcgaactcctctcgaaggctcccgctacccggacttcctccctccccgctatggtcgcgtctcgtggttgctcaaacggaggtgggaggtgcgccaaggtggcagatttggcggagatgaacggcaggataaatatggtggagtttgagctgaagcgggaggtgcaactgatgaagttcgcagttgaaaaacaaagagcaatggcaagggttgagatgatggaggctgaggcaaacaggatgcagtttcgcttcagactcatgtgtggtcttgtatggggtggatcgctggtctacatagcaagtcataggtattagaggtggctactgtcttgtttgctgcatctgtgaggtcaaaacatagcactgatggaactatgatctttgatgtagccaacaggcaatttatattagctagggcctagaaaatgccttcagtaatggatagcgctagacccgtgaggaactactgtgc

SEQ ID NO: 14042 - DNA, 927 bp, Oryza sativa
  ref <308>: DATABASE ACCESSION NUMBER: AK111390
  ref <309>: DATABASE ENTRY DATE: 2001-12-06
attaggatacaaccaaccaaccatcgatcctattttcctggatctgatatcatccacttccacgttgtttttcccggatcgagcaagagggagagagcacgggcgaaggttggtggcggcggcatcctccagtggcgggttatgggtgaaatcggtcggagatagcggcgcatctacggtcaatggcgatggcgaacaggtggcacacgacggcatagggcagcggcacatgagaaaggaggaggcagcgacgcatggtggtggttgtgtcgatcttctccattgtgcgatgcatgaggaaggaggaggcagcggtccgtgcaacatgccaagaaattgccgtgatggacatcgatctaagaaccaggcccgtcgctgacccaagctccactcccatgaaaagatttgcaggtttcccgatcagagcacacacgtttcccaagttctcactgaggtgagtcagatccaacatcaaccttctccacggagccgtgtggactgtggaggacgaggcagtgctgcctggcagatggagtggagggaggaaagccagcgctcagctcctttctcagaaccagtgctgggacaaggcctccaaacaaaatgtttgattgcaggctgggacaaggcctccaaacaaaacttctacggttgttggcacatgcgccatcgtcggctacgatttgtcctccgccgatccaattggagcagcaacatctagttttttcatttgtacaatcaatatgtatgtgtacccccgagtctttgtaaacatgaaatgtagctgtaatttatttttggcttggtaaatatgttactgtagtagccagggagtaatttatttttatgagagaagattgaagtaaatttgttgttagagcgatgtgttagtacgtttttatctgggagtaatttatttaccaagag

SEQ ID NO: 14043 - DNA, 563 bp, Oryza sativa
  ref <308>: DATABASE ACCESSION NUMBER: AK111391
  ref <309>: DATABASE ENTRY DATE: 2001-12-06
catgagtcatgtctcaacaattatcagatcatggaataaaagaataggaggggtgccgattccccccacccgctctgccccatgctccgccctccccactctgcagagaagggcatgggcgacgatggcatgctctgcgcagagtgctcaggggagagggcgcgagcgacgacggcatgctctgcgcagagtgctcagggaaggacgtagcatcggcaatggtgcagagttggggatttttgacgtgtcttcaggctgttctcgatgagctgttaattaaatgaaatgtcaagtgattttcttgaacttgatcagacaaagaaactatattaggcgaatattcatgacctgttagtctgaagcggaagtagaatcagatttaacaaatgcagatgtagaatcagattttagcaaatgcagatgtagaactatccaagcagattgatcgggcacaatcttactgtgccattgccagtcatctattcaagcacagagcaaatttaactcaagattgtgagatgatgcatgtacaactgaataaagatacaaccttttctctgctc

SEQ ID NO: 14044 - DNA, 769 bp, Oryza sativa
  ref <308>: DATABASE ACCESSION NUMBER: AK111392
  ref <309>: DATABASE ENTRY DATE: 2001-12-06
acacgcatcacagaggagcgttgcatcacgccgctcgtcctctcctctcctctctcctcaccagataacagcagcggcgccgatgcacatccgcggaagggggcgtccccggcgcgcatcggcgacgagccagcgacggcggtgcgtctccgcagcggcgtccgcgcgcatcggccgcgacagcgggcgcacataggcggtgagccggcgatggcccgacgacagcagccaacagccggcggcacttcaccttcctggcttcctcagccacgggcccacggcgagccagcggccgacgacagcagccagaaaatcttggttcccaaaatccaattgagtctcctctctaatcttggatctgcattcttattttgcatttgatagtaattagtcaattagaaattggtttgatttcctggatgaagaggtgctaaacattaatatcatttctgtccacccaaccccagaaacaacagaaactgattgagtacatcacaacactagaaacagccggaactgaggatagtaacaatgggcaaaataatgttgtgcttgctccaaatgtgattgttgttgactgggctgctcacaccaatcgaacaattggatgtaaacattaggtagaagggattatttgtttgtacagtccttagagaccaacttgacacatttatttgtgacatgagatttgatttggatttctcaagctgctcttaccttggtaaccttgttgtaaagatggtaaaaagtgatagtcacaagtttttcc

SEQ ID NO: 14045 - DNA, 1402 bp, Oryza sativa
  ref <308>: DATABASE ACCESSION NUMBER: AK111393
  ref <309>: DATABASE ENTRY DATE: 2001-12-06
agttttggactactccccaccggccagtggccgccgcgccgtcgtccgccgcaccactccatctccgatctccctgagtcgctgggagggctccagcatggtccggcgaggagccacgacccgcggcacatcgacatatcggcggcgggaatggtgtgctttgtcgccgtcgtgggggggcacggcctggaagcggatctccattgccgcagtcgtctccaaggtctcgggcgacaagcgcttcgatctatttgtgaccgagaaattggagctcgaacagccatggcggaacccgtgggcgaacgagcaatgccccccaaccccggcgtcacagcaaggtcctgacgatgttggaaaaccataaatgtagtgcctcagttttatcattgaattggactaatcactaatgggatttctaggtagtacttcattttgcaaaagatgaaaagattaaacttggtcgaagtcacttggcacaaatgatgctaacaaggggcgcgaggtacattggagggagccagcactgactggaagcaggtctccagtggcacaggcctctacaaggtctccgatggcttgttgagcaatccgaccccaatatcctggagctttctggctgttagcttcccttccatctcagtttaccatgggaagaccttaccttcctagattgtgcactactcatgttgacttcagtattatctcatacatgatcctcttctctctgttgaatacttgaatttggtgatgttcaaattacttcaatattaattaactctgctgatgcctgttagtactgaataacttatcattttggaaaccatggctgtaatcttctccaaagataaaatttacagtcaagaatttctgcttattcaattaagaagaatagaaagaagcactcatagaggttctcagttacaatttggatgaaatggatgccacaactaacagtaataaaattgctagaactagttatgattcattttcttagatacattttatcaggacatagttataggtatccatggattagtcttctatctccttggattgcccccctcccagtgtataatgccatttcttttttggacagattgtgccagttgaatctatccatcaaggccaaatcatgagcaaccaattttccatgtatgaatgaagaatttacactttttggctaaatggattgtagtctcatcctccatgatccacaagtgagcaagatgaattacatggccatcccatgaaggttaacctcatttttatcagtgaattgaattttgaggatagtacttcagtactttgttaccgctaaagagggatgcgtataatgtagtattgtattgcttgtttgatactttcgttactaatgctatcgagcctcactaatcttgcagtc

SEQ ID NO: 14046 - DNA, 725 bp, Oryza sativa
  ref <308>: DATABASE ACCESSION NUMBER: AK111394
  ref <309>: DATABASE ENTRY DATE: 2001-12-06
atcatctgtagcatatgcctacggtataatacgtcgccgtttctgcttgctcgtgccaccgcagcgcctcccgccgccgccgccgaccgatgcctcgccggtcgccgctgcctctactctactcctcctcctcctcccctttcaccgcttcattggcggtgctcgcggcgtgaccccgagctcggagctgacgtctcagcgctgctgctccgcggacggctcggcgcgcgccaactgttcgacgaattgccccaccgagtccggtggcgccgcggctaccttcgcgccgccttcgctgcctccgtctccaacctcaacgcgcgagacggccacaggggagtgaaagcagaggctatgaaatcatcggcgcaatgaagtaatcactcctgtcaatggtgattgattcagcaatgctgctatcttgcgagaagtcaatccgtttctcgatgaaatattgctttggtctgaaagtgaaagcagaggtgcagtgaagtaaccactcctgtcaatggtgattcagcgattcttgcaaaatagtcagtttaaatgttactttgctctgaaaatttagacaaacattcttcctgttacagattgaaaacaggttatcttcatgtttcaatccagctgacacattttttacttgcacaacttcctggttcatagaagtgtatctggcaacgttcaaaacttcaatttatcgaagtactggagtaccttccgtt

SEQ ID NO: 14047 - DNA, 1430 bp, Oryza sativa
  ref <308>: DATABASE ACCESSION NUMBER: AK111395
  ref <309>: DATABASE ENTRY DATE: 2001-12-06
acacctgcagcgctgccccttcctctcagtggagaggagagcgaaacgagacgagacgagaattcctctctcctcctgtgtgcatccgtccatccacgcgttcccgagaatcgcatcgcgatcgggggcatacatttgatgcttacacgagaggaattctaagctctcgctcgctcgctcgcaacctctcgtgcgatcgtcgtcgcgtgccagtgtcacctcgccttcaagagattctcccctccaagacgcgcccggccagacgccaggagtcgtggtcgccgagactacggctttaaagccagcgaggcgaggaggagttcccccaaacacttcagtagctgctactgtagccagcagcggcggccatggaggacacggcggcggcggtcgagacgccggtgacggtgtccacattcggtgtatccaggcacccggacacggccaggctcgtgctgagcagccccaagccgccaggcgtgcgcgaggagttcgtcggcgtcgtccgcaaggcgttccggccgcgggcgagcggcggcggaggagcaggccgtacgccgccggcgcggtgggggtgggccctcacggcgctgcagaccgtgttccccgtgctgcagtgggggaggacctacaacttcaagttgttcaggagtgacgtcatggcaggcctcactcttgccagccttggaattcctcagagcattggatacgccaatttggccaagctggaccctcagtatggtctttacacgagcgtggtaccgccgctgatctacgccgtcatggggacgtcgcgggagatcgccatcggccccgtcgccgtcgtctcgctgctgctgtcgtccatggtctccaagatcgtcgacccggccgtcgatccggtcacctaccgcgccctcgtcttcaccgtcaccttcctcgccggcgtcttccaggtctccttcggcttgttcaggttgggtttcctggtggatttcctgtcgcacgcggcgatcgttgggttcatggcaggagcggcgatcgtgatcgggctgcagcagctgaagggattgcttgggctgagccatttcaccaacagcaccgacgtcgtctccgtcatcaaggctgtctgctctgcactccgagacccggtgagcctccagactccagtagaacagaatcatttactacagttaagccgaacaagaacaaagacaaatagatgcacagtgatgaaataatcgtccatggagaatgaacgatcgactaaagtgtagggacatacaacgacggcatggacatgcacacatcgctctcgacattatttgtctgcttatttttgtcatgactcggttgttagtttcttctcatctgcatttcaaaggctcctagaaaattaacctgtttactgaatgctacctgaaaagaaatggcgtccctttcgttgttac

SEQ ID NO: 14048 - DNA, 1738 bp, Oryza sativa
  ref <308>: DATABASE ACCESSION NUMBER: AK111396
  ref <309>: DATABASE ENTRY DATE: 2001-12-06
agggaaggaaggagacgctctcaccggcgagggtttagcgccgcttttctcagggtttctcggcgggcggcggcgcgccagcttccgtcgaccacgaggctaaaaccctaatcccggcgatgaggcggctgcccaaatcgctcctgctcgcctccctctccaagcccttcctccgccgcaaccgggaacccctcccgctcctccggccgccgccgcgtcccctcccgcgcgtgctccccttcgccgcacgaaccctagccgcgccggccgctcctcctcccgaggcggcgccggctgctcaatccgatgggttcgcgctcctggaggccgcccagctccgggaggccgcggacgaccaccaggaggccctcgccctcgccatcaaggcgctcgagccgctgcaggcgtcgcacggcggctggtcgctccccgtcgcgcgcaccctccgcctcgcggcgtctgacctcatgcgcgccatggagctgaaggccgtgttcctggagaaagggagtttggagttgggaaatgcttacaaggatgtcgccgaggcctacagaggcgtactggcctgtgacaaagcgttgccactgtgccttgaggcgttggagattgcccgtaatcatttcggaggagattcccaagaggtggctaaggtccggcagcttctcgcgaccatctatgctggatcaggtcgaaatgaggaggcactggagcagtatgaaatcgttcggatggtgtatgagaggctggggttggatgtggagctttctctggctgaaactgatgtggccatggtgctggttttgttggggagatctgaggaggcaatggatgttcttaaaagggtgatcaatcgggctggcaaagagagtgaggagcgtgcactagcattcgttgcaatggcaaatattttgtgcatccaggacagaaaggccgactcaaagcggtgcttagagattgctcgtgagattcttgacacgaagatttctgtgagtcccttacaggttgcgcaggtgtatgcagagatgtcgatgttgtatgagacaatgatagaatttgaggtggcgctgtgtttgatgaagaaaacacttgtgtttctcgacggcgtatctgagatgcagcacattcaggggagcatatcagctagaatggggtggcttcttctgaagaccgaaagagtagatgaggctgttccatatctgcagagcgcaattgaaaaattgaagaactgctttggaccattgcactttggattagggtttgcttataagcatttgggagatgcttatcttgccatgaaccaatcagagtcagctataaagtactttactattgcgaaggacattattaatgctacatatgggccaaaacatgaggatactatcgacaccatccagtccattgcaaatgcatatggggtgatgggaagctacaagcaggcaatggattaccaagaacaagttatagatgcttatgaaagctgtggccctggtgctttcgaggaactcagggaagctcaaaggcttcggtatcagctaaaaataaaagcccgaggtttacctcatgcatgcttccctgccaactcattgccaactaaattccaagaccgagaatagttcttctctcatcaacgtccaccacctagatgattcaatggtaaattatgtttttataattttgatgcattgactccataaaaatcattcttgttgagttagtggacgattattcctgcagt
